United States Patent Application Publication US 2007/0083945 A1 - sequence listing, part 12

SEQ ID NO: 75761 - DNA, 467 bp, Glycine max
  unsure (1)..(467): unsure at all n locations
atgcaagctgagcaanatgattgcaaacctacattctatttgatgattgtttgttagttcatgacttccattcaaattttaactgtaaaaaagacccaattctgcttntggaaatcatgatatatgattaaaattaaactaggaattccaaaaataaagcgctgaggcaattagttttaaaaataaatggaagaatttatttagagttctctgatagagtttgaaatgcttttatcgtagatttgaaggcatattggttctatagccaaacagaagagtcatttgtgatttccgaagggcatttttggcattatgcttcctgctactgattagatggtttttgtttcttagaatgatcgtgtgtgatgatcctttgtaatatcccctttggtaattattatttannagaaaattattggtaggaatgtcacaattgattttgttttgtggacaggttgtctcatata

SEQ ID NO: 75762 - DNA, 356 bp, Glycine max
  unsure (1)..(356): unsure at all n locations
tgcaagcttggaaatgattttatatcaaaagttagcgtttaagcgactacaaactccccaaattacatttggcttgtcctcagaaagaaagagagtcactggtctcagtgacaagataggcccatcaaaaaaaagggggttgttcatcaaggcttcaccctatgactgatccatggatgctcaccaatactttcacaagctgcagttttcaagatagagcacagtattgagtcacagctaaataactagaagctgacaanatcaggaggttctcaccaaacctacagcattgttactcaactcagtgttaggatattcatctaacaccacacagttcatcttgcattattctatct

SEQ ID NO: 75763 - DNA, 468 bp, Glycine max
  unsure (1)..(468): unsure at all n locations
tcatcctatgagatgttgtcgatttttttcgatcagaattgccattccttggattatatgtgtgaaccaagctcatgctcttacaaacaggttcantaagtcaagttgaaatatggaagtaaccgtcttgcaaacatggggcgaaagatgaattgagtcacatcactgcttcgtctactgccaaacatatttaggaatattgatgtccttgttacttccaagttcaccttgacaaagatgtcatggaccatgttgaaaatctaaattgattcaaccccatatcttgcgtaaaaattcgcaatacttcaactgtgcatcattcgcatgcatccatgcttttcattggttgcattgctcgttgcattctttccttgaaanataaaataaaatgaacttaatcattgttataaaaaagaaagggacacgctttacgacgcccttaccgaactcgtgctagagctagaataa

SEQ ID NO: 75764 - DNA, 339 bp, Glycine max
  unsure (1)..(339): unsure at all n locations
accattcccttgtaaccaacttcaactggagctcacgtacctccacgtagcccataatcttcgttctcttaacaccgggtccccaatcaatcttccaaagcttcccaacatcaaagtaataccaacattcaaacagcacaaactatcacagccaagaaaacagagcaaaggcagaaaactctgccaaaacaccaaccaaaatcacaacttttctcacttaaagaccccagtaacaattccttcgttccaattcgttaacccgtggatcgactcaaatttttactggaagtctctagtacataagcctacnatttgaccgntgggatctactagcaaaca

SEQ ID NO: 75765 - DNA, 304 bp, Glycine max
ctctattttttctctgagatctttaggccaatggctgttgtatgccctcatttataatcaccctgctttttgggatcttttcgaagtgctgaacttcaattctacgtctggtttttaaatgtctgaactgcgaacataatctcccttcgactacgatgtacgactactatggaagagcttattgaatccgggtgtacgactacgatggctatactctttgttccgctttcggatacaacgcatgtgggcagcctaaggcaacaagtgggttaacaagtcgggaatgggtgcatgcctttcaggt

SEQ ID NO: 75766 - DNA, 302 bp, Glycine max
gctattaaatgggttattctggcactctagacaactctattggttagtcaaaccgattcgaatcttataaatcaaaattcgacagagggtatgaccaaaaatgacctgaattattaccattgggaatgaattacccaacctggaagcttggaatttttggcagggggccttggtgaaaatgggttccgaatgtggaaagaagttattgacaaactatgcatggcaaaataatgtcctaaacattgctggagaagctatgaaaagggtgaatcttccacatcaatatgggatggctttgattc

SEQ ID NO: 75767 - DNA, 227 bp, Glycine max
  unsure (1)..(227): unsure at all n locations
tcttaaacanaaagaagagaacgtccctttatcaatgtaatgtagnncatgtcatctctagacctatattattctcataatgtccttattcttgatcacttagnatttttaattagggaaaatgaggcatcacttgttgtcctacctgatttgttgatggagcttgatagtatggatgatgtatgccttactattactataatccctctgagattaacatgggtgga

SEQ ID NO: 75768 - DNA, 364 bp, Glycine max
  unsure (1)..(364): unsure at all n locations
ctaacattcatatcgagcgttcggaatatatcggtattgaacagacatccgagtaaaagttattgttgtttgagttgctcagagcttcacattccatatcgagcgtntcgatatattacgggactgaatccgaccatcgagtaaaaagtgttggcgttgaaatatctccagcttcggttcccattcgagcgtctgatatatacgggactcaacagacatcgagtaaaagtattgtcgttgaattgctagagttcataatcatttcagcgtctcattattaccgactaatcgacaccgagaaaaagttttgcgttgaattgctaaactccgatttaattcagcgctcgaatattcggactcatca

SEQ ID NO: 75769 - DNA, 433 bp, Glycine max
  unsure (1)..(433): unsure at all n locations
ctgcgctgctgctgaaataacttcgagattcctgttttcatatttaggctacggctacactgcacctaagaactcgtattagtcgagatgtttgagtttgatgaatacgcttctttgaantgggatgaagaanaaatggagaagaacattcttatacccgctcaactacctcaagaagaagctgaggaagaagaccaggtgaaccaccttcaccttcaccacaacaacaagatcaagaactatcattaccagagtctactccaagatgagtaagatctttggtggacatatatgaaacctgtaacttggccatacttgaacctgannagcttgaagaagcgtcaaagctggaagtatgggtaaaggcaatggaaaaagagatacagattatcgaagaaaacaacacatgggagttagtaaatgtccccatgga

SEQ ID NO: 75770 - DNA, 378 bp, Glycine max
  unsure (1)..(378): unsure at all n locations
ctgtccactgactatatttctaatggtgatactactcatgatttctcatctacatacatgcttattcaaaactcatgatttcaacacatgattcaccccttcacgtanatcaatcacaacaaccaatttcacaaagaaaataattatgtttgcactgcatactcagataatcaagtcaaactgttcagtatgcttcaagacatgcatactattatctacanatcaaagtaaacaaatatcaccacaaaaattgtactaaagacataagtataacaattataatttttatcccaaaaagagaacaagaaattaaaactcctgtgactggtcatactgctgggtatcctgatcctaagtgccctccctcatctgtaaatg

SEQ ID NO: 75771 - DNA, 288 bp, Glycine max
aatgcattaagtttaagtaactagtatcagcattaacacagcagtattaccaagaggccatatgttgcacaaatctatcaagcaaaatgaaataaactacagcgttttaaatgattttgaatatccaaatcgccaattaactcaataagaacttcaatgaaaactgtagttgcgtagaaaaataccaagcatgggtctaattaacaaaaaatagactagcgattagtttttttttctaatttaacagtactcacatccaaacttttcaagcgggaagaaaacaaattc

SEQ ID NO: 75772 - DNA, 322 bp, Glycine max
gcttgaaatctttctcaagctactgaggacaaatttatattcttttaatcaaattcttaaattggccaatatataatatttgggcaaaattatatgtaccaagcacttcattattgaaccataaactatagtgactgctacttctgtcaacaagtcggtctctttagaatctataatgtataaagaaccaacggactggaatgaaatcaattaaaaagtattccttaaaaacgttctttcaatcttaaaaacacaactcaattatataaaacactagcaccatacatgattaattttagaagcagagtttggatcaactcaa

SEQ ID NO: 75773 - DNA, 390 bp, Glycine max
  unsure (1)..(390): unsure at all n locations
ttaaacgaacaataacttntactcggatgtctgatttgttcccgncatatatcgagacgctcgaaattgaatgttgaagctntgagccgaattaaacgacaataacattttactcggatgtctgattgagtcccgtaatatattcgagaccgtcgaaattgaatggtgaagctctgagccaattcaaacgacaataaccgtttactcggatgtctgattgagtcccgtaatataccgagacgcttcgaattgaatgttgaacctcttagccaatttaaacgacaataaccttttactcggatgtctgaatgagtcccggaatatttcgagacgctcgaaattgaatggtgaggctctgagccaattctaacgacaataacgttttactcg

SEQ ID NO: 75774 - DNA, 233 bp, Glycine max
ctttttggaggaatatttgttttctgggtaaatacttgaggtgattataagtacaaacctattgaacacattttgtgggtgcaggaaacctaaaccacaagatctttctacgaccaatgaaataccaggcatctatataacccaaaacttacggtataggtgtacaagtcatggcacttatatgaactcaggtactcaactggacattctaattcctgtggacttttttctta

SEQ ID NO: 75775 - DNA, 419 bp, Glycine max
  unsure (1)..(419): unsure at all n locations
tgcaagcttgctacatccatggttggtgtgtctggactcattactataccatntcttttggaggctcttggcagtgtagattttttagaacgaaatttcaaatgcagggtcatctataccagtcaatccatcatcgtagaaattgtctccagtggatatcacaaagtcgatatttaactntgcagcaacccttcccatctgacatacacaaagagatgagtgtctaaagagctccaagctttgctttagcaatgaacatttgtttaactaattagacacaagcatcctaagcaaaaaaaaaaaaaaaagcctcaaacgagcataanaggattaanaatgatgctaatgctaagttcagtatcataattaaaaaattattggtaacttgtgcttagttaagtagactactagactaatac

SEQ ID NO: 75776 - DNA, 335 bp, Glycine max
  unsure (1)..(335): unsure at all n locations
cataaaggatagacatatccttcatggaattctgatccttaatgaggtggtggaggaagctatgaagacanagcagccagttatggtctttaaagtggattatgaaaaggcctatgatacagtatcttggtctttcttggactacatgctgtcaagactangattctgtactaaatggagacaatggattgctgcctgccttcaatcagcatctatttccattttagttaatggtagtccgactaaagaattcgctcctactctaggtctgagactatgggaccctctagcccctttgttgttaacttagtangggaaaggtctcattgaatgat

SEQ ID NO: 75777 - DNA, 464 bp, Glycine max
  unsure (1)..(464): unsure at all n locations
aatagtgaaatgctctgttagantttgatagacatgaagggctgggaatcgtactcataataatgctcttaacttgtcacttgggaaacgtcattgttgtaatgaaatagcattcggcccatattcctccatgggaccacagcattgttcatattgngcacaagatttacgtgtcagagatcgacaactggtgaaggaaaaaaattantatgtaaacatctcgaggttttgtcgacccgacttcaaatatatgtttgcaaattaattcaaactaataatatattagaattatagaaatcctttacataaacaattaanaattatgggaaccctaaaaatgtgtaggaaagtattccacatagtgtaagctacagctttacgagatacgacgtctggacanatctaatgttgcgatatttatatatgataatatcatatatatagtatatataatatatattata

SEQ ID NO: 75778 - DNA, 361 bp, Glycine max
gccgcatttcatgcaagtggggatgaattacataaacaaaaggaagaaacagcctatatcttaattatttcttggatgaccaaatggaagattgaacaaatggttataataataaaaacctctatgttggaagggaaagcacaacaagtcaagggtaatattaaacagctttccacatattggacaatactatataacaagtgagaaattaataataaaatgcactatgttagcaggcaatgacaactatgttacctccacaatggattgtgttgaaataagataatgccaccacacggctggaaatgttcctaataccacaacctcagctttgcacctcaaggaatgtttattacccctc

SEQ ID NO: 75779 - DNA, 362 bp, Glycine max
  unsure (1)..(362): unsure at all n locations
agcttagccctagaggggatggttcttntcangtctttaagangatcaataacaatgcttataggtgggacctcccagaagagtatggagttagcaccacttttaatatttctgatttaattccttttgtaggcggagctgatattgaagaggaggaaccaacatatttgaggtcaaatcctcttcagggagaggggatgatgcaatctctcctaggaagggaccagttaccagagcaatgagcaagacactccaagaggattgggctagaggtgttgaagaaagccctanggttcttatgaacctcaaggtagatttctaaacccatgggccaaggttgggtccacttatcttagtacata

SEQ ID NO: 75780 - DNA, 255 bp, Glycine max
gattttatggacatagagcacctccctcaaaatttcacattaactggaacggtacctaaattacgataaatgctcctcaccattcctaaagggcatgcctggactggttcttttacaacaacttctatatctacgggtagctgaaacaattaccctttccaagcaaatactcacccaaactcgttttcctctaccaatttcttgacacgaccacccttttggtccagcgtcaacaaactacagccgaacctacca

SEQ ID NO: 75781 - DNA, 356 bp, Glycine max
  unsure (1)..(356): unsure at all n locations
acactcctgacatcttctcaaagaatccaacgggcaaaacatggaaaccgggtttgtgaaagtgccaaacacattttgagaacatccaaccgttaatgaaggccangaagcgttttaccgaggcagcttcatgtagctttctctagaagcttcataaaaggctttctctagaagcgttctccgggcttctttgagaaggttnctcaagacgcttctttgagaaacttcattcttaattatccaccctctattactaaataacttccttaaaatactacggatgacaatatgcaacaaatatctcacttcaacattattactaatcttctatgatataattacctgggggctccctc

SEQ ID NO: 75782 - DNA, 281 bp, Glycine max
gaaaaaaaccataccgctttttctgaaggcagacgaatttcaccgacattccaatttttaaaaaaaacgctcgtggcgaaatgtttttttacacaggggaagttattgttcgagttgctaaaactacatgatgccggtaggttatcggcaactcaccagttcgttagcgaactgcatattcagtatatgcctcaaacttacccacccggcaaaaatattttccggtttgtccaaaatatctcatcgcctgaacaaacgatcaagttagaagaatcccccta

SEQ ID NO: 75783 - DNA, 440 bp, Glycine max
  unsure (1)..(440): unsure at all n locations
cgccgcagcttagagaaccataatagtcacaaccttttcatttttatgtggtacagagatactntcctaactanggtttacacaagagaagatagtcaacaacctttttggaaagaaaattttagccggtcttcccagatcattatgagantagggttagagataaaaatccgtagtcaatctgccaatggagatattccatatgaaaagttaagttatggccaattaatttcttacgttcaaaaggtagccttaaaaatttgtcaggatgacaaaattcagaggcaattagccaaagaaaaggctcacacaaagaaagattatgttctttctgcgaacaattggctaccggctgtcaaagcaaagaaaaacatcttaagaaagaaatcatgaaataaccggcaatcaagagatttcaagagagatctccacaaccatca

SEQ ID NO: 75784 - DNA, 210 bp, Glycine max
tctcgacgtacagttcgatgaataatattgtcgggatcggagtgttcaacacgataagtatgatattcttccttatcttgaagaagatgatgaatttgaacaaccaatcatagaggagcatattacaccaccttgctcaccgacaccaatgctggatgaaacacgttcagtgagaggacaccgcgactatggagccttgacaagatttat

SEQ ID NO: 75785 - DNA, 457 bp, Glycine max
  unsure (1)..(457): unsure at all n locations
gagccacaatcctgactcaccataaaccttgactctttgtgagaatgtctatccttaccctcggaagcaaaaaggaagagaaggaaaatttccaatcaaaggaaaaaagagaggaaaggaaattcccaatcaaagagtgggagaaagcaataagaaaagaaagaatattcccaatcaaagaatgggagaaagataaaaaaaagagaaggagaagaaggaaagaaagctcctggtcaaagatcgaaagaaaacagaagaaatatgcagagaggtctttggaccagacaatatctgaacaatacggaattgtcaccaaatgaacaaaagaaagaanaggaaaccataacctaaaagtggtcttctccctttgattaccaaccaaaatcatgtgcatcggtgacttggtcgcctcgcgtcaaacaaaaacagaataggaaatagcaacaatatatcaaag

SEQ ID NO: 75786 - DNA, 343 bp, Glycine max
tccacatccacaatgcgcgcattaacccaccataccctggtgcccacctacaactgaacttacttactcccacgtagcccatatccttcgttctttccaccgtgtccccatcaattctcccaagcgttcacaacattccaactcaaacaacattctgacggcacaagctatcacagctcagcaaaacagatcaaacggcagaaactctggtcaacacattaaccaaaatcacagctgttctttcttaatgaccacagtaacaatttcttctatccaaatcgtaacccgtgtatcgacttcaacatattactggaagttatagtgataaacctacattgtgacc

SEQ ID NO: 75787 - DNA, 329 bp, Glycine max
  unsure (1)..(329): unsure at all n locations
cagagatctgtatggtgatctgcagaataacatanaccacagactcttgcaacaagtgcaaatttctgattcatggcaagctgagttactaagttgaccaaggcattcaagttttcctcaagctttttattttcagcagatgaagatgaatccgtggccacctcatggaatcctctaaagacaataacatcatttcttgcactgaattgttgggagttggaaaccatcttctcaatcaaattcccagcctcagcaggagtcatattaccaaaggctccaccactggcagcatcaatcatacttctctccatggtgcgtagtccctcata

SEQ ID NO: 75788 - DNA, 199 bp, Glycine max
gcacatgtgccatttgcttctttttacttaaacacgtttgaatgtatgcatatcatgcttttggaaacataattgtacgggaggtgtattgtaactatacagttaaaatcactccttgtgaaaaattgaagttatctaccctattcacccttttagtggattattgatttaaagctcctaatgacaagatgactatgtt

SEQ ID NO: 75789 - DNA, 467 bp, Glycine max
  unsure (1)..(467): unsure at all n locations
gtaacctgcggcatgcaagctntgatgcaacatttggagaggttaatgaatcttcgatgatgatgcgctccatgagaggttggatcanatggagaatagagatcataatgaagaaaaagggggagaagagggaatgatggtgtttctagacaaacccgaattgatggtattaanactcaacatttcctccattntaaaggaaaagaatgatccggaggcctacgttgagtgggagatgaanatagagcatgttttctcatgcaacaactatgaggaggaccagaaggtgaagctttgccgccacggagtttccgactatgctcttgtgtggtggaaccaagctacaaaggagagagcaaganatgaagagccaatggttgatacatggacggagatgaaaaagatcatgaggaagcgggtatgtctcgctatgttactcagggacttganattcaagctccaaaaac

SEQ ID NO: 75790 - DNA, 361 bp, Glycine max
  unsure (1)..(361): unsure at all n locations
ggctgcagcttatgatgagaataagtgattcagtgtttttgtgatgacaatagctcaagagaatgatttcaagattgagtcaacaagttcaagatcaagattaatttcaagtttcatgannagaaatcaagaagattcaagattcaagagaagtttgatttcaagattctagagaagatgaattcaagattcaagagaagaaatcaagaagacttcacacgggaagtattgaaaatatttttcaaaaaacaaacatagcacaattntggttttcaaaagagtttttctcaaaattttctaagttaccagagttnttactctctagtaatcgagtaccagtttcctgtaatcgattaccagt

SEQ ID NO: 75791 - DNA, 351 bp, Glycine max
  unsure (1)..(351): unsure at all n locations
gcggagggacctggaagaactggagctgctggttgtgaatgtttattatacatanagggagcagaagtatggggagcatgggcagctaaaggagatggtgcctcagatcttctagccctggatttttgggtccttgganaagtgactgataggtcatccatgttccagtaattcttcttaatataagccaaattaatggctgggccaagtgactcataagtgagagaatctgaggtgactcctcgggccttgcacaaggcaataatcaaggctggagatcctgccacgaagagtggactgcacatgagtgaatctgccagaataatgatctaagtcatgtcatcttattac

SEQ ID NO: 75792 - DNA, 464 bp, Glycine max
  unsure (1)..(464): unsure at all n locations
tgcaagcttgcgcttggttntaataaaacaaacaatcttgtttatatntaacgggttgagcttgaatagtggaggaatagctcaacccatttacgttctttaggataccattcttttcttgcaggtcagcatgacaatgaatatttccgcagacttgcagtcccttttcacatggaacacaaaacaggtttttgactttaattttgatttttcattataattttttgtcttctctccctttgcctctgaaaaggatgaatgctctttgtaggacagggaagaatgaaataattggcttttttcccccaaactcttgcatagagcttttggagggaaaaaaaaatattatttcttaatgtgtgcttggttgctctatgtctcctatcgnaatatgttccctaatgttaaatatccttacctattgtatatcttgttccattcatacaatattttttctatactat

SEQ ID NO: 75793 - DNA, 472 bp, Glycine max
  unsure (1)..(472): unsure at all n locations
ctgatacatctattatatattccatttatctctacactctcgctgttgcaatagaactgcacatgaccaaatacccttgagtggtcattgttgttttaagaatagcattccaaaatgtggtgatggttcttttaaagtcgtattgttttcaaaattacattccaaaagttcagtcaaaccatcgcgcattaaactaaccacggccatggtttcactttgtggtcactgttgctagaatgttcaaaaaccttgatactgtatataatataaatgcagccaatacggttgcaattgtgatcacgatgcgtcttanaatatgngatcaggcctaacttaactctacaaaacagacttatatgatgagagaattaggattgtcctgtacttatatacattaatatggtcatactagtgatggctattctcaacaatgtgatatctgacactccaaaagctttgatgttacggtcac

SEQ ID NO: 75794 - DNA, 228 bp, Glycine max
agctgttggcaaaggattatagtatatatatattcatgtatatgctcaaagagattcacaggatgtataggattgtaataattggtcttgaaatgccaagtaaggtcttgcttttataaactcttcatgtctggtcaagaaaaccattataagagttacaacctttataaaaacttgaaaaccattggaagaggtacatcctttgatttaattcacaacttatcaccg

SEQ ID NO: 75795 - DNA, 182 bp, Glycine max
  unsure (1)..(182): unsure at all n locations
ctcgctactgctgaagtgacctggattcatactatgctntttgtaatacaggtcaaacacactacacccgtgttttttgtgacaacatgagcacagttgccttagctcacaacccagttctgcattccagaaccaagcacatggacctggacttgtcttttgtctgagaaaaaagtctggag

SEQ ID NO: 75796 - DNA, 381 bp, Glycine max
  unsure (1)..(381): unsure at all n locations
gtctacgcgccattgtgactaatctctcttcttctctgtgttactctcgcgtgngacataccctatatntgctcgcgctgccttcctctctgtgtaacctctgaaggtacatttcgtctaagcttcatatattcagcttcatatcttcattgtaacttagctgtgtcatttcggttaaccctaggtacatttcatgctgacttgagttacgaggaaagcttcaagtctgcatgccattgtgactgatctcacttccagcctcgctgccattgtcactgttgggttngaggtaagcttcctctatttttaatttcaaagttagttagcaaacatcttcaagttgtttttgttagaagttgattttctacattctatactcat

SEQ ID NO: 75797 - DNA, 433 bp, Glycine max
taataactagtcagtgagcaaattattacaacataaacgctgtcagctaagccctgtgttgacatcctacttgtacagatgaagcaaggatactaatgtgtagtcatgggctcacatcaaggttagactagatcatgcaactgttatattaattttctagctaagaatctatagattagaaaccctgtatttgccagctcacgcattcatgattaacatctatgaactggaagggaatgactcatttcttctatttcaacctacttaggttaataattcttcttgagctaatgctacaaaaaggacactattatttgaaacacttgaagccataatcgattctggaatcatatgtcccaccaaataacaacatattctgcaacgctataacctataccatattactcactttgtgatttgagcagccaatatt

SEQ ID NO: 75798 - DNA, 483 bp, Glycine max
  unsure (1)..(483): unsure at all n locations
atccttgagtcacctgcggcatgcaagcttcttcagtagttagtattggaatggtttatcattttatcaaacacatgaccgtcacgagcttctaattgatgtgactaagcgaatcctcagaactagaaacccggtttcaataggaaacatgcgaatgattaataacgattgaattgaaagaagaacacatttgtaccaaaaaaaatcacgtaaatgaagggagaaacagtacctaccggtgtccctgagtttttctaaaaccctatacttgagtctgaaccgagagacatcagaatccgacagctgactccataatcactaactggtttaatataaaatataaaatggcattttacatgttctaatttatcgcaaaattaaaatatatctatntaaatatataanatatatatttaccttatacctttcctagactaaaatattactactttcttatctcgcacatcgtacaaattagagtac

SEQ ID NO: 75799 - DNA, 424 bp, Glycine max
  unsure (1)..(424): unsure at all n locations
aatcttggtttatgggtaatgctgtctctagaacatttccatcggatgtaatgatgaaatatgtgcattttcgggtgacaaagaggctaagttttgaattgcaaaatgtagcagttgggctaagctcaacagttgggctaagcgcatatccaccgctaagcgtagtttcagtgcgcttagcgcaaaggagaatctggcagagcatcagcatcaaagctgcgcgctaagcgcgagatcaatgcgctaaccgcagtaggtgccttcagccangctaagctcgagactggcgctaagccctcgcgcttagcgcgagggtcacgctaagcacagctgtgcgattcaaagccttttaaagcctgtctttgtagattanggaacaacttttacatcttacaacacctttatgacacttctatagatggca

SEQ ID NO: 75800 - DNA, 511 bp, Glycine max
  unsure (1)..(511): unsure at all n locations
atccttagagcaccgcggctgcaagcttatttaatttccatttgtgcaaattgagtctttaacatgcctatgtaactaacatgtggtcccaaatgtgacctatcatgcttaccttatgcattggttttcattntgtatccaatgtgttgcgtcttgtatgaaagaatgacgtaaagcacccacagatactatcgacatttgtcttactagttgtaacgtggtcaagttggtttatgacaataatgatattcactatnttataacatatattgggtctcgtttaagaatttataatgattnttataattgagttaattattattttacatgtatctgataattgactttatgtntcagatgctcgtggtcgtgcggcgtacgtgatagattctttcttacagcaatgtcagaacaagaaataatntatgtggcaaaatattatattcaanggaaaaagaatggtaggatagataatactagttcatgattggcataacaaatcttattcatc

SEQ ID NO: 75801 - DNA, 382 bp, Glycine max
  unsure (1)..(382): unsure at all n locations
agctnttcactcggagatctgattcaagcgcataatatatcgagactcttgataatgaacaacggaagctctcgagaaattccaatgctcattaccttcaactcggaggtctgatttatgcgcctaatatatcaagacgctcgaaattgaacaacggaagctctctagaaattcaaatggtcataacttttcactccgaggttcgattcaagtgcatgatatatccaaacgctcgaaattgaacaatagaagctctcgagatattcagatggtcataaccttatactcggaggtccgaattaggcgcataatatatcgagacgctctatatttaacaatggaagctcttgagcaattacaatggtcataactttcatctcgg

SEQ ID NO: 75802 - DNA, 467 bp, Glycine max
  unsure (1)..(467): unsure at all n locations
tcttcagtcacctgcggcatgcaagcttgtatcatgcaacgtaatgcatgcagggtcactatttagttacatcggcttaggaccattattctgttattccagttaattacaggccataatggtgcaataccattgtataaaaggagatcatattcatgaataaagcagagaanaccattttccagtaatagtttagcgtagatatccttctcttacctctcgctcatatcaatcttggaatggtataattaagatcagttaggcgccggctgtgcggtgcatctcccattgataaattaagtttcttctccagggactccccccacaaaaatatagaaccaaaaacaacatacgacattgccaataaagtgagtaatatttgtgcacgccaagcattccacagccacagtgacgacgccatatatattccgagtgaaacctgatattcaaatcgtatcgtgcttact

SEQ ID NO: 75803 - DNA, 391 bp, Glycine max
  unsure (1)..(391): unsure at all n locations
tgcttatatgatcaagttgtataaataggcacactatcatatgtccaagagagaacatggcatctatcttgtccaccttggccaagccccaatgactgaatatgtgaaattaaggcatatggaatattgtaagttatttgaaatatcttatccaagaagtaaaattaaagaagtcaaattaaattacggagaactctcanataatatatgcacacactcgtgcacaattaatgagatcatttcacgcaaattacaattgacacatgaataactgctggccattaataaggtcaacaaanaagtgcaatggttaaatcctaattatacctaattaaattaaatctaatagtccataacttgattcatgaagagaatctatgctgctcatgta

SEQ ID NO: 75804 - DNA, 412 bp, Glycine max
  unsure (1)..(412): unsure at all n locations
acctagctccaacttgctcttccccatatcaactatgcagcttgcagtcaacatgaatggccttcccaatattacagggatgtcagtatcttcagagatatccattaccacaaagtctgtcaagaagataaaatgtttttctctgaccaacacatcttcaattactccatatggcctggtaatggaacagtcagctaattgtaaagtcattcgagtgggcattatttccaactccnccaatcttctgcacatggagagtggcatcaaattgacactggctcccacgtcaataagagctnttcccacattgacttctccaattgaataaggaatagttacactcccaggatctttatgcttgggtggaaagatctttnggatcatagcactgtagtctccttccactatgatg

SEQ ID NO: 75805 - DNA, 382 bp, Glycine max
  unsure (1)..(382): unsure at all n locations
agctgagatgaggaagtgttgaaagtgttaaacttcctgctnttattgttgaccacagagtggtacctggagatatgtctcggccgtcacgagaccttgnggacgtcaggtggggtgctattgcccataaccaagcttgaccaatcccgacccaacccgggcatagtcggtcagtgagaacctgtgatgtacctaaacaggcgagctcctggcagtcaacagattaaaggataacaagaccacaaagcaaggaggcttgtggtggctggccagctgtgaatattgtgtaatatgtggattgtggcctctggtaatcgattaccaagggtgggtaatcgattacaaagcttaaaatngaggacaggaggctaagatggtctct

SEQ ID NO: 75806 - DNA, 501 bp, Glycine max
  unsure (1)..(501): unsure at all n locations
ggatccttaagtcacctgcggcatgcaagctagttattgattntnttntctaactaanaatgcattatatggtcaaaaggatgaanatatgcgagagagctccatgtaatacccaccttntacctgtcttgcttgataaatattggttatgtgctcatttgttaccctcacgatatccaataagcggctatggatntttntaatatccaaggttatccgtggatacccatggatatttatgcacaaataaaaaatattttattaatatgtttaacaaacattttattgatctttttttattgtagcattgtcttgaagaaatgagtttaattgttacaactaatattattcaaacattctacaatctacacaattaaaaatgtccacaaataattctaaataaataaatcttgtgaactccacataaaattatttataaagtattcactataatatatactcaaataaaaatatactaagatataagtcccaataaaatta

SEQ ID NO: 75807 - DNA, 439 bp, Glycine max
  unsure (1)..(439): unsure at all n locations
gtcacctgccgctgcaagcttcaatctgatatgcagagtggttcttaaattttgtcannagacgcacacatgatatatatatgtgtaacaatgacacagactcctcaagtcgatagagggctaagaaaagtggtctatttctaacaaattaataaagctagcacaagcagttcaaaaataaaaatattaagctttgactttaatcatcgtccctttatgaccatatgatatccatanatatactcataatcgtggccagtagtacggtatatactacgcagcgatgctttaaagtctccactggtgacgctggcatgcacatcatataatctgattcattgatgaccccctagaatacttatttatttaacaactaataacatgtgccaagaaaaccatcctacacggtacaagttcagcctatatatatatataaagc

SEQ ID NO: 75808 - DNA, 297 bp, Glycine max
  unsure (1)..(297): unsure at all n locations
agcttgctcgtctagctgatatatgtctactncttctgtttgtgaccgaagaacaattacggatcaacttgaaacttatgtgcttcacgcgagaagaaatgcttctttttccacttgtgaagatgttccaagttcggctatgaagatcgttcacactgagaaacattcggtatttccattggtttataaactcattgagctatctntgatattgccggtgtcgaccgcgttcgatgaaagagctttntcagccatgaagattatcaagtctacattgcgcaataagatcaacgatgt

SEQ ID NO: 75809 - DNA, 465 bp, Glycine max
  unsure (1)..(465): unsure at all n locations
tctgagtcacctgcggctgcagctgaaaaaagtataatctttataattattttataagggaatagcagtgggattattgaactcatcacctcacgaacgaattctattaatgattataatacggataattctatggacatacaacataataacttgcatttgaaagatcatatctgtattaagccaagttaaggaggtatatacagagataattgttatctctgaaagacataatgacaaattgttaacaaaataatcaaatactactgcccagatagatactttgacttggagcccaacagcaattagagtgcatcgacaatntctattttgacttagtgtgcatgtgcaacaacagttatagctttcaacggacaaagttctcactgccacactaactattgtttgcccagtggcacttatatatctacaatagtcttacacaatataaacgagtaacgatga

SEQ ID NO: 75810 - DNA, 436 bp, Glycine max
  unsure (1)..(436): unsure at all n locations
agcttcccatctttctgctagtccatcaccttcaagcatgcgtaccacttccgacattntaggcctatgaccgggaagatattgagtacacaatagagccacttgaaccatttcctcaaactcaatcctgtcatagttgctcttgagatctttgtctactagcatttctagctttttctcctgatgaattttctttacctgaataatgtcaacaatgtgaggacttggttgactttggtttgagggaagggggaattaatttaataaatatatttaaaatacatttgtttataaaattattantttttaaacattgagagaaacataattagttgtttaagttctttaaagatgcagagtaagcagtgagagtatttganaatattttgtaactgggtccctagatnttataaaaccgccacanatagttattctt

SEQ ID NO: 75811 - DNA, 495 bp, Glycine max
  unsure (1)..(495): unsure at all n locations
tactctcagnacacctgcaagcatgcaagctngaagaggaggataaagctctcttgcttctgaattccttaccataatccnttgaacatttcaaggatgcaattctttatggcaaagatcaagacattaccctataagaagtccagacctcaataaggaccaatgagatgcaaaaacagcaagactccaaatctgaggataatggtgaaagcctgaatatttcaaggtgaaggagtgaaaagaatggaacaagaggaaagaagtccagatcaaggtcaagggactcaaagaatggccagaanacataatttcanatgctttaattgtcancaaaatttgtcatttcaagaaagattgcccagaacagatcaagaaaggatctttggactcntgtgacatagttgaagcctctgaaggttatgagagtgcangtattttagtagcttctaataccaagacgcanacagaatggattatggattctggatgctcata

SEQ ID NO: 75812 - DNA, 464 bp, Glycine max
  unsure (1)..(464): unsure at all n locations
agtcacctgcggcatgcaagctntgactaactcgcacgaactntatataccctatgtttggaaactctatggaagataaaaaaaattaactataaggggctttgcgctgaagtctaagtccactttattctttggtgctcataaggcttagtggtctcctttatatatttgtgaagaaagggatttatgaggttattctgcccgattgggacttaagcgattnttcatgatcaagtggcctacttcaaagacgattttctccaagatagaaactgattntggttccaaggtgtgtgaatgaatttagctttttcacaagcttttaacggcacagatacacctatatggaaactataactaagattgcatggtcttctaagtgcatctaaactatctaacttaaaacttttagttactaacttagagtaatcatctcttacccgactattataaacaaacatata

SEQ ID NO: 75813 - DNA, 457 bp, Glycine max
  unsure (1)..(457): unsure at all n locations
agctngaaagcttaaaagaagactcanaatatacttggttatgtactataatgaagaagtcaacatgttcactgaatgaagagaaaaatttcaagccataagaagtagtaaaaaactaaaggacaataagaatgttgcaaacatgaagatgtcaacaatgaacatgacattaagaacaacattgttacaacacactcagaatgaatttcatcaacaggatgagttcattttgaacattgtatctaaatttctagaaatgcaattgagatattctngatggatatggaaatcttgaagaaagatcttcaactttcatgaacaagtcatggtctaatacaatctaaatcatggagaanatttgagttgtagttgaaacactggtctacttgaacaacttgatatgtgtgcagtaagtngaagaccactcgatctacaaaagtgcacttgagaatatctg

SEQ ID NO: 75814 - DNA, 427 bp, Glycine max
  unsure (1)..(427): unsure at all n locations
agctngataanacatataattgtctnttcttagacattatatatatatatatatatatatataagngctaacatttcaacagaaggaaataagagaaattgaagttaaattatttgtaaaatgatatgttacggatatatgtacactcgaccaaagattaatgtatattttcaatttaaaattacgagctaaaagatggctcaatattcgagatctatagagctagtaacccatagttgaaagatgactcatgattgaaatntattaaagctagttgtgatagctcatggctgaaaaatggctcaactattgagatttacatagagtcttaatagccaaagctgaaagatggctcgactgttgagatatatatatagtttaatagttgtgagctgaaagatggctcacttcatatatggttataata

SEQ ID NO: 75815 - DNA, 373 bp, Glycine max
  unsure (1)..(373): unsure at all n locations
ccaatacaactgagtagtatacaagaatatttcaaatttgcagcatatacctactaaaaagattcaaccacattagacaaaacttataattagtaggacgggcaaatgaacttagcttaatgggctggcctaaccaacccgcgttaaggctaagctgggttcaaaactaagtagctcatatagaaatgagcctntgtggcttgaccgtaaaagggtcaaatggactttggccaaattggcccagttaataatatatagtaaatattaaatagaatatagtaacttattaatataacttataagattatatattttttttaaaagaggttaaacatataatgtaacattgaacataaaatgcataatgaataac

SEQ ID NO: 75816 - DNA, 434 bp, Glycine max
  unsure (1)..(434): unsure at all n locations
agcttgaggagttggtcnttgccaatgaaaggatctatgtgnggtctgaaaaaggcaaatttagtcatcctgcttggacgaatgagaaaactggggcaaatgaagagggtgagaaagagggagaaacccatgctgtgactgccattcctatacgaccaagtttcccaccaacccaacaatgtcattactcagccaataacaaacctcttccttacccaccgcccagttatccacaaaggccatccctaaatcaaccacaaagcctgtctaccgcacttccaatgacgaagaccacctttatcacaaaccanaaaacaccaacaaaaaggaattntgcagcaaagagcctgtatgggttcaccccaaattccgngtcatatgctaaacttgatcccatatccactcaataattcaatggtagccataacctcaac

SEQ ID NO: 75817 - DNA, 356 bp, Glycine max
  unsure (1)..(356): unsure at all n locations
agctggcttgtggagcttctatggaagctggatcttttatcttcaatggagtcctttaatggtgantttccaccatggagatgcagcggaagacaaaggaanataggtgagaggaggcgccatccattaaggaataagccatgcaagaaggagcttcaccaccaagatgagccttggataagaagcttggagaggatgcttcaatggaggaaaagaaagagggagagaaagagagaggggggagcacgaaattgaaggaataaaagaggtatagaagtggaactttgaagtatgtctcacaagactctcattcatcaaagttacaacangtggtacacatgcttctatttatagac

SEQ ID NO: 75818 - DNA, 188 bp, Glycine max
  unsure (1)..(188): unsure at all n locations
agcttgttcttgattnttcctcagttctttaacaagctttgaacaatatacttgtccttcatttaattgtctttgggcttggcgaccacgctcaacaaagtacttttgacacctactgtacgttgatttcaccaatgctgttatgggaatgttgcgacaatcctttataaccttattgatacattatg

SEQ ID NO: 75819 - DNA, 442 bp, Glycine max
  unsure (1)..(442): unsure at all n locations
ttaagtcacctgcggcatgcaagcttcttacanagcatacggctntctggatgtagatgatgatatctatacagatggatcttatatatctatatatctatagatagatatatagatatagatatatagatatagatcatacaatgaagtaccgcacgagtgggtatataggaatccaaatctgccgaatcactcatgttatgatcttctacatcctaggtcttcccgttccttcatctggcttatgttcttcatgtagcattcagactgaatgactctatgannatacgtcgctacttccacatggtacgggtaacgtaggagacatctctatttttcccggggggaatccttagaattaccacagcttagctttcaattcgcctctgaccatcaaatgaaatgtgaataacccgtcctcccctctttgaaactttgaaac

SEQ ID NO: 75820 - DNA, 414 bp, Glycine max
  unsure (1)..(414): unsure at all n locations
agctntggtcatgcttcaatgtatggattccttgagcctcaatccatacacaatgcaaaggttagacgtgctgaatgtcgacaatacattgaaacatgggtgaaggaatccccacaagaggtctacctaggagcctacttgaattagtaagtaaaatttatgcaaatggttgtacgagatatatgtgcaccatacgaacctaattattgtcgaatgcagagcccattggtagttggntgttctatgtcctatgaatgtcnatngtgtctagttttgttcgttaggtaagaagccaaanagtcatatcanagttgcaattaacaagttaagttttatattataactcatttaatgtccagtaaagttagggtggtaaatagttntctagtgtatatatgttaatggttttttcta

SEQ ID NO: 75821 - DNA, 455 bp, Glycine max
  unsure (1)..(455): unsure at all n locations
agctntcacaatatccaaacaattcaattccatttgtcatgatactaccttatacaaggaaaaatagagtggaggcagatatctttgcacaagattcattcaaattccacagagtttttcctaccctcatatctcagaaaaatcctctttgttccgattcgttaacccttggatctccttgaaaatttaactgggggttcctaatacagaaacctaaattttgaccattgngatctgctaaagaatgtacaaaacacgagatatactacctttcccgtgacagcagaaactagcactgcacaaccatttnntttctgcataattggcagaaattgctgcacaatntgacagctttgctgcatatatttgcagaattttgaaatcaagctcacatacatccaattncactcannatggatcctacaagtcctaaatcatgtatttaatcatgttca

SEQ ID NO: 75822 - DNA, 478 bp, Glycine max
  unsure (1)..(478): unsure at all n locations
agcttgaccttngagcactgacgactatttcagcattctagtagcatctttgtatctagggttttcttcgagcctggacaatgtgggttctgtggggttcgagcgacgacaatatgggttttccggcagtgtagggggttctgtgggttcgaccaacgacaatgtaggtgtcgacggagcggtttccggcagatntcgggcgggaagagaaagagaacaacgatttcaggcatgaggatgacaaagagaagaggtatggcaaggttttcgaacgcgcgcggcttctgaaatctctattttttttaacttataagcacaacaacatcggttttttatggataaccgatgttaactgaatgtagttaacatcagttntgtaaaaaccaatgttaacatcaaatacattacnatcggtntntaacaaaccgatgttaaatcaactncttaacatcnngctcctcacaactgatgtaactct

SEQ ID NO: 75823 - DNA, 332 bp, Glycine max
  unsure (1)..(332): unsure at all n locations
agctntagtgcccttaattntgaagccaatattgacattcccataatgtattccctgacantttctttgccttgatagttcatggaaatcaagttctgaaagagagtacttgtttccgccttatcgctttttgcaaagcactttttcaatttcagtaagaaattctttggcactagttatatcatctaaaacaatgctcctaaagacctcangaatgcgacgcttaatgatcataagactcatgcgacttgagtgatcccacttctcatgaagtttcctctgttaagagattgtggaattcgtaggagaagggggtttctcaatccttaatg

SEQ ID NO: 75824 - DNA, 244 bp, Glycine max
atggaggaatcacgcttacctcagatagtgcgtctctagaacaacaacaggctgcttctttcatgcaataagctgctggatccaacagaccatacattcctcctccgatccaacaactacaacgaccccatatacaggcaagagttgatgcgccctcacaaccttttctcgaagaacttgtgaggcaaatgacatatgcataacatgcaggtgcaggaagagatcagagcctccattcttagct

SEQ ID NO: 75825 - DNA, 391 bp, Glycine max
agcttaatgaaacattctgcctcttgatactattgtatttatattaattattcttcataaaacaacttgttcttttcattacattctgtccaaacagagcattacattgtaagatgttgttaacatggcaagagtatcatacatgtaccacgcagtcaagcacgcactaggagttgtactcaatggatggtatctaaatgtcaatggagtctggatgaaataaaaggaaataaagacactgatgttgtgagtcgtatcgaaacacagtttgcatgagtgtgtctatagattatatgatccttgatgaatctgtatatcaaggggccaagatatgttctcaccttcgagtctgacttgctcggttggaattataattctgaagggtttatac

SEQ ID NO: 75826 - DNA, 167 bp, Glycine max
tagctctgacctttctaatagaagaatctataagctttgttcttgctatgaaggataaaatgttgtgcaatacacgcgctatggtgcattcaataacgggctataatatgttttcgatctttctggagaatattcgaagtttataattagtctctgcaagaaaaaaa

SEQ ID NO: 75827 - DNA, 477 bp, Glycine max
  unsure (1)..(477): unsure at all n locations
agctngaatcttccttggtcgggtacatgagcatatgttatgctcccaaatactctcaagtgatcaactcttggcttcactccactccatgcttcttgtggtgtttgatctttgacattctntgttggggagcgattggacaaataaacggcacatgcaacagcttcggcccaaaattcctttggcatatntttagccttcaacataaatctagtcatattaagaatagttctattttttctctccgctaccccattttgttgtggagatctangaaccgttagagggcgacgaatcccatattttttacaaaattcattanattcttttgatgtgaattcgccacctctatcggatcttagagctttgattacataatcactctccttttncacaagagctntanaattnttaaaagctacaaatgcctcagatttttctttataaatatactcaatcttctctataatatcataa

SEQ ID NO: 75828 - DNA, 421 bp, Glycine max
  unsure (1)..(421): unsure at all n locations
agctngaaggtaaactatattcctaggtttacctggtttcccaactggccgtgaatcaaaaatctgcacctgtcgccagactttgtgggttatgctcctctgtcgaccaccacacagaccttngcccttctatgcaacaatctgaagcaattgaacagcctgaagcttatgctgcaaacatctacaacagacctcctcaacctcagcagcaaaatcagccacaacagaacaattatgacctctctagcaacaggtacaatcccgggtggaggaatcatcccaaccttagatggtcgaatccttcacaacagcagcaacaacaacaaccttatntccagaatgttgttggcccaagcagaccatacgttcctccaccaatccagcaacaacaacatcaacagccctagaaacaacaaacagt

SEQ ID NO: 75829 - DNA, 443 bp, Glycine max
  unsure (1)..(443): unsure at all n locations
taagtcacctgcggcatgcaagcttgtaagttctggtgttggatgagctcacaacattcttagatgaagctgaccggtaatccccaagaatagtgatgttatatgctatacatgtcatatnntgtgaaaagttatgaaaattgagaaacctgaaaacacggatactggaaactanggactntcatcatctacaaaatattcactgacaagtcattttctttggttcttcatatnttcttttatctgcatttgacacattcatgctgacaacaatgctgcttgggcagtctctatataagctttcttacatctgaatatgtggaccttcttattctaaacatgctcgttacttanaacacggcttcactttntgtgcctatnngttgaattgctcatgttagtaaatgtgaaagttntgattaaaaccacacttgctgtagatg

SEQ ID NO: 75830 - DNA, 349 bp, Glycine max
  unsure (1)..(349): unsure at all n locations
agcttgagatgaggaagtgtcgaagggtgaaacttcctgcttttattgttgaccacagagaggtacctggagatatgtcgcggtggtcangagaccttgcggacgtcatgtggggtgctattgcccaaaaccaaacttgaccaatcccgacccaacccgggcatagtccgtcagtgagaacctgtgatgtacctaagcaagcgagctcctggcagtcaacagattaaaggaacaaagaccacacagctaggatgcttgtggcacttggccagctgtgaaacttgactgatatgtgagatatggcctctggtaatctattaccaagggtgggtaatcgantacaaggctt

SEQ ID NO: 75831 - DNA, 464 bp, Glycine max
  unsure (1)..(464): unsure at all n locations
atcctctcagtcacctgcggcatgcaagcttgcctaattaactngaaattgagagaaaatgattattaaacacacaaaatgaaaatattaagtatttattacctatacttaatagaaaatacttataacactacaaaataaccataaattgggagagtttgatacaacttatacaattttatacacaaaagttagtcattttcattgactaacagtcagcagggaaggaaacgacgatgtttggacgattaggctaatatangaggtggatgctattgcaaaagaagagggaagtggcgtcgttttgattgggaaaagagagagtgataagtgccaaattttagttatttttgggattaaattgttagcactctaccctttgatgtaatagttttcttataaactagtcttaaatctagttggttatatatattgnacatttactaatatntttatntaaatat

SEQ ID NO: 75832 - DNA, 368 bp, Glycine max
  unsure (1)..(368): unsure at all n locations
agctnganagatcccgggtagtcaaagagaagttcatgtccatagccatcaaagtctgaagagagtatgatgaactgagggacgtcaatatggccaccgatgaagccttggaatgagaaaccaagaaggcccganaggaagaacacgaccaaaacaagtttcgaggggctttatagggcagcaataataagctcaagctccgaagaggtgaaaggaatcatcacgggtcaaaggcatgatcttgaaggacgagctaaaggcttgccttatgttgaaaagaaatntgtcccaacagttaagcgagactgaagggaatgtgtgggccatcatcgatgagtgcaaagagaagctaaatctatcggcgactc

SEQ ID NO: 75833 - DNA, 355 bp, Glycine max
  unsure (1)..(355): unsure at all n locations
atacaagaatgattctctgataccactagttggacaagtggcctcacgtatcttaagaatggngggggggctgaattaatatattacaactcatctccccaatcataaatgctattacactatctatccaagacatacagtcccttattcatgaatctcttaaatatagattcctatacaacaatttgaatatgaatctcatccaatcataaataaccgatgttacaggaagagaatacgcgaactcaggattatactcggtcggacacaccctagtgcctacgtccagtcctcaagcaacccgcttgagagctccactatcttggacatatcttttacatattctcaacacaca

SEQ ID NO: 75834 - DNA, 428 bp, Glycine max
  unsure (1)..(428): unsure at all n locations
agcttgtctaacgtgatgtgtcatggtttctcaggttatgataactaagggtgtcacaatgatcaaatcaagtagtgaatcaaacagtctaacaggcacatatagcacaaacactaaacaacaatgacattattattctaaaattcaactcgtaaatcaagtagagaattcaggcagacaaacggatgacatagtcaaagttatattatgattataaaacttaatgatgatgtagaaatcaatagttgtagaaaattgctgttaaaataaagatatgtcagctaacataatagcangangtaacaaataacactgtataacaacaaataaataagtgataaacaattcataattttaagatttataatatctgagatacacatacttaaaataagataagagtgagatccaaaatttataatgatata

SEQ ID NO: 75835 - DNA, 377 bp, Glycine max
agctctaagtgcgtaaatgttcttaatattctatcacgctggctacctaacattctggtatattctttccacgtaactcttaacccatcccaacttttaaatcacaccaccagacccacagaacaaaaatacaatctttttattttgtattagtaaatataatattcttataactatcaagataatcttgtcggttaaaaaaacaaaatactaaaccagtcatataagttagcaatttcatgagaatatgtataaaaatttgattcaatttgtagtgtaatgtgcaagtacaggtataaaaacatcagataatgccaaagactggagacacacattccaaacaaaagacacattcttatattttataatactaacaa

SEQ ID NO: 75836 - DNA, 461 bp, Glycine max
  unsure (1)..(461): unsure at all n locations
agcttgtgcgaatcanatcactcctgcattntatctctatcatgcattctttctttctttacccactcctcacgtttggttttttagggaaaaaacaccataactaaacgcgccacaaggcatccctatcgcaccagatccaaatctagaacgatgggtgatcaagaggagacacaggaacagatgaaagccgacatgtctgctctgaaagaacagatggcttccatgatggaggccatgttatgaatgaagcaactcatggagaaaaacgtggccaccgctaccgctgtcagttcggctgccgaagcagacccaactctcttggcaactacgcaccatcctccctcaaacatagtaggacggngaagggacacactgtgacacgatggcaaccctcatctgggatacaaccgagcggcttacccttatggatngtcctccaactactcaccacccgtctt

SEQ ID NO: 75837 - DNA, 415 bp, Glycine max
  unsure (1)..(415): unsure at all n locations
agcttgccacccagctcgcccaggctagctcagctattccaggcgagcagggttgcttcctccagaagtaacagccttctggagggcccaagtgggcctggttgctatttgcacccccatttttactaagtacaccccattgcctttttttttgtgattctttnttcgtaaagttacggaaacttatgaatttcgtaacgatacttgttttctttccgtaatgttacggaaccttgcggattacataatcatcccctttntgacttacggaatgttacggaacctcactaatcatccccttttttgatttccggtgtgtcacggaaccttacagatngtgcatcaatatattcttttgtttccggcatcgtccggaatttcacaaattgctaatgatgggtgccaagcacctcac

SEQ ID NO: 75838 - DNA, 432 bp, Glycine max
  unsure (1)..(432): unsure at all n locations
agcttacaacatgtggattatcctccagcacatcaacatcctgcanactatgtatatcgtacagtcttcatcagactcttcagtcgaggagttatcctcacctcgcctcgtgttatcactgcaaaccaaatacaaagaacgatcctccatcgagtcctccatcaaatatgtatcatatagggcatcattagtccctaccttaatgtaagatttaagcaaaacttgtgccttgactcaaattaagactctagccacatctagatgcatcctattagtagtatactcatttgcatacatatagtcaccataggagctacaatccgatttgaaaaaatcatcattccattcatgagtagggacattaagcaatttcacccataccacagtttcatggtctaccaagcgagcgaaattccatagaacaatatctac

SEQ ID NO: 75839 - DNA, 473 bp, Glycine max
  unsure (1)..(473): unsure at all n locations
cgtgatcctctcagtcacctgcagcatgcaagcttacatatcgtgttccttactatgtgaagctggcatcctcacatggcacgtgaagtttatgatgcatantaattcataaaaggatgtattttagtttgtcccacttgttcttcgtgaagttaagtgaaactcanacggtcangatgtgaatagggagatataatgttggtagggagggagggaataagtgtgggattgaatctntttactaacaagaattaacaactaatatttgttgataaaaaatcaataaccaatgtgaatagttataatcatagagaaaaaaagttatatcttatcatatttattttaacggtaatactaacctgcattgatnttnttaanaaanagtaacctggattgacattagttggaaaattaagtgttnttctatgaagtgttattaaaagatctatactataatntttaatacatcttta

SEQ ID NO: 75840 - DNA, 394 bp, Glycine max
tcacctgcggcatgcaagctcgttaaagaactgatgaaatatcaagaacaagcttgtacgcactatcgttcgcgtgtatgatatccactccacaaggtttgaagtagaggagagcttcaaccctataacgcaacgtggcggacaaatgtgggcagtaaacttgaatgatcgtcattgtcaatgcggaaggtattctgcgcttcactatccatgttcacatattattgcagcttgtggttacgtgagcatgaactactaccaatatatagatgttgtttataccaacgagcacatcttaaaagcttactccgcacaatggtggcctcttgagaatgaagcggctattcctccttctgatgacgcatggacacttatctctgacccaaccacaatt

SEQ ID NO: 75841 - DNA, 386 bp, Glycine max
  unsure (1)..(386): unsure at all n locations
agctntctacatcgaccagttaacatcagtcatagcttcaaccgatgttaacgaacgtgcggtggcatttatgcaatgaaatggagatacttaacatcagatctagcaaaaccgacgttaactacttcatgttaacatcggttatataaaacaccgatgttaacatgatgttaacacgaatatgggaacatccgtccgtgcaaaaccgatgataacttgatcgagataacatttgttttgagggagccgatgctaaagagttgtatataacatctgcttgttagaaacccgtgtaatgtgtctgatgttaacatctgtttatacaaaaccgatgtatagagcattagtatcatcttgaatccataatagatcatgttgcagcgtga

SEQ ID NO: 75842 - DNA, 312 bp, Glycine max
  unsure (1)..(312): unsure at all n locations
agcttgttgttgttgtggacctctatgtgaacaacctctctaagagttgttataaagacctacaaaagaagtgttagtgggaccagaattntatggtctctatccacaaagctgatttgaacctgagccacccctatagccttggtaacttacttaaaagttatgttgagttctggcttggttctacagataatgggccttctcttctttnnttttcatcaccaagtactgaacattggtcattctgttggttaccaccacagaaatcacatctcaaaatttgttgaacttggtgagcttgatgtgctttct

SEQ ID NO: 75843 - DNA, 387 bp, Glycine max
aacttaagcgaccgctgctgcatcttgtgactcctggcattactatatttctagcttctaagaaagtggacttcgacaaatattctcagtcagtgacttgaagaattatgactcttggagatgtctattacgaaatcactcactgtgtatcgatcaccatgtcgtacgtatagattacacatcatccggatgtgactacttcactctcgaattttgaaaacttaaaacgttatcataagctcttattctattatcaagtatctgtgtctaccgacctacacgcagttcaattaatactttatacatctgtgtgcaacacatatttatcaccttgaggatcgaaatcctgacgttttaaaacactatttctcgactactatcttgcgc

SEQ ID NO: 75844 - DNA, 381 bp, Glycine max
  unsure (1)..(381): unsure at all n locations
acctccagcaagggcatcagaccccctacttatctagccttcatcaaaaaatactggcgctccaggcaagcgcatggcgaaaacccnctncagcctgtggatggctggcaacaggcaacagacgcaccgccatcacctctagaagtcacctctgctcatccacanaaaggtttgagtattgcctacaccacatggccgaccaataggcgaccaaagtcaaagccaaatgtcnncanagtactaggtcagtgaccgacaagtcataatgcgtncagctcaagagcgttaagaagcgctactangaggcaacctactaccttntgaatctatgcttgttatttgatcaccttgtatagtaggacgcacctagttgcttatgat

SEQ ID NO: 75845 - DNA, 449 bp, Glycine max
agcttctcgaacgtgatcaatatcattctttggcatttattgaaagatgaagctgcggtgcgtgatctgtattggagtcacccaaatgcagtaaagttatgcaacgcatgtcatctagcgtttgttatagacagtacctacaaaacaaacaggtacagactcccactacttgactttgttggagtgacaccaacggcgatgacattctctgctggagttgcatatctggaggctgagcgtgataataatattgtatgggctctggaacgatttcaggcctattttaatacacgatcgcctacctttgtattgtactgacatagaccacactgataatgcgtgaaactgtgttcccgagctactaatttgtgtcatgttcatatcataagatgtgaagcgaaggcatatttatcgggaataatgcgtggatatgaatgatactgggtctt

SEQ ID NO: 75846 - DNA, 400 bp, Glycine max
  unsure (1)..(400): unsure at all n locations
agctnggtggctagttcatggcgttaatgctccaatacttcataaggttgcccttaagctacttgtgaaaccttgttcatcttcatgttgtgaaaggaattggagtacatattcatatatccattctttaaagagaaacaagatggaaccacatagagctgaagatttagtatttgttcatagcaatctatgacttctctcaaggaatactccacaatatcatcaagaggaaacaaaaatgtgggatgtagctggagatgaatttggatcacttgatgattgtggtattcttgaaattggtagtttgtctttagatgaaccacagttagagggtgtctttntcaatgatgattgctagtttgtggaattcttgaagagttgaagttgctaattcatcatc

SEQ ID NO: 75847 - DNA, 451 bp, Glycine max
  unsure (1)..(451): unsure at all n locations
atcctctnagtcacctgagagacatagcaagcntttggngtnaaacatgggaccactcatttatttcaaaaggaagtcatatctagtcaaggtctgatagaccatacaagtttcctaacgatttctaattatgtgggccattaagtctatcatatgctgacaatagccgagaagcccatgaatctcttcgggggcggagtatgtgtctgccatcgccttggccttggctaacaataggtgaagttcttgactccctgtcaaggtaagagcaaaccgatccatccacatggttgcctcttggtgtaaagagtcaatcacccttcctctaacctctttttccgcgtatacttgggcatactcattcgcgagtctatgctcgtgggccgggctagacctaactcttctggtacttgcgatgatagtacatgttggctctgtctccataacgctg

SEQ ID NO: 75848 - DNA, 225 bp, Glycine max
tacctccgaacagggatatgcttccttctattggtaggggacaaaaacctctggttaataaaggatgcactcccataataacttgacagcctttggtggcaaaggcccttttttttgactggacctacctcccaaggggaattacctgaactaacccgctcggggaccttttgtccctttgctttcgcccgcggccgttcagctctttttttaacgttataaccc

SEQ ID NO: 75849 - DNA, 470 bp, Glycine max
  unsure (1)..(470): unsure at all n locations
agcttccatcaagtggtaatcagagcacaagagcttcttgtaggtgctccttanacctccatataattnttgctttaccttctcttccattgttgtttcttcatttttttctccatgtatctcctcacatgtcttgtactaaatgtttataacatgattctttagagtttccaccgattaaacttgctatagaagctagattcgattttctatggttcaaataaccatgaattgtgttgagtttagattcccttgagtcttgtctcgttatnttttgtggctgagacctaaaccataaaattcttacaaaaatattaaagtagaagataacctcaaaaatctagagtgacttgttcacctattgtagttntgtcatagaagtcatgtctagtcatgaaacttgtcacatatgatntcttatgtcgggctgaaatttattttcttgttctttgtctaactcattgtcatga

SEQ ID NO: 75850 - DNA, 422 bp, Glycine max
  unsure (1)..(422): unsure at all n locations
agcttaaacattcaatntcgagcgtctcgatatattacgggactcaatcagacatccgagtaaaaagttattgtcgtttgaattggctcataggttgaacattcaatttcgagcgtctcgatatactacgggactcaatcagacatccgagtaaaaagttattgtcgtttgaataggctcatagcttcaacattcaatgtcgagcgtctcgatatattacggaactcaatcagacatccgagtaacaagttattgtcgtttgaatttgctcagaggttcaacattcaatttcgagcgtctcgctatatnacgggactgaatcagacatccgagtgaaaaagtattgtcgttgaataggctcatatgtcaacattcaattctagcgtctcgatatgtaccgggactcatcaacattcgagtaa

SEQ ID NO: 75851 - DNA, 384 bp, Glycine max
  unsure (1)..(384): unsure at all n locations
agcctgcttaagtagcttctatggaggctagatctntgagcttcaatgaggtccatcaatggtgattgtccactatagagatgcaatggaagataaaggagaagaggtgagaggaggcgccatccactaagaaataagccatggaaggaggagctacaccaccaagaaagtgccttggataagaagcttatagaggaagtttcaatggagaaaaataatgagatagagagagagtgatgaaatcctacctttcagggcattggatagaagacttcaagaagattggactatagatgcaagagaagaccctatggttcttatgagccttaaggtagaatttgggcccatgggctaagtgtgagcccacttatctntgtacatatt

SEQ ID NO: 75852 - DNA, 475 bp, Glycine max
  unsure (1)..(475): unsure at all n locations
agcttgtgttatangaagcttatggtgtatntaatccaagtcagaaaataaaaaatattaattatttttcaacagtatttttctcattgaatattgttgctcctaaatattaattaattcgaaactataatataatgttntataatgaggacattntaataaatagaggggctcactaattaatttgatcttcaaacttcaagttcttgaagacgggcaacaagatcgagcaaataaagataatgttcagacaatagaatagcgccccaagcaattgcaagtaaatttggaggaaaccaacaaattcaattcatactttttttttattattaattntatatgataaattaaaatagtatgacttatgttgaatgagaacgtttcttaattatttttagagtattttacgaagctgaatttctttgatggaaattttnttataaaataaacctatctctctttaatttaatcattt

SEQ ID NO: 75853 - DNA, 482 bp, Glycine max
  unsure (1)..(482): unsure at all n locations
agctgtgccgatatacgtttcaccgatgaaaggatcatagtgggttttatatgaggaanatatgattatcctgctttgatgaatatgaagcctgtggcaaatggagagaataagaaggagggagaaacccatgttgtggctgtcgttcctacatggccaaatttcccattagcccaacaatatcaatactcggccaatatcaaatccttctcattacccaccaccctaccagccaagagctcccaatcatccacaaagaccatccccaaatcgaccacaaaatccacctgatgcacatacaagaccaaacacctaccagagaaggaattttccagaagagaagcctgtagaattcaccccaattgcaatgccatatgttgacttactctcctatctgctcgatactgcaatggcacgtataatgcccacaatgatttcttaacctccattttccagaggatacaaccctaacgtgacatgtg

SEQ ID NO: 75854 - DNA, 482 bp, Glycine max
  unsure (1)..(482): unsure at all n locations
agcttgtggagcttatgtaccatacgttccgtanagctcaacacatacttaaatcatggccccccctcatgctcaaatcgtcgtaaccctcaactaccacccacgaactcagccacaatgcttagaggggtagttcatgaatattgtgtgactcccacgacaaaagacgtgcatatatagaccgagaggggagaccccaggggcattntcctgatcctagtgagaggcgcataaacaccttatagtaccactgacttactcattggaatcccgtttgtaggtaccttctcccatctcaacaccagagatcagaaattccattgtaaagaagatgatgagacagctcaacaagaagatatataatatcacttttctttacaaaatatatagatacacttctnttacctaattacctacacttatgtcttntatcaatttgtatgtagattccatgatttccacgaaatcgaaaaataataatg

SEQ ID NO: 75855 - DNA, 432 bp, Glycine max
  unsure (1)..(432): unsure at all n locations
agcttcaacattcaatntcgagcatctcgatatgttactggactgaatcagacatccgagtaaaaagttattgtcgtttgaatntgctcagagcatcaacattcaatatcgagcatctcgatacgtgacgggactgaatcagacatctgagtgaaaagttattgtcgtttgaatttgctcagagcatgaacattcaatttcgagcgtctcgatatattacgggactcaatcagacatccgagtaaaaagatattgtgcgttgaacttactcagagcatcaacattcaatttcgagcacctcgatatgtgaccggactgaatcagacatccgagtaaaaagatattgtcgtntgaattggctcagagcttcaacattcaatntcgagcgtcttgatatgtgacgggactcaatcagacatccgagtgaaaagt

SEQ ID NO: 75856 - DNA, 363 bp, Glycine max
  unsure (1)..(363): unsure at all n locations
gacctctaagcacctgctgctgcagctatcattanattagatatatanaatatttgtgtgatcacgttatagctgttatacctgaatgcactctgcaagatgtgatacgcttctagttcaaatatgacaatccttcttcttaaatcttaatcaaatcttcccatctctctctctctttgatgtgtctagtgatcagntaaatagtaacttaacagacttgcttctgagcttcactttatatgattatttcatcattgatcatttgtatccgacaaaacagtttttcctctcactggtttctatntcattttttaaagttaagtcgcaaatctctttagtatctaactgccgcttcaccaatga

SEQ ID NO: 75857 - DNA, 369 bp, Glycine max
  unsure (1)..(369): unsure at all n locations
ttgaactttgagttgtgtctcacaagactctcattcatcaaagttaccacaagtgttacacatgcttctatttatagactatgtagctcccttgaaaagctttcttaagaaaactttcttgagaagctcctgtgtaaagcttgagcttatctacacacactcatctaaaactaagctaccttcttgtcacaatcatgaaaactcaataaaaatggtgcctactacatagactactcataatgccctgaactaccatgctaaaaccctctactacttgaatggccacaatactacgcccaatagtanggaacatctattctcatatatactagaggagtggatccaccttaacccgcggctcaaaatcta

SEQ ID NO: 75858 - DNA, 310 bp, Glycine max
gataatctctggaaatggaaaaactaatagtaaatgatttttacacaagccatactgacattgtaattatatgatatgatgtgcagtgttttgaacagtaatgtagtaacattttttcattttaatacatctggtctgattatttactggtctaaaggctaagtgggagcgaaatccagtgtagttatatgtcccattgatcaagattaccatatgatgtgtgcatttactgcgtgcccatgtgaacctactatataataaattctaatagccacccacacacactctctcatcgtatgtagtcaatgct

SEQ ID NO: 75859 - DNA, 403 bp, Glycine max
  unsure (1)..(403): unsure at all n locations
agcttgcctcatagaggtctangaaggacaaggcagctctaaagaactatttccgctccggagtatgacagtcaccgctttaagagcgccgtacaccagcagcgcttcgaggccatcaagggatggtcgtttctccgggagcgacgcgtccagctcaagacgttaaagaagcgctactaggaggcaacctagtaccttttaaatttctgcctgctatttgatcactttntatagtaggacgcacctagttgctcatgatcctgngaatntaaataaaacaagcgcaagctcggaaggtagtcataccttacaaaacatatatatgtatgtttangtagtgaaaataccttagatatacatgtatgttaacaaaaaaacacttcacanaatatatatatgtatg

SEQ ID NO: 75860 - DNA, 467 bp, Glycine max
  unsure (1)..(467): unsure at all n locations
atccttaagtcacctgcggcatgcaagctnggccaaaccanaatcagcaactntaggacagatgttccagtccatagagaatatttcctggtttgatgtcataatagattattctttgttggcactcttcatgtaaataagcgatgcctcttggtgtgccaactgcaatctcatgacgcttttcaaatgataagaacatgctnttacaaaacaagtacttctcaagtgtgtcattcgccatgtactcataaaccagtcctctgaagtgactntcannagcaaatccatgtagacgaactaaattgaaatgatgaactttaccaatagtagctacttctgccataaactgctcaataattctcttctcagaactcccacgtagaaccttcacagctatgctggttccatcactaanacttcctttataaactgctccggaacctcctgaccccaacaaagagtaatta

SEQ ID NO: 75861 - DNA, 485 bp, Glycine max
  unsure (1)..(485): unsure at all n locations
agctngganacnctaacagagcaaccaaagaaaaagcttgaggaatcttatggaacagctagcaatgttgttattgcttctggactacacatgtgagctcatttagaggaaagggatgagtttattgcaattgaggttaggatgaacatgtgtagggatccttagagaatcaaattggggttaattntggggtattntatgcattttaattntgcctgtacaatgataaccacgaattgttcatgtttgacgggtcaattgatgccctgatgtgaattaattgagtgtttggctttgaatgttagaaacctanaaatttgagaattcttaattctttcatgttttcttgaaattgatngagagggtttgtttcctatgatgtgatcacatattctatgctattaaccgaaagaataagtgaatgattatatgccttcaatgttggaagattctattgtggtgtgtgtggtgtgnatatatatata

SEQ ID NO: 75862 - DNA, 481 bp, Glycine max
  unsure (1)..(481): unsure at all n locations
ctgcagcttataaataaccactttaatatttntatataaataataaaatttatcggtctaatctttaattgtgtaatattatcttaataaaatttaaatatgtnttttatcctagataaatttcaaattntattnttggtctctaatattttttcaactttttggcacctaataaattttttattttttgggtacaaaaataaaataaaaaattaattatggataaaaatattagggaccaaaaagaaaatccaaaaatttatcaaggcccaatacatatttaaaccttctaataatatatgtcaactctttcatgaattaaactttcataaatatataatctaatattagatatttacttatattttaaataacagattatattttaatataaagtgctagaattattttatcaaataacctttntgttggatcaagtggcctcggaataattaaaaaggggggttgaataattatgaat

SEQ ID NO: 75863 - DNA, 418 bp, Glycine max
  unsure (1)..(418): unsure at all n locations
agcttgtangattatggngtacccatctcatgtggtcttatgtggcggncgggcgatggtgcataacaagtnttncatatccacaaagcgcgcataaacccaccatccgctgttgcccacctccatgtgagctcacgaactcccacgtagcccatatcctccgttctctcaacaccgggatcccatcgatactgccaagctttcaaaacatccaaactaaacgacatttaaaccgcacaagctatcacagtctagcaaaacatagcataggcagaaaactctgtcaaaacaccaaccaaatcacagcttttcttacttaaagaccccagtaacaattccttcgttccggttcattaaccattggatcgacttcgaatatttactggaaatctctatacttaaaccacattttgaccgt

SEQ ID NO: 75864 - DNA, 350 bp, Glycine max
agtctacctgctgcgatgcacctcaaatgccgcgtaatgacatttctgtacaacttttagaacaccatatcgatgatcatgtggatttccaaaatcaatccgtatcctcagaaaacgacaaggataatctatttgggggtcactgtagcatggaaatatgaccttaccctttaagaacaatctgtggctactatgagggcttatgtgcaagataattcattctgcactcccgctactccgactatttgatagcaaacaggtcgaatgatacatctgaaataatgtcatgatagcttaggacatcaagtgacatacaaacaagctagcgacatctcatcacctgaaggtcg

SEQ ID NO: 75865 - DNA, 300 bp, Glycine max
ttgacgttgcgcgatctgaagatacaatgtgtacggatctcatagagagatcttaacgtgcgtatatcttggggatggataatctacataactcccactagttattgagaaaacaataatagccgcacatagattgttatttgccgcgctagcatcaatatataaaacatgtgatatgcagtgtgtataaacaaatattctatttgcatacaaatgtctcacgataattagaaatcattgacgcggcttatgttgcagagaactgattattgtaccaaaggcactgtctcatgtacttga

SEQ ID NO: 75866 - DNA, 360 bp, Glycine max
  unsure (1)..(360): unsure at all n locations
agcttgagcaacttcaacaacatcaactttttactctgatgtctgattgagacccgtaatatatccagacactcgaaattcaataccgaagctctgagcatattcacacgacaatacgtttttactcgtatgttcgactgagtcccgtaatatatcgaaacgctcgaaattgaagaccgaagctctcacgaaattcnaacgacaataactttttactcggatgtctgagtgagtctcgtagtatatcgagacgctcggacgtgaatgtcgaagctcttatcacattcacacgacaataactattttactcggatgtcatagtgagtccncgacaatatccagacactctaaattgattgt

SEQ ID NO: 75867 - DNA, 229 bp, Glycine max
  unsure (1)..(229): unsure at all n locations
agcttaaggatggaatacttacttcgtggtgatgaattaaagcgcacaacggaatcgaagaatgcgaanagtagagatcctatgggtgcaaactcgtaaattccgtgggtatggcttttgaaaggggggaaaagaagtttttgaatgcaaaaacgtcccccctttcgtcacttttatattttggtgcaagggttgctcgcccaagcgagctaacctgcacttatttttt

SEQ ID NO: 75868 - DNA, 421 bp, Glycine max
agctcgccatcctatccattctaattgtcaacactttatgaaagaagataattagcatgcttgagcaacaattattaattatacatgctatctccctcacctactctcatccatgacttgtgaacactcagaaacttggaagttatctaacaataactaacaggtgcactatccaacaaccaaaagaaactcattagaaatctcacaaatagttgaatatagattgttggacttgtaacaatatttcatcatgtatattagtaggtcgaaaaaaaacatgatgaagacaatgctaacagcctgtacacattatgcaccagcttcttccaagaaagatgaagaacattatctatgacagcaaaaagaacatcttatttattgtatacattatgcaatttgacatctggataataattggtcc

SEQ ID NO: 75869 - DNA, 371 bp, Glycine max
  unsure (1)..(371): unsure at all n locations
agctntacaatcggacaaactggttactatacaactactatgtgttttcttttcttttcttttaatctctgttcccatattatcacaagtatttcttgtttgtcatatattaaaaaaaagtaaggaaaattaatactgtaaattataaacacatgccatataaaattgtgtaaaaaataaataaacgcatgccatataaaaacacatgtcataaacaacgttntaaattgtggtctctggtcagcagccacaataataattctgcgacccaattttacctacgacaactataagttttacactacttaccacacaatttaaagaatatataatatagaaaaacataatagcgtgtaaacgccactacactg

SEQ ID NO: 75870 - DNA, 418 bp, Glycine max
  unsure (1)..(418): unsure at all n locations
gtgcaacgggagaatatcatgganaaggatctcctcaatttatgaatgactaaacaatntcaatntaagtgaataatggtcattgaattacaatttatggttatgatgaattctaacaaacactattgcntcattttcacatcatttttaactcacattaaaagtatcactctatcactctcatagtttgatgttccttgaagaagtaccaattaccaatttgtccacatggctttacttgatcagaaccatggctgtgtcaaacctcaacatggtgagaacaaccaaagcataatatgttggcacccaaagagttcttcttccattcacactcgtatccactcttctaattatgcacaacaatcttcccatgaaactctcagacaccatgatgaccacgatttggaacaaatacaac

SEQ ID NO: 75871 - DNA, 325 bp, Glycine max
aagcgtatataatttactcctctgaaactgatctaactgatgcgaagctaatttaagttcatgacagaagcgtttttttctcttcttcatatggtcttctcccatgagtgcctatggagaaacttatctcaccaggcaactaatatcagcaggcatggatgctcaattcaaaagacgttgattatgtgtgttaacagcacacggtccttcatttggaaagcaaaatacgaaggcagagtgattcccacaaggagagaagtctcacgaggaccatggatgatagacatgatggacccactacaaccctattatgatttttggcctc

SEQ ID NO: 75872 - DNA, 284 bp, Glycine max
actttattcagagagaagatcagacactctttgaagtattcaaagagttgagtctaagacttcaaagagaataagactgtgtcatcaagagaattaggagtgaccatggcagagagtttgaaaacagcaagtttagtgaattctgcacgtctgaaggcatcactcatgagttctctgcagccattacaccacaacaaaatggcatagttgaaaggaaaaacaggactttgcaagaagttgctagggtcatgcttcatgccaaagaacttccctataatctctgg

SEQ ID NO: 75873 - DNA, 383 bp, Glycine max
  unsure (1)..(383): unsure at all n locations
agcttgtgactgagggtggtaagatnggattacttgtcttagttgcattgatagactactanntagtattcattcattttctaagttacttctctttcatgtatatgtggatacaagtgaggttgtgaggagcccgcacgatgctcctggtcattggttggtaactgctgctaagcttgtgactganggtggtaagattggattacatgtcaagtttgcgtcgatagactactagcagatattcatgcattttctaagttacttctctttcatgtatatgtgaagagaagagacaaatattagtagattgcatttgttatcttttcttttgtgtgaagatacagatcacatgtacatatgcatatgcttaatttcttatgact

SEQ ID NO: 75874 - DNA, 473 bp, Glycine max
  unsure (1)..(473): unsure at all n locations
agcttcttaaatattgattcaaataaaatcaattgaatatgaatataaagcaataataaataaaggagattaagggaagagaaagtgcaaactcagatttatactggttcggccacacccttgtgcctacgtccaatccccaagcaacccgcttgagagttccactatcttgtaaattccttttacaagttctaaacacacaaggacaatccttcctttgtgtttagaattcctttacaacaagagactcacggtctcttaatcccttagagaatgagaagaataagaagaataaatctctctagaaagagatgggatttacagattgagcactcaaataattccttaatgaattgcaattgaattggccaaggaattcttaagaggatanaatgaatttgctctttgagaggatanacacttgttgttctgaaaactctcaacacattcgtgtataagtcacatatatatag

SEQ ID NO: 75875 - DNA, 481 bp, Glycine max
  unsure (1)..(481): unsure at all n locations
gctntatattactatactatgtatttttctagcgtgtattattccttgatagaatgagttcatattcatagaatttgaggtggagaagatatatattcaatgcatgcacgtaccttatgagtagcatatggtacatgcaaagatatcatagacttgactatgattaatcatctaatctgatatatttgcaaataattaattaatcaccaagtaactagataagatgttagtttgcctgatagatgagtgataaccttccttgtaggtacatatgttcgtttagtatatggtggattgtagatgtttgccaccgccatcttgagaacagattaataagtgacagaggaacgtaaggtaatatattactgagaaccgtatataatgattagttctataacagacttgcgtatgctaatgaaccttataatgtgaacattaatcttcaagtgtttggcacatataattctcgagtcgaacacaa

SEQ ID NO: 75876 - DNA, 412 bp, Glycine max
  unsure (1)..(412): unsure at all n locations
agcttatcgaatatatctctatagagtgtacaacatctatgagaaatggactagcgcatcaagacaagcttcattgtgggagaatgctcatgaacgtaatgctaagcgtgttctaaatttgataatagagatggaaggcttatgggttaaacttgcgcaatatatgtcaacacgtgcagatgtgcttcctgctgcctatatacagtttttgaagcagatacaggactctcttcctcctcgacccttggaagaggtttttcttcaatattttttattntaagaatgatttactttatgttatggaagaaaatatgctcttaggagacaatttacattatgtggctttaataaatagagccccacatattttttgagcattgtagatgatatttgttcattaacctattacaag

SEQ ID NO: 75877 - DNA, 465 bp, Glycine max
  unsure (1)..(465): unsure at all n locations
agctnntgcagattggtcttcgccagtgaaaggatctatgtgggtatgaaaaanaaggcaaatntgatcatcctactaggacgactgaganaactgnggcaaataaagagggtgaggatgagggagaaacccatgctgtgattgccattcctgtacggccaagtttcccaccaaacccaacaatgtcattactcagtcaataacaaacctcctccttacccaccacccagttatccacaaaggccatccctaaatcaaccacaaagcctgtctatcgcacttccaatgacgaacaccacctttagcacaaaccaaaaacaccaaccaagaagtgtaatttgcagcgagaaagcctgtagaattcaccccaattccagtgtcctatgctgacttgctcccatatctacttgataattcaatggtagccataaccctagccaaggttcatcaacctccacttttctg

SEQ ID NO: 75878 - DNA, 408 bp, Glycine max
agctagtagaactctcttggcattattagcacatgttattctcttagatccaatgtttctatgttgtgcaacacgcctattgattttggaagattactatctttgaatatctgaagcttaagtacgtcaaaagggataaatccccacaatttttcgtgagcggaacataattatacagtgaatcgccttcaaaatgaagtaccctcaataacctgtagtttgtggcattctcttcaccgaggattctgataattcttcatcactaaaaacatgaagtgatcgaatgtttgagtctacaacacttcccaccacattgttggaaccagatgctattgttaggcgacgaatcataccacttcttgactagttctcacgctcactcgcagaatggcaaagcttaaatcttat

SEQ ID NO: 75879 - DNA, 486 bp, Glycine max
  unsure (1)..(486): unsure at all n locations
agcttganaagagttatgagattgtaaatcctatcttttatatttaagggagcttagcggaaattaaataagagggacagagagggaaataaaaaatgtgataaatgtcataaacaatgtgatacaaagtatagagagaatgagattgataaagaaaatcaaagtataaataaaataaaataaaaaagtgagtgcatatatagttataatgcattttgagcttgaaaccaaccaaattgatgataaagagtgaaagcagcaggctcaaatgctccttcataactaaaactaccaaacatatttacttaattataagagaaaaaatatttgtggttgaccctttagaactttcaaagcaaacttatcaagggttagcaattcttatctaccaaacgaattagcacgttttatatgtnttggctattcctttcatacgtatgcaacacagcatagatgtagagtagttgtaaaagacctaatctgagt

SEQ ID NO: 75880 - DNA, 338 bp, Glycine max
  unsure (1)..(338): unsure at all n locations
atttaatccaaatatatctggcagcatttattaacccacacactctaactatggcaacatcatcagaactatcccgacataattcagttgccttgacccgaaaagtaatggcttaaagaaataccagaggaatcttcctgcagtanatctaataaaatgtgcacgtaatanacttgatggcatagntnggcagcgctcaatcnatctccagaatattttaagaaaaaactctgcaataggtggagctttgtgatcttcgacagtcaatagcagatactcttgctcagtgtcaaatccagatatgcatttcttagaaagtcatcatgcttttctctcta

SEQ ID NO: 75881 - DNA, 380 bp, Glycine max
ctgacgcgtgcgagctctcattactctatagaagctgctcaagcacgcttctatcacatcgataccttcctaaagaggatgacatggaaacttagaagtgactatttgccaataggaattggagtcactctaaatatggaggattttcgtataactcatgaagtgagagagtacataactagagtatcatatgctagcatagtaggagctattgtatatgacacgatcttcacatgttctaatatcattaatgcactacgtgtaacaagttgatatcaagaaagtcttggaggagggcattgaaagtgggtaagactattcttaattcttaagaagaactaacgactatgtctctattatggacacaccacattaaaaac

SEQ ID NO: 75882 - DNA, 269 bp, Glycine max
  unsure (1)..(269): unsure at all n locations
tttcgcanaggtttcgaccgttcttcgacgttcttcattcgttcttcatcgctcttcgatcttcaacgggtaagtacctcgaaccaagcttttcgattcattctatgtatccgtggtgggccacattgggtttcgtgtatttntattctcgtttatttactctttatacccccttctgacgtgcttaagccattttatntaagtcatttctcgcttaaactaagaatacaataaacttccaccgatcgtttgaatcgattatccgtaac

SEQ ID NO: 75883 - DNA, 383 bp, Glycine max
  unsure (1)..(383): unsure at all n locations
tgtcttcacaaataatcgncacacagcttatccctagcaagattacccatcatatctccccataaccccatacccacgatatttaagagagagagaagtgcgcccaaacctgaatgtgcgaagtcccactcgtagccacgcacttcacgaccccgataatgctctcctttcacgatttgtggcagaaatgagcaccaaaggttgaagctttgtgtggagcttcaatggagaatgaacaagaagagaatggcaacgtgagggagagagagggctgtctgaaatttctgttctgctgagtgaggagagagaaaagctgttcggtcataaatataagggtttgctctttttctattatttaattcaagctctgccacatgtcccta

SEQ ID NO: 75884 - DNA, 381 bp, Glycine max
ctgcacgcgtgcgagcgcgagcatgtctgcacccatgatacgcggatatactttacagttattcgcgcgctctcgtcatacagaggctgttgtccctatgagtaccatagaccaactatggtcattctgcacccatgatacaacggtgataccttatggcgaatcgcacacttttgtcatccatgaggcggcgggcccgatgacaagcacagaccaaacttggtcgttactgccccatgattcactgagaacctatatggtaattacacctcattgcatacacacgccgtgggcacgatgataaacacagaccacgttttgtcattcccgacccatgatacacggagatccatgatggtaatcggcgcctttgtcattcat

SEQ ID NO: 75885 - DNA, 456 bp, Glycine max
  unsure (1)..(456): unsure at all n locations
gagcttcagaccanagcaatacataatctaggtatctaatactccctcaatctagcggattttcaaggtttgagacacgataatgagaatggggtgattatggagcacactctcatctcacacaagtctataacattactctaaacttgctcaaactggttttacaactaaaactccaccgaatcaaaatatgacccctcaacacccaatgtaccctaaagatggctcttgatttcactgtggacactcattttcctcatttgctcagcccaagttttcccacaagtcctagatgacattgtagactaagattaactcactttaacctccgattaccactaaatacagatttaacttttcaagcccttaatgcatcacactttttcactgatatcactacattctcacatttcaaccctaggtaactctaccttcatcttatcagtttccatagca

SEQ ID NO: 75886 - DNA, 317 bp, Glycine max
cgtctaattactttccttgctccattgaattgttcctgtcattgtgatcgcagattaaagggcaggtgataatcttcaatctttcatcgtcttatcaataaagaccctttcatatcaagttctcaagatcctaatgacgccatcagaacttcatgattacttgaaacttttatggcttgaacattcatccaatgaatcagtaagtgaaaaatgaatcccagagtatctatagcaacagactcttagttttaacttcacttcttaagataatcatcttccccatctaagaccatttcaacaatccttatgcttacttc

SEQ ID NO: 75887 - DNA, 459 bp, Glycine max
  unsure (1)..(459): unsure at all n locations
agcttagctaatggacctgngtgtngcctcatttcattatatcttccgcaatactcatcagctctatcatatctaataattttcacatttatgtctaattgctcttatacttcattgtagtaaatatctaacgcatccattgcctataaaatctcgggcagtaagtagacataaccgtaacgtgaataatcatcaataatggtgataaagtatcattcctttccgagagaactaacatcaanaggtccacaaatatgactatgcacaatttcaagaagctgagtgcttcttgtagctcctttctatgatgaattgcttgtttccctaatacaacccaccaaatatttagaccgtaaaattaaaaaggaagaatttattcttagtaatctttccatcctcttctagaaatgtgacctaacgttatgccacaagaagagatcgtcactcactaactatgtt

SEQ ID NO: 75888 - DNA, 471 bp, Glycine max
  unsure (1)..(471): unsure at all n locations
agctngagctaaattaggctaaactntcgtaagctacttgagctgagtctagtcttagatgagggatctgcgaacgaaactcagtttaagttagtctaaacctaagagggctttctaaataagggatctacggatgaaggttggattaattcggcctgacaagggatcaaaggtttagtaatttaggctacaacatagaacacaagagcacgattgattagagaaatatatttctatgcatcaacttgtttgttagaaagacccaacatttctacctactgctgtcattttatttaccttgcattttatagtttttagcataaaagtttagtttaaattttgtttgaaattatcactcatacatgttctctcaataatgcttcaattctgaacttaattcaggctaacattagttccctgtgttcgatactcggattcatccattttaaatgttaaatacttaatgatctg

SEQ ID NO: 75889 - DNA, 301 bp, Glycine max
  unsure (1)..(301): unsure at all n locations
cttttaacatggatgtctgattccgaagcataacatatcgtgacgctcaaaattgaataagagaagctctcgagaaattcaaatgtcataaattntcacacggatgttcgattcggggataaatatgttgagatgcttgaaattgagagatanaagctctcgtgaaattccaatggtcataacttttcactccgatgtccgattcaagacacttgaaattgccaacgggagcttntagaaatcgaatggtcgaactttcacacgatgtcgattcgggaatatattcagacatcgaattaca

SEQ ID NO: 75890 - DNA, 424 bp, Glycine max
  unsure (1)..(424): unsure at all n locations
agcttcanacttcattgcatccaaccactttcttttttcttcactttccatggcctctctaaagcacttatgttctccatcatctgttaagatcacatactcattagtagaataccttttataaggttgtctctccctgttggacctcctgagttgaacttgaggtggttcggtagcatcaccaagattttcatcttgtgacatgtcatgctcctcttcatcatcattaacaggaacatctacctcatctctaggttgctggacaccaacatcactataaacatcaatattcagattcttgataggtggctgaacttgttcaaaaatagtcacatcattgtcttccttgggtgtagacttctccacttataaatgtcttcaacgattggtcttccgtgaattttacatcgcgacttctacaagc

SEQ ID NO: 75891 - DNA, 322 bp, Glycine max
  unsure (1)..(322): unsure at all n locations
atgacacctttggtaaaataacaggtgtaagaacaaggctggtctggaaccatcactgctcacataagaggcatctgacctgtgctgcatataaagcaccaaatcggggaagccgaacgagtaaaacttaacgagctcaactatcttcctgatgtgtcacactgctangtgcggacctgtgaccaaaagagctttggctcaggaactataggacaatgtaccaatgcatctcattttctgtttagtttgtgttttgaactgtgatggatatgagagaggaattatattagtngaatggctatctgtccatggccaagcatga

SEQ ID NO: 75892 - DNA, 485 bp, Glycine max
  unsure (1)..(485): unsure at all n locations
agctngctaacccatggaagctcctaatatctcccacactntttgaggtgggccattcttagatggccttgattttctcaaggtccacttggaccccatttctaccaactacaaaccctaagaaaactatattatctacacaaaaggtacacttctctatatttgcatagagggtgtttttcctaagtactgaaagaacttgcttgagatgtcctaagtgatcatctaggctcctactgtatactaaaatatcatcaaaataaacaactacaaatctacctatgaaatcccttaagacattatgcataagcctcataaaggtgcttggtgcattagtgagcccaaaaggcatcactagccattcatacaaaccanacttggtcttgaaagcggntntgcactcatcacccattttcatcctgaattggtgataaccacgtttaagaatcaattttgaaaagatattgacaccataccactcatca

SEQ ID NO: 75893 - DNA, 360 bp, Glycine max
  unsure (1)..(360): unsure at all n locations
tgcttttacatcccattggtgccactcaaagtcaaatgagcaacttatgtccagaatatacaaagaatntttcttagataaaggagaaaaagtctatgtgtaatcaattcctttttttcccttagtagtgagtcttgcctttgaacctctcaatgtgactaatgaatcctttttggtcttaaagacccatttacagccaatggcctttgccccattatgcaactctaccaggttccaaactctgttactctgcatggaattcatttcatccttcatggcatncataccataaattgactctttacaactcatggctttgataannagttcnggatcattttcagcttccatattatagtt

SEQ ID NO: 75894 - DNA, 346 bp, Glycine max
agactttcctctaattggctcttataggtgtttatggcgttatagagaaagagaagagagtcaagccttcattttgtactgtacttgtcagattcactcttctctattcatgaataatattttgcaaatcccaatggtgaaggtgtgcggaattgaattttgaaccatatgtctaaatttcacaatgatctatcggttaaagagtctaagatcataattttactggacaggttttgagtctctgcgggtaaaaagaaagctacgatgcgaagaacatttctcttagctctgacagttctacgcatatttccaatcgtgagaatgatctaacatgacgtgtaaacct

SEQ ID NO: 75895 - DNA, 340 bp, Glycine max
  unsure (1)..(340): unsure at all n locations
gtattcctgaaccctggcttctaatggaggacttcaattatatcattcactcatcagagatccatagagggaacttccacattgctcgcgctcaaaatatctcttctgtctgtatagatagcagccttatggactttgataccatggngggcacctctatatagcggaggaatacttaatgtggtcggcatgctaggaagaagatagataaagtcatgtcagattctgcttggagaatggctattcccaatgcattagtagaaatattgcatagcataattctgacaataaccctatgtatcttcatagttgcaaatatgctacaatgagaacttcatat

SEQ ID NO: 75896 - DNA, 474 bp, Glycine max
  unsure (1)..(474): unsure at all n locations
agctngcactggtttacatgtgatgttgtctgttgaattganaaatctacaatgctntaggctgcggagcatcattagcatgttcatgtttagcattttttttttctaaatcataattatctttcaccaaaaataatcaaatagtataacattgttgtaagtatttaactaaggtgcatatgtaagactcaaatacatgttaattaagttggaacatcctcagcatatatgattcattgcttggtggtagcatttaaatttagtatacgaacaaaattaatcagagaagctctcttgattgccacacgtgtgtggtaaccaaaggtagcaggcagacagttgagtagggtaccccaaattcatccatatagtagtaataaatacactcctaaatgtttacaaataagatctttttctttcatttttggtagacgcttcatgaatttttcttctntctcaatatttttctcttct

SEQ ID NO: 75897 - DNA, 295 bp, Glycine max
  unsure (1)..(295): unsure at all n locations
tatttacgcgaagattcttaccggtcttcaagaatcatcgttcggtcttcgctttcttcagtcttcaacgggtnagtacctcanaccaagtttttcaattcattctatgtacccgtggtggtncacattatgtttcatgtatttntattctcggtntcatctactttctgtacccccttttgacgtgctnangccatntatttaagtcatttctcgcttaatctangaataaaataaattccatcgatcggnggaatggatcacntcgtaantcagttataatgaattccgaccg

SEQ ID NO: 75898 - DNA, 500 bp, Glycine max
agctctgatcccagggacatttgtatgatatcactctcgtgtccacatcatgaaagggtcaatggaaaggaggatgataaacaatctatttctggcgattgtgtgagtaagagtacaaaaaagaatgaccacattttaactactgatgatagcctcgtacgacgacagtgtgaaacagaaagcaaacgttcatcttctgattcttctccaatgctaagtcccacaattcttttagacgtcccttcaaaaatatgcatggaggtggccaccacaaaatcaaatgactctgatgagctcgagttagcacctagtgaatagtcagaatcacacaagagttggcaatcacatgattcacatgcacgtgcacctaatgcaacctcttttccccacggattagtgtgtaaaacaagaaaatcatctttagacgacatgccgaacaccaagacaccaggattcatatttaggctccgtgttgcagtcatgctgcttctgttcttgtc

SEQ ID NO: 75899 - DNA, 408 bp, Glycine max
  unsure (1)..(408): unsure at all n locations
taatcctatcatatattcaccatgagaaagtaactactttggttaatggtatgatattgtgggtcataattggcagaacatgtataggtgttacttttatgtcataatcacaatcttctttggaattnttttttnttttaatacatcttctacaatctttgtctgctagtaataatgtggttaatgtacatagaaccaagtagagagtgcctcctttaaaaaaaagggggtttcaatgcatcttgtgatcaaatgagaaacaaccagctggttataaattgaacaaagtatctattcaaatgatatgtctaacanatngtntngctagggcaatggtttaatctcattntatctaactngctacttgctgtttgtnaataaaattatagcagaataggaatcatctat

SEQ ID NO: 75900 - DNA, 329 bp, Glycine max
ctacacacacactctctcataactaagcgtgaccttgttgagaatatccctcaccaagagacctaaagaagctagagcttatctacacataccaccctaagagctaagctcacctccttgaaacgagaagctataacttagctacacaccctcaataatagctaagctctcccccatgacacagaacatgaaatacaaaaaaatgtgcttactacaaagactactctaagcgccgcgaaatacaacgctataaccctttactactagaatgggcaaaatacgacgcccaaccaaaggataaacctattctaatatttacaaagatgagc

SEQ ID NO: 75901 - DNA, 440 bp, Glycine max
  unsure (1)..(440): unsure at all n locations
acttaaacatgcccaacacgtcatagagacagagctggtcatttgtatagttgccattgatcatgaatgaaggcccaagtggagaaagatgaaggcccagaggcactaccaagactattaattgttgctgaaggcacaaactaacttaaaggcccaagttaaatatgtttgtagttataattcttatctattggaagtttggcccaaactgtttagaaggcccatgtctatctttatttttcgttcagatacactgtacgtattggttcttgttntcaaaacaggaacttttggcatntaatanaatatggtgagagtttctctctgagttccttggtgaaccaatctcagacttatcaaggtaatccttgtggcatctaccctgactttatcttcttcattggaagtggcgtcatccanatctctgtagcctgtatcaa

SEQ ID NO: 75902 - DNA, 325 bp, Glycine max
  unsure (1)..(325): unsure at all n locations
gagcgctatataattatatggaaccatgtgctatgtctgtgctatagagcgttggtgcctgtggcctgtatcatgaagtactccgtatacatccagctatttatctgcgtgcgccgatcacatgttcaagagcatcacatgatccagacacaccattcacacatggagtgagctatcgcgtttctggctaacacagagacatgacaattaaatatggcatattctctgaatganataccacgttgcgtagacagtagctcactacatctggctcacctcgtgatgtaaaaaggacatgccccttatctatccctttatacgcgaa

SEQ ID NO: 75903 - DNA, 334 bp, Glycine max
  unsure (1)..(334): unsure at all n locations
gatgcgttttcattttattaacccattgtgcaatcgatggacatggtatatggaaatacaaaggatgttgttaattgcaattgcacaagatggttgctaacacatatttccattgtcatttgtcattgtcgagggtgagacaacagatgggtggcacattntcttgaaaaacttgagaacacatgtgacnaccacacatggtatatgcttaatctctgacagacatgagtcaatcnaaagtgcatacagatgacctgacagtgggtggacagcagacaactcgtcacatgtgttctgtattcggcacatattgccaaactacaaaaaanaacat

SEQ ID NO: 75904 - DNA, 356 bp, Glycine max
gcgctctacatattcaccaagaacaactcggttctcatcttttggtactctatataccatccacgtgatgaagtcgttatatggatgaaataccattgagtgcgatgcaacaatgtagttcttcatgacatgttcattttgaagatcttcaagacagtaacgtgcttcttacccttgagttgttctattacatacgatggcgggaaccctttctctttatccagcgaacatgttgtcttcttcattgcattacacaaccaatgacactttgaggctgctctaggcactctaagctcatcatccttattgcgtgactcatgatacccttgatttcacgtcaagtgctctatatcaaa

SEQ ID NO: 75905 - DNA, 342 bp, Glycine max
tcacctgagccgcagctttcccatttctatcctggggttatgtgatggagaaatgctcaacctgctgctaactttagaattaattgtaattattgaagaacattgtttcattgaaaaatagccgatcacgggcgctttcgtaacatatacatatcgtgtctcggggtgatttgctaatatttcgacctgttgttgaccttcatcgtcggggttcatatacttcagtctatgcggtttggcgctacctttcttttcattattttttgaccctttatggccgtacttggatacacatgctattatcttcatttcattttctttccgatccgcttatggcgcgct

SEQ ID NO: 75906 - DNA, 444 bp, Glycine max
  unsure (1)..(444): unsure at all n locations
agcttaccagaagcgccaatcagtggactttgttgttggcgatattgtctgagctatcatgagtaaagatcgtctacccactcattaatacaactagcttattgctagaanaatcgagtcatattcatagttctaatgctttcaatgttaatttccttattgtggtaatgcttcttctgatgatgagatggcttttgatctgtggatgaatcttctccaccccgaaaaggatcctgcagtgcaagattgaccacagttgacccaaaaaagtcattcgtgtccatatttttacaaaggagtacactcttttgaatggaaatgaccttctaaggagactgccttccctactagcaatgtgttgattgatattttagcccaattctattggttaagggaaaatttgcaatattatctttattgttctttagtcaaattctatcgtta

SEQ ID NO: 75907 - DNA, 304 bp, Glycine max
gtcacctgcggcatgcaagcttgcattgcattcttggttaagttcattgtgtctatgctgatagctaaagacaaaccatgttggggctataaaatactctctcctcactatgataaaagacatcatgtgaatatggtacccaacgcgtgagtctttgaagtgtctcgcgtcgatctcataaatacacatgtgatgcatcgcataactatatcctactcattcatcatatatcctctatgatagattgtcgaagtattgacaatcaaaatttttattctttggaacatggggccgaaccaagtgc

SEQ ID NO: 75908 - DNA, 333 bp, Glycine max
  unsure (1)..(333): unsure at all n locations
ttcttgatgtggatggtgaattatgtggaagtttgctgaacttagntgaaattatgagatttcaaattttacctaaacccatcttagtaaaatcgcagtctcggattcgttaaatcgttgggattgtcttcacaatgtcnntttggagggttctaagacaactcttcacattcntgaccgtgggatctgcaaaataacatcttgagtatgagatatgactntntaccanagcagaaaaatttgaactgatcagttcacccagcgagtgttgaggcctacatatgtcagcagcgtaaccaatatcttcttctcttnttttccctaaccttccca

SEQ ID NO: 75909 - DNA, 362 bp, Glycine max
  unsure (1)..(362): unsure at all n locations
aggtctgagagaccatacaagtttcctaacgatntctaattatgtgggccattaagtctatcatatgctgacaatagtcgagaagcccatgaatctcttcgggggcggagtatgtgtctgccatcgccttggccttggctaacaatcggggaagttcttgactcccgttcaaggtaagagcaaaccgatccatccacatggttgcctcttggtgtaaagagtcgatcacccttcctctagcctctttgtccgcgtatacttgggcatattcatccgcgattctatgctcgtgggctgtggctagacccaactcttcttggtacttggcgatgatagctaacatgntggtctctgtctcgcat

SEQ ID NO: 75910 - DNA, 410 bp, Glycine max
  unsure (1)..(410): unsure at all n locations
tgctagtcttgagcanaattacggtacacacatttttctgagaattctagagcaaggagaccacattgctaatttcaagatagaagctctggaggcagcaagaggagcagctttgcagagaagcctatggttcttcaatttgagagagaatattgagctatagagtgattgtgaggcactgagaagaggaggagggatcccccttcttgtgtaaggaacaattattctatactctcaatctcatttgttgtacggtttttctgaaatggctggctaaacacccttgtaatggctcgccatatcccttgccttgccttccagtatttccgtggcaggcccactattccattccgaatntgctgcatgcgacccaactctgttgctgaatcccaatcacagctgcaatctgc

SEQ ID NO: 75911 - DNA, 448 bp, Glycine max
  unsure (1)..(448): unsure at all n locations
gatccttaagtcacctgcggcatgcaagcttgagcaacattatttcttatagagaatacttatagtgtataccaaaataattgccacaaattgttttttttttatgatttcaagttgttgtaaactaaatacagaaactcaattacaaaagttttacaaatcaaaaacttaattatattttttaatttaaagacttaattaaaaattctcaaataatttaaagagttaccaattagtttaacaaaaacaaatagtaacaagtgaggatccttatactttttttttttagaacaaagtatctgaccagatataaatataagtaaaagaatggtttcacgctaactaagtaatactagntgttccatcgggatttggcttgagatttgcttattggaaaccaacaatcaatgcgttttttttacttatatttgaaaccaaactattacta

SEQ ID NO: 75912 - DNA, 357 bp, Glycine max
  unsure (1)..(357): unsure at all n locations
gcttagctacacacacccctctaataactaagctcaccttcctgagaagcntccttaaagagattcctaaagaagctagagcttagctacacacacctctctaatagctaagctcacctccttaagatgagaagctagaactttgctacacaccccctataatggctaagctcacccccatgacaaaatacatgaaaatacaaaaaaagtccctactacaaagactactcaaaatgcctcgaaatacaaggctaanatcctatactactagaatggccaaaatacaaggcctaaacgaaggantaaacctattctaatatntacanagagtagcgggctcatacttagcccatgggc

SEQ ID NO: 75913 - DNA, 420 bp, Glycine max
agcttaatgtggtccttcaatggtgtatttctcccatggagatgcaacggaagataaaggagaagacgtgagaggaggcgccatccactatggaataagccatggaaggagaagcttcaccacaaagagagtgtcttggataagaagcttagagaggaagcttcaatagaggaagaaaaagaaagtcgtatggaaaataataggaagaaagagagagaagttgaactttgatgtgtgtctcacaagacttccattcatcaaagttgtgacaagtgttacacatgattctatttataagctatgtcactaactaaatgaaattcatgtgaatctaagaggaatattccaaggatatgccaaaggcatcttatcatatttcctttagatgccacaagaatgaaatgtgtgactctcgcacac

SEQ ID NO: 75914 - DNA, 331 bp, Glycine max
gatgttttgatgtatatattttgactcttttgattcacgggtgcgacgacgacggtcgaattatttaaccgaagttaacggataatacaattcacacgttcggtggaaattaatttatctctaagttaagcgagaaatgacttaagtaaaatggcttatgcacgtcaacagggggtataacaagtaaatgacacgagaatagaaatacacaatacacagtgtggaccaccatgggtacatagaatgaatcgaagaagctaggttcgaggtacttacccgttgaagatcgaagaacgatgaagaacgaatgaagaacgtcgaagaaacggtg

SEQ ID NO: 75915 - DNA, 396 bp, Glycine max
agcttcttatccaaagctcatcttgtgggtgaatctccttcttccatggattattccctagtggatggcgcctcctctcacttcttctactttgtcttccgttgcatcttcatggaggaaatcaccattaatggacctcattgaagctcaaagatccagcctccatagaagccccacaagcaagcttccatcaagtggtaatcagaacacaagagcttcaagtaggtgctccttaaacctccattaatgtttttctttaccttctcttccattggtgtctcttcattgttctccatgtatctcctcacatgtcttggtctaaatgctgttaacatgtatctttagagtttccactaattaaacttgctatagaaactaagttgattttctatgggt

SEQ ID NO: 75916 - DNA, 435 bp, Glycine max
  unsure (1)..(435): unsure at all n locations
atacttcgggcgtgtattgtagagcaacaaggtagctggatggattgtttgccattgattgagtttacttacaacaatagctaccaagccagtattggtatggctctttttgaagctttatatggacgaaagtgcaaaactcctatttgttggtatgatgatggagaagcagtacttcttggacctgaaatgctacaacagattaacgaacaagtgaagttgattcgagagaagataaaagcatctcaggatatgcagaagagctattacgatagaaggaggaaaccactagatnttcaggaaggagaacatgtgtttttgaagggttctcccgtaaccggagtcggaagagctcttaaggctaggaagttgacacccaagtatctaggtccgtaccagaatttgaagaagatngngcctgtagcttatcatatc

SEQ ID NO: 75917 - DNA, 496 bp, Glycine max
  unsure (1)..(496): unsure at all n locations
cttaaagaattattagaaataaaaactatatatattataatataatgatggatgttattaatatacttctaccttanatcttagtggaaatgttaattaattgattctttagtcaacagtttttaacaaaattgttcgtaagatccaatcaagaaaaatagtcatataaatgtggcgtgcatagtggttaaattatataattctccacgtcattgcatgcaaatttaataatatagaaagataatataaaattatagtattctttanaaaagtataaatagaaagattcattatattctgaacagtagcanaatatatccttgacacccaaccattttctatacacgtgatatgcaatgtttacatttgtttggattataatgcttacgagaagtaacattataagttataacgtacgaagtacataacatcaagcaattggagtgtccagtcttggaagtgaatgccctcgcactgaattcattgctggcatatg

SEQ ID NO: 75918 - DNA, 372 bp, Glycine max
  unsure (1)..(372): unsure at all n locations
agcgcgtgcgagcttagactgcgctatagagacaggtcatcgaccattgtgaacanatagccactagtacggcacattagggtgtggaacattcacattttgattcggtgagattgtaggtgcatattcatggtgagcaatactatatagatgtctttgacttgtgtgaagagacagtctgcttcanatctacctcactctctattttctttgggacctagaaacacacgattcgagggcttggcacccacattagtgtgctgtggcctgaacttgctatggttatacatgttgatacctatgtgtacatgtcgattgatttgctcatacaggatatgtgaagggatctacaaagctggcttataacaattt

SEQ ID NO: 75919 - DNA, 357 bp, Glycine max
  unsure (1)..(357): unsure at all n locations
ttcctatatggcaactcatataataaggaaccaagagacacacaattacccaaggaccanaaaattgaattgaaagctaaataatagaagtttaacaagacgaactttctatgattattcaacaattaaagcaatgaacagcacataaaaacaagctaggacttaaagagaaacttagaatggctctagagtagagtatagaaacctttataaaaccagaaacctctaatgtcggcactcggtttcacacctaatttagattgacactttagaactacgaatggtatgaatagtcacccagtatataacangatttgagccaaacaacatgcacacttgcctttcactttttttttc

SEQ ID NO: 75920 - DNA, 412 bp, Glycine max
  unsure (1)..(412): unsure at all n locations
ttcccacgattcttcaacttcagagccttgaagaacttaactacactggaaattctgagcttcgtggtcctcctgttacaaacaatgctcagacaatgaagagttgacagagagtgcttcttgtggacacggtgatggtaaactctatggaacatcagacgtttatatcggtatgggagtaggatatgcatcacgattgtggcgttgttgcactgttgttttctttaacagaacttggaggcgtgcttattttcattatcttgaccactagagagatctgatgtatgtgataatagccttgaacgtatgaacgttactcgggaaattgtgagttacatgttaactgtaggagtgagagacattcaacgngtattctgacattaaaatgtgaaaaggttacatctatgacatg

SEQ ID NO: 75921 - DNA, 310 bp, Glycine max
gtaatgtagtcatgaatttaaagtcataactatagatggtcgggcacaagctggtcacatgatccacaccggtatattaaagcaacattccgggcataaagattatgtgatatgatgaacagaatgatagtgatacatattttttaatatgatcactaagccatactctcaatgtatttatagacaccataacttataatgatactcaagattacactgtactcataatgacattctgtaataaacattactgaacttataataaagctgccttggtaagaaaacgctaataatactactctgaattagt

SEQ ID NO: 75922 - DNA, 462 bp, Glycine max
  unsure (1)..(462): unsure at all n locations
atcctcagagtcacctgccgcatgcaagcttgtacaactagtattctttgcataccttgtcactaatagctctaatacaaataagaagattcatttgtttgtgtacacatcgaccaactntcaatcgtcttatagacagatatacaatcccaacacgtagtcttttctctcaagatattcaaagtggtgtcaagctattcgaaactctataagcatttatagacaacttatttacaaaaagaaatagaatttgagcgtttcaattggatcttcatgtcttcaaagcttttggtatttatagaccttcttcaacaaatgtttgttgtctctaaaaacatgatttcttatctttatcttgcggctgaagaatatggccatttggagcatttacatgtttgcattaaatacacatacctcttcatactagaactcgactcttcttggatatcatggngaacaccc

SEQ ID NO: 75923 - DNA, 93 bp, Glycine max
actcgagccgggctggttgcccctttactaaccgtgctttggtctttctctcactataattcacactgtttttgagaaactcgtcgattcttt

SEQ ID NO: 75924 - DNA, 433 bp, Glycine max
  unsure (1)..(433): unsure at all n locations
agcttcttatccaaagctcatcgtggcggtgattcttcttcttccatggcttattccctagtggatggcacctcctctcacctcttctcctttgacttccgttgcatctccatggtggaaaatcaccattaaaggacctcattgaagctcaaagatccagccttcatagaagccccacaagcaagcttccatcaagtggtaatcagagcacaagagcttcaagtaggtgctccttaaacctccattaattttgttgctctaccttctcttacattgttgttacttcatttctctacatgtatctcctcacatgtcttgtgctaaatgttgntaacatgattctttagaatttccaccgaataaacttgctatagaagccatatttgattttctatggctcaaatttctcgctctttgtcttgaaccatgaatt

SEQ ID NO: 75925 - DNA, 369 bp, Glycine max
  unsure (1)..(369): unsure at all n locations
ttttatatggatacacattggctagtagtggttaaaagatgaaaacaatttattttggtgcaatgccataattgcaaagtttttggtcatcatgctttgcctgagagtaacctattctgatgttgctactcttgtggtgcttgtgagccactngattggatcccaccttcctctgcacctagactgaccactgcttngacaaacattggatagaggagtctttaccaaataataggagctttgttttaccctcttgtctcgtgtcttttgtacttcttgtttcattttnatgataactgatgctgactacaatttgactctaggtttacactctgctgcctcagatacccactggactacaaatgtact

SEQ ID NO: 75926 - DNA, 472 bp, Glycine max
  unsure (1)..(472): unsure at all n locations
tcaagcttgctgaaagttcatggtgctattactctaaatagatataaattgtcaaatgtcaagataatgacaaataacttcaaagtaaaactggggcaaggtggttttggctctgtctacaaaggaaagctacccaatggcgctcctgtggctgtaaaaatattgaatgcatcaaaaatagatggtgaagaatttatgaacgaggttgctagcattagtagaacttctcatattaatgttgtcactcttcttgggttcagattggaaggccgcaagagagttctcatctatgaaattatgcccaatgggtcccttgacaagctcatttatagaaaaggacctgaaaccattgcacccttgagttgggacattatatatgaaactgcaatnggtatagctagaggcttggaatacttgcatataggatgcaacactcgaagtttgcatattgacatagaaccacataacattc

SEQ ID NO: 75927 - DNA, 338 bp, Glycine max
  unsure (1)..(338): unsure at all n locations
cacctgccgcatgcaagcttgttntagggatatgatgatattattgcatttattatgactaggaatgaatgtcatctttgaaaaggatgaaactcatattcaacaagttaggtagatgtggcggtattctctacacaaaatcgagactccaccttactaacctatgtaatcattactgtaaacatttcttattgctgagttgaaattatgattctgattagggaaggaaatttaaacacttgacaaactacattcgtgttttcttatgatacagaggtgaaattctaattctgaatggagaacaaaatctaaagtactcaatagacttgcatctatgt

SEQ ID NO: 75928 - DNA, 391 bp, Glycine max
agctatagttcactgctacaagctgtgcatgatatgctatcagaggataacacgctgcctaaaagttactatcaggccaagaagatattgcgtccgatgggtatgaattatcagaagattcatgcttgcccgaatgattacatattgtacatacatgaatttcaagatatgcccatattccctaggtgtggggtatcccgctacaaagtgaaagatgatgacgactgtggtagtgatgataactcatagaacgaccctccaacgaaggtcttatggtatcttcccatcattccaaagttaagcgtctgttgctaatatagatgatgcaaagaccttacatggcatgaaatgggagatactgcatggaatgcttcttattcactgatcctca

SEQ ID NO: 75929 - DNA, 481 bp, Glycine max
  unsure (1)..(481): unsure at all n locations
agcccttagcacagctgtggtggactcaatacaactgtgacggatttttattgtctttagcacaggtgagcttttcaacaaagtgacaaatttgagtgcaaaacttgaacttttaaactatttagcctcttagaatatttggctaacactaacttacaccaaattgtgagttttactaacaaaaatatgctaaaaaaacattgtaaatatattcaaactcagagatatcatgcttcactatggagtatgaattatcgataacgtggctcactttaactaaaactntaaatattcatagagtacaactacacaataagtggagataataacttgaagaggatatacaattatctggttttatcataattcaatgacccagacactattacgaaaagcactttctacgtctggtattaatcatcgtcgtagagagtttgaccttttatgaacagttnctagagaaccgcttagaaaaagatat

SEQ ID NO: 75930 - DNA, 430 bp, Glycine max
agctatgaacaatatacttgtccttcatttaactgtctttgggctcggcggccacgctcaacatagtacttttgacacctactgtacgttgatttgaccaatgctgttatgggaatgttgtgacaatcctttaaaaccttattgatacattctgagaggttggttgtcatgtggccatatcgatgtccttctctatcataagccatcatccattttttctttgaaatgcgatcaatccatgttgctatggctggactcagttgacgaaatttttctaaattatgatcaaaaatgtgcttgcaaggagtgtaggctgcataaacattagtatgaataacaatcttaagtatatatgaagagtaaataaacgtgaccatcaaatacgaaatcttacccaatttctttaacattttctttttgttcggcatta

SEQ ID NO: 75931 - DNA, 401 bp, Glycine max
  unsure (1)..(401): unsure at all n locations
tccattcagtactcactgctngctatcgtgctatgagtcttactgatagccaatgggactatntcatagtctcggccgaaagacgctgacatctncgggaagggtgctggtgacgacgttagtgactgcttgctatcgtgccttgagtcttacggatagcaaatgagactttttcgtagtgtaggtcagaagacgctgacatcttacgaaagggtgcaggcgatgacgttagtcactcatttgtatcgtgccttaagtcttacggatagcaaatgagactttntcgtagtctcagccggaagacgctgacatctncgagaagggtgcaggtgacgacgttagtcactgcttgctatggtgctatgagtcttacggatagcaaatgagattttttcgtaatc

SEQ ID NO: 75932 - DNA, 388 bp, Glycine max
  unsure (1)..(388): unsure at all n locations
nagcttctccccaatnttctataaatagggggataagtgaagtggaaaagggttcaacctcttaggcacttctctctctttcgaatttgcttggaaaaattgtttccgtgaagaaaatctaagccgaggcgtctccaaaacgtttccgtgaggaatttcgcaaaggtttcgaccgttcttcgacgttcttcattcgttcttcatcgttcttcaatcttcaacgggtaagtacctcgaaccaagctnttcgattcattctatgtacccgtggtggtccacattgtgtttcgtgcattnttattctcatttcatttactttatatacccncttttgacattcttaagccattttatttaagtcatttctcgcttaacctaaaaataaaat

SEQ ID NO: 75933 - DNA, 365 bp, Glycine max
  unsure (1)..(365): unsure at all n locations
gcatgaaaaatgtgattatgagattgagatgcccgaagtacatcttttttagtaaccatgcttaggtaccttggtcactcattgtgttntaagtgaaacgggtttatgatcccaacattgctggctcatggtaccgaatatatgcaaccaagaatgtatcatgaatnatcatgcttccctttttggtattgtttcgttaggacaacacatggatcatgcatgagcacacatgagaataaaatgtattgcagttgtagatcaataagtatgttgaacgcatatgcatgatgatgcaatgactcatgcaanatgtgatgctggaatatgataacggacaaatgcagcaacgatatggtcattatgat

SEQ ID NO: 75934 - DNA, 479 bp, Glycine max
  unsure (1)..(479): unsure at all n locations
agcttaganacagannatttgttgcaaatgcagtaattgatactaatcgganttttgaagatgctatctttatagtttggacttggcttagacaatttgagaaggacttcacagtccactataatcagtggtcaagcaatattagacaagggtttttgtttatgtagagggagtgcacataattcagcaatacttgtacaccacacaagtagacctatttgactacttatgtactacatataatagtccatacctttgtaattagtacctctggtactttatttcaatataatatatttatctttgctgataaaaaaaaggtttaataagcatttttgggaagagctgaaagcacagtttctaaggtttattgcagaatttcatgtgaatgcttcatttcctaagggactcaattcctcattcattgaaaccagtaaaccagtatgcaacattntacatganacactagtatataacat

SEQ ID NO: 75935 - DNA, 444 bp, Glycine max
  unsure (1)..(444): unsure at all n locations
ctggtacccaactggcctttgatcagaaatctatacctggttgcaaggttgtggtttgagctcctctgctgaccaccatacagacctttgcccttccatgcagcaacctggagcgattgagcagcctgaagcttatgctgcaaatatttacaatagacctcctcaacctcagcagcaaaatcaaccacagcagaanaattatgacctctncagcaacagatacaaccctggatggaggaatcaccctaacctcagatggtccagccctcagcaacaacaacagcagcctgctccttccttcaaaatgctgctggcccaagcagaccatacattcctccaccaatccaacaacagcaacaaccccagaaacaaccaacagttgaggcccctccacaaccttcctttgaagaactngtgaggcanatgactatgcagaacatgcag

SEQ ID NO: 75936 - DNA, 367 bp, Glycine max
  unsure (1)..(367): unsure at all n locations
gtcacctgaggcgtgcagctttggtaatccanacactaattgggtaatcgtctattaatgactgtctatgatcaaggatagcgatgtgctctaagaagaggctcttgactatttcatacagagtttaagtttgtctaagaagtatgactcttcagaatggacttcatgaccagacatgaatagtctatttaagcggtgctatgttgtgtcattcaacaatcttgaacacttattcattcaatcctgtacgagccgtgaaatctatttgaacgtctatgtctttctttgaaccaaaagacttactgaagctttctggttttacagatcttgcacacttgtgctattcatcttatcattctcttctccc

SEQ ID NO: 75937 - DNA, 407 bp, Glycine max
  unsure (1)..(407): unsure at all n locations
ctactatatgtngactngaccaacgcttgtattggaatgctgcgacaatctttcaacaccttattcacacattctgatagggttggtgtcatgtgaccatatcgtcgtccagatgtatcgtaagccatgctccatttttcctttgaaatgtgatcaatccatcttgctatggctggactcaatngacgaaatttttctaaagtttgatcanacacatgcttgcaaggagtgtacgctgcatcannnatttgtatcatcaaaagtgtacgtagacatcaaactcaagttaaattaatgtataaaataaaccttacccaacttcttgaacatctctttttgttttcgcgttgttgaattgcgatngaaattgctggctatgtgtcngacgcagtacacatgataaccgt

SEQ ID NO: 75938 - DNA, 395 bp, Glycine max
  unsure (1)..(395): unsure at all n locations
agctctggagtttccaagtgccaattcgtcttcttctatagtccagtcttcttctggcttcaattcatcagtgggctttccttctgtgtccatcatcttgggatgttcccagcctttgatgacagctttccacgntctgctatccagtgatttgaggaaggccaccatccttgctttccagtattcatagctggttccatccagaattggtggtctgttcactggtcctccttctttctccatgttcatcagaatatatctccctagatctcactcagtgatttcgagtgcctgctctgataccaattgaaattctgatactggggacagatgtcgtacaggatgtcacgacatcacgcttcagatcatgcaaattatatttgacagtgtgtaca

SEQ ID NO: 75939 - DNA, 359 bp, Glycine max
  unsure (1)..(359): unsure at all n locations
aaaaagaatcacttgataagccagaactacgtanggctgatttccttatcgcaattgaggatacgtatgaacaaagccctgcttttgtcgaccacccccaagagatcgttaatggtccaatgccctaacgtttctctcctttcaaaaacaaagatcgttatggtcaacgcttaacgttctctctttcaaatcaaagaccgttaatggccaacacctatatgacctttgtcaataaaactatttgcaaaaaagacaaaagcactaaccaacacttgttccgaagactacgtaagctgattcctcatcgcnnatgaggatacgtggagcaaggaaacacctngtcgccacaaaagagaaaa

SEQ ID NO: 75940 - DNA, 225 bp, Glycine max
tgcacgcgtgcacgcgcaagagaacctcaacattaatattgcactatgctatgacctcaatattattacggaatgaacctgtatctcaagtgacctatcagtcaactgatgcaaccagatcacactaagaaaaagcgtacagtggagtacctattgcagtttgagaaaagcaaccatctccgttactgacattgaatagaacataccagagtggcatgaagaagg

SEQ ID NO: 75941 - DNA, 397 bp, Glycine max
  unsure (1)..(397): unsure at all n locations
catgcaagcttgcctcaaagatatctaggaaagatatatctgttgattgaaccaggtccgctcccgaatatgacagccaccgttttatgagtgctgagcaccatcatcgcttcgaggccatcaagggatggtcatttctccgggagcgacgcgttcagctcagggacgacgagtataccgactttcacgaggagatagttcaccggtggggggcatcactgtttacccccatggtcacgatcgacccatacatagtcctcaaattctatgctaatgcttggcctatataggatggcgtgcgagatatgcgatcctgggtgaggggtccgngatgccatctatctatttgcangtatggcacttaccaggcaccctttggacccggataagttcaaca

SEQ ID NO: 75942 - DNA, 108 bp, Glycine max
ggggggggtggattaaaatattccaaaccttttcttctattaaaaatctatcctactttttacctaaggtatgaattcccttaatgaccatcttcttaaatattaatt

SEQ ID NO: 75943 - DNA, 124 bp, Glycine max
aaaaagagggaccaaaagaaaaagaaatttaaaaggctaaaaggaggagcaaaaggagaataaaagggaaaaaaaaagaaaagcaaaggcctgacaagaagcagaaaaggtgaagattacgaaa

SEQ ID NO: 75944 - DNA, 387 bp, Glycine max
  unsure (1)..(387): unsure at all n locations
tcttggtctggtttaaaccgggacctcataagcttattgtatcaattactttaatgagttttggttgcagtggagatgaaagtattattcaagtattacttaaaatgaaaggctgcacagtcttcacattctattccaatatttatttgcgaaaatatgttgtcttccgaaacttcaattgcataaacacttacatatccactgtgcanggaaatattgatgcanagtataaggggcctttgaaacagttaaaaaatggacatacacacaagacttatgagaaggtacaaatcagtccccacgtggtgggttacatcattctagcagcaaacatagctcttattatacttatttgtgagtactacaacgaatcactccagttaccat

SEQ ID NO: 75945 - DNA, 279 bp, Glycine max
agcttgaagcaatatctataaagctagaacattgtgtgatacagaaagatatctcggattgcagagtgtttctatgagagtctcttgtcgaacaactacacattcattgtttgatctgttgctgtgcaagagaggatgagaaagagaagctactcaacatgcttctatctgatggtgacaacaagaataataattccatagaagtgatcacaatattgggcatgggaggtctgggaaaaacaacccttgctcaatgtcctttattatgacaatgaagta

SEQ ID NO: 75946 - DNA, 471 bp, Glycine max
  unsure (1)..(471): unsure at all n locations
actatcatactcagcttgtatgtcagcttgcgcaccagcgatttaacctagaaatcaagagtagtggttatgttgcttaagggcttggatagntacaattnttggttgcttatgctcaattatcttgaataacacaattcaaaagatcctaagacttatttgactcacaaatccttgcacaactcagcaccacatctcagcaccacaactcaacttcatcataggcatcatgtatgaaacttagaaaacaaaaaagaaagagttcaacaacaagactacttctatgaatngatttagaacatggtatgaactanataacatgcatgaattagactcaaaattcaaaagataggctaagaatgacangaatacatgaacaaatgtatctagaatttcaatcaacaaatanaaattcaacacanacttagaacataattgtagacaaaggatcaagctgaatgttttgatgat

SEQ ID NO: 75947 - DNA, 477 bp, Glycine max
  unsure (1)..(477): unsure at all n locations
agctnggacaagttataatcgacaatgctttattgaattctntaatctaaaggtagagacctgagtcacacatgtttcatctttctgttggtgaatgcagaatcaccttggaaagtgttgctcttcaacttgatttatgcgttaatggaagactagttactagtgcaacatattatgattgggaacaaatgtgtgctaaatatataggtgttgttcccccaaagaatgcattggtgggatcaaagcttatactaaaatggttaaaagaaaacatgttgactctcccaacagaacccttaccacaacaattagcagcccgttgaaggcatacatattagggttgatttatgtgtgctgatgctatacaagtcacgatacanacgtcacttaatgtatccactcctggtagcacatggtgattaggatagctggtacactatggtttgacatgtaacacatttgatatagaaatgatat

SEQ ID NO: 75948 - DNA, 316 bp, Glycine max
gtcacctgcggcatgcaagcttatatatgatcatacatttatagaaacatttattattaagcaaatattatattctatgcaatatatatgtatatgatgacagatagctagagtcatagataattaaattctcaccatgggtgtgtgttcaagtgagatggacaggaaaaggtatatgacaattcacaagggagcttaagtgagtgagcatacataatataacataccttctggttgaatttgtccttggatcttgcatgaactaagatatctgaaagtatgagatagttggaggaagagagcattgaattttcat

SEQ ID NO: 75949 - DNA, 455 bp, Glycine max
  unsure (1)..(455): unsure at all n locations
tgnntgttgtggattgtacagtctcgcccgagaggcacgcacgctataagctgcttgtgctgctactgctactatactctgctattctatgaaaggaactcagctcacttatgccttttacaaatntattntgtgcttaaaattaaaaatatttttttattcgttttaagtgaaatcatatatttttaatcatntatcttattnttatatgctatctgatcctttgagttaaaaaaaatagntctttattttgttaatagtattatcgtaatgataattaanagggtaaatattctttttttctcaaaaaacatgaaccgatgagatattgatttttaaaaaggagaaattaactctagtatgataaagagtgcaatgatttgctcatcattaaattgtgaacaatctattattagtgatcaagatcaattgatataattatattttntataata

SEQ ID NO: 75950 - DNA, 404 bp, Glycine max
  unsure (1)..(404): unsure at all n locations
agctnggctagttgtggaggcaaatcttgttctcctgatcaaaagctcagtccccaaagttgtgaatgtgcctatccatatgaaggaacgttgtactttagaggaccctcattcagagaactgtccagtgtaaatacttttcattcacttgaaatgagcttatgggtgaaattgggtctaactcctggctcagtttctttacaaaaccccttcttcaatagtgatgattatcttcaagtgcaactagcactctttccaccaatggggcaatattttaacaggtcagaagttcaaagaattgggtttgaatngagtaatcaaacttacacgcccccaaaagaatgtggaccctattactntattgcttttccttatccttttccaggttacacaagccaattaca

SEQ ID NO: 75951 - DNA, 470 bp, Glycine max
  unsure (1)..(470): unsure at all n locations
cgtaagactacttcagtctgattaaaattatttatcttgggaaaatcttatttaaccaaaatatgtaggcttttattattctttttattgcaaattatggggatacaatctttattttgtaatgccataaggccacttatttcttcttcagtagaaattgaagtagaggttctattttccctcacattttcatagagaaaatctacccgtttttcaattttggttaatctggtttcaaagtagaaatcttgggtgttacaactttatttccagaatcattttcctttttaaaatcaggaaaatcaattttcaaaaatggttgtaagcaagatntgcagaaattcttataacataagctacaatgaactcttaatgttntatgaggatatctttngcaaaaataacattctntatgatcangtcctgtatagaattgatntcatgtcatagtcattaccataagtttgaca

SEQ ID NO: 75952 - DNA, 428 bp, Glycine max
  unsure (1)..(428): unsure at all n locations
agctngttagcattcaacacagatttctatggtggaggtggactcgaacataagaagattgcgtggattaaatgggatacaatgtgtcttccaaaagacaaggagggcataggcatcaagactnttaacatagcattgcttggtaaatggagatgggatctttttcggcatcatggggaattatgggcaaggattctggagtctaaatatggtgactggagatgcctggctgaaggaacaagaggcagcaaggattctatttggtggcaggacctaatggcaactcttaatcaatcacaacagggcactgcttttcaaaatgtaacangttggagtgtatgatgtggtgataacgccaaattctgggaggattgttggactgctgatgaagtatctttaatgataaaatatcctaggctgtaccgcat

SEQ ID NO: 75953 - DNA, 380 bp, Glycine max
  unsure (1)..(380): unsure at all n locations
gagatgtcttgggccacatgggcctcggtcaaaaccttcactagcagagcccgatgaggctcggagcttatgagtaactccaacagcgagaccctggccggnngtnttgtgagctgttcgataaccttgaattcgctctgctgaattatacggaggaactcactggcttcctctagtgacacctcctttataccatcctttttctccgggagacctttcgccggaatatctttattcgaagtgaggggtgcttcgtcatcttggtccttcactacttttgctntccccttgacgttcgtgggttggactggtaggtccacgggtgcatacacacgaccgctacnggtcacaccactcagtcccgttgatattggtacctt

SEQ ID NO: 75954 - DNA, 472 bp, Glycine max
  unsure (1)..(472): unsure at all n locations
agcttctgttttnaaattcgagcgtctctatatatacgggactcaaccggacttccgaacgaaatgttattgtcgctataattcgcagagagcttcagttctaaatatcgagcgtctcgatatattactggactcaaacggacttccgagtgaaatgtcattgatgttcaaatatgctacgagcttcgattctactattcgagcgtcacgatatattacgggactcaacctgacttccgagtgaaatgttattgtcgtaagaaattgctacgagctttcggtttaaattacgagcgtctcgatatattacggtactcaatcggacttccgagtgaaatagtattgtcgataacatttgctagcagcttcggcttaaatttcgagtgtctgatatatacgggactcatttactctcagtgaacgtattgtcttacaatttgtacagctttcgtttaattttgagcgtctccat

SEQ ID NO: 75955 - DNA, 376 bp, Glycine max
  unsure (1)..(376): unsure at all n locations
tatatcgggacgctcggatttaaaaccgaagctcggtgcaaattcgaacgacnataacatttcactcggaaggtctatggaagcccgtaatatatcgagacgctcgaattttaaaaccgaagctcgtaacaaattcgaacgacaataacattttactctgaagtctgattgagtcncgtaatatatcgtgacgctcgaaatttaaaaccgaagctcgtagcaaagtcgaacgacaataacatttcactcggaagtccgatggagtccccgtatatatcgagacgctcgaatntataaccgaagctcgagagattcgacgacgatacatttactcggaagccgatgagtccgaatatatcggacgctcgaatttaaa

SEQ ID NO: 75956 - DNA, 470 bp, Glycine max
agctagctaacataaatattcatgtacgcggactcttcttcttctaattgtgactcacagcagcctcctatgcgtcttacatgtccacctatagcgatttcaaacaaaaagatggaataagcataataagagatcttggagaccttctaaaaaagtggaggtgaacatacctcttctatatgccatcaagcagagtccaagatatgctatgtttctaaacgagctgtgcaccctcaatatgaagttcaagggcgatgaaaggattatcttgggcagaaacatgtcatcattgataggtaaatctgttcctcatattcctgataaatgaaaggacccacgttcgtttctggtaccttgcattataggcaacagtagaatgatagatgcatgctagatctatgagcatcagttattgtaatgcctctgttcatcttcattctatatctgattgacctttgctttctaacgat

SEQ ID NO: 75957 - DNA, 500 bp, Glycine max
  unsure (1)..(500): unsure at all n locations
atcgcgctagcgcgagtaatggatttggacttggcgccaatgttgcactgagcctancaagagatttacgactcgcttagcgagctgatctcgcgcttanggcgctgcttcgattcaggtgctcttccagattcctttttcacgcctaatgcactgaagccgtgcttagtgacggatacgcactatgcccactgagttcgcttagtgcgacaaccactttggcacttcaagaaattagctcctttttacctgagattgtacagaatttaacattaattccaataaaagagaccccaatgacagagatcaaaacacatcanagtttatttacaattcctacaaaagaacntataaattgggaagatatacatatnttgcnaaagtttctatacaaaaagtagtcgtataagacgactaannaactccccaaattacagttttgcttgtcctcaagcnagaaagaacagttcacttgtcctcaagttgaatatctatagtgg

SEQ ID NO: 75958 - DNA, 455 bp, Glycine max
  unsure (1)..(455): unsure at all n locations
gagcttggttatgggcaatatcaccccacctgacgttctttaggtctcctgacccccgcgacatatctgcagagaccactctggggtcaacaataaaagcacgaagatgcacccttcaacactttctcatcataagcatcgtatgattatggggtacccatcacatgtggtactaggtggcggtcgggcgatggtgcacaacaagtattccacatccacaatgcgcgcataaacccaccatcccctggtgcccaccttcatctaagctcacgtactcccatgtagcccatatccttatttctctcaacaccgggtccccatcaatcctctcaagcttgcacaacatncaagcaaaacatcattcaaactgtacaagctatcacagactaccaatacagagcataggctgagtacttcgctcaaacactcaccaaatcacagctcttctcacttaa

SEQ ID NO: 75959 - DNA, 487 bp, Glycine max
  unsure (1)..(487): unsure at all n locations
ctccttagagtcctctcactaggtggagatngcaaaatagataacgaacttataaatngaagaaccgaaatttattgctactggaatngcaaaacgaaaaaaaaatgtctcaaagaaaaacctaaaactaaaaaaacgaaaataggggagagagaagagagagcctaaactagaaccttggtgctgttatatagttntccagccccaaagctttacaaatttgtttaaatccaagcccataaataaaatcaaatctagataagataagatctagatgaaataatatatagatcagatcacatctaaataatatctagataagataagataagataagatctaattttgtagaataaaatagtttgtcctcttcaaatccaagtccaatgcttcattaattcctgaaattagattaanaacatcaaattagctgaatgggcccaaataataaaactgcctaattaatttgacaattaaaataatcagt

SEQ ID NO: 75960 - DNA, 232 bp, Glycine max
tgacgcatgcaagctattcatgtacgagcctgagtaccttctggagatggttatctcacgactgattcaagctatcactgtccattctctcaaagtgaactctaactcatctcttcttcttgaactataaggaagtgcgttaactattgaagtcataaatactatctagagacaaattcagcatatcggaatgttgttgcagtacatgatggatcaagacattctcacttct

SEQ ID NO: 75961 - DNA, 437 bp, Glycine max
  unsure (1)..(437): unsure at all n locations
gatataacgtcagaactgttgtatcattctatttgtgatgatactttgcaatttgatcaatctatacctgtgtaataatttgtcctgtatcatactcttgtatcataccaaagtaattgttgaaaagacttttaacttaaattctggccaacctcttgtactcaattggaagtccttcctatttaatatacccttctctaagactttagagactgtcttgatcatncatcttgaatatacttatttctctgtcttgaatanaagcttgagacgcatgtgaacctttggcatcatcaaaacattcagcttgatcctttgtctacacacaccactagacacggagacaatcataggattacgtcataaatgggccgaatatnttgttaaacttagaaccatcaatttgtaaaatagtaattagatgacatgcagacatg

SEQ ID NO: 75962 - DNA, 503 bp, Glycine max
  unsure (1)..(503): unsure at all n locations
gtctacctgcatgcgtgcaagctcgagatgatgaagtgttgcagggcgaatctctctgcttttatcgatgaccacagagtgagtcctgcagatatgtcgcggtggtcaggagaccttgcggacgtcacgtggggtgctattgcccaaaaccaagcttgaccaatcccgacccatcccgtgcatagtcggtcagtgagaacctgtgatgtacctaaacacgcgagctcctcgctgtcaacagattagatgataacacgacctctatgcatggaggcttgtggtggctggccagcatgtgaatttgtgtaatatgtgcatggtggcctctggtaatctattaccataggtgggtcatcgattacaagtgcttaaattgaggacaggacgctaatatggtctctggtaatcgataccaacgggtgttatcgattaccatgctttgatactgagctatgaacttatggagcctctggttatcattaccancctgagtaatcaataca

SEQ ID NO: 75963 - DNA, 345 bp, Glycine max
  unsure (1)..(345): unsure at all n locations
agaatgaattgaacttaccctagtaaagcgatattaaatgttctcagcggaaattaaagagtgtctgggagaagaagacatacacaagaatttattctggttcggcaacaaaccgcgcctacattcagtccccaagcaacctgcggtccttgagatntcttttcaacccttgtaaaacctttacaaacctagatccccaagggatgtaccnctccttgttctctttgataaccaagtggatgtaccctccacttgaactgatccacaagagatgtacnctctcttgtttcagttacaacacccaagtgatgtccctctactgtccacaaagatgtacctcatgtg

SEQ ID NO: 75964 - DNA, 443 bp, Glycine max
  unsure (1)..(443): unsure at all n locations
agctttacagtattcaactaagataactaacctatggttataaagatataaaaacaaggttaaaggaagcntacttggattgctgaaattggatgcaaagaatgaagcatggataacaagctaagagtgagagcacattgcatagaagacgcaccatcgaattgccttaaatgttgtttaaaagcacaaatgaaaatgtaactgccaaaggcagctatgccttatttattgaggtttcgaatgccttgcttatcgcatcaactcgctaagcgagcatacataagcgttaagaatacaaacacacgcacttatcaggcaaactcgcttagctcaatgtaaaaattcaaattttccagataagactctgcgcttaacgtgaagagtcgcgcttagacaataatcatgactcttaaacgtattagagggctacacttaacaccggt

SEQ ID NO: 75965 - DNA, 344 bp, Glycine max
atttatgccaaatccttctgttgatcattggaatgcctgtatgcgtattcttagatacattaaaagagctccatgtcaaggattactttatgacgaacaagggtatacacaagtatcttgatattgtgatgcagaatgggctggttgtcctatggataggagagccacatccagatatcgtgtctctattggagggaatgttatttcttggagaagaagaagcaaactgttgttgtagatctagtgcagaggctgtagttacatgtgaacttatgtgtgtcaaactaattcttgaagagttgaaattctgcacagtgatgcacatgaagctataattgtgatat

SEQ ID NO: 75966 - DNA, 471 bp, Glycine max
  unsure (1)..(471): unsure at all n locations
agctataaaagtaactatcacatgttataatttcagtgagaactctattttctataatatttgagacttgaaacttgcgtactggattctaacaaaaaaaaatgctntcggacttgtttagtactagaatcataacaaaggatctacaaccattgaatttttgcaaggttgaaatatttagaaacatgaaagaatcctcttaaacatgctaaaaagagtttataaagaataagtactgttgtgggttaanactaagagatgagtagactagtcctcttgtagggacagtcgacctctcagtcttttgtattttatttaaatttttgtagatttttaattgagagataaagtagtattttgaataatagacatgataagatttaaaatgatatatgacatgtatgaaaataaaatgttctcgtcagtcaaataattatctttttcagacctgaaaacagaacacaataccct

SEQ ID NO: 75967 - DNA, 443 bp, Glycine max
  unsure (1)..(443): unsure at all n locations
tcttgaggaagctacaagaagttgggctgggtaanacgctgcgcagtccttctttgtcagatgtgtggagtgtgctcaaagctttcgttcccgagagcacctcttatttaagcattntagcctttgctttcgtgtagcttaggaaaaacgtcatttattctcctttctttctttcaaagccatttctaacatcccaagcactatctccatcacccacagccaccattagccaccacaaaccatcgttgttctccattgaaaccccacaccaagaggaaccctncaaccgaagcagaatcttcaacttggcttgcggttcggtagagaacaaaccctatctgcctttcatttctttcaggaaccacggtctaccctggttcttgtagntcatctggctttgatccttctgacctggaaccgcatgatgtctatgcttcttgaaa

SEQ ID NO: 75968 - DNA, 485 bp, Glycine max
  unsure (1)..(485): unsure at all n locations
agcttgcctatataacctgatatggagagaatatgtatattactcacacagaatggaggtacttagtattttctacctatactcaataaataatactgattacactacgaaattatcataaattgtaagagcttgatacaattcacacaagttatatacacaaaagttagtcgtattcaccgactaacatgtattacaaagaatggactctcttaagctcaatgtacttctcaacttaagatattatgtgctctcataacttgacatatgaaacttgattttatgcacttgaacatcactatctatcaatttttgatgtcctatttatatgtagagagacacttgtaattgtggagagtattctcaaaattggaaaatatgacccgcttgcagattgatcttatttcctaacataagctaatatttgacatttttgnttgataagatcacgactatttatatcttgtcatttataactcaatatg

SEQ ID NO: 75969 - DNA, 312 bp, Glycine max
  unsure (1)..(312): unsure at all n locations
tcaatgttccctaaccattaaatattgtgaatctaactttcaacttgattaagaaagcttggggccatccatagacatgatacgtgtaagctatcataccttgaatgataaagttaattaaattgagctcttcccattatcgataataaggcacccttccaagttgtggattggacttgatcttgctacaatgggttagaagtgacaagctcttgtgccgctcatgaaaataagagaaccaagatacatgaaaggaagatntaccaatgacataccaagaaaactattaatgtcccttatccctcatctaac

SEQ ID NO: 75970 - DNA, 454 bp, Glycine max
agctcgctacactatattagatatatgtgactttgtctatcatcacctcttaaagaatatgagaactcactccacgcgtgtagttcgtgtccgaatcttatgatgatctctgaccttgtgttcatgataacaaatgattacatggatgaacttaaagaacctcctgctataagaggttgagacacactgctctgatcggatctaacattaagacatgagtctctatactcataacatgaaagtacggacatgcactcttatcatcttatttcacatgctgagtctttagttcattcattggagacaaccttatcttgggtggaagatgtctcacaccctgactaataagctgttaaatgatgataacatggatataaccctttcacacggaactctctatgttcttgaaaaaaacactctgaataataggattttacgaaatataaataatatg

SEQ ID NO: 75971 - DNA, 386 bp, Glycine max
  unsure (1)..(386): unsure at all n locations
cgcaactgcgttgngagtgaaagaaggtntactcactcaagagaattctatcttctcacgtagagtacttatataccaangagcttacatagtgaaaaaattcatttaacatatttgcaattcaaagacagtgcctatgaaaaccttcttggtccacttaaagaacaaatggcagttttataataaccatcggtatactagttatagaagtcctagtaaatctcacaaatgccactgtgatnattactacatcagttttttataaccgatgtagatttggcgatgttaattcatgtttttgtantagtggaatatagatcatgtaatgatgtaaacaaactcatggcgataaaacctccatacacanaaggctaaagatacttacg

SEQ ID NO: 75972 - DNA, 370 bp, Glycine max
agcttactatctaattatattttaattatatttataataatgacaaattaatcataaacattcgtgattctatgcatcttagaatacttcaaggaattaacgcagatcattgtagtgtaagaataagagtatatgctagtaaattggatattgtatcattatacatacgaataacgtcatgaaatacttgttacgcaattgtgcattgcaccagacctttatctttaggttataatggaagcaaatcacaatagctctagtctaaagtacaaatcacagatgctcaaaatctacaaacccattattcaacaccaaaaataaatgaatatataaatatgattaatccataagcattgaacgactaatttct

SEQ ID NO: 75973 - DNA, 316 bp, Glycine max
  unsure (1)..(316): unsure at all n locations
cgagagtgctcactgtgttttgccctacatagtacagaagagagcaagttgattaactcaaagtagccaccacttatacatggaccatacatgtcacagaagacaaagaactggtacttactgtgagcaaagaacatggttgaaaaactaaacctgtcaaataaataacaaatagaagttacaaccatatccagagctaaacgaatcananatggaaaccctaccgttggttgatatgantactggatgtatcatcaacatgggtaggctcaatatagagagcctgagaaagggaggagggagaaaaagaccagat

SEQ ID NO: 75974 - DNA, 481 bp, Glycine max
  unsure (1)..(481): unsure at all n locations
agcttctattggaccatgaacaggcaactaactcctctntcaaaaccatgctatgtgctcgcgactggtccctttcctcccttcgcaacttgagttcattattgctaccccatagggctccgtgaaatttgttccggccatactcttccttgcgagccctcttggtctctcgttcaagggctcttgcggtaattgtattctcttcccgtaacccggcacactccttccgaacgtgtgtagcagccaacttgaacttctccttggcgagtgttgcctttcctaactcgcttttgagagcttggacttactcgttctcttccggtgcttcanaattctcttcgctgacgacttttaacttggcgagccaatctatacctcgtatgcgaactttcaaccattcgtggtacccaccaatgatgccattacgaatgcctctaagctcttgatcttctctaacggggtttccatgctttatggattc

SEQ ID NO: 75975 - DNA, 385 bp, Glycine max
tcgatgtgggtccgttttgaggcaaactagtcatcctgcttggacgaatgagaccacgtgggccaatgaagacggtgaggatgaacgtgaagcccatgctgagactgccattcctatatggcccagtttgccaccaacccaacaatgtcattactcagccaataagaaaccgttctccttacccaccgcccagttatccacatacgcaagtccctatatcaaccacatagtctttctaccgcacttccaatgatgaacaccacctttagcacaaaccactaacaccaaccaagaattgaatcgtgcagcgagaaagcctgtagaattcaccccaattctggtgtgctatgctgacttgctcccgtatctactggataattcaatg

SEQ ID NO: 75976 - DNA, 417 bp, Glycine max
agcttataaaacacagtgaatacactatgatgtatcaactcaaccgaactcttgccagaatatcacttttgttcctgatgttgaactctgaaccccatatgaaagtattgttgaagatattgaatgatgcttatgtcgttcatgacatctctgatgagaaatttgaaggtattgtgggtaatgtcaccgtaagcaattaccttacattcactgatgaggagatgccaacaaaaggagctaggcataatatagccctacatatatttgagaaatgcatggaccatgtcttggtaagagttctagatgataatggttcctcgatgaatgtcatgccaaagacaacattggcaaaactaccgtctaatgagtcatacatgaagctcagcacttatggagactcgcttttgattggctcat

SEQ ID NO: 75977 - DNA, 432 bp, Glycine max
  unsure (1)..(432): unsure at all n locations
ttctagnttcagatgatgcatatgagtttgtagctatctcatgcattcctctaatgactataacatcatttctagcgctatactgctaagagttggaagccatcttctcaatcaagtttctggcttcagcaagagtcatgtctccaagggctctaccactgacaacatctatcatacttctctccatattactgagtccctcataaaaattaagagaagaagctgctccgaaatctgatggtgagggcaactggcacatagttttttaaatctctcccagtattcatataggctctctccactgagttgtctaatacctgagatgtccttcctgatggtcgtggtcctggaagcacgggaaatttttctaagaatactctcttagagtcatcccagcttgtgatggaccttggagcaaggtaatacaactag

SEQ ID NO: 75978 - DNA, 384 bp, Glycine max
tgcaagcgttctcatcattgtttagatctaatgtttctaatctatgttatcactggccactgggtaatgacttggctatggagtatcatacttctgttgataggaagacggtcgcttcatacctaagtggttcctggatgacgaatcgtacgatatctgatttacgaacctgagtggatagtggttctagtgtgttgtcatgatagttatggttattgcagaagatgatcaatgctgataaacgaggtgtggttgaatacattatcaacaccgtgaagatttttatcctctcttattctaaattaattattttaaacattatctgcacgttttattactaatctaattagaggagatcaccattatgataccttacaaaacata

SEQ ID NO: 75979 - DNA, 433 bp, Glycine max
  unsure (1)..(433): unsure at all n locations
tggtcgtctagcgggtggtgtgttctggcatgacaagggccaaggtagaggcanggtggatggctgtgtggagaggttggaacggaaagaggtgggacacaaccatggtgggcaggtcggatcaaattgttatgaactgaaggtaggtgagggccttgtattcgagaacaaggtgaacttctataataagctattgatattggtgaaaaattcatcttgatatcattcatcatacccgaaggatatatatagtatacttgaggtgctaaatgataaaggtccatacaccacataacagaaaacactactattataacagaatatcatacaagatattctcctataagtggatgctacccactactaacctaccaacatcttattcttctaacgggattcctaacttgctcatagactctagcctatcagaatc

SEQ ID NO: 75980 - DNA, 375 bp, Glycine max
gagctcaccgtatccgtacttggaaggatctgattaccttcttcctaatgcagtatcattacaatagtgatatggctcctgaccgtactcaactgcagaatatgttcaagaaagagggtgaaacctttaaagaatatgcgcatcgatggatggatttggctgcacaagaggctcctcccatggttgagagagagatgaccaccaagatgagagacactctgccagtgtactactatgagacgctagtatggtacatgccgtccatctttgcggaactggtgtttgtcgaggaaagaatctatgattgattgaaaagaggaatagttgattatgtgtcctccacaaacgcgagtgccacaagaatctgggcatcat

SEQ ID NO: 75981 - DNA, 496 bp, Glycine max
  unsure (1)..(496): unsure at all n locations
agtgtaccagatgactactgctctggccaagctatctttgttgatatgcatcaataacttctcttccctggaatacgtacccatcttgcgataatacatttttaggtgattcttaagacaagtcatccctttgtacctatcgaagtcaggtactttgaacttcggagggatgacgacgtctggtaccaggcataggttggtcatgtctgcgaatggataatcgtcgaatccttcaacagccctcaatctctcttcaatgagatcgagtntcccctttccttccgtttccgggggtggtcctcttacggacagaaacattggctgtgttgggtggcttcgaggctctcccatgatattgngttgcggtagtgcattgtgcgccggcccctcagtgggaaacggcgagtaagtgttggatcgagtggcctcagaataattaagaaaggggttgaatatatattcctaaaccttactaattaaaaatactcttttaagc

SEQ ID NO: 75982 - DNA, 387 bp, Glycine max
agctcttcttttgtaacgaacatggaaaactagatatgttggtcgcataccactcatcatatgaattgtacactgcatgtgctaatgaaagccaccaagcgtctggctgctacttctccttatgaaatcaaagattcattgtatgttaacaagtaaccatgtgaagataaaaacatgttatgttggtggtatcaactaggggttttcttttgataacatggccatggaaagcctccattttggaagagacatgacttccttataagcatatatgagctatatggctcgaggttccgttacataaccgataataagagtgatgtgctaatgcgttcactgaaatacaaatatggccactacagcgtgcgaaatcaatgtatgactact

SEQ ID NO: 75983 - DNA, 228 bp, Glycine max
tttagcacttatcttcgcggaaaaaatactggaacctgaaaaatgctcataggaaaagtttattaagaggaatgactatgatgcgggaccaatgtggccacatcacaaacgaaaaaaggtgccccaaaccggtgcgacacctagactacagactggcaaatattacccctagtaagtttcctagatttacgatgtattaataaatcaatatatcattattatataaaa

SEQ ID NO: 75984 - DNA, 286 bp, Glycine max
atctatgaattgtgtactacatgaagcgaccaacgagtcgtctatattaataaggctcacgaatatgatcaccatcaatgagagtcaacttttattaagttatgcaacatactctctaatgtattattgattgaagcttggtgcaaaactttacatatatcattgactgagaatcattacttaatatgttgtgacttttgctagaggaatgaatcatcgatccgtttatgactaggaatacctcacgcaaccttcataaataaggcagtcccggcggtcttgttct

SEQ ID NO: 75985 - DNA, 502 bp, Glycine max
tagctgcctaattaacctgaaatggagagaaaatgattattaaacacacaaaatgaaaatactaagtatttattacctatacttaatagaagatacttataacactacaaaataaccataaattgagagagtttgatacaatttatacaagttttatacacaaaagttaatcgttttcaccgactaacacaaccaccaagatgtcagctcttagagatggtactatgataggggacatatgtattatggtgtgcctaagtcccacgttgactagtataggatgcttagtggaatagttaagtggtttgctaggttctccctccttaccagctaagctttaagggagggttccccaagtacttgagtgctaatcaatatctaatggataaaataaagacaaattcagtagaaaaaaatatttcttgccatacatatcagttataaactgaccatcggaaattcttaatgctcaaagacataattactgaaatcatatgaaccg

SEQ ID NO: 75986 - DNA, 329 bp, Glycine max
  unsure (1)..(329): unsure at all n locations
tctcttatctttaccaaggactggaattgcgggggtagaacttggacccggggtgtttgccanacacttgacatccgaccacccggccatatcgtcaggaaacctgtacgtcctaacagcgactctacagccaccgataaagacaagacacaagcaggaggctggtgtggtggcactatgatttgaggaatctgatatgctctgatatgataccaggtggtatcatacaggctnaataaacagagtagatgcttatatcatacaagtggtatcatacacctaaatggacagagtgaatgctctgtatcatacagggtgatcatacagct

SEQ ID NO: 75987 - DNA, 494 bp, Glycine max
  unsure (1)..(494): unsure at all n locations
agcttccatggtgatccctactaaattctctataccctgcctaagataggttttccaaaagtcgacttagaatctatagaatttaagataattnttctaattacaatcttagaattttaaaaaaaattaaaaaaacctacagtaatatttttttatcaaataaaaactcaccataattgactatagaatttacaaatcatatttgataaaaatcatctctcttcccaagatgatgatattttgctactcaataaaattaattttaaattcatgattgatttggtgaaaaaaatcttaaaacttaaaagaaagtcgcatttttcccctaattataccatgcaataatattaaaaaattcaaatgaaactctaaattacattatatatgaagattattttaatttctgatgatacgctaatcttaattaatttacttcaccagaacttcttaatatcaaatatagataatatttctagtaaaacacaaaaataaca

SEQ ID NO: 75988 - DNA, 343 bp, Glycine max
  unsure (1)..(343): unsure at all n locations
gagaacttgattatctttgattcactgggttcactcgagccgaagtggctttaacattntacaaagtcttcaagccattggtgacaatgaaattaatatccagtagatgatcaaatctttcaaccattttatcagtacaaatattggcttcacgtgaatatctttatatatataaagtagatgtgcgggccaattttgtaaaatcaatttccttccttgtttagtctctatnttagaaaatggcatctcatattttcttcnnataaaaatgaaaattatanaatttataaatatatgtgctaattaatgacanattttaaaatgtggtctctcttttcacaac

SEQ ID NO: 75989 - DNA, 398 bp, Glycine max
agctagccacccagctcgcccaggcgagcatggttgcttcctccagaagcaacagccttctggaggaatcttctggagggcccaagtgggcctggttgctatttgcacccccatttttactaaatacaccccctgctttttttggtgatgtctttttcgtaaagttacgaaaacttacaaatttcgtaactatacttgttttctttccgtaatgttacggaaccttgcggatcacataatcatcccctttttgacttacggaatgttacggaacctcactaattgtgcaacgatgcttccatttgatcttcgatgtgtcacggaaccttacggattgtgcatcaatattctcttttgatttccggcatgtcccagaacttcacatattgcctaatgat

SEQ ID NO: 75990 - DNA, 336 bp, Glycine max
cttgatctcagctacaagtgagtatttgactctcttctgctgttactttttcagtccttcaactactagggtttctctttttatagtgaggggtgctctgggatatagttgaactctcctgtttctttttttttgtgcggatgctaatacttgataatatgcttatgttaatctgacattgaagaggaactctctttattgtacaacattttttttaattgactatcaattgacaaatatatacttgagggaatgtttgtatgcctaaactttcaatatggctttggagatatgaattaatcttgagaccagtgacttgtcgcataatgtatgatc

SEQ ID NO: 75991 - DNA, 436 bp, Glycine max
  unsure (1)..(436): unsure at all n locations
cgcattactaaattagaatcactatacagatgtcctgtataatgtcaaccatccgatccctaatcaataaagaatatagccaacacatatgatgggacaaataatcggcgagggcctcttcatcctttgtcgaggattaagcgtctgtttactatcatgaaatgtttggaatattaagtgctaatcatattaagtattatagccatccagcatagaacactcttgtactataccacttcatcttaatctattgctaatataattccctaaacaattataataaaaantatcaatctcatcagacatgattatttatgagtgaataacgccataagaactctctatctatatgtcactcgtataatcttttctaataatttttcgcactattctaccattatttgaataaacaattctaattgattttacaaacttt

SEQ ID NO: 75992 - DNA, 405 bp, Glycine max
  unsure (1)..(405): unsure at all n locations
atccttaagcaccgcggctgcagctagtattaannttttttaattatatttagaataattacaaattaatcataaacattcatcattntatgcattttagaataattaaaggaattaaaacagatcattatagtttaaaataagagtatatcctagtaaattggatattgtatcagtatacatagaagtaacgtcatgaaatacttgttacgcaattgtgcattgcaccaaacctttatctttaggttataatggaagcanatcacaatagctctagtctaaagtacaaatcacagatgctcaaaatttacaaacccattattcaacaccaaatataaatgaataaataaatatgattaatccataagcatttaaagacaaaatttcttaataaagaccaaaact

SEQ ID NO: 75993 - DNA, 335 bp, Glycine max
  unsure (1)..(335): unsure at all n locations
cgctgtgtgacttgagttaattattataactacaaataaccatattatcagcacatagcgaccgagagtgctcactgtgttttcccctacatagtacagaaaagaacaagttgataaactcaaaagtaccaccacttatacatggaccatacatgtcacagaagacaaagaactggtacttactgtgagcaaagaacatggttgaaaaactaacctgtcaataaataacanatagaagtacaaccatattcagagctaaacgaatcanaaatgaaaacccctaccgttggtgatatgaatactggatgtatcatcaacatgggtaggctcaatat

SEQ ID NO: 75994 - DNA, 411 bp, Glycine max
agcttgaatgctctattcaatggagttgacattaatatcttcagactaatcaacacttgcacagtggccaaagatgcatgggagatcctgaaaaccactcatgaaggaacctccaaagttaagatgtccagattgcaactcttggctacaaaattcgaatatctgaacatgaatgaggaataatgtattcatgactttcacatgaacattcttgaaattgccaatgcttgcactgccttgggagaaagaataactgatgaaaagctggtgagaaagatcctcagatccttgcctaagagatttgacatgagagtcactgcaatagaggaggcccaagacatttgcaacatgagagtagatgaactcattggttcccttcaacctttgagctaagactctcggataaggctg

SEQ ID NO: 75995 - DNA, 343 bp, Glycine max
  unsure (1)..(343): unsure at all n locations
gaaaatgtggccaagatattgaactctcacacaacactcattttcgcaaatcaaatccatatctgaggccattaactacgttatttcgttcaacaatcaaatacgggagggaataagtggcatggaaattntataaaaaaaattatgatcttatagtataaatatttttacacattcattcaactacaacttattatacaccatacagttattaacttttaaaataattattntaaagtaattcatatagcgttcaataactattataatagtataaaactgtnttacataataaatccatacacattaattttaaaatttactatagtccacacgatcaaca

SEQ ID NO: 75996 - DNA, 415 bp, Glycine max
  unsure (1)..(415): unsure at all n locations
agcttngaaggttaaagtctcacgatggtcatgtattgatgcaacaattgttagttgtggctatatgagacatcttgccaaacaaagttaggttagccataactcgcttgtgctttttcttccatgccatatgtagccaagacgtagatcctatgaagcttgatgagttggaatatgaggccgcgattatactgtgccaatcggagatgtattttcctcctgctttctgtgacatcatgattcacttgattgtgcatctggccagagaaatcgaatggtgtggtcctgtttatttgtggtggatgtacccggctgagcgatacttgaacatcttaaaagggtatacaaaagatctgttcgtctataagcattattgttgaatgtacatcgcagatgagccattgtattatggtca

SEQ ID NO: 75997 - DNA, 389 bp, Glycine max
  unsure (1)..(389): unsure at all n locations
ataggggtggagcgcgactggcagtccttggttgtatgggcttgtgtagcctctgtagataatagccgggagcttatagataatgttagagataaacatttgcttatagataaaaggtaaaagataattataccttgtagataatgcgtgaccttatagataattaattacctgccaacagataaagatattcaaatagaattgaatattaataggttagagataacctatttgttgtggagcctggctgctaaaggtcaagcgtctgcgctcctgtaatangactgatatggaggggtgacacgtgtaacaaagtgccatgtgggatgccacatgtgttttgtgggtgctagacagtacagttgataatnttgtcggttgaaagttca

SEQ ID NO: 75998 - DNA, 349 bp, Glycine max
  unsure (1)..(349): unsure at all n locations
aatgaagagggtgagaatgaaggagaaacccatgttgtgactgccattcctatacagcccaagtttccaccaacccaacaatgtcattactcagccaataacanaccttctccttacccaccacccatttatccacaaaggccatccctaaatcaacaacaaagcctgtctactgcacttccaatgacgttcaccacctttagcacaaaccataacaccaaccaagatataattnttgcagcgaaaagcctgtagaattcaccccaattccggtatcctatgctgacttgctccatatctactngataatcaatggtagcataaccccaccaaggtcatcaacctcatt

SEQ ID NO: 75999 - DNA, 414 bp, Glycine max
cgcgagctcacattatatccgtaaaccactaatcatatctctattgtaatgactatactatgcacatccagaggatttataaatacccattcagctccaataattggaagagtggcgcggtgccctgtaagtactttttgagcacatatatactaagggaaatagatttggaggatcgcgcaccggatcatcaagtatttaaaaattaagacggatgagaccgagtatccaacacaacgaactaatgttagcctgacataagtgcccaaatgaagcattgttgagagaacatgtatgattgaaatttcaaaagagattatctaactttatgctaatgccatcaaagcaagtaatataatgacaatcgaggttgaatgtcgggtcttctaacaacaagttgacgagtatagcata

SEQ ID NO: 76000 - DNA, 469 bp, Glycine max
  unsure (1)..(469): unsure at all n locations
tgatcttgagcttcatgggtccttaatggtgantttccactatggatatgcagccgaagaccaagganaagatgtgagaggaggcaccatccattaaagaataagccatggaagaaggagcttcgccaccaagatgagccttggataagaagcctggagaggatgcttcaatggaggaaaagatagatggagagaaagagagaggagggagcacgaaatcgaaggaagataaagggagagaagttgaactctgagttgtgtctcacaagactctcattcatcatagtaataacaagtgttacacatgcttctatttatagactangtagcttccttgagaagctttcttgaaaaacttncttgagaagcaagagcttatctacacacacccctctaataactaagctcacctncttgagaaagcttcttgagaagattctaaagaagctggagcttagctacacctaac

SEQ ID NO: 76001 - DNA, 382 bp, Glycine max
  unsure (1)..(382): unsure at all n locations
agtcacctgaggcatgcaagcttgacatgatgaagtgttgaaggcagacacttcctgcttatattgncgaccacagagtggcacctgtagatatgtctcgggggtcacgacaccttgtggacgacatgtggggtgctattgcccataaccgcagcttgaccaatcccgacccatcccgggcatattcggtcagtgagaacctgtgatgcacctaaacatgcgagctcctgacagcaacatactacaggatacatgaccacaaagcaacgatgcttgtggtggctggccagcagagaataatgagtaatacgtggattgtggcctctggtaatccattaccgagggtcgttaatatattacaaggcttaacattgaagacatg

SEQ ID NO: 76002 - DNA, 380 bp, Glycine max
  unsure (1)..(380): unsure at all n locations
tctatatctccacaccttttggagtggccattctggatgggcttgatttctcatggtccacttggaccccatttctacccactaccaaacctaagaanactatattatctacaccaaggtacacttctctatatctgcatagaggatgttntcctacgactgaaagaactgtctgagatgtcctaagtgatcatctaggctcctactatacactnaaatatcatctaaataacaactacaaatctacctatgatatcccttaagacatgatgcataagcctcataaaagtgcttggtgcattattgaagcccaaaggcatcactagccattcatacanaccaaactcggtcttgaaagcaagtttccactcatcactctt

SEQ ID NO: 76003 - DNA, 398 bp, Glycine max
  unsure (1)..(398): unsure at all n locations
gagctctatcctcacatccttccagctggactatgtctctttttatacaaccatcctaggtttagacaaacttaatctaagcttcatcctccaatccctcttgttggactagactnagcttgtcataccctaatttcggctggggactattgttagatggcatgaaacctttggtcgaccgcttcgagttacttggcaccctctgtcgcacaatacttgaagttccgagacatgccggatatcaacaggaagcattgttatgcacgcctggaaatcttctaacatgtcggaaatcaaaaggaagtattgttatgctatccgagagtttccgtaacattctcaaagctaataaagtgagaattacatgatctcgaaagctccgcaaccttactgaaaga

SEQ ID NO: 76004 - DNA, 209 bp, Glycine max
gtctttggctctttggcccttaattggcgccctaatcgacctcttcttctctttatccattccacaatctactttcttgtaaccccttactctgtgtcttgcgcttttcagcctgaatttcatttccgtaattcttctatgatatgaaactacatacatcaattaagaaaatagtatagtaatctaagataagatagagtcttactagt

SEQ ID NO: 76005 - DNA, 283 bp, Glycine max
aaaaaaggaagacatttgatgtgcatcccacgatgagttcaattatagtcacaatggtgctaactagttaaggctaaaatttctttaaattatcatatatatataattacgaccgcacaaatatggttaagactcaagtgagattgagtgaactatttgtgttgactgattgtgaacacagaggcagtataatatggttcacttgtaatatttgcaatctgtaaataataatgaggggatgtacaaattgatgaccgctctcttatatatgattaaaagtgaa

SEQ ID NO: 76006 - DNA, 482 bp, Glycine max
  unsure (1)..(482): unsure at all n locations
agctntgttaggaaaatatacgtatatatatatatggcttcacaaaaactctacacccaagaagtgtctgaaaataaaaatttaatttataccaaaatacatgcgcgcaggctgctcatcgaccaaaactggtggcttatggtcataatagaaaaagaaagatgacctactcatgattcctcccctatgatgacatgcatgcatgaatgtggacgtggttcatccatttaacttgcatttgaacaaacattttgtttctcccatacgtataatatgaatatgaatatgaatgtcattgtcgttccgacggctgtcttaaatataatttcaaaattaacttttcacaatatatactcagatagctagctagtggatcaagtaacaactttcttatatccgattataaacgggtatgttcagctaaacgaaatggaaataagacgaatgtttgtttggttgccttgaaccctgatctgatctca

SEQ ID NO: 76007 - DNA, 424 bp, Glycine max
  unsure (1)..(424): unsure at all n locations
agcttcaccggatgacgccgatcgaacatttcctattcgacgtcatgcgaatgtcgttcagggattgaattgaaaactcgttaggcgacatctgtcgtgaagtagcgaccgatatttttcagccgacatcgcacaattctttttagaaaagctcgctggtcgataatggtctctttacggcagagtaagttttcttgttttggtgtcgcataaaaaagatacaatgtacttcggctaggtttttcgtgcgagtacaaccgacattttgttncggtcaggaaaacattatcccacctctgcaaaaaaatatttgcttaccgtcttcatgcttatttcattcaacgattgaatagaaaactcaatagcccgcaacggtcgtgaaatagtcccgactgatatttttcagcccgcattgcgcattttt

SEQ ID NO: 76008 - DNA, 426 bp, Glycine max
agcttagcatatggacctgcgtgttgtcttgttttatcatatcttccgtaatactcatcacctctatcatatctaataattttcacatctatgtctaatcgtcattttacttcattgtatctaatttctaaggcatccattgcctaagaaatctcggacagtaagtagacataaccgtaatgtgaataatcatcaataatggtgataaagtatcattcctttccaaagatctacattaaaagaccacaaatttctgatgcacaattcaagaagtgagtgctcttgagctctttcttgatgtttgcttgttcccttaaacaccccacaaatatctatcctttatctaaaaggaaaattcttcttattaacttccatcttctctaaaagtacctaacgttatgcacaaaaagccatcttattccttac

SEQ ID NO: 76009 - DNA, 135 bp, Glycine max
tttggaagttaaaaatgatgtaatatgaatacaaccactgatggatatcactttattaaaagctttatgatgctgtgaagttgcttttagtatattattgtgaatgacctgcacaactttgcacctggatgagag

SEQ ID NO: 76010 - DNA, 454 bp, Glycine max
tcgtacccgcgatcctctgagtcacctgctgcatgcaagcttaccttgaatactaattgtgtcctttgctctcttggtgagttacattacactttcaaaattgaaccttgaacctaaatgattatctccaataaccttgtctagattctacgagagcatatggttcaaggcaaatataccccaaatttgggggagtggagttgattgggatgcagagtacaatgtatagcatctgcacacacaacaaataagttgtatcttaaaaaaaatcaaagaaaatatcgtgatgttataataaggtcagaagcaaataaaagtgaaaagctagtgagcaagctaattgtattaaaaagatcacttggataagtttaggaattgtactctcttagaatctaagccttttgaatcctagaaaaaccaatgatatgtttgtacccagcctcactactagcct

SEQ ID NO: 76011 - DNA, 253 bp, Glycine max
actcaactgatagcaatgattaccttacttacttagtattatcattcgatagaatggaaaccctagagaaacgtcgatgatttcgttttttactaaagatgcctttgatatatatattttactcttttatttcaatgtggtacagacgacgaacggtctgaatcatttaaccgagttacggatatacattcaacgttcgggaattatttattttaagtagcgagaatgactagtaaatggtagcacgtaacag

SEQ ID NO: 76012 - DNA, 358 bp, Glycine max
agcttcccattgtccccatagattacttcatcttatgggttgagccataactagttgctaccattaccgtataacgattagattgctggacagtggatgataaagatatggtggatgatggcgttggtcgtttattctactactcttgacttcggcattggttgtccaatcttttgtacatctggtggaacctccagcctggaggttcattatcataaatgattaatgttttcttgttcgaaccattttcatttagatagatagttgttgtcttctttataacgagctatgatgaacatcgaatttactgaatttcatatgcattctgcgacgattattggcattttaattaactttt

SEQ ID NO: 76013 - DNA, 488 bp, Glycine max
  unsure (1)..(488): unsure at all n locations
ggccaattaacctgaaatggatagaaaatgattatttttctcatattatggaagtactaagtatttattacctatacttaatagaaaatacttatcacactacaaaataaccataaattggaagagtttgatacaatntatacaagttntatacacanaagttagtcgtattcacctactaacaaccatctaacgcaaggacggaaaaacacatttcaaattctgatattatcgtatcatgcatccaaggtatgtcaataatattgaagcaagctaaatnttttgcttcacatacaaaattacaagctagctaaaccaaagaaaaagatntttgtaatgattaatctgatggtgctggtaaatggaaatgaacctcattttccaaatagatcattatgaattttggtaatcttcacacatgtataatcaaatatattactaattctttnntataaattatatatatatgattanaatacatttatata

SEQ ID NO: 76014 - DNA, 406 bp, Glycine max
  unsure (1)..(406): unsure at all n locations
agcttcagaactgaaaccagcgagcttgtgtggcgcgtcttaaggctngngtttttgacggaatcggattagtttaggtgagaaattataaatttacttacctaaaatcggaactgaggtgttgaatctcaccgtaatgttaatccaatattcggttccatgattttcccctgcctcttcatttatttcctaaaatcgaaaaaccgtctcatttttcttctggttgctaacatcgtgcaagttttctgtaatgcgttgattntcattccttacnggttcaatatcatgcatttggatctcctccccttgcaaatattntgtgattttttttaacgattacaaatatagttgattttaagtcccctgtttctctctctggtcctggtatgacattctctanttctat

SEQ ID NO: 76015 - DNA, 345 bp, Glycine max
  unsure (1)..(345): unsure at all n locations
caatatactacgtgttctattatctttttgaagactatctatgatgaaactctntctttatctggatcattgcatgttacttgataactacgaaatttgagttaatataatagtcaattttggctaagaatgattggaattgctatagattactattgcttctaatgaaacaataaagaaattaatatctntgcagctatngattagcagaagttaaaagaagaattcaagtactttggaggagaattgatgcaaaaacttgaagaaaagttgacgattgagacagttcgcttatcgcgcacaacagacccaacatgtctccttgctagcggtcagctcacactt

SEQ ID NO: 76016 - DNA, 410 bp, Glycine max
  unsure (1)..(410): unsure at all n locations
agctngcactaagatntctgattcatgttcctaatgtatcgagacattggttattgaacaatggaaactcccgagaaattaatatcgtcattacttttcactcggatgtccgattcaggcacttcagatatcgagacgctcgaaattgaacaacggaagctctcgagaatttaaaatggtcattactttacacatggaggtccgattcattcacatcacatgttgagatgctcgaaattgaacaacgtgagctgaagagaatatcacatggtcataacttttcacttggatgtccgattcaggcgcatcatagttcgaggcattggttattgaacaactgaaactcccaagaaattaaaatgggataacttttcactcggatttccgatccacgtgcataatatatcgag

SEQ ID NO: 76017 - DNA, 494 bp, Glycine max
  unsure (1)..(494): unsure at all n locations
caccgcagctgcagctntaactgaattacaacgttccaattgatttctaaatattgtaatcgattacaatgattcggtaatcgattaccagtgtgtttgaacattgaaattcacattcanatgtgaaaagtcacattctttcacaaaatatctttgtgtaatcgattacactaatttggtaatcgactaccagtgatagtttctgaacaaatcataagattcaactcttcaaatagtttttgactatttcaaattggttttaagtatttctaaaggacataactcttgtaatggttctcttgaccagacatgaagagtctataaaagcagcattgctttgctttgcattgaaacatctaactattcaattcattctttacacaagcaatatttccacattgatttctgagtctcttagaacttcttattctctttcttttgcaaaacatttcaaagtttctgttattaaacctgaaacttggctttatctttca

SEQ ID NO: 76018 - DNA, 230 bp, Glycine max
  unsure (1)..(230): unsure at all n locations
tgctgctactggtggaagcacttcagtttgcttgccgacctcaaggtgatgacacttacatttcttggattctgcacagtntgtgaaagcaatttgtcagaattgtgggactgagctaggtttaactaagtagccatctgccctatctgatttgtcagactctgaatggcggctcttgtctcttgctgaaatctcatattctagatggtcatttgtctcactaactcttc

SEQ ID NO: 76019 - DNA, 293 bp, Glycine max
  unsure (1)..(293): unsure at all n locations
tagactataacttgtcaattcacggagtaggttaccctagatagcccacccngtgcattattattagaacttcttgtaaaactaacacaagcaacaataagaatcaataagaatcgcttaaaaaacacgcaaatcatataaccctaggtcaccacgaaacaaaccaagtntcaaaatccacaccaccccacactgaanacaacacaaaccaataccacacaagagataaagctcaaataagaatcacaaccccatatcccnctactattcataaaaacacgcaataagtcaac

SEQ ID NO: 76020 - DNA, 426 bp, Glycine max
actgcacgcgtgcgagcttgtgcgattatgtgatagtgagatcgccggacatgttgatgatagacatagactaccggatgtgtgtgtttgatgggagactgtgtacatacatgaagtaaaagaagctggcattgtgacactttctactcgtgaagccgagtgtgtagctgcagcatttctgccaagtcatgccatttggctaataagatcgctggaggagcgtttagttgttgcaaaatgacaacacggagagctatgttgataataaatccgcacaatagcttgccaagaatcctgcgatcatgaacgaagtgagcatatagatacaaggaatcatttcattagagagtgcattaccaagaaagaagtagaattgactcatgtaaaactcaagatcaagttgatatatttcaccgcgcctctcaa

SEQ ID NO: 76021 - DNA, 351 bp, Glycine max
  unsure (1)..(351): unsure at all n locations
gacattctttggtggggagcgattggacaaataaacggcacatgcaacaactncngcccaaaattcctttggcatatttttagccttcaacatacatctagtcacattaagaatagntctattttttctctccgctacccatttttgtgtggagatctangaacccgtaaagggtgacgaatccatattttcacaaattcattaattctttgatggaatcgccacttatcggactagagcttgatacataactactctcttttacaaagcttanaatttaaaaatacaatgcctaattttgcttaaaataaccaagtttttatatatatcataaaagcagaatattattgt

SEQ ID NO: 76022 - DNA, 395 bp, Glycine max
gagcgtgcgcgcgcagcaaacacacacttatagacttggtggattcattgactgatatcacaagaccgaaatgcgtgcgcatacagactacgctaccaagaccattgtaagtctacattgatgactgactttagagttgaaaagcctaataacacgtgtgtcttttccaccattacggtaactacttagatgttagccttgagaagctgctaagggcaagtaataccacacacactcgtagttaggaaaaatgtggccaactcatgtgatcggaaagattaaaattgaacgttaggcactgggctcgctaatatactgtctcctttgtgacaacaaaaacaagccccactagctatggttggaaattagataaagcgaaagatgccaccctacgc

SEQ ID NO: 76023 - DNA, 387 bp, Glycine max
  unsure (1)..(387): unsure at all n locations
agctataagctgttcaattacttcagattgttgcacagaagggcaaatgtctatgtggtggtcggcagaggagcagaaaccacagagtctggtgacaggtgcatattntttattcatgatcagttgggttaccaggttaaccaaggcatctagtttaccttcaagcttcttagtctcagttgatgaagatgaattcgtggatacttcatgcactcctctaatgacaatagcatcatttctggcactaaattgctaggagttggaagccatcgtctcaattatatttctggcttcacgaggggtcatgtctccaagggctccaccactggcagcatctatcatacttctcttcatgtgactggagtcttcatataaatattggagaag

SEQ ID NO: 76024 - DNA, 436 bp, Glycine max
  unsure (1)..(436): unsure at all n locations
ctaactgaagcactaagtaagttaccaggtcaattgcattatggaaaccctntaccctcttttgttttgtaagttgcaggttgtgttatatgtggtggggcacatgattctggctactgcattcccacagaagatacaacacatgaagtgaactacatggngaaccagccaagaccaaactttaatgcaggtggatattctggaatttcacatggccagcaatataataagcaacagggacaatggagaacacaccctgntaatcagttcaataaagactanggtgggccacctaacaggcctcaacaacaagggcctagtctctatgatagaacaacanagctagaagagactctagctcaattcatgcaagtatccatgtctaatcaaaagagcacanagtcagccatcaagaatctagaagtccaggtgagac

SEQ ID NO: 76025 - DNA, 276 bp, Glycine max
ctcttcacggacttacatgtgtcacttgtttcaattttttgacaatagctctccactagacctaacaatatacaatcataatattccctgcaaaaaatagcatcatttgaaacagtttcccttgcataaagcgtaacatgcttacaaatacagcgactattcgtaaataatgcaattaactggattgctctctgctctaaaaatatttcccataatctacctcctcaacgtacaagatttgtcaactagcacgagctaaacattactatatttgac

SEQ ID NO: 76026 - DNA, 390 bp, Glycine max
  unsure (1)..(390): unsure at all n locations
acattaccaaaaatcattccacgaacacgaagaagtgggatggttacttaccctggagaagaattttcaaccgacaacaacgggccactaacaaacatgaagaagtggcacccacacccacgctcactaccacngaggaagatgaacgatgatcagaatatggaacaagcattgctcacaggaagaataagaagcatatgccaagaggaaggggatgaaacaacactangaaatgaagagaagacgaagcaaatgtgtcgtacggatgaaacttacgcttntatattactagggtgaagggcatttatgccttntcaccacaccacanagtaactcccttcacaaatatatgttaaaggannaaccaacacttgtcattatcatcaaatc

SEQ ID NO: 76027 - DNA, 425 bp, Glycine max
  unsure (1)..(425): unsure at all n locations
agcttganattgacaacggaagctctcgagatattctaatggtcataacttatcacatggaagtccgattaaggcgcataatataccgagacgctcgaaattgcacaacggaagccctcaagaaattcaaatggtcataacttatcacacggaagtccgatgaaggcgcataggatatcgagaatcttgaaattgaacaacggaagctgtctagaaattcaaattgtcataacttatcacacggaagtccgattaggcacataatatatcgagacgctcgaaattgaacaacgaacgctctcgagaaattcaagtggtcataacgtttcatacggaagtccgattcatgcgcataacatatcgagaagcttgaaattaacaacagacgctctcgagagattcaaatgagcattacttatcacacg

SEQ ID NO: 76028 - DNA, 288 bp, Glycine max
cttgatctcactgaatgacacgagcttcagaactaatggctatttccactacctcgatcagcctgaatatgaagctgaattgacacgatgggcagaaataatggctacttgtaacgagtcgatacggctcaaatcagagctcaatgaacatgagcctgaaaatccaggcatactgtcacgagtcgatcagcctcatttcagaactgaatgacacgagcttcaaattatggctactttccacgatcgatagcgctaatatggatctgaatgacacgagcttcaaataat

SEQ ID NO: 76029 - DNA, 440 bp, Glycine max
  unsure (1)..(440): unsure at all n locations
atgctaacanaataattaatgacatgtttcctctaatagtgtcaaaattacatgcccganaagtgtgtgcttggatacaatcttccaagactatgtaaaataataaactggttgaatacttgaatgatcatgtacgtttaaacaggtgaattttatatgattattagtataaaattagaattttaagctctggaaagcttaaaaggtgtttgtaaatcacttcaaccaatttggagggtgaaattataagtcagccaacctttatgtgttcgttaaaattatacgataatgataataaggtcgataaggatattcagaaattatcaattgtattnttttatttgtaagaattaaaaataattacttgagttaatcaatcgagttagatnttatgtatgttaaaggcatgaatcagtgatgacatatgtgtgttattccta

SEQ ID NO: 76030 - DNA, 437 bp, Glycine max
  unsure (1)..(437): unsure at all n locations
tatcttctgttattttatcacctctatcatatctaataatggtcacatttatgtctaattaccattttacttcattgtaggaaatttctaaagcatccattgcctaagaaatctcgggcagtaagtagacataaccataacgtgaataatcatcaataatagtgataaagtatcattcctttccgaaagaactaacatcaaaaggtccacaaatatcagtatgcacaatntcaagaagctgagtgcttctggtagctcctttctttgtatggtttgggtggtttcctttaatacaacccacacaaatatttagatcccgtaaatctagataaagaagaaatttcattttttattaatctttcatcctttctctagaaatgtacctanacgttatgcacaagaaacagatcgtcattactaactatgttagtgcaaca

SEQ ID NO: 76031 - DNA, 401 bp, Glycine max
ggatccttaagtcacctgcggcatgcaagcttgcttaagaagcttctatggaggctggatctttgagcttcaacgaggtcctacaatggagagtttcaaccatggagatgcagcggaagataaaggaaaagaggtgataggaggcaccatccactatgaaataagctttggaaggaggagtttcaccaccaagagagtgccttggataagaggcttagagattaagcttcaatggaggaaaagaatgagagagagaggtgtgacatgaaattgaatgagaataagaggaagagaagtttaactttgaagtgtgtctcacaagtttcacattcatcaaagttgtgacaagtgttacacatgtttctatttatagcctaagtcactaactaaatgaaatttac

SEQ ID NO: 76032 - DNA, 472 bp, Glycine max
  unsure (1)..(472): unsure at all n locations
cgtnatcgattaaaccgatatgagagacttctctgctagctacanactctggtgtnatcaattacgatcaactggtgatcgattaanatagagaagcttaactttagaagaatatttccagctttagaacttttcttcttactcctacatgatgatgcatgatacatatatgaaatattagagactaagatgcaacacacaatgcaataaccaatacaaatgccacttaagagagttaagcatgtaanagacaaaaattcttcaggctcttcttcaagcttcaaggataagtcttcatgttgcttcccttatctctaatacctaatgtgtgagaacgcanagatntgggccaacattctgaacaagagtgttcttcataaagtaggttctaaaacaactttgtctgacatactcttcacttgatggagaacctccnctttgacattccacacaccatgtacaccaacatatt

SEQ ID NO: 76033 - DNA, 414 bp, Glycine max
  unsure (1)..(414): unsure at all n locations
agctatacagcagaatttagtaatgacccactttcctagaattaaaataacttaatgccattaacctagggaattaaaacaaactaaatggctgagtgtaactgaaattgttggcaaccaaaagtcacccccaacagccaacaagtcagccaccatttggtctcccaaaaggctgatgcctaggttgccaattgggcccttattacaacttgaactanagcctctttagttgattaacccaaaacatatttttggtcagccaactttacaaggattgggccattatttagacaaactaaacactctaaaattgaaataaagtggtgtcatttagtcctccatttgggccatgatacaactcacaaccttggacttttctccttgaaacttgggcttgtattcaaatagtatgga

SEQ ID NO: 76034 - DNA, 396 bp, Glycine max
  unsure (1)..(396): unsure at all n locations
ctcttttcttcctctattggctttagttgaatacacctcttgttgggtctctatttggttcttaaccctctcatgcatcttctttacaaattctgacctagattccccttctttatgtataaaagaagtgtccagtgggaggggaatgaggtctaacggtgttaggggaataaacccatagacaacctcaaaaggggactgcttggtggttctatgaacccccctgttgtaggcaaattctacatgaggaagatactcatnccaagacttatggttgcctttcagaagagcccttatnagggtggataaagacctattcactacctctgtttgccatcagtttgtgatgacaagtggtagagaaagaaagttagtcctaacttacccataaggttt

SEQ ID NO: 76035 - DNA, 434 bp, Glycine max
  unsure (1)..(434): unsure at all n locations
agctngtctcacttaatntagtagcataaacattgagattccatgcactggtattttcagtacaccacactatttggtaaaggttgattataatattcatattagtacttcaattttcattcgacaaaaataatactaacaagtagaagtctaatgagtagcattattntattgcagtctaatgagtaacattaatgtcatgttaatatatgaaattcatatagttttntgtgtagtgaaacttacatatgaagccagttcacacagatatatattataaatgcacgagaggtgtaaaanaagaaaaaaatgtgatacaatgaataatatgataaaaaatacatacataaattattagataatcttattaattatataatggtaatataaaatttgaacatatgcatactttcgttcagtttcatgtctcccat

SEQ ID NO: 76036 - DNA, 466 bp, Glycine max
  unsure (1)..(466): unsure at all n locations
ntgtggagtagaaacatgggaccaactcattntatttccaaanaagatatcatatctagtcaaggtctgagagaccatacaagnttcctaacgatttctaattatgtgggccattaagtctatcatatgctgacaatagccgagaagcccatgaatctcttcgggggcggagtaggtgtctgccatcggcttggccttggctaataatcggggaagttcttgactcccgttcaaggtaagagcaaaccgatccatccacatggttgcctcttggtgtaaagagtcgatcacccttcctctagcctctttntccgcatatacttgggcatactcatccgcgattctatgctcgtgggccgtggctagacccaactcttcttggtacttggcgatgatagctaacatgggtggttctgtctcgcatagacgctgagacaagcttcttttggacctgaacaagcaatca

SEQ ID NO: 76037 - DNA, 329 bp, Glycine max
  unsure (1)..(329): unsure at all n locations
agcttagtcgaattgcatcttcaggcactccagccaatctaatagtattgtatatttctatgtaagtggctaagtgtgcatatgagtcttcatttggtaatccatgaaacaaattattctgaatcaactgaatcaatgatggtggataagtaaaagtttgtgcttgaacttctnggtgtgcaatgctggtgaaaaattgtggcacattataacttgaataatcttccagagtaactcttcttggctcttcagccatgatgtagtcttcactatgatctaaatgagaatgttctgccatatgaaaactagaagatgcctcagaagattga

SEQ ID NO: 76038 - DNA, 269 bp, Glycine max
  unsure (1)..(269): unsure at all n locations
gcttctggtgggacatcttgacttgctntccaatctgtcattcaccacttattctgtcttcttctatgttcagatagggaatgcctctaacagcacctttgtcaatgattttcttcatgcctcttaagagccgatgtccaaatctttgatgccatattctgacttcatcttttttggaggatagacatgtggaggaagaactggcttcttgaggtgtgcataagtaacaaaagtcctttgatctgctgcccctcattataacctcactc

SEQ ID NO: 76039 - DNA, 461 bp, Glycine max
  unsure (1)..(461): unsure at all n locations
agcttagtgagagaacatttttcctcactcaaatatcaagcttcaactgtttcattaatgttgggagntaattttggaaaaatacataactttaggacaaatntaatgttactatattaactaatttccttgtgaatcagttaattgggtcttctaaaaaggaccagagtaaatattactgggaatcatgtataaaagagagtgaatattatgtattcagcacatgcgagctcagtttgaaacataagagggaaagcctctggaaaacacggaaacagtagcattttagattggagagaagaaaacaaagaaagatatccagagactgcaataagcaatctccacccatgccaatgcccacccactttccaccanaacttttctttctcttctcacaacttcctacaccctccctataaacattcagctctctcccaacaagaccctcttgattacacact

SEQ ID NO: 76040 - DNA, 486 bp, Glycine max
  unsure (1)..(486): unsure at all n locations
cttaagcaccgcngctgcaactgtctaccgacttcatgacaagacaccttttcacaaaccattataacaccaacaaaaaggaattntgcagcanatagcctgtatggttcaccccaaattccgttgtcatatgctaaacttgatcccatatccactcaataattcaatggtagccataaccccaaccaaggttcctcaacctccatttttctgaggatacgactcgaacgcaacgtgtgcttatcgtggaggagccctgnggcattccattgagcattgtatgaccccgaagcataaagtgtgaagtctaattgatacgggctggctgatnattgaggagaatcgctttgtgaatcataacattgacaagcaacaccatacatggngcaattctggaagctgttgttatgactcatcangaattttcaagttatgccattattatanaccacagttacaatgcttaatgatatggataaaatggac

SEQ ID NO: 76041 - DNA, 473 bp, Glycine max
  unsure (1)..(473): unsure at all n locations
ngtcttgtggtgaggaanagggacaatgaaaaaacctttctccgtttaattatagggacatttctccaccagaattgttgcaggaagatggaaaaactttggctgcagaaacattaccagcatggggggtggatgaggaccaagaaactaatattgtggaatatgttgacggctatcaattgagaagtgtggtactatggaggcatgagcctaatttcatttctgatgatttgaaaaggtgttcttctgtggctagtgatggaagttctgattcaaatacagattctggttcgacatctgattctgatagtgaacatgacagggaggaaatgagaaagaagagggataggattctggctgataaagcagcagctaaagcaatatatgctatctaggtacgggagaatatattggtccaattagagggggagaacgacagtctatataatatacttgatgagcgagctcaacta

SEQ ID NO: 76042 - DNA, 455 bp, Glycine max
  unsure (1)..(455): unsure at all n locations
gctntaaattgaataaaacgttcataactgcttgtaatctattaccatatatgtgtaaacgattacacagngcacattttgaattcaaattctaatagctgttgtaatcatttttggccattggtaatcgattaccagagagtaaatctcttgaaaaagactttntaatttaaatttcttggccaaaccttttgctacttcaattggaattccctctctatttaatatacccttcctaagactctagagactggcttgatcatccatcttgaatatctttaatttcttttgcttgcataaatctttgagaagcatgtgatccatgtgatcctttggcatcatcaaaacattcagcttgatcctttgtctacaatctccccctttttgatgatgacaatctctgaaatcaagacaagctatatacaagatgatagcacgttcacacaacaccgtac

SEQ ID NO: 76043 - DNA, 461 bp, Glycine max
  unsure (1)..(461): unsure at all n locations
agcttattgtaatggattacactatttatataagactatgattgatatttaaagagtctctgctttaatcgattatcaagagatatatcgattacttctctcttaaataatgtttcagaagtgatcaagaacactttaatcgattacattgttcttgaaagttttccagtttttgggagaaacactntaatctattgaaatgataattaatcgattacttctttgaaataatcgattacattttatatttaataaattacaggagtttatataccgtttctctataaattgtccccttgcgttcttacttctaacaacttttgaatgagctagaattatgagctcatattagtaaaacanagaacgaaagagaaagtgctntgatacagtgtgcctcacaacttctaatctttgattataaagatcatattgtganaagtngagtgtgaaattcttttgag

SEQ ID NO: 76044 - DNA, 414 bp, Glycine max
agcttctatataagctgaaccattttatcaataaactcatgttgtgttttattcagaaaattagagtttatctcttttatcttagtgagagtgattctcctaaattcttgagtgattcaagaacaccctggctgtatcaaaggactttcacaacctttgtgtgttgccctcgctggaaagagtgattctttccttccaatcatctccacccttgttctttcaaaccacaattccagaaaatccacctctgcccaaaattatctcgtgaaaggtctcgttttgaaattcaatttacgctcaagaatcacttaatttgagtgtgtaaaatgggaattatggtcacgagataatcttggccgaataaatgggaaaatgccagtttccgtcctaaccaaatgtccgttgatctcgcac

SEQ ID NO: 76045 - DNA, 462 bp, Glycine max
  unsure (1)..(462): unsure at all n locations
agctatggacttcggacgtgcattgctggtnaagatattgtggtctgaactgcttgagtaatcctgacgggttaccttctgctggtgttcatcagccatgataaccgcttttggtgatatgtcgtggattccctcgatgatggngagtctgatgatgtttaatcacaaaaatctagtttcttccctctactaataggaagctatctggtctttggtcttggcacgtaattatcattcttcctctccggctctgcttccttcttaacgcagctntcatctccaagtccaaaggaactatattgcctgtgggagatctatgcatataaaaaactaatagaaacaccggttatccagttctagaagaaaacacatatagattgaaagcatatattcatagttaatcaaagaataaagaatagacacctacgactaaactaactctccacatagaaagaagttcct

SEQ ID NO: 76046 - DNA, 446 bp, Glycine max
  unsure (1)..(446): unsure at all n locations
agctcgaancagnccaccatctnctgctctgattgttatttctgacgcatcatcagatgaagcagctgcctcttctgattcaccaactgcagaaacaactgacccccctgtttccccaattggaggaagtgttgatctttctgattcgccatctggagaagcggttgctctcaccgattccccagtttaaacacttctgacattggagattcttgacgatactttatgcttcttggtttactattatataaagtatggttataatatagcattaattttatgtctgtatacactgctagttctatttatgaataagaagcttgctctttctgaagcattatgaatacgttaactttgtttctatgacatggcagtgaaacactcttatctttctgtgacagatgggtgtatgtctttattatgaattgaacgcatgattgtgatgg

SEQ ID NO: 76047 - DNA, 325 bp, Glycine max
  unsure (1)..(325): unsure at all n locations
tatatatgatgtttattatatataagtgtttattagagagaatggtgtttttatagtgcgtcgctataaaaagtatggttcagaagaagaaagaaaaacacctcagaatagggggtaagggtgaccaaaataattgaattgaaatgataaatgtgaatatagaagggagaaaaaacaaaaaggaaatttaataaagagccaacatgtgtggaaatagataagatatntaaagctcaattgtcaaatgtataatcacactatgttaanaaagaagtatggngatnnnnnataaaaaaggaaagtaatatactctgagtgcattaaa

SEQ ID NO: 76048 - DNA, 440 bp, Glycine max
  unsure (1)..(440): unsure at all n locations
catcacgccgctgcaacttacacaatgtatatgcccctacctaaataaaatatctaatttcttaacctagggatttaaaaanaaaaacttaatggctgagtgtaactgaaattgtggcaaccaaaagtcacccccaacagccaacaagtcagccaccatttggtctcccaaaaggctgatgcctaggttaccacatgggcccttattacaacttgaactaacctaactaacgccctttagttgattaacccaaanaatatttttggtcagccaactttacaaggattgggccattatttagacaaactaaacactctaaaattgagacaaagtggtgtcatgtagtcctcctccatttgggccatgatacaactcacaaccttggacttttctccttgaaacttgggcttgtattcaaatagtatggacaacacttgttg

SEQ ID NO: 76049 - DNA, 400 bp, Glycine max
  unsure (1)..(400): unsure at all n locations
gactcacactctttatagaagatgattgtattttcacgagtctatgctttaatcaattacgaggtgatataatcaagtacttttctttaaaagtgtctcagaggtgatcaaaaatactttaattgattacattggtcttgaaagctttccaatttttgggaagaacactctaatcgagtgaaatgataatataatccattacttctttgaataggcgattacattatatatttagtcaattaccggcggttataactatatnttctataaatagccacctcttgttctcacttctaacaacttataattagctagaattatgagctgatattagtaaaagacagaagagaagaaacaagtgcttagaaatagtgtgactcacaacttctaatctttgata

SEQ ID NO: 76050 - DNA, 252 bp, Glycine max
  unsure (1)..(252): unsure at all n locations
taagtcacctgccgctgcaactaagatggacactacttgtggnaggaattnatcgcaaactgaatcattaatgcaaaagagagatcctggggtgcaactcgtaattccggggtatggtttgaaaggggggaaaagaagatttgaatgcaaaacgtccccttttctcactttatatttggtgcagggttgctccccagcgaactcatctcccatgcgagcaacctgcacttttttttctgaaagaacatacca

SEQ ID NO: 76051 - DNA, 324 bp, Glycine max
  unsure (1)..(324): unsure at all n locations
atctcgcactttgtaagttgagtcatagaagttattgggatttatgtctgggaggaaaacaaatttaataaggacccagcgattttttcttattatgggctgaagtganatcaaaaactaccattggactaacagaccgttattctacttaataaggaaacaaatgaattattataggtatggaaacctttcctgagacattacctcagatacattgtaacattctcacaacaatcttgatttatgagatatctctatattactgattgaacggcaacaaaatgacaaggtttaactatttttgattatcatgcactattattt

SEQ ID NO: 76052 - DNA, 331 bp, Glycine max
  unsure (1)..(331): unsure at all n locations
gaacttaagtcaactgcagcatgcagcttatctgatcttatcatttcatacgccaattctgatcctcaaccnctcngatgttaaaagcaattacatatgtttggcctgctattatagttttgtaaaagggtaaattaacactagactttatttttctatgcactgctagggtaatatcttctcactgtcgaccaactatgatttataatagttacgcataaagtaacaaacttatcttatatgccgatcctattacatgacacggtacaaattcttcatcctatctatctttaatattaaacattctccctggcaggacgaataatataca

SEQ ID NO: 76053 - DNA, 459 bp, Glycine max
  unsure (1)..(459): unsure at all n locations
agcttcttcaactccttgatgttatctctcatcctgtgtttcctttgtttttcatatgcatgcgtatctttctgttggatttttgtgtcattgataactgttaattatgagtatattttggcgttaaattatataagaatgtataatttcactcctaattcttcctttttgagaaaataattgttaaattaacatcatataagttttcgtgcagagaaaattaanagtgatgaaattatgatgcttagcgagtaaaatatagcataagacagcacggctaattaacgaaagcaaggctaattaaagaaaaaagactaattaaggaaagaaggctaattaacgaaaacatgataattaaggaaagtttgattaattaatgaaagcaaactaattanggaaaacatgctaatttagaagctcgcttagctaagctaatatgcaagcattgggagtcattca

SEQ ID NO: 76054 - DNA, 461 bp, Glycine max
  unsure (1)..(461): unsure at all n locations
agcttgactaggcgagttgattttatccttagtttcttcttagttattagtcaattcaattaagaatgagaaatcccaaagagaaaaatgtccgattgattttccgctttattttactaaaagatgttttttttattattatattattttttacctctttttgatttccaatgtgattacggcacgaccgaacggtcggaatttattttaaccgaagttaacggataatacaattcaaacattcggtggaaatttattntatttttaagttaagcgagaaatgacttaagtaaaatggcttaagcacgtcaaaagggggtataaaaagtaaatgaaatgagaataaaaatacacgaaacacaatgtggaccaccatgggtacatagaatgaatcgaaaagcttggttcaaggtacttacccgttgaagatcgaagaacgatgaagaacgaatgaagaacgt

SEQ ID NO: 76055 - DNA, 421 bp, Glycine max
  unsure (1)..(421): unsure at all n locations
agcttgaaagaggaagtgtagaatggtgaaatntcttgtctttattcgttgaccacagagtggtacttggagatatgtcgcgggggtcaggagaccttggggacgtcgggtggggtgctattgcccaaaaccaagcttgaccaatcccgacccaacccaggcatagtcagtcagtgagaacctgtgatgtacctaagcaggcgagctccttgcagtcaacagataataggaacaaagaccacaaagcaaggaaggcttgtgtggtggctggccaactgtggatcttgtgtgatatatgggttatggcctctggtaatcgattaccaaggatgggtaatcgattacaaggcttaaaaatgaagacaggaggctaagatggtctctggtaatcgattaccaaggggtgtaatcgattaccatg

SEQ ID NO: 76056 - DNA, 443 bp, Glycine max
agcttcattatgtattcattttactcttggtttcacttggttactttcaaactcattaaaagaggacttacgaagtaaatgatcggttgaaactttattttacaatgattaactgaggttacgacacaaacaatcagttgaacttttgttttacaatggttaagtaagattatggcacaattaatcagtggaaactcactttacaatgataaaaaggagattatggcacaattaatcggttgaaactcgctttacacaaagaaatgagatcactgatggtagaagaatgaagatgaagatgcaaaaagcaagagtggaaccctaagggtgcatagaatgaattcacaacttcaaaaataaaaactaaccggttgatgaacgaagaacgatgaagaacggacgaagaacgatcatggaatcgatcacggaaacgtttcagaaac

SEQ ID NO: 76057 - DNA, 457 bp, Glycine max
  unsure (1)..(457): unsure at all n locations
agcttaacaaacttataaatcaagtgatcatgtattctgaaatatagggggagaaaacggatgcacattntatctatatacaattgtttgttgcttgcttgaatcttgatttcaggtattgtattgtcatcatcaaaaagggggagattgtagatgcaattggctttgatgttttgatgatgatcatgatgatgtgttgcaattgatgcaaatgggcttttcaagattaanattcaagacaatacttcaagattacaaggcacaacatcaagatgatcactagaatattangaagggaattcctaattgaattagcagaggtttggccaagtgatttaaaataaaaagtgttgttcaaagggtttactctctggtaatcgattaccagaggatgtaatcgattaccagtggccaattacattntataacagctattaaaatttgaattcgcaaattt

SEQ ID NO: 76058 - DNA, 460 bp, Glycine max
  unsure (1)..(460): unsure at all n locations
agcttattggcaaataatacttgtattctgtttaattttatgtgacggcngcgtnggtgtaagtttgaacaggcagttaagaatatttggttgagtagttaatggaaataatttaactgaaggaactggacataactcttagttaagaagggaaccaatataaattttactttgtaatattcgacaattatcttaacgtccgttgcgagaaagttttcaagaacacgtatattttgtttatctcaacaagtagtaataaaataaacaaagctagaatatgtttttttatctcataaaactgaaaaggaaataagtttaatttgttcaaaattaagttcgaataaatctaaacttaaaattatgatattttatattacttacgtatataattaatgtaaatataacattatggattgtgtatgtaaacaatatacatgtaacatttntacatcttcatatg

SEQ ID NO: 76059 - DNA, 468 bp, Glycine max
  unsure (1)..(468): unsure at all n locations
tcttcgtgggtgggtgggttctgtctcgattaatggcatgatcactggcttacatgttcttaattagctcagttgcttcttcaggggtcttcagttttatctttccccttgcagaagcatatgtggaagcaatgacttccaagattattttgatgatgccaaagaatcaagaagtaagcatgttccaaagaatcacgagtcataaagcttcaagaatcaaagttcaacgaatcaagattcaagaataatcaagtttcaagattcaatcaagtttcaagaataatcaagatcaagattcaagaatcaagagaagactcaatcaacataagtactanaaaagtttntcaaaacattgagtagtacaagaatatttcacaaaatcttttaccaaagagtcttactctctggtaatcgattaccagaacgtagtaatcgattaccaattaccaacattgtgtactaaactga

SEQ ID NO: 76060 - DNA, 437 bp, Glycine max
  unsure (1)..(437): unsure at all n locations
gcatgcaagctntacatgagtcgaacaccgcaccancaaacttctcatctcttgtgtgtgatttttacatgggagacatatatacatatgaggtctcgattgaatgacaattgcgtcctttacgtactttatctaagaattctcatgaataataggccttattcatttgcacataaacggtttgttatataacttgtatatactccattttctagccaccaaactatagacttggtgcatatattcttcctataagactccacggagtcaccacatgctccagtcttcaagaaaaaaacgcgctccattttctttaattaacacttcattaatggaaaagaaattataattggtcgttcctctctcacagcatatggcgtgaatatcttatgaatcaaatcataattatcatgatgtcgctccatcatgaataaacg

SEQ ID NO: 76061 - DNA, 387 bp, Glycine max
ctacatattgttaacataaaaaatttatacaataattatattttaaacagagtgccaacatgtgagatgtacattcctcatcaacattgacccaaatgtcaagtctacatataaaaaactgataaatgtagttatgaactaaacaaaaaaacattaattaatttgtgaaagtcattattacatgttcatgaagaacatattgcagagacaatttgagaatatggcatgacataatattacactataatctacgttggtttgacactacaaaaaaatcaattgaatatatagcactttaagtacttaaatttaatgtcgcaattataacacttacacaggaaaatcattggctcttctattgtgacccaaccaccatttctgattcat

SEQ ID NO: 76062 - DNA, 61 bp, Glycine max
ctctaatctatgaaataaagactaccacggaaattctttcttgctgattttatttctagcg

SEQ ID NO: 76063 - DNA, 458 bp, Glycine max
  unsure (1)..(458): unsure at all n locations
agcttaaggctaagtcttcatgttgcttatgtctctcctcctatctctaacattntcccccaatcttagttctaatgaagttctttccatagttaattatttattcctaaggtcaaccaaatccgatgatcaaggtcgaaggatgttctttgccttaaaccaatactccaatgatcatatatatattaattttgttggatcaagtggcctcggaataattaagaaagggggtttgaattaattattaatgaacctttactaattaaaaatctatccttcttaatgttactagaatcaattaggcttttactataatggtaagaaagttaagaacagaaatataaacttaaccaaaagtaatagtgacaattatagtgcacagcggatattaaagagtgtagggaagaagaagacaaacaccagaatttatactggttctgcaacaacccgtgccaaca

SEQ ID NO: 76064 - DNA, 466 bp, Glycine max
  unsure (1)..(466): unsure at all n locations
agcttatccaaaccatccatcatatgttggagccatatggtaatattaaattggagcacatctatatatagggaggccaactacttcgcagggtagacctgttagctaacatggctagtaggatctggacgttgatatttngatgtttgagcaacaactacttagtcgagtcagttgctcattatagatgccaaggccatggggttctttacccctangcttattgtgtactttccttgggccttaacttggccctgatttatcatttaaaaaaaaaatagatcttactaaagcactgattaaataattaaaaaaatatttattataaaaaataaaaaacaaataagtaccttaattttatgtatcctaataaaaatatttttacttttagtttcttaattggtgttcttagggcatggctaacatttgaaaaatattatataccactttaaagtattatcatggg

SEQ ID NO: 76065 - DNA, 455 bp, Glycine max
  unsure (1)..(455): unsure at all n locations
agctngaatcggacttttcgtgtgaaagttatgactatntgtaatcctcaagagctggcgttggtgaatttcgagcctctcgacctattagtgcgcccgaatcggacatacgtgtgataatgcatgatcatttgaatttctcgagagttccgatgtttaatttcgagcgtatcgatatattataagcctgaatcggacctcagtgcgacaatgtatgaccatttgaatttgacgagagcttccgttggtcaatttcgaatatcactatatgtgatgcgcctaaggtggacactcgagttaaatgttatgactcattggatttctcaagagattctgttgttcaaatgcgagcctctcggtttgttatgggatcgaatccgacatccgtgtgaaatgttatgaccattggaaattctcaagagcatctcgtcttcatattcgagccgctcgactta

SEQ ID NO: 76066 - DNA, 440 bp, Glycine max
  unsure (1)..(440): unsure at all n locations
agcnttggagaaccaagccaatcagaatgctagatttatatagatgggaatagaggtaacaatggcggtaatgacggaccgaggcaaaaccgggttgagggagtaaagctcaatgttcctcccttcaaaggtagaagtgatccagatgcctacctggactgggaaatgaagactgagcacgtatttgcctgcaatgactacactgatgcgcagaaagtcaagctagcagcagctgaattctccgactatgcccttgnttggtggcataaataccaaagagaaatgttgagagaggaacggcgagaggtatatacatggactgagatgaanagggtgatgagaaanaggtatgtgcccactatctataacagaaccatgcgacagaaactccaagggctgtcccaagggaatttaaccgtggaagaatattataaaaagat

SEQ ID NO: 76067 - DNA, 466 bp, Glycine max
  unsure (1)..(466): unsure at all n locations
cctgacgcatgcaagcttgaagcaagttattgaaactganattgttctatccacctaattgtatagtgtgctttntggcacctcttgcctcatggcattaaaatcttcttctaggccaggggcatttcttgtgctccttgttcatgatgcttgatccatggaacaaaagtattcagagcccaatataagtctacttttggaaaaatgagtgggtttaaactgaaggtttttcctganatttgtggcatgctgtttgaaataaagatatctgtaaagcaatagtatggatttgtaaattcatgtggaaaaaggatttgatcatgttttggcagccctcatgtcttgtcaagcttctcagtttataatcctttcgttgtctcgatttaatcttgagaccttcattntaattnttctttcttatcttctactnntagtttaaaataagttcacttatgttatttcttac

SEQ ID NO: 76068 - DNA, 460 bp, Glycine max
  unsure (1)..(460): unsure at all n locations
cagattaaagtataaaagtatttatctttaaattattaaatgccatcgttcttttattcactttccatttattatttatttaatgaaaaatttaatgaaatccataacttatttggattgaagccaaaaacataagatctgattcagtgcaaatccgtgttcctttacttttcgagaaaaatttacttccttagaaaatgtcgcgtgcgatgtgcaacccaacaatggtgagtaggagtgttctatggtcccaaacgagttcaaaatcggtgatagagacaatgagtggttcccacgagtttgtgatcaagggttactcactaacgaaaggaatgggcattgggaaatacatcgtgagtgagactttcatagtgggagggttccaatgggccatatactttntccctgatggtanggaccccaaagataatgccgcttatgtctctgtcttcgttgcact

SEQ ID NO: 76069 - DNA, 308 bp, Glycine max
  unsure (1)..(308): unsure at all n locations
ctgccgcatgcaancttgttaaaactattatcacatgactgcttatagtttntcaatcagtttttttcttatcaactcgagacttaacggcaacacttggtaattatccaactaaactgtctattggttaacctacacattcctctgtcttgcacgttacaaggtcgaccatctgcggtgaggctcatgaaacatgcccatgtatctccattgtataacactctctaaaatttactatatgcgaaattaacagagaccatgtatacttctgaaggatttctatttttcagtcaggtcctataaccaac

SEQ ID NO: 76070 - DNA, 380 bp, Glycine max
  unsure (1)..(380): unsure at all n locations
tattcttattcatcactccactggccgttattgtgattcattcgtctganagacatgncnatcgattaattcataatgacatactagtgcggagatcaaaactaatatatactgaaagagagtgaaggacaaaccttatttatctatggactcaaaattttcaatcaattgctgagacctgcattatagtacaaagattaacattttggtacgtaggattagagtttaataagaaataaaaatgacatcagatacacttgcacgtcatttacaataatacatgttcagttgggggtctcgagagtcaaggaccgaaattaaggcttttctaggctgtgaacagcttatgcacaaaaagtagaatttcaccgcattgatat

SEQ ID NO: 76071 - DNA, 394 bp, Glycine max
tttcgatcccggccgacatccaaggaatactacatgttatttgatgtgcgaacatagctcttataatgtccagaatgagtgctggaaccatcatgaactcatagcacaatatagagagtacttaacatatctctcctgcgatatggaagaaaattgagagaagcatgacattcctgtgtaacgttacatactcatatatcagtctagcagcatacgaaagattttaaaacaatagcgatccacaaatcctatatggcgaaacgaatgttcaatataatattaccgcttcttctctctcatgaatattgcaagagcaatctgaggatatgcacttagattatttatatcaggagccaaaatatattacctattaacttacatttgtgccactgac

SEQ ID NO: 76072 - DNA, 468 bp, Glycine max
  unsure (1)..(468): unsure at all n locations
agcttggaaggtagtcacacctcacaatatatgtatgtgtgtntatgtagcgaaaataccttagatatgcatgtatgtaatttaggtagcaaaacatacctcacaaaatatatatgtgtgtgttgaggtagcgaaaataccttagatatgcatgtatatagcaaaaatacctcacaaaacatatatatgtatgtttaggtagcaagataccttggatacgcatgtatatagcatagattcctcacaaaaatatacacatgtttaggtagcaaaatacctcatgaaaaaaaaacaaaaacaaacaataacaaaaaatatatctttcggctganaaaccaacacgcttttgaaaagaaataacttccagcttttctttgaaagagatgcactgatcataacaccaatntttgaaaaaaaatgtgtatacacctgaaaggtgaatgctatgaatattcttccgaacaccca

SEQ ID NO: 76073 - DNA, 453 bp, Glycine max
  unsure (1)..(453): unsure at all n locations
agcttcaagaaaaagatggcctcttcanattccttatttncagaanggaattctatcaatagacctccaatctttaatggagagggctaccactactggaaaacccgaatgcaaattnttattgaggcaatagatctaaatatctgggaagccatagaaatagggccttatatacccaccacagtagaaagagcttcaatagatggtagttcatcaagtgaaagcataaccatagcaaaacctatagatagatggtctgaagaggatataaaacgagtactatacaacttnaaagccaaaaacataataacatctgccctgagaatggatgaatatttcacggtttcaaatcgtaagagtgctaggaaatgtggacactcttcgattacacatgaaggaaatacagatgttaaagatctatgatanatgcactaactcatgagtatgaattat

SEQ ID NO: 76074 - DNA, 371 bp, Glycine max
  unsure (1)..(371): unsure at all n locations
gacccaagcgacgcagctgcagctatgatctgctatttattaanaaaatgttcctttcattcctccatcgtgcaggtctttcatgaccgaaatcactcaatacttattaaaagaatgagcctaaagagaatctagatctaatataagagaaactgatgacttgcactgaaaagaacttgcgcttccaaggccgctatgatcaaaggataatcctttaaaattatcaaggggctatttgaatatatcaaatagataagtgaagttttttacactttggtatgaagcacaatattcattgtttttttatgaggcgaaactgaacaacgtaatttaatttttagtttatagaaggcgccttttttaatattatt

SEQ ID NO: 76075 - DNA, 464 bp, Glycine max
agcttcattaactgatgcagatcctaacacaattgtttcttattatacagtaccttcatgaacaaggacaccatcaatgtttcaaatgatcaatttgagaacattattatgtcatctaatggtaccatgcctttctatcacatgcctgaattgaaaacacatccttgttcatatgaagcaccaataagtaataaggacatggttcaattttctcgaggagaaaagtatcccaattctccatggcttctttcatgttcaagcactataccttcttctccttcttcccttgtggctccacctgtgacggagatttcattgactaatgtggaagataattgcactatttggccggagctcctactagaggaccctctgttcaaaatgatttcctagtttgagattaatattttgtgttacgcgacaggaatttagtgttatattatttagtcctatagtcttacaac

SEQ ID NO: 76076 - DNA, 440 bp, Glycine max
  unsure (1)..(440): unsure at all n locations
agctngccacccagctcgcccaagcgagctcagcttttcctggcgagctangttgcttcctccagaaggcaccgccttctgcaaaacttcctggaagacccanatgggtctggttgctatttgcacccccccctttttactaaatacacccctttcctttttttgctgattatttttccataacgttacggaaacttacgaattacgtaacgatacttgttttccttccataatgttacggaaccttacgaattacataatcatcccttttttgccttctggaatgttacggaactttacggattgcacactaacacttccttttaattttcggcatgtcacggaacttcacggattgtgatacaatgctttcttttgacttccgacatgtctcagaacttcacgaaatgcctaacgatgggtgccaagtaccttgaagt

SEQ ID NO: 76077 - DNA, 432 bp, Glycine max
  unsure (1)..(432): unsure at all n locations
agctagtaaagnggttggactccaaatttatcaattctcttaagagagcacacgccacctgaattacataaaatatctcactctactctttccataatgaaaaccatgcccaactcaataagtcttttacaattaaagcattagtcaccatagatccttgatctttttctcttcctttcttcttatctatatcatttcctaaccgggactacaataaatgaacaactggtattttttctcttgtgagaagaagatagattaacaatggtgcaatctttttaagctgaaaaattctgtgctaattcaaatcaactcttaaacacaagttttcccctaaacttaaatggaactcttttcatgcataattgctctcctagctagaggcgagcattctttttattttggctcgatggttcaagaagataatacttt

SEQ ID NO: 76078 - DNA, 458 bp, Glycine max
  unsure (1)..(458): unsure at all n locations
cacctgccgcatgcaagctngngctcttctcagtgtcattctctggccacattatttacagcttaaatatgttattatagaatctgattgcaaagctgttactgatcattttaatagttgttccaaaggcatttcagaatttcatgttattatggataagtgtangcattaattctccactattacaaactatagagtgagttttgtaaacagacaagctaattttgtaactcataacttaacaaggactttaagatttatgttagttcttgatagtgtttgattacattccctcatgtatttatgaatgaaataatataactatgtttactttntcaaaaaaaaaaaaagtttgttacgtgtntcttacacacccaaatccgatttatatatattttgcttggaccggtggtacaacttggtacattacactgagctctatttataatacatcttcc

SEQ ID NO: 76079 - DNA, 460 bp, Glycine max
  unsure (1)..(460): unsure at all n locations
ctctctctgagaagaatctgcagatttatgataacattattatttgaacaaatnttcaaaactctggctaatatcatctaaaaacttcaacatagcacaagttagtaactgacattgctaaagcatgcaagaacccgaggaacaccctcacttggaccatcaatgccaggaatgaaatccattcgaggtccaatccagttaaaaggcctcacaattgtgaactccaagccattttcagcaccctcagctgccaataatcacacatcagtgagaattaacaaaatntgaaaagatgaaaaaaaacaacacctaaacaaaaacaaatcataactcaccataaatcagcctctcaatcaactgtttcgcacaggcataagaccacctctcgttttcaatagaaccaaagatgcaaggagactcgtcttctttaagaacatagtatgccggatcctaacacaaa

SEQ ID NO: 76080 - DNA, 222 bp, Glycine max
  unsure (1)..(222): unsure at all n locations
tgccgcatgcaagcttgngagtggcggagttatcagcggctctgcatcttgttctcaacatctctgaatatttaattatatgggacgttggccatcaggtaatcttatttcatcttatctgcttcttttcttttcactgaaaattaaataggagaaagagataggaaatccaaagtgtaactccacattcaactcatttagagaaattcgctctggtaccaa

SEQ ID NO: 76081 - DNA, 318 bp, Glycine max
gtgtggcctgcggtctaagattagcctgatcctgtgtctcttaagaagcgcgagatacgaacagcacctgatggtgactggtttacggttggacatgtattggctgaatgatggacatcgttcgtattgtccggacttgtattggtgagatatatgaacctgccaactatccttctattagaagaagaagtatcatctgatagaggagtccctgatgtagcttcgtactttgtggagtattccatatgagtggaatgtggacgaaaaccaaccatgcctgagtcagaaagaatatccagggtatatttgcgttgacat

SEQ ID NO: 76082 - DNA, 447 bp, Glycine max
ccacaaataattgttaaaacattttattcatatatatatacaaaagggaagcagacatacaaacattacaaaggaaaatacatcgttacgaagtcatatttgcacacttgaataaaggctgccgacccttgtgacgagcatgtggggtgctaataccttccacatgcgtaaacaactacccgaacccttattttaaaaatacaacagaccatccttatctttggtcttctttacgttcttctcgaataaacagtggtggcgactccccgagttatccttcaatgaaagatgcacccttggtccgaacgagaggactttacgcgcccccgcctgacggcgggttgcgacactcttcagtacgctttgaccaaacctgactatggaagtgatgcccgtgcttcgaaaccacaacaacaaatgtcaagagtctaatgcatcttatctacc

SEQ ID NO: 76083 - DNA, 375 bp, Glycine max
  unsure (1)..(375): unsure at all n locations
agctntgcttctacagtacatactctagcattacatttatatgtctcatgctntgtgcaatcaaaacgttatattatattcctagctacgtaacgtaaagagtaagatcattcagttcagattctaagattacctcccagtctcacttaaaatccaatgtcatgatactagtgatcaactagaatcgagcattatgagtaaaatgaaattacccatagcaagtagaaaatatttatacacacatattatcacaaaggacccatatgggtacaaagattacatccaatccttaagacaaactaatcgattgtggtgcatggcacaagactaacacgagaagtggcataagaaatgatccacagtcataattctgca

SEQ ID NO: 76084 - DNA, 366 bp, Glycine max
  unsure (1)..(366): unsure at all n locations
gcttgagttggntcgctctatcntttgttaggntttctttgaattgtcatcagatatgtcttcaacaaggttacccacaactcggagaaaatctcaaatctttttgaactgcatcaggaaacgtactcatgtctggcaaaaaaggttgagactgttgtgtgagggcaatatgatccacatcttgtatggacttctattgttttctcaattgggtgtcctccacctctgttttagcctttgtcttcacttcaacattgggctcctatgcaatatgctcattcatctgtaaataaagagatacagtgttcttcatcaaattctctttcggaatttgctcccctaaaactccattatgagttgtacgct

SEQ ID NO: 76085 - DNA, 382 bp, Glycine max
  unsure (1)..(382): unsure at all n locations
ctaagcacctgctgcatgcaagctgatgatatggngactcatcacatgttgttcttgtgtgtgncgcgcgatgggcacaacaagattncacatacacatagcgcgcattaacccaccattctctgttgccaccttcaactgagctcacgtactctcacgtgtcacatatacttgtttctctcaacaccgcgtccccatcaatccgtcgcagcttacacaccagtgcaagcgaaacaacactcaaacagatcaagctattacacccaagcataacacgagcataggcacaatacattgccaaaacaccaaccatatcacagctcttctcacttatagacccaagaagcaatatctttgattcaattcgctaaccgttggatcg

SEQ ID NO: 76086 - DNA, 467 bp, Glycine max
gtcacctgcggcatgccgcgtgtgtaatgtcatctacacatcttctggcgttttgtctatgtttctccttctaatccggctcgtatgaggataaaaatatatagtgcatttaactaaggcgcacgttaggcacgaaagctctttttcatgttgggaaatcatgaatcttgagaatcatatttcttggagtctctaaatcaatctcctgaatataataaaacctgaatattgtgtcgatattctatactatttatcacatatatttaataatagataaattgatgtttctattatactaaaagacacattccatttcgaaaagtaagacttttattttttattataagagagcttctgtgagatatatagtcttaacttataatttttgaaaaactacacatttcttttactaaatgtctgcttagagttttataacttatacccacaccccctccttcctgatgcca

SEQ ID NO: 76087 - DNA, 450 bp, Glycine max
  unsure (1)..(450): unsure at all n locations
agcttatagcaactctcaagtaagaatgattggaatctttattataagttggattntgagattcacatgcatacaaaaataagtcacattaaatcataagtgtatggtaaaactagctaaaaagttagtgggtagttgaaaagtagcttatagatataaaactatcttattacatcataagtgtttggtaaaataatttgttgaaatagttaaaaaaatataaaataaatgaacatatctatgtaatatttgtatacaaattttaatttgattatcttgataaaaatatattttggattattttatgatattagtatcaaattaattttaaacactcgtaactnttatttataaaatatccaaagtaaaataataaactacataacttattctatatcactatcaatatcatatataataaaaagataaaatgagaaaatcttgtcatat

SEQ ID NO: 76088 - DNA, 440 bp, Glycine max
  unsure (1)..(440): unsure at all n locations
agctcttcctctaattngctcatatatgtgttcatttcgttatagacanagagaagagattcaagccttcattttgtactgtacttgacagattcactttcctctattcatgaattatattttgcacatcccaatggtgaaggtgtgcggaattgaattctgaaccatatgtctaaatttcacaatgatctaacggttaaagagtctaacatcataattttactggacaggctttgagtctctgcgggtaaaaagaaagctacgatgcgaagaacatttttcttagctctgacagtcttacgcaatttccaattgtgagaatgatcgaaattgattgtaaacctggtgttgaaaaatcacaacgactccacgattaacgagtctgagatctgctttttactaagacaagttngagtgtatgtgacaaaagagaaggtttt

SEQ ID NO: 76089 - DNA, 452 bp, Glycine max
gtcacctgccgcatgcaagcttcttatccaaggcacattctcgatggtgaagctcatagatcaagcctccatagaagctccacaagcaagcttccatcaaggagctctagtttcttggtcctccaccaaggaaccagtagtaacattgtcatcctatgaagctgagtatattgcagcctcagaagctgcatgccaagcagtgtggctagatgccccgatgaagaaattgcaactggaaaaatcatgtaaagtgaagttgttggtagacaataaatcttccattgatttagctaggcatccgacttctcatggaagaagtaaacacatagaaacaaagttccacttcctaagaatgtcagcaatgagaaactgaagattgaacattgcagaactgaaattcagcttgcaaacatactcactaagactttgaagctagaaatgtttagatgttt

SEQ ID NO: 76090 - DNA, 458 bp, Glycine max
  unsure (1)..(458): unsure at all n locations
gcttccttgggccatttcctgcgaaggcaaacattttgaaagttagttttaccagtgggatactattcttaaaacaaaaatgacatacaacctcctcccataaatacaaacatcaatgtaaatttagaacaagcttatgcgcatattttcttacaaacgttctcttgcacaagacattctattaaccgaaaaaaatgcacccatatacaatcaaagcagcttcgttacctaaaatatttacacgtactttcaaggtgtatttgttacttacatcacacacctccttggctaaattcacatacatgcatactcaaagcattttggggtaccanaaattgcacatgtgcacatcttggtatttctaatacctatacatacacaaacttcatgatgaatctngactatctacacaataaggcgctacattttatgnctctttcaagtttttgtacctaaag

SEQ ID NO: 76091 - DNA, 324 bp, Glycine max
  unsure (1)..(324): unsure at all n locations
cctgcngcatgcaagcttgtcaattgaacacatcaatagcccttcatcctttctcaccattttctcttcaataatcaaaacttggaacctcattcttccccattttgcatgagatcttcaaggaggaagaggccacaattntcatcttcttccaagctccatcatattggtttgactctttctctcaaagccttggtaagaaacccttaaacccttcttttccttctaaattcttttccaattttatgaaaaaatcttacttgagggttcaaatttatttttcatcctttggaagcttgagacttcaacatctaagcccttttt

SEQ ID NO: 76092 - DNA, 335 bp, Glycine max
gccacctgcggcatgcaagcttctaaggaggtgagcttacttatgagaggtgtgtgtgtaactaatctctatcttctcaaggaagtcttctcaaagaagcttctcaacgaaagtttctcaagaaagcttcttcaagaagctacctagtctataaatagaagcatgttgtacactctgtgtaactttgatgaatgagagtcttgtgagaacacaactaaaagtcaacctctgttcctttttcttccttaatttcgggcttcccactttctttttttttcctctttcttttcctcatagaagcatcctttcaagctcttattcaagcgtattttgtg

SEQ ID NO: 76093 - DNA, 161 bp, Glycine max
catgaagactggttgtgggttatgtaagcctccagataacttaattcctactagacacctagagtatgttcgctattaaattcatcgacagcagctttagaataatatcggctaattaccgaggcttgcggtgagaaacaattctcatttgcgatgtagct

SEQ ID NO: 76094 - DNA, 423 bp, Glycine max
agtctatcaaggacatgattgtatattttatacatttttataatgattcaattatggactagaactaataatatatttcttgttataatctactgttaattattattcagtataatcgagagtcaatagagcctcgcactattaaatgatctgtttacaaatctaaatatagtgtaagtatcttttatgtgtaaacttttcttttccttaatgagattcttagatagattatggattacgttgaattttatgccaacttcaattaactgttcatatttatacctggattgcgcttcgttgctataattattaacattgacgtggtattcttatatacaagaactattatttgtaacaacatcaaactcctaataagaatattattgaatattcaaatgatcattatttatattcttgacctga

SEQ ID NO: 76095 - DNA, 463 bp, Glycine max
  unsure (1)..(463): unsure at all n locations
agcttattaaagtttataaaagtttcttatgacctttctacaaaatntaacttattttaataatcttcataagtaaacttttaacaatatgtacatggcatggacatgggggagtcacacaatcttgcttaaccattgaatttaatgttggacaagtggtctcaattatcttaagaatgtggggttgaattaagatacaaaaattattctcaattacaatttaactctctttttgaattaacaatgcacccttaatatgaattactcacaagacacataaaaaataaacttcttttaagtcaaagataaataacaataaataaaagaagttaagggaagaaagaatgcaaactcatatnttatactggttcagccaccccctgtgcctacgtccagcccccaagcaacccgcttgagatttccactatcatgtaaaaagcttnttaccaactctgaaccacat

SEQ ID NO: 76096 - DNA, 448 bp, Glycine max
  unsure (1)..(448): unsure at all n locations
acctcagagtcacctgctgcatgcaagcttatgcacggaaaatgttattattaaatngatattctctaanaaacaccatntcctagtttaccatgcattacgtaccatgttcaattattatgtttttaagtgaaacaggtttatgatcctcacatggttggctcgtggtgcctaacacatgaaactaagaatgtagcgtgaagttctacgcttcccccttttttgtttttgntttgataggaaaacgcaaggatgaaccaacatgaaaacaaatggttttcaatttctgcaaacataaagtttgttgaacgcatatgcatgatgatgccatgactcatgcaaaatgtgatgctggaatatgataacggacaaatgcaggatatgtccattatgatgttatgaagagatgcttatgccatgcatgatatgaattgcatttacagacacc

SEQ ID NO: 76097 - DNA, 454 bp, Glycine max
gctaggaaggatattcacttttgataacaatgttgtgatatattgagagaggggggagcatgaaattgaacgaagataaatggagagaatgttcactttgagttgggtctcacaagactctcatttatcaaagttacaacaagtgttacacatgcgtttatttatagactatgcagcctcctgtagaagctttcttgagaacactttcttgcaaagcttctttggagaaacttccttgagatgctagaggtatctacacaccaccctctataactaagctcacctccttgagacgctcccttaagaagagtcctaaagaagctagagcttcgctactcatacctctctgataggtaagctcaccttcttgagatgagaagctagagcttagcttctcacccgctgtaatattctatctcatctctctgacatactacatgaaattcataaaatg

SEQ ID NO: 76098 - DNA, 430 bp, Glycine max
  unsure (1)..(430): unsure at all n locations
aatatagctctattggagtatataaaagcatgaatgtcaaacaaactcacccatgcatgtttgcattatatgctttatatttaagacaaaatgtatatcaagttccttatattcctgtcattaagttatcaaattaaataatgacatctgnatttgttttttaatactataaatagtatttactaagaatatattgcaaaacgttataaacatattcatgtatcacttggttcgaaaattttagcattaaagatatatatatgtgatgtacattagtccttatatttaatgtacacttgaattagttcattttaagatatctaaaggaaagcaattgttatttaaagagccaaaatacgtatattttattttgtggccatcgaacgtacctttggttagtcaattttagaattcagctcgaacggtatat

SEQ ID NO: 76099 - DNA, 450 bp, Glycine max
agctagatataattatcatttgttctggcaaatattatactgaacgtaacattcttaacattagatagcgaatatatatcgacaagtgaatagaatgaaatcttatcttaatttggtatttaattttacctctttcaataagtaaagcttataatcttctaactcccgttttgtctttaaaatgtatctttaaaattatgagttaataaccattttagtatatagaaatttacatggtcaattatcaatcaattaaaagtcataaaatcattcttattataacttttaaaataattatattataaaaataataaatttatcatatgagatgcttcgtcattgatttgtgattgaataattaggtgcgttatatttattctaacttatatatggaatgcttatgcaagtatatctcatttaagaatgaatttaatgatcatatataactta

SEQ ID NO: 76100 - DNA, 456 bp, Glycine max
agctaggacaaaatttcccatgctactatgaataactccaccacaagaagcaacacctgccacttgagcagaattggccctagtgtaaaacagctaaaatttgaacttcgggtctaccaatatttattattaattttttaaagtaaaaaatatcacacatgttaattaaaagaccttacatattattattttctttaaagtaaaaaaatatacttttaattttattctacgtctcattttctatcggaccgacacttcagttgagattaaaaatttcactacgagaatagctccaagtatttgtattgtagcatcactaacaacatcgtgtccattggttgcagcacacaggtattcacaactattcttcatgtccggaattagtgatttgatcaaaatactaatcaacatatgcggagatataaggtgggatagatgattaagatcactgttcat

SEQ ID NO: 76101 - DNA, 476 bp, Glycine max
  unsure (1)..(476): unsure at all n locations
agcttctacttatgtggcnaggcgggcttccttcacttttcttgtctccaacgcgagctttgaccactgttctttccttccgcgatgcttcttttcatgtccgcctgagtgggcttatagcctaaaccatacttcccacgatttccttgggtatttatcaggctagttatgccgccgntgtctttgcctaaacccatcccgggttcataaaccgtccccaacataactcgggccatcattaccgctgcatcggacagacaaagctacccaaagagggagtccacggaggaaatgctgaccacctcanaagactggatagcagtttctaacgattcttctgcggcttccacataaggcatggaggatgggcagcttaccaagatgtcttcctcgcctgacacgatgaccaagtgcccttccaccacgaatttcagcttttggtggagtgtagaaagcacaactcccactgagtggat

SEQ ID NO: 76102 - DNA, 394 bp, Glycine max
tttcttgggctttgtcattccttggattagagtgaaagccatataaatttgaagaacgctctcttttaagttgttgctccacttttattacaaagtggactagctcatctatgcccctatatggaatgaggtcaaccttgaccctcacttccatataaagcccacctaggaacctagctatgcttgggctttcctcctccctaagtccagctcttaaaaggagtagtatcatttgttgtctatatttttcagcactcatactaccttgtctaagcatttggagcttgtccatacgctctctttatagtatgtgggaaagtgtctctttctaagagcactttctagatcatttcaactacttactagaggatgcccatgaatccttattcctaac

SEQ ID NO: 76103 - DNA, 464 bp, Glycine max
  unsure (1)..(464): unsure at all n locations
catgcaagctttgagggtgcgcancccaccatcttttcatagtatagtactgatattgtgtctaccatcacgattatcgtctccctttccattattgaggagaccacctgngccgccagatcccttcaccttttgggcgtgttctttgaatgatctgtccccctttttgcacatgttctgtagttgcattctatccggaaccatatcaaaattgtactgatactgcctaacaaacgcaaccattaggtccttccaagaatggactcgagaaggttccaagttagtgtaccatgtaacagctaccctagtaagactttcttggaaggaatgtatcagcaattcctcatcttttgcgtatcccccatcttctgacaatacatctttagatggttcttgagacaagctagcctcttgtacttgtcanagtccaacaccttgaacttgggaatgaccatgtttgggta

SEQ ID NO: 76104 - DNA, 435 bp, Glycine max
  unsure (1)..(435): unsure at all n locations
gcatgcaagcttgatgatccangatcttgtagacgactcattttatgtctttgttcttaactatatctaaaccagatatatgatactgtgtgcacaaattaagtcagttcgtctacaacctctatacaaaccacatgcatgttgcaaacatgttacttcagtaccttacgcacactactggtcaaagtattctctttatagccaacttatacacaaaattacatgcctatgtggatatagattgacgatcatgtcctgaaagtataaaatcaaccactgacttctatatcttcttaagaaattccttggtttcctggaaagcccaaagacaaaagacagtatgcatgtcctcaacagaaacagaatacacgtccctggcttctgtctctagtgaaattacatggactcgaaatttgcttactgatttcaatatca

SEQ ID NO: 76105 - DNA, 156 bp, Glycine max
tgaagttgagtaaatgaatatttttacctttctaaaacaggatttttacatcacagagcactataatccattttaccattcacagctgcttttctgatacttaactggtttctatattattttctctcctacctggtaactggcattgatcctata

SEQ ID NO: 76106 - DNA, 446 bp, Glycine max
  unsure (1)..(446): unsure at all n locations
agtcacctgcggcatgcatgcttttgctgcaaattcctctttgtggtgcgtgttntatatggttagagctaaaggcggtcttcgacattggaagtgcatgacacacgctttgtggttgatttatggatggcctctgcggataactgcgtggagggtaaagatgacgtttgttattggctgagtcacagacattgttgggtaggcgggaaacttggccgtatatgaatgacagtcacagcatgggcttcaccctctttttcaccctcatcatttgccccattttcctcgtcgtcctactgggaagaccacatttgccctttcttcacactcacatcgatcccttcactggcgaataccaccactgcaaagcatttgatggtgccctgcccaccattttctcttgtgcactaccgataatgagtttaccattacgattatctcctccc

SEQ ID NO: 76107 - DNA, 444 bp, Glycine max
  unsure (1)..(444): unsure at all n locations
gtcacctgccgcatgcaagcttgttctanatttacattgatgtttgtatgggtttgatgttcatgccatctttgctntaagagtaatgtcccactaaaactaactttccaaatgtttgccttcgcaggaatggcaccgaggaatcttgcctcanagaggtccaggaaagacaacgcggccgaatgaactacttccgcccccgagtacgacagtcaccgctntaagagcgntgtacaacaccaccgtttccaaaccatcaagggatggtcgtttctccgagagcgacgcgtccagctcagggaggacgagtatactgattttcatgaggaaatacggcgccggcggtgggcaccactggttactcccatggccaagttagatccataaatagtccttgagttntacgccaatgcttggccaacagaagaaggcgtgcgtgacatg

SEQ ID NO: 76108 - DNA, 83 bp, Glycine max
aagagaaaaaaaagaagggctgtgagctgaccggaccaacaccgcgccgaaagggagaacctttttcccccggcacggaccga

SEQ ID NO: 76109 - DNA, 459 bp, Glycine max
agcttcttttggaccttgaacaagcaatttactcctttttcataaccatgctatgtgctcgcgaatggtctctttcttcccttcgcaacttaagatcattattgctaccccatagagctccgcaaaattgttccggccatactcttccttgcgagccctcttggtctctcgctcaagggccctagcggtaatagcattctcttcccgtaacctggcacactcccttccgaacgtgtgtagcagccaacttgaacttctccttggcgagttttgcctttcctaactcgcttttgagagcttggacttcctcgtcctcttgcggagcttcaaaattctctttgctgacgacttctaacttggcgagccaatctaaacctcgtatgcgaactttcagccattcgtggtacccaccaatgatgccattacgaatgcctctaagctctcgatcattccttaacg

SEQ ID NO: 76110 - DNA, 449 bp, Glycine max
  unsure (1)..(449): unsure at all n locations
agctatcataaggctgcgacaatgaacttcanttacttttcgaagacgaaaatgtcttcagtcattgcatgctttcaaaaggcgacaatgaacttcatttacatttcaaagacgacaatgtcttcagtcattgcgtgctttcaaaaagcaacaatgtcttcagtcattgcatgttttcaaaaggcgacaacgaccttcatttacatttcgaagacgataatgtcttcagtcattgcattctttcaaaaggcgacaatgaacttcatttacantttgaagatgacaatgtcttcagtcattgcatgctttcaaaaggcgacaatgaacatttacattctgaagatgacaatgtcttcagtcattgcatgctttcaaaaagcaacaatgaccctcattacatttcgagacgacaatactntagtattgcatgcttcaaaggagacatgaac

SEQ ID NO: 76111 - DNA, 396 bp, Glycine max
agcttatacacctttgtgcagtgttccactattcggctggacccagtgtttcttctttttctcctttagaaacgaaatgaaaatgtcttaatctcattattggttatgagaaattctatctgtatgcttcgaatcctccttcgttgcattattttttgaaaaaaaaaatgtgtgtgttctgataggtttggtggtttgatttctttaccaagcgccgtttgcattgtaatgaaagatttccagacttcaatatcttcagtctttacctttcaagacttcaatgtcttcactctttacatttcaagacttcaatgccttcagtctttacattgtcaagacttcaatgtctacagtctatacatatcaagactctaatgtcttcagtctttacattta

SEQ ID NO: 76112 - DNA, 354 bp, Glycine max
aatatggaagtcacggacagcgttgttcctctcatatttattgacctacatgagcgattctaacggtgtattagagggcgacaacaccttataagaaagttttcttccacatcttatggatgtcactcttatccaaagaattatgtggtttcaccttccccacccaaaagataagggtatgaccatataaatacccacctgtatgactagttgcctagcaaagactaccttttaaatgccttatacgtcataggagaggtcacattgtctttattacccacaaagataccatgattataggggtaaagaataatagagtctagaagagacactttctcccttcctctagtgaat

SEQ ID NO: 76113 - DNA, 424 bp, Glycine max
gctttgagccaaaatcctaactcaccatataccttgtcccaggggagtattttatccttacccgcggaagccaagaataagagaaggaaaatttccaatctcacaataaataaagagaaggaaacatttccatctcagagaaagccctcaaaaaaagagaagaggataatttccctctatgaaaaaaaaagggaaggaatttcccctaaagagtggagaagcaaaagaaagaaagaaattccaaccaaaggggaaaagtaaatgaagaaaaaaactctgatcacgattgaaaaaaacaaaacagtcagaaggtcttggaccgacatatctgacaatacaaattgcccaatgacaaaataaatggaaggaaccctacctgacagggctctcctttgatacaaccaaacctggcgcgggactgtcc

SEQ ID NO: 76114 - DNA, 347 bp, Glycine max
tcctatcaacgcgcaatctctcatgagccaacagtgcccagtgatagcacgtttattctacacatcagtctctcctctctataaacatgtgatgtacaaaaaactatatttttacacaacaataaacatttttcccatttactatggagacattaacgaaccaccataggattgctgacagcctgaatgacccacgaagaatcacattccatccacaaattattccatccatttgaactctactacttctaaggtgatgcctacaccctaacaaacaaatatgtaatacccctatatacgaggagacacaaccgaaacactctcgagtgatcccgaaattactttac

SEQ ID NO: 76115 - DNA, 463 bp, Glycine max
  unsure (1)..(463): unsure at all n locations
agcttctacaccttgacttgtgtggaccaaccacatctgcattctttcctaaacgtagatatcggctagttatagtggacgactatactacatggacatgggtgaggctcctaacctataaggatgagtctctngataccttntataaagtctgcaaaaacattcataatgaaaaaggaatttgcatctattctatcaaaagtaatcacaagggagcatatgaaaacaatcttttggaaaattctgtgaagaaaatggtattcaccataacttttaaactctaagaacaccacaacaaaatgaagttgttaagaagaaaaaatgatctctttaagaaatggctatgaccatgcttaacgatcactaaactcctaaacatttctaggttgaagcaataaatattgtttgtatttacataatagaatttatattaagccattatttaataaagactctctatgag

SEQ ID NO: 76116 - DNA, 463 bp, Glycine max
agcttaatacaagataacaatatatcatctcattcatttgtttgttgtgataaatccaaagaatagatggttgattaaaaaatgctcttgccaaaattactcttggtaaaaataacttagatattatattagacaaacaaagatgtgtttttgatgagggtggattatgacataatcctgaaaatcaacaaaagatgcaataacaattccttctcctttttacatgcttttactatggtaagacacgtcatagtgcatcaacattgttatattaaaaagaatagtagtatcattggaaaaatggtatgggtttcaaaaggatctttatttaaaaccaacattcaaggacccatgagagattgggtaccacaataaaaaacatgattatatgaatgatggacttcttgaagcaaagttggtacattgatagtggctgctccaaacacatggtgggaaatgcatc

SEQ ID NO: 76117 - DNA, 479 bp, Glycine max
  unsure (1)..(479): unsure at all n locations
taagtcacctgcggcatgcaagcttncacgaactcctnccgcttccgtgtgtttattgtttataactcgtgaaacggattctgcaaacgtcggccaccgtaacgagcaatcaacgacttcttcaattttgtccacgtgaactgatcctccgtctccatcaacaaattgaaccagtgaatggttgcccccttcatgctcaggcgagctaacttcactcacatctcctccgaagtgttctgaacatcaaagtatatctcacctcgcgtaaaccacgctactggatcatctccctcaaaaaccggaagtttcaccttcttccccgagaatcgagactcataataatcattcatcgatttctcgctttcattaaagatctcgttcaccttctgaccaatctgcttgctgagttcactcagtaccaagctctgttgtgcatttgttgagctatcgacgtactctgttcttgcatctgtaacgcc

SEQ ID NO: 76118 - DNA, 370 bp, Glycine max
  unsure (1)..(370): unsure at all n locations
agctcgtccacaaataatcactcaaaattggtttaattgttaacgccttaaacgggcctctttgctgttatcggttaacatggaccgctcaaaagcataaaatcaacacatcactttactacctttcgcgagaactacgtaggtctgatttcctcttcgatggaggatacataggagcanaagtcccgcttttgtcgaccttgtgagatggttagaggtccaatgccttatattttttcaccaagcaaaatggatcattntaaggtccaatgccttaaatgaccaccttccaagtaaaaagaatcacttgattcgcccctttngcaagaactacgtaggtctgatttcctcatcgcaattgaggatacgt

SEQ ID NO: 76119 - DNA, 330 bp, Glycine max
  unsure (1)..(330): unsure at all n locations
cagcttnngttntatatttcgagcgtctctatatatttctggactcaatcggacttccgagtgagatgggttgactatacaattagctcctagcttaggttctaaacctcgagcgactagatatattgcgggactcaatcagacttccgagagatatggtattgacgatagaattagctgctagctcggcgtttaaatttcgagcgtctcgatatattacgggacttcatcagacttcctagtgaaaaggtattgccgatctaatttgctactcagcttaactcggaatatcgagcggctcgatatattacaggactccatctgactttc

SEQ ID NO: 76120 - DNA, 437 bp, Glycine max
  unsure (1)..(437): unsure at all n locations
agcttctancctatatggcttaccttgtattaanttcttcgatagccnctttgagccttgattgcctttccttgttttgaagctcactacaagccttaagtgacaaaccatgatattaccatatccttaaggaattttggagctctggaattgctttgtgaataagcgtgggggggtattgttcattggacaacttgttttgctgactatgctctatgaagtatcttgagccatacttgatgtacattgtatattggttaaaagctggacatgctgaatgaaatgttgtttctcaaaggcaaacaaacaaagaaagcagtaatgttgagggaataagatcttaaatggcacaagaatgatgaaactctcggttctactcttcatgattaaatttcatctntacttctttatattgtcttattttgttactaatatgc

SEQ ID NO: 76121 - DNA, 193 bp, Glycine max
tcatttggcgatcttgaagatcggcccttttgcctgtctgtgtgatctatcgagactttctgcctgctacgaagaccctagtcttcagatggctcggaggtcagtaggacagaacagtcccatagattttgaggaagatacattctattttggatgctctttcgaatcattttaaggttgggcagaccctgct

SEQ ID NO: 76122 - DNA, 391 bp, Glycine max
  unsure (1)..(391): unsure at all n locations
ccttatcgaagacactctctnggtggtgaaacttcttcttcctatgtttattccctagtgtatgacgtctcctctgcccttttctcctttatcttccactgcaactccatggttgaaaatcaccattaaaggaccttagtgaagctcaaatatctagcctccatagaagtttttcaagcaagcttccatcaattgagcactgcattactatatcatacttctatataatgaattgatgtatatgatatatgatatatgatgagttattgatatatatgatgatgatgatgaattaatctctacttaagtgttaagaacttttcaggataagactaacaagtctccaatccaatcttaagactctccagatgcattcgatgtcataattatg

SEQ ID NO: 76123 - DNA, 493 bp, Glycine max
  unsure (1)..(493): unsure at all n locations
cttacagcacctgaggctgcagctggcagacattaagtgcatccggacacaagctcatttctttttggacatgcttgcactgactatctatagcaggatccaatgcttctaacaagggcttgttgcttttcttcttccttatccattcgactatgtcaattgattcttcaagatgaaggtctaaaggcattcttccagctaggagcctcaaaagtaccactccatagctgtatatgtcaatcttctcgtcaaccttcagagtgtatccatattctgaaaaccaacacacataagcatgatgtgaatcatcttttgcctcattttcacttgtttgagctangaagttacaaaaacagaaagtggggcataaatggcatactaatatgggcgtgtaaataaacttctaaataatgagagctaagtactgacccgggtgcgatgtatcatatgatccagccaccatggaaactgtctcattcttttgaatcatcat

SEQ ID NO: 76124 - DNA, 390 bp, Glycine max
  unsure (1)..(390): unsure at all n locations
gctacttgttaaatgaccacaggtggagaaactaatcctctgtcaattatacatattacacttaaacaagcatgcattanaaacaaaaggaagatcctagttctgtaattcaccaacaactntaccttcttattcctcaagtaaaactagaaacaatctattaataactaaaacgcacaacatgtgctaggttcattaagcatccttggctctgttaaatcagtacttatgaattcaagatcaacatgtgatggcatgacaacaagcaagacaatcaattacctgtgaattctntgatgagatangtgagagcatgtttatagtgtttggtgataagttcagaccagttgcatcagcttcagcatcaacaatctgtatgtgggaaaccat

SEQ ID NO: 76125 - DNA, 388 bp, Glycine max
  unsure (1)..(388): unsure at all n locations
tggttatctaatataatataatataatcttctagaggttggacataatctgataatctatttaaaaggtaactaataaatcgataaatatagaatgttaaaacatattataataaatttttaccataataatagcataaatatactgctatatttttttaaaatgggaacattattaataataaaagagtttttttattggcttaacatcttacattaaataaaaaaataaaaaattggctatataccattaattattattaaatagtccaatgtaatattagacgctatacgggtcacagaccatatggctatgtgtaccaagaaaacaccnataggctataacgagctantttacccaccctatccttaacggtagatacatacat

SEQ ID NO: 76126 - DNA, 386 bp, Glycine max
  unsure (1)..(386): unsure at all n locations
tatcttacgggttcgctgcttccagaagctccaaagaatggtgggcgaattgatacccaaattctcctgcttgtgacatgtaaagcgattgataccaaaattcaacccgttggctcttgttcgatctgatttgctaagatcctacttccattttttgtttacggagaatagcagagcanattttcattaagaagaaaatacccaagtataaagattactatataaaatatataccataaaatagaccgagaaatttgtccgcctcttagagttttgatagtcttccttcaaaaaaaaactcgtaatacctatntcattcgaaaatccatcttcaaaaatattggaattgattaattntcttacactcataactaatgatatataat

SEQ ID NO: 76127 - DNA, 384 bp, Glycine max
  unsure (1)..(384): unsure at all n locations
tttacatgtctttcttnnctgagcggcatatatattggcgtgtatcttggttgttacatcttagtacatttgatactctgtgttgcattgtgcatcatgatagtctgtgtgaagaaaagtttccaagttagaaaatttctttagagacaaaaactctttggtntaattaattacaacctcattgtaatcgattacaacaagctgtctgaagcttgtagaattgagtctcgtattggttcaatcgattattgatatctcgtaatcgattatactggtgtttgagacaatgactacattattcaggattatctactttaattgattaccaaggagaataatcgattacttctctctcgcttaagtgtcagagatgaacaagaacac

SEQ ID NO: 76128 - DNA, 142 bp, Glycine max
ctacgtgggagtacgtgagctcagctggatgcgccaacaggggatggtgggtctatatgtgatcctgggatgtggacaatggttatgcaccatcgcccgaccgccacctagtaccacatgtgatggataccccatgatgcta

SEQ ID NO: 76129 - DNA, 376 bp, Glycine max
  unsure (1)..(376): unsure at all n locations
tagcaacctaactattcttaagacaatctgctactcgtattggccctttcctctctccggagcttaaggtcgctgttactaccccacagagcccctccgaatttgatccggccatgttcttccctacgagcccttttggtctcttgttccaaggccttggtggcagctatatttacatctcttaggtcggcattcttcttttggatcttaagtgttgcttatttgaacctttctttgactggttagactntctcgagttctaccctaagggcccgcacctgttcgtcttcctcctgtgcttcaacttacaaccctctagtggttctcagactctggagccaaccagaccttgcatgtnggctctaaccacctatgg

SEQ ID NO: 76130 - DNA, 491 bp, Glycine max
  unsure (1)..(491): unsure at all n locations
agcttctnggtttcagctgctgaagatgaattcgttgttacttcatgcactcctctaatgactatagcatcatttctgacactaaacagttgggagttggaagccatcttctcaattaaatttctggcttcagcaggggtcatgtctccaagggctccaccactggcagcatctatcatacttctgtccatgttactgagtccttcataaaaatattggagaagaagctgctccaaaacctgatggtgagggcaactgacacatagttnttttaaatctctcccaatattcgtataggctctctccactgagttgtctaataccttaaatatcttttctgatggtcgtggtcctggaagcagggaaattnttttctaagaatactctcttgaggtcatcccagctcgtgatggaccttggagcaaggtaatacagtcagtcctttggtactccctctaaagaatgaagaanagccttcanaaatatgtgat

SEQ ID NO: 76131 - DNA, 311 bp, Glycine max
  unsure (1)..(311): unsure at all n locations
caccctaggtgaagccctttccattactaagtttcatccccataggaactcaagctacacaaggtttactctcgacaattttccttattcctaacttttatccgtggaagaatacagccttataaaaaacccaaggctcacccttggtacctgtcataccctaatttcgtccgggtaccattggttattggcatgcgacctttgtttgaccacctcaaaatgtctaacacccatcattgtggaatccgtaaagttcccagatgtttcgggaagaaaccgatcaaaaatacgaaaatgggagtgtatntagc

SEQ ID NO: 76132 - DNA, 413 bp, Glycine max
  unsure (1)..(413): unsure at all n locations
agcnttgtccataaaataggttntgaagtttatcatttattatttctactaagtaaatggatcattgtcaaggtccaacgccttaaaatgatcaccttttaaaataaaaaagaatcacttgataagaaagaactacgtaggtctgatttcctcatcacaaattgaggaatacgtaggagcaaagggaaacacccttgtcgaccacaaaaaaggagaaatataaaaagggtataaaggatataaggacataaaagggaacataaaaaccaaagtcacgtttgcacattcgattaaaggctgccgtcccttgtgacggacgtatggggtgctaataccttccccgtgcgtaaatacaactcccgaacctttcacttaanagttcgtagatcgcgtctttttcgatttttccgacg

SEQ ID NO: 76133 - DNA, 430 bp, Glycine max
  unsure (1)..(430): unsure at all n locations
tgcgagattcctcacgggaaacgttactgtatcgtttcggaactctctggcttagattttcttcacggaaaccaattttccaagcaaattccaaagagagagaagtgcctaaagggctcggatccttttcttcttcattttctcccctatttatagcaaaataagggagatgcttgccgcccagctcgcccaggcgagctcagctcgcccaggcgagcagggttgcttcctccagaagcaaccgccttctggaggaatcttctggagggcccaaatgggcctgggtgctattttgcaccccattnttactatagttcacccctctgctgggtttttttggtgattcttttttcgtaaagttacggaaacttacgaattccgtaacgatacttgtntctttccgaattggtaccgaaccttgcggatacat

SEQ ID NO: 76134 - DNA, 503 bp, Glycine max
  unsure (1)..(503): unsure at all n locations
tctgagtcacctgcggcatgcaagcntgctgattacacctccctctttctcaagcatattcttcttgatatcatcaaaatcttcatgatttacacctcacacctctagtaggggcaaattcatttgaggggctgccatttatgagaatggatatagaagctgattgattgcaagcattgatccatttcctccatataggacagaaccccattctgaccatcatataatccagaaagttccatgaaacagagtcataagcctttgcaaagtccaccttanacaccaaagnntggtacttacttcttttagcttcctctattgcttcattgagaatcaaagttccatgaaggatgtgtctatcctttatgaaagttgtttgtctctcatcaatgagtccaggcaataattntcttaacctattggccagtaatttagcaatgatcttatacatacagccaatgagggagatgggcctatagtcatcanaagactgtgggtgattg

SEQ ID NO: 76135 - DNA, 413 bp, Glycine max
  unsure (1)..(413): unsure at all n locations
ctgaatccctgtactacttgttattatggatgcgaaatctaaccagcaagtgtaccgagtcgtgcaagtaataataaaacggtaagaaatcgagtattgaactcagggaacttggttcatttggtgaagtgtcattcaataaacacacatttgtacaaagaaacaataatcatgaatcanagcaatggtgttttctattctaattactaactacaaaanatatgagcaagttggtgttaaaacagataattaaaagcgttgggtcctcctcctgagttacttgatgcaagtaagggttggtctctatttaaagatgttcatgtgttttatgtgagggagaaaactccaaaccataattcctcgcatgaatgggataatcatatttaaacctcattcagatgtctcattgaact

SEQ ID NO: 76136 - DNA, 503 bp, Glycine max
  unsure (1)..(503): unsure at all n locations
gatccttgagtcacctgcggcatgcaagcttaacatcagaccactttcgggtgctggaacttcttcacatnggattgatggggcctatgcangntgaaagccttggaggaaagaggtatgcctatgtttgtgtggatgatttctccagatttacctgggtcaactntatcagagagaaatcagaaaccttngaagtattcaaagagttgagtctaagacttcaaagagaaagggactgtgtcatcaagagaatcaggagtgaccatggcagagagtttgaaaacagcaggttcactgatttctgcacatctgaaggcatcactcatgagttctctgcagccattacaccacaacagaatggcatagttgaaaggaaaaacaggactttgcaagaggctgctagggtcatgcttcatgccaaagaacttccctataatctttgggctgaagccatgaacacagcatgctacatccacaacagagtcacacttagaagagggact

SEQ ID NO: 76137 - DNA, 422 bp, Glycine max
  unsure (1)..(422): unsure at all n locations
atcatggtacaggcgcggtcaaattattgaattctgatttcaggcttgggtttctatcaagactgcagcaagtctgatctggaacctaatgcttgacatcaataatttgaagcttagtacccctggtactcaattaatactacttatacttttgctgagcaaaaagaaatattggcattggacaatttaaataagtaaataaataaataaatctcatgaataattcagacacatattggacatcacagagcttcacccctcacagatatatatcctagaaaaatctgctcatgcaagtttcaactttatttgtccatcaagtcatcaagagttngataataaagtttcacttcttctaacaacaacanaggcttatctcactagatgaaggtggctacatggatcacttcttcaacacacaa

SEQ ID NO: 76138 - DNA, 434 bp, Glycine max
  unsure (1)..(434): unsure at all n locations
agcttgcaagccggcctattctaataacaataacaataataataataataataactttattttatcanatcttatcttatccagattttattgtatttagaatttattttatctagattttattntgtccagattttatttcatccaatcttatcttatcttgtccagaaatttatttatttcgtttatgggcttgaaccttaaaataaattgtaagcttttggattgaggacctaatccatacantttttaatattatgctcttttattttctttngatatactatgctttaacgacttgatatactatgctcaatatgattntgtatataaattatttttggatttgtacattatttatacgaannatttataagttttttttagttagtatttcactaagttttaaaataattaatttaatcaaaagtttt

SEQ ID NO: 76139 - DNA, 353 bp, Glycine max
tctgatcatcatgctttgatgaatgccaaaaaaactacggcgcatgaagagggtgagaatgagggagaagcccatgctgcgactgccattcctataaaccaaagtatccaccaaccacaaagtctgtctacagcacttccaatgacaaacaaccacctttagcaaaaaccacaaccaccaccaagatatgaattttgcagcgagaaagcctgtagaattcaccccaattccagtgtcctatgctaacttgctcccatatctacttgataattcaatggtagccataaccctagccaaggttcatcaacctccatttctccgagaatacgactcgatgcatcgtgtgctttgca

SEQ ID NO: 76140 - DNA, 309 bp, Glycine max
  unsure (1)..(309): unsure at all n locations
atagcgaagttcagaggaagctgaatcatcttcagcatttccagacttagaagaatcctaagtangtgcgtctgaagcacatatcatggatgaagatcaaccacaatgggtgactctagaggactattcaagctctatcgtgccacaattnttcacagtattacgcggtcggaagtccaagctcataacatcacatatactcattccttgatccagctgattcaaggaaatatgtttaatggtttgccaaatgaagacccttacgcacaccttgctacttatatagaaatctgcaacacagcgaaaatt

SEQ ID NO: 76141 - DNA, 470 bp, Glycine max
  unsure (1)..(470): unsure at all n locations
gttctagagagagaaatgtccaagttctatagagttctgacagattntgctgtgtgaagatctctagagacgagagctcgaagcggaagccattttgagaacttgagatgagtttgtgagtgaatgtgagatcctagaggtgaaggagacatcctcaccacttgtatttttgcaatctttcatgttgttcttctctatgttgtaaaggaggttttcggactatggaaagctaaatcctctgttggattttccctgtaggtacctgatgtaaatatatttctatctatgtaatgatgttntgggtgttctctgtgctatatgctnttcattcaagtatgcctttaccttcatcacgtagatgcatgctntgttagggtcattcaacagtggaaactgatatgattctaaagtccttgatagtacgggggctaagtgttgtactatcacgaggaatcggngtacaagaactt

SEQ ID NO: 76142 - DNA, 413 bp, Glycine max
  unsure (1)..(413): unsure at all n locations
gaagtgttagtcatcttatacgactatctcttgtatagatttctctatttgacacttgtatagttccccaatttatagttattctcataggaatntgtaaagaaatcttgctntatctgtaaagatgtctttagagtattctcaattggaattaatgataaaatttgtgcaaatttcaggttaaaagaggccaattcttgaagtgttgaaaatggcagctgggctcagcccaccatgaacgctaagtgcgagcatcacactaagcgtagcttcagcgcacttagcgcgatagagaatttggcagatcactcatttcaaggtcgtgcactaagcgtgagatcttgtcgctaagcgcagagggcatctttatttangctcaacacatgagggtgctaaccctacccactaactca

SEQ ID NO: 76143 - DNA, 380 bp, Glycine max
  unsure (1)..(380): unsure at all n locations
gctggcatggttcacacggtgatagtagctagacttgtattgcatttgtatttcagcanacagnactcanagcttggtgatactgagtcacgtcccagaatttcacaatgatgtgctgtaaagtgtgatcaccaaacagtactatgatataataataaacaaacgtcttatttatttatttttgagaagaaacaacgctttttttaagagaaagcaacgtttattaactgtgcaacggaagcatgatttagactttatcaattaatgagcatctcatcgtcttgttaaggcggaaaaatattacaatttggcaatatagtcatcatttttaagaggcatcaattatatagctataaaaatgaaatttttatctgaatttg

SEQ ID NO: 76144 - DNA, 245 bp, Glycine max
  unsure (1)..(245): unsure at all n locations
gttcccatgaaccctaagagaataatcgtcattcctaaatggccctactcaccaagtataagaaaaattttggggcttccatgacttaacaaacttttacaaaagggttgcncccatattttctatacttgtggcaccactcattgaagtggtgagaaaccactgttcttcatgggaagatgcccaggaaatgggtttcagaccttaccttacttcancataccanacaccactaatacatatgt

SEQ ID NO: 76145 - DNA, 444 bp, Glycine max
  unsure (1)..(444): unsure at all n locations
tattcaaatcattctcanacattcatttcatgcaaaacaatccactgcatatcattntcaatcaattcactattcaaacacgctttatgtacaagcaaacaactcaaagtgctgaaatttaaataactgaaattaaaataactgaaatatgacaacgaaatcagctggaaatataaggtgtttaaccttcaccaaaacatcttcaatgactccatatggccttgtgatggagcggtcaactaactggagggtcatgcgtgtgggcattatctctatctctccaagtcgctggcacatggaaagaggcattaaatcgatactagctcccaagtctatgagagctgtgcctacaacaacctcaccaatataacacggtatcgtgacaactccacgatctttgtgcttgggtggaagaatacgtngaataacaacactatatgtacc

SEQ ID NO: 76146 - DNA, 331 bp, Glycine max
accgctccaaataaatcagatcgactcagatcagaatcttttatgtcatatatagtttaaaagttttcaaactggtaccatgaatttctcaaaccttaccaaacatttttactttggaatcgatacagttatatatcataccagacaaaggtttcaaagcttcactgaatctacacgtcaatgattcaaatgtgtatgataccagggttgacgtgaatcaattaatggaaatacatcttccaaaaacttgtgatcatacctgttggaatcatacaggatgttctgacaacaagagaacttcaatagttgatttaatggttatgttttaagt

SEQ ID NO: 76147 - DNA, 483 bp, Glycine max
  unsure (1)..(483): unsure at all n locations
agctctttgggaccttgacaagcactaactctctttcagaccatgctatgtgctcgcgactggtccctctcttnccttcgcagcttgagttcactattgctaccccatagagctccgcgaaatttattccggccatactcttncttgcgagccctcttggtctcttgttcaagggctctngcaataattgcattctcttcccgtaacccgacacactccttccgaatgtgtgtagcggccaacttgaacttctccttggcaagtttcgcctttcctaactcgctnttgagagctnggacttcttcgtcctcttccggtgcttcaaaactctcttcgctgacgacttttaacttggcgagccaatctaaacctcgtatatgaactntcagccattcgtggtacccaccaatgatgccattacgaatgcccctaagctcttgatctttnacttaacagggttcccatgccttatggattctttga

SEQ ID NO: 76148 - DNA, 466 bp, Glycine max
  unsure (1)..(466): unsure at all n locations
ctactacttaagctgaatacatagggganggattttgttgtctcaatttctttggatgaagcaacaacttgaagactttggagtaaaccttgatcacattcctctaaaatgtgacaacacaagtgctaccaatctaacaaaaaacccagtcaagccttctaggactaaacacatagaaataaggcatcattttcttagagatcatgtgttaaaggaggctgctgcattgagttcattgatagtgagcatcaactagaagaaattntcactaaatcttttgctagagatagttnttttattagaaatgaactaggcatgttagatgcatctagcataaaatgacattctgtttgcatagtgtgtgatgcacattgctactcatatcatntgttttgttagctggtgtcccagtttattgattcatatgcatactcattnagtagttttcaaatcacatggttttctt

SEQ ID NO: 76149 - DNA, 392 bp, Glycine max
  unsure (1)..(392): unsure at all n locations
gagggggaacatgaaaatgaaggaggaaaaggggagagaaagtgaactttgagttgtgtcttacaagactctcattcatcaaagttacaagagagtgttacacactgcttctatttatagactagatagcttccttgagaagttntcttgagaaaacttccttgagaagcttctttgagaaaacttccttgagaggctagagcttagctacaaacaccactctaataactaagcctaccttcttgagaagcntccttaagaaactntcttgagaagcttcctgagaagatcctagagaagctagagcttagctatacacacctctctaataactaagctcaccttctttagatgagaagctaaagcttagctacatgttagtcgatgaatac

SEQ ID NO: 76150 - DNA, 390 bp, Glycine max
  unsure (1)..(390): unsure at all n locations
cacaacaagntttccacatncacaatgcgcgcataaacncaccatcccctgttgcccacctncaactgagcttacgtactcccacgtagcccatatcctcgtttctctcaacaccgggtccgcatcaatccttccaagcttccccaacatcaaagtaatacaacattcaaacagcacaaactatcacagccaagaaaacagagcataggcagaaaactctgccaaaacaccaaccaaaatcacagctattctcacttaaagaacccagtaacaattccttcgttccaattcgttaaccggtggatcgactccnanattttactggaagtctctagtacataagcctcattntgaccgttgggatctactagcanacatccagaactcatt

SEQ ID NO: 76151 - DNA, 421 bp, Glycine max
  unsure (1)..(421): unsure at all n locations
agcttccatgggtgagtntttgcttcttcttntcacgtctttgtttctctccctacaagaaatggattnngaaaagctttccgcgaagagatctaggagggacgtcgcggctaaagggaccagtgccactcccgagtttgatagccaccgtgtcaggagtgctgattagcagcgttttgaggccatcaaaggatggtcgttccacagagagagacgcgtccagctcacggatgatgagtacacaaattctcaagaagagatagctcgccgacattggacgtcgttggtcactcccatggctaagtttgacccagatatagtcgtggagttttatgccaatgctcggcccacagaagagggagtgcgggacatgcgatcatgggtgaggggtcagtggattcccttcgacgcanatgccctc

SEQ ID NO: 76152 - DNA, 209 bp, Glycine max
  unsure (1)..(209): unsure at all n locations
tggatcaaatggcatcagaataaataaaaagggcgggttgaattaattatgaacgtgtcttgactaattaaaaatntatccttcttaatgttactagaatcaactagggctttactacttagttaagaaagtgaagaacatatacaattacctaaccaaaagtaaaagcggcaattaaaagtacacagacgaaattaaagagtggttag

SEQ ID NO: 76153 - DNA, 473 bp, Glycine max
  unsure (1)..(473): unsure at all n locations
agcttcttatccaaggctcatcttggtggtgaagctctcttttccatggcttattccctagtggatggtgcctcctctcacctcttctcctttgtcttccactgaatctccatggtggaaaatcaccattgaaggacctcattaaagctcanagatccagcctccatagaagctccacaagcaagcttccatcatattctctactcttaatctcattattgttaaggtgtttttatatggttgactagacanctcttgtggggatttctaaagaacaactgatgtaattcctttaataatctaattggtgtgtttattgtgttcaatgcttctttcaatgcttaaattttgtatgctcttggtctaatcacccatttgtgtgcatagttaggtgactntagcattgngaaatgtactatngccttagaacttaattgaagcangatngaaacttagtcttaaatgaaggatct

SEQ ID NO: 76154 - DNA, 411 bp, Glycine max
  unsure (1)..(411): unsure at all n locations
gagatctagattccatacgaatagaaaatgggtaattaagtcattagagtttaaagtgaaagaattttcataaataactatataactagtttaaaaatagaattgtagtttaactagttggtagctaattaaagtgtctaattatatgatgtaaaattattaaaataagttagagttgtaacatcctgaaaaattacaactcatactaatagaggaaactctgtcgtgngtcatctgtgcatgtngtgaattaatttcaatagttatatgtctttaatcatagaatttcatgttatatatatggttgcatgtacggttggatctggcgatgatgtatctatgtatatatatgaatgatttagtgaagctcgatagagaaatagaaactagctgagctacgtgtctatctat

SEQ ID NO: 76155 - DNA, 427 bp, Glycine max
  unsure (1)..(427): unsure at all n locations
agctgggagaggatgcttcaatggaggataagaaagttggagagaaagaaggagtggngagcatgaaattgaagtaagaaaaaaagggagagaagttgaactttgagttgtgtctcacaagactctcattcatcaaagttacaacaagtgttacacatgcttctatntatagagtaggtagcttccttgagaagctttcttgagaaaacttccttgagaagcttctttgagaaaacttccttgagaagctagagcttagctacacacacccctctaataaccaagctcaccttcttgagaagcttccttgagaagattcctaaagaagctacagcttaactacacacactctctataatagctaagctcacccctatgccaaaatacatgaaaatatataaaaaaaagtccctactacanagactac

SEQ ID NO: 76156 - DNA, 354 bp, Glycine max
  unsure (1)..(354): unsure at all n locations
gtctcggtatgaaaattagtagcggaatgctcaaaatcagaatattcagaatcaccctcaatagaatgctcacaatgcacagaataaccaggatgcacattatgcctaactaatctatgaaaggttctatctatttcaggatcaaaggggtgtaaatcacctggatggcccctagtcatgcactatatgcagcanatactgtgtttctcaataagcacctaacaaggggggtaaactacagctatactcanacgatatcaaaatgagctgaaattttgtgaggaacaccctataatcatgaaaagatagcacaanaattttcagacaaaaattcaagtctaactatggaaaact

SEQ ID NO: 76157 - DNA, 431 bp, Glycine max
  unsure (1)..(431): unsure at all n locations
agcttacttctanatgttggttctcttctgatatggtctcgangaagctcgcctcanagagatctaggaatgataaagcggctgaaggacccagttctgctcccgaatatgacagccaccgttttaggagcgctgagcacatcaagggatggtcatttctctgggagcgacgcgtccagctcatggatgacgagtataccaacttccangaggagatagttcgccggcgttgggcatcactggttacccccatgtgccaagttgacccagacatagtcctcgaatattatgctaatgcttggcctacagaggaaggcgtgcgagatatgcgatcctgtgtgaggggtcagtggatcccgtttgatgcggatgctcttagccagttcctgtgataccctctagtgctggaggagggccangaatgcgagtat

SEQ ID NO: 76158 - DNA, 385 bp, Glycine max
  unsure (1)..(385): unsure at all n locations
ttggtcagcagcccaagctcacgagtctttaatgaggcagaaggcgagatcgcgttggattaatgacggggtcacatatctcgatattttcacctggtgattaactcccatcgaagtctgtagctctttccaacagagaattcaagaaactatgagcagcataccagttttgaatggcacctcttttcaagaaactatgttctttcgggaggctactatgaaaaatgtcaagacaatcaaattgattttgagggcttttgaattgtcatcacgacttaaaataaattatgggaagagcagctatggngtgttgggccaatctaaatatggaaaatgcacgttgccagttatctgaattgtaaatcatgcctctgccttctcttat

SEQ ID NO: 76159 - DNA, 415 bp, Glycine max
  unsure (1)..(415): unsure at all n locations
gaagcanagacttgtgacgatgctcgagtgcgacgaacacgattgctcagatgtagaacagagacctttcatgtagatggagattagaagacgaagaagagagcgtgatagcttatatgaagaagaagacaacgcgagcttcatagggttcacgatattttttaaaatataagttcaacatcggtttttttaanaaaaccgatgttaacttatcaaacgttaacatcggttntctcanaacccgatgttaataaacttatgttaacattggttatttggaaaccgatgttaactaatcaatgttaacatcggttnttccaataactgatgttaatgtacttcgttaacatcggttnttcataaaaccgatgttaacggatacacgatatntacaattatgtcaccgcgcttacgt

SEQ ID NO: 76160 - DNA, 313 bp, Glycine max
tcacattgattattaatatgccttaatttatgccaatgctcaaggtggttgccagaagaagaattataagacttggattatttggataagaatttgatgggagtcgaattcatttttgacaagcattaatatgactatggatcttgattctaattcttttcattggtcaattctaaatatgtatatggggatttataataaattcctctaattctatatacaagaaaagttctaaggggggagatatataagttgaaatggctcatgtacggtgtgtcttaagactttgggttggatatagtatctagtttac

SEQ ID NO: 76161 - DNA, 388 bp, Glycine max
  unsure (1)..(388): unsure at all n locations
agcttatacatttaattaatcttcatagaattctttatacattatggcatataagatgattnntaaatatcntctttggaataccatcttacttaaaatgtataaaactattatagaagataaaattttctctttataaattaatacggcattgggattcattactaactagtatcagtattatgtggaaccaatttcactctttatggagtgaaaaaaattatgtaaaatgagaagtaattatggatgggtctattattaatttgaaaaataggtacttctcgcttttatctctatttctataaattaaaaagaaaaaagaaaaagtcattaaagaaactagcgatggtaatttttcttagagagtagtggcaacagtcacatcttg

SEQ ID NO: 76162 - DNA, 216 bp, Glycine max
atatatatgtgacttgagacacgaatttgcttagagttttctgaacacaagtgttattctctaaaaagccaaatcgtttatcctctaaaaatttcttggccattcaatggcattattaggaatatttgatgctagattgaaattatctttcagagaatcactttctctcttttatcactagggataaagacgaggtctctgtgtacagaatctaac

SEQ ID NO: 76163 - DNA, 301 bp, Glycine max
  unsure (1)..(301): unsure at all n locations
gagcacattccacaaacccttgtaacaggtacaaatttctgattcaaggccagctgggttaccaagttaaccaatgcatccagtttgccttcaagcttcttagtctcagatgatgcagctgagtttgtagctacctcatgcactcctctaatgactatggcatcatttctggcactanactgctgagaagtggaagccatcttctcaattaaatntctggcttcagcaggagtcatgtctccaaaggctccaccactggcagcatctatcatacttctctccatattactgagtccttcat

SEQ ID NO: 76164 - DNA, 404 bp, Glycine max
  unsure (1)..(404): unsure at all n locations
atgtggtatgctaactgccaagtatgggcaaaaaaggtgcaatacttcaactcccagagtaaaccgaatcttgtcaagtccacgcagcctccctttcacatattgaacatgcttatatagtcatgaacaaagcaatatatcatttattaatgaaggctatgtaaacaatagatttatagatgtatcaaatcctgcctctaacttttgcttgtattcatgcatcacatcttattttatctcataacattatcgaaataaataacaactatcgagcaaaaatatgaaatattacaaataaaccatatcttgtaagtggaaagctatatcagttaagtcattagaggagcagtttcaacttcattgcattnggcanaacataacattcttcgtgaaattctacttga

SEQ ID NO: 76165 - DNA, 509 bp, Glycine max
  unsure (1)..(509): unsure at all n locations
cacctgcggcatgcagcttcntaattaatntcgagcatgtcgatatattattgggtctcaatctgacattcaaagtaaaaagttattatcgtttgaaattgctctgagattctctttcaatntcgagcgtctcgaaatattaaaggactcaatcagacatacgagttannnattatttgtgtcttaatttgctatgagctnntcgtttcaatttcaaacgtctcgatatattacgagacttaatcggacatccgagtaacgagttactggttgttgaatntgctacgagtattcattttcatcttcgagcgttttgatatattacgggacttaattggacatccgaataaaaagttattgtcgtttgaatatgctcagagcttctgttnntcaattcgagcgtctcgatatattacgggactcaatcaaacattcgaataanaacgttattggcgtttgaatntgcacanngagtttgtttcaatcacaagcctctcaatattntatgg

SEQ ID NO: 76166 - DNA, 423 bp, Glycine max
  unsure (1)..(423): unsure at all n locations
tagtaatttatgcttcagcatagaacactttagcatgattgattatagaaacatctttatatacatcagctgggtnggtagaaagacccaacacttttacctactgatgtgccatcattttcttctattttctaaaccctttttgcaccattttaattattgattggtcttaattgtcaattaattaggcagttttattattggggctcatttagctaatttgatgttttaatctaatttcaggaattaatgaaacattgggcttaatccggattntagttgtggacttgaagagggcaaataaagcagcgcttaccttagttaatttctaattaggaaattttgcattctaatttatgttgttcagcggttatttattttgcgccagagtattgtaatatggcccagtgactctgagtgact

SEQ ID NO: 76167 - DNA, 464 bp, Glycine max
  unsure (1)..(464): unsure at all n locations
gctttatctctatatatggtggatgtnttaggattccaataatatccatatgatatacgagngcttggtattcaactatttgttttctaagaaatccgactcaataccaatcttctgagacttcattcacttcaatttactaccacaaatngcctcatgtacctacaacaattcttttacctgtattgaaaaatatgggtatggcaaaataattaaagcaatngtcctccactgagtgggcataagcttagcaagatgaagtagctttttatcctcttctcttgtccacccaatctatacacaaaaagcatcaaattggaaaatcactcattagaaaaatatcacaacaattaataacatagttggtacatactccttatcaataacatcttaaaaaaagagaggctcttanacccacagaaagacttgttaattcaacgattacttaactcacaggaatagac

SEQ ID NO: 76168 - DNA, 265 bp, Glycine max
gcgaaaatcctcacgggaaacgttaccgaaacgtttccgaagcgcctcggcttagattatcttcacggaaacaatttttcccagcatattcgaaagagagagaagtgcctcaggggctgaacccctttcgtcttcacttactaccctatttatagctaaataggggaggtgggtgacgtccagctcgcccaggcgagctcagctcgcccaggcgagccaggttgctttctccagaagcaacagccttctggaggaatattcttga

SEQ ID NO: 76169 - DNA, 516 bp, Glycine max
  unsure (1)..(516): unsure at all n locations
gtcacctgcggcatgcaagctngaagatgttcatgttaatgaagtcgaataacatatgaataatgtgagtcttaatgaacaaactactggtatgctgtcaattttgctgaacgaaagaaactcgagtgaactgagtgaatattnagctcactaagttagtaagtttcatggtattcaagcttactgtgtaaatactctttgagtgattagaatacattntctatcanacgtctattgtttgtgaaagctagaagtggcttagtgagaaataatacttgggtcttaatctcagggtaagattaagggtagtgccaggagtaatctagagagtacttcgtgtaggcagaagtgacatatagaatacttggttgtaatcaaagaattgattaatggagcccttcaagtttgaaggagaatnggacgtagcccaagagttggggtgaccagtataaacctctatattttcttactacttctacataacaaatttttctattagttacttcaacattattg

SEQ ID NO: 76170 - DNA, 440 bp, Glycine max
  unsure (1)..(440): unsure at all n locations
caccgacgagaggatcacagtgggtctactataggcacatctgttcatcatgctntgataaagtgccaaaaaaacaacggcacatgaagatggtgagaataacggagaagcccatgctgtgactgccattcctatacagccaagttttccaccaacccaacaatgtcattactcagacgatagacaaccttatccttacctcgcgcccatttatccacagaagccatccttaaatcaaccacagagtctgtctactgcactatcaatgacgaacaccacctttagcacagaccaaaaacaccaaccaatagatgaattttgcagcgagaaagcctgtagaattcaccccaattccagtgtcctatgctaacttgctcccatatctacttgataattcatggtagccataaccccagccaaggttcatcaacctccatttc

SEQ ID NO: 76171 - DNA, 146 bp, Glycine max
cccgaagtcattaatgcccctgatgggcttataccaaccatacttccacatttcttgggatttataggctatttatgccgccttgttttgcctaacccatatgggttataaccgttcccaacataactcggccaacattaccgctg

SEQ ID NO: 76172 - DNA, 418 bp, Glycine max
  unsure (1)..(418): unsure at all n locations
tctttaatggagagggttaccactactggaaaacccgaatgcaaatttttattgaggcaatagatctaaatatctgggaagccatagaaatagggccttatatacccaccacagtagaaagaagttcaatagatggtagttcatcaagtgaaagcataactatagaanaacctagagatagatggtctgaagaggatagaaaacgagtacaatacaacttaaaagccaaaaacataataacatctgccctgngaatggatgaatatttcanggtttcaaatttgtagagtgctaagaaaatgtgggacactcttcgataacacatgaaagaactgagatgttaaaagatctatgataaatgcactaactcatgagtatgaatatttagaatgaatgcanatgaaaatatcaaagcatg

SEQ ID NO: 76173 - DNA, 477 bp, Glycine max
  unsure (1)..(477): unsure at all n locations
ctgcagctcacatagaccacttcatgtgctggactttcttttcatggattgatggggcctatgcaagtngaaagccttggaggaaagaggtatgcctatgtttgtgtggatgatttctccagaattacctgggtaaactttatcagagagaaatcagaaacctttgaagtattcaaagagttgagtctaagacttcaaagagagaaagactgtgtcatcaagagaatcaggagtgaccatgngcagagaattganaacagcaggttcactgaattctgcacatctgaaggcatcactcatgagttctctgcagccattacaccacaacagaatgggatagttgagaggaaaaacaggacctttgcagaggctgctcgggtcatgcttcatgccaaagaacttccctataatctctgggctgaagccatgaacacagcatgttacattcacaacagagtcacactgagaagagggact

SEQ ID NO: 76174 - DNA, 369 bp, Glycine max
ttgctaactcacatcaattcagcattcgttattacggactcatcaacatccgaataaaagtttgttgtttgaattggctgagagcctcaacattcaatttcgagcgtctcgatatattaagggactcaatcagacatccgagtaaaaagttattggtcgttgaatttgctcagagcatcgacattgaattgcgagcgtctcgatatattacgggactcaatcagacatccgagtaaataagtattgtcgtcggagattgctcagagggttaacattcaatttcgagcgtctcgatatattacgggatcaatcacacatccgagtaaaaaggtattgtcgtctgatttgctcacagcttaacattcaatt

SEQ ID NO: 76175 - DNA, 487 bp, Glycine max
  unsure (1)..(487): unsure at all n locations
agcttgngagggagtgcatattctgctaatgatatttctccttccaactntatngagtcaacaacccaagttgctaattgtgaatatgaagatgacactttctggngtaaataggtatggaacaaaaataagtgtattttaattattttctcaagaaattgaatttgttaattatttttgaggatattttggaactctagatggngcaagcacatacctcattgcaaatgagctccacgctggtgctaatgagatgttagagagatgggagaagcgaagcaagtgtgggcctcgtcataaatgacctctacaccagtgcanaggatataagagagaagcgggagaggacaatntangtgattttggagagacgggagaagcaatggagaagcangagaaaaggtaagcgagagaagacaatntanggatttttggactntgccttttcccctctnttcattttaattaatnnttggaactccccttt

SEQ ID NO: 76176 - DNA, 389 bp, Glycine max
  unsure (1)..(389): unsure at all n locations
ccagagaatgatttccagaatggattcaccaggtcaagatccaagattaattcaagtttcatgagaagaaatcaagaagattccagaatcaagagaagtttggattcaagattcaagagaagatgaattcaagattcaagagaagaaatcaagaagacttcacaagggaagtattgaaaagaattttcanaaaacacaaacatagcacagtttggttttcanaagagttttctcaaattttctaagtaccagagttttactctcgggtatcgataccattacctgtagcggtactagtgganagttggattcaagctttaactgattgcatgtccaatgattttaatagtgtatcgatacatatattgtatcgataccatgatctaacg

SEQ ID NO: 76177 - DNA, 433 bp, Glycine max
  unsure (1)..(433): unsure at all n locations
agctngttaaaacggaagaaaagattatcaaaagtgtctatttgaagatgaaagcaaaanaaaaagcaagaaatgaattgaaattntcggattcgaacacttaccagttgaagaccgaagaacgaacgaagaacagacgaagaacggtgaagaatggcagaaaatcttcacggatttgctcacganaacgtttcagaagcgttacggaagcacctcggcttggattttctgcatgaaaacacgtttntttcaccaaaaacagctgaaatgcataacataggggtcagggacccttgaaactcagcctgctccccctatntataggagaaatggngaggtgcttgccgcccagaggcttctttgtagaagcaagcttcatgatgatgaatcaagttgattcaagtagttttgatgatgacannagatgatgaca

SEQ ID NO: 76178 - DNA, 391 bp, Glycine max
  unsure (1)..(391): unsure at all n locations
atggatgatcttcgagaatctatgttctatccgacttcatttatctcaatgaaggtttctgcgcttncacgatgcaaatataggggttcgcgtttagggttcctttcaatttatttattatcggggttttcatagagatcggcgataccataattngggggtttgggagagtctctattgacgttgctgatcangggttaaatattggtctttgatccaagtcttcaattgggtttgatattgatggtgttgatcttcctcgatcaacatagttntggtgctggtcatcacttgcttacgatggtattttggaaatggacnattggagccananggtttgggtttggatgaagaataagtctatggctggggattatcatgagttatgact

SEQ ID NO: 76179 - DNA, 339 bp, Glycine max
  unsure (1)..(339): unsure at all n locations
ctgcagcttctaagcaactttcataacatttttaattgatgtttaagacttngaatgaatntatgtattgagatnaaacattgaatgatatttaacccattgttattattgattcaatcattgaatgactgtggtgaaaaaatgtaaattttataaaaatatagaaaatactttaattanaaaatttatcattcnattttatataaaaagtgggagccatcactgcttgagtgaccaacaagtgatttttgtggtcattaaaggatcgctactgacccataagtgaacatattacccaataccatttacctctatggtatagaaacatataaaattggt

SEQ ID NO: 76180 - DNA, 290 bp, Glycine max
aagaggggaagattctttgtaaccaagaaaaaaatcattgatgagtatacaaagaggtgtggcacatgttacaatactatttaacgatgaaatttatttgcaggatctcctttgaattaaaagatgccatgaatggcaatatatatgtatggcttgataatttataacgatgtattggataaattaaaattatgtgtaggataaaaaaagtgtttcattgataacatgtaatatgtgctgataaaaagtttattagtgatatttttactaatatttatgatatacttacc

SEQ ID NO: 76181 - DNA, 488 bp, Glycine max
  unsure (1)..(488): unsure at all n locations
atccttaagcaccgcggctgcagctctacgtggacaaaaaaatctcttactgcacagccgtgagcagttanatctgacttgacaggaaatgggcacttgcagccgacaaggaccgtgtggacgacactgtctgtgaaaaatggcgacattagcaggagaaatgggccaagttttgtcagacccgcagagacccctcgtgggaggtatgtagtttgtcattntagttggtttccacaaaaaaaataacttcttataattcattggagtaatcattntcattaatgttcgatttttgcaggatgtgcggaaaaaaacacaagtcatccagaagcaaaacactgcccnccatgtgttgtttcgtcggggttatgaatatttagaacaaaagcttatggctgagaagacaaagaanagactggaggaagctgcccaatccgaaagcactgagggcgtcattgacccttcatctcccatcagacgccacatga

SEQ ID NO: 76182 - DNA, 485 bp, Glycine max
  unsure (1)..(485): unsure at all n locations
agtcacctgcggcatgcaagcttcttcctgaacttctaacatacatgcctcttttttcttaaactttcctgttacatgtaataatatgaagatattaaacgtgattatttgggtagtatagtcaaaatatactctggatatgtcattgattatctctatntatntacttattctattaattgttcctttcttccttttttttcttggtntttttctttttcagaaattagcttaatgtttcaaaattagctaaatgtttcttattgtacttatattgatagatcaatattaatatataaactatttgtgacaggattctttttataataacttgacggaggaggaactctcaacgtaagattatctntttaatgcgtaactgttatgcaagttntcttggagatccgatagcattatatcccgcaagaatntattngatcgtgtcataacatanagaaagaagaaaaataattatacaagttaat

SEQ ID NO: 76183 - DNA, 465 bp, Glycine max
  unsure (1)..(465): unsure at all n locations
agaaaagcacatganacaaacttcagatataacgagatatccgatgtgtttatctctaacaaaagacccccccccccccaaataaaaaagaaaagaaaactatttgttgctacccacgacacaaggaattaaaaaacttgatttcgtcgccaaaaagatggatggggaaaactatttgctaacccattgtgtccatcattngtattcaattgcactttactnttttgtcataaaagaagaatgaatagaaaggaatatagaagcgaaagtacatctaacggaggataaggaatgcttctgagaagtaaagaaattaataagaatagtgtgcctagctaggtggcccacataaacaaggttgcccactatcagtgatagaaactactagaatttgaacttgatggagcttctttacaggtnnttgtgtcactatacttgacaattctgttcatatcaagataaatt

SEQ ID NO: 76184 - DNA, 318 bp, Glycine max
  unsure (1)..(318): unsure at all n locations
acagaaccttgaacttgaagtgaatgaagaccaattagcactcagatgagacagaaggagaatgacaaaaagaaanagagagagactcctatggaattgacatacgttggtagtggggagaaaaagaaaagaaatgtatttcaactacttcttgtctcaatcatttattagactaatataaatattttattattactaataagtaaccggtcagacttagtaatttattgcacaactctaacagagtacttatgagtttatttctatcgttgatctgactgccaccaacaattggtangcagtaattttaggattttg

SEQ ID NO: 76185 - DNA, 483 bp, Glycine max
  unsure (1)..(483): unsure at all n locations
taatccgaanatgtcaaagaattgggcgttgtttagcataacanaactttctgtgnatggtttaaagatacaatctttgcaaatgagaatgcttcagaaacattaagaaaactagcagatgggcctaaaagaaatgttataacctggcaaggatacgacataaacaggtattcattttacacaaaagcacaagatgacaaaagtataatgcagaacaacggggtcaccctaagggctgaatctcaacactttgcaagtgtcaatgacgccaatccctgtgtagcttccatcccttacnttgggttcattgatgaaaattgggagcttaatttatgtgaaattacagtatgtgttttcaaatgtaaatgggtngacagcaacaccggtgtgtgcaccgatgtatangaacttaccctgaagatctaaagaaactnggttaccacaatgaccctttcatcatggcagacaagctagacaagtatt

SEQ ID NO: 76186 - DNA, 500 bp, Glycine max
  unsure (1)..(500): unsure at all n locations
ctgcaagcttaaattgaattaaaacgttcagaaactgctggtaatcgattaccatatatgtgtaatcgattacacagttcanattttgaattcaaatttaatagctgttgtaaatcggttttggccactggtaatcgattacatcctctagtaatcgattaccagagagtaaatctattgaaaaaacctttttaacttagatntcttggccaaaccttntgcgacttcaatnggaattcccttcctatntaatatacccttcctaagactctagagactgtcttgatcattcatcttgaatatctttgtcttgaataaatctttgagaagcatgtgattcatgntaatccttggcatcatcaaaacattcagcttgatcctttgtctacagtcaccgggtttgagtgctcctttaagcctatgctgatcccatatagttggagcattctcgcanaacatcatgaccctgacaggtctccctatgatcttacatagtgaga

SEQ ID NO: 76187 - DNA, 475 bp, Glycine max
  unsure (1)..(475): unsure at all n locations
tagacttaacctcgacgtatgaagctctcatannaaaatgtccttctgaatgggatatggccacacctataatgaanaagtgagattntcatgcatcaaataactttgtgagtatcacggagttattattaagatggatagaagttggatgaacaaaattcgcatgagccctgcatatgaggaaggcatngatgagttcatgcaattttcttctgaaagaagtcgatcggatgaaggatgaaaatattntggtccttgtataaatggtttgaacgggagacgatgaatactggatgacatatgagagcacctgctgtgtgataggattaagaagaattataccacatggatatggcatggtaaatggatatacatgcagagggggtctcaatctgaccatttgatgtagaaatgggagatcgcttanaggatatgattcatggtctttgacaagagtctattcaacaagcacatg

SEQ ID NO: 76188 - DNA, 412 bp, Glycine max
  unsure (1)..(412): unsure at all n locations
cgccgctgcagcttaccctaaggatgacctttangtttgtagggatctattcaatgcctataggttggacctcccagaagagtatggagtcagcaccacttttaacatttctgattntaactcctttgcaggtggagctgatattgaggaggaggaactaacagatttgaggtcaaatcctcttcaaggggaaggggatgatgcaatcctccctaggaagggaccaatcactagaaccatgagcaagaggctccaagaagattgngctagagttgctgaagaaggccctanggttctcatgaaccttanggtagatntctgagcccatgggccaaggttgggtccaattatctttgtacatattagactangatgtcattatatttggtccttgtatatacggctccatatt

SEQ ID NO: 76189 - DNA, 436 bp, Glycine max
  unsure (1)..(436): unsure at all n locations
tgtatttatggggggaggttatatgctcattttgcttttttagtaatgtcccactaaaactaactttccaaatggttgccttcgcaggaatggccccgaggaagcttgcctcaaagaggtccacgaaggacaaggtggccgaaggaactatttccgccccggagtacgacagtcaccgctttatgagcgttgtacaccagcagcgcttcgaagccattaagggatggtcgtttctccgggagcgacgcgtccagctcaaggacgacgagtatactgatttccaggaagaaatatggcgccggcggtgggcaccacttggtactcccatggccaagtttgatccagaaatagtccttgaattttatgccaatgcttggccaacagaggaggcgtgcgtgacatgagatcctgngttangggtcagtggatccccgtc

SEQ ID NO: 76190 - DNA, 495 bp, Glycine max
  unsure (1)..(495): unsure at all n locations
ctgcagcttgcaagagagagcaagttaaaacctctttcttagcaaaaaccgttgttctacttcaaaaccccttgaactacttcacattgatttatttaatccctctagaactatgagtttaggtgtaaattactatggcttatcaatagtggatgattactcaaggttcacatggacttttgttttgaaaacaaaaaatgaagcttttgaggcttttcgcaaacttgcccagatgattcaaaatgaanaaggtcttaacatttgttcacttggaagtgatcatggaggtgaatttcaaaatgagtccttttaaaacttttgtgaagaaaatggaattcaccacaatttttctgcccaagaacacctcaacagaatggtgttctggagaggaanaatagatcgctagaagaaggtgcaagaacccttcntaatgaaacaagggtacctaagtacttttggctcgatgctgtacatactatttcgtacacctttgac

SEQ ID NO: 76191 - DNA, 489 bp, Glycine max
  unsure (1)..(489): unsure at all n locations
cgagtgagccaccgtagagtgagtcaatcccaagacaagagtgaatttactccttggagtgaggaagctagaaagttagagaagccttttgagagacaagataaatagcttgggaagtctctatcctcaagctngagtgagccaccatagagtgagtcaattttgtaaacacatccttgtaaccttactatcattttgatagtggaagaaatctcatattggagaaatataatcggatgctcccattactacctttaattactaagtgtctatcttaaacttcacgaagcggtaaagtccgagatttcccaacaccttcctcttagacgctctcctttacggtccttcgacctcgacacaactctcaccaccaccatgcctaaactccttgcaccgncattgattttngattncagtaaatggaaaatggaacatgttcatcaaactgaatctcagtattggaagcaacaccaccactttgtgacacta

SEQ ID NO: 76192 - DNA, 382 bp, Glycine max
tacatgaacagtattaatatactataattcctttcaattctgtgaatttcaattggaaactgcaaaagtttatgtcatggtggtatggtattttgtgtctacatatttctaacttaataaatataatataggtatcgatataagtaattaaattcattaaaaaagactaacctaatttatgtataatgtgcaaccaacagggagtgagttatcagattcctaactaatagagagaaacaaaataacatgtaggtataaatatcatataaataaaatataacttacttaaacataactcacgtcatttcgtcattttgtcgtccaacatcacatcaatcacaacacaccaccattcattcatttttacaacattcacgtactc

SEQ ID NO: 76193 - DNA, 518 bp, Glycine max
  unsure (1)..(518): unsure at all n locations
atcctctgagtcacctgccggctgcaagcttggagaggatgcttcaatggagaaaaattaagttggagagaaagagagggggggagcacaaaattgaaggaagaaaaagggagagaagttgaacattgagttgtgtctcacaagactcttattcatcaaagttacaacaagtgttacacatgcttctatctatagactaggtagcttccttgagaagttttcttgagaaaacttccttgagaagcttctttgagaaaacttccttgagaagcttctttgcgaaaacttccttgagaagctagagcttagctacacacaccccttccataaccaagctcaccttcttgagaagctagagcttagctacacacacccctcccataagctcacctncttgagaagcttccttaagaagatntctaaagaaagctagagctagctacacatacctctctaatagctaagctcacctccttgagatgagaagctagagcttagctacacacccccctatatag

SEQ ID NO: 76194 - DNA, 364 bp, Glycine max
  unsure (1)..(364): unsure at all n locations
ttacaaaactttctacctcgtttctcttcatctttcaatagaaatatttgattcatttctcaacttctttctaagagtttttgttcaaaactntctcttccaagaaaagttctttgttaaaaaacttgggctattttttcttcttcattctcttctcccttttccaaaagaacgaagcactaaccgcctgaattcttttgtgtctctcttctccctttgtcaaaagaacgaaggactaaccgcctcaattcttttgtgtctctcgtctcccttacaaaagattcaaaggactaaccgcctgaganatctnttattcttcccttcccttaagcaaaagattcaaagggactaccgcccgagcatc

SEQ ID NO: 76195 - DNA, 467 bp, Glycine max
  unsure (1)..(467): unsure at all n locations
agcttntagtanaactctgtnttcataataagatgttttnttctttctggtaatcgattactataggatgtaatcgattactagtagctaaatgtttttttttaaaaaaaatagtttacaaattttgaattcgaattttaaactgtgtaatcgattacacaatgaatgtaattgattaccagaagttaaaactattnttaacagcttttagaaatataaatttaaattttaaaagcctataatcaattataacagttgtgtaatcgattaccagacacgaaaatttcaaatttcaagtctgaagagtcataactcttcaaaaactatgtaattgattaccacattatgcaatcaattaccaataaggaaattntaaaaataactccccaaagtcacaattgttcanaagatttttgaatggccaccaaaggcctataaataggtgacttgnggttcgaaattcaata

SEQ ID NO: 76196 - DNA, 373 bp, Glycine max
  unsure (1)..(373): unsure at all n locations
tacttatggagatatggtaatttaggtaattatttcattcttcttcttttatttagactctngttgtacctttttggtgttaaaattatgaatttgagctttctctttagtttatcattttgataggttgcatatgtttatggatgacntattttgtaagactgaatattggctcggaaaggaaacttanaacaagaaatgagaaagttaaagtcaaaaaattaagtgctgagcaaaaccgcttaagcctgaatttttgctcaagctaaatacacaggtaaagtttcaaatatgcttaagcaaaatttttgcttaagcacatttcattanagtgtgcaatttgggggattaaaggaactactcacatttttca

SEQ ID NO: 76197 - DNA, 436 bp, Glycine max
  unsure (1)..(436): unsure at all n locations
tcagtcacctgcngcatgcaactgcctgtccgatgcagtcgtatgatggccctagtttgttgtggaacggntacaaacccgggatgggtttatgcaaagacaacggcggcataactagcttgataaacgccaaaggaaatcgtgggaagtatgggttaggctataagcccactcaggcagatataaagagaatcatcgcgggaaggaagagcggtagtcaaaactcgcggttgagacaagaaggtggaggaagcccaccctctcacataagtaggagctttataagcgcgggtctggaggacgaaagtcaagtggtcgcgatatacgaagatggtgttccgagtacattggatttggtacgaccatgccctcctgatttccagctgggaaattgacgagtggaagaacgccccggcatttatgcgacgagcataat

SEQ ID NO: 76198 - DNA, 342 bp, Glycine max
  unsure (1)..(342): unsure at all n locations
atctcacttatgaaacatttaccttcaattaaatctttggatttngaagcctcaacatcgttaagagtaaatgttggatccagtggcctcggaataattacgaaggggggggggagttgaattaattattaatgaacctttactaattaaaaatctatccttcttaatgttactagattcaatttggcttttactataatgttaagaaagtaaagaacagaaatagaaacttaaccaaaagtaaaagcgataattaaagtgcataacggaaattaaagagtgtatggaagaagaagacaaacacaagagntttatactggttccggcacacacgtgcctaca

SEQ ID NO: 76199 - DNA, 487 bp, Glycine max
  unsure (1)..(487): unsure at all n locations
agcttgccagtgttgatgccagnggatgatgtgccattgttcatagccatgccgtgtccgtgccagccttcaagaccagacagcatcgttgtcaccgtcgaaatggagaagccaccgcccaaaccgccgcaactaccagtccctttctatttgtaattagctgcttccaaggtttcaaaatgggccaagattcttctccacaaccacaattttcaaaatatcaattatcaaagatcacagcgaatcttctggaaccacagtatcatagatcacgacaaaacttctgagacctanatttaaaaatcttggctagttgtgctactgcttctcatcacatgtttctatttcccaccatttgttgtactaatgtatattcattttgttcacccaaattagagtgtaagaaataaaatgcaaaacaaataaaataataagggataggtagggttgcaggtcaattcgtagattctgagatcaatctcatttg

SEQ ID NO: 76200 - DNA, 168 bp, Glycine max
  unsure (1)..(168): unsure at all n locations
atccttaagtcacctgcggcatgcaagctatgcacggaanatgtaattatganattgagatgtccgaagaaacaccatttcctagttaaccatgcattangtaccatgttcaaatattttggtttgtggtgggggtttttttttagaaatggggttatgaccccacat

SEQ ID NO: 76201 - DNA, 172 bp, Glycine max
tgcttttttcatgttgaatgttcggaaaacaccagctcgacgtcgaggatggagttcacgctacgctatcttatcgctgctccggagctaccactttatatcttgccggggcatggtatgtttattgtatatttttcccttgcggctacttatagatttgtaccaataaaat

SEQ ID NO: 76202 - DNA, 447 bp, Glycine max
  unsure (1)..(447): unsure at all n locations
agcttattcnaatgaanaggaattcanaattaattgtttgagaagtgaccacggaagagaatntcanaatgactctgaattgttntgtgaacaaaatggcattaatcgtaacttttccgctccaagaacaccacaacaaaatgggattgtggggaggaaaaaaaagtcccttgaggaacttgttagtgtttagctctactgagctttaaaagaatggctaagattntgttaaaacataagcacttagacaatgaagganagctggagttgctgcacatgatgtccaacgctatgtcaaggaataagatcgggctgcacaatgcacaaggcaagataaaatgtcaaatgaagaattgaagttgcaggatccacgatgtcggatacaatgtcctgacatcctgcccgagaatactggagtngctgtacaatgcaagataaaagtcaagt

SEQ ID NO: 76203 - DNA, 399 bp, Glycine max
  unsure (1)..(399): unsure at all n locations
aagatatttgtgatacaaaatgtgacaaggtgatgaccaaaagctcaaaggtcaatcaaagaatgagttcaagatattcaagatagaatcaagaacactttcagattcaagaggaaagtttgatttcagaatcaagaatcaagaatcaagattccagattcaagattcaagaatcaagagaaggcttaatcaagataagtatgaaaaggttttctcanaaattgagtagcacatggatttttctcanaacatgttcaccacagagnttttactctctggtaatcgattaccagattggtggtatcgattaccaatagcaaatggatntgataaagttttcacatgaagttacaacgctccaattgattcataaagctgtatcgatacaatgtatggaat

SEQ ID NO: 76204 - DNA, 453 bp, Glycine max
  unsure (1)..(453): unsure at all n locations
ctgcagcttctagttcaatatgcgatgatttatggctacttcatgcactcctctaatgactatagcatcatttctggcgcttaactgtttggaggtggaagccatcttctcaattaaaattctgactttagcaggggtcatgtctccaaggcttcaccactggcagcatctatcatatttctctccatgttactgagtccttcataaaaatattggagaagaagctgctcaaaaatctggtagtgaaggcaactgacacatnagtttttaaatctctcccaatattcatatatgctctctccactaagttgcataatgcctgagatatcctctctgatggtcgcggtcctggaagcacggaaattatttctaagagtactctcttgaggtcatcccagctcgtgatggaccttggagcacggtaatatagccagttctttactcactcctcta

SEQ ID NO: 76205 - DNA, 450 bp, Glycine max
  unsure (1)..(450): unsure at all n locations
tagcatntatagctatctttagtttatatatatgatgagagtttttnttttcatttcttttcaactggacttctttctctctttttcaaatgtaatttattcactcaacttttagtgaaatatacccatcgccatctctcgtccccttggaatgaaattaagttcttaaatattaaataatatgttcaacaattgaagggacgcatttcggaagaggaaaggttaccactctggggggtgtgtagcctccaattntacttttattcctctgctcaactgtnttactaacaaaatattatgaggacaataatntataatttataaaatacaataacatggaggattcanacaaagattagtttctgtgatagttgaaacttaccagtcaagcttgtagagattgttccagctcccaacaagccataacagcttccatagcatgaacacgta

SEQ ID NO: 76206 - DNA, 475 bp, Glycine max
  unsure (1)..(475): unsure at all n locations
tcacctgcggcatgcaagcttctagccanatggacttaccttgaattaattcctttgatagcccttttgagcactgtttccctttcctttgtntgaagctcactacaagccttaagtgaaaaaccatgatattaccatatccttaaggaattttggagctttggaattgttttgggaataagtgcggngggtttttgtttcattggacaacttgttttgttgactatgcttcatgatgtattntgggccatacttgatgtacattgtatattggttaaatgttggacatgctgaatgaaatgttgtttctcanaggcaaaaaaaaaaaaaaaatttcgaaaaaaaaagaagaagaanaaaacaaaaaaaagcaataaagttgagtgaataagatcttaaatggcacaagaatgatgaaactcttggntctactcttcatggttaaattntatctctactttttttttattttctt

SEQ ID NO: 76207 - DNA, 456 bp, Glycine max
  unsure (1)..(456): unsure at all n locations
ctaatgtgcggngagtaccaagactagcacattcagccatatccaatattcttcgagcacaactttctctaggatcaataccaacatgatcagccacatgttgatgtctagcacactcctttttccttttcctatcttttgagcattaatctgttgtttgatgtagagcagtcatgtggcaatgagcccaccaaaatatatgctctgaagggtagaattccagctgcaatgaanaacaaaccctcccctgccatccgcccatcccattctagaaccatggngtaaaactgcagtcaaatccaattgatcctcacatgcttacaactccttcatgctgtcacaacatatcttaaagaatcctctcctactgccagcattagataggtgccaagtaagtgctcaccacttgcacttgagcacctgtgcgaatgacacgtcaacatgatctagtgacat

SEQ ID NO: 76208 - DNA, 448 bp, Glycine max
  unsure (1)..(448): unsure at all n locations
agctntacagcagatttagtaatgacccactaacctataattaaaatatcttattgccattaacctacggaattaaaaaaaacttaatggctgagtgtaactgaaattgaggcaaccaaaagtcacccccaacagccaacaagtcagccaccatttggtctcccaaaaggctgatgcctaggttgccaattgggcccttattacaacttgaactaaacctaactaaagccgctttagttgattaacccaaaacatatttttggtcagccaactttacaaggattgggccattatttagacaaactaaacactctaaaatagagacaaagnggtgtcatttagtccttctgcatttgggccatgatacaactcacaaccttggacttttctccttgagacttgggcttgtattcaaatagtatggacagcacttgtagaagaagcttct

SEQ ID NO: 76209 - DNA, 403 bp, Glycine max
  unsure (1)..(403): unsure at all n locations
gatcattctttcctttaaatggaggaatgttgagtttaataccatcaattcggatttgtctaggaacaccatcattctctcttctgctnccttcttcttcattatgatctctattctgcatttgatccaacctctcatggagcgcatcatctcgttggttcattaacctctccaaatgttgcatcaaagcttgcatttggaattgcgacagccccactccatcattaggattagtacctgacatctcacacaaacaaatcaaacgtgacaagacaattatagttgctgtttgaatacctcacccactcaagtgtatcacacaattatggctttctctaatgaaacactcttgcgctttaccactctaanttcccttgagttcttaggcaattcaagagaatat

SEQ ID NO: 76210 - DNA, 390 bp, Glycine max
  unsure (1)..(390): unsure at all n locations
gcttcttgcgtagccactcttggtgcttagaaaatcctcaaaacaatatctctcttattactagctattttgaattctttagtttctgaatgtacaaccttcacaatggtgctcgttcccctctttcttttcagcaaaaaagaaaatcaaatgttgtgaaaacatggatgaagtcctaagaaaatcaatatcaaagaaaacatggatgaaatcacaattaanaagcacaactacctatctttcagagtcctttnggtaatttggctggtctccttatatggggggggtttgtttaataatgttatactcttgccttaaaaaaaaacttatcactaatcctcttttcattaatccaactttggatgttattctataaaagaatcatgggtc

SEQ ID NO: 76211 - DNA, 392 bp, Glycine max
  unsure (1)..(392): unsure at all n locations
agataatctatcttgtcaacgcntggtcttagtggagtatatggagggcagaacatgattgaacatctaaacacccttcaaggtatttgttacccattaaaagaatgtagatataaatatagatgatgaattacaaactcttctactcctcagttctttgcttgagagtgggacatattggtgtcactctcagcaactctgcactagatggaaagcttagcatggacaatgtcacagatagtttgctaaatgaagagtctagaagaaaagagaaagacttgagtagtcacttcaatgaaaatgttgttgaaaatagagggaggaacgagcacctggtaagaaggccatggaaatacaagaagatccagtctcacccaaggcttagtgtacta

SEQ ID NO: 76212 - DNA, 400 bp, Glycine max
  unsure (1)..(400): unsure at all n locations
agcatgtatatatatggtactggttccatcctttatatgaaatgcatgttgggaacatgtttaaggtcattctctcttcaatccagaagatcatctggctatagggttatatggaggactntgcttccagcctctggtgccatgatgctacatatcttaacatttttatgcaagcacttgtttgacatcagagattagagaacaatagatagagagagaaatactatattattggtaagagagactactttctatagatcaggatgattagttacattgcacttctttctttatttggaaagtagatctgcctgtgtattcttgggattgaaaggtaaaaatganatagaattcatactactaataatataaatcgtattatatatggcctcatatcatt

SEQ ID NO: 76213 - DNA, 443 bp, Glycine max
  unsure (1)..(443): unsure at all n locations
caacataatcttcctcttggattaagccatttaagaatgcgttttttacatccatttgatatagcttcatattgctataagttgcgaatgaaagtaaaatgcatattgcctctagatgagctacaagtgcataagtttatttggaatctataccttcttggtgtgagtaaccnttagccactaaccttgctctnattatctcgaccttaccattttcttcaagtttgttgtggaagtcccattgcactccaccaactntattttctttnggcaattcaattaacctctaaacatcattcttctaaaactggtgaagttcctcttgcattgccttaatccagttatcatcttgcatagctcatcgatgaagttgggttccatttcagagaatagtgcaatatgcccttgtgttctaagtgataatcttggttgaacatgatcta

SEQ ID NO: 76214 - DNA, 302 bp, Glycine max
  unsure (1)..(302): unsure at all n locations
ctcttggtctctttgttcaaggggctctttgcggtaatttgcattctcttcccgtaacccggcacacttctttcgaatgtgtgtngcggccaactngaacttctccttgcaagtttcgcctttcctaactcgctnttgagagcttggacttcttcgtcctcttccggtgcttcaaaactctcttcgctgacgaactttaacttggcgagccaatctaaaccttgtatatgaactntcagccattcatggtagccaccaatgatgccattacgaatgcctctaagtcttgatctttcttaacg

SEQ ID NO: 76215 - DNA, 369 bp, Glycine max
  unsure (1)..(369): unsure at all n locations
atcattctttcctttaaatggaggaatgttgagtttaataccatcaattccgttttgtctaagaacaccatcattccctcttctcctcctttcttcttcattatgatctctattctccatttgatccaacctctcatggagcgcatcatctccgtggttcattaacctctccaaatgttgcatcaaagctcgcatttggaattgcgaaagccccactccatcattaggattagtacctgacatctcanacaaacaaatcaaaccgtacaagacaattattagtgctggttgaatacctcacccactcaagtgtatcacacatatatggcttttctctaatgaaacactctngccttttaccactctaaa

SEQ ID NO: 76216 - DNA, 105 bp, Glycine max
tgaaactgatgcccgccatggaccagtgggcctcttcggcccatgacatgagtgggtcgttgacgggaacgggtgggtcgacgcggtggtcgttgaacttgacgt

SEQ ID NO: 76217 - DNA, 369 bp, Glycine max
  unsure (1)..(369): unsure at all n locations
ctttaccaagtaatgcatcaagagattctctggtaccatgactcttttccagctgtgctgctttgatccatatgctcttcttagttaagaagacagtcaaggcatgagcatatatagctctggcagtctcaatagaacctcttttcttacattcctncgcatcagcaacccatgtcctcttcctatcttcttcttcaactccaaccccaatagtattatgaattattgcttggcaagttacaatggacccagcacgctcggctgcctctgcttccttatccaagcttncctatcaatacacaccttctctctgagagccctataccctctcatgatcttgcaccatggagtatcccatagctcctccac

SEQ ID NO: 76218 - DNA, 437 bp, Glycine max
  unsure (1)..(437): unsure at all n locations
gcagatatacatacctctcgaggcatgagcgtctggggaataactctgcaagagacaacatgacaaatatagcatcaatggtgaaagagaccaacaaaagcaaacacagtgggtactaatggagtatgagttcctattcttgcctttntcccaacatctttgtgggaaaaaagagaaaggggaattaataaaagaaacaaaagtgaagagtgtttatgttacttacccaatgacatggcgaccgccatcatgaacagcttgtgaaactaaacccattagaccaatgcttccccctccatacaccagatcgatgttccttgagaccttaattccaacaccattcaaaaaacaaatattaatcagccttgaaatagtaaaacaataatagtggtggctattgatgtgtatgtgtatgatctcaaaaaatataaaagaga

SEQ ID NO: 76219 - DNA, 427 bp, Glycine max
  unsure (1)..(427): unsure at all n locations
ttaagcaccgcggctgcagctatcnannagaaaaattaattatatagagatataaaattggatcaacgacgaatttaagtgttataatatatattacttctgagaatgttaacttttattagataatacttgtatcttttatttaagtatgatatctttacaatttttgtcatcataacattaatatacatgattctgtttcaccaattttgtttttagtgagatntttttcttaatcatatttttttatgcatttacgatgcttaaatttgaaactttatttaaaatgattgaatcaagttttactctagttgttgatattaaaaccttactatcaggaacctatattntaattttagaattgattcctaaaataagtaaaagtaaagtatacaaattaaattattgattagaaaaataactatcg

SEQ ID NO: 76220 - DNA, 399 bp, Glycine max
  unsure (1)..(399): unsure at all n locations
acatanagcatgcttatgtattttttcttccaaattgtcatgacacttatacactttgatacaataattaataaaatgacgagagcacttttcaatacatataatgcacgaacaaattagtttaaatattaactttctacacanaaataannatataataatggcaaataatttgggtttctatatgttttcttctttttcattaaaaattaaattaaattaatttattttttatattttcttggaattnntttatatgttactgataatttntatatctttttcttactntaaattttctatggatattatatatattatatatatatatatatatgtatgtatataaaacatggtatttaggtcaaaataagtaatacgttaatgaaatatattcat

SEQ ID NO: 76221 - DNA, 469 bp, Glycine max
  unsure (1)..(469): unsure at all n locations
agcttctggtgggacatctngacttgctttccaatctgtacattcaccacagattctgccttcttctattttcagattgggaatgcctctcacagcacctttgtcaatgattttcttcatccctcttaagtgcagatgtccaaatctttgatgccatatttttacttcatcttctttggaggatagacatgtggaggagtaactggtttcttgaggtgtccataggtaacagttgtcctttgatctgctgcccttcattagaacttcactcttctcatttgtcaccaagcattctgactntgtgaagtttacattgaatccttcatcacacaactgactgatgctgatcaagtttgcagtcagtcccttcaccagcagtactttgtccagactaggaagtccatcatggactagctnntccattccaatgatctttcctttatctncaaatgtcacatagctagtggag

SEQ ID NO: 76222 - DNA, 337 bp, Glycine max
  unsure (1)..(337): unsure at all n locations
cgctggtaaataaaatctaaccgaacgttcacactgtaacctcaggtgaaccagaaaaagccaaattatcattaaataatcaagatctcttgaataataataataaaataatcagaatatcttttgatattataataaagaaaatcaatcggacgtttctctttggaagtttattggatcaattgattaataaccaaagtgaaactaagggctaaataaactcacaaatcaagctttgtccgcaaaaatcacctaanagcccgtttaagggtcaacgccttatacggtcctctttgctttatcggttacatgaccgctcaaagcatgaattaacatg

SEQ ID NO: 76223 - DNA, 476 bp, Glycine max
  unsure (1)..(476): unsure at all n locations
agcttgtgcattcaatattctgatgagggtgttccatatgttctcaagactggactaatagatttgctgcccaagtttcatggtcttgcaggtgaagatcctcataatcatcttaaggagttccatattgttttttccatcatgaagccccttgatgtccaaaaagatcatatctctaaaggcttttcctcattctctggaaggagaggcaaaagattggttatactaccttgctcctaggtccattttcagctgggatgaccttaagagggtgttcttggagaaattcttccctgcatctaggaccactgccatcagaaaagacatttcaggcatcagacaacttagtggagagagcttgtatgagtacttggaaagaatcaagaaattgtgtgcatgttgtcttcaccaccagatttctgagcaactccttcaatatttctatganggacttagcaacatggaaaggagtatga

SEQ ID NO: 76224 - DNA, 299 bp, Glycine max
ttccctatgggataagtgagaacaaaagcgacttcataaaccagagcttcactgtcaatggacaccgacttaagccattcctcacaaacccttctttaatggacgtagtggtggaagagacttccttactccaccctactcttcctcaccgtgacttaggagtctctttacatctctcttactttatacattgccatcattgaacaatgttaattaatgctcatgagacaggtgtagataggaggtcttgtttgcttgtacttgtagttgtttgtaattgtaattgcggttctagtata

SEQ ID NO: 76225 - DNA, 460 bp, Glycine max
  unsure (1)..(460): unsure at all n locations
agctntgtatntaaagagaaaccataatgaaccattcaatcctgaggtgtactggcanatggtatacaaacttgccattaaattatctttccctgcaaatggcattcggattgtctaccgggcgcaactaattntgcccatgcagctgtctgctgcagcaattaatccgtagatcacatccaacaagtttgtttgaatacaaagttaaagtgtttttaaaagtttttctactaaaaaatgacttatattatagtagaaaaattcccaaaaccgtttataacttatattcaaacaggttntataagacaaaacaagtttcattattctagtagaagactntgtatgatttgcttgctctactaaaaaaatgacttatattatagtagacaaattcccaaaaccgttgataacttatattcaaacaggttntataagacaaaacaagtttcattattctagt

SEQ ID NO: 76226 - DNA, 312 bp, Glycine max
  unsure (1)..(312): unsure at all n locations
agaagtagcagggtgtctaagaaaagtgagtatggtaaacaaagtcaagacttggttataaaaggaaaatgaacaanggtgctgaatactttgctgaaattcttctttttattgcagttgtcatatattatataaactgacctgaggatgaaaagttaaattttcctcaagagggtgttataattgacttatgcaagaccttgcngagcaatgtactggagtcactattattattattctgacctcgaagctgtcatcgatatgatagtggaagagtatatatactantatgtatagatatgtaccactgta

SEQ ID NO: 76227 - DNA, 514 bp, Glycine max
  unsure (1)..(514): unsure at all n locations
gatctctaagcaccgcggctgcagctatantaaatgtattgaaaaataatntatcttttntaaatgtcttatngtaaaatatattnttaaataaagtatcataaatggtatattagatcttaaaaatatattttttgtgtgactttcttaaaaatatgtttatatcatataaataattcttataaaataaatatttttgcttctattttagtatttaattaatttttattaacaatagataaaacacgggtaattaattnttctcttttgaataattaaacaaacatcttacataaaggagtataatatctttaccataatgaaacatcacattaataataattcattgaatngaataaaacataaccatacactcttaagtatataaatatgatgagtgctatcagcacactctcaaacatctcactcttatacacatgcactctctcgtattggtccacctcagctttaactataactcattactttnggtagangtacctattttcttaat

SEQ ID NO: 76228 - DNA, 459 bp, Glycine max
  unsure (1)..(459): unsure at all n locations
tgatggcgcctcaaagagcctccatgttgaggactacaagtactgatcaatctaagtgctgtaggaatctgtattntatgggtacaaccgaattttcttgttaatgagtattgtgcttcgactcttcccagaataataatcgtttggaattntgctttttgtttttcctagtgttccttcatatcaattntagtaattcggtgtattggtcaaacctgtgcaaacaggggaggggatgtaactntgttttcttgatagacaccaccaccttgctgttaacgaggctttgtngtttatttgcaattatctttctttgtgttntcataattatatgtatgtgatagtttctctaaattatttgttacaaagatttagataaacgttgctgataagtttcctanaaataatatatgcaattatcaatggcattcagaaaaatttctactgagtcattaaatt

SEQ ID NO: 76229 - DNA, 383 bp, Glycine max
  unsure (1)..(383): unsure at all n locations
tcaagtctaaagagtcataactcttcagaaattaactgtgtaatcgattaccacatttatgtaatcgattaccaataagggaatttttaaaataactcccaagtgtcacaactgttcaagaagtttttgaatgaccatcaaaggcctataaataggtgacttgggatacgaaattccttagagtatttttgaacaacattgtcttatcctctcanaatcaaattgtcttatcactctcaaaatattccttggccaaaacacttgcaaattcattaagggaatttgatcgatcttcaattgtaatatctttctcttaaagagagannaattttctttttcttctacattcttagcttaccatntannaagcgggggggnggggg

SEQ ID NO: 76230 - DNA, 476 bp, Glycine max
  unsure (1)..(476): unsure at all n locations
atctaggtgtccaaaacccctcaatttattggattntctatgtttgagaagtcaaattgagaatgggacaaatttgaaacaaactctcacctcacacaagtctataacatcaatntaaacttgtttaaactggatttacgcttaaaatctcaccgaatcaaaatttgactcttcaacacccaaatttaccctagaaatggctctntattcactctggtcatttgtttttctctctagcacagcctaacctttctcataagtcctaaatggcatttcaagctaagattaactcactctaacctctanatactaccaattacagaattggccttccagcccttcaaaattcactctttttccactcataacaccacattctcactttctaacnctagttaantctacccttcatctctaacnagtttccataagcaatttcagcacatgaacatcacaagcattatcataaaaaccct

SEQ ID NO: 76231 - DNA, 467 bp, Glycine max
  unsure (1)..(467): unsure at all n locations
gactaagaacaccattaaacctatatttactattcctatgttttctcaacagaatccaaaggtctggtagagatgaaaaaaatgaacagaaagtaaattgacaagaaagttttgaattaaagtaggatggaaaagtatgggtcacacgccatttattgttcatttctcttcacttaccctctctatctacacaaacgaacacacccttagtcagatgcanaaaaaaccaacccatcactgagagaaaaagcgaaagagagaaccttttgcggttacgtctggcagcctcgcgcgacttgcgttttttctcttcatgattgttctcgaagtagcgtctcctgctacactcctgaacgacgccggccttggtcacctctctgcggaaccttaccagagctatttctcagtttcgtcctcggccaccaccacctgcacgttgtacggcgactggaagaaagcgtgtggag

SEQ ID NO: 76232 - DNA, 443 bp, Glycine max
  unsure (1)..(443): unsure at all n locations
agctntatcaacgtttccttttcctgggaaacanattcttagtatactatcattgaagtgtgaaaccaatgacaagtatacatgcatatataatctatataccttgagaaggtgatcaacagagatgtgttgctttggttgttggggtaagttgcttatgtcagcaagaattttgttctgggaagctcccacgttggccacaggaacagaatctcccttcaccactttcactctctntgcttttgcacctgcaactcatcaagtaacatttcagatctgataaaaaaaagagcccagatttgcgagtagagntttttgctcggacaaatctagtagatggaaaaacctatgagctacgtaatcacaaattagttcttaaaatatgaactctttttctgaaacaatcggtcaattgagtatctgcaagggggttcaattggagt

SEQ ID NO: 76233 - DNA, 276 bp, Glycine max
gaaactccttttatattattgataaatattaaaattaaatgcatcaaaaagagaaatttgttacttgattgccatacatagtcacattcactctttcacattaacctccattcacgtatggttgggcttttccagagataatcaagattgttatacgagcaaccaacatatacaaaaaagctattgtcagataacatgtataataaaagcatgaagaacaggtatattaacatctcatataatactagaagaatttttatataaaccacctttcgg

SEQ ID NO: 76234 - DNA, 355 bp, Glycine max
  unsure (1)..(355): unsure at all n locations
gtgtcacgaatgtcacgtgctcatgcaacaattgttagccgtggctatacgagacatcttgccaaacaaagtcaggttagcaataactcgcctgtgctttttcttccatgctatatgtagcaaagtcattgatccagtcatgtttgatgaaatggaaaatgaggccgcaattatactgtgccagttggagatgtattttccccctgctttctttgacatcatgattcacttgattgtgcatctggtcagagaaatcaaatgttgtggtcctgtttatctacggtggatgtacccggttgagcgatacatgaagatcttaanaaggtatacaaagaatctatatcgtccagaagca

SEQ ID NO: 76235 - DNA, 366 bp, Glycine max
tcatcttggggaccactggctgcagatcctcccctttgggcgtattctttgaagaccgccccctttgcaatgttctgtattgatctatccgaccatataaatgactgatcctgctacaaaggcaaccataggtccttccaagactggactcgggaagagtctaagttagtgtaccaggtaacagctaccccagtaagactttcttggaaggaatgtattagaaattcctcatcttttgcgtattcccccatcttctaacaatacatctttagatggttcttgggacaagtagtcccctcgtacttgtaagggccaacaccttgaacttgtgaggggtgatgatattgggttctaagaacaactctt

SEQ ID NO: 76236 - DNA, 392 bp, Glycine max
  unsure (1)..(392): unsure at all n locations
agctntcatctnntatttcgatntcttttcttccgtctttaacacgctnttactggttatntaagccggtttctcatctaaataatgataaaatgaatttcaaccgatcatttgtgttgtaatctcatttaatcacttttaaaatgaaatctaaccgatcgttcacgctataacctcggttaaaccaaaaaaagtaaaataataataaaataatcagaatgtcttgaanaataataataaaataattgaaatatctttgaataaaataaattaaaaaaatcaatcggacgtttntctttggaagtttccttgaatgaattgattaataaccaaagtgaaactaagactaaaatagactcacaaatcaagttttgtccgaaaatcactaaaaa

SEQ ID NO: 76237 - DNA, 462 bp, Glycine max
  unsure (1)..(462): unsure at all n locations
agcttcctccaccatcgagtctagagcctcacgaattgattgtctagcgctgntcgtctatcctccaccatcaagtcttatccggagccccatgaattgattttcattcatgcatcctccatcatcgagtctggagccccacgaattgattgcctagcgctgttcgtctatcctccaccctcaaatcttaaccagagtctcatgaattgattgcctagcgctgttcaagcattctccacaatcgagtctagagccccatgaatggattgcctagcactgttcgtctatcctccaccctcaagtcttatccggagccccattaatggattggcattcatgcatcctccaccatcgagtatagggccccacgaattatagcctangcgtgttcgtctatcctcaccctcacatctaatccggagtctcatgaattgatagcctagcgctgtacatgcttccttc

SEQ ID NO: 76238 - DNA, 336 bp, Glycine max
  unsure (1)..(336): unsure at all n locations
attaaccggtggatcttcttcgaatttggtcttaaacctcaccagacactttgccatgatctgactggtgggatctttgagaagatgtctggagtatgctagaagcctcttaatgaagcttctagaggaagcctcttaatgaagcttctagagaaaactacatggagctgcctccgtaaaaatgctgcccagccttctttaacccgtggatcttctcaaaattnggtttgcaacttcacaagacacttgtccatgatgtgaccgttgggatcggttgacagatgtctagagtgtgctagaaactttcgtcccgagagcattcttatttaagcattt

SEQ ID NO: 76239 - DNA, 484 bp, Glycine max
  unsure (1)..(484): unsure at all n locations
gcttttatccaggctcatcttggtggtgaagcttcttcttccatggcttattccctagtggatggcgcctnctctcacctcttcttctttgtcttccgctgcatcttcatggtggaaaatcaccattaaaggacctcattaaagctcaaagatccagcctccatagaagccccagaagcaagcttccattaccttggtatgaactntgaagtgaaattctcaaatgatcaaagttcagacctcatttgagacacannaatttgtgctccttctcttcctctccctccactcatcttcttctaccttcaagggtntatccatggcttcctatggtggtgagcttattcttgactcatcttctnctggaagtggcgtctncaagcatctttcttccttcttcattccgctgccattaatcttcaaaaagcaaaggactccattgatgaagaagatccaacgcctacaagctccacatggagctaca

SEQ ID NO: 76240 - DNA, 475 bp, Glycine max
  unsure (1)..(475): unsure at all n locations
actaagctgaggcaactgatgcgtggtaacttgtgtaccanctggcctttgatcanaaatctgtacctgtcgcaagaggttgtggtttgtgctcctctgctgaccaccatacagaccttaggccttccatgcagcaacctggagcaattgagcagcctgaagcttatgttgcaaatatttacaatagacctcctcaacctcagcagcaaaatcaaccacagcagaacaattatgacctttccagcaacagatacaaccctggatggaggaatcaccctaacctcagatggtccagccctcagcaacaacaacaacagcagcctgctgctttcttccaaaatgctgctggcccaagcagaccatacattncttcaccaatccaacaacaacaacaaccccgatacagccaacagtngatgcccctccacaaccttccctctgagaacttgtgaggcanatgactatgcataacatg

SEQ ID NO: 76241 - DNA, 315 bp, Glycine max
  unsure (1)..(315): unsure at all n locations
tgcaagcttgacgatgaatcaagaatgattcatagagtttttatgatatcaaagatgatgacaaanagctcaaaagttaagaatacttcatgataacaaagatgatgatctcaagaatcaaagaatgagttcaagattgaatcaagtacacttcaaggatcaagaggaaagttgaattcaagtatcaagaatcaagtttcaagattcatgttccaagaatcaaggtcaagatttcagactcacgattcagaatcaagagaagactccatccagataagtattaaaaagttttttcacaaactgagtagcatatga

SEQ ID NO: 76242 - DNA, 365 bp, Glycine max
  unsure (1)..(365): unsure at all n locations
gacctgacctatggttatgatttgttgatacttttgtagaaaatataatgtgactcatacttatgaaatcgactttgatatttaaatattactagttaactattttgataacgaagaagttgttacagaataattaaagtatattgtgacaacaaccataataaacatttattatcttaatagaggaactagtgagagctattatgttttggntaggagaagggatcactaatcttgcctataaaatgtgtgtaaaacttcattgattcacacaccttcaccgaagaataagggtaagaggatctctctctatttctaaacattgatataatatgcattttttactttatagagaacatatgata

SEQ ID NO: 76243 - DNA, 433 bp, Glycine max
  unsure (1)..(433): unsure at all n locations
agcttatgtttctgcaggttagtagttactgctaattttgccaacattctagttcaattggctttggctcaagccttcgagattctgttgcctagagactagagtgattatatttctttagtaaaatgaaggatcctggcaccaaggattctagttgagttagttgagtaatatccgtgacttattataaactttntggtaaatgagttggattgttagggattaaaaatgaaggatcctattaatgaatggtgttaaatattttcaattacttaaaataaatatttttggtataatgaatactttnttgtttacatatacattntaattttatatatctagcagatgtcctaacgctntattttgattgacagaaaaaggctatattgaacataatangatagaataanggtgtcaattgtgatccatggtt

SEQ ID NO: 76244 - DNA, 364 bp, Glycine max
  unsure (1)..(364): unsure at all n locations
aaaaactgaatcaacttgttataattttgtaaggggtgaatttggatatgttattataagaacttgtttattggcctcaagtgagaaaatatatatttcatgtcaaaatacacaattaaggatctacttatactttaatgaactgttattttgtttcctttagataaaaaatgactcaactatatcttgtttagatgaattaaagattttagttgtgggtccaattaattgtgcaatgtgttatactcgtccaatattaatggacttactttccgaacattggagtgagaccagnggcttanatacnaaatagtggaatattttgtacatttgggacaaagaagtatgcaagtaggagtgacaa

SEQ ID NO: 76245 - DNA, 478 bp, Glycine max
  unsure (1)..(478): unsure at all n locations
ttaagtcacctgcggctgcaactgaagctcacccttcttattganatcctaatatatatgtatctnttggcattcattagaagagataaggaccctaacttctactcncaggaggcaacaatcaacgagtgcacaaagataaccctntttttattattataatctgtaatacactattgttcatgcataaccaaaaaaatcgtatgatgctgttaaaaaattgaggctaattaattnttgtttttgatcaacaaataaaagggctatattgatatagagtatgttgcaaggggtaccatcccatttaccatcaattctgaatttgctaactattatctaaacttcattntaacgtctagtgttgctcaattagctgatcattntaattttgtttttagcaaggtcaacaacaaaaaagaatccagcanacactgtattattctattacccattttttcttccttaataatttccttta

SEQ ID NO: 76246 - DNA, 457 bp, Glycine max
  unsure (1)..(457): unsure at all n locations
tggctggaaatgatcggtaaatggacatctttgagttcacaagataaccactctgtttagttattctatcaagaatttttgtagtcctttggaattcaagcaaaaatccagcaattgactcactgttttctttgttntaatattacaggttaaagaagagattaaaaaatgttatgaactcataaacaaattacggagaggagttgtgtatgtgggttcttcaagaatgagacctagccattcacattatgggcaagcacaagagctggctaaaaaggcaagtaaatattcttacaatagcttcctacctctntgttcaacttacttgccggtgtgtattgtataagatctcattcattngtacctaatcacattgttttggcattaacaacatgatagcggcnagggtagtataagttttgattattttgcacatatctgttgacatatacaaatc

SEQ ID NO: 76247 - DNA, 475 bp, Glycine max
  unsure (1)..(475): unsure at all n locations
ctgccgcatgcaagctctgagtgcaggggggaacagaaactcgattcctctgtagtggtgttagcgagagagcgcgtgggcaaaaacggaaacggcgtcgtaggggttactgctctgagaaagagcgttgacgagtttggcgacacaaagtgcgtgagtgacgatgtttgttttgacgatgtacgcgtgaatttggcgcacttgggactgtgttatgcgtttctccgacaacaaccttgttgggtttgccccaactgtaaccgaaacacagcttgatctcatgttaacaacaaacaacctttgctgtcgtcgttctgaactttatgcttcaagggcctgctgggcctctntacttntcatgttgggattgctattggccctaatcaaacggctattagcctcatttaaaaattctaaatttattctcagtcacaatgcataactcgaatcatgtnttcatgcattgaggaaaact

SEQ ID NO: 76248 - DNA, 404 bp, Glycine max
  unsure (1)..(404): unsure at all n locations
cttagttgtagctgccanattgacaataatatctgtctggntgcttatctcttcccttataatggaatcagctaaacccaagtcctcgtaagaaatgtcccacggcaccagagtcactatttccgaaataaaggacttataatttgcacccaatttttcctttagcacaataaataagtccttcgctatgatctaaatgccaaaagtacatgtattaagcgcatattagccacaagtttaattaaataacatgtctggcgagaaaattaatctgtgttcacttaataacatgtatggtgagaaaattaatctgtgtgcacttaataatgatttggacaagcttgagaatgacatatgaagcaagccatgtatctacttgaagtcctagtctcatgctaactata

SEQ ID NO: 76249 - DNA, 248 bp, Glycine max
taccgctgtggtctgaataatctcgtcagaatatattcttgtaagacatgtcttaattatagaacattacattatatgctgcatatagattatgccgcgtgataaatcataatacgtacactgctaaaacacaatggtatattattacgccaaacctagtcacttcttgctaaacagaacgcataatgaaaatatatgcgctgctttctaatatgtacgtgattcgcacactctccgcagtgcccatg

SEQ ID NO: 76250 - DNA, 384 bp, Glycine max
  unsure (1)..(384): unsure at all n locations
cacctgcggcatgcaagctnntatgaaacaattntgctctntggaaaaggttttgtgaanattcatgtgctattcaaagtttcgaanaaaaaattagtacttatcttgattgagtcttttcttgattcttgattcttcaacttgaatcttgaaacttgattcttgattcttgaaatcaaatttcctcttgatccttgaagtgttcttgactcaatcttgaactcattcttgaatgtcatcatctttgttatcatgaagtgatcttgacttttaagctntttgtaatcatctttgttatcatcaaaactccttgaatcaatcttgattcatcatgaagcttggttctacaaaaagtagaccatgtctatagattaaaaaaagcac

SEQ ID NO: 76251 - DNA, 370 bp, Glycine max
  unsure (1)..(370): unsure at all n locations
gctgatgaagatgaattcatggctactttatgcactcctctaatgacaatagcatcacttcttgcactaaattactgggagtttgagccatcttttaattaaatttctggcttcagcaggggtcatgtcttcaagggctccaccactggctgcatctatcatacttctctccatgatactgagtccttcataaaaatatttggagaagaagctgctcagnaaatctgatggtgagggaaactggcacatagtttcttgaatctctcccagtattcatataagctctctccactgagttgcctaattcctgaaatatcttttgtgatggccgtggtcctgcaagcatggaaaatgtttnttaagaatactc

SEQ ID NO: 76252 - DNA, 501 bp, Glycine max
  unsure (1)..(501): unsure at all n locations
tgcaagcttgtggggctacttgcaatatcaatatcattgttgaaataattatctaactaatatatgtatgtatatgacacattnttaggatccactctatgaaaaggtttgaataggaaaattgcaatattggcgactagtgctcttggtgttggggctcattacttagctagcctatctggtgcaacaggggaacctatattgattggagccgttgtcttcgtgctaggtaaaagaaagttatataacaaacaaataaagtaaataattaataatgataatgataataataatttaagaaaagaaaatagctcttggactagtgactttcaatcaatcatagttgattctttaatgaatttgatcattgttntgtgttttgcttaattttgcagatgccttaccatcctatcaaatttttaggcgtttntgtgctctctaataaaattccctactntattacgttatttattatgccaataaaaaaataatcattgacta

SEQ ID NO: 76253 - DNA, 183 bp, Glycine max
  unsure (1)..(183): unsure at all n locations
gacatgctgaatgaaatgttgtttctcacaggctaatattatacataataaaagtcgctaaagaaaaaaatttcggaaagaaaaaganaatggatcactaatgatagctatagaaccgcgctaaagttgagtgaataagatcttaaatgcacacgaatgatgaaactcttggttctactcttc

SEQ ID NO: 76254 - DNA, 388 bp, Glycine max
gtgaattttaatacgagctctagatgaatggcaaactggaacatttatagtccatggagcctcgattgttgagctactaggggcagattcactcaatgtaccagaagcaatcattacctgatgaattaacatgttggtcaaaattgaataacaagaaaaacacacaattgttcagttaccgtaaagagaactcaattcgtcctcactgcatgggatcatctatgagttctaccaaataccacattttcacataaaattataaacggtgttatatctggatgtcctaatacgtcattatgaccttcccaacccaatttgattaatcacatcttaaatagctcaagttctccaatggagactccactagtctctcagtgacctaccacct

SEQ ID NO: 76255 - DNA, 217 bp, Glycine max
  unsure (1)..(217): unsure at all n locations
catttttcacgagaccaaacttaaaccacaaaccactgtatgaggatcaaggtcatttcaattccagtttatacattcataagataacagntaatgcaactgtncgagagtataggaatagatctcttgattcgatcaagtcatacaaaatccagtttgtacaggcatagataaacagnttaatgcaactgatcagagagtatagaaatagacctct

SEQ ID NO: 76256 - DNA, 424 bp, Glycine max
  unsure (1)..(424): unsure at all n locations
cacgattggcgaggacaagatcttcctcacttgtgcagaggttgttgcatattgttctccaaagctggttgaggacccttgaaaaatatatatgaattttgctgtcggggaatagaaatagagaccagaaagtttcagtttactagagttagctagtgaaggatatatgaagaagaaggtgtgaaggatgagaattaagatgagaatggttgttacaaaaagctatagtagaagaaaggggcctatccgattntgctactgtctattagtgctactactagctccaccattcttatcttaaaaagtgtgaaattaaatactacaaaataaaacagagantaagtaaggtgcatgcaccatatangcatcaactcgttctcttggtttacttggatgtcctagaatctaactcaaggctatgttg

SEQ ID NO: 76257 - DNA, 292 bp, Glycine max
  unsure (1)..(292): unsure at all n locations
aaatagcttttagaaagggttttgaagttgaaatttgaatcatgtaaccgattaccagatgtttgtnatcgattaccagcaacaacacttcataaaacacttttgaaagtcatgacccttcaaaatataactgtgtaatctattaccaaaaacctgtaatcgattgccagtgaagaattttagaanaagctttttgaaagatacatctcttcaaaccattttgaaaggcatgaangcctattatatgtgtgtctgacttcganagcaagagagagatattctaagagaactt

SEQ ID NO: 76258 - DNA, 489 bp, Glycine max
  unsure (1)..(489): unsure at all n locations
agcttctaaactntgtacaagaatgtttctctgatatttcttgntagacaagtggcctcagatatcttaagaagggggggttgaattaagatattccaaacttttctcctaattaaaaatctatcttactctttacttaagttatgaattcccttaatgacaatcttcttaaatattaattcaaatgaagcaacttgaattatgaatataaagcaataataaataaaggagattaagggaagagaaaatgcaaactcagttttatactggttcggccacacccttgtgcctacgtccagtccccaagcaacccgcttgagagttccactaacttgtaaattccttttacaagttctaaacacacaaggacaacccttnctttgtgtttagagattctntacaacaagagactcacagtctcttaatcccttagagaatgagaagaagaagaggaacanatctctctttgaagagatggatttacagatg

SEQ ID NO: 76259 - DNA, 389 bp, Glycine max
  unsure (1)..(389): unsure at all n locations
gaacacttcatgataacaaagatgatgatctcaagaatcaaagaatgagttcaagattgaatcaagaacacttcaaggttcaagaagaaatattgattcaagaatcaagtttcaagattcaaggtccaagaatcaagatcaagattcaagactcaagattcaagaatcaagagaagacttaatccagataagtattaaaaagttttttcaaaaactgagtagcacatgaatntttatcaaaaccctttaccaaagaggtttactctctggtattgataccagatattgtatcgattacagtagtnaatggtttcaaaagcttaactgaattacaatggtccattgattcaaatgttgtatcgatacaatgattgggtatcgataccagt

SEQ ID NO: 76260 - DNA, 393 bp, Glycine max
  unsure (1)..(393): unsure at all n locations
agcttgngagggatgatggngacccggtgtgagagttctatgatatgggctacgtgggagtacgtgagctcagttggaggtgggcaacaggggatggtgggtttatgcgcgcattgtggatgtggaaaactttgtgtgcaccatcgcccgaccgccacctagtaccacatgtgatgggtaccccataatcctacaagcttgagatgaggaagtgttgaagggtgaaactttctgcttttattgttgaccacagagtggtacctggagatatgtcgcggnggtctggagaccttggngacgtcaggtggggtgctattgcccaaaaccaagcttgaccaatcccgacccaacccgggcatagtcggtcagtgagaacctgtgatgtacctaaac

SEQ ID NO: 76261 - DNA, 479 bp, Glycine max
  unsure (1)..(479): unsure at all n locations
tagctacacatacctctctaatagctaagctcacctncttgagatgttaagctagagcttaactacacaccccctataatagctaagctcacccccatgagaaaaaacatgaaaataacaaaaaaaagtccttattacaaagacaactcaaaatgccccgaaatacaaggctaaaaccctatactactaaaatggccatatcaaggcctagacgaaggaaaaacctattctaatatttacaaagataagcgggcttatacttagcccatgggctcgaaatctaccctaaggctcatgagaaccctagggcctttccttggatctctagcccaatctacttggagtcttctagccaatgcccttgcggagtaagattgcatcattctctccaccttggaaggattgacctcaaatcccgaggttcttcatactctgggctccttccctcaacacctgtaaaaagaacaaaaacacatgta

SEQ ID NO: 76262 - DNA, 478 bp, Glycine max
  unsure (1)..(478): unsure at all n locations
agcttatatggactggtccttctacaacaaaatcgtacacaatgttatcattatattagaaaatacaactgttctacttttttacgaatgcaaaagaaattaattgcattaagcaagttaaccccactaatttggcacgtgtataaaacaataattacaatgtacgttatggaaatatgcataaaatggtttaaagaattcataaaacttttgttttctttcaattgataattacaaattgaaagacgaaattacaaattcaaatgataattacaatgtatcgtactaaatccgtcgtaagtccagaagctgatcctggcttgtcaacctgcagganatcgtactaaatggtatcatttaattacaaaatacaattggtttactttntcacaaatacaaatgacattatttggattagcanataaccccactaatacgcatgtgtacaaacaacaatacaatgaccttaagtaacata

SEQ ID NO: 76263 - DNA, 478 bp, Glycine max
  unsure (1)..(478): unsure at all n locations
cacttaaaactcagctagccgaatcgatcatttgaagtagcttttctcaacttggtcagcttagcataccaaatcaacctcagatgcaagggttaggcgctaagcacttgagactcacggcttagcgcatgaacagagatgcgcttaatgataactgctaaataattgtgaattaatagtagaaaattagtcaaattttggcttaaaattaattatttagccagtatttgtgattaaaaagtagacaagcaattaagttgaattcttggccatagatatgaaaactgaaggtacaacaagcaaaaaggcagcagaaagtgaagaanaagaataaaatctgaagcagacccagcccaacacgcgcccttagcgcgcgtcacgcgctaagcttgcaaggcacacaggcactaagcgaggcgttaagcacgaagatgcangattcgttacgtgcgctaagcgcgaggcacacgctaagcgc

SEQ ID NO: 76264 - DNA, 482 bp, Glycine max
  unsure (1)..(482): unsure at all n locations
agctngcagagaaagcaataatngatcaaatggatttgttgaatctcattgganaaaatgaatgatgaatacatgtgtttcagcttatatacaatcagctttggatgccaatctaactaacaaaaaatacaattaactgtaactgtttctcactgtcataacagaaaacagttggtgcataactaattgtatatgctgagaatatcctcaagagatataattatgtgtcaatcattgattttctggggggttgtgtgctgtagcagaacaattaatctgcccttacggacacaaataatttcttgcagtcagagattaaaattcatcacagtcaaactggtcataaatgaattgctagtcattccacccacatgaacatgattntcacaacatatattgtgagaaaagatgctactagttgcatattaaaaagcatcagaattggttataaaaactctattacgtactatcatcaataaact

SEQ ID NO: 76265 - DNA, 483 bp, Glycine max
  unsure (1)..(483): unsure at all n locations
agctntgaaaattaccttctctacccaattcaattatacttctatagagtttcaaaaacctgtatgtatacaatatttttggcaggtgtacacatcctaccatcttcatccaagataatcaagtatttntaagcccttttgggacttgactcttgaaaaagcaacataaaattgaccatgtgtaaaaaccaatttaggtaggtataatactcttgttgatggtcattacaaaacataaacaaataaggaactatctttgctataatttgaatggaaaacctgaagggcatgcccacaatgctaagttggtggtgtttctcaatgaaccttggagctccaaaacgaatcgtcgtgctctgcaacatcacgtntgcattntctcggcttcgaacgcttcactgacgtcaatgattatntataaatgattcgatttanantaanataaaaaacaataacaatccaaaattatntaaatacttttgg

SEQ ID NO: 76266 - DNA, 289 bp, Glycine max
ctgacagcagcgacgctgtcaacgcagggttgccaacagcatcaacgttattctccgacttcaaaaaagctgtatctaggtccggaaaaacaacgtggttccattccgtgaccgattattataggtttttgttttttttgcaattgagtcatcaaaactttggaaaattgcatgaacccaacaatatcacacatggcatggcattagagaggagaacgtgtcgcatatatacgacatttatagatatttgtatgtacttatgaagagtcatttcatagtatctcttact

SEQ ID NO: 76267 - DNA, 369 bp, Glycine max
  unsure (1)..(369): unsure at all n locations
gacatgaaaattatgccccaaatgaggtctaaactttgaagtatcattttcagttgaaaaaaccacacactggggctttatttatagcctaagtgtcacacaaaaatagaggggaaatttgatttctattcanatttcactactttaatttgaattgtggagccaaaattgagccaaaattcactaatatgatagtgaattcagctatggtcagccactaatcagatcaagtcagatatcactagtatgctggtgcataggctgtaagatgaagactgccaagaagactatttatggacatggaggtgcagaaatgctacctcccttagctgccaaattatcgttcgaagctacagcatcgtgggatcg

SEQ ID NO: 76268 - DNA, 399 bp, Glycine max
  unsure (1)..(399): unsure at all n locations
tatccttcctaagatggagccaatttcatccccttcattaagaactagctgctttcttcctctattgcctttagctgcataaacctttgtttggttctctatttggttcctaaccctctcatgcaacttatttacaaactcttacctagattccctttctttatgtataaaagaagtgtcatgtgggaagggaataaggtataaaggtgttagaggattgaatccatagacaacctctaaaggggattgtttggtggttctttgaaccccatattgtaggcaaattctacatgaggaagatactcatcccaagatttatagttgcttttcagaagagcccttacacggatggatagagacttatgcactacctctatntacccatcagttgtggatgga

SEQ ID NO: 76269 - DNA, 409 bp, Glycine max
  unsure (1)..(409): unsure at all n locations
tctagcatgagattcttcatagtcatccacctattttcttgctcccanacacaaagtcaagatcatcacaggatccaaacacaaccacacacaaggagtgagttatcacattcctagctaatagagaaacaagacaattaaatatacatgttatataaatgagatacctacttgntttaaacatagcttcaacgtaacttcaccaacttcgtcattcaaaattcacttttcaatcatcaatcacattacacaagaatcccacactctgatcaagatataataacacatcaattagcaagcatatgcaacagttatgctaagactcaatcctatatgcaatgtggtaccatgtcagtgaaaaaccaccctgtggcgcttangagtacataacaagacacaccacacaatg

SEQ ID NO: 76270 - DNA, 399 bp, Glycine max
  unsure (1)..(399): unsure at all n locations
actaccaaacctatggagaaaacaacgtgcgttccagatcactcaaatccaattatgggtctagaaagtagaaaatgcatgtcgagtgtcgacaccatgttaacatcgtttctgctaaacaaacattctgaactaaaaattgacgacatccactgttaaggattttcatttcgttgcgtgcttntcaccattttaaaantctattcaaatataattgatattagttgtgtttttgttaaactattggcaatatgtgcataccaagaattgatgtggatattgaattgatgtatctgacaataattttcttaaattatattaaaaggaaatataaatcatatgaaaaacaaataaaaagtgaaaataatcatataggaagtgtgattatttttggagtga

SEQ ID NO: 76271 - DNA, 403 bp, Glycine max
  unsure (1)..(403): unsure at all n locations
ctgcagctgaagtaacanatgccttggtaactgggtatcccaactggtcatgaataaaaaatctgcacttgtcgccagactctgtggtttatgctcctctgccgaccaccacacagaccttttgcccttctgtgcaacaatctgaagcaatggaacagcctgaagcttatgctgcaaacatctacaacagacctcctcaacctcaacaacaaaatcagccacaacagaataactatgacctctccagcaacaggtacaatcccggatggaggaatcatcccaaccttagatggtcgaatccgtcacaacaacaaccttattntcaaaatgttggtggcccaagcagaccatatgttcctncaccattccagcaacaacaacaacaacaacatcctcagaaaca

SEQ ID NO: 76272 - DNA, 436 bp, Glycine max
  unsure (1)..(436): unsure at all n locations
gagaagcttcnttgagaaaacttcctttataagctagagcttatctacacacactcatctaaaaactaagctcacctcattgacgaaatacatgaaaatacaaaaaaaagtccctactacaaagactactcaaaatgccctgaaatacaaagcttaaaaccctatactactagaatggccaanatacaaggcccaaaaagaagaaaaaactattctaatatttacaaagaagagtggatccaaccttgacccatgggctaaaaaatctaccctaagttcattagaaccctagggccttctttagtagctctagcccaagcctcttggagtcttctatccaatacccttggggggtaggattgcatcagttgttgtgcaagctntctcttttctcctttatatctcaactatntttcattcttcttcgtcatttcac

SEQ ID NO: 76273 - DNA, 387 bp, Glycine max
  unsure (1)..(387): unsure at all n locations
aacacgcgtcaaagctttgactntacttgtatgctattggactgagcattactgtgtngcatatttctgtaattctaacatataattatcgtgtgatttgaatttgctcttttggctttgatgtgatttgatttctttcacaaccttatgggtttggatatggttgagtaagacaatntttttaaaatacaattctcatccttctactttacctctgatacaantnntatttatatgccttaaaagcttatttntatatctttataactttacaaatacagggaataatccttatantctctaataatctaactttcaggctttntaatgtattacagattattcctaatgattacactttataagacatattttgacttgtttgaa

SEQ ID NO: 76274 - DNA, 487 bp, Glycine max
  unsure (1)..(487): unsure at all n locations
tgcacactgagtccatcaatgttggagatggcgtcttttctctntgtgtttatcatggcagcattgtgaataaaagatctcatggcatctaccaaatacttaatatctgacgggccccatatattaacctacaaattaaaagaaactatcattcatgatagataaatatatatatattcgatgaaaaaggaagattaaatgctgtttacagacatcccttcttcttccatgccagccaaagtaagaagtatacctgcgagttgaggagtaaatatttaaaggcgcttgtacatgaatcaccaatctaaccggtaacagtaaagaagaaacaattgaacatggcaagttatacagacctggaaggccaccggcagtctcagaacagacgcgagatagataaagtgatctatctgaagacagatgaacaacacttacatgagatgatactactagtaataggaaatcaattaacattaggagagaaagg

SEQ ID NO: 76275 - DNA, 366 bp, Glycine max
  unsure (1)..(366): unsure at all n locations
tcacttaaaattagtgagaaaaatgggttccgtaaagaaaatccaagccgagacgcttctgaaacgcttctgagacgttttcgtgggtgattacgcgaagattttccgtcgntcttcatcgttcttcgttcgntcttcgtcgntcttcggtcttcaaccggtaagntccccgaatcaaactnttcaattcattctatgtatccttangtggccccacttgtttcgcgtgcctttatttttaatttcattactttccgtacccctttttgacgtgctntagtaatttatttaagtcattttctcgcctaataaaanactaacataaatttccaccgatcatttgaattttgtacgtctttaatttct

SEQ ID NO: 76276 - DNA, 350 bp, Glycine max
  unsure (1)..(350): unsure at all n locations
gtgaagagggtgagaatgagactgcccttcctatacagccaaggttccaccacccaacatgtcttctcaccataacaaccttctctaccaccgccagtatcgacaaggccatccctatatcaaacacaaagtctgtctaccgcacttncaatgacgaacatcacctttagcacaatccanaaataccaaccaagaaatggaatttgcagcgagaaagcctatagaattcaccccaattccagtgtcctatgctgacttgctcccatatctacttgatattcaatggtagccataaccccaaccaaggttcatcaacctccagttctccgagaatacgactcccgaactta

SEQ ID NO: 76277 - DNA, 467 bp, Glycine max
  unsure (1)..(467): unsure at all n locations
agtcacctgcggcatgcaagcttggcanatanatcactcctcatctcatctctatcatgcattttctttgtttacccactcctcacgtttggttntttagggaaaaacaccataactaaacgcgccgcaagggatccctatcgcaccagatccaaatctataacgatgggtgatcaagaagagacgcatgaacagatgaaagccgacatgtctgctctgaaagaacaaatggcctccatgatggaggccatgttaggtatgaagcagctcatggaaaagagtgcggccacttgccgcgctgtcagttctgctgccgaagcaaacccgactctcttggaactacgcaccatccttcctcaaacatagtaggacggggaagggacacacntgngcacgatggcagccctcacctgngatacaaccgagcggcttacccttatggggatgccgccactattcaccaccca

SEQ ID NO: 76278 - DNA, 508 bp, Glycine max
  unsure (1)..(508): unsure at all n locations
atccttgagtcacctgcggcatgcaagctnntagaaatgatntctatacatatagtagtcgtataatgcttctaacaaggatgaagctttgagtgggattcctttctttttcttatcattctcctcatgttgattcagtctcattagttccatttcgtgttcctataactttccaaataaagttgcaagagacatgttagaaagatcccttgattctgtaatagttgttacctttggttgtcattccctacttaaacatcttagaactntattaataagatcctcattgggaaatatctttcctaatgatgcaagatgatttactatgtgtgtgaatctcttttgcatatcatgtatnagttcattnggattcattctaaacaattcatattcatgggttaaggtatntattctagacctttntacatctatnggttcttcatgggttacttggaaggtatcccacatatctttngcactcttgcaatttgatactctanagtattca

SEQ ID NO: 76279 - DNA, 185 bp, Glycine max
atatgttcaagaaagaaggtgaaacctttaaagaatatgcgcagcgatggagggatttggcggcgcaagtaactccttccatggttgagagagagatgatcaccatgatggtagacactctgccggtgttctactatgagaagctagtgggttacatgccgtccagctttgctgatctggtagtt

SEQ ID NO: 76280 - DNA, 452 bp, Glycine max
  unsure (1)..(452): unsure at all n locations
gcatgagtgataagacctttaatcaagttgaaatcggacctgagatgatttcacgtcatttacttttctatttcacaagaccactaaagtcttgcctccacattgacaaggtcttgcttcctacgctgtcaaagaattcacgctcaccatgatggcctattcatactaccacaagtaacagagcattgcataaacaaaggcaaacacataagacatacatactggtgcaaaattgtcaatgaaggaaaagcatgtgcattaaagagaaataataattgccaccattacaaggcctatgcagccaaaatccaacaatgtagaaaagaaggaaataaagagaaggaagcctaaacttaggcgtcattgccttgctcctcggcaccctgctcctcatctgtagcctnctncttcacaacaacttcttctttgtcaagagaacactatccttcaca

SEQ ID NO: 76281 - DNA, 319 bp, Glycine max
acttgaaatcttcttcttttaacttctggtaaaaaaaactgcaaaaaataatctctctatatttccttaaagaccacaatgaaggaaagaacctgcaatcattccttagcaacattgactatcacaattactcaaatttcgtagttatcatcgtgttatacagaaggagaaaaatcaaactccacgttaaatatttccatttatagacatagattcttgtgttggataaaatgtgtatcgaccttccttctgtttacatatattcaatacaaaataattttatatttaaactcatatgactcccatactataaatctac

SEQ ID NO: 76282 - DNA, 426 bp, Glycine max
  unsure (1)..(426): unsure at all n locations
atccttagagtcacctgcggcgtgcgagcttgaagaggatgctctaatggatgaaaaganatgttattatgggagcacganattgaaggagtagaagagggagagaagtgtaactctgaagtatgtctcataagacttttattcatcacagttacaacaagtgttacacatgcttctatntatagactacgtagcttccttgaaaagatttctttagaaaacttccttgagaagcttcttcgagaaaacttccttgagaagctagagcttagctacacacacccctctaataactaagctcaccttctcgagaagactcctagagaagctagagcttagctacacactccctataatagctaagcttacactcattccaaaaatacatgagaataccaaaaanaagcgcctactacaaagactact

SEQ ID NO: 76283 - DNA, 265 bp, Glycine max
accatctaggatcctatgtatactatttctactttaatagttaaacactcccatccaacaagcatacactattacctatgaaactgttggatagattatttggataaatctatagaattgtatttccttttattctcctcttagtaaaaatggatttaatatattaagctttgtgcgaatggttcaatttggaattatattctaggaatatgccgcaaaaacaaggaaactcagaagcaattgagattgagctgtacccaccgtt

SEQ ID NO: 76284 - DNA, 487 bp, Glycine max
  unsure (1)..(487): unsure at all n locations
atcttagagtcacctgcggcatgaagcttgaataaaaacaagtaataattttacttttttgtaactaaatttagaataatattaataaaattaaatttggttatcatatgttaaaatcgcccccccccccgagagagagatgaactaacatcttttgtctgacccaaacgatgagctctatccatcgcctgtagatccaatggtggattccaatcactctcgtaaaatatgactgtgtcagcagctgtcaagttgatacccaatccaccagctcttgtactcagtaagaacacaaaaatatcactcctgaaacaaagatataaagaaacaagtcatcttcagtagtctcaccaaagtagacacattatagcatgacaacaaagacattacctgtgctggaagtctctaaccatgtctctgcgatcctgaatagtggatgacccatcaagtctaaaatatctatattntctatagttcatatagtcct

SEQ ID NO: 76285 - DNA, 485 bp, Glycine max
  unsure (1)..(485): unsure at all n locations
ctatgatactaagctatcgaatcgatacataatntgtttgaagctttgcagagnntatgtcttcgtatcngtttaatcaattaccaccttatcataattgattatgtcgcaacctacccttcagcgggaaggtgaggcgtgactcaagggtgagtctttctaaaaagaatatgcgcgggagtcgccaccaaccgttattcatggaaatgttagaaaaccacaatggggtctatgaatttaagaatanggttcgggagttgtttacgtgcggggaaggtattagcaccccacgcatctgtcacaagggacagcagcctttaattgagtgcganaaatcatgagttcaatgtttattntattttccctttntatgtgtttttacactttgggtcgacaagagatgacctttgctcctacgtatcctcaagtgcgatgaggaactcagacctatgtagttctttagaagtaagaaagttatgcgtaga

SEQ ID NO: 76286 - DNA, 447 bp, Glycine max
  unsure (1)..(447): unsure at all n locations
agcttgttattaattctgctttgcttccatctntcctactaatacacnccanagttggcatctttgttagtactagaaagaaaagaaaagaaagtaaaggtggggggagagagagagagagagttgtgttatgttctgtctaagactctgaacatacttgtgttgtgttacagcaggtgtgatggcggcttcgttggggtttcctttcacaagtgcacaatggagggagcttgaaagacaagctatgatatacaagtacatgatggcttctgttcctgttccacatgatctcctcacaccctcttctcgctcttcctgcagtatgaccctttgctttctttctcgtgcgtgttaattacctaattttctttagcataattcatgcacaaacacaagacaacaacatgttcccgtgccttttctggcctttgagtccattccctcatc

SEQ ID NO: 76287 - DNA, 414 bp, Glycine max
  unsure (1)..(414): unsure at all n locations
aatttgattgaagccaagaaaaccttatccttttctaccatctaagtttttcaaccagctaagtaaaatggaattgttcaatccacatttttcatgggaacaaactaaatttggcactcagtcaatagtaaagaggatccacagaagtntaatttaattgatgacattngtcatactgtagtccttcgcatgtattattattgntgatcacgcaaacttgttcaagtggttccccaactcctcgactatcatcatggagaatacgccttgagtagtaaacattgtgttaatactttgtttgaataaaataatattgaattagcattaataaaagaaagcttgaatgcctgtgaagcatcaattccacctcaccatctttgatgctgggctcaccagttgcacgatcaactaaca

SEQ ID NO: 76288 - DNA, 394 bp, Glycine max
  unsure (1)..(394): unsure at all n locations
atgagcaattagaattaaacctttattcacattaaaaaaatcagcacaaatgcaaaccttagagtctacgaagattatttccatggaaaaagggcaattgggggttgagttttccctctgtctggatacgtaagacaccatccatattcggatgaccctaaccaatatcttccagcaatccttttttagcagtaatttcagcaacaaagttgtatttgttagccattctttaaaataaaaaacaacaacagagtttacttctaatggaaattatttttcagcanatgcgacataactcattcttagttntgagttatttatagatgagacacagtaagaaagagagtctatagcctttggtgggaagacaaacgaaattgataattcaaatgga

SEQ ID NO: 76289 - DNA, 295 bp, Glycine max
  unsure (1)..(295): unsure at all n locations
aatttgatcaactatctaccttggacaaagggaaggagtggggtaatgttgtcttgacttttttcattcagaaactgtatattttgttgcttcttggtgatcaaaattgcaccactctctatctcttgtgcactgtgtcttgcagtgtcaatcctactggtcatctttttatatgttgtgctggagattcctcgttcacctttgacattcagaagggcactgttactggacattatctcngtggactatatcacattgagaatttctatcacctgcaagtagctaagagctctat

SEQ ID NO: 76290 - DNA, 321 bp, Glycine max
  unsure (1)..(321): unsure at all n locations
atatgccaagctccaagaatgtgcacgtttttttcattctacaagtatgtggatctttaccaaaaaaaaaaaggaaaaagtagtggatcatgatgatattgatcaattggcaaaattgcaacgcacatggatcatatgtttgttaactatgaaaagaaaggtttgtaaccggggcatagggagttctgctntcagaatctactactatgtnttctgatttcagaaacagaaccataaaggctacaaacaaacacagctagntaaccatacagcttgcttcaattcctcatctcatatggacccatcaggcatctgacataa

SEQ ID NO: 76291 - DNA, 314 bp, Glycine max
  unsure (1)..(314): unsure at all n locations
gaattcttacggaaaacgttacgganacgtttcggaagcgcctcggcttatatattctcatggaaacaatttttgccaacacattctaaagagagagaaggcctaggggctgacccttcctttttgcttcctcnccttttatagcaaaataggggaggtggttgccgcccagctcgcccaggcgagctcaactcgcccaggcgagcagggttgcttcctccagaagcaaccgccttctggaggaatattccggagggcccaagtgggcctgggtgctatttgcacccccattnttactaagaacacccccctct

SEQ ID NO: 76292 - DNA, 203 bp, Glycine max
gaatggactcgggaagattccaagttagtgtaccaggtaacagctaccccagtaagactttcttggaaggaatgtattagcaattcctcatcttttgcgtattcccccatcttctgacaatacatctttagatggttcttgggacaagtagtccccttgtacttgtcaaggtcagcaccttgaacttgggaggggtgatgata

SEQ ID NO: 76293 - DNA, 225 bp, Glycine max
  unsure (1)..(225): unsure at all n locations
atgaaaacaaaaggtatgcagtttgtagaacaaaaagtatgttgaacgcatatgcatgatgatgcaatgactcatgcaaaatgtgaggctgaaatatgataacggacaaatgcaggaacgatatgttcattatgatgttatgaagagatgcttatgcgatgcatgatatgaatgcattntacggacacgagagcccggaaaattatctctntttacttgcgcatt

SEQ ID NO: 76294 - DNA, 276 bp, Glycine max
  unsure (1)..(276): unsure at all n locations
atgatagcctcgagttctgcagttacaactaaacaatagcatacatcaataacaaaagagaagttcgctttgccattataatccttgagaactccaccaacaatggccttcttcgtgtctctattgatngaaccattaatattgagtttgaactagccatttgaaggcttgctccaactaatgcttttatgacccaaaactttaccttcattgtgggcaataaatntcatatagttcatactttctgctattgcatcagctttgcccataatctga

SEQ ID NO: 76295 - DNA, 387 bp, Glycine max
  unsure (1)..(387): unsure at all n locations
gcgagattcctcaccgaaaacgttaccgaaacgtttcggaagcgcctcggcttatattttcttcatggaaacaatttttccaagccaattcgaaagagagagaagtgcctaaggggctgaaccccttccttcttgcttcctcccctatttatagcaaaatangggaggtggttgccgcccagctcgcccaggcgagctcaactcgcccaggcgagcagggttgcttcctccagaagcaaccgccttctggaggaatattccggagggcccaagtgggcctgggtgctatttgcaccncccattatactaagtacacccccctctgctgtttttggtgattcttttttcgtaagtacggaaacttacaatttcgaacgatacttgttt

SEQ ID NO: 76296 - DNA, 232 bp, Glycine max
  unsure (1)..(232): unsure at all n locations
gaaatgggactcgggaaagattcccaagttagtgtaccangtaacagctaccccagtaagactttcttggaaggaatgtattagcaattcctcatcttttgcgtattcccccatcttctgacaatacatctttagatggttcttgagacaagtagtccccttgtacttgtcaaggtccagcaccttgaacttgggaggggtgatgatattggggtctanggaacaactcttt

SEQ ID NO: 76297 - DNA, 149 bp, Glycine max
actctatctctcttttggcacgtactaacttatgactatcttatattaagaagatagagattatgtagctacgatacttttcttaatagactccttacattatgacacaacattcttcatatgggagaaaagtgcatgctctatttagc

SEQ ID NO: 76298 - DNA, 374 bp, Glycine max
  unsure (1)..(374): unsure at all n locations
atcatttccacaagtctatatanatatagaacttaaaataacttccagagtgctaaaaaatataaatgaaggcactatgaaatgcttcatcctcaagttaaggttgcattctacattttgcagacaaccccataaggtgtatggcatatctatgaaatgtcatacaccttcttttacaagttaaggtcgtgttgaactaccattttaagggctgcaatcccttcattggtgttttcaatgctatgatcaattgatccttattaanaattacaaaaaatctcaacgaattattaattcatttattgacctcaagccacactggctcctaatanggtatgacacaattgattttgaaagcttggtttttctgtctg

SEQ ID NO: 76299 - DNA, 375 bp, Glycine max
  unsure (1)..(375): unsure at all n locations
ctaactattactaacgaaagctagtaaactctctagggatatctgatgttaattgggatgaagtgagcagattntgtccacctatctacaataacccacatggaatctaaacctttgtgggtcctaggtaaccccaccatgaaatccatggagatgctatcccacttccactcaggtatctctaaaggttgcaacttcccttaaaggcttctggtgttctatcttagttttctgaaacactaggcatgcaaggaaaaaatcatcaacttctctcttcatacccggccaccaaaacatctgcctaaagtcctgggacatcttagtcactcccgtgtggatacttagactacttctatggagctcacaatcactcac

SEQ ID NO: 76300 - DNA, 410 bp, Glycine max
  unsure (1)..(410): unsure at all n locations
tttacttttatctcctatcatcaaataataagttaggtgacgatgatgttggcagtatgtcatacaaaagtctactaaaataatcataaataataacttnttttataattgtgactttaaatcttcatctattccaaacatctaaagatgttatattagttgatgagagatnttaaaatacaatttaccacaagaattgcatgtaactactttggctccatgatgagatagcaagtcatgaatgggatgctagaaactagtatgaatgttattaattgatagcataacctaaccactgtaaatgaataaaatcaaagacactatttctatagagataaacaaaacttttttcattagtaaaaattgaagacaaatactacaatgtttacaataactcacataataccttc

SEQ ID NO: 76301 - DNA, 386 bp, Glycine max
  unsure (1)..(386): unsure at all n locations
aatgattttaagatttacaattcttaaattaaatcgggctatatgataggtatttataaaaaattaactaatcatgttattataaaacttanaatcatactgtttnttaaatagtattattattattataaatatactattcattgtaaatttacatcacattaacactttatttatcattttatattattttcatttattgaaagaatataatacaagaattgtaatttatttaattaatataatttctgttaattactctgtcttaaaataaatgagttatgtaagtttcaactttcaagggatctttagttaatcaaagaaactatctaagtataacaaatagtaacctggatcttaagagtattattaagtaacttaatata

SEQ ID NO: 76302 - DNA, 471 bp, Glycine max
  unsure (1)..(471): unsure at all n locations
agctattatgtgagcctagcctgagccttacatatagattagtttattcaactcaagccgagctcagacctagttaagcctgacttggcttatcttcacccctacttattattagaggtgggtaagcaagccggcccgccccgcataatgtccgtccacataagccctcattgttagcggatcggttcaatctgccccgcttcttacacgaaccaaataaaatggtccgttcccgttccgcggaccccgcgggtaaacgggtcagtccgtgggcctagttttaanagaattttaattatcataaagatataataccatccacattagttgcaatgacaaatgtttataacatctccataattaggcaattacatcaataatataaataatgtcttaacaaaagacaatcgcagcaataaatctaaaatttgaaatgtaaacatttcaccaacaaatgatttttatttgaag

SEQ ID NO: 76303 - DNA, 412 bp, Glycine max
ctcaagctctgatggtgtcgagaagaaatcacatgtgtgtcatcatcaaataggttagtatgtgaatgcatgcatacacgatcttgatgatgtctaagaagaatctaacaaagctacttcaaaggataagcatttacttcaagaataattcaagattgccttcaaacaaagtgctttcaagacatgcaaggctctggtaatcgattaccaggaagtgtaatcgattaccacaagacacggttgagaaatagctgttgaaaaacgtttgaaatttgaattttcaacatgtaatcgattaccatatgtctgtaatcgattaccagcaacggaactttggaaattcaaattcaaaagtcataacccttcacattataattgtgtaatcgattacacatacattgtaatcgattac

SEQ ID NO: 76304 - DNA, 442 bp, Glycine max
  unsure (1)..(442): unsure at all n locations
agcttgtgcanatcaaatcactcctacnatttattctttatcttgcatngcatgtnggtctcgtcctttgtcacgggaagccggaaggtccatatcaccttcttaattgtacacatggggcactacgcccccaaatgcgcaagtaagaagagataattttccgggctctcgtgtccgtaaaatgcattcatatcatgcatcgcataagcatctcttcataacatcataatggacatatcctgcatttgtccgttatcatattccagcctcacattntgcatgagtcatggcatcatcatgcatatgcgttcaacaaactttntgatctgcaaaatcgcataccatttggtttcatggttgctcatccttgcgttntcctctacaaaacaaaaacaaaaaagggggaagcgtgaaacttcacactacattcttagtttcatgt

SEQ ID NO: 76305 - DNA, 448 bp, Glycine max
  unsure (1)..(448): unsure at all n locations
attcctanagaagctagagnctagctacacacacctctcttatagctaagctcacctcctgagatgagaagctagagcttagctacacaccccctataatagctaagctcacccccatgacaaaatacatgaaaatacaaaaaagtccctactacaaagactactcaaaatgcctcgaaatacaaggctaaaaccctatactactagaatggccgaaatacaaggcctaaacaaaggtaaaatctattctaatatttacaaagataagcaggctcatacttagcccatgggctcgaaatctaccttaaggctcatgagaaccctagggccttcccttggatctctggcccaatctacttggagtcttctatccaatgcccttgcgggatatgattgtatcattcctccctccttctcattctctctatnntggtcaggctnttttttg

SEQ ID NO: 76306 - DNA, 405 bp, Glycine max
  unsure (1)..(405): unsure at all n locations
tttcttggagggaccatgggatatggcactttcgtacccttatttgaagctntttctttcctcttttctctttctttttcactcctactctttgcttcatctttattntttcaaatatttctttttctttttttttctgtgtctnttcctacctctatttctctttcttggtcttttaattctttctcttcaaccattatttgtttttccctcctctaactcattgcatctgttaccttattcttctttntaacagtagtgtccttcaaagcaacttgctccttcaaagcaacaacatcctcgtcctcagccgccacaagctatctgcttcttgttacaacaactntacactcttctttgcgattcttctcaatatttggcccagagcttgtggatacttctctg

SEQ ID NO: 76307 - DNA, 343 bp, Glycine max
  unsure (1)..(343): unsure at all n locations
gattattttattcaagatatatcgatgattggattattacttttcaagagatttggatattctattattattttgctttcttttttggttaaccgaggttacagcgtgaacgatcggttagattttgttttaacagtgattaaacgatattacaatactaatgatcggttgaaattcattgtatcatttattatgcgacataatggctgtaatgatcgggtaaagctcgctcaaaacggataaaaagaaaaccgaacatgaacgacatgaagatgatagctcanaaaaacaagagacacttcccttcttacacttctctctaaccactaatgggtggacttct

SEQ ID NO: 76308 - DNA, 476 bp, Glycine max
  unsure (1)..(476): unsure at all n locations
agcttgtanatatccatntacaagcttatattctcttggatgtaccctcccttgctctctctgaacctaatggatgtaccctccactagaactgatccacaagagatgtaccctctcttgttctcagtctaacccaagtagatgtaccctctacttgtaccacaaaggatgtaccctccaatgtgttaagacaaagatctcacgcggttaaacctttgatactgtgtgaatggggatacaaaagaattctcaggcggttagtcctttgaacactcttgtattagggaaagggaagaatcaaaagaattctcagactatgtcgttttgaattctttgacaagggagaagggagacacacaagaaattatgcggttattcctttgttcttttggaaaagggagaagagagacacaaaaagaattcacgcagttagtccttggagaattctttttggcatagggagaagagaatgaaaa

SEQ ID NO: 76309 - DNA, 392 bp, Glycine max
  unsure (1)..(392): unsure at all n locations
atgtaagacaacatcggttatcaatacaaaaccgatgttaactaaatgatgtgaacattaacatcaattttctacaacaacccgatgttaacctatcttatgttaacatcattgttttcagacgaccgatgttaacatactgactttaacatcggtaattcaaaaaccgatgttaccagtttcattttaacatcatgttttatacaactgatgttaccaatttaatgttaacattagtttttaaataaccgatgttaacgtaagctaattaacatcgcttttctaagaacccgatcttaaaaactttacattaattacaattatgccaccgcgttaacgttaacatcggttntaaggaaaaccgatgtaaacgtacgatgtaaatgtgtttt

SEQ ID NO: 76310 - DNA, 126 bp, Glycine max
  unsure (1)..(126): unsure at all n locations
cagctaccccaataagacttcttggaggaatgatcacaattcttatctttacgtatgcccncacttccacaatacatcttagatggtcttgggcaacagtcccttgacttgcaagtcacaccttga

SEQ ID NO: 76311 - DNA, 440 bp, Glycine max
  unsure (1)..(440): unsure at all n locations
caaaaatggggggttcgtggtcacgagaaggttcgagaacgcagagcgcaatttctatatacnnatgcgagaaatannngaatgggaaaaggaccgttaattttaaaagatggtctttaatgaaccgtatttgaacccatatatttaaatacggtctttagtaaaccacctttaaacattcgattnttaaaacgggtttctaaaaccgtgtttgtatattttttattatttacgaaatttccatgtgttcaaatttaagacgaatcttaagaaccatagttgatttgatgttntaaaatatagttntttttagcagtgatccaacgtaatgccctcttgccgtgaaagaattcanaatttcacatatggattaattgcttttagccagcttttacaagagaataatttgtgtgaattatgtttcccataataatctatat

SEQ ID NO: 76312 - DNA, 211 bp, Glycine max
  unsure (1)..(211): unsure at all n locations
tgaaatttgaatcttccatgaaatagccacaaaacacaacaacgttttctctaacattccacactactacttggctagggcaccaacaccgctaacactctgttcattcattcttctncgtcagaagcagagagtaagaatgctctcangggatatacctncanatcagaccatttacatcaaanatatcaatgagaaggtcaagaaagat

SEQ ID NO: 76313 - DNA, 405 bp, Glycine max
  unsure (1)..(405): unsure at all n locations
ttattccctaaaattgatcattttcatattgtattaaaatctgagntctggttgaatttattactcgtatcctcaggttgtaggggaaaaatctatcctatatgtatccaagcacggaatgaaagaaggcagagaaatcattactcagaaattcccttttcagtctctttgctattttggagttcctcttacttgaaacaagtcctcattcctttactcctctctatcactcggccagaanaacaganaaataataaaataaagaacagagagaaaagagatgaagctgaattaatatgattgcagaagcataagggaagataaagaacagaanagtacanatatgtgtggcaataagaatagaaagattagaaagactataacaaaaggaatgaggactcttat

SEQ ID NO: 76314 - DNA, 355 bp, Glycine max
  unsure (1)..(355): unsure at all n locations
atttcccattcaagagtgggagaaagcaaaaagaaaagaaagaaaattccccatcaaagaatgggagaaagaaaaagagaaggagaagaaggaanggaagcttctgatcaatgatcgaaagaaaacagaagaaatgtgcagaggggatctctggaccagacaatatctaaacaaatacagaattgtcaccaaatgaacaaaaganagaaaaggaaaccataacctaaaagtggtcttcttcctttgattaccaaccaaaatcctgtgcgtcggtgacttgttcgcctcgcgtcanacaanaacagaaaaagaaaanagccaacatataaaatcatcaaaagccaataacacacaa

SEQ ID NO: 76315 - DNA, 294 bp, Glycine max
  unsure (1)..(294): unsure at all n locations
atatatatattagcacaaaaatgggaacttaaaacattatcactggcatttacttcattatgtgagcccaattgtatttttgtcaggtggtacatgggggggtggacaaaagtagtgccaccattgcaccccccaaaaaggagatggaggatatcacgttgattgaaacttgtatgagaaagattgtgcatgcagatttttctgtgtaaaatgatatgagcattanagggataaataatgatagtgttatggcccttatttggtgctttagaagaatattcaaactacactaat

SEQ ID NO: 76316 - DNA, 375 bp, Glycine max
  unsure (1)..(375): unsure at all n locations
ggaaattaccgaagaaccagccatttaattttatggccctaccttaaggtaaagaccactatagtctttcttcatgtgtccttggacagttgccttccaagaaaattgcatttatctcaacatgtacatcagcatttattgaataatcaatgtctctgtgtagcaaaagtttccctgtanggaaccctgaaaatgaatggcatccaagaagaccctgtaatgcaatgaanactacataacgtggattgcttacatattacatgaattgtgtcagtaacaacatgcaagctacatgacagagtnaggtatttataaccaaacagaaggagagaacaagagattggtatgaaccatcctaacaacacacaaactgta

SEQ ID NO: 76317 - DNA, 284 bp, Glycine max
  unsure (1)..(284): unsure at all n locations
ttttggttatttaaaaaaccttaatattttgaataacttctaatgggataatatgattcataattcattaggttactcatagtagaactgagataaattagtaaaagtaaatataatttaantctatatatatatataaataataattatatacaaataatataagaaaatgaataaatagatctaaattgtataaaggatatattacattctttgagataaaatcataataacaaatggtagaaatatattggtattgggaatatatattattattattaatg

SEQ ID NO: 76318 - DNA, 323 bp, Glycine max
cgagctgcagctgcgctgcctcgacgacccgcggttcttttttcaattatcggggtgagcacggtcccttcctattgcattaaggggtgccgggattatcttaagttttacagtttacatggctccggaaaaccattgatcttaagcgatgatggctcattgttacacgcctctattatcatattctgatcagtgttaggtgcttgtcttttatatgggaatcctaaaacatcacgggattgcccaaacatgattgcaagatgacgacctggatcacccagtttaatacggtgagtaactttattttaaaacaagttatttcc

SEQ ID NO: 76319 - DNA, 178 bp, Glycine max
  unsure (1)..(178): unsure at all n locations
gatacngatacagatgttatatcatgaggagactgaaaattgaatggtggcactttgccatacaaattgaactgaactaatatttgagttgaagcactctacttgttatttgattattgaataagacttatctatacatatgacataatttcgtatagtctgggatattgaagaatga

SEQ ID NO: 76320 - DNA, 229 bp, Glycine max
attaccaagttacaagccaactcttggatataccattattaactctagtagctgataaattatatatatcttcaacatggatgttggtgagtactacttcaggcgccttgtggatattttcaatcaagtgcaagcgaaccacgcgttgaatgagacatcatatataatgatgccattaattggcctgtgaggtatcgcactctcttgtgccatattgagggttaatatt

SEQ ID NO: 76321 - DNA, 304 bp, Glycine max
  unsure (1)..(304): unsure at all n locations
agctgatgacaatgttatgaaactggctgaagatcaaaaggtgtgttgcccattttttgcttttgtagtaaccaacaagtgtctcatcagcaccagaatgaacataggtaaagattaatgctatttatattttatacagacgcaaaaagaacaactccatgctaaaatcattcagcttcaaaaacaacttgatatgaaacaagagctggagttggagattcagcaattaaaaggttcattaagtgtgctgaagcacatggtngatgaccaagatgcagaaattctgaatatggtaggatcacta

SEQ ID NO: 76322 - DNA, 402 bp, Glycine max
  unsure (1)..(402): unsure at all n locations
ttgaagagcctgggtagtcaaaagagaagttcaagtccacaaccatcaaagtctgaagagagtatgatgaactaagggacgtcaatatggccaccgctgaagccttggaacgagaaaccaagaaggcccgaaaggaagaacacaaccaaaacaagttntgaggggctntatagggaagcaatagtgagctcaagctccaaagagatgaaaggaatcatcacgggtcaaaggcatgatcttgaaggacgagctaaaggcttgccttatgtcgaaaagaaatttgtcccaacagttaagcgagaatgaagggaatatgtgggccatcattgatgagtacaaagagaagctaaatctagcggcgactcacgagcaaaggctagaggatgagtatgccaagatatc

SEQ ID NO: 76323 - DNA, 188 bp, Glycine max
  unsure (1)..(188): unsure at all n locations
ttttcaagatccgcgtcgtcttcggttcttcagtcttcacggtaagacctcaaccaagctttcattcatttatgtacccgagtggccacatnttgtttcatgtatnttttattctcgntttcatatactttttatacccccttttgacgtgcttaagccatttatntaagtcatttctcgcttaatct

SEQ ID NO: 76324 - DNA, 484 bp, Glycine max
  unsure (1)..(484): unsure at all n locations
agcttatgcatagaaatatattnctctaancaattcgtttcttgtgttctatgaaggagacntaaatactaaaccctcgatccctcgtcaggctgaatatccaagcttcgtccgcanatcccncatgtaagactacacccgatntagacagccctcttaggtttagactaactcanactgagtttcattcgcagatccctcatgtaagactagactcagctcangtagcttactaaagtntagcctaatntagcctaagcttcgtccgcagatccgtcatgtaagactaggcctaaactaaatagcattattgaacaacataattaanaccaaaacttaacccgcagattcctcatgtaaggctaagtttcaatcttgcttcaatcaagttctaaagcaacagtacattttccaatgctaaagtcacctaactgtgcacacaaatgggtgatcagaccaaaagcatacaaacattaagcattgg

SEQ ID NO: 76325 - DNA, 437 bp, Glycine max
ctcagcttcgggatcattgcaacttgagggataacattgttttttgtatgcaatctaccccgctacaagctccatggagctacttcaataggaatagaggtacttaaagtgaatccccttattgttttgtggtctcttgattgttggtctaaatagagagtatgccctcttttccttgaatgtattttgagatctgaaatatataatttcaaatttcttaaccatcaaaatcattcactatatctcttcatcaaatatatgaacatacagatcttcttatgatgcagaaagtaacatcagtaattcaatatatgtgtgtgtgtgtgtgtgtaaaaatcataccaagtattttaatgtaccaagagaaaatcctttggtgtgttttacgtgatctacaactcgtccaagagtcgccacctgccagaatgtgaattcca

SEQ ID NO: 76326 - DNA, 502 bp, Glycine max
  unsure (1)..(502): unsure at all n locations
atccttaagtcacctgcggcatgcaagcttctacttatgtggcagggcgggcttccttcacttctttgttccaacgtgaactntgaccattggtcttccttcccgcgatgcttcttttcatgtccgcctgagtgggcttatagcctaaaccatacttcccacgatttccttgggtatttatcaggctagttatgccgccgttgttttttcctaaacccatcccgggttcataaccgttccccaacataactcgggccatcattaccgctgcatcggacagacaaggctgcccaaagagggagtccacggaggaaatgctgaccacctcaaaagactggaaagcagtttctgacgattcttctgcggcttccacataaggcatggaggatgggcagcttaccaagatatcttcctcgcctgacacgatgaccaagtgcccctccacttacgaatttagcttttggtggagtgtagaaggcacaactcccactgagtggatcca

SEQ ID NO: 76327 - DNA, 359 bp, Glycine max
  unsure (1)..(359): unsure at all n locations
ggagatatgtcgcggnggtcaggagaccttggggacgtcaggtggggtgctattgcccaaaaccaagcttgaccaatcccgacccaacccgggcatagtcggtcagtgagaacatgtgacgtacctaagcaggcgagctcctggcagtcaacagataanaggaaaacaagaccacagagccaggaggcttgtggtggctggccagcttgtgaatttgtgtaatatgtggattgtggcctctggtaatcgattaccaagggtgggtaatcgattacaaggcttaatattgaagacagggggctaagatggtctctggtaatcgattaccaaggggtgtaatcngataccaggcttgaaaa

SEQ ID NO: 76328 - DNA, 419 bp, Glycine max
  unsure (1)..(419): unsure at all n locations
tgctggcttagcgagcatncgctaagcacaacactcctgggctaagtgcaaggaagaatccagaagaagatgagctgtacaggttcgctaagtgcaccgcttcatctctctaagcgtaccgcttcagttcatccgctaagcgagaaaggtgcactaagccaaaaatcactaacgtgcgctaagcagtccatatgtccgctaagcgcacgagcacgaacaaggccatctattgaagcctaaaatcagattntgtgaagggagtttggactgggattcagaggtttgcatgtctagggtttctagagagagaaaggtccaagttccagagagttttgagagatnttgctgtgtgaagatctgcggagaccaaagctcgaagcaggagccggtttgagagcttgagatngagttataagtga

SEQ ID NO: 76329 - DNA, 429 bp, Glycine max
  unsure (1)..(429): unsure at all n locations
gtgctcgcgactggtccctctctttccttcgcagctngagttcactatagctaccccatacagttccgcgaaatctattccggccatactcttccttgcgagccctcttggtctcttgttcaagggctcttgcggtaattgcattctcttcccgtaacccggcacactccttccgaatgtgtgtagcggccaacttggacttctccttggcaagtttcgcctttcctaactcgcttttgagagcctagacttcttcgtcctcttccggtgcctcaaaactctctttgctgacgactnttaacttggcgagccaatctaaacctcgtatatgaactttcagccattcatggtagccaccaatgatgccattacgaatgcctctaagttcttgatctttccttaacggngtttcccatgccttatggattc

SEQ ID NO: 76330 - DNA, 478 bp, Glycine max
  unsure (1)..(478): unsure at all n locations
agcttctggtgggacatctnngactgctttcttatctgatattcaccacagnatctgccttcttctattttcagaatgggaatgcctctaacagcacctttgtcaataattttcttcatgcctcttaagtgcagatgtccaaatctttgatgccatattttgacttcatcttctttggagaatagacatgtggaggagtaactggtttcttgaggtgtccataggtaacagntgtcctttgatctgctgcccttcattaggacttcactcttctcatttgtcaccaagcattctgactttgtgaagtttacattgaatccttcatcacacaactgactgatgctgatcaagtttgcagtcagtcccttcaccagcagtactttgttcagactaggaagtccatcatggactagctntcccattccagtgatctttcctttagagccatctncaaatgtcacatagctagaggagcaag

SEQ ID NO: 76331 - DNA, 437 bp, Glycine max
  unsure (1)..(437): unsure at all n locations
tctcccgcaattntctataaatagggggagaagtgaagtgaanaaggtgttcatccccttaggcacttatctctctttcgaatttgcttggaaaaattgtttctgtgaagaaaatccaagccgaggcgcttctgaaacgttttcgtaacgtttccgtgaggaatttcgcgaaggtttcgaccgttcttcgacgttcttcattcgttcttcatcgttcttcgatcttcaacgggtaaatacctcgaaccaagcttttcgattcattctatgtacccgtggtggtccacattgtgtttcgtgtatttttattctcgtttcatttactttttatacccccctttgacgtgcttaagccattttatttaagtcatttctcgcttaacctaaaaataaaataaatttccaccgatcgtttgaattgtattatccgttaactt

SEQ ID NO: 76332 - DNA, 369 bp, Glycine max
  unsure (1)..(369): unsure at all n locations
caatcataagcttccagtaatcaagggtcttgtcttcctgcatacataaatcataccacaagtntacaacgtcttcataaccataccacttacagattaatttggcttgtcagtctatattccatctaaatgttcacaatcacatcaagcctttaagttaatgaacaagaaactatcacccatcccctgcccatcccaacggacttaccaacattattttttaacctgcatatttaccaagaaaatttaaaaaaaaatagaagaaatttacctgcacaataagcatgacctctgcaacaccactaaacgtttcagcatcaacaacattcccatntgttctcccttctcgaaccttacaagagaaatatg

SEQ ID NO: 76333 - DNA, 392 bp, Glycine max
  unsure (1)..(392): unsure at all n locations
tctctcttccttggaacaatttccaatactggcttcgtagctacagtgtgtgagaacacgatccattaccaaagcacttggataaagaaataagagagccatcatatgacaacaatgcataaattatatatggaacactaaatacctgtctggtaatggatctttccatccaatgtcttgattggaagagcatctacacgatcaacctgcaaaccagtttcttctttttctttcttgagagcattcttttgcatgcgtttctcataaagtttctccaatgcatcgtctttggcatcagcaacccgtgtaacatgcctaaggatgtgtgagaaagtcatttccaaagtaacccatcatatanaactcataacaacaatgtacattcacataag

SEQ ID NO: 76334 - DNA, 305 bp, Glycine max
  unsure (1)..(305): unsure at all n locations
taacaccttcttaatgggcctgagacctccaactaatcctatggctgattgctcaggtggaaacaaatacatgtacaaaacatcagttggagccaaagagatcattggaatatggacctccaattgactattganggttcatcatgaaagaactccctactcctgcacaaaagagaggagtgccttgagtagattctcatgattcaatcttggctcaaaacaatttgctcactcaacaactcgatgcactcaccaagaaaattcaaaaattactcaactccaaagtgggcaagctcctcaatctg

SEQ ID NO: 76335 - DNA, 333 bp, Glycine max
  unsure (1)..(333): unsure at all n locations
tttgccatcatctagctaatgcctatagtgcagacgaccagcagaactatactttgccagccgaaaatctgtaagcaaaattgatacaatatgttcacattttttgttgtaggatatcgaattatagactataccacccaccaattattgaccccaaatgtttntaattcttgctgaattgcatatatatcttaaaattcttttctattttctattatatattgggattatcaagtaggactactattttgttccccactccgtgtcttgatggttacgctgaaatatggtaaacaatcgctagtctaatcgagttgcttgcgagatcgacta

SEQ ID NO: 76336 - DNA, 432 bp, Glycine max
  unsure (1)..(432): unsure at all n locations
aatatggaaaccttgtttccccaataccatttatggtgatctcaaatgttatcccaaatatagttcattgtctaaacaaaaacactcatcttttctttaatacacacccctcccaaattacaatcgaaatatatgaaatgtgttgcttcaatgaggcatcaatttgaaaaccatcaggcctcanattgataaagcatgcctagttctntattttatgtatactttattataatgaaaatttcatgcaaaaagcaagctaaagtaattctctcttgctntcacaattgatcaccacaatgcaacaatngtaatgtcatgaacttgtcatcanaatgtcaatattatgggacatcatttatactggttntctaattaacatattgcaccatgagtagaattaggaaatcanaaccaaatntgattattacaatg

SEQ ID NO: 76337 - DNA, 353 bp, Glycine max
  unsure (1)..(353): unsure at all n locations
ttctatctaaacctggtaagggaatgggtggtatcactgctaaatgtcttgctgactttcttggttaatgtaaaaaataaagggcttcaaagtccatacatagtaactagtgaacctaattaaggtggtgtacatcatttcagatgagtatcccagagatacaaatttatgggaaaatgactactcatttctaagaatttacgttaataagtttaatgtttgaagagttgacattgttcaagatgagtattatatatgggaataccgactcangacaaaatgacaactcacttataagcatttangccattangttcaatgcttgangngctgtacatggtccangatgagta

SEQ ID NO: 76338 - DNA, 376 bp, Glycine max
  unsure (1)..(376): unsure at all n locations
aatgtggtagtttattacactgagtttgatgagtntaaggaggaactcgagagaagacattgggatgaagagttgactgattttgctaacggtagcatagatgttgctattgtgaatgaatttcacgtgaacctctatgaccccgaggataaatcacctaagcaggtgagggtgagaggtcatttantgaaaattngatgaagatactctgaatacctttttgaagaccccagtgattctggaagagggggagaatctctgtgcttattacaggtttgcactcctgaggcctgatcctcagcagttagttgctaagctttgtattctacggagtggattcgagctatatgctgatggtcaccccttaaagatatta

SEQ ID NO: 76339 - DNA, 328 bp, Glycine max
  unsure (1)..(328): unsure at all n locations
taatatgggccaatgtgtagatcgatcctattttccttgaataagtggatcctacantgtttttgtctgatatgattagaactntccatatttgtcattcataactcaatatgaccattagacttataaaaggaaatataagatttattcgcagatatgctccttntaaacaaaatcatataaactgataaatcaaataaaatgcatattcaaaatgttgtttggatggactggacgagtacttcctgcttctagtagacgggttatccactaacggataagtcttacttggtggtgcttccaatcatcanacctcttacatgtaaca

SEQ ID NO: 76340 - DNA, 197 bp, Glycine max
aaatcttaaactcaaaggtcgggttaccctgaaattccatccccttatggcactgcttgtaatcagatctacgtaggggcgcttataatttggaatgggaccggctccttggataataatctctgacgtacgagtcatttggcaaaacacatctgaatggtttcgagtactaattttgcatatctttatgaacattc

SEQ ID NO: 76341 - DNA, 425 bp, Glycine max
atattaactcaaaatagaagtctaataaaacaatcacaatccacacaatttcatcatcattcattaaacaatcaaactatatattaattccatatgcaacttcaccatgaaatgtcatgcaaactcgacttccacgagaatttcacctttggacgataaacatagatatttcctttaaccgtttctcactcctcgaccattcaaggatgacctacaatggatcatgtggaggaagtgtaattgtattgaagatagacaagtgtgtgtattagtttacctctgtaagatttgcaagatcgatcttacatctatagagattcacccactcatatattctataggaccatttccattagtcaccacaaaacccctcagcactatgttgagacttcacttagcactctcaatttatgtgtctatacata

SEQ ID NO: 76342 - DNA, 329 bp, Glycine max
  unsure (1)..(329): unsure at all n locations
caatatcatcaactataggcaacaacaacatggaaaaccatagatttaaagcaagtatgattcaacaaaagcccgaagcaacaaaaagcgtatctgacaacaaaagctacatgttaatgctcaggatagtgtccatgcaagtgtcaatctagcttcatcccatactgaagatcattataaccaaccaaagacaccaccgcatagtgtccatgcaactgtcaatcgggctttacatgatgctaaagatcattggaagctatcaaagaataccattttatatctttatattcaactcatattagntaattagattgatacaatatccatat

SEQ ID NO: 76343 - DNA, 464 bp, Glycine max
  unsure (1)..(464): unsure at all n locations
acctgcggcattgcagcttacatatctagtgtttgctggcacaagatcgtanttatctgagagnagaaaattgattatcctgctttgatgaatagaaaagcctgggcaaatggagagaatgagaaggagggaggaacccatgatgtgactggtgttcctacatggccaaatattccaccagctcaacaatatcaatactcagccaatatcagccatttttattacccaccaccctatcaaccaagaacactcaatcatccacaaaggccaaaactaaatcagccacaaagcctttctgacatacatccaataccaaacaccatccttaacacataccgaaacaccaacagaggaaggagatttccagaaaagaagcctgtagaattcaccccaatttcaatgtcatatgttgacgtactcccctatctgctcgataatgcaatgacagncataaccctaacaaa

SEQ ID NO: 76344 - DNA, 361 bp, Glycine max
gataacccgctgtgatagataagaagcctgtggccaatggagagaataaaaagaagggaggaacccatgttgtgaccgtcatttctacatggccaaattcccaccagctcaactatgtttatactcagccaatattagcccctctcattaaccaccactttatcattcaagaacacccaatcattcacaaaggtcacccctaaatcagccacaaagtccgcctgccgcacaaccgatactagacaccacccttaacatgaaccataacaccaaccagggaaggaattttcaaacaaagaagcttgtagaatgcaccccaattccggtggcgtatgctaacgtacttctatatctactcaat

SEQ ID NO: 76345 - DNA, 456 bp, Glycine max
  unsure (1)..(456): unsure at all n locations
agcttatanaanacaacggtgagtgctccttgatttatttatagatggnngattttctgcttcatgatcacctgtaaacaagaaagtttgctttattattctacgtaactcattttatctaaacatttgcctttcttgttntgatgattgtcatagactcatagtttntgcctttgatataattttctgcaatcatatccattntaacaatttgagttnttcaataatggatatgcagaatattctcaaaataagttggtagacacgatacatntcatggaaattcttagttgtaaagatagtgtggagagagacaccttcttccacaagcttccaaatttagctgagcaacagccgtgccagatagtgtagaagatttacatatttctgtggaatttctaattataaactatagatagatcttccttcgtcatcccaatcttttatgattcttat

SEQ ID NO: 76346 - DNA, 311 bp, Glycine max
  unsure (1)..(311): unsure at all n locations
tctgctaacaaagcaagtagccataactcgcctgtgctttttcttccatgctatatgagcanagtcatgatcctgtcaagtttgatgagtttgaaaaatgaggctgttggatcgaatggcctcagaataattaagaaaggggggtgaattaattattcctaaaccattactaattaaaaatttctcttctaaggattttactaaattggtaagagaatgaggggtagaagagaaacttaacagaaagtaaaagcggaaatttaatgcacagcggaaagtataagagtanggaagaaggaaacaaacacaca

SEQ ID NO: 76347 - DNA, 478 bp, Glycine max
  unsure (1)..(478): unsure at all n locations
agctagaagcaacatgcttgcccaggcgagctggtgctttctctttaagattcctgatggacctagggctgaagaacacccnctaaattgatcagttcacccccattnntgagttttttttggcttatttccttccgaaacatcgcgaaaccttacggatcgcacgagaattggctntaagcagctcaatgtgatcggaaaaaatccggatgtcgacaaacaattgtccctggacgaaattagggtatgatagttgccccttttcacttatcttttattggagataaaagggaagtaaagataagacactaatttcgttcgagttgaattccctcccgaccgacgatctgcttgaacagcgaaacttgtcaaaagaaagagcataaaagacatcatgtgcatcagcaaaagccttggtgccttgaaggtgacaganatggataaccgtgatggtctccgcatgctatcggactcactt

SEQ ID NO: 76348 - DNA, 442 bp, Glycine max
  unsure (1)..(442): unsure at all n locations
nttctcaagtganatatctacttgatcttganaagttntctcaagttttatatgatctttggatacattctagaaatctttttgtaggattntgtaagcttttgagggaatagatgagttagatagaagcccattaaaagctcttctaagagattcagagtcgtcaaaatttacctcatcttcgtggtctgattcagactcctcaaaagttgtatctgccattaggcttatattggctttttcatcatcttcatcaagagaggtgccgtctaggtcctcccaggtactcataagacccttcttttgtctagtcttgaagaatttcttcttatcttgaatattctcctgatctagacatttagcttgaaatgtctaggctttttgcactcacagaanattatnggagctttgctttatccttcttttctttgggcatttttct

SEQ ID NO: 76349 - DNA, 335 bp, Glycine max
  unsure (1)..(335): unsure at all n locations
accgccacgaaaaaaccccaaatcgctgacatgaagaaaacaatcaacaaggaaaaaaccaaccaataaagaatcccaaaagtaagactcagaatgaatcaatccctactgttaaaatcatggtagcggagatagaaacgagagaaaagagacactcgatactaatctgcgtaatgctcacatgaacaaaacaattcttacgtgagtacatcgagtcttatatagntaaacctggaactaattgggaaccaactaaactaatctgcattaacaaactaaatcgaaccaactaaactaaaactaatttgtactaactcaaataataattttatctc

SEQ ID NO: 76350 - DNA, 490 bp, Glycine max
  unsure (1)..(490): unsure at all n locations
ctctaagtcacctgcggcatgcaagcttctgcctggatccctgtaggaatgcagatagggtatgaagtanaagttaaggtggaagaagcacatccacgtgatgatattctatttctgaaggaggttgtaaaagagtgatgagctaagataggattntgaataggctntatcattgttcaacgatttattcaatagggtaaacatctttccgcatcccaaatccactcaatttggctggtaggatgcagcctccttcctggtctattgcatggaagagagatcacactntcactggcagaatttcatcatttgaaacattgttaagtggttcaaatcaaatcttgaagtgtcatttctggcagagaagttcatggatgtaatagccaacaagtgtacagtccttcaaacattntctccaaccatagtcacatgaggtctatcggttttgttcctcacttgagccaagtaatttgcccattcacctgatttg

SEQ ID NO: 76351 - DNA, 480 bp, Glycine max
  unsure (1)..(480): unsure at all n locations
actcagctttagccaatggacttaccttgaataattcctttgatattccttttgagccttgnttccctttccttgttttgaagctcactacaagccttaaatgaaaaaccatgatatcaccatatccttaagggaatttggagctttggaattgttttgggaataagtgtggggggtttttgtttcattggataacttngtttgttggctatgcttcatgatgtattttgggccatacttgatgtacattgtatattggttaaatgttggacatgctgaatgaaatgttgtttctcaaaggctatagagtaaaaaaaaaaaatcgaaaaaaaaatcgaaaaaaaagaagaaaaagaaaagcaataaagttgagtgaataagatcttaaatggcacaagaatgatgaaactcttggntctactctttttatgttaattttatctttacttctttttattttcatnattttttaatatgcaa

SEQ ID NO: 76352 - DNA, 342 bp, Glycine max
  unsure (1)..(342): unsure at all n locations
cacttgttcacaagttacaaagagagtggccaatcaaaagataatggtgtttcattcatcaaggacatcaaccctataaatngattaccatgaaatgcttanatcaattagttctcacaagctgcagttttttcgaagataagaacacaagtattagagtcacaactgaaataagctagtaagcatgactgaaatcaaggaaagatcatcaaccaaaacctcacagtcattgtttcactcaaactcaagtgtntaggcttattccatcataaacaaccagcacaagttccaacctttgcatttcatctcctatcatacagtaatgaacacacaaaaatgaat

SEQ ID NO: 76353 - DNA, 118 bp, Glycine max
atactaggactattgcacgtatgctgaacaaaacaaaagccaaagaaacctccacaatttgagggttttgcacatatactaactcaaagtaaagatatacggtaagctattgagacac

SEQ ID NO: 76354 - DNA, 393 bp, Glycine max
  unsure (1)..(393): unsure at all n locations
tctctcacccagaattatgatcagccattgatgtgcttcacctttggggatttccagctatcacccatggcagaagaatttgaagagatcctatgatgtcctttacggggaagggaaccatacctcttctcagggttctatccctcattaactagaattttcaagacagttcaaatctctacacaggaattagaccacaggaagccagtctaaaatggggtggttggaataccaagaaaatanttggaggcaaaagcaagaatcttggcaggtataggcgagtgggccccgttcatagatattcttgcactgttgatcttcggaggagtcctctttccgaatgtggatgggttggtggacctagcagcgatcgacgcttttcttttctatcat

SEQ ID NO: 76355 - DNA, 403 bp, Glycine max
  unsure (1)..(403): unsure at all n locations
tggcgcaaggggttgtgggttgtgctcttctgctgaccaccatacagacctttgccctttcatgcaggcaacctggagcaattgagccacctgaagcttatgctgcaaatatttacaatagaccttctcaacctcagcagcaaaatcaaccacagcagaacaattatgacctttccagcaacagatacaaccctggatggaggaatcacnctaacctcagatggtccagccctcagcaacaacagcagcctggctcttccttccaaaatgctgctggcccaagcagaccatacattnctccaccaatccaacaacagcaacaaccccaaaaaacagccaacagtgagggccctcacaaccttccctcgaagaacttgtgaggcanatgactatgtagaacatg

SEQ ID NO: 76356 - DNA, 364 bp, Glycine max
  unsure (1)..(364): unsure at all n locations
tattcttttaccacaaattcctgattaaggttttatgaagaaggttaatttgatatatttttaggttaaaattttcttacgcaacttactaaaatcatcttcaatatcatttttgaatatttattacaaaaatcacaatgtttacatatatcacaatccataattagataatagtgcaaataacatttatattattaatgcattcgatccatttaaattcattaattagaatagataaggaaattaaactaacaaattgttttagttgaattaatacgtaaacaaagaagcctacagtctcatatgattggctggtacatattcttgcgaanagagtgattgtcactactaaacaaatggtcta

SEQ ID NO: 76357 - DNA, 434 bp, Glycine max
  unsure (1)..(434): unsure at all n locations
ggcgatggngcacaacaagctttacacattcacaatgcgcgcataaacncatcatccncctgtgcccacctccaactgagctcacgtactcccacgtagcccatatcctcgtntctctcaacaccgggtccccatcaatcctctcaagcttccacaacatccaagcaaacaacattcagacagcacaagctatcacagccaagcaatacagagcaaaggcagaaaactctgctcaacacatcaaccaatatcacagcttttctcacttaaagaccacagtaacaattccttcgatccaattgcgtaaccgatggatcgactccaaaattttactggaagtctatagtgcataggcctacantttgaccgttgggatctactagcaaacatccaaaactcattctgcactactctttccacagccaatcacacac

SEQ ID NO: 76358 - DNA, 340 bp, Glycine max
  unsure (1)..(340): unsure at all n locations
ttaatcattaaatctacatcttatttcgttcatacacattgaaatgactctatttagttaggtaactaccatcttagctaacttcgtccccagagaaaagaaagtgttatctattagtatgtctatgtatgtgttanaaatgacagctatattactaaatggtatataagtgtatcaacattaagtattttatttcaataacttctattcaattcatgaatttgtgaacttcggtactatctcttatgccaagcttccccaatatattgtacctctatgcttctaagtgcatcgtgaaatacaaacaatgcaacattagacttgtttcgataatgttcta

SEQ ID NO: 76359 - DNA, 321 bp, Glycine max
  unsure (1)..(321): unsure at all n locations
ttcaattttatttcttgaaaggatcaattcaagactggccggntggaaaatgaaactcttgaatagagctcgtagagtgaccctggctcaatttgactttcattccatgcctatttcaccatgcaaaantctatggtaccagaagggatatgtgacaaaattgattccactattngtcgttntattcgnggacaaaatcactatcattgggtgaactgngaaaccatctccctgccaaaagctcttttggggcctcatattagaccttccagacatgtaaatatatctcttctangcaagcacgcatgggatatttacatg

SEQ ID NO: 76360 - DNA, 171 bp, Glycine max
atgactatgcaaaacatgcagtttcaacaagagaccagagcctccattcagagcttaaccaatcagatgggacaattggctacccaattgaatcaacaacagtcccagaattctgaccagctgccttctcaagctgtccaaaatcccaaaaatgtcagtgccatttcattg

SEQ ID NO: 76361 - DNA, 255 bp, Glycine max
ttttttttgtgccaaaacttaaggataaattttcgatgcccgtccagagaccattctaacccctaaactgcagagacagctaaacaaccaaaaagaaattgtgcaaaaaggggaagatcctgaatcaaaatatgactggtgcaagattgcagacatcccacatgttatgatttaaaaatcctgtttcaagacttattaccagagagaatattagacaatacccacgcggcgggccattataaatgtctttggtga

SEQ ID NO: 76362 - DNA, 486 bp, Glycine max
  unsure (1)..(486): unsure at all n locations
gcttcttatncaaggctcatcttggnggngaagcttcttctttcttggcttattccctagtggatggcacctcctctcacctcttctcatttgtcttccgctgcatctccatggtggaaaatcaccattaaaggacctcattgaagctcaaagatccagcctccatagaagccccacaagcaagctgtcatcacaagataccttggacacgcatgtattatggcaaaatagctcacaaaatatacgtatgtctatgtagcataatacctccaaaaaaaagagagagagcaaaaagagagcgagcatgatcagaataagacataaataataataaaaagttgtctagctaacaaacaacatgcttgtgagaagagataatatccaactcttctttgaaagattntactgatcttaaccagtttttagaaaaaaaaaaatgtgtgtacatatatgaagggtaatgctgtgaaaagttttcgaacaccc

SEQ ID NO: 76363 - DNA, 384 bp, Glycine max
actagctgcggacattgctatctttaggcttttgttcttaaccgacaagaggtgacacttacctgagaggtctctggtccactcttaaaaatatggtttcttcatcggtatttattgactttcacatccggtttttcaccgatggtgaaagtaccgacggtgatagattatcgtaacatccgttttgaaaaccgatgtaacgtaaattaccacatcggtatataataccgatgtgctatatgaataccccaaaaatgttataatgtgaaagtaacatggttttacaaaaacgatgtgtttcagaattttttattatgcttgtgaaacgagttacaatggtactatgatgtaacatcgttttaaaacgagttacccggtacgtgt

SEQ ID NO: 76364 - DNA, 468 bp, Glycine max
  unsure (1)..(468): unsure at all n locations
agctagtcatttgaatcacttatgaatgcagatgangtatctatttaacagtaggattgtgattaattaggctacaaggccattagaaaatagtagaaaatatataccaggcaaacgtttcatatatcttttcatttaagtcatattatattattcaattaatgtagttaattgtttgagcatgctcttccaaaaaaaaatagtgtaacaaagcaaactaatgcatctttttcttagcttggacatgttgatttggattctagcacgtgatattaacttggcttcaaataggaattatgaaagtggatatatattctctattaaggctaatatattggatcaaatgacaaatagacttgatatgagtcttaatgaattaaggctaatattcccgatggaattcacaaacatcagtggtctctattcattgattatcatctagggttttgcatcgtgatcaccacattc

SEQ ID NO: 76365 - DNA, 414 bp, Glycine max
  unsure (1)..(414): unsure at all n locations
taatattgatgaaagaatatgcgtaaatcaagtacaaacccttctaaacaaggtaagatcaaatagtatatttagctganaagagaaaaagaagaaaaagaaaagcataagcaactaaagttggaagctaaatgcaagaacaaaaccaaaacccatgaaatttaaggtgtgtgagagaaagttgtaccaaatgaattgtgacttttgaagaacaaatcgaaatgaaaataaatagaagaggttgattcttttgaactaagaaatataaacttcgtggcattgttttgcacaaccatntcacaatcgtcctctcagaccattgagaaatcaatatctatttgcaatntcataagatcacagctaaaattctggttaaaccacatatcgagtcgtcttgtggagtctgaatgcctc

SEQ ID NO: 76366 - DNA, 476 bp, Glycine max
  unsure (1)..(476): unsure at all n locations
agcttcaactgcgaggttcagtgaacgactacttcattgtgttttaacgtctagcgaatcgaatcatnggcttctcctcaacggcgctactgagctgttttatttcgggcctttaccttgacctccgccgcgaagtccaagctctgcaacctatgtgcataccacaagcagttgcgcttgccaagttgcaagaagaaaagattcaggaaccgtcttgccattcctgcacttcatataccccttctggtctactaccttcaccgccaccacccaccacggttccttccaccattaagcggctttccgcggaggaacttgttgtccgccgtgacaaggggttatgttatcattgtgatgagaagtggattctcagtcaccgttgccgccctcgcctccacttactcattgcagacgatgatgatgaatgatgcacaaatcttncaccaactaacccacacttgcacaacgatgaccat

SEQ ID NO: 76367 - DNA, 417 bp, Glycine max
  unsure (1)..(417): unsure at all n locations
gagcctctggaggctttcaagaaagaaagaataccttacagtgattggtcttagtataaagcctacaggtgtagttactggacgtagcctatgttgaggttaactagtatatttataggtgtgttgttttccttccttactacttctcattggatattgttngtgtgtgcttaaaaattgttttacaaaactttgttttgaaaagcttaatcttaatcattgatcaaaaggtttttataaaactgttttaatatttaggaagcaacacctactttgagaagaanagtgaagcagaatttgttggttaacagaattttagttattgtgaataggttctgaagtagtaaactacatgaatacttgaaaggttntacttganaataatcacttatctacgtacttgntaaaanaacacat

SEQ ID NO: 76368 - DNA, 396 bp, Glycine max
  unsure (1)..(396): unsure at all n locations
cttcccacaagtacttgggcagactcttgcctttcaacatgctccttaccataatcattatgggtctggtatttctttctgcagctccattatgttgaggtgtgtagggaggagtcacttcatgaattatgccttcttgatcacaaaattcttgaaattctatagaaacatattcacctccaccattctgtcttaatatcttgatcaatgagtcactntgcttttctgccatatttttgaacttctcaaagacttcaaagacatcactcttccttcttattatgtaaactcatactntcctagtcaattcatcaatataggatatgaagtatccgtttccacccagagattcagtttgcatagggccacacacatcagagtagttcacctcaagtt

SEQ ID NO: 76369 - DNA, 282 bp, Glycine max
  unsure (1)..(282): unsure at all n locations
atatcatccagaagaactccaagcggtagactcatgacaagaaagtgaactgatccatgaattttgcataccacttctgtcaaaacagattccgtgaaaccacatttatttcttacccaccaaacgtaccatataactgtgcaccaaactaccacccacatttctgcttcttttttcaaaactttatgtaaatgctgccaaaatggttcaatcggnggtggtttctcaaaatgtccgccaaaagcgcaaaacacatcctgtgaagcatccataatgttccta

SEQ ID NO: 76370 - DNA, 394 bp, Glycine max
  unsure (1)..(394): unsure at all n locations
cttctcatgaagataaaatgatatggcttcttaaagaaaatatataacttcatcatacttaacatattttcataacacaaagcatttgaagaagtatgcttcattgattntcaagtgccgatacaatgattggtgtgttagtgatctgtcctcgattcagactgcacaaggtctcttcagtcttcattcttatgttgcacataaaatcttaaggacatgtcttaacattcaacttgttgcttcttataatgctntaaacattncatctttgatgaaccctcaagatgtgtggctgcataaatggagtatgagatgttttcaacctttgtcctttgttgaagttgtngaaaatttangggatccttataaataccaatataccaccngaacactt

SEQ ID NO: 76371 - DNA, 459 bp, Glycine max
  unsure (1)..(459): unsure at all n locations
ctgagctgcgctatttaagtcgaagttccgcttttcttttttgagacggtcttatagcagtggttatgggctacgatttgacaaagtcttgatgaccctcgattgaagctgtgggccgaggaactcctgatacccttaacatttactagtggtgggtacttctcaatgacgtctattggggtttgtccacctcaatctctctgttgaaaccttatggcctaatattattccttcctggaccatgaattgacacttctttcagttcaacaccaattttgctttacacatcttccaacatgagctntagattggtcgagcatcagtcaaaggaagggcctataactgagaaatcatccatgaagacctctatgcacttctctaccatgtcaacaagtatagctagcatgcacctcaggaaagtggctggtccattacatgacccanatggcatccttctat

SEQ ID NO: 76372 - DNA, 370 bp, Glycine max
  unsure (1)..(370): unsure at all n locations
aaatataaactntgtatttaattaacgtagaatcttattatgtggtttttatcctccccttcctatctcaatctcaacaaccttgtatactgccaatttgtatgcacaatgtatgtttaaaatagacctatgcttcaatggtttctgcaacaccaaagccactaatcttcaacgacaccaactaaaacattaaggaaaaacatacaaagcataacacagccataccagcacattacactgtcttgacacacacatgccaagtccattaagcatattagtgaagcccaatatacatatttgtggatttcgataagaaacttaaccacaaagactaacttgaatgaatgactcaatgacctagtcacctaat

SEQ ID NO: 76373 - DNA, 394 bp, Glycine max
  unsure (1)..(394): unsure at all n locations
ttgggcgcccaaaaagaattattaatgaagtgtgcaaaacgcatacagtctgggatgaatataattcaaaggtgttcaccaactttttttgcgagtttgtaatttattcttcttttggggttgatcccagcttctcgcttggcctataaagcagaactcacttgacagcaccacttattttaagtacagaataataattacttattatggtatgtgaaatcagtttgtatgaattggctgtccaaatagccctgtgataattttntatgttgactgaataataccttttaacccgcactctgactgtctataagacatcatctattctatatgtccaatcacagccataaaatgtctcttctggtggtatctacgacttaatgtgaaatgtatc

SEQ ID NO: 76374 - DNA, 418 bp, Glycine max
  unsure (1)..(418): unsure at all n locations
gatgaatcgagtcacatcactgcttcgtctactgccaaacatatttaggaattgttgatgtccttgttacttccagtntcacctttgacanagatgtcatggaccatgttgaanatctaaaattgattcaacccccattatcctgcgtaaaaaatttcgcaataacttcgactgtacatcattcgcatgcatccctgcttttcgttggttgcattgctcattgcattctttccttgaaaaataaaataaaataaaataaaatgaacttatcaaaaagagaaggacacgctttacggcgcccttaccgaactcgtactanagctagagtaatgggtgaagcagaggaggtgcaagagaagatgaacgccgaanatggaggccataatagagcacatggcacaatgatgacgccatgatg

SEQ ID NO: 76375 - DNA, 190 bp, Glycine max
cttatatacaacattcgggcaacattgggcctgatgcatgcatttaagaaagtgacacggacctttcgtcttctcgcgacaaagtgaggggatcaagacacaacccgtgcatgatgacatgattcagatgctaaacaggtacggtcacaatgagatgtcaccacatggaatattctctataatacacacg

SEQ ID NO: 76376 - DNA, 348 bp, Glycine max
atgcaggcaaaaaggcaaacatttcctataaacaatttatgtgtctaccttatatagacattattctgggaacgtgtaaaatagcttcttctctgatgtggacacctctactagcacatttgataatgtaaaataattttggttacctccactttattgaccaaaaaaacattctcttctttctctggtctgagatgcacgctctggtctggacacctctggtaagaaatctgctcacaaagggtggtattgacacacttacctccactttattaaccatgtatgtagtgaaagtggaaaaacacatgatatatcaaatagtaacatgttaagtcatgatcttgcata

SEQ ID NO: 76377 - DNA, 457 bp, Glycine max
  unsure (1)..(457): unsure at all n locations
caagctaatatattntattacacgtactaagatattactttattcttatgtattacantagaagaatttctttacatgctataaaaagaatcttgacaaaaaaatcttaggtttaatttctttcacatatgaagttataaggttgtttccatgatactttagaaagaaagacgaaaaaaggttgtgggtttgaatttttttcacttacacaaattaataaactaacaattaacattgatcttaaaaaaagttatggtaggttaatttaacctgtaaattgtcttctatggttgagttaggttaatattctcaacttgctttcaaaataaatttattctaaacctattttctttaacaaattacattggattgacatatatccctttctatttttcacaacttaatcctacttttggcctgtcttaagtagcttagagccctctattatgtctaaaga

SEQ ID NO: 76378 - DNA, 445 bp, Glycine max
  unsure (1)..(445): unsure at all n locations
ggcacttcacgacattactgtaactagaccacaaccgaactacagtgtatacaaatgcatgtctagtttatgtcactaactccatgcgaggagacacttggaaaagcttgtcacagtgtcatcttaagggtatctacaagggtacctatangacntactggatatgtcctctaaaaatcttgtttctcaaagagaaacctatactttggaagctctctgtgatactgattggagaatggatatggttgacagaagatcatattcagggggatgtattctctttggccctaatctctgtttcttaagtggtcataagaagcacgctttttgttgctcgatcgactacaaaactgaatattgaacctggttgttaccgcatcagaacttctatggattcaatccttactaggagaacattattaaaattaccaccccagctggctac

SEQ ID NO: 76379 - DNA, 386 bp, Glycine max
cttgaattcattattgctaccccatagagctccgcgaaatttgttcggccatattcttccttgcgagccctcttggtctcttgttcaaaggctcttgcggtaattgcattctcttcccgtaacccaacacacttcttccgaacgtgtgtagcacccaacttgaacttctccttggcgagtattgcctttcctaactcgcatttgagagctcggacttcttcgtcctcttccggtgcttcaaaattctctttgctgacgaactttaacttggcgagccaatctaaacctcgtatgcgaactttcagccattcgttggacccaccaatgatgccattacgaatgcctcttagttcttgatctttcttaacggagtttccatgccttat

SEQ ID NO: 76380 - DNA, 421 bp, Glycine max
  unsure (1)..(421): unsure at all n locations
tatcaantcgaacttcacctgctgcatgcatatcaattgatgacgaacggttagtattattattaatccctcgatcgctaagttattcattttaaatacagtcccattcacgactttatattaatttaatttccgttgatcaaagcttagagattaaggtggcaagttagaagacattcattgcaactactaataagagattcattcaaggttaaaaaaagtagactacaattgttgctactattctaatgatgattaaacttatgttatataaacgacttaattaaataacattgnttatataacatgtactctttaacccctcgatcgctgagaagaactttgagcgtgatgcagaattataactattaaagagctaactgtataacggcagctagttggatgaatgactgatatatta

SEQ ID NO: 76381 - DNA, 428 bp, Glycine max
  unsure (1)..(428): unsure at all n locations
ctaagctccacataacattataatgacttgatgaccacacactatttctttccctaactaacacgannattttaatcttgagtaatagaagttatactatctcattttatcacattatgtcaataatcaattattacatatatttctctgggatataagattgatttatgcataagagatcagagacaatatgatttgaatattttactaacaaaaaaactaacatattaactaagaatatgtatcgatcaaaaataaaaataacagcatacatttctctctttctaggtgtagattcgtacatgggtgtccatgcatcatttattgaatatctttgctacaaagtatccaaatcaaaggaacttgaagagatacaaacctggtaagtcccatggatctaactcgtagatatcaacctctgcaatgat

SEQ ID NO: 76382 - DNA, 446 bp, Glycine max
  unsure (1)..(446): unsure at all n locations
agctatatatgagctcagcctaccaccctcagtccgttgtttttactgaggtgctaaattagggtattgaacaatatctacatgtcttcgtgcacaggataccagcttcatggggaaaattcttgatatgggcaaaatggttgtataatacgtccaggcatttcggcacggaagcttccccttatgagaatacgtatagtaagaaatcgcttatgattccgtagtatgtgttagtcggtgaaaatgactaacttttgtgtttaaaacttgtataaattgtatcaaactctcccaatntatggttattntgtaatgttataagtattttcggttaagtataggtaataaatacttagtattttcattttgtgtgtgtaataatcattctctctcaatttcaggttaattaggaaagctctggaaaaggcctgtttcaccttctcgct

SEQ ID NO: 76383 - DNA, 385 bp, Glycine max
  unsure (1)..(385): unsure at all n locations
ttcttttagtttatttttttaatttatgcaatctaattacaatagttaaattcagtcatttaatagtttcaatttagtttgatgcatgatagagaagtaggtacttattgattggttgcaacatattttgagtgaatcaattgcatgagtgagatgaattacgtactaatggatatttttgtgaattgcttattcttgtgcaagcagacgtcagtgtaattgatgaagtgtgaactaatagtacaagagtgaaaaggttagtatttctgatagaaaagcatggaataagaacccttatacttcaatgaanatcggtaagttgtgtgatctttacatngtgaaagaacaactagttctaattccttggttggtattggttagctac

SEQ ID NO: 76384 - DNA, 463 bp, Glycine max
  unsure (1)..(463): unsure at all n locations
taagtcaccgcggctgcagcttaatacattggggctgtcttatttctacttctgctatgnattcctacaataaacaaaagacagtgtncattttagacaaaattctgagattcaatgaacaagtaataaatnctcgcacaagtacggtttggtcaaactttcataaaataacattattaggatggacctaattaaagtaaaccatgctataacttttcttcacccaaattttgcttttgctcagaaagtcgggtctaacattgcatggaaaatggaaaaatcgttcctggtgtttgtgatacatatatagatgaaattaatttactaanagcctaatatatatcaatatcactagcgaattaatataaatttcagtggacaatatgtattggaattatgttggtaatacctttcgttctaatatatgttaaacaaataaaactattttaaaagtatcacacta

SEQ ID NO: 76385 - DNA, 434 bp, Glycine max
  unsure (1)..(434): unsure at all n locations
cgcacttcattggatcagcttntgcacttcacttaatcatttctncttgtgtccatcgangncggttgatctgtcanaatgtgacatttttgggatcaaaatgtttgtcaagatctctgtgttccacacgaccaccatggaggggaatccctggcctcccttacaaatgtctgaggttgacttccaaaaccttaagagctttatctgccgccatcctcactttttcaccctccctcctagccttttcattttccctccccatgtcctttatctgcgccattttcttggacaagtggccttaataacttaagaggggatgtgaatcaaattntaaaattttcccacttaccaaatttaacccccttttaaatgatatatgataggcttagaatgttgaagaagaagcgcaatcaatntaataatgttctttaaat

SEQ ID NO: 76386 - DNA, 472 bp, Glycine max
  unsure (1)..(472): unsure at all n locations
agctagttaaagcccctttaatgcatctggtcgtgtattnttggaggtattccccacatttgttgctcagtggtttacgattccgtgcacgtctgtcaaaacttgttttgtagcactttcatgataaatattgaagagtaatattatgtctttttactattcctcttaatattttatgaaaaggatgttaaatgacatagtaaattaataatgtaatattttgacatctctaaaagctntcaatattttggttgtcgtctaataagtaagaaagatttagaattgtttaagaaaactctatccaattataaagagataaaatagaagtgaaagtataaaataagtatataattgttaataaaaaaaggtaataataaaggactgcaataaaattaagtttatacaaaataaatcttaaattattataattntaactggntaattttaactaataattattagtataccttat

SEQ ID NO: 76387 - DNA, 368 bp, Glycine max
  unsure (1)..(368): unsure at all n locations
tactcagctcgtcagctatctctctcctattgatataatatgttatttgattganatanagccaagctagtgagtgaacagtttntctttcctcacanaaatcaaaagcttcaagtgtatcatcaataacctcaataagaaataagcaaatanattcccaaattgagtagaanaaaaaaaaagaagaaagaaaaattgatacaagtaacaacaaataaaccaaaaataagtcattcagataagcaaccagcaggaattttacaagaatntacttagaatacagtgcattaagacttaaagagatnttttgggaaatgctagaaaaacactttgagacattcttttaaggataaatactcattctgatc

SEQ ID NO: 76388 - DNA, 451 bp, Glycine max
  unsure (1)..(451): unsure at all n locations
gcagctgacacaaaattgagatgaaagaactaggattttctttaangatacctcggattgatattcatagggatagggcaaagggtgaactattctttgtccaaagcaattacctcaagaaagtggtggaaagggttaggatgcatcaaagcaaacctgttagcacaccacttggccctcatacaaagctatatgttattcaagcaccagagataactgaaaaaaggtctaaaatgaatcanacaccctatgccagtggtgttgaaagcataatgtatggaatggtttgcagcagacctgacttggctcatgcagtaagcataataagtaggttcatgggagatcctggcagtgcacactgggaagctntgaagtggacactaaggtatctaaatggatctttgaaagctggattaaagtacaagaagacagcacacgaggtagcaatcat

SEQ ID NO: 76389 - DNA, 348 bp, Glycine max
cacggagaccgttaccgaaacgtttctggagcgccatggattagatattcttaacggcaacaagttttccaagcatattcgaaagagagagaagtgcctaaggggctgaacactcttttcttgtacttcctccctcattataccataataagggaggtggttgtcgccaactcgcccagcgaggcacggtgcttccttcagaacaacatccttctggaggaatatctggagggcccaagagggcctgcgtgctatttgccctctctttatactaggacaccaccctctgcttttttattggattcttattcggaaggacggaaactagaattcgggcgatcttgtttc

SEQ ID NO: 76390 - DNA, 341 bp, Glycine max
  unsure (1)..(341): unsure at all n locations
gtcacctgaggctgcagcttgtaacatataattatattctcaagaacattgtatctacatcattgatgtggagttcaatacatcanataaaacaaagtgtcatagttaacagtggattgctaacaaaaatgctactttataaatttatcaagctactgatcctctggaatactgtctaaagatggcttccaagaattcactccctcatncatcaattcaccaacatctgaaactctttcttctctcaacttcacagngtgttataattgctccaatgaagagtgtgcattcttgaacctcaacatcctttttaactcttcttgagtcattaccactctaat

SEQ ID NO: 76391 - DNA, 298 bp, Glycine max
acaaacaactcaacagaacgggggacgagtcgacgaccacttgcgagcactcaacttatcaaaatcttctgggcccctctgcgttgaaaacgcctggtgggtgcgtagacacgtacaatcggactcaagcctaagctggccgcatatgtctgaccattctcacatcataaaccacaaggcggtcctctataaacaccgacagagcgctcacgcggaacctggatcaaaatgggatttagatcaccaaggtctggctcaaaccaaatcaattatggtgtggggtgtatgccgggaggag

SEQ ID NO: 76392 - DNA, 232 bp, Glycine max
acattaaaattcggtggctctttttctctaacccaagatgctctagaattcttctaagccaaatgcattgacatgcacaagatgctgcaacaatgtattcagcctcagtagtagataaactaactataggctgctttttcgaagcccatgaatacagctgcagtcccatcataaatatggatccagaggtgcttcttctatcatctaagtctcctgcatagtggctatcact

SEQ ID NO: 76393 - DNA, 202 bp, Glycine max
  unsure (1)..(202): unsure at all n locations
tatctgacttgtctatagtctttntcaatcattatcttatgcatacaataggcagggctgattcctttcagatttgatatgtgccacccaattgtctccatgtgtctcttgaggacctctaccaacctgttctcttnctctactgttagctccctgctgatcaccacaagcttggtcttgttctccttcaagaacacatact

SEQ ID NO: 76394 - DNA, 486 bp, Glycine max
  unsure (1)..(486): unsure at all n locations
acctaagcgacgcagctgcagcttcccacatccagtaaacaacancatacattacattctattcagnccagaaacagagcaagggagaaaactttggcaaacacccaccaaaatcacagcttttctcacttaaagaccccggtaacaattccttcgttccattcgtaaccgtggatcgactcaaactttactggaaggctctaggtcataatcctacattttgaccgttgggatctactagcaaacatccagaccgcattctgcatggctctttccacaaccagcaaatgcataacatttttctgcacttgtgcaaaattctgctgcacaatntcacataaaaaatctgcacaaagagcatatttcgaaaaccacacttcccctcatccaatctggcccaaatcaaatcctacaaagtctaaatcatgtatcaatcgtgtctaaaccaaagtcaagcttcacaccacagcaacacataatctatgt

SEQ ID NO: 76395 - DNA, 408 bp, Glycine max
  unsure (1)..(408): unsure at all n locations
ctaaaactttatgaaacaaatatttgtaataaaaaagataggattntccaagaccaagtcaaagataaggtaaacctagtctaacaaactaaatcaacaaggccaagttaaacaaaatatttgtttttttataaacaataaatcccacattaagtttgagaagtgtaaattcatattgtttttaaagaacttggtagtaggtttcctaacatttaattaacatgttcttctcaataataaattggggtagtataactatataacaagcttttctaatatgaataacctatgattcacttattgaaaaagtggagagataatgtgtgagagatctcntctaaactttatgagacaaataatttgtaataacaaaaatagtatttttcaagaccaagtcatagataagat

SEQ ID NO: 76396 - DNA, 465 bp, Glycine max
  unsure (1)..(465): unsure at all n locations
accttaagcaccgcagctgcagcttctttgaccttgaccgcagcancttctttanttttaccatgccatatgcacaagagtggtgtctgtcttcccttcgaaggttgagctcattgttgctgccccataaagctccacaaaatatgtctcggccatgctctatcttgcgagccctcttggtttcttgttcaagggctcttgcaatagctgcattttcttcttgtaactcggcacactctttccggacgtctgaagcgactaacttgaattcttctatggcaagtcttgctctacctaattctgcgtttagagctcggacttcttcattctcttccagagcttcaaaaatctcctcgctgataatattcaacttggagagccaatctaacccttgtgtacgacactttaaccattcatgaataccactgatgatgccattatggatgcccctaagttctttatctt

SEQ ID NO: 76397 - DNA, 306 bp, Glycine max
  unsure (1)..(306): unsure at all n locations
cttaatggagaagatgcgctatgcgccactccttctctggaaaaaactattgtagcagtgctaagtgcgctatcctgagctaagccccatacccattatgggaataaactttcacgagttgggcttagcggcaggatgcgctaagcaccaatcccctactgtttttgacatgcttgtaagtgcgcttagcgtgcctgttgcgctaagcctaaactactctctgtaattngaagcttgattgcgcgctaagccttacatctcaagctaagcgcatattacagaaaaattttgtgctgcataaagtgc

SEQ ID NO: 76398 - DNA, 390 bp, Glycine max
  unsure (1)..(390): unsure at all n locations
ttaacaaagtataaattttacatgttaacctttcatgcttaagcttaaagtttatctatctctatgagatacaagtagaaagcatgaatataaaggctctagatgatagctaaaatattagtcattggacgatactaccttaataactagtcttaagaagacaagtgctttagcacttggctcatagtccaaaggcatggaataattaatcgatcctcaagtattgaaagtaatcatcaaaagtggcttagtaacaaaaaatacttgagctttaatcttanggggagattaagggtagtgttagggctggcctanagaagactcgttgtagtcggaattggcatagagaatacttggttgtcatcaaagtgttgattagtggaacccttc

SEQ ID NO: 76399 - DNA, 491 bp, Glycine max
  unsure (1)..(491): unsure at all n locations
ctatcttcatgttgctcaccttatctctaacanagattncatgttatttngttattgtgatgcagactatgcacgagacatagtagaaaggaagaacataagtggaggatgtcactatattagacattgctngatatctttggcaagcaagaaacaaaattccattgctctatcttcaactgaagttgaatatgtgtttgctacacgttgtcgttcacaattgttatgggtataatatcagctggaagattactctagtatttaaaacaatataccagtatattgtgacaaaactagtgcaatcaacctatctaaaaatcctatacaacattcaaaggctaagcatattgagataagagatcattccatttctgattatgtgcaataaggtgcttctgatataaagattgcagacatagatcatcaacgacgtgatatcttcatgaagcctttgtttgaagaatggttcgtatgtataacggaacacttaa

SEQ ID NO: 76400 - DNA, 326 bp, Glycine max
  unsure (1)..(326): unsure at all n locations
taccctatttaattggcatcatctaatttctgtctttttcaatatataatgataatctccaacgctttgtcagatgttaattctttgtcacttaattatgtgagatctaatctatatcatgtagattcctcttcaatactctttgctctgtctgtaaagggacttgggagctttgctccattgatgttgttctgctgctntactttgcattttcttttgctaagggagatcaattatccttcatattcctcatctccttgtacttttctttccatcatgatgaattttgttacccctctgacatctgatatgaagaggaatggaaa

SEQ ID NO: 76401 - DNA, 388 bp, Glycine max
  unsure (1)..(388): unsure at all n locations
tactaagctgagtctagctaactgttgatacgctgctaattgttttatttatngatgngtattatggcttgatcggagtgtgtgaatcctgtgtattgtgattgatgattganaggtgtgattgatggatgaaaagtgtgattgatganaggcaaagtgatgaaataatgtgagatatgctaagtaaattgtatttggctactatatgttgtgttgtttctctctagtagttagaaatgtgataactcactcccggtttgctatatgtgtttggatcctgtgatgatattgaactttgtgttcggcggagcagatgaataggtggatgactatgaagaacctcatgctagatgacacgagaacaccacgctttgataggatgtgacat

SEQ ID NO: 76402 - DNA, 461 bp, Glycine max
  unsure (1)..(461): unsure at all n locations
agctatcccgctctaggatcntttttggctttctctctgactcgccatacgaggtcgccaggttgaaaggctcatgattgaacctttatattgtatcttttggttggcaacttcttctctaatccttgtcatttcttggactttatcaatgatttcaagttccaccctcatattttcttcatttttttgttgctgaaataatagtctctttgtcgatgattccccaccttctatggngatcatggtgtctgtgccatatgtaagttggtaatgagtttcattggtggttgtttagggtgtacaatggtacgcctagagtatgttgtagagttcttctttccataggcctttagacttgtcaagtctagtacgcagggccctgagaatgactcgattagttgcctctgcatgtccgttattctaaggatgttcaacagaggtgacaaggtgcttgatccata

SEQ ID NO: 76403 - DNA, 467 bp, Glycine max
  unsure (1)..(467): unsure at all n locations
cttgatctcagcttacaccgatatcttgtctaccgcactgtgttctttcattcanagattgtgntgattgctactgataaaatctaatcatcttacaaacanatgtgaaatctaagcatttagttttttgtcttagagtattcaagatgttntgagagcttttcaaactttataagaatatacaaagagttntctacataaagaatttgaatgatagcgtgtaggttcgttactcatttcttcaaagcatctagtatttataggttttcattttcaagtgtttgttgtttctaaacgattataattttcctttgagcttgcatctgaagcttgtggntattagatcatttaatgcttacattaaacgcatatcctgcttcatgtangaaaaccactatgactggctntcgtgtngatcactataacaaaaaatcagttccttttagtcanagagatctatcacagta

SEQ ID NO: 76404 - DNA, 375 bp, Glycine max
  unsure (1)..(375): unsure at all n locations
ttaccccccactgaagcatccaagagcttcttagattgtggtctcaacccatctatgaatatgttgagctgtattggttctgaaaaaccgtgagtgggagtcttccgtaataaacctttgaatctttcaagtgcctcactcaacgattcatttggaaactggtggaaggaagagatggcaactntgccttctgcagtcttcgattaagggaagtacttcttcaagaactattctactacttcatcccatgactntagactatttcctttaaaagaatgaagccatctcttagcttctccaactaaagaaaattagaacagactcaacctgattgcatccgcaggcacacctgccagcctgatagtattgcatatc

SEQ ID NO: 76405 - DNA, 354 bp, Glycine max
  unsure (1)..(354): unsure at all n locations
caaaaccaaccttgacacatcccgacccaccccggcatagtcggtcagtgagaacctgtgatgtacctaaacaggcgagctcctggcagtcaacagataanaggaacaaagaccacaaagcaaggaggcttgtggtagctggccagctgtgaaacttgattgatatgtgagatatggtctctggtaatcgattaccaagggtgggtaatcgattacaaggcttataaatgaagacagggggctaagatggtctctggtaatcgattaccaggggatgtaatcgattaccaggcttgaaaacggagtcaggaagctaagggagcctcttggtaatcgataccagcctgtgtaatc

SEQ ID NO: 76406 - DNA, 323 bp, Glycine max
  unsure (1)..(323): unsure at all n locations
atcggtaatattaccaaaaattgtcaggggtaacagatattaaacctaaaatatataaaatttagtatgtataagctttgaagaatgtaagtcataatgataacanaataacaaatatcccataggggtattcccatttcatcatatctctacaaatttttttattaatttgtgctagtagaaattattatgagaaatcctatgatgattatattcttataagacgctntctttctgttgtgctaaatcatttattattggataaaagaacaataacatctagcttgcctttcaagttcataaaactctctttcttactgatg

SEQ ID NO: 76407 - DNA, 315 bp, Glycine max
  unsure (1)..(315): unsure at all n locations
accaagcatctagttaccttaaacttcttagtctcaactgatgaaaatgagttcgtggctacttcatgcactcctctaatgacaatagcatcatttctggcactaaattgctgggagttggaagccatcttctcaattaaatttctggcttcaacaggggtcatgtctccaagggctccaccactggcagcatctatcatacttctctccatgttactgagtccttcataaaaatattggagaagaagctgcccagatatctggttgtgagggcaactggcacatagtnttttaaatctctcccagtattcatat

SEQ ID NO: 76408 - DNA, 295 bp, Glycine max
  unsure (1)..(295): unsure at all n locations
atatatacagtgactactcaaaaaacagatgggcttgattaggctcatataatctacctaattaaacctaattacacaaagcacatcccacattcaccacccaattattcaagtgccgagattctgacttccaagcctaatacgatgctcaaaattgaagctctttttcttagctttccaaggactactcatatgctctatttggagttatgtagtgtcctatatgccctgcacaatgaagataggtcaagttatcacataatccaaatatagcnacaatatcaattagcccaat

SEQ ID NO: 76409 - DNA, 240 bp, Glycine max
tacaaatctcgttaaaggtttttagtgaaaaaaaaaaaagagggatttcagggggatatacaaacctaactcgaggaaaaaaacaaatacctgaagcattctatcctatcatctcttcttctcttatatttaccctttgatttaccttatgacataagtacacccatgtggaaatccccacttctgagataattaaaaactactctgcttttgctattcatgtggtgacccttttcttga

SEQ ID NO: 76410 - DNA, 375 bp, Glycine max
tgtgggcaccaccttataaacaattaggttattatctacacgaatccaagccctgtggcttcttgggccactcgtgtcttgaggcgctatcctgcatctggtaatagcgttgaaatagctgagccatatgtcactcacctatgtaggatggcgagaccaataaactttgcagctgaggctgaatgtggcgctgggaaatgtgctaacacaatgcatccaatctagaatagggtacatgatcacaccgttcccgtacgtcagcaagtctgaccacacgcacaactggcgaagctctatcaagctgagctgatctattggtgactccatgtggatcatcaacagggtgccaaaaaggtaggatttgcaaagatcctg

SEQ ID NO: 76411 - DNA, 297 bp, Glycine max
  unsure (1)..(297): unsure at all n locations
gagacacaacacaaagttcaacttctcctcctttttcttgcttcaaatatctgctaccccctctctcgttctatcactcagtctgttcctccattgaagcattctctccaagcttattatccaatgctcatcttggcggaaaacatcttctttcatggcatattaccctaaatggatggcgcctcctcttaccatctactccttggcttccgctgcatctccatggtggaaaataccattgaaggacctcatngaagctcaaagatccagcctccatagaagctccacaagcaagct

SEQ ID NO: 76412 - DNA, 346 bp, Glycine max
tcttcctcttcatctatctcctttccacatgtgtgagacgcatcactctctccactcactgcctcatgagagccttctgtggcccaacttcttctgggggatgaaaaactccttccttcactcattgaccctacaatatcttctccgccaccctcttcttttgccatatcaatcaaaattatggtttcccttttgtcctcctggtaattgtacttgtagtgaaggtgtgctattgtgagccttccaagtcaaacgaatcaagtaactctgaaagaaacaatgattgaccactcactcacatgtttctaccaagtggcacatgtacatcatatatgtatgattatgt

SEQ ID NO: 76413 - DNA, 344 bp, Glycine max
  unsure (1)..(344): unsure at all n locations
agctattatagaagggtcattcctaatcnctctacaattgcatcacctctcaatgagctggtgaagaaaaatgtggcatttaccttgggtgaaaaacaagagcangcctttgctttgctcatagaanagcttactaaggcacctgttctagctcttcctgacttttctaaaacttttaagctagaatgtgatgcctctggagtgggagttagagttgtattgttacaagggtgggcaccctattgcttattttagtgaaaaacttcatagtgccaccctcaactaccccacctatgataaagagctntatgccttaataagagcccctcanacttgggaacatt

SEQ ID NO: 76414 - DNA, 395 bp, Glycine max
gaatgtcagaattatggtacacacagacacaactgaatttctagagtacaatactgggctcagaattcgagagagactctggagcagctatgcagagaagcctagggttctacattttttgagagattagtgagtgttagagtgattgtgaggtgccaagaagaggaggagggatcccccttcttgtgtaagcaacaattattctgtactctctatctcatttgtgttaaggtttctatgtatggctgactaaacaccctagttagggatttctaaggaacagttaatgtaattatctttgatatctaattagatgtgttttgtgtgttcaatgcttctttcaatgcttaattactgcatgctcttggactgatcacccatttgtgtgtactggt

SEQ ID NO: 76415 - DNA, 454 bp, Glycine max
  unsure (1)..(454): unsure at all n locations
catctanctcgctaattangtaatttcttaagcctaagcaaccaactcgcctaggcaagctaattccttcagccataagtaactggctcgcttgggcgagctctagctcgcgccattttctataaatagccatgctatgggaggggtttatggattcagattctcaaagaaaaaaggagaacaatgaacgaagaggaagaatgaagactaagcgaagtcattgctctattgaatcgcgaccgtggatcattccctacatcgttcctcttgctagctatgtaccccgtgcaatagtcggttagtttttcttaagagatgaatataatatatgtacccttacgggtcccctctagtattatgtgcatattcatcttctccatttatcattggagatcccgctctatttgtaggcttaatttagccgatcatagtgtcgtgaaatcgtttctttttt

SEQ ID NO: 76416 - DNA, 351 bp, Glycine max
  unsure (1)..(351): unsure at all n locations
ctaaggatgcctatatgtatcaatcctagaaggaaggtggtgtgggagcctataatcagaaaatttgaggctaagttgaataaatggaaccagagaagcatntctatggctgacagaattacattaattaatgttgtcttaacaacattgcccttgttttatatgtcttttttcaaggcccctacaacagtgattaataggctcactgccattcaaagacattntctttggggtggtaatgtagaaagaaaaaagatagcttgtgtggcttggaatcaagtgtgtgctcctagagaaaaaagaagtttgggaatcaaagacatcaaggcttttaataaagctcttcttatt

SEQ ID NO: 76417 - DNA, 335 bp, Glycine max
  unsure (1)..(335): unsure at all n locations
gaccttaagcaccgcagctgcagctnctatcacttcttcaangaacagctacattanattttntcaatctnccacggcaggccgagccttacacacatgagcaatcatgtcatcactggtttgcttgaaggttgtaacccttcatggtttgcatcaaacaaagctctggatatcaatggcaaagatgtcctgggcttttcttcaaaaagagcgacactatttatatgatccgatgatcttcaagatatcctgctaaactgattggcataacacggcacataaatgatagtcaagccttctcccatcaggtcttttatcaactgaaacagaattcg

SEQ ID NO: 76418 - DNA, 274 bp, Glycine max
agaactcccttaatttttttcttatgaaattagaaggatcttgctcgcatacttcatctaacacacgccattacttaagtgaatatacataattatatagagacaatgatttagtacacgtcatacacataaaggaaattaaaatcgttcatagatataattaaaatccaagttttacatccttaactcaacaaaataaaacttggaaaccaactacggaggagtcgattacgaaacacaactctctcccaaaataatgccaacgtcatcacgt

SEQ ID NO: 76419 - DNA, 477 bp, Glycine max
  unsure (1)..(477): unsure at all n locations
agcttcaacatcagactcactccaggtgctgtacttcttacatggattnganggngcctatgcaagttgaaagccttggaggacagaggtatgcctatgttgntgtggatgatttctccagatttacctgggtaaactntatcagagagaaatcagaaacctttgaagtattcaaagagttgagtctaagacttcaaagagagaaagactgtgtcatcaaaagaatcatgagtgaccatggcagagaatttgaaaacagcaggttcactgaattctgcacatctgaaggcatcactcatgagttctctgcagccattacaccacaacagaatgggatagttgagaggaaaaacaggaccttgcaagaggctgctcgggtcatgcttcatgccaaagaacttccctataatctctgggctgaagccatgaacacagcatgttacatccacaacagagtcacactgagaagagggactc

SEQ ID NO: 76420 - DNA, 498 bp, Glycine max
  unsure (1)..(498): unsure at all n locations
acctatgatactcagcttcaacattcaatttgagcgtctcgatatatgactttactcaatctttatccgagnaaaagntattgggcgtttaattggctcagaagttcaacattaaatttcgagcgtctcgctatattacgggactcaatcaaacatccgagtaaaaagttattgtcgtttgaattggctcanggcttcaacattcaattttgagcgtctcgatatatgacgagactcaatcagacatccgagtaaaaagttattgtcgtttgcatntgctcagaggttcaacattgaatttcgagcgtctggatatattacgggactcaatcagacatccgagtaaaaagttttggtcgtttgaattggctcagaggttcaacattcaatntcgagcgtctcgatatgttacgagactcaatcagacatccgagtaaaaagctattggtcgttgaaattgctcagagattcaacatttannattcgagggtctcgata

SEQ ID NO: 76421 - DNA, 397 bp, Glycine max
  unsure (1)..(397): unsure at all n locations
tgcaagcttcatcactaaacttaaccaattagtctttttttatacttagcttgctcattagcctttcacttgacttgttctaacaacacacacacttatttgaactcttttcttcttcttcttcttcttctttttcttctttttttatttgntgggtgttttgttgtttcttacctttaaacattaaccatctaacaaactcccccaaatttcaggtgaaattgtcctanaccaatgtgccctcttaaaacctaagcaaggtaaataggaattacaactcaaggctcacagttcaatacaattacaatttagctcaaagatgcatgcccatgatattatcattgataacaggtaagcttttggtccagtggcttgtatataccacaatggcgttcat

SEQ ID NO: 76422 - DNA, 254 bp, Glycine max
  unsure (1)..(254): unsure at all n locations
gactagttcttttaatgttacctacacatcaagctaattggcttgacaagaaagttgaggaaaagccttcattgtgtcaaaggtggaaggtcctaaccatcagctcacatgtttaatgaacaaagtaactaccaatgtaaatctagatgaagagaaatgaaatcacttatatatataanaaagaagaaacactatgttcacaacccaaaattgaagaaatgactcttcanaagaaacaatggacccgcgagttg

SEQ ID NO: 76423 - DNA, 312 bp, Glycine max
  unsure (1)..(312): unsure at all n locations
ctcatcaacctttgtttttttcaataagacctcagattgcaagccataggagtgcagcatctcatcaacaccacagctcatattcaacctttggtttcttctttcagtacatcaagttcaaagtcacatcctatcttatgttatgagggtagttctggccacgaaagcaattctttagtaaggcctcacaatgcatgcatagagaggaggagtgataagaggaaatnttggccataaagcaccacttctttcatcagagagaggagccctgctgattcgaatgtcaagcgactcaagccttcatgtgatgag

SEQ ID NO: 76424 - DNA, 283 bp, Glycine max
aagtacgagctccctgagaactgtctggcacatcttttgctgataaacacccgtgagatgggaattctcgaatacacaacttgcctcttgacattgagcatgacacgaacttgcgaacttatatgactctagcgaaaccacaccacatattatatgactttcagcattgtacaatcaggtggaggaatatcaatctggatgacaagtcttacaaaacacagctggcctctttagatgagctgtgcagcagcctatgtctctcatgagacgcaacgcgagaatc

SEQ ID NO: 76425 - DNA, 221 bp, Glycine max
  unsure (1)..(221): unsure at all n locations
tcccccacataactaggcccatcatactgctgcatctgatatgcaagcttgcccaaagaagagaccacggaggaaatgcttaccacctcanaagactggacagcggattataatgactcctctacagccttcacataacgcatatatgatgggcagctcaccaagatgtcttgctcgcctgatatgatgaccagatgcccttccactacgaatatcaactt

SEQ ID NO: 76426 - DNA, 299 bp, Glycine max
tgctctctacacatgtttctttttttcttttagggccccgtcatttaattcatatcccttttgctagctattttgggcttcagctggaatattttcaacataagactgatttcacttccaaggttacttggtctaacttaattactaaaatgcagccaactaatgtcctgtatactgaattgcggggaagccaaaacttgaattgcgttcatcacatatacctctttaaccctgcagactaaaatattgctttaaaaacatggggttgtatttatgaagatccaccatactgactttga

SEQ ID NO: 76427 - DNA, 234 bp, Glycine max
  unsure (1)..(234): unsure at all n locations
tcgcgacgacgaccgacaatgttggatggagacagtggacttcgaagaaacggagaaacttgtttacttnaaagcagtgttagccgaaacactgtgtgaaaantaaatttatgttaaataataaaataatttaaaaagttactttatatcntttcctaatacanacccgacattacccaataaaaggatattataagtaaaattacattatttggctagtacataacacataaa

SEQ ID NO: 76428 - DNA, 390 bp, Glycine max
  unsure (1)..(390): unsure at all n locations
atggcccaaagaatttaattcttccggttagtacccaatatgcattcacattaccttaaaggattttataaaaatggcgcctcttccttgaattactcttgttttataatagttcctaagccttaaaacttttgcagcagatcagctgatgtgatctgacctaacgagacttcaactgtggtaacaatactttgactataagattggaaaaagacaaaccatttgaacctttcatagaanatccagtacagcttggatcaaaccttgaagatagcatcctagctgcattctcctcaagattntcctcttcatcttgcaaatcgtcagatattntactacttgaaaccaaaggttcagcctccttggaaaccttagtactatctatagctg

SEQ ID NO: 76429 - DNA, 456 bp, Glycine max
  unsure (1)..(456): unsure at all n locations
agctagaagaggatgctntaatggatgttttatattatagaaggggacacgaattgaagaataaagagggaaagaagtggaactttgaagtgtatctcataagactntcattcatcaaagttacaacaagtgttacacattcttctatntatagactaggtagcttccttgagaggctttcttgagaaaacttccttgagaagcttctttgagaaaacttccttgagaagctagagcttagctacacacacccctctcataactaagctcacctccttgagaagcttccttaagaagattcctaaagaagctagagcttagctacacctacctctctaatagctaagctcacctccttgagatgagaagctagaacttagctacacacccnctataatagctaagctcacccccatgacnaaaaatatganaatacaacaaaaaaagtctttccta

SEQ ID NO: 76430 - DNA, 451 bp, Glycine max
tacaaattttctttttttgaaataccctcaggccagaccatatgtataaatatccatctactcatgaaatcgaatataaatactcatgatgcaaacataagccaggaatgtgggcatttgcgtgggcttaggctaccctattatcgccaattctgcacataatcttgtcttcgccaattatgcgtgaacttttacaaaagctaaactgattgaaaatattattcacaacgtggatttgcatctactctaactctacctacaattacgactcaattattattgtcactttcttggtaaacaagttgatgttggaaggccaataaaaattattttaattaggttcggcatctagtttaagatattcccacgccttgtcgtttggtaatcaacatgccgtgtggactgtatacttttacgataaactatagtcgctaatcaatttatatcgtat

SEQ ID NO: 76431 - DNA, 305 bp, Glycine max
  unsure (1)..(305): unsure at all n locations
tttttggtcaacataaggcaaagagcgaaggagacagacattctatctctggagctacccccctcctcgcgatacttttgaacgagattctcagatataccctttgtagctgaaaattaaatgagttcagattctttttatgtcgtagttcgctctaattactctgttatcggtataacgttggattccatccaacaccaacgaacatgttcattgacatccggngtagaaaacgatgcatgtcactaaacccagtggaattcaagcctccatccacttattgatggaattatataccatctttt

SEQ ID NO: 76432 - DNA, 411 bp, Glycine max
ctgcagcttgactataatggaagaaggctttttttttttcttccgtggacaaacgttttccttatggtacagatgagatcataagcgactccacaaacaagagcttcaaggtcaatggacatccacttaagccattcctcacaaacccttatggtacaattgatgacaatgtgttgttaagtataggggggagcgagttcttaggttttggttctgtagctgtgttaaattacttcaatttagttagctatgttgggttctagattaattatcgttcgttttgttgagttaaattatcatgcttttctttgaattatatgatatgctcaagtaatgggtaattgttctgaaaataaagcctcttgacatcttgtgattagaaatcctctgttttcctctacatgtcatgat

SEQ ID NO: 76433 - DNA, 125 bp, Glycine max
  unsure (1)..(125): unsure at all n locations
ccaagacattnataccattttaaacacatcacaaactacaagcaaatgcccaaagcattctcacacattttcatgaattgaatccatgtcctatttcacattttattaagttttacacatgcctt

SEQ ID NO: 76434 - DNA, 484 bp, Glycine max
  unsure (1)..(484): unsure at all n locations
agctataaaaacacaagcagaggcaganagaagtngattgtatcctctaattaantatnctctagagttgaatatcaccttttcaccatcagagttgacagtgtcattgttcgacggttggcaagtgcaccggatctcgcaagtagtataaaacggtaagaactgagtatcgaactctcggggaacttgttttacttggtaaagatgtggttcagtaagtaagcgtcttgttataaaaggtttatgtgtagtatggacacatgtgtaaactaactaaacaaaggtaaataaaaggtgagcagtggtgggtgcgaaggtagaatggtcaacatgtggtcttcctactatgcgactgatgctactaaagatgttctctacctaacagtgttcttgtgttctatgttgtctcctggactgctaaaccccgatgtctcatgcatgtttagcctaatcctagccaagcgtcatcctcagatccctcttg

SEQ ID NO: 76435 - DNA, 496 bp, Glycine max
  unsure (1)..(496): unsure at all n locations
acctatgaaactaagctctcggatctgtgtcatgtcatatcgagacatgtgtgtggtcattctattgtgtgactatccatgaatcaggttttctagataaaattgtccttatatagaacacgcaaggacactctgcgcttttattcaagcacaaacaacatactngttcgatatgctttcaacaacttttgaaagtctgatgcaccctcataacatattganttaatgccatttttaccgcatccttagtatcaaaatccatgccaacatataattcttgtccaacattcaaactcgatggcatcttcaaaccacaaatgtcttcctcatcatgatgactccagttgatattggtataatgtaaaacatcattccacaatggattgtcaattccttggacacctaatagttaccaaaaaattcaaatcatacttatttaacaattcttaattaatagaatcaaatcatacacctattctgtaattaaaataatata

SEQ ID NO: 76436 - DNA, 474 bp, Glycine max
  unsure (1)..(474): unsure at all n locations
agctgtcaaactcaggcaacacattctctgtctttgctcgacaaacctaaagttcacccttggtgagccctttctgtttctaagttccatcttcaaaggaactcgaggtacacaaggtctgtccttgacgatcttctttattcctagtttttatctgtctaggaatacgagtatatataaaacccaaggtctgcccttggtacagattcctccaaaacccaaggtccacccttggtacgtactcctgtaaaacccaaggcatcccctatgtccactcactcgcagcaaccatgacgaccacaatcaaaggtctaatgttaacaacacaaactaccaccaaactatttggcaaggcctttcaatcaggtggaagtcatacttgctcctcaaaaccatcagagaagaagcttcgcatgtcanaacgacccatcaccaaaatgagtgacaagacctctcatcaagtgcaactcatac

SEQ ID NO: 76437 - DNA, 386 bp, Glycine max
  unsure (1)..(386): unsure at all n locations
tactaagctattgcattgtaaagatattaaaggaaagtgtatcaactctttaaaacctnggctccaatactcatctaggaatgcgcatgtggatctattatggacatattgttgaaggtattttgtggaaaacataattttattcaatgtattcatgcatctttaattttcaaatgtcagtgaaaggcaaaagatactcacttaacacagttctctaaaaggtctaggatggnaaagaagttgatcagtaacggatgttaacctaatgtaatgagggaggggtaataatttgtctttaactaactattgaaaatggggcgagtaatggagaaaaaagaaacttaccaaaaatttgttgttgtatattaaaaaaggttatatttggc

SEQ ID NO: 76438 - DNA, 431 bp, Glycine max
  unsure (1)..(431): unsure at all n locations
gaagatcgatgatctatgaagaacgaatgaagaacgtctgagaacggttgaaacctttgcgagattcctcacggaaaacgttacggaaacgtttcggaagcgcctcggcttagattttcttcacggaaacaattnttccaagcaaattcgaaagagagagaagtgcctaaggggctggacccattccttcttgctttcctcccctatttatagcanaataggggaggtggttgccgcccagctcgcccaggcgagcagggttgcttcctccagaagcaaccgccttctggaggaatcttctggagggcccaaatgggcctgggtgctatntgcacccccattnttactaagtacacccccctctgctggtnntgtggaattcttcttcgtaaagtacggaaacttacgaattacgaacgatacttggtttc

SEQ ID NO: 76439 - DNA, 240 bp, Glycine max
cataagcctgaatcggacactcgcgtgaaacgatatcaccacttgaattacacgagagcctccgatgggacatttcgagcgtcagtatatatgatgcgcctgaatcgaacatccgcgagaaatgttatgacccttctaatttcgccagagcctccgatgtgacattcggagcgtatggatatatcatgcgcctgaatcgcacgtccgtgtgagaagctatgaccattggaattcctcgag

SEQ ID NO: 76440 - DNA, 183 bp, Glycine max
atccaagtgaatcgacaatgatcatgaactatgggtagacaataacgatgaccatgcattaatatctttgaacatgcgccccctatatctatatgcacgagatcaaaacaacatattgcatgtgaagtgctataacgaaagggtaatttcttatgtttcgcatagcaacatgtgttacataca

SEQ ID NO: 76441 - DNA, 319 bp, Glycine max
  unsure (1)..(319): unsure at all n locations
aagcccataatgagcaaggatacaaagaaatattattattatagaataatccatatacaaaagtgcccacaatttatgtcaaaggaaacacaagattgaaacttactggaacatacacacaacaacattcatcttaaatgcatgttagaaaggaaatctgacaacctaaaagcatcaatttttaggttagtgaaatgaacaagaaaaaagagtgaaggaaaggttaaggccagagataatgagaaggcanagggcaacctaatgtctttggcaattacagtatcaccctttgtagcccctagatgtcgcanaactacct

SEQ ID NO: 76442 - DNA, 383 bp, Glycine max
  unsure (1)..(383): unsure at all n locations
ctagagcaattcgccatcctcacccnttttcggagccccatgaatggcgtnttcgttcatgcgtccttcacccacgagtttggagtcgtccgtagtgaatgcttagtgcaattctccattctccatcctttttcggagccccatgaagtgcgttttcgttcatgcgtccttgacccacgagtttggagtcgtgcgtagtgattgcttagtgcaattctccattctcaatccttttacggagccccatgaattgcattttcgttcattcgtcctccacccacgagtttggagccgtgtgtagtgattgcttattgcaattctccatcctcaaccctttnttcgagccccatgaattgctgtttcgttcatgcgtcctccaccct

SEQ ID NO: 76443 - DNA, 390 bp, Glycine max
tactgatatgtaaaaatgggtagcctagatcaaactctatcttgagatcgttgagaccactattagtctaacggcgatgcatacgacctattcgcgagactataggactaacacaaggcgatccactatcaccttttgttttcaatatttgcaccatgggacatcccttcctcttgagaaaatcagaaaagagtggtgagtcacatggtatcaacgtgtgtagaggggctccaaccctcttacaccttttatttggtgatgattgttctttgttctgttagacagatgaaaaagaacacattgctcttaaatctatgttggactcctatggtgaaaattttggccaagcaataaactgtaaaataatccaagttctttttcagttataac

SEQ ID NO: 76444 - DNA, 403 bp, Glycine max
  unsure (1)..(403): unsure at all n locations
cacccgcctctgattaataaactctgaaatgggttcttcgaatgcaatccctctgatcttgcatcgggattctgaatgttctctctaatcccatnttcctttctcacttcgtcttccaactctcgtcngtgtgcaaaagccatctcactagcaatgatttctctcctgattntttccttctctagctctcgccatattntctccttctccaactctcgttggaatacttcgttgacattgatcggcatgaccattgngaaaactctaagcgctgaaacattgctaggaaagccacctgatgcaaagtcacaccctggaaattggattgtaatagaatgaattggtgacaaaagttttgtatttaaaccaaaaaacaaatgggtctattgatgaaaggaacatt

SEQ ID NO: 76445 - DNA, 456 bp, Glycine max
  unsure (1)..(456): unsure at all n locations
agcaccgagctgcagctaacaaataacatcaagtatatgtcatcactggtgngtagattaaacaagagaatctaaacttattgaaatttaaaaataatcgattttacattttttaaattattggggtgtgataaggtacagttgtatggttattgtttgcaaatcattatantttagttattagaaatgaatttgcaattgcaatattcttattaatgcttttcattttttttcgtcaacaagtgccatgttaactttagagcaattgttaacaagacttgattaataatcaaatccacaaattntagcccaataaatagttntgctaagaatataaatcaattcagtaaatntacttttgaatttattgcttgcttcatctaaaagtacttctttgaatttcaacaaggcttcgttaggttcaaatattccgttaactatgccatcataatacta

SEQ ID NO: 76446 - DNA, 338 bp, Glycine max
  unsure (1)..(338): unsure at all n locations
agcttctaaactntgtacaagaatgaagctctgataccacttgttagacaagtggcctcagatatcttaagaagannggggcnggttgaatctanatatcccctactggatcccctatattaaaaattatttcactttttacttaagttatgaattcccttaatgacactttttttaaatattagattagatgaaacaattcgattaggatttcgcagcagtatgaataaatgagattgagggaagagaaaatgctaacttagttttattctggttcggcccacccttgtgcctcgtcagtcccctccaacccgcttgagattccactattttttatt

SEQ ID NO: 76447 - DNA, 467 bp, Glycine max
  unsure (1)..(467): unsure at all n locations
atcctcagagtcacctgccgcatgcaagctntagtccgcttagctaatatatgcaatttatgtacatagaagctggcgctaagcgatcaatagcatcgcttagcgcatatactgccgcaagcgattgagctcagcgaccatgagtggcactaagctacagtgaatccagtttaaatcgcaagaatatccgcttagccagcagattatgcgctcagccccatggccctcaattctgactgcaaagaatagcgcttggcgacatagagtcgcgcttagccaagggaagctatcgctcagcgatcagtttgtcacttagtgcaattcaactcgaattgattttggcttagctaaaccttggttggcttagcgaaaataagcaaccttaggtgccaaggtggtgtgttaagcgcttgaactcgtggcttagtggcataagtgatatgcgcttagcgaanagcaggcactta

SEQ ID NO: 76448 - DNA, 429 bp, Glycine max
  unsure (1)..(429): unsure at all n locations
gcttatnccatgcctccttagcttgaaagatgatgaagaaagctttcttgtttctctttcttgaatcctttaaagtcttcttttgtgcttaggaaagtgaagtctcatcttgtcactccgtatagcctttttcaaccatttcctaaacatcatgtgtgatgcaatccgaccccccaagggcattggatagaagactccaagaagattaggctagagatgtaagagaaggtcctagggttctcatgagccttagggtagatttcaggcccacgggttaagtatgagtccacttatctttgtacatattagattaaggtttcattatttttgggccttgtatttagggctccataatgtaggtagggtaccctagaaatgtaggatttttcagcccttgtactntagggcacctagactagtttttgtatt

SEQ ID NO: 76449 - DNA, 451 bp, Glycine max
  unsure (1)..(451): unsure at all n locations
agcttcanantattagaaagtatactttttctagtggaagttatctttcagttatttagatgaaattttactcattaaaaaatttcatgattttgtttaaaactttntcgaaacaataataaattcaattcatttaattgttgtgaaattttattacttttaaatttagatcatataaaactatntttacattgnatcatccttaaattattttttatgttaaaaaatagttattaattttttatcattattaaatacgttctctctcactttgtatctctctctttatatataaagttttcttgtgaacctaggagataaggagagaaaaaaaaaagctttttaccgaataaaaaatgacaaaaataattgtctaataatagacacatgataaacaataagaaggatatgaanaagggaaataacatttatcaatcaagagaataaatga

SEQ ID NO: 76450 - DNA, 436 bp, Glycine max
  unsure (1)..(436): unsure at all n locations
agcttctaagtgattgttttatattttatattatctcttcattaaaatagtcttacgttactttattttaaataaaataaataaataaatttataaccataatatctttatcattaatttcccaaacagttaaagcatgtgtatgtattatttcacgcatgtaaaataaaataaaatattttttttcttattctggaattaattctaccaccggttggtacatttataagcttcggataatatttttttttatatcctatcgtcaatataatagtcttacgttactttattttaaataaaaaatagaaataaatttataagcataatgtctttatcattaatttcccaatcagttaaagcatgtgtatttattcttccactcatgtaaaataaaatanaatattttntcttattctaaagtgagatgatgtctata

SEQ ID NO: 76451 - DNA, 449 bp, Glycine max
  unsure (1)..(449): unsure at all n locations
agctntatcaaaataaattttgtttattgttatataatttattatcaaatttatgacacaaatcctcgtaaacaagaacttattaaatataggctaaatgatattttatagtttatcttatttttttaatttaatactagttcaataccccaaaatcacacataattaaatctacagtatagttataacatcacacataattttttggcacttgattggaaacttagaaaaggaaaactaaaattaatataaaataaaatatttcagataaagatgttaaaattgatttcaaaatcaagcaaaacacaacacattttatatgacaaattgtctattgacaaaatgataaatttaaaaagattgtttgtagcaagattccaaccagcatatctcanaaattacatcatgaagagttataaacaaaaatctacatatccaacaactataat

SEQ ID NO: 76452 - DNA, 419 bp, Glycine max
  unsure (1)..(419): unsure at all n locations
tggctagacatgatacatgttatggtttganttggttcaaggataaaagggatgccccacattatttccatgacacaaatgcaaaaatgatgaattggaaacttcatgcaaaactggtcatgcatgcacctatgtggacactcaagtgtcaaatttttatggtcatgtgatgcttaggctcaggaatcatttcctctattntaaatcaacccaatgtttccaaaatatgttcttttatccatttgtgcattcatccaagtccatttcgggcgtccggggaaatttcacagcattcacccttcaggtgtagacacatntttcaaaaattggttatgatcaatgaatttttttcaaagaaaagatggaaatcatctcttttcaaagcatgtcgtgttttaactagacaacttatttttctt

SEQ ID NO: 76453 - DNA, 235 bp, Glycine max
ctcccctacttcaaccccctgagctaaacgcttgcaataagcctgataaaccatgaaggtttgagcttgcttccttgactttcgttgcactggagttcgtttgggaacataccctttcttcatattggatttgttttttgttacagttgcacagcgtacctaaactactttaggcctggtgttgtatttctgtttcaaattgttgccatcgccgttctcttaaaattgatcactg

SEQ ID NO: 76454 - DNA, 435 bp, Glycine max
  unsure (1)..(435): unsure at all n locations
tagtctntgtgctcacaaaatcttatatagtgacctaattcggatgatgaagctggcatagcaactcaatttcattcaggtgattgcaacccatagaacttggcgacaccatngtagcaagctaatgagtcatcaactcttaactcagtgacactaccaagttggaggagaagcacagaataagacaagggattgggggtttggaagagagggttcgactcaacaaactccatggaatcaacaatgaccaaacaagactattggttcaagaccattcctctccaatccaaaagcctcagataacaatgaatcacanataaaatgaatctgtcatacctctaacatattcacaaaagaagacacatacccaactacaataataaagcataagcaccctcgaaacccagaattccaaattagttacataaagaacta

SEQ ID NO: 76455 - DNA, 262 bp, Glycine max
tctatcatctccacccttgttctttcaaaccacaattccagaaaatccacctctgcccaaaattatctcgtgaccataactcccatttcacacactcaaattaagtgattcttgagcctaaattgaatttcaaaacgagacctttcacctcgttttggaatcacctcatttggagctctgtagcttccgttattgccatttctatatttctgtccagccaccacttaacctacgttttaccatcccattcatcccatttatg

SEQ ID NO: 76456 - DNA, 438 bp, Glycine max
  unsure (1)..(438): unsure at all n locations
tgcagcttaagagttctaaaaaacttctgtttgtaatgctctacagaaccacacagtgatgctaactgcaaattatgacagactttgggttcattgatcgcataatcccttgatgaggcttgataatatcccttntagggggaaaaaaagattaagaaagttctagctctgtgatctaagcaggggcgggaaacagaaaaataagaaagttggtaaacctgaacatantttgatgcaaccattgcaggaatggcaacaatgagtactggccatgttactaaaaccattatataaatcgtcaccacaatatcaattgctacagatactacaaaggtgatggaataaggtatatcaaagttcanaatactcaaatctgctgaagcctgcaagagagtaaagatggatcaaaattttgagcatgattaaatagtaataaaa

SEQ ID NO: 76457 - DNA, 363 bp, Glycine max
gatgtaactcttcaaaaaggctttgactttttcaaatgggttttaagtcttctcaaaaggtataactcttctgaatggccttcttgaccagacatgaagagtctataaaagcaaggctctgttagcatttcgataacaatcattccaatctgtgaacacgtttttcaatgtcattcaaacaatcctatacaagccttgaatctctttgaactttgtcttcttctttgtgcccaaagctatttgaatttttctggtattctaaaccttgaaaacctgtgctattcatccttatcattctcttctcccattgccaaaaagaattcgccaaggactaaccacctgaattctgtttgtgctctcttc

SEQ ID NO: 76458 - DNA, 449 bp, Glycine max
  unsure (1)..(449): unsure at all n locations
cgctgcaacttatgaacctccgttttctaactcttanaactngagctattcattcttttcattttcttctccctctgccaaaaagaattcgccaaggactaacctcctgaattctttgtgtgtctctcttctcccttttccaaaagaacaaaggactaaccgcctgaattcttttgtgtctcccttctccgttgtcaaagaattcaaaacgacatagtctaagaattcttttgattcttcccattccctaatacaaaagcgttcaaaggtttaaccgcctgagaattcttttgtatccccattcacaaagtatcaaaggtttaacagcctgagatctttgtcttaacacattggagggtacatcctttgtggtacaagtagagggtacatctacttgggtttgactgagaacaagagagggtacatctcttgtggatcagttctagtgg

SEQ ID NO: 76459 - DNA, 444 bp, Glycine max
agcttgtaaagcatatacaagttctgtcattgtaatgtttgatagatctttagtattctccaaggatgcaatagtagcctcaaatctttcagggacagtcaccagtattttctcaactattcttaagtaaaaaaaaattagaaccaagccatcttactttgttagcaatgctaagaagcttgttagcatgctctttaattgttacagactccttcattttctgcatctcaaattctctaaccagatttagggcttgcattcctttaatccattcatctccttcgcattcattctggaggaaactccatattttatatgttgatttggtggtcatgattctagtgaaaatttcttttgagacagcagcaaacaaattagttcttgcctttcactatcttgctttcctttcttattgaatttttatcagagccattgctggattag

SEQ ID NO: 76460 - DNA, 446 bp, Glycine max
  unsure (1)..(446): unsure at all n locations
agcttcctcaagaagcctctatgcggcaagcacctccctttntccctataaataggggagggggctgtttcaaaaatattcatgacccctaagctatgcctttcagctattttgggcaaaaaaacacgttttcgtgaagaaaaatcgagtcgaagtgcttccataacgcttctgtaacgtttccgtaagcgattctgtggaaattcttcatcgttcttcaccgttcttcgtcgttcttcggtcttcaaccggtaagttcccaaaatcgaatctttcaattcattctatgcacccttagtggtccatacttgttttatgtactttcactttcagttcgcttactttcagttttcttttcttccatttttaacatgctttaaccgtttatttaagccgttttctcacctaataaatgataaaatgaatttcaaccgatcatttgtgat

SEQ ID NO: 76461 - DNA, 444 bp, Glycine max
agcttagcatccaactcctgatgatatgctctatgagtgcagatctggaatatgttcacaagttctccctctcctccaaaattattgtggtcttcagaaatgtattaagagtatcttcatcaaacttcactaagtgacctctcaccctcacttgcttaggtgatttatcctcgaggacataaagtatcgcataaaactcctttgcaatagcaatgactatgctactgtcaaaaaaatcaggcagcttctcatctcaatggcgtctctcgagctcctacttgaactcgccaaactctgagtaatagactatgacatttctctccgataatagcttccgaggcaccacaatgtcagagatcctatgtcgtacccgaatcacataaacatgaaaatgcactaactatgaagtgatcctatgtcgtatcccgacgagcagtgacaatc

SEQ ID NO: 76462 - DNA, 399 bp, Glycine max
  unsure (1)..(399): unsure at all n locations
catcctgctactgggagaggatcggngccccacaaagaanaatntcacagttacctatgggttgtggcaagagaaaaaattccaattgtccactccaattggaatcttgtcctggacgatcaaaagaacctaatatgggaagacatnttggtaagtggttttaacaacatgtatgtntatcattgtctttataagtcacttttaaatcaataatttagttactgttacataacacctttgatgtgcagtgcaaatttgacatccctgaacgtgacaatgcaaaaaaaaggtgatgtcaacaatcacaactagatggagggcaatttagtcttccttgacgtctaaatttgtctatgctgacaatgatggtcaacaaataagtgatcctactgtgaagta

SEQ ID NO: 76463 - DNA, 429 bp, Glycine max
  unsure (1)..(429): unsure at all n locations
agctntgatgatatggtctcaccgacgatttgatcaaagtgagtctaaaaagaggcaaatctgatcatcatactttgatanatgccaaaaaaactatggcaaatgaaaaggtgagaatgaggataacccatgctgtgactgccattcctatacagccaagtttcccaccaacccaacattgtcattactcagccaataacaaaccttctccttacccaccgcccagttatccacaaaggcaatccctaaatcaaccacaaagtttgtctaccgcacttccaatgacgaacaccacctttagcacaaaccaaaaacaccaaccaagaaatgaattntgcagcgagaaagcctgtagaattcaccccaattccaatgtcctatgctgacttgctcccatatctatttgataattcaatggtagccataacc

SEQ ID NO: 76464 - DNA, 443 bp, Glycine max
  unsure (1)..(443): unsure at all n locations
tttgtcaatatgatcatacttatcataagttctatctatggatcttagttcattaagaatggtttgaaagcatccgagcatacattgtatgtcttcattttctttcatagagaagagttcatacttatgagtgaggagattgagtttgttcctctttacttgtgacgttccttcatatgttacatccagagtgtctcacatttgtttggcacttctaaagttgtgtaccttggtgtattcttcttttgaaagatcacacaacatcacattctaagccttggagtttagcataaatctgagtctttgttcctccatccattgacctctangaatttcattcagttcatcatcatatggaatataatccccattntccaccacatcccatagatctgtatgaatcaattcanaggggctatcatatgcttcttctattaatcata

SEQ ID NO: 76465 - DNA, 231 bp, Glycine max
  unsure (1)..(231): unsure at all n locations
gcaccactggttactcccatggccaagtttgatccagaaatagtccttgagttttacgccaatgcttggccaacagaggagggcgtgcgtgacatgagatcctgngttaggggtcagtggatcccgttcgatgccgatgctatcagccagctcctgngatatccgatggtattggaagagggccaggaatgcgagtatggccagaggaggaaccggtctgatgggttcgat

SEQ ID NO: 76466 - DNA, 398 bp, Glycine max
  unsure (1)..(398): unsure at all n locations
tgctctaacattatgccgactatggaatttgttattgtcatcaagggatgtagttccattttcaccatatccatgaggttaatatgaatagaatcgagatgagttatcatactttccttctagtagccatactttgctcctctaatagtggagatttngtggtggagcacccttcttccatttctttcatttattaggatcttcctctgtatttgttagaatattcaacccaagaggtcgagctctgatgacaactaaaatacaataaatcacaatgccagtgtgttagataaacttagaacatattttgtaatggaaatgatnttcaggcaaaacaagttctcagaaaactatcgtctagtaacaaaactcaagtttcacaaaggtgctatggacta

SEQ ID NO: 76467 - DNA, 386 bp, Glycine max
tccgactcaccatataccttgacttatggtgagaatgtcaatccttaccctccgaagcaaaaaagaatagaggggaaatttccaatctaagaaaaagagaaggataatttccaatgaaagcaaaaaaagaaaagaaggaaaattccccaatcaaagagtgggagaaagcacaataagataagaaaggaaattcccaatcaaagaatgggagaaagcaaaaagaaaagaaagaaaattcccaatcaaagaatgggagaaagaaaaaaagagaaaagaaggaaagaaagctcctgatcaaggatcgaaagaaaacagaagaaatgtgcagagaggtctttggaccggacgatatctgaacaatacagaattgtcaccaaatgaacaaa

SEQ ID NO: 76468 - DNA, 387 bp, Glycine max
cgcgcgatgatggagagggttaccactactggaaaacccgaatgcaaatttctatcgcagctatatatataaatatctgggaagccatagaaatagggccttatgtgcccaccacagaatgacagagtctcaatcgatggtcgttcatcgagtgaaagcatcaccataggaaaacctacacacttatggtctgaataggatagaaaacgagtacaatacgacctaaaagccaaaaacataataacatctgccctatgaatggatgaatattacaaggtttcaaacagtgagagtgctgacgaaatgtgggacactcttcgagtacacatgaaggaactacgtatgttaaaagagctaggataaatgcactaactcatgagtatgaat

SEQ ID NO: 76469 - DNA, 447 bp, Glycine max
  unsure (1)..(447): unsure at all n locations
agcttgaatgctcattggagcttatatgcatgttatttacacacaaagggaaagggagagataactgaccaaatcttttcatggctattcttccagaagaacgctcccctgatgtagtttcgtttatagcttggaccatctcatttttgctgacatatccatccttgttcttgtctaagaatacaaatgtatcaaccaaagtctcaaatgtgccctccagctttggcatcccaattcgtgatttctagggaagtcatggaaaaaaatttgaagatgtagcaaaacatggaaattcaaggtttattgttatcaatgcaagcatgatgaaattctaggctgccctgaagaaatgcatgaaatgtccataaaataaaataaaaaaggaatgaacatatagaattgaattgttcataaagtacaaacatcttctgaattataganatgata

SEQ ID NO: 76470 - DNA, 451 bp, Glycine max
  unsure (1)..(451): unsure at all n locations
agcttcccagatccgatcatggaatgacttgtcaactgccttcattaggcagtaccagtacaatacagatatggctcccgatcggaaccagcttcagagtatgactaagcgagagcatgagtccattaaggaatatgcccaaagatggagagatctcgcagcccaagtcataccgcccatgacggagagggagatgatcacaattatggtagatacgttacccacgttctactatgaaaagctgataagctacatgccagctaactttgcggatctcatcttcgccggagaaaggattgaatccggactacgaaaaggcaagttcgaatatgcttccaatgtggcccccaacaacaacagaagagccctagtagtgggcgcgaggaaaaaggaaggagacgcccacgcggtcatcaccgccccgatgtggatgaaagcaccccanaatatt

SEQ ID NO: 76471 - DNA, 446 bp, Glycine max
  unsure (1)..(446): unsure at all n locations
agcttggtaatcgattacaccctcttggtaatcgattaccagaagccctcatggcttcctgacctcgttttcaagcctggtaatcgattacaccccgtggtaatcgattaccagagaccatcttagcctcctgtcttcacttttaagccttgtaatcgattacccacccttggtaatcgattaccagaggccataatccacatatcacacataattcacagctggccagccaccacaagcctccttgctttgtggtctttgttccttttagctgttgactgccaggagctcgcctgtttaggtacatcacaggttctcactgaccgactatgcccgggttgggtcgggattggtcaagcttggttttgggcaatagcaccccacctgacgtccccaaggtctcctgacccccgcgacatatctncaggtaccactctgtggtcaac

SEQ ID NO: 76472 - DNA, 447 bp, Glycine max
  unsure (1)..(447): unsure at all n locations
agcttgaagaggatgctntaatggaggattatatagagagaaggggggagcactaaattgaaggaataaaagagggagagaagtgaaactttgaagtgtgtctcataagactttcattcatcaaagttacaacaagtgttacacatgcttttctttacagactaggtagcttccttgagaagctttcttgagaaaacttccttgagaagctagagcttagctacacacacccatctaataaccaagctgacctccttgagaggcttccttgagaagattcctaaagaagctagagcttagctacacacacctctctaatagctaagctcacctccttgagatgagaagctagagctttgctacacaccccctataatagctaagctcacccccattccaaaaatacatgaaaatacaaaagagagttcctactacaaagactactca

SEQ ID NO: 76473 - DNA, 390 bp, Glycine max
  unsure (1)..(390): unsure at all n locations
ctgcagctctagtcgtcatagacctcctctgtgtacngtctagcaaacgttgcatctgtgcattcatcgcatccactaacagacgttgagcgccgtcaactgatggtactcgtcaccaccatggtagacgccactctcagtgaaggaagataagtctgggtagacgccacttggcagaaatgaagataagtgagggtagacgccacattgaacgaaggaagatactcttgggtagactcctcaaagattacctggataagcttgataattgatgaacaccgaaccgagagagaaactcgaaccaagctataatagaatggcatgagtccactttattggaaacgaagaccaatactggtagacgccacttaacagagaaagaagaataga

SEQ ID NO: 76474 - DNA, 384 bp, Glycine max
  unsure (1)..(384): unsure at all n locations
agcttgtatcatattcaaacgacaataactttntactcggatgtctgattgagtcccgtaatatatcgagacgctgaaaattttaatccgaagctctaagaaaattgaattgacaataactttatacacggatgtccggttgagtcctttaatatatcgagacgctccaaattgaaaacggaagctcgtaggaaattcaaacgacaataactttttactcggatgtccgattgaatcgggtaatatatcgagacgctcaaaattgagactagaagctctaagcaaattgaaatgacaataactttatacacggatgcgggtgagtgccgtgatatatatagacactccccattgagaaagcggactctttgagaatcaaacgac

SEQ ID NO: 76475 - DNA, 393 bp, Glycine max
  unsure (1)..(393): unsure at all n locations
ctgatgaattaccaatgtcgagtccccgtataccttgagtaacttgaccctanagtcggccactgctcagatccctagggcacatgccttatactccgcatgttgtttgtgcagtcgaaacacaacatagccatgaaaggtatatattgcttatccggngaaaccaatattgccccaatcccatggcctagtgcattagacgccctgtcaaaccacacaacccatttatccttgtcctcttcttcaacctcctcctcatacaaggccataatatcctcgtcagggaaatttttatgcataggctgataatcatttatgggttgttgggctagatagtctgccaaggcacttccttttattgccttctaagtgacatagacaatatcnaattct

SEQ ID NO: 76476 - DNA, 342 bp, Glycine max
atcgttaattctgccaattttttccctctcaatagatgtcagtatgtgtggttcacatgagaaacaacaaagatatctaagagtgtagttataatttatagccctggctattatttcaatattaaacatagagatgtgtagcacaggacgccagatctattaaatgaatctgtttgacatgtatggttatgcttttaatggaccagtcaggaggttgtttaagaaaacttcatagcagatcagtctaaggattgtagaatttgattccataatccttctagttagttaatattggcttaattcatatgatatttctttatgcttcttgaagccttcaaattc

SEQ ID NO: 76477 - DNA, 448 bp, Glycine max
  unsure (1)..(448): unsure at all n locations
agcttagtaagactgaagtcagatcttctattatattgataggaaagaatacttcaaccccataactntggaggtgcaggactctacataatntagcaaccatcaacttactatacccgctaaccaccttaattctatatgatggaattatattcctttcagtttgtaagtatagaaaagtatatgatttatatttcttagaaaattttcttttgttgtaggtagtatgttgaggcaaaaagttacgaagtaaattcttgtttcacaagcgtcggagttgactttgttgtgtttggtttgccactgctctgatcccactcgtacgtcttgttattgaccatatttgtctggtatatatttgtttgactcacaccaatgataattacatggttatttatatatcaattntgtgttatataagtaattatgtgccttgtgagtgaacctt

SEQ ID NO: 76478 - DNA, 426 bp, Glycine max
  unsure (1)..(426): unsure at all n locations
anngcttgcggattggtcttcgccggtgaattgatcaaagtgggtttggaaagaggcaaatctgatcatcctgctttgatgaatgcaaaaactgnggcaaatgaagaggatgagaatgagggagaaacccttgctatgactgccattcctacacggtcaaatttcccatcagcccaataatgtcattactcagccaataacagttcctttcacccaatcatccataaaagccatccccaaatcagccataatgcctgcctgctcagcacacgcccaatgcccaaacaccacctatagcgcaaaccaaaaaggaattttgcacaaaaagcctgtaggatttgccccaaatttcggtgtcatatgctaacttgctcccatatctacttgataatgcaatggtagccataagccctgccagggttcctc

SEQ ID NO: 76479 - DNA, 449 bp, Glycine max
  unsure (1)..(449): unsure at all n locations
agctntgtctgtaagtgccatcttcttttttctaagtgcaatgcataaatactcatcaacaaatgagttcatgtatttggtttattagtttcaccttaaactttttgtttcatggatgtagatagtggaacttaaggtgcatatggattgccaaggatgtgaagaaagaattagaagggcaatctccaaattgaatggcaagaaccatgcatgcacacattgccctttaatttttcttgtctatttgtctttggaatacacaatctgatgcaaactctagatatctgtccctacaaacaattacacaatatgtttaaaatgattaaattaaccgtcaaactttccaatctttcaattttatatgatttgcttagttttcattttcatagataattgactaattattacgcgtcaccatgttagggtgctgatttaattatgtataaata

SEQ ID NO: 76480 - DNA, 433 bp, Glycine max
  unsure (1)..(433): unsure at all n locations
agctntntcttacccctagctcgcctaggctagcctctggctcgcttgggctctcaaataacttaggagtgaagtaaccagctcggctgaggcgcttccaaatcgcaaccgtgatcgattctcacatcattctacaccgttctccgttcgttctttgttcgtcaaccggttagtatttattntaaggttttaaattcactctatgcacccttaggggtcatctttgttgctttgcacatcttcatctcattcttctaccatcaatgatctcgtttctttatgtaaagcaaatttcaaccgattgtttgtaccntaatctcattttatcattctaaaaataaagtttcaaccgatcatttactntacaagtcatcatttaactaaatntaaagtaaataaatgaaaccaaagctaaaatcaacatgtaaccgag

SEQ ID NO: 76481 - DNA, 445 bp, Glycine max
  unsure (1)..(445): unsure at all n locations
ctgcagctttgtttactaacatttacacctttctagaagacattataagaattttttaattattgggtggatccacacaccacgtgataaacttaataattcatatttcaattaaaataagtcttatatgagtacccttgaggagaaacgatatgtccagcttttatctctatgggtntttatttagntgggagaacttttcacatactaggtggtggatctctggcattttattttctgaaatttataaataaactgcacaaaatctcattcattaaaatttgtttttttttttttttgtaaaatagtataattacaagcattggaaagtaacttattaatcttacaaatcaaaactacgaatagttatttttataatgtattaactgtatatttatttcaaattattntaagaaaatattnttttacagttgtcttgagaata

SEQ ID NO: 76482 - DNA, 437 bp, Glycine max
  unsure (1)..(437): unsure at all n locations
ggacttaagcaccgagctgcgctttaacttgttcaaacttgtttttacagtggaaatctgcagaaaaacaaagtgtgctatcttttcatcccttctccctcttgccaatgattcaaaggactaaccgccgagaattcttttgaattttccttccccctctcgaaaaaatattcaaaagactaaccgtctgagaattctnttgattcttccctttcccttaaacaaaagatttcaaggactaattgcctgaggtatcttttgtttccccttacaaagattctagggactaaccgcctaagaattctttgtcttaacacatttgagcatacatcctttgtggtacaagtagagcgtacatctacttgagttgtaatactgagaacaagagatggtacatctcttgtggatcagttcaagtggagcgtacatccacttgg

SEQ ID NO: 76483 - DNA, 435 bp, Glycine max
  unsure (1)..(435): unsure at all n locations
aagcactgagctgcagcttatcctagtgntatgtgctcccctatctctaacanagataacattagccacaacatcattcttagccaaatcaaatcccgaggagaagctggtcatatacctcttggtctccaatgaaattgtgagtgcggccgtcgtttangagcatggagaagttcanaaaccaatttatttaataacttgagtccaacacgagactgagaccaaataccaactcatagagaaagttgtgctagctttggttcatgtggcaagacgactttagaaatatttccaaagtcgcttagtagttgttagaaccacatgttctatttcaaaggtgttaaggaagcttgagctagtangaagaatgatagcatgtgattgaggccgtacccgtatcaaataaacattaaaaatgcaatatctatgaagtga

SEQ ID NO: 76484 - DNA, 257 bp, Glycine max
caacatccaatcaaaacatcattcagacagcacaagctatcggagcccagcaaaacagagcaaaggcagaaaactctgctcaacacatcaaccaaaatcacagcttttctcacttaaagaccacagtaacaattccttcgatccaattcgttaagccgtggatcgactcctaaaatttactggaagtctatagtacataagcctacattatgaccgttgggatctactagcagacatccagaactcattctgcacta

SEQ ID NO: 76485 - DNA, 453 bp, Glycine max
  unsure (1)..(453): unsure at all n locations
agctntatagcagatgccactctactccaaattcttgaatgatatgttaacaaggaaacataagtacattcaccaggaaaacattatagtggaaagaaatgtagcactgtgattcaaaagatccttcgcctaagcataaagaccctgtgagtgtaactattccttgttcaattagagaagtcactgtgggaaatactcttattgacttangagccagtataaatttaatgccactctccatgtgtagaaggttgggagagctggagatcatgcccactaaaatgactntacaattggctgatcgctccattaccagaccatatggagtaattgaagatgtgctggtcagagtngaaacatttatcttcctggcagactntgtggtaattgatatctgtgaagatactgacattcttgtaatattgggaaggccattcatgttaactgcaagct

SEQ ID NO: 76486 - DNA, 427 bp, Glycine max
  unsure (1)..(427): unsure at all n locations
gcgtaagcgcgagggtggcgcttagcgcaacatcgcanattatagcctatntanagcctgtcttgtgcagaattangggacattttttacacacacttttacagacttttagacagaatgtangcagaagaaaggcacagattctagagcacaccacaatgcctatttggggaaaagagccctagaagcatcaagaagagcagcttgtgcattgaaacctangttttgtaagattattattgtttgggtttctttgtaatggttggctaagcaccctagtaggggatttataatgaacaactaatgtaaatacctaatatctaattgattatgttttttgtgttcaatgcttaatgtttgtatgcctttggtctgatcatccatttgtgtgcataagtaggtgactttagcattgngaaatgtactg

SEQ ID NO: 76487 - DNA, 439 bp, Glycine max
  unsure (1)..(439): unsure at all n locations
cctgagctgcagctatgtttcaatacgagcgtctcgatatcctcggtacacnaatggacatccgagtgaaaagtattgtcgtttgaatatgtttagagcttctggtttcaattacgagcgtttgaatatcctacgggacaaaatcggaaatccgagttaaaagttattgtcgttagaattttctcattgctntccgtttcaattaaaagcatcttgatatcctacgggacacaatcgaaaatccgagtcaaaagttattgtcgtttgaatttgctaggagcttcagttttcaattacgagcgtctagatatattacaagactcaatcagacatccgagttaaaagttattgtcgtttgacttttctgagagcttcagttttgaatgtcgagcgtctcgatatattacagggctcaattggacatccgagttaaaagtta

SEQ ID NO: 76488 - DNA, 407 bp, Glycine max
  unsure (1)..(407): unsure at all n locations
tctcaaaaatcaaaatggggagggaagagtaaaatatatatacttttctaataaatccagctaacattgtgattgtgtcttgtcaactactaccaacgatgcatgagtaataatctagctatctaattatttgctatctccatctgtatntactggaggtatatatgtggggcgctgatgcaatttcgggtttgctagggttatgcagtatttgtacttactgtttggtacgaagatcatatccattaaccttaggctttacctttgatctgtactgaaacatgattatgatttaggtaccactgatttaggtaccagttatattaataacctttttgctgataaaaaaattatacttacaattggaagcagataanaaaataattacaattggaagagactcaaat

SEQ ID NO: 76489 - DNA, 437 bp, Glycine max
  unsure (1)..(437): unsure at all n locations
agctntgaacaatatactnggtcttcatttaactgtctntgcgctnggcggccacgctcaacanagtattttcgacacctactgtacgttgatttgaccaatgctgttatgggaatgtttcgacaatccttcaaaaccttattgatacattctgaaaggttggttgtcatgtggccatatcgacgtccttctctatcataagccatcgtccattnttcctttgaaattcgatcaacccatgtggctatggctggactcagttcacgaaatttttgtaaattctgatcaaaaatgtgcttgcaaggagtgtaggctgcataaaaatagttatgaataacaattttaagtatataggaaacttaaataaacgtcaccatcaaataggaaatcttaccncaatttttcaacatttctttttgtttggcattatttgaatt

SEQ ID NO: 76490 - DNA, 452 bp, Glycine max
  unsure (1)..(452): unsure at all n locations
agcttctatataagctgaaccattttatcaataaacacaagttgagntttattcagaanattagagtttatctcttttatcttagtgagagtgattctcctaaattcttgagtgattcaagaacaccctggctgtatcaaaggactttcacaacctttgtgtgttgccctcgctggaaagagtgattctttccttcctatcatctccacccttgttctttcaaaccacaattccagaaaatccacctctgcccaaaattatctcgtgaccataactcccatttcacacactcaaattaagtgattcttgagcctaaattgaatttcaaaacgagacctttcacctcgttttggaatcacctcatttggagccctgtagcttccgttattgccatttctatatttctgtccagccaccacttaacctacgttntaccatcccattcatccatt

SEQ ID NO: 76491 - DNA, 439 bp, Glycine max
  unsure (1)..(439): unsure at all n locations
agcttgtaatcgattacacatatactgtaatcgattaccaaaacagatnttcagaaaatattctcaacagtcacatctttntatgtggttcttgaatggctatcaaaggcctatatatatgtgacttgagacacgaatttactaagagtttttcagaacaaaaaggtcttatcttcttataaagcanaatcgttttatcctcttacaaattccttggccaaattacttgtgattcaataaggaattatttgagtgctcaaattgttcaatctatctctttcaagagagatttcttcttttcttcttcttcattttgaaaagggattaagagaccgagggtctcttgttgtgaaagaattctaaacacaaaggaagggttgtccttgtgtgtttagaacttgtaaaaggaatttacaagatagtggaactctcaagcggg

SEQ ID NO: 76492 - DNA, 420 bp, Glycine max
  unsure (1)..(420): unsure at all n locations
agcttctaaagggtactcatatacaatntatatggtacgatatgatgttcatgtatggagttggattgtagcattaatgcataaggaattagaacaaaaatggagcaacctaaattgacaagataaagccaaaactaatgccaacaatatgaattgctctgatggttcactgcagggggatcaattcctacatctaagcantttaagagactagtaagtaatagctatatttatgtttatatttcttaggaagaacattataatttacagttgtttacatattttatttccattttttttttttgcagatatgactccaacatgctaggagctatttcagaagatccataagattgctaagggtaattcatgggtgtcctctaaggcataaatgaattgtgtaagttacatagtcttata

SEQ ID NO: 76493 - DNA, 444 bp, Glycine max
  unsure (1)..(444): unsure at all n locations
agctngtattttaaataagccttgtgtattttatatgaaataataaattaatattattttaactcattttacccttttctaaatacatccttacttataaaaatctttatatttttttcaactgtgaattcatgatagtgtattggtgctgtacgtattcaccacgtgtcactttatgaatcatgtgatatttattgaagcagtttcgatacgggcatcttgctatttcgatgaaagaatctcataaagtagtgaatcgatcgaaagcgtagagattgacatgaaatttacacgcatatgtagtactttatttttttaaggagttaaaaggaggaattaaaggaaatgcacgaagtatattacaaattgtgcactttttttacatatcgngtaactntattaattaaattacaacatttcaactatagctttacaaataatctc

SEQ ID NO: 76494 - DNA, 427 bp, Glycine max
  unsure (1)..(427): unsure at all n locations
agcttgatatcgatngtacatatactggtatcgattaccagagaagattgtcagaaaaatattctcaacagtcacatgtttgtactaggttcttgaatggccatcaaaggcttatatatatgtgacttgagacacgaatttaaaaagagattttcagaacaaaaaggtcttatcctcttaaaaagcaaaatcgttgtatcctcttacaaattccttggctaaaacacttgtgattcaataaggaattatttgagtgctcaaattgatcaatctatctctttcaagagagattacttcttttcttcctcttcattctaaaaagggattaagagaccgagggtctcttgttgtgaaagaattctaaacacanatgaagggttgtccttgtgtgttagaacttgaaaaggaattacaagatagtggaact

SEQ ID NO: 76495 - DNA, 427 bp, Glycine max
  unsure (1)..(427): unsure at all n locations
gcaagctaacattcactntgagcgtctcgtatattacnggactcaatcaaacatccgagtaaaaagttattgtcgtatgaattggcttanagcctaaacattcaactttgagcgtctcgatatattacgggactcaatcagacatccgagtaaaaagttattgtcgtttgaattagctcaaaggttcaaaattcaatttcgagcgtctcgttatattacgggactcaatcagacatccgagtaaaaagttattgtcgtttgaattggctcagagggtcaacattcaattttgagagtctcaatatattatgggactcaatcagacatccgaagtaaaagttattgtcgtttgaattggcgcatacggtcaacattcaatttcgagcggctcgatatataacgggacctcatcagacatccgagtaaa

SEQ ID NO: 76496 - DNA, 433 bp, Glycine max
  unsure (1)..(433): unsure at all n locations
ctaaactaagtttttttaacaaaaacaatgaggagcttgccagtgtccccacgaaatgaaaacctttattcaaccctttcaaagtagtgagaaagcctaacggaaattatgggaacttagaaaaaactaaatcctttaactgagggtgtangtgacaatcatagtgaattactaaacaagaatggtagtttactaaaggtcattccagatactccccanacctcggaaaatacttccaaaatggtaacaagaagtacctccaaattaattaatgttataaatgaagatagtgaccaaacctcagataacacaactgagataggatcagtgtcagaaaagaatataaatccaattaattccaaacactggaaaacacccttccaaatatattaccaacgtccaactgcccctgaccttctattagaagaaagag

SEQ ID NO: 76497 - DNA, 455 bp, Glycine max
  unsure (1)..(455): unsure at all n locations
agcttcatactntnttatagttngaattcatgtactagttactttaagacattaatntaataatatagataaaccaacgcttaaatatttttagttcctattatntttataattntaatccttaaaatattttattttaattgttgtcattaaagtgattatgttaaaaagataatatgatactaaagtatcacatcattgcctcatatgtcattcatgtagacatatgtgtcacacacatatcacatgttattatgttcacacaaagattaaaatgataataattntacaaagattaaaatgacaattcccaaaattgtacgagctaaactaattttaaatatgggatttcttgagatttttttcttattaatctttattgttggctgaaatgaattatttctaaattataaaagaagattattaatggtnttaaccggcanatatacgttaat

SEQ ID NO: 76498 - DNA, 389 bp, Glycine max
tcctgactcaccatatactctgacctattgtgagaatgtcaatccttaccctcggaagcaaaaaagaatagaggggaaatttccaatcaaagaaaaagagaaggaaaatttccaatgatagcaaaaaaagaataagaaggaaaattccccaatcaaagagtgggagaaagcaaaaaaagaaaagataggaaattcccaatcaaagaatgggagagagcaaaaagaaaagaaagaaaattcccaatcaaagaatgggagaaagaaaaaaagagaaaagaaggaaagaaagctcctgatcaaggatcgaaagaaaacagaagaaatgtgcagagaggtctttggaccggacgatatctgaacaatacagaattgtcaccaaatgaacaaaa

SEQ ID NO: 76499 - DNA, 391 bp, Glycine max
cgcacttaaacaaagctacattttatttttggatagacgctaccaaataacccagctttggcacatctgggaaacccccagatatatgatgaggtctatttcacaaagaaaacatcacttcaattaactttcaaactatcatgacatgtagagaagaatcaaggatttcaagtcacaaaaagtcaagaacttttattttctaaacaattacccatttctgaacatattctataatcaaaaaaaaacatgcaaagtcgtacgtgccccgaaattgacccaaaatatttaactgaaattccacggaactaacaacactaacaattaacacaacttacagataacaaaaccacccaacttgctaacccaagacactcccccccccccatcttaa

SEQ ID NO: 76500 - DNA, 398 bp, Glycine max
  unsure (1)..(398): unsure at all n locations
tatctccctatgtacctatggaaccgaccaacttgcgcatntatcgctttcatatatctgtggnggcccatgtcctcagttggactctatatataagccttcaacttggacttaagtacatcacaatgactaaattaaaaaaaaaaaaaaaactatccttatcagacattcataataattttatctaactgattaaaaatgtttttagtaaaaataaatatatatgatctaaaaaaaaagagtaatatgaatcaaatatccttactgtcactttttttggcttgatttttgttnttgctttgaaaataattcaaccattatatttaatatcattatcttattaatttggtgtataactctagaatgcgaggaagtgatttcttcctctgagaatctgc

SEQ ID NO: 76501 - DNA, 446 bp, Glycine max
  unsure (1)..(446): unsure at all n locations
agcttgtttcctannatttattagttgtacttattcatttcatgcanaatttatatcaaatactatgttntaaaacataaggaacttaatttcatggtcaaaatctatagaaatcaagcctatatgtacaattcattcaaaacagggcatgatttaccgaaaaagcacaaaacttganattatggttccataggctatactaactcaaatggttgtatttatgtctaaccctaggttattggacccaataatttcaattttaaggtccatatcaacagattccaattccaatttcaaaagttctgaaaaacatagcatgagaagcacatattttgccctaacttgaaagttaaattcccaaggctacacaactccaaatgagacatatcatgtatgattntgaggttnttggggtcaaggaactcaactntgatacccaaattcat

SEQ ID NO: 76502 - DNA, 381 bp, Glycine max
  unsure (1)..(381): unsure at all n locations
agctntattggaaggggcttcacgttgtctattttgttaggaagcccaacattgcgtgtcaaagactcgtcaatattttcgtcattctcaatcttggaaggggattttacatcaacttccaccatctttggccttgttgccttctggggtttcatagcacgcttgccagcagttcggctgcgagaatcctttatatcggaattgggttttgtcaatatagtcaccgttggctcagaaccttccaatggttccgagtgttccttttccattgctatcgttgcagcctgatatgcaagatcatggatgatagagctgcaaaaaagtatagtatttgttgcctcttcaagtgtcagggttctagcattttctccatcttgacac

SEQ ID NO: 76503 - DNA, 354 bp, Glycine max
  unsure (1)..(354): unsure at all n locations
agctntgatgatagaggatgttctaacatatgttggcaatcaattcgcggggctccggactcaatggtggatgattcatgaacgaaaatcaattcatggggctgcgaataagatggtggaggatgcacaaacaacattaggcaatcaattcgtgggtctctggactcaatggtggaggatgcatacacgacaatcaaattatggggctccgagtaagatttaatgatggaggatgcactatcagtgctatgcaatcaatttgtggggctctggactcaatggtgtaggatgcgtaaacgacaatcaattcatggggctgcacataatatgctggatgatgcacgaacagcacta

SEQ ID NO: 76504 - DNA, 462 bp, Glycine max
  unsure (1)..(462): unsure at all n locations
gggatccttgagtcacctgcggcatgcaagctntccaagcccatccattatcatctactttacacttggaagaaatgatttttaatttattggatgagtaccatagtttgatgaacctgcaagtagcaaccctccacctgaagctgcatagacatcatgagaacgatccaccattggagatgaagatgaaattccatttctaccaccatcacttacacttgtaacatttccaccgccaccaccactcaaatgtaattcagataaattagggtacccttctttgtcctcaaccccttgatcatagagaaaccctttgaagacatggccaccaatcttcacaactgcttgatacgcatactcatcttccccaccatcatccactgatgttacacgaacacacttgaacactgctggtgcacgcacttgacttggtagtgactccttgaaacccacatctgaaaa

SEQ ID NO: 76505 - DNA, 463 bp, Glycine max
  unsure (1)..(463): unsure at all n locations
atccctacagtcgacctccggctgcagcttatgtttctaaaaagaatagactttatatatgttanatntattgtgatagatatttgatctttatttcttttgtacatagacaccttgactttaaattcatttcaatttatctttaaaatttatcctttttacaatttttaagttacttatctaaatattatcccttcattattgntttttttgttacaactcatgattctatacttaaaatataataaagaatatgaacattgaaaatataaaaggggaaataataacattattaaaaaaatattttattctttaatgataaaatttattatgttttaatgattggaaaatttatttatagaaataagattaataaataattaacattaaataaataaacagttttttttntggtagtagtttaactccaaagccaatttcatataagagaatatttattaaa

SEQ ID NO: 76506 - DNA, 435 bp, Glycine max
  unsure (1)..(435): unsure at all n locations
agctngtttcttgagctgcatnaatcaaaattccacannnaatttctttccgttatactataagttctagaaaaagtgtgaaggggaatacnaaggaaaatatttaaaaatacccgcgaatccttgtttctctaatcttgaacacctcactactttntgacttcactgaatccaagctaggctaaaagttggtgcanaattaatgggtctgagaatctgagccaagccattcatcagattttcgttacgttattccttgttgcagataaagtgccaatcacatcgagttttctgtttcagaataccttcaattcaaacgcattggctctgcaccagatgccaacctcatcacctccttaacctattcaacaccacaaattcacattatnttttttttgtctctgattcccagaagtaacgagatagttcaaaagt

SEQ ID NO: 76507 - DNA, 418 bp, Glycine max
  unsure (1)..(418): unsure at all n locations
agcctatttaacagtattanttctaattattaagtgccanaattataaaggacaaaagacctgagcattntcttcagcatcagcttcacgaanacgacgacttcggctgcagactaagcccatgttatctgttacaaagaagatgcattgatcaagctccaccagaaaccgttgnnttcaatttcaatactctcctttattgcatacttgcattatgcagcatttatcgtagcttatttagacttgtggaagtagcttattatgacatttctattaaaactctatttattagttcaataaacttcctggtaaaacttaacaaattatgttctttttaaattagttttaactaattaacgacataagttctttttaactaattatactagtcttcacaatcaagcttataaacaaattc

SEQ ID NO: 76508 - DNA, 431 bp, Glycine max
  unsure (1)..(431): unsure at all n locations
cctaataataaanattgtaatgacanattcacaagaggagggtgaatatgatttagaaatggcaaactttcttttcaacaacaaagttatcgtttgaagtataagtttagcaaaacaaataatagattttcgtaagaaagattagacgatagaaatggaatttgcanaacaaaataagtttttcaaaaaatataatcaaattcaaaccccaggtcagtttanaacaagagatcaacaaaaagatataagacattgatatttatactgatttgtctttatcactaagactatgtctagcttttggttaaccatcaagttccatgaattttaacaagttataagtattntgtcactgtcacttctggctcttacctcttaaactctatgctaagcttgacacaacccagtattctttatcctatanagctatt

SEQ ID NO: 76509 - DNA, 386 bp, Glycine max
tgcaagcttttgttcatgtgcctaaaaattacaatgcttttcggctaggtttcttcgggcgaactgaaccgaagttgtgtttcggccgactggcatgttcttcatttgtcggccaggataacattagcccacctcggcataaaaaacatgattcaccgatattgacaagaaaagaaaaatgctagccgacgtcggccaggaaagatgaccgaccgaggtctgaaaaagaagcatgaccggatgactccggtcgaacatttcctaacagatatcatccaagtattattcagggattgaatagaaaaaacaatagccgacatcggtagttaaatagccgtgactgatatttttcggccgacattgcgcaatttcttttacaaacgctg

SEQ ID NO: 76510 - DNA, 411 bp, Glycine max
  unsure (1)..(411): unsure at all n locations
gcgctgcagctaagctcccactactcttattgttatacattactaagaatgagccttacaatataaaaaaaaaagagtgttgtccgcatatnggagtaaattagcctcaactttgaggttccccaccaaatagctagaaaagagtattttcttaattgcttgtctcatcatcccactgaagccttcactacatttgtaaaaagaaatagggctaaaggatcgccttttctcaaccctttttgtgctacgaactcagaagtagggcttccattaaccaacaccgaaatattatttgattgaagccaaaccttaatccaaccaatccacttatcaccaaagcccaacctcctaagcttgtagaacaataaatcccaacacaccaaatcattggctttctcaaaatttgctttg

SEQ ID NO: 76511 - DNA, 319 bp, Glycine max
tgaatggttcgttcagtctgaccatctgtttgaggatgataagctgaactaagctttagctttgtccccaaggcctcatgtagactcgtccaaaatcgcgaagtgaaccttggatccctgtcagatacaatactagaaggaattccatgcaaccttactacttccttgatgtacaactccactagcttttccattctatacttcatattcaccggaataaaatgagcagatttggtgagtcgatctactatgacccacacggcatcatgcccacgactagtcttgggtaaactagatacaaaatccatagatatgctct

SEQ ID NO: 76512 - DNA, 364 bp, Glycine max
  unsure (1)..(364): unsure at all n locations
gagctacatcggttctaataatgaggagctnacttttcatactattgatcatgtgcatgatcaaggaccttgctggggaccagatcccatcaatggattccctcatcactagacttctacgcgtgcctcatatattgaaggatgagaatcctactgatggagaggagacgtcactcatggttgcgtctcgagggacagcgaacggtcgtatcattagaggatgttgcagagtatgggctgggcgtactcattgcggctattgcaagaggatatgtcacacccaagagacttgctatgcattacatgggtatgctgacatggtcgcacaagtttcttattcagagaaagctgagaccatattctc

SEQ ID NO: 76513 - DNA, 449 bp, Glycine max
  unsure (1)..(449): unsure at all n locations
agcttgttacgtgtctntctacagaataaattttagtatgatgtgtatatgtcaatcagtagatatcttatngtgaagatcctagaatgctngccttgaccgaaggtggtcatcaagtccacatagcctctggtctctaccatctcacttgtaaagtcaaggaatggaccggcatgaggatggacaatgttgggggagatgtctctggaaagttttccaatataggatatcaatagaactaccctggtcgataaggaccctagacaccatgaagtttggaataatgatggagacaaccacgaggtcgtcttggttgatggggttgatacccttgaagtccctatctgtaaagtgataggagggaaacttcgttgtagtggtgcgtcaacaaaattaatgttgatgtttcggatagcatatagatgacatttntgggactggtaggactg

SEQ ID NO: 76514 - DNA, 442 bp, Glycine max
  unsure (1)..(442): unsure at all n locations
agcttcttatccaggcactctcttagtggtgaagcttctccttccatggtttattccctagtggatggcgcttcctctaacctcttctactntatcttccgctgcatctccatggtggaaaatccccattgaagtacctcattgaagctcaaagatccagtctccataaaatcttctcaagcaagcttccatcaagtggtaatcagagcataagagcttcaagtaggtgctccttaaacctccattaacctccattgttgtttcttcatttttctccatgtatttcctcacatgtcttgtgttgaatgtttttaacatgattctttagaattntcaccggttaaacttgttataaaagttagatttgatttcctatggttcaaatttcttgttcttgttcttgaaccatgaattgtgttaactntaggttcctttgagtttt

SEQ ID NO: 76515 - DNA, 447 bp, Glycine max
  unsure (1)..(447): unsure at all n locations
agcttcagatgcaagctcaaaggataattattatcgtttagaaacaacaaacacttgaaaatgaaaacctataaatactagatgctttgaagaaatgagtaacgaacctacacgctatcattcaaattctttatgtagaaaactctntgtatattcttataaagtttgaaaagctctcaaaacatcttgaatactctaagacaaaaaactaaatgcttagatttcacatttgtttgtaagatgattaagatttaatcagttagcaaatcaaacaacatatcttcttatttgtatagaaccaacagtggcttggtaggacaaagaatattcggttgttaaagcttggcgataaactttgttgtgagagctaaaagtaacagtgacaaatacttgtaactnttgtgaaattagtgaaacttgattgctaaccaaaaactgaacttagtc

SEQ ID NO: 76516 - DNA, 451 bp, Glycine max
  unsure (1)..(451): unsure at all n locations
acctgcggcatgcaagctagagtggtccatgngacgaccaaaatgttttgctgtagacatggtcattaatgcatcctgctgaatacagaatagcgatcacacattgagacgtctgacactccgaatagcttagcctgttccttcttgagagcctctcagcatgaactaactatcgtggtttgacgtgcactcactggacaaattctaatcgtgaatctgtactgagccaggtgtatacttgaatgacccaacgcaagcttccatcattaatttgggtttgatatttgctattttttaacattaccttattataacacaggcatgcaagtcggtctgatatggatatcattccttcacagtccacacatatgacaggaaaagattccctctttgcaattcttgcactccaatctattttgttggcagaaagttgacctggctttgaacatca

SEQ ID NO: 76517 - DNA, 281 bp, Glycine max
caagttcgagcgtctcgatattttatgttcacgaatcagacatccgagtgaaatgttatgaccattcgaatttgtcgagagcttccgttgttcaatttcgagcgtctagatgtattatgtccccgaatcgaacatctaagtgaaatgttatcaccattcgaatttctcgatagcttctgttgttcaattatgagcgtctagaagagttatgtacccgattcgaacatccgagtgaaatgttatgaccattcaaatttgtcgagagctggccgtgttcaatt

SEQ ID NO: 76518 - DNA, 431 bp, Glycine max
  unsure (1)..(431): unsure at all n locations
agcttgttagagacatttgaattattacacttctttagctcataaaggtgagggagtccaacggattaacgaagtagtgtaaggtctcgttttatgagtaagaaagatttttagtaaaagaatagtgttcgatttttacaaagaaaaataattagtgttacatgtttacaggagttgaaattcaccanaaaaaatgtttacaagatttgaaatttaccaaaaaaaaatgtttacaagagttgaaagagctgggagcataagctataaagaaaaagatgtgtgtgtacgtattttgatcggaataatattatttctgggtaattagttttgaatgtcttaattgaattaatcttgaaagggtgtaatttctaaattacttgttttaacttggaatatttccgttttaatgacactaattcaattcaattaat

SEQ ID NO: 76519 - DNA, 398 bp, Glycine max
  unsure (1)..(398): unsure at all n locations
agctntaacctcatcgtctctcacagtctttagaattgggagccaatccaatccttgtttcggactctcagccacttatgatagccgccgatgatcccattactacttcccctaagctctctgtcctttcttcacgccgcatcccatgccttgcgaactccttggagtaccctcgcgttgtggtcactgaaacctcgtgcgatgaaaggcgtgatgctttcgtctgatggcactcctctcatgggacatccttcgcatgaagatagaatcctgattcttccttccttctagcgagggaaccatttaacagacgcccctccatgctagccaagagttggtgcacaacaaacaattcttgcgccgctcttttcacatccctggtcgaacgtgtcatacat

SEQ ID NO: 76520 - DNA, 424 bp, Glycine max
  unsure (1)..(424): unsure at all n locations
taacttttactccgatgtctgagtcagtcccgtaatatatcgacacgctcgaaaatgaatgtngaagctctgagcaaattcaaacgacaantaaattttactcggatgtctgattgagtccccgaatataacgagacgctcgaagttgaatgttgaagctctgagccaattcaaacgacaattaacttttactcggatgtctgattgagtcccgtaatataacgagacgctcgaaattgaatgttgaagctctgatccaattcaaacgacaataactttttactcggatgtctgattgagtcccgtcatatatcgagacgcttgaaattgaatgttgaagctctgaccaattcaaacgaaataactntttactggatgtctgattgagtcccggatcattcgagacgctcgaacatgaatggtg

SEQ ID NO: 76521 - DNA, 444 bp, Glycine max
agcttagatcaggcatccgagtcaaacgttatggccgtccttatatgcatgggcattccatatcaacttttaatcgtcatgatatattacgggcctcaatcggacatgcgagtcaaaactttagcccgtcagaattcacccgagtcttccatgttaaattttgagcgtcgcgatagggtacttggcttattcgaagatccggaggaaaagttatggccgtttgtatttgcgatgggcttcaattttatcctaagagcatctcgatatattatgagcttcaattgggaatccgagccaaacgttatggctgtccgaatttgcgtggtcagtccatttctactttcgagggcgatgatatattatgggccgtcatctgacattcgagtcagaactttagcccgtcagaaatcacccgagtgtttcatgttaaattttgagcgtcgc

SEQ ID NO: 76522 - DNA, 438 bp, Glycine max
  unsure (1)..(438): unsure at all n locations
gtagagccaaccaccagcattgtcatctttgcatcctaacactatgttgttcctaacaatggtatcaattgaataataactacaattaatgactctaatttgttaggactaagctcagacatatttctttctcaaagttctattccagccatgacccaagagcatttcttttagacttttccaaacctagtgccaaataattatccaactcgaatagcagttgttggactctaagtttcagttcaagcttaacaatcagtgtcatactattgatcaaaacaaagcaggtataaatatgcaatactagactcaaaatatgcaacaaacactagacctaaatcagtgtcacaganaatggaagaaaatattttatccaagcacaaacttcaagccttattccatgtatttgggggaagttatggctggccatatgggtag

SEQ ID NO: 76523 - DNA, 420 bp, Glycine max
  unsure (1)..(420): unsure at all n locations
tctagtcgtcctagacctcctctgtggtacggtctatctaacgtngcatctgtgcattcatcgcatccactaacagacgttgagcgccgtccaactgatggtactcgtcaccaccaccacctgctccagccataattcaacaggaaaaaaaaatgtgcaataaaaattattaaggtttcaggacctcacaacactctactcacgtctcttagatggtagtacactcgtgtttaatgctctcaataggcttttgtgtaatgtattccctcttgccttttaccactcgtgtttcctcttaagttcctggatggaccaaattagacacacaaggtaatataaaataaaaggaaagacaatataatgatcacaaacagatttgatttgggataacaacttggacttgatttgaataataatata

SEQ ID NO: 76524 - DNA, 417 bp, Glycine max
  unsure (1)..(417): unsure at all n locations
agctngcttgtggtagctcctccagggtctattttgtcggtagagcagttcattaaaaaggtatcctggcctggaaccttaccttctactgtgaaagagggtgagggccccaatgcttaagtacctcaacaggtacatggaaccttaccttctattgtgaaagaaggtgagggccccagtgcttaagtacctcaataggtacatgatgcgtcttttgaggttaccatccctggagcttttgaattttcaggtgcaggagtagagattagatctgatgaggttgttcttcttaagccaattgtgccagttatacatgagtgatgtgccatcattttcttctattttctaaaccctatttgcaccattntaattattgattggtcttaattgtcaattaattaagcagttttattattt

SEQ ID NO: 76525 - DNA, 447 bp, Glycine max
  unsure (1)..(447): unsure at all n locations
agctnggagaggatgcttcaatggaggaaatgaaagagggagagaaagagaaaggtgggagcatgaaattgaaggaagaaaaaaaagggagagaaattaaactttgagttgtgtctcacaagactctcattcatcaaagttacaacaagtcttacacatgtttctatttatagactaggtagcttcctttagaagctttcttgagaaaacttccttgagaagctagagcttagctatacacacccctctaataactaagctcacctccttgagaagattcctaaagaagctagagcttagctacacacactcctctaatagttaagctcacctccttgagataagaagctagagcttagctacacaccccctataatagctaagctcacccccatgacaaaatatatgaaaatacaaataatttcctactacaaagactactcaaaa

SEQ ID NO: 76526 - DNA, 406 bp, Glycine max
  unsure (1)..(406): unsure at all n locations
agctngannatgaacaacggaagccctcgtttatattaaatggtcataacttgtcacacggaagtccgattaacgcgcagactatatcgagacgctcgaaattgaacaacgaatgctcttgagaaattcatatggccataacttgtcacacagatgtctgattcaggcgcataatatatcgagacgctcgaaatctaacaacggatgctctcgacaaattcaaatggtcataacttgtcacacggaagtccgattcaggcgcataatatatcgagacgctcgaaattgaacaacgaatgctatcgagaaattcaaatggtcataacttgtcacacggaagacagtggagaaattcatatggtcataacttctgaaacggaagtctgattcacgcgcgtaatatatc

SEQ ID NO: 76527 - DNA, 440 bp, Glycine max
agcttatccttatgccttgcctccggacttcaccccccgtgccaccccgaaagatttaagccaagcccctactttcgaggggcaactcccaccttatgacgactatcccgggcaagacgatgaggaaggagatacctatcttggccccctgctccacctcaaagatccgtccccccatgaactaccccaaccgaacatagtccgccatatcccggcttcacccacacctgtaaaagaatttgttcccttcgcagaagataaggggaagatggaggcgcttgaagagaggttaagagcagtcgagggccttggcaattacccattctcggatttggcggatttatctctcatgcccaacatcgtcatccctcccaagttcaaagtaccagactttgattagtacaaagggacgacatgtcgaaaagggcatctccggatgt

SEQ ID NO: 76528 - DNA, 450 bp, Glycine max
  unsure (1)..(450): unsure at all n locations
agcttgcttgtgaggcttctatggaggctgtatctttgagcttcaatggggtcctttaatggtgattttccaccatggagatgcagcggaagacaaaggaaaagaggtgagaggaggcgtcatccattaaggaataagccatggaagaaggagcttcaccaccaagatgagccttggataagaagtttggagaggatgcttcaatggaggaaaagaaagagggagagaaagagagaggggggagcacgaaattgaaggaagaaaaagggagagaagttgaactttgagttgtgtctcacaagactctcattcatcaaagttacaacaagtgttgcacatgcttctatttatagactangtagcttccttgagaagctnntcttgagaaaacttcttgagaagcttctttgagaaaacttccttgagaagctagagcttagctacacacac

SEQ ID NO: 76529 - DNA, 429 bp, Glycine max
  unsure (1)..(429): unsure at all n locations
agcttcattcaattgaaacatggaaagaagacagtntatacccgacaccaaagatntcttaaaccttatcacccatatcggtgatggaagaaagcttttaatggaagtcaggagaatgaaagtgcgctgcaaccattagctggaaacgaagttcatgattgggtgatgacctanaagaagacaccatctgacacaaacatatggaagaaaagctcaatattctttgatcttccatactggtctgatctacatgtgcatctagatgttatgcatatcgagaaaaatgtgtgtgatagtttaattggtacccttcttaacattaaaggcaagacaaatgatggtttgaaatgtcatcaagacctggttgacatgagaatacaagagcagttgcatccgatatcacatgatcgntaaacgtatcttccccca

SEQ ID NO: 76530 - DNA, 394 bp, Glycine max
  unsure (1)..(394): unsure at all n locations
agcttgttttcttaaatagatcttagattattgcaatntcctaagtgaaaaccctcttatgaggagaaatctctctttgagcagtctaaatacaaaaatcttttgttgttgaaagtccaacaagtggctggcaaaggttgtaatcaatggtggtggtggtctagtagtggcaaagtgtgaagtccagtggggttgttggcatgttgttgaaatccagtggttggttggtccgacaatgactcattgtgttggtgaaatctcatcttgaagggtgtaagaactaaacgtagtccaagtttgggatgaactaatataaaactcagggggcatcatcttccttctctctctccctctacatggtntttaaagtggaatatgtttactggtgtttgac

SEQ ID NO: 76531 - DNA, 418 bp, Glycine max
gcttctctgaagttgtggacgaaaaataactttagaaagtttttagtgatccactcgctaagcgcccccctacgcgctaagcgaacctttcttcatgtgctaagcaagtcattgcttgtgctaagcgcatcaacccctgttcattggctgataaggtctcgctaaccgcgaaccctgtgtgctaagcccaaaaactctctataacttcatcttctggaattgggctaagcaagtaatctcgctaagcacacagccttatctcgctaagcgcatagccgcactagcactattcctctctgttggatcatttatgagaattgggccgagcggatcagcccgctaagcccaaataactctcgggtttagaattacgctaagcgcgacccactactgcagcagagagcattgtaattcgcta

SEQ ID NO: 76532 - DNA, 376 bp, Glycine max
  unsure (1)..(376): unsure at all n locations
acccacaccaccattcacctttccttgtctttggtgctccgcaagaagtgatcatgttggcttatatgtgcttccagtgaatatggtaagaccgattttatacccaaccaccaatagcaagctttccatacttccaccactccctgcatgtgaanaaacaatggatcacggtcttttcacacctattacataatacacactggcttgtctcttcgtctactatgacatattctgcccgaagattgtctttagttggtaatttgtaagtagcaacctccatatctaaaaaattagcttttggttgtaccttaaatttcatacctcttccatcaactgtatattttgagaacccacaatatccatatgaagagcaata

SEQ ID NO: 76533 - DNA, 343 bp, Glycine max
gcagcttttatccatgctcatctatggggggaagcttcttcttccatggcttattccctagaggatggcgccttctatcccatcttctcctatgtcttccgctgcatcttcatggtggaaaaccaccattaaaggacctcattgaagctcaaagatccagcctccatggaagctccacaagcaagctctcatcaatgtgtgtgcattttctcaactgtgatcatttgagaattacacttcaaagttcacacctcatatgaggcataaaattttgtgcctcttctctccctctccctccattcatcttctcctaccatcaagctcttatccatggcttcctatg

SEQ ID NO: 76534 - DNA, 468 bp, Glycine max
  unsure (1)..(468): unsure at all n locations
tactcaagcttagacgtgctgttttcaccttctcgctaagccaatctaccggcttagcgagcgtccgttgatgtgccatcattttcttctattttctaaaccctttntgcaccatnttaattattgnatggtcttaattgtcaattaattaagcaattttattatttgggctcatttnagctaattgatgtttttaatctaatttcaggaattaatgaaacattgngcttaatccggaatttggttgtggacttgaagagggcaaataaagcagcgcttaccttagttaatttctaattaggaaattntcgcaatttattttatgttgttcagtgtttatttcgttntgggccagagtattgtaatagggcccagtgactttgagtgactctttttaaatagatgccttgggattcgtgcagngcattctattctgttatgctattcattattcagagctttgcttta

SEQ ID NO: 76535 - DNA, 414 bp, Glycine max
  unsure (1)..(414): unsure at all n locations
agctgtatgggccgagctacaaagnagcagtgtttttcggatccagcgtacgggggtgagagcattcacccattcctcattttcttgacaaaccatagaccatttgccacaggcccaaccttattgttttgctacacttaacaacacacataatttatttggcacatagttgctaccagctactatctctcacaatgaagaaaagtttctctctttctctttttatgcatagataatcagtaatactggagcaattgactgcatatcacaactcacattagctgggtgctgtgattaatgtccctacaacaaaaatttacccgagacaatccaccaaatttgggacaaacttgacatgatccatgagtgctctcctatgacctaagatagggtatacgtgacatcatttgcatt

SEQ ID NO: 76536 - DNA, 494 bp, Glycine max
  unsure (1)..(494): unsure at all n locations
ctaagcttaagaaatatggtctcatcanactacttgtttcccgagggaaattctataaatatacctcccatctttaatggagtgggttaccactattggaaaacccgcatgcaaatttttatagaggcaatagatttaaatatttgggaagccatataacaaggaccttatgttccttctatagtttccggaagtgcaacaatagaaaaacctagagcagaatggactgaggaagaaagaagatagtataatataattaaaggccaaaaatattattacatctgtcttaggaatagatgaatactttagggtttcaaattgtaaaagtgctaaggatatgtgggatacactacangtaacacatgaaggcacaacaaatgttaaaagatctaggataaacacattaactcgtgaatatgaactgtttaggatgaatgtaaatgaaagtatacaagacatgcaaaagaggttcacacacatagttaatcatcttg

SEQ ID NO: 76537 - DNA, 416 bp, Glycine max
  unsure (1)..(416): unsure at all n locations
agcttctctcttctaattccaacatggtggattcttaagtgtgtgtggtttctcctagtcttatttgtccccctcgcaccatctttttcctcccctcactccatcttcttcctagtggactttgatttctccatgtctgcaagtggcagttcttctgcattttctggtagaaccatttgccaatgccaccatggaagacgtgcaactattcaaactgcaagaaaaaggaggaacccaagaaggttattctatacttatgcattgtcccaaacagacccaaataactgtcaattttttcaatgggttgaagaagaaaaccaaatttctaatccttcttctgtcacaagagaatcaatgatagtggcttgattgaacctaccaattgaagcattgcataagaaaatgaganaattaac

SEQ ID NO: 76538 - DNA, 472 bp, Glycine max
  unsure (1)..(472): unsure at all n locations
ttaagtcacctgcggcatgcaagcttgaatgaagtccacaccgaggcgtgtcgttaagtctggaggttangcaatgaaggagatgaaggaggagtgtaattaccactgtactttactctagcagtggttgttgtgttatcaaaggcaacaccaacaccacttgaatatgcccttgcagccagataatagtgatcaagttcttggttggcatgcaacaacacatccattgtttgtcccggtgatatgcaaatgtattcccttgtcaatggcttggttaacataccatcagcaccaacaacagtgaggttgtgttttgaaacagagaagaaaagaatgagattcattgccgcattgacaacacggagaagataagtcctgccttgctctacatgaaactcgaacgtttctgaatattaaaagaaagtgttgtggttaattacatgatcnatcttctttcaaaaaaattaaaaaa

SEQ ID NO: 76539 - DNA, 452 bp, Glycine max
  unsure (1)..(452): unsure at all n locations
agcttcattaagaggcttcctccagaagctttctttggcttctttgagaagctntctcaagaggcttctttgagaagctagatccttatctatccacacccctctattaactaaattaacttccttaaaaataattacggatgaaaataacgcaacaaatattcaaacatcaaacataattactaatagtatatagatatatatatatcagggtgttacaactctcccacccttttagaaatttcgtcctcgaaatttaccttactcaaacaaggatgggtgagcttctcacatctgactttctaattcccatgtggcatcttctcctgatgcacctccccagatcaccttgaccaacagaatctctttccctcttaagtgttttgtttgcctatcctcgatcctcaaatgcaatgtttcatatgtcaaattcttcttcacttgtacataat

SEQ ID NO: 76540 - DNA, 453 bp, Glycine max
  unsure (1)..(453): unsure at all n locations
agctntacctttaactacaataccatcacctatctcaacaggaaaaaaataacatatgttttctatgcttctgatagacttgaattntatatatttgatcaaataaagagtacactagatgaatttctcaataaatattaatagacaaaaaaaataataaggtaaaatgaataaattttttttgtaagttatataacttcaactaacaagctaattttaactcataagtacttactgagaagtttatccaaataaggtttaaagcttaatcagataacttcaactaacaagctaattttaactccaagtaagttatataacttcaactaaccatctgcctgccttttccaaaatcaggtgtgtttccaaagcactgatgaacaaattgctgcagtgtaaaaccatgccacaatagaactccaggctctcgtactgccagtgaaaaaatgatga

SEQ ID NO: 76541 - DNA, 452 bp, Glycine max
  unsure (1)..(452): unsure at all n locations
agcttgagatgaggaagtgtagaaaggtgaatcttcctgcttttattcgttgaccacagagtggtacctggagatatttcgcggnggtcaggagaccttggggacgtcaggtggggtgctattgcccaaaaccaagcttgaccaatcccgacccaacccgagaatagtcagtcagtgagaacctgtgatgtacctaaacaggcgagctcctggcagtcaacagataaaaggaactaagaccacaaagcaaggaggcttgtgtggtggctggccagctgtgaactttgattgatatatgggatatggcctttggtaatcgattaccaagggtgggtaatcgattacaaggcttaaaaatgaagacaggaggctaagatggtctctggtaatcgattaccaaggggtgtaatcgattaccagacttganaacgaggtcaagaaattaggggagc

SEQ ID NO: 76542 - DNA, 407 bp, Glycine max
  unsure (1)..(407): unsure at all n locations
ctattgtgcaaggaatcaatggggcaaaacacaccaaatgattatgatgatggatggctcanattctcacaaaggtaaacacatcactttcaaattgagctctcaaaactatcatgacatgtagaggagaatcaaggatttcaagtcacaaaatgtcaagaacttttattttcaaaacaattacccatttcttgaacatatcctatgattcaaagaaaaacatgcaaagtcgtacatgcacacaaaattgacccataatattaaattaaaaatccgacgaaactaacaacattaacaaattaacacaactaacaaattaacaaaaccaacaaaactagcaaaaccaaagaacactcccccccccccccatacttaaacaacacattgtcctcaatgtagaacaatta

SEQ ID NO: 76543 - DNA, 409 bp, Glycine max
  unsure (1)..(409): unsure at all n locations
tcacaattttttgctggtctaccactacgtaaaagccacacttgtctaacccctgttatggtgaagagaaaatatgcatagctattggaggtaacttggtaacattctataaacaggttagaatttagaacaagacatattataagtatatgtttggtgtattcatcatgaatcagaacctctgtatcgctcacaacacgcgattaaaagcatggttgacgttgtagattgtgtgtttgtatttttgtttacatgtgttctaatgtacattcacctcaatttatggaattaatgagttatntaacataacatgtaattngaatttatcatatgaagagcatcaccttaatattaggaattttntatttaaggtatnggccactacctattcccgcaacaaatatatcta

SEQ ID NO: 76544 - DNA, 354 bp, Glycine max
  unsure (1)..(354): unsure at all n locations
agaaactctctctcttaaacaacctccacatcttctcctttgtaaaaagacacttgttagcattgccacacctattgggcttgaggttattcctcaagtaaaggagttattggacgaangtttggtttgaaagagcataaatcattgtgctctgctggtgcncaaantangnattattangcaccaaatccctaaaatagatgatatgatgaatgtgttgagtggtgcaaccctcttttgtaaaatcattcatgcacccaacatctttatgattcgtgtacatagggactcattaattaaagttgttcttatttttggtttcaatacaaacctatgtgctcatatgggacacct

SEQ ID NO: 76545 - DNA, 445 bp, Glycine max
  unsure (1)..(445): unsure at all n locations
agcttagcgcgcgcaatagtntctgctccttcgtgcttaacgccacgctnggcatctgcatttggttgctcgcttagcgtctgacgcgcgcttagcgccactgttgggctgggcctgcttcagaattccttctttctcttcatttctattgctttttttgcttaatgtaacctcatttttcgtatctgcaaccagaaattcaatttaattactttctcaacttttaattataaataactgctaaataattagttttaggccaaaatttgactatttaactactattaattcataattatttagcagttatcaagaaacagtttcaattagttacgaagggaatgaagaaatatattaaaccttgaccttgaaattagctcatttgaataaatnttaagtataagacattcgagtcatttacaccatnggccttgtaatgtcattg

SEQ ID NO: 76546 - DNA, 409 bp, Glycine max
  unsure (1)..(409): unsure at all n locations
cctagaggcgtaccataggcaagaaattatactcaacatttgtaaaagaaaaaaaaaatcaaaggcatgaactgctaaaaaataagtggatatgcatgcatatataagtgaaggaaatttgggagaccataaagataattttagtatatattaatactattcttttagaactaaatttaatattttaatgttctaagtagctgtaattaataaaaatattttgccttgccctgatcgtgtttataacatcatggtattttttctcanaaaggaaaaaaaagtaatattcactttcaatacatacttttagttatcaagtccagtgtagattttatngtatttttttatcaacaattgataattngttagttttattacgcaaatgttaattatgaagtccagcatagat

SEQ ID NO: 76547 - DNA, 457 bp, Glycine max
  unsure (1)..(457): unsure at all n locations
cagcatcaaagaaacctncctggaccatagcatacaggaatgcatcaaccaaattgtggtcaaacttgatccccttctggccatccaaagatagctttcgcttaacctcgttccacaacatcagcacaagaaaatatttctcttgccagacatatccattaatcatggacaagtatgtctgatcatttgctcaaactgcaggaacatcatncttctgaaagtccttcttgcatcttctagtctcccagctttacagaaagcatggatgatggaattccaatcatgagtacctacctcaatcctaggatcctcaaccacctcatctaagaaagctgccatcaactcaggccgatgattctccatcaaacctgtcattatagttaagtaactccctttcaaataggaatccttcatctctatgtcctgacagggaaacgctgatgaaatctggccacat

SEQ ID NO: 76548 - DNA, 175 bp, Glycine max
  unsure (1)..(175): unsure at all n locations
tctatccatctaatttgatccttttctttgcatagngttactcttaattggatacttataactgtgtcttatttacccaaaacccttttataaagaaaattgttagaanaagacaaaagccccttcagttaagaacagtaaagttactgttcatttattttatcacagagctgtc

SEQ ID NO: 76549 - DNA, 500 bp, Glycine max
  unsure (1)..(500): unsure at all n locations
gacactatcantactcaagctggatacctacggagttctaggctagttngagtcanaacgagagcttatgttgagatgnttgttcacaagaaactgaataggccactatggaagaaacagagggtgataagaaaatcgccatcacttttgatcatcctacactcgaaatgatcaaacacttgaagcctatatatgttagagcccagataaatggtaaaccctgttgagagtgttgtggatgaaggagccatttgaatatcatgcctttgaccatactaaagagggaggcagaaggaactaatacctacaaatatgaagaatgaccaatttactagaggagccactccaacattanngagtttggtagccaaaatcacagttggacccaaaaccatgtatcatgccttcttcattgaagatgccaagccagcttatntctgtgtngtaggggagaaactagattattcaagccaatgtgtaccttctactttacaatagta

SEQ ID NO: 76550 - DNA, 395 bp, Glycine max
ccctttgagagacttctgaataaaaagcatgcagcttattttatgccctactactctaccttgtttgagtaagctcactagaatgaggattaatattgagactgattaagccaaaatctctccacctttggcatcaaaagaaaaccaaagtgcctattgaagcaaaaaatcatacacaagctcgtaatcatccaagctctttaatccatacaacaaacaaggaggacaataattcatacataaactaagcaaggaagataataatttatccataaactataatataatgtcagataatttagaaagtcatccaagataaccaaaataaaacaactaatgtagagagtaacatacacataagtgtgtcaaaacatagccaaatacatggttagaaa

SEQ ID NO: 76551 - DNA, 484 bp, Glycine max
  unsure (1)..(484): unsure at all n locations
tctccttccttntcctataaataggggaaggagggaagaacanaaatgttcaaccctcctggtatctgagattcacttaanattagtgagaaaaattgtttccatgaagaagattcaagccgaggtgcttccgtaacgctttcgtaacgtttccgtgggtgatttcgcaaaagatttcaaccgttcttcgtcgttcttcgntcgttcttcgtcgttcttcggtcttcaaccggtaagttccagaaattgaacttttcaattcattctatgtacccttagtggtcctcatttgttccgcgtgcttttatttccattgcatatactttctgtacccncatttgacgtggcttagtcatttatntaagtcattttctcgcctaatcgaaaataaaataaatttctgccgatcattcgtattataacatcctttaatttttgttaaaatgaattccgaccgttcggtcatgccgtaaccacgtttaaa

SEQ ID NO: 76552 - DNA, 430 bp, Glycine max
  unsure (1)..(430): unsure at all n locations
tacttatgtggcagggcgggcttccttcactttctagtctncaacgcgagacttgaccactgttcttccttcccgcgatgcttcttttcatgtccgcctgagtgggcttatagcctaaaccatacttcccacgatttccttgggtatttatcacgctagttatgccgccgttgtctttgcctaaacccatcccgggttcataaccgttccccaacataactcgggctatcattactgctgcatcggacagacaaagttgcccagagagggagtccacggaggaaatgttgaccacctcaaaagactggaaagcggtttctaacgattcttctgcggcttccacataaggcatagaggatgggcagcttaccaagatgtctttctctcctgacacgatgaccaagtgccccttcactacgaatntcaactt

SEQ ID NO: 76553 - DNA, 489 bp, Glycine max
  unsure (1)..(489): unsure at all n locations
ctcaagcttctacttataaaggctatgggatggtgatcttgcatgagaacagctcctacccctactcctgaggcatcaacctctactataaaagtctntgtgaaatcaggtaaggccaatacaggtgcctggcttaacagatccttaagacactgaattgtaagcttagcttcctcagaccaagaaaaattatcttttttcaacatgtcatttagtggtttggctatagtgctatatcttcacacaaaccttctataatagcctgccaaacccanaaatcctctcaatcgtttaggggtttgaggaagtggccaattcctcactgcttccaccttaacagggtcagtagagactctctctctagtgataaaatgtcctatgtattctactcgagtaaccctaaagtagcacttagatttcttggctaacaaaagcattgctctcatggtagacaagactgtttgaaatgatcaagtgatcctcctgctc

SEQ ID NO: 76554 - DNA, 447 bp, Glycine max
  unsure (1)..(447): unsure at all n locations
agctngccacccagctcgcccaggcgagcanggttgcttcctctagaagcaacaaccttctggagggcccaagtgggcctggttgctatttgcacccccatttttactaagtacaccccttgccttttttgggtgattcttttttcgtaaagttacggaaacttgcgaatttcgtaacgatacttgttttctttccgtaatgttacggaaccttgcggattacataatcatcccctttttgacttacggaatgttacggaacctcactaattgtgcaatgatgcttccatttgatttccggtgtgtcacggaaccttacggattgtgcatcattattttcttttgttttccagcacgtcctagaatttcacaaattgcttaatgatgggtgccaagcaccttacaaggaccaaacaaaagtcgcatgtcatcaagcaaaggtcccca

SEQ ID NO: 76555 - DNA, 481 bp, Glycine max
  unsure (1)..(481): unsure at all n locations
gcttataagcgcgggtctgggagacaaaggtcaagtgttcgcgatatgcgaagatgatgttccgagtanccttggattggtacgaccatgccctcctgatttccagctgggaaattggcgagtggaggaacgctccggcatttacgcgacgagcataatgtaaacctttacggttttaaaagctctatagttgggcctaggctttagagnttttccttttattaaggctttgtngtctntggttttgaatttataatacaaggatctttcttcatctgttcctggtctctacccattctcattcatttgcatgtttacttctttttctgaaacggcagatccgatgacgagtcccccgaaggtactaatacctgggacccgcctatcgacttcgagcgagaaatgaatcanacggaagatgaaggagatgaggatgtgggacttcccccagaactagaaagaatggtcgcccatgaggacc

SEQ ID NO: 76556 - DNA, 306 bp, Glycine max
ctaacttgaaaaccacatcggatgttacgctaaatgggattccgtctctatcatgaataaggactgtggtgtccattctaggagcgaactctggagaattccacatcgctctctgcatgacttacagccaggatacgaagatatcctcctgcactatggagagattgaacgcgagatctattgattcgcccggcatatgaaactatgaacatgaattgccttctattcattaagaatggccatggagactgagatggtgactaatacattcacataaaacacaccaaacttgttatgtgtttccct

SEQ ID NO: 76557 - DNA, 414 bp, Glycine max
cgatagagaatcgataatacattgactgttcttcatttgtccctacctcgactgccattaccatgcatttgcctgactacttctttatgtatgacacggcatattcgatgatgagtgccccgagagaactgatacctgcgacccgcctatcaacttgtagccagaactgaatggaactgacgactaatggaacgatgatgtcatactcatctgagaagtataacggacagtctaccgtgaggaccaagaacaggtggctcatttggaagatacataactactacactaggcgaattgcaactggagtgacggaagtaaagataggcacaggtattactgcacctattcgtgaagaattaatagccctgctgagagactaccaagacatctttgcttggtcgtaccaagatatgc

SEQ ID NO: 76558 - DNA, 439 bp, Glycine max
  unsure (1)..(439): unsure at all n locations
ctgngacagagatgccagtctaccattcaacttttagacttccttgatgttggtaaggttgtgcatctctagtatagttatgcatttgtcggggctgacttctattccctgatgcgtgatcacgaaacctaggaccttgccttcgtcaaccccaaaagtacattttttgggttgaggcacatgttatatttgtggatttcttcgaacacctcttctaggtctgccacatgtagggctatgccataggacttggcaaccatgtcgtcaacatagacctcgacatttcgtctaatctattgtttgaagaatctgatccatccgtcttggtatgtggtgcctggcatttataggccaaagggcatgaccttgttgcagaagttaacatcctcattaatgaatgttgttntctcttcgttcganggcatgcatttgatctgat

SEQ ID NO: 76559 - DNA, 483 bp, Glycine max
  unsure (1)..(483): unsure at all n locations
ccatgatgatgaatcaagtttgattcaagtagtttgataatgacatttatgatgacaaaaggcccaaagaatgatttcaagaatgagtcaacaagttcaagatcaagtttaatttcaagtttcatgagaagaaatcaagaagattcaagaatcaagagaagattgatttcaagattcaaaagaagatgaattccagattcaaaagaagatgaattcaagattcaagagaagaaatcatgacgacttcacaagggaagtattaaaaagattnttcaaaaaacaacatagcacaattttgtttttcaaaagagtttttctcaaaattttcaaagttactagagtttttactctctggtaatcaattaccagttttttgtaatcgattaccagtggcaaagtttgatttcaaaagttntcaactgaatttgcaacgttccaattgatttcaaaatggtgtaatcgattacgagtgcatctgagcgt

SEQ ID NO: 76560 - DNA, 445 bp, Glycine max
  unsure (1)..(445): unsure at all n locations
agctnggcttaaacttccttataatatgctgtctaacactccagctcttaaaagacacccctaccttgcaagtattntgttaaataatgtgattgaagtaaatnttttattagatntaattaaataaatgtttagtattttgttctttcctattagtttgttgatagctaactggaataaaagaaaagctaaggtcagaccagttgatagctaactggaataaaagaaaagctaaattgcagggaataattctcatatatttttatttcatcattacccctttttatagccatttcatacaagatattttgctaagttgttataacagaattttgaaattgcataaccacacaggtatcaagtaaaatgtggaaaaagctttaagcgcgaagtagaaggaattctagaatctgctatcgngcttgtagctcccctggtccttata

SEQ ID NO: 76561 - DNA, 466 bp, Glycine max
  unsure (1)..(466): unsure at all n locations
agcatatctcttctcagatcctactctatatagatcagtagttggagctctccaatactccaccataaccagaactgagctaagttttgctgtaaacaaagtctgtcaattcatggtcatactcttgaaactcactgagcagtagtgaaaagaattctcaagtatctaaaaggctctttacaccatggcctacttctcaaagctgctactccaggaattaccattcctattaaggccctatgtgatgcagattgggcttctaaccctgatgatcacagatctactttaggagctgctatnntatttggtcctaaccttatatcttggtggtctaagaaacaacagattgttgcaaggtcaagtactgaagctgagtatcgaaacctatctcaagctacaactgaagtagtgtggatttattagaattctaacagtatcatagagagatattntgagagaaagagag

SEQ ID NO: 76562 - DNA, 433 bp, Glycine max
  unsure (1)..(433): unsure at all n locations
agcttanaggcttagacaagggagtataagtgtcgaataatatagaaaacanatggaactactccttttaagagctggacttanggaggaggaaagaacaagcatagctaggttccttagtgggcttaatatggaagtgagggacaaggttgaactccttccatatatggacctagatgagctagtccaactttgtataagagtggagcaacaacttaaaagaaagtcttctttaaaatcttaaggctttcactcttatccaaggaaggaccaagcccaaggaattttggaggctgcaccttgaaaacccaaggaagataagggtaagaccatatagaaatccacccctaagactagttcccaagaaaggactagcaacataaaatgtttcaaatgtcttggcagaggtcacattgcctcttaatgccccaca

SEQ ID NO: 76563 - DNA, 476 bp, Glycine max
  unsure (1)..(476): unsure at all n locations
tcttgcgtagccgctctgggtgctcagaaaatcccanaaacaaatccctcttattactagctattttgaattctttagttcctgaatgtacaactttcaaattgttgttcgttcccctctttgttttatgcaaaaaatgaaatcaatatcaaacaaaacatgcatacaattgtcatcgttattgctacttgaaccataaggaataccatctaaagaagtacttcanaacgtttatttaatttttttggtattttttgaattaccaatttgacttcaatatctaatttttaatgtacttangtggaggatgttgacgaagagaacgagaaggaagaaagtaatttanagaagattaaggaagtgtcaaaattttttttcctcaacaaggaagtgtcacatgaatgctcgttcgtgaacaagcataaggccatntggatgacagagccttatgagatcacaaaggaggagtattatgc

SEQ ID NO: 76564 - DNA, 426 bp, Glycine max
  unsure (1)..(426): unsure at all n locations
agctnttatagtttagagaatgttatacttaatctaccgaataattnttggtgtaaaaatccaaacattcagagccagtcttgtattattcttagccaccaaaataaaccctaaatagttattgatcgcattcaatatggaaattcctgaaaattacgattatttacaaattacaatactcattcgattctatgactntgtgatgccaagaataatttattatcttaaaaaaaaagtaatttaataattgttgatcctgaaataaccatggttaatcaagttattcaatacctcattgtcatggtaattaaaatttaaaactagtattgcgaattttgtcttaaatacattgtcctttcaaataaatntggctctgccgagaatttacgttgggtttgatagttcaataactacgtgaaagtaaaa

SEQ ID NO: 76565 - DNA, 472 bp, Glycine max
  unsure (1)..(472): unsure at all n locations
tcagcaacagcaacaacaactgcaaccncttgcttgtcccacttccttatttcctcatcacggccacttctcagtgttctctttatttccctcacgacatcctaaccctttcttttattatcccactttaacacttccaccaccaccttccattccattagcgctagaagctcatcaacaaactcgttttcataacataaaaaatgattctgattctaaccccgttgaagcacatgcagtgcaccagaagaaggatcaagtggtactagccgaacccaaaactggtggtggttcgataggacttgtaaagaagcaagctttgaatgcttacattaatggccgccgttctgctgagagttggagacagaagagttacccgccgagaaagaaggtggaagaaaatggtcaacgcataaatgtngactntntgaggaaccgaagggttttaggcaaccagatgatgaacaaccct

SEQ ID NO: 76566 - DNA, 416 bp, Glycine max
  unsure (1)..(416): unsure at all n locations
gcaagcttcatgttcttggcatcactttgtttttacttgacatgngaactaaatatgttaaaaaaaactatggggtgactatgtttatcaaataagtggaaagtcaactagggaatcttaaattcaaaacatgatatttcactcaaaggataactccctccctttgtattagttatttttcagaggatacaacttttctaaattgcatgaattatttaataattaatattttttctcaaaacataaccgatgagcggaattaaaaaatatatattttaaggttataatattgttttgacaaagacaaatgacctaattagaggctcacaacaaanaagattcctatgaaataagtgtgagacntttcaagatgcatggtacataanaaagaagtataaaatcaagatatacaaata

SEQ ID NO: 76567 - DNA, 483 bp, Glycine max
  unsure (1)..(483): unsure at all n locations
tactaagcttctaacagcatagcagaaataacagctgccaacgagttgcaaccgtttccagtatcggttcttgactcgtcattttacaaggatgactggtcttcaccatccccgataacaaaacgctacattgattacaaaggtgagtgagactgtttttttttttaccaaacttattagcttctgtgtaataattggaattgaattttgtggtgacgtattatctgtgcaatagccaaagatggggtgcgtcatctattgtcttagactctaatgttatgcaagtaaatctgtaggcgttttatttatatttaagctngcatgtttgtttgcaactacaagtatgagaacagtggatggtttgttctcttaaaatcccaaccaatgtggaccaatcatttgatcccagggatgttgacatggcatgactcagttgggctcattcactcttacctcanaactgcactacactgcgatgcgatg

SEQ ID NO: 76568 - DNA, 467 bp, Glycine max
  unsure (1)..(467): unsure at all n locations
cgatgtctactcatttataaaagcangtctacagagctacatgattgttcttcggtgacacgacacttcatgagctgtatagtgctcaatcggagctccaaactgacgagccctttccttagacgaaccaaacatgtctccaatttctgataaagattcatgtgctgcatactcaaaaaacaaaatcatatgttagctgtattattcatttattcttctttctttgggaatgaatacttaggacattgagcacattngtataacaaaaatgatgtaatatgctatggctcactggataatctcatgctgcatggcagaataccaagcactccaaatatttcttcaacgatattcacatggtcgaatataactaaccagaaaaaaccatgttgtccatgcatgcatgtaaacgctaaacaataggtgaagaaaggtctatactcaacaaaggatacttctaataagtc

SEQ ID NO: 76569 - DNA, 460 bp, Glycine max
  unsure (1)..(460): unsure at all n locations
tcttatctaaggctcatcttggtggtgaagctccttcttccatggcttattccttaatggatggcgcctcctctcacctcttttcctttgtcttccgctgcatctccatggtggaaaatcaccattaaaggatcccattgaagctcaaagatccagcctccatagaagtcccacaagcaagcttccatcaagaaataggagaaaataatggcacatcacacgctgaaatgaataattcanaaagaagaaacatatagtaagattaatgtacttngtgcgataaagacttgaccagatgtgtcggccaagcaagggaggtctaaattgcctaccccacttaggaaacctcatgagtgggtacaggaactgaagcatctgcatctattaacctctncacacttacctttacttggccaggcaacaaaggagtgttatgaacaatagtggatccctcataaac

SEQ ID NO: 76570 - DNA, 178 bp, Glycine max
atgtccccttttgaaattgggaacatgtagttctttgatggcgaggacgtgtagtcctcttaaggtgaggacgtgtattcctcttgatgtgagggcgtgtagccctacaaaggtgaatgcacatgaccctttgactgcgaggacgtgtattccttttgagtataaggtacatgacact

SEQ ID NO: 76571 - DNA, 479 bp, Glycine max
  unsure (1)..(479): unsure at all n locations
tgatgatgtcgaaaaaaaatacatgtttgtcatcatcaaaaaggtggagaatgtgaatgtatgtatacatgattntgatgatgccaaagaagaatcaaacaaggctgcttcaaatgataagcatttgcttcaagaataattcaagaatgcttcaaaaaacaaagccttgtttcaagattcactaaagaccaagccttgccttaaaacaaagtgctttcatgacatgcanggatctgggtaatcgataccagaagacaggggtgagaaataactggtgaannaacctttgaatttgaattttcaacatgtaatcaattaccatatgtctgtattcgattacgagcaacgaaactttggaaattcaaattcaaaagtcataactcttcaaattataactgtgtaatcgattacacaaacatttggtaatcgattaccagtggaaagtttcagaanatctgccaacagtaacatcttttcat

SEQ ID NO: 76572 - DNA, 450 bp, Glycine max
  unsure (1)..(450): unsure at all n locations
gactgaggcgtgcaagctgaacataacatgatangatacctttgatgatttgtttgtctgtctccgcatcgaggagaaacatcgctcatctctgacacacttgcacaaatctgattctcactctaaggcctatcttgttgacagctctagctaacctttctctaagtccttctaaaggcatgggtttaacacaaataaatgaggtagaaagccttcatttactaaaaataagaacaatgcttttaataacaacactaagcctaaggataaaaattccgggaatgaaatctttcgcttctgatggcgggcgagcatatcatttggctaagaattgttttcaacatcatcgccagcccacgtctttccctaaaccgcaggctaatgttgacaccaccagcgctgcctctgaaactcatctgacacgtaccatgtcactagccctgagttaaa

SEQ ID NO: 76573 - DNA, 483 bp, Glycine max
  unsure (1)..(483): unsure at all n locations
gacaagactatacgaggatcttccttaggtatagaaatatctctaagggctaccgtgtctacaactggcaaactaagaaactcgtcatcagtcgagatgttgaagttgatgagtacgcttcttgtgaatgggatgaagaanaagtggagaanaacgttcttatacccgctcaactacctcaagaagaagatgaggaagaagacctatgtgaaccaccttcacctccaccacaacaacaagatcaagaactatcatcaccagagtctactccaagatgagtaagatcttgggtggacatatatgaaacctgtaacttggccatacttgaacctggaagctntgaagaagcgtcaaagcaagaagtatgggtcaaggaaatggaagaagagatacagatgatcgagaaaaacaacacatgggagttagtaaatggtcttcatggaaaagatatcattggggttaagtgggtctataagacaaagc

SEQ ID NO: 76574 - DNA, 376 bp, Glycine max
aacatgtttttcaacccctatcacatatatggggatagaacaatcatgaataagggcatctcccaaataaaaaagaagaatctcttcctgagttaagaaaatatatgcaggctagacattgaagattgtgacactcatgagagcccaagctcaaatgcccatcaatacaccttcatttccaacctgtgagatatgtgggattgtatataggttgggagaatgcattatgggtaatgaattatttgccaccatggatgagatcaactttgttggagaaagcaataattcatataatcgagaccctaaaaattacaatcaaggacaatgctttatgcataatcacaaacaagggatgtatatgcctccacccatgcat

SEQ ID NO: 76575 - DNA, 481 bp, Glycine max
tactcaagcttctcccgcaatattctataaatagggggagaagtgaagtaaaaaagggttcagccttcctagttattcagaatcacttacaattagtgagaaagattggtttcgtgaagaacaactagccgaggcgcttccgtaacgtttccgtgggtgatttcacgaaggatttcgaccgttcttcgatgttcttcattcgttcttcgtcgatcgtcgatctttaacgtggaagttccctagatcgaacttttcacttcattctatgcacccttagtggtcctcatttgtttgtacgtgctttcatttacatttcatttactgtccgtacccccttttgacgtgctctagtcatttgcttaagttattttctcgcctgatcaaacaataaaataaatctccaccgatcatttgaatcgtaatatccgttgatttctggtaaaatgaaatccgagcgttcggtcatgccataactacgtcg

SEQ ID NO: 76576 - DNA, 492 bp, Glycine max
  unsure (1)..(492): unsure at all n locations
gcttctgttgctcgacttccagcgtctcgatatattatgcgcctgaatcgaacatccgtgtgatatgttatgaccatttgaatctctcaagagctttcgttgttcaatttcaagcgtctcgatatatcgagtgcctgatgaggacattcgagtcataaaccatgaccatatgaactgctcaagagcttccattgataaagtttgggcgtctcgatagattatgcgcctgaatcagaccttcgagctaaaagtgatgaccatttgaatttctcgagagcttccgttgttcaatttcgagcgtgtcgatatactatgcgcctgaatctgacatccgagtgaaaagttatgaccatntgaatttcacgaagtcttccgctgttcaattgttagcgtctctatatattatgcgcctgaatctgacctccgtgtgagaagttatgacccattgaatttctctaatgcttccgttgatcaattttgagcgtctcgata

SEQ ID NO: 76577 - DNA, 455 bp, Glycine max
  unsure (1)..(455): unsure at all n locations
agcttaaggttcaatttgacaattacaattcatttcacaaatgggtgcaaatgatattatcattgataaacaggtaagctttttggtcaagtggctctcaaaacaataatggccttcatcaaatccacatttatgcatttcattctaatattcagagattgatacaaaaatcattgctttatgctagtcgctctctcaacaattaagttcacactctgactgggttatggttcaagcttttctttcacaattaatctgtctactgactaacatttctaatcacaagcttacattcttgttctttctttgtctagcatacacacttgctcaaactcatgataaaacaaaagcttcattccaatcatgcattcaatccacaatcaccatttcaaaactataccanaactgcaatttcaaggagttaagtaaaactggtctatatgcatcatgactgg

SEQ ID NO: 76578 - DNA, 476 bp, Glycine max
  unsure (1)..(476): unsure at all n locations
tagactgagttcagcctaccatcctcagactgatggccaaactgaactgaccattcagtcattggaggaccttttaagagcatgtgtcttagagcagaaaggaaactgggagagttctcttccattgatagagttcacttatcacaacagttttcattctaccattggcatggctccctataaagctntgtatggtagaaggtgtagaacacccctatgttggttagagcccggagaaggcctcaccttacgaccagaagtggtacaacaaaccactgagaaagttaagttaattcaggaaaggatgagaactgctcatagtatgcaaaaaagttatcatgatacgaggaggaaagatctggaattcgaggttggtgatcatgtattcttgagagtcactccatgcgactgggttggtcaagtattgaaatcccanaaactcacacctcgctttattggtcctttccaaattctta

SEQ ID NO: 76579 - DNA, 434 bp, Glycine max
  unsure (1)..(434): unsure at all n locations
taagtcacctgaggcatgcaagcttcttagtcctgtatagatangaatatctgtttaaccgcatggaaacatccagaattatattatatgccaacaataaccaaagccataatcttatttcaagtgatcaacaaaaatgatccactacagattcattcaatccttcttatttcatacatgcatctgtatcaaagaatgacgaaaaaaatgcatttatttcactcggatctaacttggacaagtgacatttactaatacacaatcaactaattcagtttgctgtattcagtgtattgtattttacattttacacaagttatttcacttcatagtaacatgtggattttattttatcttttgtttagttaagaacctaagtattgcacaggaagcaatcctattagagtaaatatatctgagtattaacacaacta

SEQ ID NO: 76580 - DNA, 475 bp, Glycine max
tactcacacagcctccagatccctctatttcatgtgtgattcgttgaggtgttacatgtccaccagttttcgtctaattcttcctcaaaccacaccatattagaagaacagtttgctcttatatcatttgtagcattcttgattatcgacttctcgacagctcacacaccacgacacttcacactgtggcacttcactaaactcttcattgatcataaccctccatcggtcaaaattcttcgtaggtagccctttttgagatctcgaaaatctatttcgactaattttcaggattaataacagtccccacaaaccaatacaaaactttttcagcgtgttttggtctcactcacatgttttttgataaatatctcagaaagtcactcgtcttataactacttcaagttgaacatgattaattgtggagttcttaagtgacgggttactggaaagtataaacattttgttcgtatag

SEQ ID NO: 76581 - DNA, 450 bp, Glycine max
  unsure (1)..(450): unsure at all n locations
agcttgcataccccaaggatccattangaaattacttgtgaaaaagagccatgagggtgggctcatgggccattttgggatagacaagacccttgtcttactgaaagaaaagttttattggccccacaagaaagatgcccataagaattacattaggtgtgtggcttgtttacaagccaagtctagggtgatgcctcatgggctatacacacccttccccatcccctctgcaccttgggtcgacattagtatggactttttccttgggcttcctagaacccaaagaggtgtagactctatctttgtggtggtggataggtttagcaagatggaacactttataccatgccacaaggtggatgatgcttcccacatcttanaactctttntagggaagttatgagactccatggtttgcctangaccattgtgtcaaatagagatgctaag

SEQ ID NO: 76582 - DNA, 479 bp, Glycine max
  unsure (1)..(479): unsure at all n locations
tcttatccaaggctcatcttagtggtgaagctccttcttccatggcttattccttagtggatggcgcctcctctcacctcttctcctttgtcttccgctgcatctccatggtggaaaatcaccattaaaggacctcattgaagctcaaagatccagcctccatagaatccccacaagcaagattccatcaaggagcacgaaattttgtgccttgaaagaggcataaactntgaagtgtaattctcaaatgatcaaagttgaataaatgcacacacatggcttctatttatagcctaagtgtcacaaaaaattggagggaaatttcaatttctattcaaatttcacttgaatttgaaattgaattcgtggagccaaattntggagccaaattttggagccaaaatttcactaattatgattaatgaatttcagttatggttcaacccactaactcaagatcaagtccaagaatcttcact

SEQ ID NO: 76583 - DNA, 446 bp, Glycine max
  unsure (1)..(446): unsure at all n locations
agcttctngcgtagctgctcttggtgctcagatatattccatanaaaaatccctcttattactagctattttgaattctttagttcctgaatgtacaaccttcaaattgttgctcattcccctctttcttttctgcaaaaaagaaaatcaaatgctgtcaaaacatggatgaagtcctaagaaaatcaatatcaaagaaaacatggatgaaatcacaattaaaaagcacaaggtatctttcagagtcctttggttaatttgtcttgtctccttatgtggtggggttttgtttaataatcttatacttttgccttccaaaaaaaacttatcactaatcctcttttcattaatccaattttgtatgttattgtataaaagatcatgggttctccacctgcctccactactgctcctcctccttctnctcctcctcctacctcttactt

SEQ ID NO: 76584 - DNA, 471 bp, Glycine max
  unsure (1)..(471): unsure at all n locations
cgcattgtgtnggagtgtacatccaccttntaagtatgtgacgaagataaatattntcaaatagaaacaaacttatacaaataattgattcccagatttctaaagatgtagaanaaagtattaaaaaaaacaaaaaacattgtttagattttttaacgtgtacattattttatatatcatntgtttaaaaaattttatacttgtattatttgggtcatttttttgtattaaataggtaaaaaattctactcatgtaaaacacaaacttttgtaagttntgttatttgaaataaaaaaatttattgggtcccatatctcatttaatgtttgtctcttgatattgtagttttaaaaaaaaatcatcggttcttggataattacttgatagttngttgttttgcttgctggatttcgtttgcatggctcgcatttttgtgaatttggatttcgagttngaaatttgggttttct

SEQ ID NO: 76585 - DNA, 416 bp, Glycine max
  unsure (1)..(416): unsure at all n locations
agcttaccttgaattctaattgtgtcctttgttttctttgtgagttaaattacactttcaaaattgaaccttgaacctaaatgattatctccaaaaaccttgtttagattctaggagagcatatggttcaaggcaaatttaccccaaatttgggggagtggagttgattgggatgcagagtaaaaggtaaagcatcagcacacacaacaaataagttgtatcttaaaaaaaatcaaagaaaatatgtgatgttataataaggtcagaagcaaataaaagtgaaaagctagtgagcaagctaattgtattaaaaagatcacttggataagtttaggatttgtactctcttagaatctaagccttttgaatcctagaaaaaccaatgaatntttgtagccaagcctcactacaagcct

SEQ ID NO: 76586 - DNA, 458 bp, Glycine max
  unsure (1)..(458): unsure at all n locations
cgaatcgtatttagcctttagtttcactttagttattaatcaattcgattaagaatgagaaatcccaaagagaaaacgtccgattgattttccgctttattttactaaaagatgtctttttgattattatattattttttacctctttttgatttccaatgtggttacggcacgacagaacggtcggaattcattttaaccgaagttaacggataatacaattcanacgttcggtggaaatttattntatttttaagttaagcgagaaatgacttaagtaaaatggcttaagcacgtcaacagggggtataaaaagtaaacaaaacgagaataaaaatgcacgaaacacaatgtggaccactacgggtacatagaatgaatcgaaaagcttggttcgaggtacttacccgttgaagatcgaagaacgatgaagaacgaatgaagaacgtcgaagaacg

SEQ ID NO: 76587 - DNA, 423 bp, Glycine max
  unsure (1)..(423): unsure at all n locations
gcttgcacaacaagtaactgaatctgtttttgtctaaatgaagaactaactaactaacttccactaatatataaagttaatactcaaaaggatgggatgggccttgattangcccatctaatcttccttattaaactgattacacaaagcaaggcccaaattcgtaacccaattactcaagtgcggaggttctgacttccaagcccaatttgaccctcaaaatggaagaattggaccaagcttatttgtgacaacattgaagatattgtttcttatctttcaagggactacccactctccatttggagtcctttagtgtcctatangccctgcacaagacagatagatcaagtaagcaccaaaatttgaaaataagccacaattatcaataanctcaatcatttgcctaagatcaaaactaat

SEQ ID NO: 76588 - DNA, 396 bp, Glycine max
  unsure (1)..(396): unsure at all n locations
ttcaccttctccctaagccaatctgctggcttagcaagtgttcgctaagcgcaacattcatgggctaagtgcgaggaagactctagaagaagatgagctgtacaggttcactaagcgcaccgcttcatctcactaagcgcaccgcttcgatcaatccgctaagagagaaaggcatgcgctaagccaaaattcaataatgtgcgctaagcggtcaataattgcgctaagcgcataagcacgaacaaggccacctatttaagccagaaattagattttgtgatgggagtttgggctgggattcagagctttgcatgtctagagattatagagagaaaggtccaagttccaaagagttttgagagatnttgctatgttaagatctgcagagactagagc

SEQ ID NO: 76589 - DNA, 80 bp, Glycine max
agtctatcctgacgtttaccaatattcataggccacactagatcatttatgaagcgtcattaattcgacgacactcacaa

SEQ ID NO: 76590 - DNA, 72 bp, Glycine max
atgtggctcgacaagcgtggacaacacccgaagtgtcgttcgcctatgttgtcataccacccaatctagttt

SEQ ID NO: 76591 - DNA, 139 bp, Glycine max
aaagaggggcgaggatgatggagaaccaacccagttcttcgaacgcacaagagagggggacacagaacccgcacccgcaagaacggcggagggcgacgacggaaggacccgcgcgccaacgaaccaccccggcaacgag

SEQ ID NO: 76592 - DNA, 452 bp, Glycine max
tctaaagcttttctacaaccttttctccttctttggcaacatcaaaaagccaaggacgctcggaatcaacacagatatgacaaaggagtagaaaaatatataaatatcagagtataaaacacaagaagcctaactcacaaagaagaaagaatcataccagaatccaaataactgaaaatgtcaacaatcacaaaacatccaagactgaaatttataaaccataagataaataagcaaagtacttagcaaaataatgtaaattctaagaaactaaaagccaaaatacacggcttataaaagataaataatcagaaactaaaatctaagaagacggaggtggtggtggaagatcgaaactctgacgaatgtatccgacatcctcttcaagttgtgtaagacgaatgtccataccggcaaagcgtgaatctaacgagtcgaagcggtcaccaaca

SEQ ID NO: 76593 - DNA, 477 bp, Glycine max
  unsure (1)..(477): unsure at all n locations
atgatgttctggttgaaaagtattggttatgcgtgttctattaaatccttggcaagtgtaccacatcgtccaagtaatattttaaaacgataagactgagtgtcaagtccacaaggactttgactgtatttagagtttgtatatgcctaattntaagcaattaatgaattgaattgaatatttgtcaagtgatgacgcataaatataaattcgatgtaaattaaactacaaagaaaagcatgtgcaagggtgagaaaacaaacactcagagtagtgaagtgacgaaagatgcaaaattacggacatgtcaggggctcagcccaccaaaactactcttgatgcagcatcaaggatttttctctatttaatgttattccaattattacctacatccactaacctactctagccatgattcctcacgtgtgagagtctaaattacttgatttcactccgaattccttanaagtttcgtca

SEQ ID NO: 76594 - DNA, 442 bp, Glycine max
ctgcagctattgttgacaaatgatatctttttcttatatttttaatgactattcacaccctccatttggagttctacaatgtcctatagtccctgcaaaagacagatatgtcaagtaagcacacaaattcgaaaattagccacaattatcaattgagctcaatcatttgcataagaccaaaactaagttaatctgggaaaataggagtcaaagagagattaaataagctaagaagaatagcaagataataaactacaaatgcccaatcaacaggcaaggtttaacaacacaactccttaaatacctgaaccaagaactggccaaatatgtgataaaagaattacatgaggggatgtgtggagtacactttggcagtcgaacaatggaaactcatgtacttagggctggatattattggcctacatgaggactgattgcattg

SEQ ID NO: 76595 - DNA, 482 bp, Glycine max
  unsure (1)..(482): unsure at all n locations
tgaggaagtgtagaaggggtgaacttcctgctttattcgttgaccacagagtggtacctggagatatgtcgcgggggtcaggagaccttgnggacgtcaggtggggtgctattgcccaaaaccaagcttgaccaatcccgacccaacccgggcatagtcagtcagtgagaacctgtgatgtacctaaacaggcgagctcctggcagtcaacagataaaaagaacaaagaccacannagcaggaggcttgtggtggctggccagctgtgaactttgattgatatgtgagatatgggctctggtaatcgattaccaaaggggtgtaatcgattaccaggcttaaaaacgaggtcgggaagctaggagagcttctggtaatcgattaccaagggggtgtaatcgattaccaggcttagaaatgggactggaacattgtggaggcctctggtaatcgattaccagtatgtgtaatcgattacacag

SEQ ID NO: 76596 - DNA, 458 bp, Glycine max
  unsure (1)..(458): unsure at all n locations
agctngtagaatggccaaacatgatacatgtttgtgtttgtgttggctcaaggataaaagggatgccccacattatttccatgacacanatgcaaaaatgatgatntggaaattttatgcaaaactggtcatgcatgcacctatgcggacactcaagtgtcaaatttttatggtcatctgatgctagggctcaggattcatttcctctattataaatcaacccaatgtttccaaaatatgtttttttatcaatttgtgcattcatccgagtccatttcaggcgtccggtgaaatttcacagcattcacccttcaggtgtagacacattttttccaaaaattggttatgatcaatgaattntttttcaaagaaaagttggaagtcatctcttttcaaaagcatgtcggtttgtcagctagacaacttatttttctttattccatctttgttcttacttg

SEQ ID NO: 76597 - DNA, 439 bp, Glycine max
  unsure (1)..(439): unsure at all n locations
tatgaggaaagatcttaccactcttgcacagacatagagtttcttcttctatagcaacctgactcccacttnccacacctctgatcttaatatggacagagccaggttggtttatggcttagtcacaggcaaggacatgaatatcggagccctaatctcaggttagatttctaccattgtccaaagtaacttctctaggctcagattcctagccttgatcactgctttatgcagagctagaggagttacctctgatagtctgacctatgagagcctgagcccgaccattaacttggcctacattaagaaaaactattggaatgtggatgatatgacagttaacttcagaggcgctaggaaggtaaaggctcgaccagcagatattccatcttcttccgcaccaccagctcctccaacttctgccacccctacactagct

SEQ ID NO: 76598 - DNA, 208 bp, Glycine max
agcttcggaagaaagtgatgaggtacaagccctaatgtctagctttgaaagagcccggtagtcgaagagaagttcaagtccatatccatcaaagtctgaaaagagtatgatgaactaagggacgtcaatattgccacagctgaaaccttggaacgagaaaccaagaatgcccgaaaggaagaacacgacccaagcaaagttttgaggg

SEQ ID NO: 76599 - DNA, 479 bp, Glycine max
  unsure (1)..(479): unsure at all n locations
cggagcatatgatttatatgctccagctngagggggagtgttataattatgagttataattatgtgtatctttagaatagatttctgtatctggtttagcttatagtagaagacaacagtgtgtcttgtcttatcaaagctttcaagcttctctctcctctttgtatatatatatatgttatttgaatgaaagaaaaaagagaaatattttcctcactacctcagaanatctaagtatattattcatgtaacaattactgcaagcaaaaagaccatactgcaacaaaccttaactatttaacaacatgtaatttatgatttatgattacaataatacacacagcagacttcatcttgccttatccctccaagactacaaccagatgaaaaccaccactcaactaattagtaagtatttttcacaatgaaaatgttttacttttccagaaacgttataatttaattntctagcagctcat

SEQ ID NO: 76600 - DNA, 438 bp, Glycine max
atgctttaatttctctggctacggttaatgtttgatttgcatgagcaatattgaacgatggaaggaatatcttaatatactcacttgtcttatttcaactgcaggatcgtaccaataattccccaaaatggatgacaatctttataggatatcattcatcatatgaaaatgagcttcattgatacaaaagatgaacatgtgctataaagtacaaaaaccttgctagggcttcttacaatatgtagtagtagccatggtaaccatctctcaacgtgataattaaagacacagatggcggcgccgctgggcgtgggagatgtatcaatcaactaataatattggattacatataataaacttggtattaactatacacctattgaacataacatggaaaatggcgtgctaatagcttctatagatcgagatcatagtgct

SEQ ID NO: 76601 - DNA, 475 bp, Glycine max
  unsure (1)..(475): unsure at all n locations
gctttgaatcaacttgccctggaatcgatacaagatactggttatctattatcacagagtaaaaactctggttacatatatatatttgagaaaaactctcttgaanaacaaaattgtgctatgtttgttttctgaaaaatgttttcaatacttcccttgtgaagtcttcttgatttcttctcttgaatcttaaattcatcttttcttgaatcttgaaatctaacttctcttgaatcttgaatcttcttgatttcttttcatgaaacttgaaattaatcttgatcttgaacttgttgattcaatcttgaaatcattctctngagccttttgtcatcatctntgtcatcattaaaactacttgaatcaacttgattcatcatcatgaagcttacttctacagttatcaccactctacctcatgatctccctantattgttggcacanatatatggtcacccttatcttattttgtgt

SEQ ID NO: 76602 - DNA, 464 bp, Glycine max
  unsure (1)..(464): unsure at all n locations
cttgagtcacctgcggcatgcaagcttgtcanaatgaccaaattgtattcctcctttatctgtacaaactccaataaaccttgtgacacttgtcantttgccaaacaaaagaggctaccttttcctgatagcattattgtttcttctcagtgttttgatttgctgcacatggatatctggggcccttatgcttatccttcattacttgggcacaaatattttcttactattgttgatgataaaagtagatatacatggatcatttttctaaaactaaaatcaaaagttgcaaatcatatcaaacaatttgtatctatgattgaaactcatttttctgtcaaaattaaaagcattagatcagacaatggccctgaatntgcactgaaaaatttatatgcttccaaaggcattctccatcagacctcttgtgtggagacaccccaacaaaatgggattgtggaaag

SEQ ID NO: 76603 - DNA, 481 bp, Glycine max
  unsure (1)..(481): unsure at all n locations
gctctcggttctatccctccttccctgggaaactgtccaatgcttcagtccctgtatattagcaacaattccctcagtggtaaaatccctcctagtttagcaagatcttctaggatattcaggatcaatttgagcttcaactcactttccggatccattcctagtagtctcactatgtctccttctctaaccattcttgcacttcaacacaacaatctctctggttttatcccagattctttgggtggaactggaaagaagaaagcttcccagcttcaagttttgacccttgatcacaatcttatttctggaaccattcctgtttctctagggaagcttgctttgcttgaaaatgtttctttgagtcataaccagattgtangggctattccaagtgagctaggtgcactttccaggcttcagaatcttgatttatcanacaatgccattaatggaagccttcctgctagcttctctaacc

SEQ ID NO: 76604 - DNA, 473 bp, Glycine max
ctctgagtcacctgcggcatgcaagcttatgtgtgtggtgcaataactctagcactttttctttcttcaacacaacaacaacaacatcaactacaacaacaacaactacaccaaattagacctactcctccttgctgatgaatccattggttacaaatctataaggggtctaaaagctgcagggtggaagatcaaacgcatcaaacgtatcttaaacccctatgcccaaaagggttcatacaacgagtggaactatagcaggttacgtatatggcaactcaccatgtatgacaaaatcattttcctagatgctgatcttctagttttgaagagcattgatggtctctttgcttaccctcaattatctgcttcacctaatgacttctccttgttcaagtcggggttaatggtcattgaaccatccacgtgtatgtttgaggacttgatgataataagtttggaggtgaaatcat

SEQ ID NO: 76605 - DNA, 482 bp, Glycine max
  unsure (1)..(482): unsure at all n locations
tacattattttcacattntaatgcangtttcttattccttagctccttattaataattaacaaataagtcgatggcaatgcaagtataaagaagaagggatggtagagtgacgttgtctatgtcatggactcatggttgaacaatgttgaggtttggatcaacatagatgaagtgactatgtgagatgacttggtgataaatttaaagaaaggagaagaanaaaaatccacacaatgataatatttaggtaaaattgtatttttggtctccctaattgttttcaattttgattgtagtccccctttagattcattcacgaatttagtcctccaattatgtctaatcccataaatgtggtccacaaatccagattttgatgttgactgttacaaatgaacgttgactgtcatgtgtcacattctgattggacgatanaaatgtagtgttgttgtcaacatccaatcagaacgtaacagtgaca

SEQ ID NO: 76606 - DNA, 446 bp, Glycine max
  unsure (1)..(446): unsure at all n locations
agctttatgcccttgaatttgttacctactcttccagcattntcaaactcaatactactaataattaacttttttaatctaaaaatcttgttttatctttattattctttcaaatactagttgaataggtaaaaaaatgtgtaaattgttgaagatatcctatacacggttaaaaaaattaaaagtaacaagtaattattccacgcaaacatattgaaccgaaaacgcacttcttccagcaccacatgttcaacaacgaatgaggtgaccacgacaagtgctcactgacggacctatgtcacagctagggggtgcaagtgcaccccatcattttctaaaattcacaaataaaggtacttttaacanaaaaaatataaataaagtcttacaattttgtttactttntgaaactactggatttaaattttattgactgcctccactga

SEQ ID NO: 76607 - DNA, 464 bp, Glycine max
  unsure (1)..(464): unsure at all n locations
cctaattccatgtaactnttgcttactaaaatttggtaatggattattacgggattggaagcagggtaacactccattcaatctcaatattgtgacgtacttataagttataatagattgattatcatgcaaaattcatgccaagaattgggaactttagtttgaaacaaatgtaatattgctaagttaatgtgaggtttgatgtgccttcttccatcacctactanaactcagttaagaacctcaatgacaaccccagattggtctttagttcaggacctcattatcaaacatcctgtgagaaataatcgcccagtccactaacattggacccctattccttanaattccaaaagcaagagcaggacttaaatcttcaccatattactctcattaactgttaggtcagccactttccttgtcttagctaggtctatgagaatttaaagtattatacgagtcag

SEQ ID NO: 76608 - DNA, 466 bp, Glycine max
  unsure (1)..(466): unsure at all n locations
atccttagagtcacccgccgcatgcaagcttgctagttntgagttggaanatgtattctttaacaacactaaatttatctattcagcttcttatcatacacaatcctaatgttggctgcttataattcatattttttgtgtcttttaccttcttaggcaatgaaatttaatgatgttaaatcaagcaaaggctctccatactggatgtcccctaaggtttgtccctgctcttgtatcatttgcttggagtaattcctgtaaaggaatgaaatcattttttatatttaaatgaaaattatatttaaggaatatggtaaaataaattaaacctttgaaaataattacttttaaaaaatttgaatgtaattttgcaataagagttaaaatgcaaataaaaaatcttcaatntacttacaaattaaaattacaaataatagaacaagactaatagaaagacttgaaaaga

SEQ ID NO: 76609 - DNA, 478 bp, Glycine max
  unsure (1)..(478): unsure at all n locations
cgtgatgaacttagttgtattggttgtattatgtacatgttgtctataatatttgattataatttatttaaaatttatttgatgctcttattgttaagaaaatatataattgacttcactaaacgaggcataatctgatcaaggttaacataaaaataaaattaatctttgtcccattataattgacttcttagattattgtacacaaataaagaacaaataatatataaataaaagagagtaatatttgtataaaattaatcttatatatgtcctcattaatttatntataaattctttattaatattatatgaaatataagtaaaaataaataaatcaatattacattaaaaaattaaaatgataactattttaatatttttttctctcatacgattattataataagagagaagtatatgttgacataaatgcttttgtccacaagtgcggttatgccaccttgatgggtacaaa

SEQ ID NO: 76610 - DNA, 425 bp, Glycine max
  unsure (1)..(425): unsure at all n locations
ngtatgctatntgcgatcttcttcaacctatgcgagttcgcgtttgttacatcctanaatattactaattattaatcgatatttaattgtatttattatgttatttgactatatggttgacttaaatgagttgaggtatgacttgaattagtcatgtgtaaatttcttgatgtggatattgaattatgaggagttttgttgaactaagttgaaattatgagatttcagaatttacttannacctattcagtanaantgtcatctcggattcgttaaccgtggatcgtctcaaatttgtctgaggttcctaagacaattatccacacntgactgttgtattgcatatgacatttgagggagatatgatttttaccaagcaaanaaatgggtggatcactacccggcagccaactccctgggcatgt

SEQ ID NO: 76611 - DNA, 400 bp, Glycine max
  unsure (1)..(400): unsure at all n locations
aataggaataatggcaaaatgataagtttcatagttttttacctaggggataaaatcaggcttgttaaaagaaaaaaccctcaactataaatgggtgtccctggctcacaccttaaataatataggacttcacaatcacactcttgtattttccccattgagtgtgaactgctgntcatctgcacctcttcaggatttacaaaacttgagctttaataccaatgtgatgcataggaaaaaaaaggaaatttagaagtattatttttcggttagaacatcggaaatctgaaaatgtcttgtgctgctggctgagtacanaaatttgaaagctacttattcagcttaattatatattgctaaacccactacacatgaaagtataagacatacgaaagaacat

SEQ ID NO: 76612 - DNA, 464 bp, Glycine max
  unsure (1)..(464): unsure at all n locations
gacttaactctggtattgaagcgtttcctcctaaagatgtaagtcttaaacatcccttgcttcttacattgaatttctgattgagttaaaagctaattnttatcccttttgtagatgtcattcatgtcatcagagtgttttatttgcaaatactttaccatatctatgattatcctttaagatcagtttccctatttcctctttatgccttangaatagttaccatatttctttattntataatgatttgtttccataattagctaggattatgattagtataaacaaggttttgaattgttaccatattacaaatgttttccaaatgctagttagcccgtgtaatgcttgggattntgctttagataaaatttgtgtagattattattattttaggaattaaatacatttacatgtgtacaaattatgacataacattatatntaatatattatattatatat

SEQ ID NO: 76613 - DNA, 405 bp, Glycine max
aatgatgataacaaaagatgatgacgaaggtgatgacaaaaagctcatagatcaatcaaagaactactcaagtgaattaagaacaattcaagagttcaagataagaatcaagaagaattcaagacttaataagaaagtttatagtcaagaatcaagattcaagggtcaagatctcaagaatcaagatcaagattcaagactcaagattcaagaatgaagagaagactcaatcaagataagtattaaaaggtttttcaaaacattgaatagcacatgagtttttgacaaaaccttctaccaaagagtttttactctctggtaatcgattacaagattggtgtaatcgattaccactagcaaaattggtttgaaaatatttcaaattggatttacaactgtccaatt

SEQ ID NO: 76614 - DNA, 482 bp, Glycine max
  unsure (1)..(482): unsure at all n locations
ttctctagccacagagtatgagaaaatatgtgtcaaccgttcacatccatctacggtcaaagaggtcaaattttgaaagtaagaaagttggtgattccatatcttatggatattgattgagtacagcttcaaggtctccaagtttggaaattcaacctgtcaacattatcctggttagattatcactaacaagtaactaaagaaggcctttcattacttttctaactaactcaagtaaaaaatgcccattaaaggcaaatgatttaattgccttgttggtaactggtaagtaaactctcctgttacatgatcaccatgtctaagagacaatttttattttcctaatcaattcaattgtgtttttttatagtctttgttcttctcttcttcaaaattaatggtattcatatcagcacanaataacagaaaaataaacttttcaggtgcactgaaactgctataaacaagatgttcaagtccgg

SEQ ID NO: 76615 - DNA, 444 bp, Glycine max
tgcaagcttaactcgggagagatggaccatttcaagtgctttgtatgaatcaatgacgatgcttacaaagttgagctgcccggtgagtataatattagatccaccttcaatgtctctgatatatctctctttgatgcggatggagaatccgacttgaggacaaatccttctcaagagggagagaatgatgaggacatgaccaagagcaagggcaaggatccacttgaaggacttggaggacctatgacaagggctatagcaaggaaagccaaggaagctcttcaacaagtgttgaccatactatttgaatacaagcccaagtgttaaggagaaaagtccaaggttatgagttgtttcatggtccaaatggaggaggactaaatgacaccaccttgtctcaagtttagagtgtttagtttgtctaaattatggcccaatccttgt

SEQ ID NO: 76616 - DNA, 458 bp, Glycine max
  unsure (1)..(458): unsure at all n locations
gaggatctcaatatgtagttgacctttctaagtattaaataattntaaatgcttaatgtgtatctaattaattntatggatgtgtatctcaatatgtagtagacatttctataaaatttgatttaatacataagttatatctatntgtaaaacttatctgtcaaactaataaaaaaatgtacaatgaaaatatgattatgttgcacggtgtataacgaaatcacacttacgttgtgcatttttttttttcttgaaaaaatatgtacaatggaagtaggatacattacacagtgtataacagaatcatacttccattgtacatgttgtatttagcctccttgcacaatggaaccatgattccattgtacactatgcaatagaacaatactntcgtcatacatgtngtatntagccccccccnccccccctcacatcctccttatacaaaggaattttga

SEQ ID NO: 76617 - DNA, 457 bp, Glycine max
  unsure (1)..(457): unsure at all n locations
gctatcacaagagtcttgacagataaccatcatgtttgtataaaactaacaaaactacccatgagatgtgccaaaaccccatacccacgaaatttaagagagaaagaagtccacccaaacctgaattttcgaagacccactcgtagccacgcacttcacgatcccgaaaatgctctcctttcacgatttgtggcagaaatgagcaccaaaggttgaagcttcgtgtggagcttcaatggtgaatgagggaggaagaaaagcaacgtgagggagagggagagagagagcttatgaaaatgtggggctgagtgaggagagagagggttgctttttggttttaataaaagggttttctctttttctattattttatttaagcaatgtcacatgtctccatttgagtggagcaggaagggcccactttctctgtntgactgtgacccatactcagtcacaa

SEQ ID NO: 76618 - DNA, 450 bp, Glycine max
  unsure (1)..(450): unsure at all n locations
taagcttgaaggtgcgtagcccaccatnttccatattataatactggtaatgtgtctactatcattgtctatcgtttttcgtcattgaggtgccacttgagctgccaggttctccacctttgggcgtattctttgaaagatcggtgcccccttttttgcacatattttgtagttgcatcctatccgaagccattataccgacactgcctaacgaaggcaaccattatgtcctcccaggaatggactcgggaaggttccaagttagtgtaccaggtaacaactaccccagtaagactttcttggaaggaatgtatcaacaattcctcatcttttgcgtatgcccccatcttctgacaatacatctttagatggttcttggggcaagtaatccccttgtacttgtcaaagtccagcaccttgaacttgggaggggtgatgatattgggttct

SEQ ID NO: 76619 - DNA, 478 bp, Glycine max
  unsure (1)..(478): unsure at all n locations
ctcagctgtgaatggcctgttnggtgagtagacatacccatttgtttatgtgttttgcgatgatgtttgtgatgtttatatgctgaaattgcctatggaaactgttagagatgaatggtagagttaacctanggttagaaagtgagaatgtgatgttatgagtggaaaaagagtgaggctttgagagttggaaggttaagtctgaattctgtggtagatggaggttaaaatgagttaatcctagcttgaaatgtcatttacgacatgtgagaaaggttaggctatgctagagggaaaaacaaatgaccaaagtgaacatagagtcatttctagggcaaaattgggtgttgaagagtcaaattttgattcggtgagattttaggtgtaaatccagtttgaacaagtctaaatagatgttatggacttgtgtgaggtgagagtttgcttcanatntacctcattctaaatttcactactt

SEQ ID NO: 76620 - DNA, 421 bp, Glycine max
  unsure (1)..(421): unsure at all n locations
agcttatacaactnntaaacttttatttntaagaccttgctaagatatgttaatacattntctttggctttgtagctcaattcccaatttgcaaaagctagctataaatatataaagctntatttgtagtgcattcaattgtgaacgtaaatgaagtgtttatgaggaagtaattttctttttttaaagtcaataatcaattccaaacctttcttataattatttcttagttatttatctcaatgctaaagattatattgagaaaaggaataggtttgagcataaaagattgcatgacttggtaaccaacccttaagtaaaccataaggatgaaagtgatgcaattaacctctgtgatattgatgaatgtaatgagtgactaatcagagagatggatggcgacgatgctgaagttggagat

SEQ ID NO: 76621 - DNA, 469 bp, Glycine max
  unsure (1)..(469): unsure at all n locations
cgtcgcttctgaataaatgattngagccatttgcatgttatttcttcttgttgcttctagtgtgcgcttctgaacactatagacatctatgtctcattccttgttcaactttgcatcttttgttggtactcaagccaagtgtagcttctaaatatctttcccatgagtgaaaatatcttcttaaacatgattgtctttcatgattttgattagctctccttatnggtagtttgcttcagatgttgtagaatctatgtttggaaggcatgatgctttaagctattgaaacttgacacctttcttcatacttcttgatcaagtcttgtcttataatcatacacttaaaccaaggcattagtagctattaacggtgaaaattgctcctattntcgttaagaaacataatcctgtagttatatttgaggaaggggacaattctcccatagttataaattnttatgtttagttc

SEQ ID NO: 76622 - DNA, 453 bp, Glycine max
  unsure (1)..(453): unsure at all n locations
agctntgccaactatcagtgtcaggtctgttttatgtatggacacactgcatctgtatgtcactttcagtttgatgctaactatcaattcctcccttgttcttcatgattctacttctcagaattatggtcttatgtcttagaacaattctatctctagacaacaacatagtgataatcatgcatctaatgtatggatcaacagcaactataaatctgctagttctatcactcaatcaaatcccagtgctatgttgactaatgtttcaaatcagcctagtttaaaagatccctaactcagatgcatcatttcatgtgactggagagtcacaaaacattcaaaagattgaatccattgaagcatctgaccagctcttcactggaaatggtcaaggtttgcctattacctctaccggttccttctcttttatttcttctatcaacaccaacattt

SEQ ID NO: 76623 - DNA, 475 bp, Glycine max
  unsure (1)..(475): unsure at all n locations
cccatcaagtggtatcagagcacaagagcttcaagtaggtgctccttatacctccattaattntttttgctttaccttctcttccatagttgtttcttcattttttctccatgtatctcctcatatgtcttgtgctaaatgtttttaacttgattctttagagtttccaccgattaaacttgctatagaagctacatttgattttctatggttcaaatttcttgttcttgttcttgaaccatgaattgtgttgagtttaagttcctttgagttatgtcttgttatttttgtggctaaaacttanaccattaaattcttacaaaaatattaaagtagaagaaaacctcanaaatctagagtgacttgttcacctattgtagttntgtcatagaagtcatgtctagtcatganacttgtcacataagatttcttatgttgcgctgaatatttatttcttggttctatgtctaactca

SEQ ID NO: 76624 - DNA, 443 bp, Glycine max
  unsure (1)..(443): unsure at all n locations
caagctagctattagagaggtgggtgtagctatattctatcttctttaggaatcttcttaaggaagattcttaaggacgtgagcttagttaggagaggagtgtgtgtagctaagctctagcttctcaaggaagttttctcaaagaagcttctcaaggaagttttctcaagaaagtttctcaaggaagctacctagtctataaatagatgcatgtgtaacacttgttgtaactttgatgaatgaaagtcttatgagacacacttcaaagttccacttctctccctcttttattccttcaatattgtgctccctcctctctctttctctccctctttcttttcctccattgatgcatccttccaagcttcttatccaaggctcatcttggtggtgaagctctgatgtgccatcattttcttctattatctaaaccctttntgcac

SEQ ID NO: 76625 - DNA, 501 bp, Glycine max
  unsure (1)..(501): unsure at all n locations
gacctatgatactaagcttacatggagctatatcaaagaagaagtccatatcaccacatgattcataaagagacctcatatgtaagttactcatttataccaatttaatgatgatcatgaggaccaaaacatttcattcacaagattagtaggctactcaaaagtaggttattgaagtgtgtttaaatgactcgtgttcacaagaaaaatatcagtagggaagaccttaatttaccatacnaattgagaaggggaacaacttgtagaanacattatctgacaagagattcatacaaatttggatcagtaaagaataaccctatcacctatcatatacccctntgtcacaatcaactcattacccttctatagatagcaagatcatgagaaattctcaggataaggtatagtctatgtagatggctntatctcttatcttggcaatatcttgttatttcactcagctatttgcaactcaattgtgcactaatagatctcaag

SEQ ID NO: 76626 - DNA, 417 bp, Glycine max
  unsure (1)..(417): unsure at all n locations
agctngccgccaccattgctgctccctgctattattatatatccgggcaacttcccaagttcccctttttctcttctttcaggtaacccttttctttcaaagttgagatttgtgttcccattcgcacaaaatggttttatcctcagtagtgttttgttttttttcaagcataattggttcaaatcaaagtaagtaagtaatctttgaccttgaaagttcagtttcaaagggaaaattttgatcgggtaatcccgtangaagaaatggttaggttttcttctgcataattcttggttgtcaaatgatatcgttacaaaggttgaactgtaaactcatctgcttggaattggacattggcaattctctgtctctagaaattaaatattaactgaaaatcttagtataagtggtttctgg

SEQ ID NO: 76627 - DNA, 456 bp, Glycine max
  unsure (1)..(456): unsure at all n locations
ctganccaaaaggccattacagatagtaagtgtttggataccaacactactacatgagaagggcaaaggcgtcattgagcaaccaattcatgaaatctaacaagataaacttggaccttgtttcatttcatcttctgttatacattatcgatggctctgtctctgttccaaaaccccaccttccttaaacttaaaccccaaccttcaaccgccacgacgccgaggtggngctacgttcgggtgcggtgcggtggaccgcggtcccatcgaacccctctggtgaaaggccgaatcctgagcatcgaagcaatccaagccatccaaaccttataacgcctccaccgaaccaaccctccagaactcacctccctcgtctccaacaccctcacgcgcctcattaaatccgacctcctcgccaccctgcgggagctcctacgccagcagcactgcaccatc

SEQ ID NO: 76628 - DNA, 449 bp, Glycine max
  unsure (1)..(449): unsure at all n locations
agctntgttcanggacttacccgttgaagatttatgaacgatgaagaacggatgaagaacgtcaaagaacggtcgaaaccttcgcgaaattccttacggaaacgtttcggaagcgcctcggcttagattntcttcacggaaacaatttttccaagcaaattcgaacaagagcgaagtgcctaaggggctgaacccttttccttctcacttcctcccctatttatagcaaaataggggagatgcttgccggccagctcgcccaggcgagcagggttgcttcctccagaagcaacagccttctggaggaatcttctagagggcccaagtgggcctggttgctatttgcacccccattnttactaagtacacccctctctgcctttnttttggtggattctttttcgtaaagttacggaaacttacgaatttcgtaacgatacttggtttct

SEQ ID NO: 76629 - DNA, 460 bp, Glycine max
  unsure (1)..(460): unsure at all n locations
cttcgattcaatctatgtacccgtagtggtccacattgtgtttcgtgcatttttattctcgttntgtttactttntataccccctcttgacgtgcttgagccattttacttaagtcatttctcgcttaacttaaaaataaaataaatttccaccgaacttttgaattgtattatccattaacttcggttaaaataaattccgaccgttcggtcgtgccgtaaccacgttggaaatcanaaagaggtaaaaaataatataataatcaaaaagacatctttagtaaaataaagcgaanaatcaatcgggcgttttctctttgggatttctcattcttaatcgaattgattaataactaaagtgaaactaanggctaaaatcaattcgcctagtcaagctcgtccataaaaataggctttngaagtttgtcatttcattntctcactaagtaaaatggatcat

SEQ ID NO: 76630 - DNA, 478 bp, Glycine max
  unsure (1)..(478): unsure at all n locations
gcttctatgaaggttcgttcctaatttctctacaattgcatcacctctcaatgagctggtgaagaagaatgtggcatttacctgnggtgaaaaacaagagcaagcctttgctttgctcaaagaaaagcttactaaggcacctgttctaactcttcctgacttttctaaaacttttgagctaaaatgtgatgcctctggagtgggagttggagctgtattgttacaacgtgggcaccctaatgcttattttagtgaaaaacttcatagtgccacccttcactaccccacctatgataaagagctttatgccttaataagagccctccanacttgnngaacatacctngtttccaagggaattgtcattcatagtgatcatcaatcacttaagtacattagagggcaaagcaagttaaacaagaggcatgcanaatgggtagagtacctagagcaatttccatatgttatcaaatacaaa

SEQ ID NO: 76631 - DNA, 195 bp, Glycine max
  unsure (1)..(195): unsure at all n locations
tttacttcagaataaaaatcaatgtatattgatgctctcctttgggtgacacaccaacacacaacatacaaacatgatgatgcttgataaaatntaacattattggacaattaaatatgcaccaattagcagtatctatttcctttgggtgtataaataaaactaatgatacacacaaatcgcctacaataatat

SEQ ID NO: 76632 - DNA, 495 bp, Glycine max
  unsure (1)..(495): unsure at all n locations
tactcaagcttcaatggctcaatgagcaaggggaaatgatagtcaatcatcaagtaaaaataccttnttctantagagactattgtgatgaagttttatgtgatataatccctatggaagtaggacacattntgttgggtagatcatggcaatttgacaagaaagcaatccataatggtcttaccaatgaaataaccctcacccatggaagtaaaaaattcaaacttgttcccttgacacctttacaaatggctttgggatcaagtacaaataanactcanatcagacgaggaanagaatagaataaagaaaagaagaaccaacctttaatggttaagaaaggagtgtaaggaggtaagtatctcctctaagaggttagctaagaaggaaagttattntgcaataaagacaaacattaaagaaattttccttcttagacaacctccacatctttacctttgtaaaaggacacttgttagcactgccacacctctt

SEQ ID NO: 76633 - DNA, 318 bp, Glycine max
agagagagagcgagacaccgagagacagagagagagagacagtcgtggacaagcggccttaatcacttaagagggggggtgaactaagttcttaagatgtcccaccagcaacatttaaccccccttgaaataacccatgataggctcataatgccggagaagaagaagcactccatctaacaatgttcttttaaatgtgcaagacaaagtaaactacactaaaataactaagataagggaagagagaatcacacactcgttgtatcctggttgggccacttcccatgcctacgtctagccctcaagtgacccacttga

SEQ ID NO: 76634 - DNA, 482 bp, Glycine max
  unsure (1)..(482): unsure at all n locations
ttctttacaatcaatctgtctactggactaaaattctaaatgcaagttcacgttcttattctttctttgtctaacatacacattntctcaactcatganaagaaacacaaactccatccaaatcatgcactcaattcaaaataaagacatacancccatttcacagaaagataaaagtgtttcactaccatgtcatcaaaaataagttaaactgctcaaaatgtttcaggataagcatactaactattcatagataaaactaacatgtaaataatgtactaaaaccataattatactaatagatcanaaagcacanaaaatcaacaggaatttaaagatcctgtgattggtcctgngtgtcctgtgtatgaccctcttcctcttccaacaaatgaagtacatgagtagctatatgagaggtgttcggagacaggacttgggtggtttgatcctcaagcatggaagggtctgctgactgttgt

SEQ ID NO: 76635 - DNA, 455 bp, Glycine max
  unsure (1)..(455): unsure at all n locations
agcttctcaaggaagtttcttaagacagcttctattgaagctacctagtctataaatagaagcatgtgtaacacttgttgtaactctgatgaaagagagtcttgtgagacacaactcanagttcaacttctctcccttgttcttccttcaatttcgggctcccccctctctctttctctccctctttcttttcctccattgaagcatcctctccaaagcttcttatccaaggctcatcttggtggtaaagcttcttcttccatggcttattccttagtggatggcgcctcctctcacctcttctcctttgtcttccactgcatctccatggtggaaaatcaccattaaaggatctcattgaagctcaaagatccagcctncatagaagccctacaagcaagcttccatcaagtggtaatcagagcacaagagcttcaagtaggtgcttcttaaac

SEQ ID NO: 76636 - DNA, 459 bp, Glycine max
  unsure (1)..(459): unsure at all n locations
cagtcttcatctcgnttactttcggtatttatttgttccgctnttatgagctntcaaccgtttatttaagccattatctcgcttaataattgataaaatgaatttcaaccgatcatttgtgttgtaatctcgtttaatcacggttaaaacaaaatccaaccagtcgtttgtgcggtaacctcggttaaataaaaaaaggcaaaaaaataataaaataatcaaaatatctttgaaaaaaataatgataaaataatcaaaatatctttgaagacaataataataaaataatcaaaatatctctgacaaaaataataataaaatgatcaacaaaatcaatcggacattntactntaaaagtttcctttaaatgagttgataataacccagtgaanactaaagctaaaatcaactcacanaccaagctttctccgcaaaaatcacttgaagccgttttaaagt

SEQ ID NO: 76637 - DNA, 447 bp, Glycine max
  unsure (1)..(447): unsure at all n locations
tatacattctcgccgcttctgatgattatattcccccgnaggatagaagcaacgaccacattataatatccatttgtatatagttttactccccctttgatttgcaatgttcgcttatatgagacagctgaagatttcatatataaaaagttgtcttataaagattccatatatcttttatctatctcttcccctttggcaacatcaataacttatcatgaatagataggagaaaaatgttaccacctgctgccatgtatgagaatcaagtgataccaaaaggctttataaaatcattcaatattaatcatgcaaaaaacaagatcaatatcacatcaatcatatacacaatcaaaaactttcgccaaaacacaatataaaacaagtatcaaagactaattatcatatatgaaatataattcgtcaagtcaagttacacacattgaa

SEQ ID NO: 76638 - DNA, 479 bp, Glycine max
  unsure (1)..(479): unsure at all n locations
tggcttgaaagtggggggaggagtttaaaaaatttagaggaactcaagtatatttcggttcttccctgccagccaacaaanaattaggaacacaagagtccatacagcccctntctcatcaaaacatattgcaggctgtagctaatgatttcaaaagcatatgcaattaagtatggaagatgttggtacattntttgagtatgattcacacaggagtcaacactttaatcagtgactntttaatacatatcatgcaaatattgagcatcctacttttatgttgtttaaaactaatgtttgtaagtcgaaaatgttaatttataaagaacccagaaatggcttctttcagctgttntaggaagttcatccaatgaacaacaaatttcttctatgtgcttatcaattatgatgttgaaatatagtaagtatataagctaaaaatattttaaacanattatttagcagcgaaattatcctct

SEQ ID NO: 76639 - DNA, 452 bp, Glycine max
  unsure (1)..(452): unsure at all n locations
agcttgtangataattatagctaataattagttgttttcaagctngtggntaaacctgctntgtaacagagcagaggttgtctgggatgcttcccaaatcctaaaggccaatcaacaaacaaagacaacagatcagaagatttttggagcagcagtgcatttgaaatagatcagggtgcacttcagtcccagaaaagcatctcatcaattggcataccttctgatcctcaaagtagtgctgacattcagattgattctcctgaatatgtcaatcatggcaagtattctgttatagtctgcttatctattatctctggtggcttattagttagtctcatacgttatcaaagggtgcttgtaatcttgtatcatcctgggaaccattttctctgatgcggaaacaatcttgccagacatatttgccaactggtcggtatcttaatattttcatg

SEQ ID NO: 76640 - DNA, 401 bp, Glycine max
ctaacagatatgcgtgtgagttggacaagggctgttattattgctgtatcccagtacaggctgcattaaacaatgttagaagagtagtacatctttacttattttcgtggccaaacccaatgcaggaataacctagtatcggtttctaggcgacagtgtcttaaagttggcattggcataatgggctaatgaaatagggtgccactgtcaacctcttaaaacaattgtacggggattgtggctgcttttcaattaagatcatagatagcaaattatcaatgacttactaatttggaatagcattctaaacttaaatatatcaccttaaaaatagtttctcaggacgatggtggtgggggaacattcttcttatatggaggaaaaactatagaacccttgtt

SEQ ID NO: 76641 - DNA, 443 bp, Glycine max
  unsure (1)..(443): unsure at all n locations
agcttctcgatatattatgtgcctgaatcggacttccgtttgaaaaattattaccatttgaatttctcgagagctttggctgttcagtttcgagtgtctcgatatattatgcgcctgaatcggacttttgtgtgacaagttatgaacatttgaatttctcgagacctttcggntttcaatttagatcgtctcgatatgtgatgcgccagaatcggacttccgtgtgacaagttatgaccattggaatttatcgagaccttccggtgttcaatttcgagggtctcgatatattatgcgcctgaatcggactttcgtgtgacaagttatgaacattggaatctctcgagaccatacgatgttcaatttcgagcgtcttgatatattatgcgcctgaatcggacttctcgttgacaaggtatgacctttcgaattcttgagagctt

SEQ ID NO: 76642 - DNA, 321 bp, Glycine max
tctcgatatattatgcgcctgaatcagacttccgtttcaaaagttatgaccatatgaatttctccactgtattccgtgtgacaagttatgaccatttgaatttctcgatagcattcgttggtcaatttcgagcgtctcgatatattatgcgcctgaatcggacttccgtgtgacaagttatgaccatttgaatttctcgagggctttcggtgttcaattttcagcttcttgatatattatgcgcctgaatcagacttccgtgttacaagttatgaccatatgaatttcttcactgcattccgtgtgacatgtgatgaccat

SEQ ID NO: 76643 - DNA, 443 bp, Glycine max
  unsure (1)..(443): unsure at all n locations
agctataaggacanaagttaatggtgatgcatatgaagtcccttagcggcgaaggcgacaacatctgtacgtaggcaacaaacactcacacctattaccgaggatgttgaacatgtggatcatgtacctgacgaggtccatgagcagtttcaggatgcagttactaatgatgtagttgttgatgtccaggatttttcaggcgggccccacgataaatcagttttgatggattatgttcatcatgtggcagtcacaatttgaaatggagatatatttattttttaaaatatatcatattttcataactattttttatttaagttgaaatgatttatattttattttcataaacatctcgagttgaagttatccttgcatggaagaaaagtagaaaanattggaagacctgctccaaagattgaagacataagtggttgtcacaa

SEQ ID NO: 76644 - DNA, 482 bp, Glycine max
cgcttaattttttatatggaggaagaaaaaggaataggaaacaatgcccgtgagtgattggttgtaattcattactcaattttttcttacaagctaacatgttaataatattgtggcaagataattcgagaaaagtcaaacaaattcaacttcttaactattattaaatctctgtaaaaaaaaaaactattattaaatcgagagttaaagtggtaaatagctagactttagtttaatcaaatcatatagaactgattaatgattacatgacctcattcaagatgtcctacataactttccgacttcattcaaaaaaagcacatgctacactgctactattgctgtgtaatgtgctctctttccactccaacgagaaggacagaaagtggtcacatgactctcagtttgacgacggctaatgaatgagatgcttcgagattttgtgacgtaataagaagctggaaatctttgtccatgctcac

SEQ ID NO: 76645 - DNA, 435 bp, Glycine max
  unsure (1)..(435): unsure at all n locations
ggatccttaagcacctgggctgcagcttataatttttttcttagatttgaatntaaacttgggctaagcacgcaggtccactaagcgaactactttgagaaaccaaatgtctctctggctagcttagcgctgcggtccgctaagcgagagggtaaaaaattgcttaagtaagtgtaacatcagttacacttacctttgccaaaaaatttctgaacattgcttgcatcttctctctcacacccaatctcgagcattctttctttctttgtgcatcttcacacatcattagctatgaaagatccaagtaagttcctcatatccttttttcttttctcttttattttggtgaaccttaggttagaagaccatagatttagctnttgattgttagggcttgaatgatttatattaatgaaagaataggaccttatacat

SEQ ID NO: 76646 - DNA, 477 bp, Glycine max
  unsure (1)..(477): unsure at all n locations
tactaagctcaacttatatccatgcctgccactnttatctntacttanattattcatccttaagctattcctttattagcttcaaaagctcatatatttccagttcaaatggtccgaccatgaaaattctcccatcacggatgttggcttacatattttaggcaccaaggaagtcctcaaaatgtcatgatattcatgcaatgaattaaagttcttggttactaaaccaatggcggagcatcaatcatgttaattatgggaaatttccataagttcttctataatattcatgcaagcggagcatcaatcttggttacttagtacatgaatcagtactcactaatatgtttgccagcaagaaatcggctactttgtgtaattcctcaaccatccaaattacatttgaaaggcatcttagtgattcctttactccttctgagaaatgcattagtttttgctttcctacatganaatgat

SEQ ID NO: 76647 - DNA, 451 bp, Glycine max
  unsure (1)..(451): unsure at all n locations
caagcttgtgtgtntagagacaatcagttgcctttctgcaatattgtttttgtttaaatatctctaattttgtcatgtcctagatctaaataatcacttctactttctgcagagttcaaaaaggtttgtatatttcatctattcttagtgattactccatacttatgcagaaggaagatgtgggagctatggaatttacgcacaaaattttcaaacaaatcatgtggcgttcttctaaagaacatgttgctgatgaattggaacttccctcccaagaggagtgcctctcttggcttacactctcaccagtcgaggagcacttttaccagaggcaacatgaaacttgtgttagagatgcccatgaagttattgaaagtttgagaagtgatattcttaatagaaaaggcccaggtttttgcccagtcttatgtannattaattaagtcatttg

SEQ ID NO: 76648 - DNA, 429 bp, Glycine max
  unsure (1)..(429): unsure at all n locations
agctngagatgaggaagtgtagaagggtgaatcttcctgcttttatntcgtgaccacagagtggtacctggagatatgtcgcggnggtcaggagaccttgtggacgtcaggtggggtgctattgcccaaaaccaagcttgaccaatcccgacccaacccgagcatagtcagtcagtgagaacctgtgatgtacctaaacaggcgagctcctagcagtcaacagataaaaggaacaaggaccacaaagcaaggagacttgtgtggtggctggccagctgtgaacttaattgatatatgggatatggcctctagtaatcgattaccaagggtgggtaatcgattacaaggcttaaaaatgaagacaggaggctaagatggtctctggtaatcgattaccaaggggtggtaatcgattaccaggcttgaaac

SEQ ID NO: 76649 - DNA, 428 bp, Glycine max
  unsure (1)..(428): unsure at all n locations
ccttgcggattggtcttcgccagtgaaaggatcgatgtgggtccgatatgaggcaaatttgatcatcctactaggacgactgagaaaactggggcaaatgaagagggtgagaaagagggagaaacccatgctgtgactgccattcctatacggccaagtttcccaccaaacccaacaatgtcattactcagtcaataacaaacctcctccttacccaccacccagttatccacaaaggccatccctanatcaaccacaaagcttgtctaccgcacttccaatgacgaagaccacctttagcacaaaccatataaacaccaacataaaggaattttgcagcaaaaagcctgtagggttcaccccaaattccgttgtcatatgctaaacttgatcccatatccactcaataattcaatggtagccataac

SEQ ID NO: 76650 - DNA, 447 bp, Glycine max
  unsure (1)..(447): unsure at all n locations
agcttctataatattttgctggattctctgcttttctccacattctaagtttctcgtacttgaaacctttaaccttngatgttattttctccttctccactatgagggaaggtttctggttccaattttttccttaacttctttgtgtgtgtgggtgttttgggtttggacttacttagatggaagtttacatgtgggtttttntataattatttttaaaactttttgagagaaatgagggtgggtttacaaagagagtgagtgagagaagattaattaataatagggaagttataactttctcctttatctgatgggattcaaataacacctttttaaactgttgttagtgcagtaaacatccatatatggtacatgctccagaggaggatttctcanactntacttaactcaatctaatttagataattaaataatactaaaatc

SEQ ID NO: 76651 - DNA, 470 bp, Glycine max
  unsure (1)..(470): unsure at all n locations
tttcttaataccctttaataaaacttanactggttttatctattanaatattaaattattttttattttcactaaaaaaaattctaaacccgctagtaatgatatgtctcattatagttgaagacttgaagtgacttaaaatgtgtttgtgtttcggtacaatagcctttcgagaaaagactaatcatcatgttcaacgattcatctaggtttcctttggctgcatgatctctagctaagttgtagctatcaattctttctaatacatatttcatgttggataatagaatactattagaaaagtatttttctacaaatgttactttagacattctacgtcgcttattaatcatcgtcgtagtcaacatcgtaaaaaatcttgacttcctacaacgttnttctaaaaaatagtcttagaaaaaaatactcttanaatatttttctaagacggttntaagctaaaaatcatc

SEQ ID NO: 76652 - DNA, 477 bp, Glycine max
  unsure (1)..(477): unsure at all n locations
tctccattcatcanaagtagtgattctctattcgaaaggaagagagatcccatatgcggagtgttctgacagtgacggngtcgtcgtgcttgcggcgtgaggtagtgggagaaaacggtgtcatctcgatctccaacgacttcaatgctntttcttactcttcttcattattcttcttctgttgttgctccttactaataatcgcacgagatgcacaccttgacggtggaaccaatgagaagtagattggggtttaggctcaacagagaaaggggtaacagattgtgaaaagaaagaaatagaaaattttttaacatgcaaaaaatcattgtttacttttttatataaaaaagaaatcatgtgcaatcccacttaaataaagattacacgtgacaccacacgtgatatgcctgcataatctattaacggccacatggacagataacgattttgaactaatgacaagaacttatacaa

SEQ ID NO: 76653 - DNA, 315 bp, Glycine max
caaaagttataacacagggtacacatggcttctatttatagactagggagctctcttgagaagctttcttgagaaaactctcttgagaaacttccttgagaaaatttccttgggaagctagagcttagctacacacacgcctctcataactaagctcacctccttgagaagcttccttgagaagattcctaaagaagctagagcttagctacacacacctttctaatagctaagctcacctccttgagatgagaagctagagcttatctacacaccccctatgatagctaagctcaccccatgacaaaatacatg

SEQ ID NO: 76654 - DNA, 484 bp, Glycine max
  unsure (1)..(484): unsure at all n locations
tcanaatcganaactacacgtatgaagatcgacanacgatgaagatcgaacgaagaacgacaatgaatggtgaagaacattcacgaaattgatcacaaaaatgttacggaagcgttacggaagcgttacggaagtgcctcggccttgattttttccttctttcttcttctcctcactaattttaagtgaaatttgtcgcataatcttatggatcgcgcgacaattggcattaagaagctcaatgtgactggcaagaatccgcatgtcgacaaagaattatccctagacaaaattagggtatgatagttgcccctttntacttantctttattggatataaaagggaagtaaagataagacactaatttcgttcgagccgaattttcacctaaccaaccattagctcaatcagcgaaacctgtcaaaagaaagagcataaaagacattaggtgcatcaacaaacgccttggtgccttgaaattga

SEQ ID NO: 76655 - DNA, 458 bp, Glycine max
  unsure (1)..(458): unsure at all n locations
tgcaagcttggatagattaanatcagcgatactttagtgtctactttggntgacaaatggagatttaaatcacacgtttcatcttcttattggtgaatgaacaattactttgaaagatgctgctctctatttgagtttacgcattgatgggaaactaacaattgagccaacatattatgactaggaacaaatatgcgcagaatatataggtgttgttccccacagaatccactagttggattaacacttagactacaatggttaaaagaagacatgtttactctcccaacataacccacaccacaataattagcagcccattgtagagcatatatattatggttgattggtggagtgttgatgccatacaagttatggaacaacagtcacctaatgtatctacctctattagcaaatcttgattaggctgaccagctcagctagggttcaacatgttt

SEQ ID NO: 76656 - DNA, 485 bp, Glycine max
  unsure (1)..(485): unsure at all n locations
tctttgttcatatacaagcagagcattgacaaggtntgtctcaatgactatgtcaagaaaaccaagataaagagggaaatgaacagtgccaacaaacccaatatcatcatgatctggcccattgctctagccttcttcatgaccattgccacttttttctgatatcataaattatgagacgcacttcaactttcactactttctttgctatgctcacctaataatgtattacaatcattcacaagcatcatacaaataaaaaaaacagagagagaagggaatctaataggtgttggcaataaaaaaatgttgataaacaactatacattaggttgagaaaaaatttgattgtattctcctaactcttactcaagttctgcgtgttatagatacctgngtatgcacaaaataatctaaggtttcatcattgtcatttgatccatagttcttacaagccaacaaaggttgttgtcaattgttcccta

SEQ ID NO: 76657 - DNA, 493 bp, Glycine max
  unsure (1)..(493): unsure at all n locations
ntgtccttagatccctcttgttggactaggcccagtttagacagccctgctaagtttatactaacttaaaatgagttttgttcgcagatccctcttgaagactagactcaactcaggcagcttccataagtttagcctaatttagcctaagcttcgtccacaaatccctcttgtaagactaggcctagactatgtagaagcaaagcttcatggtgaatcaaaggtgattcanaggtggtttgatgataacaatgttgataacaaaagatgatgacaaaggtgatgacaaatagctcatagatcaatcaaagaaaacttcaagtgaatcacagatcaatcaaagaacaactcaagtgaatcaagaacaattcaagagttcaagatgagaatcaagaagaattcatgactcatgaagatagtttagagacaagaatcaagattcatggttcaagatctcaagagtcaagatcaagattcaagaatgaagagaaga

SEQ ID NO: 76658 - DNA, 449 bp, Glycine max
  unsure (1)..(449): unsure at all n locations
agcttctttgggaccttgaacaagcaattaattcctctttcagaaccatgctatgtgcgcgcgactggtctatttcttcccttcgcaacttgagttcactattgctaccccatagagctacgcgaaatatgttccggccatactcttacttgcgagccctcttggtctcttgatcaagggctcttgcagaaatngcattctattcccgtaacccgacacactccttccgaacgtgtgtagcggtcaacttgaacttctccttggcaagctcagcccttcctaactctctcttgagaggatggacttatatcgtctattccggcgcttcaaaactctctacgctgacgacttttaacttggcgagccaatctaagacctgtatatgaactttcattcattcgtgggacccaccaatgatgccattacgaatgcctctaagctgttgatct

SEQ ID NO: 76659 - DNA, 477 bp, Glycine max
cgtggttgagaccattgttagccttatgcctgttgagaaattagctgttccaatcaatttcctttttggacttctgcgaagtgcaatgatgcttgattgtacaattgcttctaggcttgacatggaaagaaggactggatcacagctagatgttgccactcttgatgacattttgataccatctttcacgcatgcaggtgataccttatttgatgttgacacagctcatagaattttggtaaacttctgtcagcaggatgatagtgaagaagaaccagaagatgcttctgtttttgaatccgacagccctatttcaccctctcaaactgcactagttaaagtgtcaaaactaatggacaactaccttgctgaaattgcccctgatgcaaatctaaaactttccaagtttatggtcattgcagaaaccctacccgcacatgcacgcacgattcatgatgggttatatcgagcaattga

SEQ ID NO: 76660 - DNA, 435 bp, Glycine max
  unsure (1)..(435): unsure at all n locations
agcttgctctanattacatnngatgttgatttatgggaggaggttgtatgtcatttttgttttttaagagtagtgtcccactggtaaaactaactntccaaatgtttgccttcgcaggaaatggctccgaggaagcttgcctcgaagaggtccaggaaggacaaggcagccgaaggaactagttccgctccggagtatgatagtcaccgctttaggagtgctgtacaccagcagcgcttcgaggccatcaagggatggtcgtttctccgggagcgacgcgtccagctcagggacgacgagtatactgatttccaggaggaaatagggcgccggcggtgggcatcactggttactcccatggccaagtttgatccagaaatagtccttgagttntatgccaatgcttggccaacagaggagggcgtgcgtgacatg

SEQ ID NO: 76661 - DNA, 465 bp, Glycine max
  unsure (1)..(465): unsure at all n locations
ntntggagtaganacatgggaccaactcattntatttcannaaaaatgttgtatctagtcaaggtctgagagaccatacaagtttcctagcgatttctaattatgtgggccattaagtctatcatatgttgacaatagccgagaagcccatgaatctcttcgggggcggagtaggtgtccgccatcgccttggccttggctaacaagcggngaagttcttgactcccgttcaaggtaagagcanaccgatccatccacatggttgcctcttggtgtaaagagtcgatcacccttcctctagcctctntttccgcgtatacttgggcatactcgtccgcgatcctatgctcgtgagccgtggctagacctaactcttcttggtacttggcgatgatagctagcatgttggtctccgtctcgcataaacgctgagaacaagctcctttggaccttgaacaggcaact

SEQ ID NO: 76662 - DNA, 450 bp, Glycine max
  unsure (1)..(450): unsure at all n locations
agcttgcttctacagtaaggttagctgaaacatggacacgagagtggcaagcacatcaaccatctgattttcctctatgggaacatggtggaaagagacatcattgaagaactcgaccatnttcttgatgtaggcctgataggttatcaatttgtgatccctagtgatgcaatcctaccccgcaagggcattggatagaaaactgcaagtagattgggccagatatgcaagagaaggccctagggttcttatgagccttagggtagatttcgggcccatgggctaagtacgagcccacttatctttataaatattagattaaggtttcattatttttgggccttgtatttagggctccataatgtaggtagggtaccctagaaatataggatttttcagcccttgtatnttanggcacctagactagtttttgtattacgggtagttttg

SEQ ID NO: 76663 - DNA, 486 bp, Glycine max
  unsure (1)..(486): unsure at all n locations
cttgcggatatggacttcgccggcagaaggatcaaagcgggtctgaaaagaggcaaatttaatcatcccacttggacgaatgaganaactggtgcaaatgaagagggtgagaatgagggagaagcccatgctgtgactgccattcctatacagccaagtttcccaccaacccaacaatgtcattactcagccaataaccaaccttctccttacccaccgcccagttatccacaaaggccatccctaaaacaaccacaaagtctgtctaccgcacttccaatgacgaacatcacctttagcacaatccataaacaccaaccaagaaatgaattttgcagcgagaaagcctgtagaattcaccccaattccagtgtcctactgtcataccctaatttcgtccggngaccttngcttgatgacatgcgacttttgtttggtccttgtaaggtgcttggcacccatcattaggcaatttgtgaaactctg

SEQ ID NO: 76664 - DNA, 445 bp, Glycine max
  unsure (1)..(445): unsure at all n locations
agcttatgcgcatatttccttacaaacgttcttttgtcaagacattctattaaccgaaaaaaatgcacccatatacaatcaaggcagcttcgttacctagattatttacacgtacttccaaggtgtatttgttacttacatcacacacctccttggctaaattcacatacatgcatactcaaagcattttggggtaccaaaaattgcacatgtgcacatcttggtatttctaacacctatacatacacaaacttcatgatgaatcttgactatctacacaataaggtgctacatttcatgctcttttcaagtttttgctacctaaagccgcatgcaaattcaagtatattntcctttgctgactaanattgtattcaaattaagaggtatacattntttggtaatgtatcttctttacataacatgcaacatatttatgtatatt

SEQ ID NO: 76665 - DNA, 429 bp, Glycine max
  unsure (1)..(429): unsure at all n locations
agcttataaaacatagcacanactatttantttataatccaaataaatntcttaaaaactatttttaaaaaattacttcataaaaaaactactagcatttaaaatgccacttaaatttgttttcataaaaaaaaattatataaagaattttcattttcattttagcctttaaacctacgaagtggagatcctcgtcctcacggaaagcatgatataggagccaacattntttgtgctaagtgcaaaccacgccagaatttcattatttccattaactcccgattcggcttaaattggaacaccaccaattttcgtgggaaccaacaaaacaaaaaaagggtccaattttttgaaaattattaccatcattcatattcatcaacgacccctcttctgtgcccacttccaaatcttctcctctcgctatgg

SEQ ID NO: 76666 - DNA, 468 bp, Glycine max
  unsure (1)..(468): unsure at all n locations
tcctagaataggaattatatatcatcaaccatcatttttanatcaaagccttctttatcattttcactataattacatctacaaatatcattttaggaaattaaaatcccacaaatagccctccgatatctctattcagagggattttttggaatcaacgcatagcacccactacagacactattcagccccccgctatttggtccactatggacactacactaaactgctccattacagcagcccccgtagcgggcaggggtcactctgctctgctacactgctatagcatgctatttaaaaccctgcatagaacaaacctcatcaaacataacatacctcaaatggattcttctcatactctgtatccagngcactgagcagtgcaggctttacatcagtaagaaaccctttaatgtcntgcaggagaaaaaccttagagccttgaaaacaaaattgagagaaatc

SEQ ID NO: 76667 - DNA, 447 bp, Glycine max
  unsure (1)..(447): unsure at all n locations
agcttatgacaatntgaaatnntcgagagcttccgaagattaatttcgagcgtcttgatatattataagtctgaatcggacctccgtgtgataagttatgaccatntgaatttctcgagagctttctgtgttcaatctcgagcgtctcgatgtattatgcgcctgaattggacgtccgagttaaaaggtatgactatttttatntctcgagagcttctgttgttcaattntgagcgtctctttatgtgatgcgcctaaatcagactttcgagttaaaagttatgaccatttgaatttctcgatagctctcgttattcacatttgagcttctctatatgtgatgcgccagaatcagacttctgtgttaaaagttatgaccatttgaatttctcgagagctttcgttgttcaatttgttatgcgcccgaatcggacattcgtgtgaaag

SEQ ID NO: 76668 - DNA, 480 bp, Glycine max
tgaagtgagacagtgtggaagagtcagtcttcctacttttatttgttgaccatagagtggtacctggagatatgtcgcgggagtcaggagaccttgtggacgtcaggtggggtgctattgcccaaaaccaagcttgatcaatcctgacccaacccgggcatagtcagtcagtgagaacctgtgacgtacctaaacaggcgagctcctggtagtcaaccaataaaagaacaaagaccacaaagcaaggaggcttgtgtggtggctggccagctatggatcttgagtgatatctagaatatggcctctggtaatcgattaccaagggtgtgtaatcgattacaaggcttaaaaatgaagacagaaagctaatatggcctctggtaatcgattaccaagggtgtgtaatcgattacaaggcttataaatggatacaggaagttgagatggcctctagtaatcgaataccaaggcgtgtaatcg

SEQ ID NO: 76669 - DNA, 272 bp, Glycine max
acgagcggcgaccaatgaggagaacgggagctcaacgatgttctcaagggatccacccgggacgagagcggaaaaaaggaaaagggagaggaggcgccaccctaaggaaccaccgacggaggaggagtacccacaccaagacagtatcttggagaagaagccaccacgagaagctacaacggacgaaacgaacgagagagagagacagaggaacgggcatacaattgaaggaaaaaaagacggagacaagcggaacttggaagagtgtctca

SEQ ID NO: 76670 - DNA, 486 bp, Glycine max
  unsure (1)..(486): unsure at all n locations
tgccacccagctcgcccaggcgagcaaggttgcttcctccagaagcaacagccttctggaggaatcttctggagggcccaagtgggcctggttggctattgcacccctatttttactaaatacacccccctgccctttttttgggtgattctttntttcgtanagttacggaaacttacgaatttcgtaacgatacttgttttctttccgtaatgttacggaaccttgcagattacatnaatcatccctttttgacttacggaatgttacggaacctcactatttgtgcaacgatgtttccttttgatttccggcacgtcacggaatttcacaaattgcctaatgatgggtgccaagcacctcataatgaccaaacacaagttgcatgtcaccaagcaaaggtccacggacgaaattagggtatgacagggtctataatggaacgagaggaaaagaggtttgtgtactgtatactnntgtcctcta

SEQ ID NO: 76671 - DNA, 404 bp, Glycine max
  unsure (1)..(404): unsure at all n locations
agcttgacacagngcttgacagagctcatctccacccgcagcacanaagaaattaggtggaaaaatgaagataaactgtgttaagcaagaccaaaaaacatacaagaagatactgtcagtttgtttcactaattaaatcaaataacaggtttttgtagcttatatatatcattaagaaaccagtacggcagtacctgaaggaagtgaattgtcttttaatcgagtcagaaaccagtatatatcatttaagatatgtaagtgagtgttgtcttttcagacaaatgaagcattagcgaagcgaagacacatcatcatgttgtgcatgtggaggtggcaggagctgaactgcatattcaattctatgtgggcacgttaaggtggaaaatgacactggctggcggatt

SEQ ID NO: 76672 - DNA, 473 bp, Glycine max
  unsure (1)..(473): unsure at all n locations
tgtgccattccaagttcattaattatacctttaagccagattgctttcttcactcctttagctagggccatgtattctgcttcagttattgaaagagcaacaactgatagttgatttgctttccaactgattgttgtaccaaacaaagtaaacacatatctagttaaggactttcttgtatctacatttcctacaaaatctgcatctacatagcctgtgattgctgcctcatgtgtngtcttcttgtaccttaatctagctttcaaagatccatttagataccttagagtccacttcacagcttcccagtgtgcgctgccaggatctcctatgaatctgcttataatacttacagcatgagccaagtcaggtctgctgccaaccattccatacattatgcttccaacaccactggcatagggtgtttgattcattntagaactttcttcagctatttttggtgcttgagtgat

SEQ ID NO: 76673 - DNA, 438 bp, Glycine max
  unsure (1)..(438): unsure at all n locations
agcttcaaaatatccaataaattcaattcctattatcatgaaaccaccctaaaccaagagaacagagtagaggcagaaaactctgcccaagactcattcaaattccacagttttccctactcaaataccccagtaacattctcttagttccgattcgttaaccattggatcaccttgaaacgtttactggaggttcctagtacataaatctacattttgaccgttgggatctactagaaaatatctagaacacgagatatactacctttcccgtgactggtgctgcacaagcattttttctgcacatttggtcaagtttgctgcacaatttgacagcttttgctgcacaatttggcagatttcaaaatccaactttcccacatccaattntactcaaattggatccctaaattcctaaatcatgtataaatcatattt

SEQ ID NO: 76674 - DNA, 484 bp, Glycine max
  unsure (1)..(484): unsure at all n locations
ccttatatactcagcttttgacaccaggtaatcttgagttatagtttagaaaggtcanagtttcatagaaagatggcaaagttacaattcatcccatcttcttatatgttctgataacttcagacaatgttttaaatatcgcttgtggcaccgttatggttcattatgtttggtgatatcgcgagaaatcacagacatatatgatcgattggtcccaattacaattgtgttgcgattgtggacagttaanaaaccctgatgttgtagctaaatcatggtagccgaaccatttttataaccttggatgggatatgatgtangcaccattggagcttgtaggcctaggatcttcttcatcaatggattcctttgcttcttggaagatgaatggtancgtaatggagaaggaagagagagaggagacgccacttcaaggagaagatgagtctagaagaagctcaccaccataggagaccatggataa

SEQ ID NO: 76675 - DNA, 414 bp, Glycine max
  unsure (1)..(414): unsure at all n locations
ggcgtggagtccacatatacagacgctnctcttctncatctcaaccaaagattcaaagaaataaagctaataaaaaaaacagaaagtgantaaccgataagtaaacaaagacaaacagaatgccccaattagatatggttttatcctatgatatgatcctttttattgaggcatacgccaccgccccatgccaggtttatgggtcctaaacgtatttgaataatcttttaaatcaaaaggaaccgtctgggatatataataaggtcatgtattgcagcccgttattcttgcttgagtagttttcaaattgcttttgaataatcaacgtgtgtgtggcgagcatgataagagtccaatgtgattttgtcagaaataatagaaggaaaagaggaggagggaggagtccaagataag

SEQ ID NO: 76676 - DNA, 480 bp, Glycine max
  unsure (1)..(480): unsure at all n locations
cgtatactgaatngagtatggcacacacattgcatgtctgatatgccttttaaaggctttgaaagtgcgagaaaacgagctgtgttttctacattttctggaaaaatgcgatgaactcgctaagcaagaaggctgcgctaagcgagttcatcaatactcattgtatataagctntatctgaagaactcgccaagcgcacttactgcgctaagcgagttcatcctttgaggatgaacattcatcctcttgctgaactacctatggccaagcgaggctgaatcgctaagcccaggtaacttaacccattttttggtgatagccacgtgctaagctgagcattcctaagccaagcgcaattggctgcggcatccgctgagctaagcgagcttcactcactaagctcccataacttagtgaaatttttgcacagcttagtgccgctaaacgcagctcattcttggctaagcttaaatccatgcg

SEQ ID NO: 76677 - DNA, 454 bp, Glycine max
  unsure (1)..(454): unsure at all n locations
agcttgtaggattatggtgtacccgtcacatgtggtactaggtggcgatcgggcgatggtacaagtcgactctccacgtccacaaatcacacataaatccaccatccccagttgcccaccttcaactgagctcacgtactcccacatagcccttatcctcgttcctctcaacaccgggtccccatcaatccctccaagcttgcacaacatccaagcaattaaaaatccaaacatcatgaactatcaaaaccaagataacagggcagaggcaaaaaactctgcccaaaacacaaacaaataccacaactntccttactcaaatacctcagtaacattctcttcgttcctattcgttcaccggtggatcgtctcgaagattttactggaggtgcctagtacataaatctacactttgacgcgtgggatctgctagaaaacatccagaacccaatat

SEQ ID NO: 76678 - DNA, 469 bp, Glycine max
  unsure (1)..(469): unsure at all n locations
acaaatgactacactataactgacatttaaagatctgaaacataanagctgaaatttaaatgacataaatcataaaataactgacaataaactaaaatgttctgaatgcaaaaatataaatgtcctgctcctcctgtggctgatcttcattaagatccagtgtggagctgctgatgaatcctatataagctgctcaggctccatgactggtgtggcatcatcatgaataagtgcacgggctagagatggctatggtataatctctggagaagtttcctcctcccgagccataggtacacctgcatcaaaatcaaagggctcaggaggagtcagctcatcctcaccctctactggtgctggtagtggctcctctggaacaggctcctgngctgcggaggccccaccctctgaagaagaagaaggctggtctcctggctaggccacctgtgcatcgaactcatccatgctc

SEQ ID NO: 76679 - DNA, 452 bp, Glycine max
  unsure (1)..(452): unsure at all n locations
agcttaataaatctatatatggtttaaaacattcttcccgtcagtggtacccttaagttcatgggataatttcttcatttggttttgatgaaaaccccatggatcaatgcatatatcacaaggttagtgggagtaaaatatgctttcttgttttatatgtagatgatattttacttgcagccaatgatcggngtttgctacatgaggtgaaacaatttctctctaagaattttgacatgaaggatatgggtgatgcatcttatgtcatcggcattaagattcatagagatagatctcgaggtattttgggtctatcacaggaaacctatattaacaaaattctatagagatttcggatgaaagattgttcaccaagtgttgctcccattgtgaagggtgataggtttaatttgaaccaatgtccanagaatgactttgagagggaacaaatg

SEQ ID NO: 76680 - DNA, 476 bp, Glycine max
  unsure (1)..(476): unsure at all n locations
cgaggagaatggagcagatggaggtaattctctgttcaggggatatggtttatgatgtcttatgtagaatatgttcttttctgcatgtatggtacttaactgcattcttatttattaaaatctgtcctaaatttcgacaaatagtatcattagccattttcctttgttatcccttatttgctgatcatctttacatgtttctatcattgtttgctccttctaaaatttataatatatttgcttggatattatggatgggatatgaagtaagagtgtgttactgactaatggcaaatgactaanaaataaccccttgatattgtagttcgcttgcaaatatgattcttttaaaataattttatccagttttatgtaattgcttatcatagttgcaagtgttcacactatagtcccttgccccaaaatgctgttaataggggtatatcagggtatgtgtcagtgttacacaaaaatac

SEQ ID NO: 76681 - DNA, 441 bp, Glycine max
  unsure (1)..(441): unsure at all n locations
agctttgcatgcacaaacataatccttgatatggaaaccatgtttcttggatcattattgtctggtgcagccatgattaaatgtaaaaaattatattcgaaaatattattgctaaaacttcctgtccaaaccaatatttggtttatttgtgataagtggtgagatacatagaaagcataggattacatttatagagggagatgtagaagacataattatgtacctagattgttatacacaactaattaatatacttttctagttaagcatgtagaaggtggttttatattttatacattatggactaatgagaataatgttgatgctaatttagtgatattgagccatatcttctttctcactacttgaatattntgcacggtattgtagtgctgtgtacaaaaggaggatntgtggtatgtgtacccgactatgtcatct

SEQ ID NO: 76682 - DNA, 479 bp, Glycine max
  unsure (1)..(479): unsure at all n locations
cgcttctacacatactataatgtaacacatgnatttggatcattggcagtatttatattaattattaaatctaattgtggtctctcgaattgtgtttttgtgtataatataggttaactcatttaatgtctattttactattcatccatctcgttttgtgtttaatctgtttgttcatgataggaataggactagagttagacctattaagataattaanagtatagtaggttttatgatttgataagagaaatagaaaacaaaatgttgataagatgattaagataatgagtattactccttttactatccttttcctttggtcaccgtaactactatttntgtatgtgacaaatttattggtaaaaagcagtacggngagagtcattgctaatagctaattcaatttaaagatcaacttcatttgagctcacagagaagatatcaataggagtattaatgcaattcctcttctagtg

SEQ ID NO: 76683 - DNA, 433 bp, Glycine max
  unsure (1)..(433): unsure at all n locations
agctngccacccagctcgcccaggcgagcatggttgcttcctccagaagcaacagccttctggaggaatcttctggagggcccaagtgggcctggttgctatatgcacccccatttttactaagtacaccccctgcctttttttggtgattcttttttcgtaaagttacggaaacttacgaatttcttaacgatactggttttctttccgtaatgttactgaaccttgtggattacataatcatcccctttttgacttatggaatattactgaacctcactaattgtgctacgatgcttccatttgatttccggtgtgtcacggaaccttactgattgtgcatcaatattttcttttgttttccggcatgtaccggaatttcacatattgcctaatgatgggtgccaagcacctcacaaggaccaaacaaaag

SEQ ID NO: 76684 - DNA, 460 bp, Glycine max
  unsure (1)..(460): unsure at all n locations
tctttctttctntttctctcatctatntttcttttttttntcctcttttcacttttgttcttccttcttcttggacaaatttctttgctattctatttgtgatgatcatggaaggctaaacactcaatcaatccaaggatccactccaagcaagactaaatttgagttctggttttgtatttctattctgtgtgaatgttcatcttttacttcaatcctattatgattgaaaatgaattacggtatgggttcatttcctaatttcaaaatttaatcatagattgtttggatgatactcccaccttaattgcgatctcaatgaatttaacgattaattcgagtgaactaactctaacgacattgattgaactttcataacatgatcattctctgcaaaattgtgatgattcaatatgcattggtttgatgaactggatngatctatttcatatatctgtat

SEQ ID NO: 76685 - DNA, 449 bp, Glycine max
tcagcttgagataacatagacaaagctgttttcttatatgtccgcgcttcctttctaccagaccattttggcggtgtgtatgaaggcatatgagtctgtgaataataccaagctctgcgagatacttagtaaaaggtctgtattcccctccccaatcagactagacagctttaataggcaatataaattgagttttcaccatagtttgaaactgtttaaagataggtagtgtctctgatttatttgtcaacaagtacaaccaagtgaaacatgtgtgagcatcaacagaagttacatagtttttatagacagcgtaaatgagttcaaaaggagtcgaatacacagtatgagagggagaggagggaagttatgatatttgccaatgcaacaatgggaacagaagtcataactttgtttattgataagatgtacattacaaaggttgaata

SEQ ID NO: 76686 - DNA, 471 bp, Glycine max
  unsure (1)..(471): unsure at all n locations
ctgaagttagtttattatattattagtattattatacatataattaaatacttatatgggtatggttttctattgtaattgatgtttatgattatgtagtgttattatgacatgacctcaaaagttattgttatgttggaattacagaatattattatttaatgagattgtgcactgagatgttgtatgtattgagttatgagcntatgaacttgcaatcacacaactgtaagaccctttaatggcgacgagttaatacgtgacgagtttatgatgggctccatagtgggaacccgacgagtttaatcacttgaggcatgatgagttaaaataatnttggaaaataattgaaattgtgaaaacaatcgagtgaccctgactgatcttcttatgatttcacttaatgaaaggaacctgacttacccattgtgaggcatgtctcgtcatgtactcttaggcgtcagaagagat

SEQ ID NO: 76687 - DNA, 279 bp, Glycine max
agcttcccatttctttgaagtttcactctccaggtattcattgccatcgattttttttcagggtatgatatactattaggatcatattgcggcatgaataaaaaaaattgagtataaagataacatttataatgtcatataatcccacttcattgataaaattgcattgtaataatagtccttcgatgcccaatttttattgagccattttgatagtgttcattctactatggtcctctcttggctaaattcctttggtgagccattctcgactcatgt

SEQ ID NO: 76688 - DNA, 393 bp, Glycine max
  unsure (1)..(393): unsure at all n locations
atacatttacatcacatgagaatattgaaatgtactctgaaagaaaaatatgaatagtcttctggaacatacaagcatgacggagtatgactgtgaagaactgaatttagattataaccagtcataatgtgcgcaatatgatgttgttagaccactctgacacaacacttgtgctatatgacttatantgagattgtttctgctttcctagaggttggtttattntcctagtactttaatagttgcagttattggaatgtgataggtnactagtgcatgagaaaaggaatgcgacagaanggacaataagaataagttcagtctggcgtttattccttcttttactcatcattatacctaattcaatgatcctatgtctaactcaatacatta

SEQ ID NO: 76689 - DNA, 280 bp, Glycine max
agcttctattttttctgatccattttatcaataaacacaagttgagttttattcagaaaattagagtttatctcttttatcttagtgagagtgattctcctaaattcttgagtgattcaagaacaccctggctgtatcaaaggactttcacaacctttgtgtgttgccctcgttggaaagagtgattctttccttcctttcatcttcacccttgttctttcaaaccacaattccagaaaatccacctctgcccagaattatctcgtggccataactccca

SEQ ID NO: 76690 - DNA, 478 bp, Glycine max
  unsure (1)..(478): unsure at all n locations
gactatgctcttgtgtggaggatgttattatgcaagctgaagtggacgtntccatagagaaatacaatgatcaggtactttgtggatgtgttcctatggaggccagtcacttacttttggggagaccatggcaanttgataaaagagccaatcatgacggttacaccaacaagaactctttcattacttttggtgttgcataaaaaatgtacaatgtaagtcggctagggttatttgtgcgagctcaaccgacaattttgttctggcgaaactggcatgtgtccatttattttggccaggataacattagcccacctcggcacaaaaatatttgctatccgacttcatgcatatttcattcatggaatgaactgaaaactcaatagccgacatctggcgtgaaatatccacgactgatacattctaccgacattgcgcaatattttttttataacgctcgttggcagataatgttttt

SEQ ID NO: 76691 - DNA, 278 bp, Glycine max
agcttgatgctataaagcgtggaagagtcagtcttcctacttttgtttgttgaccacagagtggtacctggagatatgtcgcgggggtcaggagaccttggggacgtcaggtggggtgctattgcccaaaaccaaggttggctaatcccgacccaacccgggcatagtcagttagtgagaacctgtgacgtacctaagcaggcgagctcctggcagtcaaccaataatagaacaaagtccacgaagcaaggaggcttgtgtggcggctggccggctat

SEQ ID NO: 76692 - DNA, 412 bp, Glycine max
  unsure (1)..(412): unsure at all n locations
agaaagagagaagggtggagcatganattgtatgaataaaagagggagagaagtggaactntgaagtatgtctcacaagactctcattcatcanagttacaacaagtgttacacatgcttctatttatagactaggtagcttccttgagaagctntcttgagaaaacttccttgagaagcttctttgagaaaacttccttgagaagctagagcttagctacatacacccctctcataactaagctcacctccttgagaagcttccttaagaagattcctaaagaagctagagcttagctacacatacctctctaatagctaagctcacctccttgagatgagaagctagagcttagctacacacccnctataataactaagctcacccncatgatgaanaacatgaaaataa

SEQ ID NO: 76693 - DNA, 281 bp, Glycine max
agcttaaaattttttatttatagggttattatgagtttgcatgtttggttagccattaatggagtcaaatgctttgtaacctatttggttgttggtgtatgtcaattttggcctagttggttgttgatgtattacaattgtgatgattgactatgatgagaatttatgacatttgtttgtcagacatggttggatgttatgactcatgttgattggtaatgattatatatgttgttgatatacttgagaagttatgttatggtgatattaaatatatatat

SEQ ID NO: 76694 - DNA, 427 bp, Glycine max
  unsure (1)..(427): unsure at all n locations
atcctaccatgtttcaaagacatcaagaaggtcttacttanaagatctatcaaaggctatattgagcagacaacatcgaaatgaagttgttttatagtcaacatcaaaatggtgtacttaaagactctgggaatgagaatatcaaaatgatactttgatgacaaaatagattatgagatgactacatcataatgaagtattgaagtcaagatcatgcaatatttatgcatcataatgaaactgcattagactctacattagaattgtgaataacttgactctgaaaactaatcttcagaatggttcataaatgctcataatgaacctcanaggacacatcaattcttccataagctaccacacatactaagggcgcattagaatactgaggttgaaagcatataatcttgcatatgttggcacacat

SEQ ID NO: 76695 - DNA, 277 bp, Glycine max
  unsure (1)..(277): unsure at all n locations
agcttttttgtttattttagnaatgacccactaacctagaattaaaataacttaatgccattaacctagggaattaaaaaaaacttaatggctgagtgtaattgaaattgtggcaaccaaaagtcacccccaacagccaacaagtcagccaccatttggtctcccaaaaggttgatgcctaggttgccaattgggcccttattacaacttgaactaaacctaactaaagcccttttagttgattaacccaaaacatatttttggtcagccaacttta

SEQ ID NO: 76696 - DNA, 203 bp, Glycine max
aatgtgttctatgttacataccatcaaatacctagtgttgtctatatattaacctttactcgatgtttactttcaaaatctgccattctggaatgtgtatggctcatgctatgtgtcctcccaaccctcaaattgaatatcaatatagtgcgtcaataaagataaaatgtagcactatattagtgtcagtattacatctcata

SEQ ID NO: 76697 - DNA, 270 bp, Glycine max
  unsure (1)..(270): unsure at all n locations
agctncttcttcttttttgagcatctcgatatattacgggactcaatcacacatccgagtaaaaagttattgtcgtttgaatttgctcagagcttcagtattccatttcgagcgtttcgatatattacgggactcaatcgaacatacgagtaaaaacttgttgtcgtttgaatgtgctcagagcttcaacattcaatttcgagcgtttcgatttgttacgggactcaatcggacatccgagtaaaaagttattgtcgtttgaatttgctc

SEQ ID NO: 76698 - DNA, 323 bp, Glycine max
  unsure (1)..(323): unsure at all n locations
acttaatggctgagtgtaactgaaattgtggcaaccaaaagtcacccccaatagccaacaagtcagccaccatttggtctcccaaaaggctgatgcctangttgccaattgggcccttattacaacttgaactanacctaactaaagcccttttagttgattaacccaaaacatatttntggtcagccaactntacaaggattgggccattatttagacagactaaacactctaaaattgaaacaaagtggtgtcatttagtccttcttcatttgggccatgatacaactcacaaccttggacttttctccttgaaacttggg

SEQ ID NO: 76699 - DNA, 231 bp, Glycine max
ggggaacggttacgaacccgggatgggtttaggcaaagacaacggcggcataactagcctgataaacgccaaaggaaatcgtgggatgtatgggttaggctataagcccactcaggcagatataaagagaagcatcgcgggaaggaagagcggtagtcaaaactcgcggttgagacaagaaggtgaaggaagcccaccctgccacataagtaggagctttataagcgcggg

SEQ ID NO: 76700 - DNA, 320 bp, Glycine max
  unsure (1)..(320): unsure at all n locations
gcctntcgcaagcttacgggtaaatctggtgcctatccatggtataaatctncacagaggccattgtcctcctcgcccagtattatgatcagccgctgaggtgcttcacttttggggacttccaactatcacccatggtggaagagtttgaagaaattctgggatgcccactgggaggaaggaagccatatctttcctctgggttctatcccttcatgaccagagttgccaatgtagtgaaaatctcatcacatgagtttgaccgtgtnaagcacaacacgaatggngtagtcggagtaccaaggaagtgtttggaggaa

SEQ ID NO: 76701 - DNA, 276 bp, Glycine max
agcttgaatgtttgtggcccaccatcttttcatagtagaatactggtaatgtgtctactatcattgtcatcatttttttctccgacattgaggtgccacttgagctgccaggtctctccacctttgggcgtattcttttgaaagattcatgccccctttttgcacatgttctgtagttgcatcctatccgaagacattatactgacactgcctaacgaagccaaccactaggtccttccaaaaatggactcgggaaggttccaagttagcgtacca

SEQ ID NO: 76702 - DNA, 396 bp, Glycine max
  unsure (1)..(396): unsure at all n locations
tatgaaatatgaaattaatgagctgattaccaacgaagaacttctgaaggtgttagtacaatctaactactggaaaatatatggaccaatagaaatcttagctgtctttactaaatatggtgtgaaattcgaagacgaagtgactgcgacatcgcctaacaactgaatgcaatggttattttcttgctatttcgttgatgtaacctttatctgtntacggtgtgtttaaatcccataataaagttcaatgtgttatttcaatggtccaaagataatttattttaatattctgaccttcataccttacgcatacttagaacgatctgattcctattcttctggattgtctgcctcttactttacgtgntatttgatggaaccagagaacggacataa

SEQ ID NO: 76703 - DNA, 280 bp, Glycine max
agcttgtttgtttttgatcattgcaaggaatttacacctaagataaagatagttgattgaaattgttactcatatagattaagctgttagtggccttattttttctgaaaatgtgaattttcacctactatctatcacctgcagaacccctgagtggctgaaaaaaatatttgcaccgatcaccaagagtgagaggaatggtcctgtatttcgcttttttattgatctagaagatgcaggttagctatataaatattctgcttttctctagtccttatat

SEQ ID NO: 76704 - DNA, 394 bp, Glycine max
cttgaaactcgcctgcctctttatactcagactcttgattccctttttttaaaccttagtgtctcttctcaaccacgagtgctgctctaatcacaagactctcacatttcactctgacaacactcttgctggcttctgctatacaaataatcggtactgagatttttattttcacattggttattctatttagttgtgacatgttcttatcaagaattttcttatttctccctcttcctctctttctgtttttgatgcaaaatctcgatgctaataaggtgcttaactataaaaaagagagcattaaataaatatacatataagtggatctacttaataaccaaaaaatatctacattaaaatggcaatacgtgctaggtgtaattatatctat

SEQ ID NO: 76705 - DNA, 273 bp, Glycine max
  unsure (1)..(273): unsure at all n locations
agctttttaatatgaagngctgaagggtgaaacttcctgcttttattgttgaccacagagtggtacctggagatatgtcgcgggggtcaggagaccttggggacgtcaggtggggtgctattgcccaaaaccaagcttgaccaatcccgacccaacccgggcatattcggtcagtgagaacctgtgatgtacctaagcaggcgagctcctggcagtcaacagataaaaggaaaacaagaccacaaagcaaggaggcttgtggtggctggccac

SEQ ID NO: 76706 - DNA, 273 bp, Glycine max
agcttggtattgaagaagtcatagaaagtttcccccttttgcacttccaaacactcctgcgaaccaaaaatgagaaagaaaggtttagaaaaaaatgctaggaagtggtattcaactattcatttattttatttgcaaccaaaagagtgagtaaccttgtctaggtcgtgacgagagcgagaaaagttctcgtaatttttgtattgctcttgtctggtcttgtggtatttgtctatgctataattaaacctctcccacgagattagagggtta

SEQ ID NO: 76707 - DNA, 279 bp, Glycine max
  unsure (1)..(279): unsure at all n locations
agcttgcatattcttttttaatnaattcaactagaaccaactttttttttttcataatgtgcagatgcatatgtgggggcatggatcagaatttaggaaaggaccagactcactcaaaggaacacaaccagctgcaatgttaaggttaccatgctattgctgtgctcaaggatgcaagaacaacatcaatcatccaagggccaagccattgaaggacttcaaaaccctccaaacccattacaaaagaaaacatgggacaaagccattcatgtgcagaaa

SEQ ID NO: 76708 - DNA, 316 bp, Glycine max
  unsure (1)..(316): unsure at all n locations
agaaagcaccaaatgtattgttggtcaccattacagattgattaattccaaataggagtattttcatcaattttggaatagggaatccagaatataatatttataatccaaaaagagccatctagaacataaaaagttatattatggattacctaatatggaatggataaaaaatactccatattagataattcataaccaaaattttgatatttatggcattggggatcacccaatatagaatgcagctatcacaaatagggataacgggatctggnaaaaataccttacagaatacctaatcttgtacatcaac

SEQ ID NO: 76709 - DNA, 275 bp, Glycine max
  unsure (1)..(275): unsure at all n locations
agcttgntctttatacttcttctccttgaagtgacatatctaatcaccttttctccttcatttcactgccattaatcttcaagaagtagatgactccattgatgaagaagatcaaaggcctacaagctctacatggagttacattaggaggatacatattactattcattctctactagctgggcctttacctatgaagaacttgatccattggtagcccattgtctactctcgtgaagaattgtgatcaacatagacacaaaaccacatgtgca

SEQ ID NO: 76710 - DNA, 278 bp, Glycine max
agcttgagttttttgagagcataaatcctaaactagcccagttcgtcttttcaatcaacttagcccattcatcagcctttcacttgactttgttttaaccatacacactcatttgaatttctctttttcttctctttttttttaacacataacattttattaatttgctatgtgtgttgtagtttcttacctttaaatttatccatccaacaaactcccccaaatttggggcaaaattgtcttaaaccaatgtgctctcctaaaacctaagcaaggta

SEQ ID NO: 76711 - DNA, 421 bp, Glycine max
  unsure (1)..(421): unsure at all n locations
tcagcttctcaggagatgagcttcgttatgagaggagtgtgtgtagcttatctctagcttctcaatgaagatttctcaaggaagctacctagtctattaatagaagcatgtgtaacacttgttgtaactttgatgaatgagagtcttgtgagacacaactcaaagttcaacttctctccctttttcttcctttaattttgtactcccccctctctctttctctccttctttcttttcctccattgaagctgtagacacaaatgactttggtgttttgatgatgatcatgatgattngatgcacatgatgcaaatgatgtaaatgggctttccacagttatattcaagacattgattcaagaatacaagccacaacatcaagatgatcactattattttatgaaaggaattcctaattgatg

SEQ ID NO: 76712 - DNA, 280 bp, Glycine max
agctttaggattatttataaaaactaaggtagttcctaaacaaaaatcaattgaggaagcttcgccaagtatccctattgaaaaacctttattcaaacctttcaaagttagtgagaaggctaaacgaaaaattagggaacttagaaaaactagatccttaattgaaggcgtaggtgataaccatagtgaattacttaacaagattggtagtttacttaaggtcattccagatactcctcaagcctcggaaaatacttccaaaatggtaacaagaagtacc

SEQ ID NO: 76713 - DNA, 373 bp, Glycine max
  unsure (1)..(373): unsure at all n locations
cagatccagcgcactcagcattatcatgttcaactatcttgttccctattattttgtgggattgagtnacttaaaagtaatgactaaattgattagtttactaattaatggatgcctctttttatcggttaatgaatatgtacttgttgcatgcattactctaagtaaagtggcgtatgaaaaaataaactaataagaagcagagtcgttactctaagtaataattatgtccacttcaagatggagttggatggaattattgaaaactaagtaagaaaagatcaagagacaataaagtgatggatattattttgcaatgaaaagattaataagagataataatgctaatattatgaaagtgtaaatagatgta

SEQ ID NO: 76714 - DNA, 288 bp, Glycine max
gcatgcaagcttgactttttttatttttttttaaccatagtttcactttagttattagtcaattcaatttagaaatagaaatcgcaaagagaaatgtttgctttattttactaaaagatatttattatattattattttacctctttttggtttccaacatggttacggcatgactgaacggtcggatttcattttaacagaaattaacggatattacaaatcaaatgatcgggggaaatttattttattttttgattaggcgagaaaatgacttaagtaaatgactg

SEQ ID NO: 76715 - DNA, 441 bp, Glycine max
  unsure (1)..(441): unsure at all n locations
gtcctatatgttcttataactggactgattctacttgtgcccaagtttcatggtcttgtaggtgaagaccctcataagcatctgaaagaattccatattgtctgctccaccatgatacctccagatatccaagaagatcacatctttctgaaggcctttcctcattctttaaagggagtggcaaaggactggctatattaccttgctccaaagtccatcacaagctgtgatgacctagataaaaatttccctgctttcaggaccacgaccatcagaaaggatattctatgcattatgcaactcagtggagaaagcctatatgaatactgggagagatntaaanactatgcacaagttggcctcaccaccagatttctaagcaacttcttcttcaatatttgtatgatggactcaataacatggagagaaatatgatagatg

SEQ ID NO: 76716 - DNA, 275 bp, Glycine max
agcttgttcttctttacccaacccgggcatagtcggtctttgagaacatgtgacgtacctaagcaggcgagctcctggcagtcaacagataaaaggaaaacaagaccacatagcaaggaggcttgtggtggctggccagctgtgaattttgtgtaatatgtggattggggcctctggtaatcgattaccaagggtgggtaatcgattacaaggcttaaaattgaagacagggggctaagatggtctctggtaatcgattaccaaggggtgtaatc

SEQ ID NO: 76717 - DNA, 406 bp, Glycine max
  unsure (1)..(406): unsure at all n locations
gcgatctagggaggtcatagagaccatacaaggtttctaacgatttctaattatgtgggcccttaagtctatcatatgctgacaatagccgagaagcccatgaatctcttctggggcggagtaagtgtctgccatcgccatggccttgggttacaatcggggaagctcttgactcccgttcaagggaagagcaaaccgatccatccacatggntgcctctcggtgtaaagagtcgatcacccttcctctagcctattttccgcgatacatgggatattcgtcgcatcctatgctcgtgggcccggtagacctaactctcttggacttgcgatgatagctacatgttgtctcgtttcataacctgaacaagctattgacttgacagacaactctttcaaacatgctt

SEQ ID NO: 76718 - DNA, 275 bp, Glycine max
agcttcttttttattttcctataaatagggggagaagtgaagaaaaaaaatgtttagccctcctggtaattcgagatcacttgaaattagtgaaaaaaattgtttccgtgaagaaaatccaagccgaggcgcttccgtaatttttccgggggtgatttcgcgaagattttcaactgttattcaacgttcttcgttcgttcttcgtcgttcttcggtcatcaaccggtaagttcccaaaatcgagcttttcaattcattctatgtacccttagtgg

SEQ ID NO: 76719 - DNA, 317 bp, Glycine max
ctgattctggttattcatttctgactctatgtgctgagatgcaatgcacataatggacctcctgttatgtgttatcaaagaatagcttatacacttgtgcttgagtgaaacagctgctgtgagactggggcttgagctactttacttgatacctgtcttatgattaacttcatctaactgtatagtgcacattttgttctcctctttgtctagctgcatattctggagaaacaagtgataagtacacattgcttcatcttttacatcatgcaatccataaattttaatgcatacacctttgaacataaacactgcat

SEQ ID NO: 76720 - DNA, 279 bp, Glycine max
agcttatttttatacatttagtttacgaagttggaatttttaattgtaaactccttaaaaaaagatagaagccaacccaaacttgacaagtttttaattaaatgcttaatatccttatttctataaatttcttggagcatatttaaactgtgacgcttgcataaggcaagagatgggtttggctgcgttttttccctcaacgaaaatgtaaggtataagagactgaaaaaaatatatataaacaatgcagtgaatgcagaacctgatataatgcaaatt

SEQ ID NO: 76721 - DNA, 392 bp, Glycine max
  unsure (1)..(392): unsure at all n locations
acctactactatttataatgggttaataaatntatatctgtaacgtataatcattaaactttacaaataatctgattgaaaatgtaagattaattatgtgtatttctttaattntaaaagaaatactttattaaataattttatgtcactttcttttcattttctctaatttattaaacatcataacaattatctcactcttcaaatattatacatttaatgctgttttaactttttntattactttagtgacaaatatttttttagagtcttattctatacttntatgtagcagttggtagtataacataaaatgttgatgccatccatgaatatacgtnctatatgaatattatctgcgatgttataaatgattttactctcgaatattt

SEQ ID NO: 76722 - DNA, 285 bp, Glycine max
atgccaagccagttttgttggttttaattctcattatacaaagcatgccagaacctagttcagtagagaccaattatgagtatatagcagttcgttgagaaggtggcctggcaaggagcccgaccttcttttgtgggagataatgaaagttttacagccaaggcacctcaacagcatgagccagaaccagaaaacgatcactcatctgaagccaccatctctggagctgtgatccaatgaggctgctcatcatggaccaatgcctccgtcagctgatgcaccatt

SEQ ID NO: 76723 - DNA, 424 bp, Glycine max
  unsure (1)..(424): unsure at all n locations
ctttataccagctgtatcatacacattctgaatcataccgagatatttcaaaaatttctcacagccatgttctatctggttcttgaatggccatcaaaggcttatatatatgtgacttgagacacgaatttgctaagagtttttcagaacaaaagggtcttatcctcttaaaaagcaaaatcngtttatcctggtacaaattccttggccaaaacacttgtgattcaataaggatctattagagtgctcaaattgttcaatctatctctttcaagggagattacttcttgtcttcttctttattctgaaaaaaggattaagagaccgacggtctcttattgtatagaaatctgaacacaaaggaagggttgtccttgtgtggttcagatcttngtataggcttttacaagatagtggaactctc

SEQ ID NO: 76724 - DNA, 280 bp, Glycine max
agcttaatccttatggtagacgatttattgctttttagtttgcatttctgtttagctttagtgttttcaattttagggtttacaatgcagggtttagttaggttttagagcccaataggggcaatgcctgtaagaggggtgaagacccctcatttctgcctgtgaatgaggtgtattggtccacatgcaatgttctatgttgttgctgcagtgtctgactattatgttcctgggaaggaaatggtataaatacaaaatatgcttccttagttcttcattt

SEQ ID NO: 76725 - DNA, 476 bp, Glycine max
  unsure (1)..(476): unsure at all n locations
cataacaataagactatatagtactgagttatactatacttaatgttatttgtgttttctcaagaatttgtntggtgagaattaaacattaattatatcttacaaattcaatctctcttgttaattaaaatacattagttaaataaaaatagtaattatgtttgtttaaaattataatcactctttcttttaaaaagacaccattanttttaatttatgaagatcattcaaaatatatnntttaatttttaatcaaatattaaatacgttttagaatttgggccccttataaataaaggtttagaatttcatatcaacttgaaaataaaatcgaagttaaaagtatttccttaacctgaanataaacctacttgattagaagaagattatttacatgtgaatanaagttcatgaactaatatctaatcaaaaggttgtacgctctaaatagagagatattatactcctaagttaca

SEQ ID NO: 76726 - DNA, 272 bp, Glycine max
agcttgtattatttcagtctgacgagggatcgagggtttagtaatttaggctacaacatagaacacaagaacacgaatgattagagaaatatatttctatgcatcagcttgtttgttagaaagacccaacatttctatgtattgttgtcattttatttaccttgcattttatagtttttagcataaaagtttagtttaaattctatttgaaattatcactcatacatgttttctcaacaatgctttgattctgaacttaattcaggctagca

SEQ ID NO: 76727 - DNA, 275 bp, Glycine max
agcattttttttttctgggaggctcgatctgggttacaagctgacaaatgctgccaacaggaggatttctttggaaaggaaagaaagaatattaccccgtttacaagggaggggaccacaggtggaaagggtccctatttgtcacatcaacgacagctttgttagcgcgggatggatgcaccaagatcaagttgttgtgttggatgaagaaaccaatcaagatcagccaaattaggtgcagtcccgttccccaggctttgaattgaagaactggc

SEQ ID NO: 76728 - DNA, 335 bp, Glycine max
  unsure (1)..(335): unsure at all n locations
cttgcttaatatgtattatatctggatcattctatctatattatccctaancttattctgtagagaaactatnttgatcaataaaattgtaaaacccctaaanttatgtgttatggtcataaagtttttctcctctttagaattaataaaaggcctttacacttgatttacggttgnataatggtgggttgtgtgcatttgctggcatatcattctatttggaataaacgttttacagagtgggtgttggcatttactacgtgacacaatttcataaatatatatattttttgtttatatgaataaataataagacaatggccgtttgtcttata

SEQ ID NO: 76729 - DNA, 278 bp, Glycine max
agctttccgttttttttacggaaagatcttagagttgaccttagcagaggtatccatagaagccattgcatcactcacccaatactacgaccggcctttgagatgcttcacattcggagacttccaattagtaccaaccattgaataatttgaggaaattctaggatgtcctctcgggggaagaaaaccatatctttcatccgggtgtctcccctctttgagcagaattgcaactgtggtcaaggattcagcaagaggtttggacagcataaaacaga

SEQ ID NO: 76730 - DNA, 434 bp, Glycine max
  unsure (1)..(434): unsure at all n locations
agtgtttcttttgcaagaagaagggacacatgaagaagaattgcaccaggttccagaaatggcttgagaagaaaggtaaatcaatctcattagtatgttatgaatctaatatggntagtgttaatattaacacctggtggattgattatggatctactattcatattgcaaattctttatagggtatgcaaaacctaaggaaaccagtgggaagtgagcaaagcattttatcangcaataagctatgctcacatgtggaggccattggaacttgcattntgactntaagtagtggctttatttttaaaatagaaaggactttttatgtaccaagtttttcccgaaacttgatttctatttcaaggctttgtaccgtttgatatttcctttatttcanagacacatcattttgagtatttataattctgaatgtg

SEQ ID NO: 76731 - DNA, 290 bp, Glycine max
  unsure (1)..(290): unsure at all n locations
caggtttgcaagcnnnagagattattttttcaanggaggaanagggttattttaaagagggggccttttaataccaggagatnagggagagaagttgaactttgaagtgtgtctcacaagtttctcattcatcaaagttatggcaagtgttacgcatatttctatttatagcctagcagatgggaagcttccttgagaagcaaggaaggtagcttccttgggaaactagaggaagaaagcttccttgaaaagctagagggagctactcacacccctccaatagctaagct

SEQ ID NO: 76732 - DNA, 348 bp, Glycine max
  unsure (1)..(348): unsure at all n locations
ttgatcatcatgctctgattaatgcaaaaaataactaaggcgaatgaagagggtgagaatgagggagaagcccatgctgtgactgccattcctatacagccaagtttcccaccaacccaacaatgtcattactcaaccaataacaaaccttctccttaccctaccgccagttatccataaaggcaatccctaagtcaaccacaaagtctgtctaccgcacttccaatgacgaacaccacctttagctcanaccaagaacaccgaccaagaaatgaattttgcagcgagaaagcctgtagaactcaccccaatttcggtgcctatgctgacttgctcccatatctactt

SEQ ID NO: 76733 - DNA, 282 bp, Glycine max
  unsure (1)..(282): unsure at all n locations
agcttgganaatttttcttattatcaatgtcatatactgacctgctaccatccttgatcaccaaccagatggctgtagtgaaccccgagaagatctacctgtctccctttccctcgatggtacaaccccaatgcaacctgcacctatcacgagggtgtcccaggacattcaatagagcaatgtgtggccttcaaacacaaggtacagagtttgattgacgctgggtggctaacatttcaagaggacagcccgaatgtaaggactaattccctcaccagtcat

SEQ ID NO: 76734 - DNA, 280 bp, Glycine max
agcttctagcttatggacttaccttgaattaattcctttgatagcccttttgagccttgtttccctttccttgttttgaagatcactacaagccttaagtgaaaaaccatgatattaccatatccttaaggaattttggagctttggaattgttttgggaataagtgtggggggtttttgtttcattggacaacttgttttgttggcaatgcttcatgatgtattttgggccatacttgatgtacattgtatattggttaaatgttggacatgctgaatg

SEQ ID NO: 76735 - DNA, 492 bp, Glycine max
  unsure (1)..(492): unsure at all n locations
gttttcactttctcgctaagccaatctgctatcttagcgagcatccgctaagcgcaacactcctgtgctaagcgcgaggaagactctggaagaagatgagctgtacaggttcgctaagcgcaccgcttcagtttatccgctaagcgagaaaggcacgctaagccaaaaatcactaacgtgtgctaagcggttcatacgtgcgctaagtgcacgagcacgaacaaggccacctatttaagcccgaaatcagattntgtgaggggagtttggactggaattcagagctttgcatgtcaagggtttctagagagagaaaggtccaagttccagagaatttgtgaaggaatttaccacattggcaacacctctcaatgaagtgctcaagaaaaatgtnggtttcaaatggggagagaaacaagaagaagctntcaatgttcttaagcaaaagctaactaatgcccncatactttgcgtgccaaactttcaaaaatc

SEQ ID NO: 76736 - DNA, 288 bp, Glycine max
catgcaagcttaaagtttttgttttttttggtggtgatattgttggtagatgggcttttatcctttccaactatcaagtgaaaaaggccttccttcaagttagccaaaccaatcatcttcaatgtgctcatgtcctgtatttcacaagaaattttagaaagatcactagaaaaagtaatatgacatgggaaagtatataataactttgggatagacaaaagattgaagctaaaatcaggaacaaaaagaacattatggataataaaatctggagtggattttatgttg

SEQ ID NO: 76737 - DNA, 310 bp, Glycine max
  unsure (1)..(310): unsure at all n locations
cctacacatccactaagaaggtcgcttaaaggaaaaagaacctaccctttacaggcgggaccacaatgaaaggtcctatctgccattactaaactttgtacctggatgatgctgaaataagtgtgtgctaataaaaaccaaccagagcaccaatggatgcagcggctcccagttcaataaaaatggagacatcgacgacccgaatttatgtcaatcatatcacatgatctgcaaataggatccagatcaatgtgattgacacttaatcaaccagagaaaaataggatgngattcccaattgaaaatgtga

SEQ ID NO: 76738 - DNA, 276 bp, Glycine max
  unsure (1)..(276): unsure at all n locations
agctgggatagtttctggctnaaatttaaggttatttttagagactgtctctctcccgccgcatttngatttcttcttcctcagagtggtttcttctcttattcctcagaccgtttccttcttcttcctcacctcaaccatttttatattgttcttgctcacctcaccggtgtctccttttgtcaccattgtcgggaaaggttcttctttttcttcagccaccattgttgttgtgaagaggagcttgccgtgaagaggttgcgaggtgcattgagg

SEQ ID NO: 76739 - DNA, 273 bp, Glycine max
  unsure (1)..(273): unsure at all n locations
agcnggatattgataatgagagctaaaggtttgttagagannattccttcttacaccagaagaatggacttaacactttaagacaaaatgtgtttcaaaatcctgcatctaaagaacaagaatgaatggcacaactaattcaaagtgcacccataccctggcccaacgggagttaaaagacatatctcctcgctctttaagcattgacttaaaactggcagcagcagctgcacgcataggttgagccttttcttcagcagctttcttcaaagg

SEQ ID NO: 76740 - DNA, 385 bp, Glycine max
  unsure (1)..(385): unsure at all n locations
aacaaagtattctgataaactaagcgcanagcataanaatgttgtatgacaaagacgccgtgtaagtaaaccaaatatgaagcagagctggaattgatgctaattagattgcaaaaagtgtgacccatgaatggtattgaagagaatgaaagcagcgcacctgtctctggaacatatgggaatcgtcgagcttgacgaacgccgatgccattgttgcgttggtcggtgttggtgactgagtctgaaggtggctcgtggctcaagattcaaggttcaaggttcaaggctcaagcttctgtatgttaccagttatatcgcatgtcattgttatgnttatgcacacgcttcagatggagatgacgattgagatctgtaacgtgactat

SEQ ID NO: 76741 - DNA, 273 bp, Glycine max
agctagcactaactattctccctcaatgaccctgttcatggggcgcaaaactcggaacagcagaagttatcttccgaaaaaatcgatgtgcttgaacagaatttcttgacatacctatttcaggtaccatctctacttcatgcattcaagtgtcaatattttggagatattgttagtataatatagacttgaaaacctaaagattatggtattgatataaaggagtaaatgctctaatcatccaaaggttatggtgccagcctgccgccacat

SEQ ID NO: 76742 - DNA, 279 bp, Glycine max
agcttgttgataattgggtacccatcacatgtggtactaggtggcggtcgggcgatggtgcacaacaagttttccacatccacaatgcgcgcataaacccaccatcccctgttgcccacctccaactgagctcacgtactcccacgtagcccatatcctcgtttctctcaacaccgggtccccatcaatcctcccaagcttccacaacatccaagaaaaacaacgatcaaacagcacagctatcacagccaagcaaaacagagcaaaggcagaaaactc

SEQ ID NO: 76743 - DNA, 371 bp, Glycine max
atccatgcggacgacacgatcttctcttgggaggcaacaatggaaaatgttagaacaattaaagcaatattgagggcgtttgagcttgtatcgggcctcaaaattaatattgctacaagtagatttggtgctttcggagttccggatcagtggaaaatcgctgcagccaattacctcaattgtagcttgatgtcctttcctttcacatacctcggcgttcccaattgagcaaatccaagaagaagtcagacttgggaccctattattagcaagtgtgagagaaaattatcgaaatggaagcataacacttatctttctgggggagagtgactctcatatagtcaatgcttacatccaatcctatttatttc

SEQ ID NO: 76744 - DNA, 278 bp, Glycine max
agctacttttttacttttgtacaagcaaataactcatctttcaaaaccatgctttgtgcccccgactgggctctttcttcccttcgcaacttgaggtcactattgctaccccatagagctccgcgaaatttgttccggccatactcttccttgcgagccctcttgggctctcgttcaagggctcttgcggaaattgcattctcttcccgaaacccggcacactccttccgaacgtgtgtagcagccaacttgaacttctccttggcgagttttgcctt

SEQ ID NO: 76745 - DNA, 117 bp, Glycine max
  unsure (1)..(117): unsure at all n locations
atgagcacttcaattcatacttaatgtctctaaagcttctagtatttataggccaactctgatcaagtatctatcgtctctaaatgaacatatntcctctcttaaggttacgtctga

SEQ ID NO: 76746 - DNA, 274 bp, Glycine max
agctttttttatgggaaaaaacaacactgtttataatgggaatccccccaatcccccccccactgaagagcagcaggcacatgtatccttagccctttattttcatacccataaaaaaaacaccactctaaataaaataggaatgggctcaggatttaacgactgcgatctaaatatgaaaattataattcatcttaaaaatatattaactagcattaaaatttatactacgaattcataattatgtgttttttaaaattcatctaaaaaaata

SEQ ID NO: 76747 - DNA, 276 bp, Glycine max
agctttgtttttttttgaaagaaccattcaacctaacagtgaggagcaaatgaaataatttcagtgtctaaaattattgatgcctgataacttttgttctttgttttccagagttttttttattaacttattaatcactgtagggagtatttgtaatgtgggaaacaaatactaaatactaaaataccatatatcacgtggagaggtgtaagtagtcaatttatcatgttttggagttggaacacagttaagttgatggagtattctcctcattac

SEQ ID NO: 76748 - DNA, 276 bp, Glycine max
agctttctcttttttttttcatttcttggttggtgttttggtttatgctaaaggtggtgtttgtcattagaagtgcggtaggtaggctttgtggttgattttagggatggcctttgtggataaccgggcggtgggtaaggagaaggtttgttattggctaagtaatgacattgttgggttggtgggaaacttggctgtataggaatggcagtcacagcacgggcttctccttcatcctcaccctcttcatttgccccagttttctcatttgtccaa

SEQ ID NO: 76749 - DNA, 434 bp, Glycine max
  unsure (1)..(434): unsure at all n locations
ttctcgctaagcgagcnagctggcttagttgaagagtngaaaacaacactntgccaaagtggcctatttaacctgaaattgagagaaattgattattaaacacacaaaacaaaagtataaattatctattacctatatttaacaaaaagtacttatagtattgcaaaacaaccataaattgggaaagtttgatgcaatatacacaggttttatacacaaaagttagtcgtattcatcgactaacaactcccccaaattgacagttttgcttgtcctcaagtggtaaaacatgtagtgattatgtacaggggtgtatgcatcannaatcattgattgcatgataagaaagatgaagcaatgtgtacctatcccttggtttacagaatatgcagctagacaaagagggagaacaaatgtgaacaatacaattagat

SEQ ID NO: 76750 - DNA, 278 bp, Glycine max
agcttcaaaatatttgatgaggtacaagctctaaaggcagagcttgaaagagcccgagtagtcgaagagaagttcaagtccatagccatcaaagtctgaaaagagtatgatgaactaagggacgtcaatatggccaccgctgaagccttggaacgagaaaccaagaaggcccgaaaggaagaacacgtgcaagcaaagttttgaggggctttatagggcagcaatagtaagctcaagctccgaagaggtgaaaggaatcatcacgggtcaaaggcatg

SEQ ID NO: 76751 - DNA, 276 bp, Glycine max
agcttcctattttttattttgattgccactttttggatggaaggatggactgatacaaattcgcattgatataggaaggggtaacagattgttggatctaaatatgagaaatgccatgcgtcataccttaatttcgtccgaggattattatttgatgatatacaacctttgattggccgcttccagatacttggcaccctctgttgcacaatatgtgaagtcccgagacgtgccgaaaatcaaaaggaagcgggcttacgtgatccgtgaaaattt

SEQ ID NO: 76752 - DNA, 438 bp, Glycine max
  unsure (1)..(438): unsure at all n locations
gagaatactggttatgtgtctactatcttagtattattggtttctccggcattgaggtgccacttgagctgccaggtctcttcaccttcgggcgtattcttttgaaagattcgtgcccccctcttgcacatgttctgtagttgcatcctatctgaagacattatactgacactgnctaacgaaggcaaccactatgtcctgtcaagaatggactcgggaaggtccaagttagtgtccaggtaacagctaccccataagactttcttggaaggaatgtataagcaattcctcatcttttgcgtatgcgtccatcttctgataatacatctntagatgggtcttggggcaagtagtccncttgtacttgtcanagtccagcaccttgaatctgggaggggtgatgatattgtgtactaagaacaactcttctatggtagc

SEQ ID NO: 76753 - DNA, 282 bp, Glycine max
agctttgagtgtgtttatcccaccatcttttcatagtagagtatcgataatgtgtctaccatcacgattatcgtctccctttccatcattgggggtaccacttgggccgccagatccctccaccttttgggcgtgttctttgaaagatccgtccccctttttgcaaatgttctgtagttgcatcctatccagaaccatatcaaaattgtactaatactgcctaacaaaggcaaccattaggtccttccaagaatggactcgggaaggttccaagttagtgta

SEQ ID NO: 76754 - DNA, 311 bp, Glycine max
acccgatcctctgaaaccaccgcggcctgcaagcttaaacattttttttttttctagcggaacatcaccgtgactcaccaaacattccagtcaaaaagaattgccctttgaattggctcttaggttaaacattccatatttaccgtcttgatatattacgggactccattccacatcctagttaaaatttattgacctttgaattggctcaaaatttttactgtcaatttttagtgtctaaatatattacgggactcaatcggaaatccgagtaaaaagctattgtcgtttgaattggctcttaggttcaa

SEQ ID NO: 76755 - DNA, 403 bp, Glycine max
  unsure (1)..(403): unsure at all n locations
tactcngatgtcttgttgagtcccgtatataacgaaacgctcgaatttgaatattcaagctttgagccaattcttacgactataactttctactcggatgtccgattgagtctcgaatatatcgaccgctcaaattgatgttgagctcaagccattacacaaaatatcgtttctcggagcccattcatgacgtatatatcgggacgctcgaaattgaatgtcgaacctctgagccattcaaatgacaataactttttactcgatgtctgatcagtcgcctatatatcgagcgctcaaattgaatgtgaacctctgaccattcaacgaaatacttttactcgatgttgattagtccgaaaatacagacctcaattgatttgacctctgccaatcaacgcatact

SEQ ID NO: 76756 - DNA, 276 bp, Glycine max
agcctatgatgattttgttagagccaagaatactttattatttatttggacaagtttgaatatgatgtaaaagaaaatgaatgtgagcctttttcccctttgaaaggtttaaaaaaaaatgttttaaaaatacttttaattaatatttgaattgtatttttccttattagtatatatgtgaggggtagagggtgtcacacgtaccgttgtttttttggaaaaaaaaagatgcagggttagctcgattgggcgagcacccctgcacctgaaaacata

SEQ ID NO: 76757 - DNA, 275 bp, Glycine max
agcttggttttccttttagtagggaatctatccttcctaagatggagccaaacccagtcaccctcattaagaattagctcttttcttcctctattacctttagttgtatacacctttgtttggttctctatttggttcttaaccctcttattcaacttctttacaaactctgacctagattccctttctttatgtataaagaagtgtccagtggaaggggaatgaggtctaacggtgttaggggattgaacccatagacaacctaaaaaggggat

SEQ ID NO: 76758 - DNA, 279 bp, Glycine max
agcttgtttattttaaaccctgagagtattgccctatattgacgaactgactgacatttgatggttcacccaaacatacagaactcaaccaacacacaaattaataaaacaacttaaaggtgaaatgagatttaatcccaaataagaccatacctctctttgtagatggaaaaattaggaacttcataattgatgagaaactttgctccatatagtgagttagagatggttaatccatgaacaactgtaatataccaaagattacaaaggtgggaataa

SEQ ID NO: 76759 - DNA, 311 bp, Glycine max
  unsure (1)..(311): unsure at all n locations
gcctagcgaatcagcctcgcttagccacaggaatcccagcaagaggatgagtgtgcgtncttaaaagatgaacttgcttagcgcagtatgcgcgcttagcgagttctttcgaanacacatatattcaatgaatactgatgaactcgcttagcccagcaaactcgcctaacgagttcatcacattttccagaaaaaatgcattttgtgtcttgcacttttttagcctctaaaggaaaataaacatgcaaccaaccaaatggctttacgacagacatatataagtctaattttacttctttanaacattaaac

SEQ ID NO: 76760 - DNA, 279 bp, Glycine max
  unsure (1)..(279): unsure at all n locations
agcttccttttgnttatttcgagcgtctcgatatgttatgcccctgaatcggacctccgtgcgaaaagttatgaccatttgaattgctcaagagcttccattgttcaatgtcgagcgtctcgatatattatacgccgaaattggaccttcgagttaaaacttatgaccatttgaatttctcgagagcttccattgttcaatttcgagcatctcgatatattatgcgcctgaatcggaacttcgagttaaaagttatgaccatttgaatttgtcgagagc

SEQ ID NO: 76761 - DNA, 378 bp, Glycine max
cttatcacttggagatcttattcatgcgtataatatatccagacgctagaaattgaactacggaagctctcgagaaattcaaatggtcataacatttcactcagagatcaaattcatgcggataatatatccacacgctcgaaattgaacatcggaagctctctagatattcacatagtcataacttttcactcaaaggtccaatttatgcgcataatatatacagaccctcgaaattgagtaatggaagctctcgagaaattcaaatggtcattaattttcaatcggaggtccgaatcaagcgcatcacatatagacacggtcgaaattgagcaatggaagctctcgagatatcacattgtcataactttttactca

SEQ ID NO: 76762 - DNA, 281 bp, Glycine max
agcttgattcttatttttaccgggatgaataaaagtgcaattaaaatgcctagagagttatacatttgtggattgataagaggttccctattttttgaagctcgatctctccccggatgaaccatataaccaagtgacattgaaatgaaataatagattttgcaatgtaaacaaacctacaaggtctgtacacgaagtatggcaacaataaccctatccgaggttcattacattaatcactagtcattaatcttggttaatttcctcgaaagtcctctgtg

SEQ ID NO: 76763 - DNA, 273 bp, Glycine max
agcttgtagtttctccaacaatttatatacttaactcctacctccttagccaatcttaggtgggctaagagggtttcatactcaactttattattcgtcatctcaaactcgaaccttagggattgctctaggattacttcacctatgctttctaggatgactccagccctactcccttttttcattggatgaaccatctacgtatagcttccacctctcaaattatggttctgtagtggttgtcattttggctatgaagtttgctaggcacta

SEQ ID NO: 76764 - DNA, 278 bp, Glycine max
agcttctcatgtgaggtgttgcttagtttttagatgggtgtgtgtagctaagctctagcttctcaaggaagttttctcaaagaagcttctcaaggaagttttcttaagaaagcttctcaaggaagctacctaatctataaatagaagcatgtgtagcacttgttgtaactttgatgaatgaaagtcttatgatatacacttcaaagttccacttctctccctcttttattccttcaatttcgtgctccccccttctctctttcttttcctccattaaa

SEQ ID NO: 76765 - DNA, 456 bp, Glycine max
  unsure (1)..(456): unsure at all n locations
gatccacgaacgatgattatcgaatgaagaacgtcgaagaacggtcttaacctttgcgaaattcctcacggaaaacgttacggaaacgtttcggaagcgtctcggcttagatnttcttcacggaaacaatttttccaagcaaattcgaaagagagagaagtgcctaaggggctgaacccttttcttcttcacttcctcccctatttatagcaaaataggggagatgggtgccgcccagctcgcccaggcgagccaggttgcttcctccagaagcaacagccttctggaggaatcttctggagggcccaagtgggcctggttgctatttgcacccnncatttgtctaagtacacccccctcttcttttttggtgttctttnttcgaaagttacggaacttacgaattcgaacgnacttgtttctttcgaatgtaccgaccttgcgatacatatcatc

SEQ ID NO: 76766 - DNA, 280 bp, Glycine max
agcttccatctttttgttatcagagcacaagagcttcatgtaggtgctccttaaacctccattaatttttttgctttaccttctcttccattgttgtttcttcatttttctccatgtatcacctcacatgtcttgtgctaaatgttgttaacatgattctttagagtttccaccgattaaacttgctatagaagctagattttattttctatggttcaaatttcatgttcttgttcttgaaccatgaattgtgttgagtttaggttcctttgagttttgt

SEQ ID NO: 76767 - DNA, 283 bp, Glycine max
tagcttgtaagttattattttcacaattgtcacgtgctcatgcaacacttgttagccatggctatacgaaacatcttgccaaacaaagtcaggttaacgataactcgcctgtgctttttcttccatgctatagttagcaaagtcattgatccagtcatgtttgatgagttggaaaatgaggccgcaattatactgtgccagttggagatgtattttccccctgctttctttgacatcatgattcacttgattgtgcatctggtcagaaaaatcaaatgttgtg

SEQ ID NO: 76768 - DNA, 434 bp, Glycine max
  unsure (1)..(434): unsure at all n locations
caagtatattggagctggaagtagncgcgctcatagtctctggacgaagcaacaacttgaagactctggagtagaccttgatcacattcctctaacatgtgacaacacaagtgcgatcaatctaactaaaaatccggcatgcattcttggactaagcatataaataaggcatcattttcatagagatcatgtcttaaaaagtgattgttgaattgagttcatacatagtgagcatcaactagcatacatattcactaaactactttctagagatagggtcttcttcaatagaaatgaactaagcatcttacgtgcttctagaatagaatgacattctcgttagtgtatattatctattgcatattgcaatccatatctatagatttctctggatacgacttagtctggtgatgtgtggtgttactcatttattt

SEQ ID NO: 76769 - DNA, 275 bp, Glycine max
agcttaatttttttcatgggtactactagaagggagttacctaataaaaatgaataattcggtgagaatgtccacgaagcaatgctccaaaaaatagtacttaccaaataaaactacactaacactaagtgtgagggtaagaatgaaaatgatcacagatgctctccctagtatggcaatagcctttctcaccaaatgttgtccaacaagtgcaatactagtggctataactacgaggtaaagagctgcaagataatatcgaaagttgaacatta

SEQ ID NO: 76770 - DNA, 257 bp, Glycine max
tgcttgaatttggtttttatacgactgatacatatgttgggacttgtaggaattgatttgggcttgattggatgagaggaagtgtgattttccatatctgcacttatgcagaattcctgctgggaaattctccaacataattttgcacaagtttcccttactgcttgcgtgtggttggctgcggaaagagcagtgcacctatgtgttctggatgttagcttgttgatcccttcggtcaatatgtaggcttatgtact

SEQ ID NO: 76771 - DNA, 94 bp, Glycine max
caacttttgagcacagcttattgatctaataccggattggctcttggctattattactcttatcattttaatcattttgaatttgaataagtat

SEQ ID NO: 76772 - DNA, 279 bp, Glycine max
agcagagtttttaaatcctgacccaccataaaccttgacccagggagagaatgtcaatccttaccctcggaagcaaaaaaagaatagaggggaaactcccaatcaaagaaaaagagaaggaaaatctccaatgaaagcaaaaaaggaaaagaaggaaaattccccaatcaaagagggggagaaagcaaaaaaagaaaagaaggaaaattccccaatcaaagagtgggagaaagcaaaaagaaaagaaaggaaaattcccaaacaaagaatgggagaaag

SEQ ID NO: 76773 - DNA, 459 bp, Glycine max
  unsure (1)..(459): unsure at all n locations
cccatcacatgtggtactaagtggtggtctggcgatggtgcacaacaagtnttgcacatccacaatgcgcgcataaacccaccatcccctgttgcccaccttcaactgagctcacgtactcccacgtagcccatatcctcgtttctctcaacaccgtgttcccatcaattctctcaagcttgcacaacattcaagcaaaacaacatgtcaacagcacaagctatcacagccaagctaaagcagagcaaatgcaggaaactctgctcaaacaccaaccaaaatcacatgctttctcacgtagagaccacagtaacaattccttcgatccatatcgttaaccgttggatcgactccaaaattttactggaaggctatagtgcataagcctacatcttgactgttggatctactaccaacatcagatctattctgactagacttccacagtcaacacacaca

SEQ ID NO: 76774 - DNA, 277 bp, Glycine max
agcttgctgctcttttcgcccaggcgagcagggttgcttcctccagaagcaacagccttctggagggcccaagtgggcctggttgctatttactccccccctttttactacatgcaccccccttttctatttttttgtaattctttttccgtaacgttacgaaactttacgaatttcgtaacgatacttattttttcttccgcaaggttacgaatccttacggattatgtatttactcttttttagctttcgaagaagttacggaaactcacggatt

SEQ ID NO: 76775 - DNA, 345 bp, Glycine max
cctacatcacactcatcttccttcgctaaatctacatacatgcatactcatagcaccttggctatcaaaaattgcatacgtgcacattctgggaattctaatacctatacatacacaaacttcatgatgaattatactatctacacaataaggtgctacatatcatgccttttatcaagagttatgttttaacacctaaagccgcatgccgatcaagtatatcttctttagctgataaaatagtattccacttcaagggatttctgcaggaatttcttacatactgcacatattaatattttgtagacttttacaccaaaatacatatcaacatctagtattgta

SEQ ID NO: 76776 - DNA, 295 bp, Glycine max
  unsure (1)..(295): unsure at all n locations
cctggaggcatgcaaacanagtttttaatttatttgacaacaacaacatacagggatgtccggttaaataccgccaaaatatagaggactctacaaattgaaacgaaaagcttctagataaaagaaagggctataaactaatacaccaatgtccagttgtatcccgaaaaatatagagacgctccaaaatgaaaacgcgatactcttaaaaaagatagacgaccttttctttttaatagatgcccgacctaagtggtaatttatggagagaagctacaaattgaaaactagaaac

SEQ ID NO: 76777 - DNA, 467 bp, Glycine max
  unsure (1)..(467): unsure at all n locations
cctcatcgtctctcacagtctctatatntgggagccttttcattccttgtgtccggactctcagccacttatgatagccgccgatgatcccatctactgcttccctaagctctatgtgctttcttcacaccgcatcacatgccttgcgaactccttggagtaccttagcattgtggtcactgaaaccccgtgtaatgaaaggcgtgatgctctcgtcttatggcgctcctcttatggagtagccaagctggcttatggtgaggacaagattataatttatacaaccccttgttcccattaatggaacattnggaaatccttcgcatgaagatagaatcctgattcttcctttcttctagtgagggaaccaattaacagacgcccctccatgctagccaagaggtggtcccaattcatctttctttttctatgacaagcggtgaccttgtgcggatgacagcctacct

SEQ ID NO: 76778 - DNA, 272 bp, Glycine max
agcttgcagctttatgacaatgaatatctttgggaaggcaccaatcccacaatatatacatttctcttaaacctataaatagaatatcaagtgttgaaaatctgttgaaatccctggaggatcgcacactaagttaaaagagcaaacctttgccttgcaaagttatttttgttgtattcaagcttattgtgtatcctctctatgagagctttgaatattgtattcaattcaaactattgcttaaaaagctaggaatggcttttgtgataaaa

SEQ ID NO: 76779 - DNA, 275 bp, Glycine max
agcttatttctgaatgaagtttattctttctctaatgagtatcatactttataccctctttatctcttctcttgtagtttccatagcagccgacaaatcatccaattcacagtttcagtccctcagtcatgaagaaaccatagtttccccaaatggagtctttgaacttggttttttccctctgggaaattccaacaaaagctacctcgcaattcggtacaagaactattcggatgaaacctttgtttgggttgcaaacggttcctacccaatca

SEQ ID NO: 76780 - DNA, 279 bp, Glycine max
agcttccaaacttttgtttgatagaaggaactcttgtattgaatttaaagagaatgttgttggttatgttggatgtaactttttcccaaacacattaaattaatcttgactattgcaatctctatttgcaaacctgaattttctcttttcttaaaggggatgaaaatactagacatttttttttaaaaaaaaaagaagaaaaacttacttggcactttatagagaagtcattagtcttaaaagccaaagctatattaggaagggagagcctctactaca

SEQ ID NO: 76781 - DNA, 260 bp, Glycine max
cggactctcagccacttatgattgccggcgatgatcccattacagcttcccctaagctctttggcctttcttcacgccgcattccatgccttgcgaactccttgaagtaccctcgcgttgtggtcactgaaaccccgtgcgatgaaaggcgtgatgtttcgtctgatggtgctcctctcatggggtaccaagattcttatggcgaggaaggatataataatcaacccttgtctcatcagggaacattgaaatcttacatg

SEQ ID NO: 76782 - DNA, 280 bp, Glycine max
agcttttacaatattgttcatcaagtcaagttgaaatatggaagtaaccatcctgcaaaattggggcaaaagatgaatcgagtcacatcactgcttcgtctactgccaaacatatttaggattattgatgtccttgttacttccagtttcaccttgacaaagatgtcatggaccatgttgaaaatctaaattgattcaaccccatatcctgcgtaaaaattcgcaatacttcgactgtacatcattcgcatgcatccatgcttttcattggttgcattgc

SEQ ID NO: 76783 - DNA, 398 bp, Glycine max
  unsure (1)..(398): unsure at all n locations
ttatttagaaaattatgagttttctcttttatcttagtgagagtgattctcctaaattcttgagtgattcaagaacaccctggctgtatcaaaggaccttcacaacctttgtgtgttgccctcgctggaaagagtgagtctttccttcctttcatcttcacccttggtctttcaaaccacaattccagaaaatccacctctacccagaattatctcgtggccgtaactcccattttacgcacctcaaataagtgattcttgagcctannatgactttcaaaacgagacctttcacctcgtgttggaatcacctcatntggagacctgtagcttcaggtattgccatatctatatatctgtccagccaccacttaacctacattttatccatccattca

SEQ ID NO: 76784 - DNA, 284 bp, Glycine max
  unsure (1)..(284): unsure at all n locations
agcttgnacattttttataaacatcttctttgaccttggtgatccttgactccatctcattgaatcgcatgtccacttgtaactccaaagtatcaaacctttcacaaacaaaggtttgaagaccatctaacctgtccaaaatcttttgaagaagagaggaatcttctccaccatgtaaatgtccttcttcatcaatgggttgagcaccctttttcacccaagagctatcatgctctttacggtaaccaaaggatgcaatcacaacaacgcctattagaaaggat

SEQ ID NO: 76785 - DNA, 380 bp, Glycine max
tgcttttattgttgaccacagagtgtttcctgcagatatgtcgcgggggtcacgagacctatgggacgtcaagtggtgtgctatttgccaaaaccaagcttgaccaatcccgacccaacccgagcatattcggacagtgagaacctgtgatgtacctaagcaagcgagctctctgcaattctacagataagagggactaagaccacaaagctcggaggctcgtggtggctggccagctgtgaattttgtgggatatgtaggatatggcctctgcgtatccattaccaagggtgggtaatcgattactaggcttaataatgaagataggaggctaagatggtctctggtaatcgattaccacggggtgtaatcgattacca

SEQ ID NO: 76786 - DNA, 275 bp, Glycine max
agcttggatttttccaaacctatgtgtctactaaaaattatacacttggagctatgtttcctgtttctctttcctcgattctctctcctttggcacactctgattctttttttaccataactttaaccactactccatcaccaccttacccatctcctttgtgtcgcgccaccacctacaccacctcctccaccgtgtgccactatctgcaccagccagcacagcgggcacgacgatgtcggggtcgcagatggtgatatggtggtggtggagac

SEQ ID NO: 76787 - DNA, 277 bp, Glycine max
agcttatccttattttttgcctccggacttcactccccgtgccaccccggaagatttaagccaagcccctactttcgaggggcaactcccaccttatgacgattatcccgggcaagacaatgaggaaggagatacccatctcggtcccctgctccacctcaaagatccgtccccgcatgaactaccccaaccaaacatagtccgccatatcccggcttcacccacacccgtaaaagaatctgttcccttcgtggaagataagggaaagattgaggcc

SEQ ID NO: 76788 - DNA, 360 bp, Glycine max
  unsure (1)..(360): unsure at all n locations
tatcgaatacacacatactgtaatcgattaccagaggatgtttttcaaaaacattctcaacagtcacatcgttttatctgattcttaagtggccatcaaaggcttatatatatgtgactagagacacgaatntaacaagagtttttaagaacaaaaaggtcttattctcttaaaaagcaaaatcattntaccctcttacaaattccttggccaaaactcttgtgattcaataaggaattatttgagtgctcatatngttcaatctatctctntcaagagagatttcttcttttcttcttcttcattctgaaaagggattaagagaccgagggtctcttgttgtgaaagaattctaaacac

SEQ ID NO: 76789 - DNA, 280 bp, Glycine max
agctttacatttttattttagtaatgacccactaacctagaattaaaataacttaatgccattaacctagggaattaaaacaaactaaatgactgagtgtaactgaaattgttggcaaccaaaagtcacccccaacagccaacaagtcagccaccatttggactcccaaaaggctgatgcctaggttgccaattgggcccttattacaacttgaactaaagcccttttagttgattaacccaaaacatatttttagtcaaccaactttacaaggattggg

SEQ ID NO: 76790 - DNA, 454 bp, Glycine max
  unsure (1)..(454): unsure at all n locations
tctctcttcttgttcacgaatatattttgtntctaatccttgtatctggatatgtntttatgacatatgaatacttattatttcttttattattagattagtatgactgaacatgatgattatatttacttgctcttggttgtttatggctatgatgtttaaactcaattattttgatgatatatgactagcggtatgcacttttatttggtattatgaatgactttctggattatatgacattctatgaagtattatatttctagcgcgatgaatgggtatgatatctggctagattggtttctattctcgngtatttggctatattattgaggtatctgaacaatatactatttccttatttgcatggtatggttgaacaaagtatgtatctggctatgcggactttatagctcatctatttatgatagttgcttataggttctacttcatg

SEQ ID NO: 76791 - DNA, 276 bp, Glycine max
agcttgaacattatctcctttagggttcgcaggttcttccatgcacggaatccagtgaacatctcaattacaatgcaccccagagaccatatatctaacgctggttcaatctgaccaacgatcgattctggcgacatgtaaaaaggtgtccctctaaacttgaccttcccatactcagcatttgcatcttctctaatcttggacaacccaaaaacagcaatcttcagttgataccttgcatgatcatcacatgaaggaaagagaaggatgttgtcc

SEQ ID NO: 76792 - DNA, 389 bp, Glycine max
  unsure (1)..(389): unsure at all n locations
tactcagctttccctatttgctataataggggatgaagtgaagaatattatggttcagccccttaggcacttctctggctttcgaatttgctgaggaagattatttccgtgaagaaaatccaagccgaggcgcttccgtaacgtttccgtgagtaattacgcgaagattctcgaccgttcttcaaagaatcatcgntcgttcttcgttttcttcagtcttcaacgggtaagtacctcataccaagcttttcaattcactctatgtacccgtggtggtccacattttgtttcatggtattttattctcgntttcatttactttnntatacccctnttgacgtgcttaagccatntatttaagacatttctcgcttaatctanaaataaaa

SEQ ID NO: 76793 - DNA, 279 bp, Glycine max
agcttctatgttaatttattagcatgcaaaaatataagctaaagcaagaaaagggatgtgctttcgcgctagttgctcatccgtagcttggtctttacgcatgctaaaaaagctattctttgggacgtagaaaggaaatatcctaattcagtagagaacgtagctggtgcacaagacaaaggaggacaggaggggttcgggggaggagctctcggcacataatcagtcggcatggtctttcatgacccataggctttgggcttcgatggctgcttgaaa

SEQ ID NO: 76794 - DNA, 468 bp, Glycine max
tcaagctgctcaattgctccaggttgctgcatggaaaggcatatgtctgtatggtggtcagcagaggagcacaaaccacaaacccttgcgacaggtacagatttctgattcaaggctagctgggttaccaagttgaccaacgcatccagtttgccttcaagcttcttagtttcagatgatgcagatgggtttgtagctacctcatgcactcctctaatgactatggcatcatttctggcactaaactgctgggaattggaggccatcttctcaattaaatttttggcttcagcaggagtcatgtctccaagggctccaccactggcagcatctatcatacttctctccatattactgagtccttcataaaaatattggagaagaagctgttctgaaatctgatggtggtggcaactggcacatagtttcttaaatctcttccagtactcatacaagctctctccactg

SEQ ID NO: 76795 - DNA, 272 bp, Glycine max
agctttgaagtgtgagagagaccaatcacgagcacatagcatggtcttgaaagaagagttggctgcttgctcaaggtcctaaagaaacttgtctcagcgtttatgcgagacagagaccaacatgttagccatcgtctgcaagtaccaagaagaactaaatctagccacgacccacgagcataaagtggtggacgagtatgcccaagtgtacgcggaaaaggaagctaaaggaagggtgatcgactcattacatcaagaggcaacaatgtgga

SEQ ID NO: 76796 - DNA, 448 bp, Glycine max
  unsure (1)..(448): unsure at all n locations
ctttctatatcaatctatctattgtctaaccatnctaattgcagactttacatactngttctttctgttgctaacatacatacttgctcgaactcatgaaagaaacacanactccatcataatcatgcattcaaaccaaaatcaattcatacaccaattttcacaaaagataaaagtggttcactgcataatcatcaaaatcaagtcaaactgttctatatgcttcatgatgagcaaactaactatttataaataaaactagcagaaaagaaatattgtactataaccataattaagataatgatanaacaaacaccaggtagtgtcatcagaaatcactgatgtgccatcattntcgtctattttctaaccctntttgcaccatttaattactgattggcttaaatgtcaataatcaggcagtttattatttggctcattagctaat

SEQ ID NO: 76797 - DNA, 365 bp, Glycine max
tgaccacagagtggtacctgaagatatgtcgcgggtgtcaagagaccttgaggacgtcacgcgaggcgctattggccaaaaccaagcttgacctattccgaccctatccgggcatagtcagtcaatgagaacctgtgatgtacctaagcaagcaagctcctgtcagtcaacatataaaaggaactattaccacaaagcaatgaggctagtggtggctgaccaactgcgaactttgattgatatgtgggatatggcctttggtaatcgattaccaaaggtgggtaatcgattacaaagcttaataatgaagacatgaggctaagatggtctctggtgatcgattaccaatagggtgtaatctatta

SEQ ID NO: 76798 - DNA, 278 bp, Glycine max
agctttgagggtgtttttcccaccatcttttcatagtagagtatcgataatgtgtctaccatcacgattatcgtctccctttccatcattgggggtaccacctgggccgccagatccctccaccttttgggcgtgttctttgaaagatccgtccccctttttgcacatgttctgtagttgcatcctatccaaaaccatatcaaaattgtactgatactgcctaacaaaggcaaccattaggtccttccaagaatggactcaggaaggttccaagttag

SEQ ID NO: 76799 - DNA, 330 bp, Glycine max
atctgcggcatgcaagcttgcaattttgtatgtacagcacaaagccaaaagtccaatgtccttttgacaagaatgagactcactcatgttctaatcctgcacactacagtggacatcattcatcgtagctcaaatcaccacttttattaggaccttcacacctcacctcctgaggggaactgtggccagaagaggcgttcacttctgaaaagacagtgcgacttatctctttagaggggtgcagtcctttgtatgtctaaaaagaagcgaagggtcgttgatgaaaacttgaacgcttgccatattcacgcataaactccaaaggaagtg

SEQ ID NO: 76800 - DNA, 281 bp, Glycine max
agcttcttattcttgcaattcttgggggggaagctccttcttccttggcttattccctagtggatggtgcctcccctatcctcttctcctttgccttccgctgcatctccatggtgaaaaatcaccattgaaggacctcatcgaagctcaaagatccagcctccatagaagctccacaagcaagcttccatcaagtggtaatcagagcacaagagcttcaagtaggtgctccttaaacctccattaattttttttctttaccttctcttccattgttgttt

SEQ ID NO: 76801 - DNA, 355 bp, Glycine max
  unsure (1)..(355): unsure at all n locations
cctgtgttgtcatagagaacttctagttcatagccatcgaagtctgataagagtatgatgaactaagggatgtcaatatggtcaccgatgaagcctttggatgataaacctacaatgctcgatatgaagatcacgaccatagcaaagttttgaggggcttcatacggcagcaatagtgagctctagctccgaagaggtgaaaggaatcattacgggtctaaggcatgatcttgaaggacgagctaaatgtttgccttangtcgaaaagaaatatgtctcaacagtttatcgagactgataggaatatgggtgccgctctcgatgagtgcatagagatgctaaatctatcggtgac

SEQ ID NO: 76802 - DNA, 282 bp, Glycine max
agctttttggtttttaaacatgggaccaactcattttatttcaaaaaggaagtcgtatctagccaaggtctgagagaccatacaagtttcctaacgatttctaattatgtgggccattaagtctatcatatgctgacaatagccgagaagcccatgaatctcttcgggggtggagtaggtgtctgccatcgccttggccttggctaacaatcggggaagttcttgactcccgttcaaggtaagagcaaaccgatccatccacatggttgcctcttggtgtaa

SEQ ID NO: 76803 - DNA, 483 bp, Glycine max
  unsure (1)..(483): unsure at all n locations
gctgctaaccatggaagctcctaatatctccaacactttttgatgtgggccattctttaatggccttgattgtctcaaggtccacttggaccccatttctaccaactacaaaccctaagaaaactatattatctacacaaaaagtacacttctctatatttgcatagagggtattatccctaaagactgaaagaacttgcctgagatgtcctaagtggtcatccaggctcctactgtacactaaaatatcatcaaaataaacaactacaaatatacctatgaaatcccttaagacatgatgcataagcctcataaaggtgcttggtgcattagtgagcccataaggcatcactagccactcatacaaaccaaacttggtcttgatagcgagtttccactcatcaccctctnttatcctgatttggtgatacccactttaaagatcaattgttgaaaaatattggcccatgcaactcatcaagc

SEQ ID NO: 76804 - DNA, 275 bp, Glycine max
agctttttatttttttttattggcttttttttttagacaatagaaattggggttgtagcaactcatcatattttattttatttttgagtgtgtgctgtttcttgaagcaaaatttttcaccaataccaatattccaactcccccaaattaagggtaaatttgccttgacccgtgctttcctacaacctaagataaggtggtcattaatttcattaggctcaggttttcaacaaaaaaacaatttactgcattaggctcaatagggtacaagggat

SEQ ID NO: 76805 - DNA, 275 bp, Glycine max
tgagacttgcttcttttatttgtgaccacagagtgttacctggagatatgtcgcggaggtcacgagaccttggggactgtcagtggggtgctattgtcctaaaccatacttgacctatcccgacccaccacgggcatagtcagccatcgagatactgtgattgaactatgcaggcgagctcctggcatctctcatgatataatgtactgagaccacaatacaaggaggctcgtgtggtggctggccaggtgagaaacttgattgatatatgggat

SEQ ID NO: 76806 - DNA, 277 bp, Glycine max
cgcttttttgtcttataaaaagaagaagttcaaagagattcaaggcttgttaaggattgattgaataattgtaaaagtgtattgaaaagcaaatcacacccttgcttttatagactcttcatgtctggccaagaggaccatttaaaacagctatatcttttaaaaaaacttaaaaccattttgaaaaagtcaaaatccttttgtagagctacatcttttgatttattcagaaacagtcactggtaatcgattaccaaattagagtaatcgattacac

SEQ ID NO: 76807 - DNA, 277 bp, Glycine max
agcttaactttttttcaatcaactacgatatatgtaacctgttgatggtgagcatcaagatgtttcttcatagtttgtaggaccctgtttagatggtatttcaattgacacaatgcttcattgcagtctatgagaacagaggcaacagattcaacttgtgtttctctcaccaaaaaacgaagcactatagggggtgggcgaccatacaccacctcaaagggagatttggaggtagctgaatgggaagaagttttgtaccagaattttgcccaagata

SEQ ID NO: 76808 - DNA, 401 bp, Glycine max
  unsure (1)..(401): unsure at all n locations
tctatagaaagtccatacaagatntctctatatattcaaaaccccttagtaatttacttgtcaaagagatcttgttccacttcaatgaagaatgccttcaagctttcgaccacttgaataagaagctagtaaccataccagctatagtggttccctattgtgggcaagaattngaattaatgtgtgatgctagtgactatgcgataggagcaatattaggacaaaagaggaatggaagatttcatactatctactattctaggaaggtgctaaatggagccctaagcaacaacagagaanaagatgctagcagtggtttatgcccttgaaaattatcgatcatatcttgtaggatcaaatatcattatgcatattgaccattccagctatatatatctact

SEQ ID NO: 76809 - DNA, 280 bp, Glycine max
agctttttattttcaacaaagaaagggtaataaaccgtttaaacaccctccttcgctgattgcacctgattttcctcaatccttcattctggttagtaaaaaaactcggcctttttaaaaactgaaaaaacaaaacaggtaattttgttttggatcttcctaaccagtggccttacgacattaattaaggaattaaaaaaaagtatttattatataaattataggagagtataaaaaagtcatagacatagtagatttgcacattccaaaattttatttc

SEQ ID NO: 76810 - DNA, 417 bp, Glycine max
  unsure (1)..(417): unsure at all n locations
gccttgaaatcagcttattataattgagttttattttttaccctttttaaatccatatttttgaacatgtgtaattgtttataccgctcctattattatttaataatgctagaagattttggcttatttgatagctaacatacataatttaaaataaaatccatatagttgttcatactatgtcacatactatcttccaacttgagaaagaaatcaaacaaatgaaaatacttaggtgcaaaataatataaggcatggaactacacgtcaatgagaagatgctttagctatgctaattgtgattatggggaaggaaaggatgggaaaacaaagcggtcactgttaattgcaaataagatcgacatatattanaagtggtctgatcattattcatgctaactcaaatattttcttatt

SEQ ID NO: 76811 - DNA, 279 bp, Glycine max
  unsure (1)..(279): unsure at all n locations
agctntctttttgttgtttttcaccttctcgctaagccaatatgttggcttagcgagcatccactaagcgcaacactcataggctaagtgtgaggaagcctctggaagaagatgagctgtacaggttcgctaagggcaccgcttcatctcactaagcgcaccgcttcagttcatccgctaagcgagaaaggcacgcgctaagctgaaattcactaatgtgcgttaagcggtccataagtgcactaagcgcacgagcacgaacaaggccacctatctaag

SEQ ID NO: 76812 - DNA, 420 bp, Glycine max
  unsure (1)..(420): unsure at all n locations
tactcagcttatagcgcggtctggagacatagtcaagggtccttattaccagatgatgtccgagtacattggattggtacgaaatgccctccgattccagctgaaaattggcgagtggggaacgccccgacatttacgcagcgagcataatgtaaacctttacgggtttaaaagctctatagttgggcctaggctttagagtttttcttttggtaaggctntgtgtatttttttttttaaaattataatacaaggatctttcttcatctgatcctacgtctctacccattctcatccatttgcatgtttacttcttttctgagacgacagatccgatgacgagtcccctgaaggactaatacctgngacccgcctatcaacttcgagcangaaacaaatcaaacggaagatgaaaggacg

SEQ ID NO: 76813 - DNA, 278 bp, Glycine max
agcttctttttttttatatagaacttatatcctaatgtcacatcctatcagagtgttgtgttcctgtgtcctctagcatgaggttgttcatagtcatccacctattcatctgctcccccgaacacaaagttcaagatcatcacaggatccaaacacaaacaacacgcagggagtgagttatcacattcctaactaatgaagagaaacaagataacatgtaggtataaatatcatataaaaaaatacaacttacttaagcatcactcacgttatttcac

SEQ ID NO: 76814 - DNA, 441 bp, Glycine max
  unsure (1)..(441): unsure at all n locations
actcaagctctatgtncacttattcataaattagcattcctaggaatcttttattctcaagagatatgtnttaagtatatgcctaatgcatatntacctgaatggcctagtgatataaatattaatcttgtttccaatgaggaggaactaacaccatataaaggcatagcgataaagttatgccttaatgaccagttggtcatgggtttgtttgcaaaacagggggtaatattttctaaaaaagtatatatngtgaacttaatgaatacttaaataatttacaatnagtaatagctatntattctactaatattagttagttattaggagatgaacttaatcaacacagatcacaatcaaactaagtgtgtagctgaatccaaanaccanattggnttttctatatcttcacgcctcttgtcaataaagatattcatattc

SEQ ID NO: 76815 - DNA, 272 bp, Glycine max
agctttttccttcgtgaaaaaccgatctggtccaacgcattcccctcccaactcagccgtcaccgctcagcttttttccactctcaccatattccctaccaccccaaaacattacaaggagggcatcaatttagttcttttttcatcaaaaaaataatcaaacttataatctttctctctctctcttttttatcacaagtaaatcttctaattcctgcgtcaacttaaatttaatatcactttaatataagtattgagcatattaaatatgg

SEQ ID NO: 76816 - DNA, 277 bp, Glycine max
agcttgtttattttgttagccactgcaatcttttcaagaattcacatttaatagccaataaattattttatatttttttaattaaaaatctgataaagagaatttgcaatcccattacacatgattatatacacgaacgctcgaatcgccagacaaagttaagtgaaacgaaacacttactttcgagtttagaataaaaggttcccaacttttcgtactacaaatttgttttaagtttctttgattgttgctaccatggctggtactcaaacagatg

SEQ ID NO: 76817 - DNA, 343 bp, Glycine max
actaatatgaagttattgtagcttctaacatcagaatggtcattccgggttgtgaaacttcgtaagtaatatttaacacatagggcactcttcaactggtaaccccttccaatgctatgtatccataatcagctcagagagtgagcaccgaggaactaccatggccaacgctacttggcttatacactcatctgggttctcttttttctcatcaattcacgcctttcaagttacaattatcttcttcttcaatggtactgcgcttggaatggcgctagatgacggatgatgaagaagatgagataaaaaatctacattctgtaatgatgtttgactaatattt

SEQ ID NO: 76818 - DNA, 279 bp, Glycine max
agcttcaggctttttgtttgtttcaattacaatgatgttgtaatcgattaaaacagagagtttttgcctttgaagaaatttttctaacttagcaaatttcctttatactaaccacgatgatgcaagatgcaaaacagatatcaaatgtactaagatgcaacaaccaagataacaaccaattcaaatgccactcaaaaaggagttgggtttgtaaaagccaaaacttcttcaaatttttccttgagctttaagctttagccttaggttgttcaccatgtt

SEQ ID NO: 76819 - DNA, 353 bp, Glycine max
acatataaggatatcaaagagagatgggagaattacttttacatgcttttcaatgatggtcaagattcaagtactaatatggaggggttagaaatccaagaggaggaatgaaattggtattgttatggcataatttgcattggtgaggttaaaacaaagtcttaaaagaatggaaggggtaaagtgctggtccaaatggtatccatattgaagtttggaagtgtatgggagaacaaagttttattcggatcactaagcttttcaatgagaatttaagatctaagaagatgtcaaatgagtgaaggaagagtactctggtcctagtctttaagaacaaaggaaatatcgaatat

SEQ ID NO: 76820 - DNA, 311 bp, Glycine max
gacgtcacgtggggtgctattgcccaataccaatcttgaccaatcccgacccaacccaggcatattcggtcagtgagaacctgtgatgtacctaagcaggcgagctcctggcagtccacacataaaaggaaaacaagaccacaatgcaaagaggcttgtggtggctggccagctgtgaatattgtgtaatatgtggattgtggcctctggtaaacaaataccaaggaggggtaatctatgacaaggcttaataatgaagacaggaggctaagatggtctctggtaatcgactaccacggagtgtgatcgat

SEQ ID NO: 76821 - DNA, 281 bp, Glycine max
tccaacccccgtctaaatctctaatgaaaaaactctgggcccgacccttatagcccatattttcagtaaccaaaatctgggggcctgggcttccaaaacaccccccgcaccaccgggctctgaaatatgtattagacctacactcccaactttcaatctatactcacagagactcggtgctttactaatcaaattcacatgcacgatgaaaacttcttggattatgaaaatccttatcctttcccaccaatcattactctccaaaacccacaattttccaa

SEQ ID NO: 76822 - DNA, 205 bp, Glycine max
ccatcgcatctaaaggtagaatgaacatctctacggagccttagatgattataattgtgttatatttgtgacgataattcgaattcttcctttatgattattaatacaacatcgatgtcatgatgcatattgcttgtataaaatagagctctcctatctgatttcacttttcatacctatgattgtgattaataggctttgatat

SEQ ID NO: 76823 - DNA, 279 bp, Glycine max
agcttctacttttttttttgggcaggcttccttcactttcttgtctccaacgcgagctttgaccactgttcttccttcccgcgatgcttcttttcatgtccgcctgagtgggcttatagcctaaaccatacttcccacgatttccttgggtatctatcaggctagttatgcagccgttgtttttgcctaaacccatcccgtattcataaccgttccccaacataactcgggccatcattaccgctgcatcggacagacaaggctgcccaaagagggagt

SEQ ID NO: 76824 - DNA, 492 bp, Glycine max
tttatactcttctctcgtccaccttatctatacacatatttgcatcatattgaaatatcactcattagaaaaatatcacaacaattaataacatacttggtacatactccttatcaataacatcttataaaaagagaggctcttatacccaaagaaagacttggtaattcaacgattacttaactcacaggaatagacaggattcttgggtttatgagcaacagcacttgaagactgagcattagatgacccttcactcttcttgctctttggtgtctctgcatcaccaccttgtatattgattctcatatctcatcattctgtaccatattctcaagaatataatatgttaccttcgttatcattatctatttagatggattcttatacaagcactgctactaaacatttaattaacatcgcatggtaacatccggttttgaaaaccgatgctaacttataatgttacatcagttttaaaaaccgacgtac

SEQ ID NO: 76825 - DNA, 277 bp, Glycine max
  unsure (1)..(277): unsure at all n locations
agcttcttctttttttaagnaatacaacattcaaacagcacaaactatcacagccaagaaaacagagcaaaggcagaaaactctgccaaaacaccaaccaaaatcacagcttttctcacttaaagaccccagtaacaattccttcgttccaattcgttaaccgttggatcgactccaaatttttactggaagtctctagtacataagcctacattttgaccgttgggatctactagcaaacatccagaactcattctgcactgctctttccacaacc

SEQ ID NO: 76826 - DNA, 368 bp, Glycine max
  unsure (1)..(368): unsure at all n locations
tatgctgcatacatttataatagaccttctcagcngataatcctacaacaacagaataattatgacctttcaagccacagatacaatccatgttggaggaatcatctaaatctgagatggacaagtcctccacaacaacaacagcctgtccctccttaccagaatgctgctggtccaaacaagccatatgttcctcctccaatacagcagcagtcacaacatagacaacaagcaactaaggctcctgctcaacctttcttataagaattagttaggcaaatgaccatccataatatgcaagttcagcacaagacaagagcctccattcagagtctgcaaattatagtgggaagatggctactcagatg

SEQ ID NO: 76827 - DNA, 437 bp, Glycine max
  unsure (1)..(437): unsure at all n locations
tattctcgtttggttacttttttataccccctctttgacgtgcttatagccattnttactctatagtcatttcttcgctnntaacttaaaaaataaaatnaaatttccacccgaacggtttgaattagtattatcccgttaaacttcgggntaaaaatggaattccgacccgttcngggtcgtgcncgtaacccacatttggaaatcataaaaaagagggtaaaaataatataataatcaaaaagacatcttttagtaaaataaagcggaaaatcaatcggaccgtttctctttgggatttctcattcttaatcgaatggattaataactaaagtgaaactaaaggctaaaatcaattcgcctagtcaagctcgtccataaaaataagctgttgaagttggcatttcatttcctcactaagtaaaatggatcatttt

SEQ ID NO: 76828 - DNA, 277 bp, Glycine max
agcttgtgttttatcatgagtattgagcaagtgtgtatgctagacaaagaaagaacaagaatgtgagcttgcaattacaaatgttagtcagtagacatattaattgagaaagaaaagcttgaaccataacccggtgagagtgtgatcttaaattatgagtgaatgactagctttgagtaatggtctttgcatcaatctctgaaatgtagaatgaaatgtatgaatgaggacatgatgaaggccatgattgtgtatatacaagccaattggccaaaaa

SEQ ID NO: 76829 - DNA, 422 bp, Glycine max
  unsure (1)..(422): unsure at all n locations
atcaaacttgctctttggaactgactntgngattcttaattcttctatctgaccgaatgaagtgatatctaacatctatatgagtggttctatcatgacgaacctgatccttggccaagtagatagcactaaggttgtcacaatacatgttagcatattcttgattaattccgagatcatttatcagacctctcagccaaaccccttccttngcagcttcagtaagagccatatattcagcctcagtagttgagagggcaacgaaatgttgaagtgttgccttccaactcaccaagcagccaccaagggcgtaaccataccctgttagggaccttctcttgacaagatcaacaacanaatcatcatcataatagccagtgagacagcaatcttgagtagatccatagatcaaccctacatct

SEQ ID NO: 76830 - DNA, 276 bp, Glycine max
agccctgtttttttcttcccccctcctgtttatcccgatggaaagacagtggaaacaacctacatggaaatttatataaaaggtaacagtgaataagtaatacaaagtccaaagttgaaaagaaaataaaagaaatttacttttgacaagtttatttcatataaagcactgcccatgtcaataacagaaaaacaaattaccttttatatatctcagtatcagttgtgctggtagtgcaaaagacaacagctgttatattgtctttctgcttatcaa

SEQ ID NO: 76831 - DNA, 363 bp, Glycine max
  unsure (1)..(363): unsure at all n locations
tgtgtgtaagcatctccgtcatggatttatatatncatgtgtgtctatttatcttcatgcacagttaatgtatcttcatataagtttaattttcctatattgtgcagttactatgtcctcactgtgttatattattcactgagcgcattgctaggtgttgttatgcattgtcgggatgcgatgttgtgttatcttttcaattgaagatacttattatttttttgtgaagagatgtttagttattttcttgttaaaggtgtttgacataatgtctcaattaaaggttgatctttgacagattattgaaggcaactgggtcaacacaaacaaaatattgtagtgtggattccatgaaattaaatg

SEQ ID NO: 76832 - DNA, 279 bp, Glycine max
agctatgtgggtgtttatcccaccatcttttcatagtagagtatcgataatgtgtctaccatcacgattatcgtctccctttccatcattgggggtaccacctgggccgccagatccctccaccttttgggcgtgttctttgaaagatccgtccccctttttgcacatgttctgtagttgcatcctatccaaaaccatatcaaaattgtactgatactgcctaacaaaggcaaccattaggtccttccaagaatggactcaggaaggttccaagttagt

SEQ ID NO: 76833 - DNA, 299 bp, Glycine max
  unsure (1)..(299): unsure at all n locations
agctagtaggattatggngtacccatcacatgtggtactatgtggcggtcgggcgatggtgcacaacaagttttccacatccacaaatcgcgcataaacccaccatcccctgttgcccacctccaactgagctcacgtactcccacgtagcccatatcctcgtttctctcaacaccgggtgcccatcaatcctccaaagcttccccaacatgcaagtacctcaacatttaaacaacacaaaccatcacagccaaaaaaccaggcaatggcagaaaactttgccaaaacaccaacaaaac

SEQ ID NO: 76834 - DNA, 381 bp, Glycine max
accagaatccagcccaaggttttgggccagccatccattgggccaaaccaccccaattgattaatatggatgggaggcttccaaatctcaccaaaggtaaatcatcactttccaaatgagccttccaaactatcatgacatgtaaagaaaaaataaaggatttcaaagtcacaaaaatgtcaaagaacttttattttcaaaacaattacccatttcttgaacatatcctataattcaaagaaaaacatgcaaagtcgtacgtgcacacgaaattgacccaaaatattaaactgtaaatccgacgaaactaacaacattattaaattaacacaactaacaaattaacaaaaccaacaaaacaagcaaaaccaaagaacactt

SEQ ID NO: 76835 - DNA, 358 bp, Glycine max
  unsure (1)..(358): unsure at all n locations
agcttctaaggaagctacctagtctataaatagaagcatgtgtaacagttgtgggaactntgatgaatgagagtctggtgagacacaactcaaagttcaacttctctccctttttcttccttcaatttcgtgctcccccctctctctttctctccctctntcttttcctccattgaagcatccttccaagcttcttatccaaggctcatcttggtggtgaagctctnttttccatggcttattccttaatggatggcgcctcgtctcacctcttctcctttgtcttccgttgcatctccatggtgaaaatcaccattgaaggacctcattgaagctcaaagatccaacctcatagaag

SEQ ID NO: 76836 - DNA, 362 bp, Glycine max
  unsure (1)..(362): unsure at all n locations
tgttctcagtatgaaaaataatagttgaatgctcacaatagaatattcagaatcaccagcaacaaaatactcaaaatgctcacaatgctcaaaatgcacaaaatgatcaggatgcacactttgtctaactaatctatgaaaggttctatctattttaggatcaaagggttgtaaatcacctggattgcccctagtcatgcactatatgtagcaaataatgtgtttctcaacaagcacctcacgagggggttaaactacaactatactcaaacgatatccaaatgagctgaaattttgtggggaacaccctanaatcatgaaaagatagtgcanaaattttcagacaaaaatacaaagtcaaa

SEQ ID NO: 76837 - DNA, 365 bp, Glycine max
  unsure (1)..(365): unsure at all n locations
agctngaaggtctgaaagcaactctngaagatctactttcagatagtacttccgttgggtctgttggtgactgttttattccagtatcagtgaattcatcatgttctgattcagctgctcatttatcatcacctgaaaatgggttgccattctcagctatggcatcaaagtttgctgatacagctgttaattctgcttctgagaagaaagaatatccaattgatccatcactgcctgatataaagaacagcatttatgcgacagatgagtttcgcatgttttcatttaaggtgcgaccttgttcccgggcatactctcatgattggactgagtgtccttttgttcatcctggagagaatgctcgt

SEQ ID NO: 76838 - DNA, 443 bp, Glycine max
  unsure (1)..(443): unsure at all n locations
gacctatgaaactaagcttcttataagctggaaccatttatcataaacacaagttgagttntattaataaaaattagagtttatctcttttatcttagtgagagtgattctcctaagttcttgagtgattcaagaacaccctggctatatcaaaggtctttcacatcctttgtatgttgccctcgtcggaaagagtgattttttccttccaccatttcatcttcaaccttgttgcttcaaaccacaatttccagaaaatccaattctgcccagaattatctcgtgaccataactttcgttttactcgttcaaattaagagactctcgagccaaaattaaaactgaaaacgagaccgttcacctcgttttggaatcacctcatttggagccctatagctcgagttataatcatttctatatttctgttcatccaccacttaacc

SEQ ID NO: 76839 - DNA, 418 bp, Glycine max
  unsure (1)..(418): unsure at all n locations
agctngtaaactaaaatagatcttagatagaagtgtgatattgtaatttcctgaatggaaaccctcttaagaggagaaatctatctttatgcaatccaaacacagaaaccctttgttgttgaaagtccagcaagtggctagcaaaggttgtaactagtggtgttgttggtctaacaatggcaaggtgtgaagtctaatgggtttgttggtatgttgttgaaatccagtggttggctagtccatcaatgaaatctcatcttgaagggtgtgaaggactggacttagcccaagttggggtaaccccgtataaaatcattgngtatcatcttccttttctatccctttgcattgttttatactgaaaaatgttactatttttactctactaagatggaactccttgaaaaacacattaaac

SEQ ID NO: 76840 - DNA, 434 bp, Glycine max
tactcagcttgaggattatggggtacccatcaatgtggtactaggtggcggtctggcgatggtgcacaacaagttttccacatccacaaatcgcacataaacccaccatcccctggtgcccacctccaactgagctcacgtactcccacgtagcccatatactcgttgctctcaacaccgggtccccatcaatcctcccaagcttccccaacatccatgtaattcaacatccaaatcatcacaaactaacaaaccaagcaaaacagggcaaaggcagaaaactctgcccaaaactcagaccaaaattacagctttttctcacttaaagaccccagtaacatttccatcattccaattcgctaaccgttggagcaactcgaaaattttactggaagtctatagtacataaacctacattgtgaccgttgggatct

SEQ ID NO: 76841 - DNA, 440 bp, Glycine max
  unsure (1)..(440): unsure at all n locations
agcttncatcanataggcacaccatccaccatcttaactccaaccactccaactagtacaactccagaaaattacgaaaatcaattataataaaaaaaaatacattaaccatttataattaagaaaattaaataaaatatgtaccccaagaaaattctacttctacttctacttcatatgaaaactatcataaaaatgaggatatgtgcaagtaatactcaattggtgtggccaaagatcatagatctcgaacaatagaagaggagtactatatgaataactcattgtataattaattgatttaaaaagatacagctatagtgtcatcgggttagtgataagaaatttaaataatttatacaagatcatatattcaaatctcattntcatcattgggactacaaaagaaactcacataagtcgtcttttgataaaagctg

SEQ ID NO: 76842 - DNA, 432 bp, Glycine max
tccttgagaagattcctaaagaagcagagcttagctacacacactccttataatagctaagctcacccccatgccaaaatacatgaaaatataaaaaaaaagtccctattacaaagactactcaaaatgccctgaaatacaaggctaaaaccctatactactagaatggccaaaatacaaggcccaaaagaaggaaaaaccatttctaacatttacaaagaagaatggatccaaccttgacccatgggctcaaaaatctaccctaaggttcatgagaaccctagggccttctttagtagctctaatccaagcctcttggagtcttctatccaatacccttggggggtaggattgcatcactaccttaaaggattgaaaggttgtttccaaggattcatctgtggcctcaacatagggcatagaagacgggaa

SEQ ID NO: 76843 - DNA, 279 bp, Glycine max
agctgtatttagaagcaagcatgttctctcattccaaggtgctcagagaggctgtctcagaacatttgtcatgaatgaagaacctaaaagattccgtcaagcccatttgtatgataaataatgtttgcttctaagtactcgtttatgccaatgaacaagacctctaggccttaaaaagaagaattatcagaggctataaacagagcatgcagcattagaatgaagttgatcagagtctacattagaatgatgaagaacctgactctgatgtctgaactt

SEQ ID NO: 76844 - DNA, 383 bp, Glycine max
atgaagaaactcaacccctccaaaaaacagggatcttaagtcaaaatatcaataaaactaaaaaattattcgaagaaaaagggaaatactaaaaaatatacaagaagaaagagcatgacgctacctgctttaaacaattcaaaacatctgcacaaatagatttatgcatacactgaatctgcaataaagttccacactgtggggcaatcaaaggtgatctgtgaaaatttaaaaatagagaacaaattgtagacttacaggaaacacattaacattctgattattcaaacttgaaaggatacatgaacatatcatatggcaacaatttaaaacaaaaatcaattaccataataacatgttccaaactgctcaatgtaaaattt

SEQ ID NO: 76845 - DNA, 371 bp, Glycine max
agcttgtctcagtgtttatgcgagacagagaccaacatgttagccatcgtcagcaagtaccaagaagaattaaatctagccacggcccacaagtacaaagtggtgaacgagtatgcccgagtgtatgcggaaaaggaggctataggaagggtgatcgactcgttacatcaagaggaaacaatgtggatggaccgcattgctcttactttgaacgggagtaaagaacttccccaattgctagccacggctaaagcaatggcggacacctactccgcccccaagcttctcagctcgtgctagggactcttccaattcagcacttgtacaacctagagcgcccgcgcccatccagagggaggccccccaagctc

SEQ ID NO: 76846 - DNA, 422 bp, Glycine max
  unsure (1)..(422): unsure at all n locations
nntttcaatcgtctgtaaggtgatgaggttntaganaatgctgatgcctagtgtacactgtttttctaccatgtttcagttgtatatagcttgtgtcttcttcacagatggggcatgcatgatgacccttaacattgtaaccactgagattcccatatgctggaaagtcattaatggtacaaaaaagcattgcacgcatttcaaaagtctccttgcgaaacccatcaaacactaaaaaccccttgtcccataactttctcaggtcttcaatcaacgaacttagataaacatcaatgtcatttcctggctgtcttgggcccgatatcatcatacacaacatcttgtatttttgcttcatgcacaaccaaggaagcaaattgtaaattactagtagaactggccaaaaactgtgttgagtgctt

SEQ ID NO: 76847 - DNA, 381 bp, Glycine max
  unsure (1)..(381): unsure at all n locations
agctntctgaagaaaacttccttgagaagcttctntgagaaaacttccttgagaagctagatcttagctacacacacccatctaaaaactaagctcacctccatgataagcttccttaagaagctagagcttagctacacacacccatctaaaaactaagctcacctccttgacaaaatacatgaaaatacaaaaaaaaaagtccctactacaaagactacccaaaaagccctcaaatacaaggctaaaaccctatactacaagaatagccaaaatacaaggcccaaaagaaggaaaaacctattctaatatttacatagataagcgagctcatacttagcccatgggcccgaaatctaccctaaggctcatgagaaccct

SEQ ID NO: 76848 - DNA, 418 bp, Glycine max
cagcttcaaactaaaactaactggtaaagatcgattaacgatgattaacggcaaagaacattcacaaaattgatcacggaaacgtcacgaaagcttctcaacttcgattttctacttctttcttcttctcctcactaattttaagtgaaatatgaatacccagggtgttgaaccccttcccctcagcctccttagccattttatagtcaaaataggggaggaggttaccacccagctcacctccaaccaaaagcaaccttgctcgcccaggtgagctcagctcgcttgcttcctccagaagattcttgatgggcccagggctaaggaacaccccctaaattgatcagttcacccccattttgagttttttttggcttatttccttccaaacatcgcgaaacatgatggatcgcgaggc

SEQ ID NO: 76849 - DNA, 396 bp, Glycine max
  unsure (1)..(396): unsure at all n locations
agcttctcaccatgtctaataaggctcgatttcttcgttctgccacaccattctgatccggagaaccaggcacagtgtactgggcaacaatcccatgttcttgaagaaatttcacaaatggacctggtgcttgtccatcctctgtgtatctaccatagtactctccacctctatctgatctcacgattttaatttggttttcacattgtttctcaacttcagccttaanaactttaaaggcatctaaagcttcattcttataatgaagtaaggtgagatacatatatcgtgaatcatcgtctataaagggtataaagcatttcggactattntcatccatgtctggacaacatatgtctatatgtatgatgtctaataaattagtactccctcttg

SEQ ID NO: 76850 - DNA, 375 bp, Glycine max
  unsure (1)..(375): unsure at all n locations
gtctgatgtgcnttcttgctctctcttttttaaacaatattccccaatttcaccaagatttctgacttgtcttcaaaatattggtttgaaacttcccaatgttggttttaagaaagatggaatttgcttttcttcggttatggatattccaactctctctttctagcaatattcttcgaattcaccaacatccctgagtggtctttcaaactattgtctttttcagtggaactgagttctatgttttttattgggaatgaaattttcttgtaataagctgagagtttagtaagcttcagcttgaggggggagtgttaagaatctgaaagatattctaaatgatattgtaataaatgtagcttgtaggcatataat

SEQ ID NO: 76851 - DNA, 443 bp, Glycine max
  unsure (1)..(443): unsure at all n locations
gacctatgaaactcagcttctttatgaatntcgagcgctcgatatattacgagacactatttgacatacgagtaaaaagttatggccacttgaatntgctcagagctactgttttcaattttgtgattctcaatatattacgggactcaatcggacatccgagtaaaaggttattgtcgttagaatatgctcagagcttccgttttcaatttcgagtgtctcgatatattacgggattcattcggacatccaagtaaaaagttattgtcgttcgaattttctcagaatttatattttcaattttgagtgtctcaatatattacaggactccatcgaacatccgagtaaaaagttattatcgtttgaatttgctatgagcatccattttcaattacgagcgtctcgatatactacgggacgcaatcggacgtccgagtaaaaag

SEQ ID NO: 76852 - DNA, 358 bp, Glycine max
  unsure (1)..(358): unsure at all n locations
agctntcatcaccattcatctctttcctttttaaaaaataaaaatcaaaatattaagagagtgaatgacacctcagtttaagataataaagaaaatntctgaactcagagaaatattttatttatcttatataacanattacagtaaagaaaagatcgataaactattaggtagaggttttttttctcttcaagaaagaaaaagtccaacccctttctcaatttataaagaaatattaggtataaaatgtttaagtcggttctgtatttagattaatgctgatgtccttatctcttattactttctattcatatgaaactttttcaattatattatagactattttacgaaagtcaat

SEQ ID NO: 76853 - DNA, 406 bp, Glycine max
agcttgtaggattatggtgtacccatcacatgtggtactaagtggcggtcgaacgatggtgcacaacaagttttccacattcacaaagcgcgcataaacccaccattccctgttgcccacctccaactgagctcacgtactcccacgtagcccataacctcgtttctctcaacaccgggtccccatcaatcctcccaagctttcccaacatcaaagttaatcaacattcaaacagcacaaattaccacagccaagaaaacagggcaaaggcagaaaactctgcccaaaacaccaaccaaaatcacagcttttctcacttaaagaccccagtaacaattccttcgatccaattcgttaaccgatggatcgactcccaaattttactggaagtctatagtacataaac

SEQ ID NO: 76854 - DNA, 420 bp, Glycine max
  unsure (1)..(420): unsure at all n locations
gcattaagaggcttctctagaagcttcctcgtggcttctttgagaagctntctcaagaggcttctttgagaagctagatccttatctatccacacccctctattaactaaattaacttccttaaaaataattacagatgaaaataacgcaacaaataatcaaacatcaaacataattactaataatatatagatatatatatcagggtgttacaccgtgtggtgttagctggaatatggatgccaaagtggcaagcgcatccgccatctgattttcctctcggggaacatgatggaaggagatctcatcaaaggaaccagccaactccttgatataggcttggtagggtatcaacttggggtctctagtttcccattcccctctcagttggtggatcaccagtgctaagtccccgtacac

SEQ ID NO: 76855 - DNA, 385 bp, Glycine max
  unsure (1)..(385): unsure at all n locations
agcttcntgcaaattggagagttctagagagagaaatgtccaagttccagagagtttgagagaatttgttgtgtgaagatctacagagaccagagctagaagaggaagctgtcttgagagcttgagatgagtttgtgagtgattgtgaggtcctagaggtggaggagacatccccactacttgtatttctataatctttcaattctcttctctttgttggaaaggaagcttcccagttatggaaagctaaaacctctgttggatcttccttgtaagttctggatgtaaatatctttttatctatttaatgatgttntgtgtgttcactgtgctatcagaacttcattctaccatgctntctgccttgatcatgtagatgcatgtg

SEQ ID NO: 76856 - DNA, 423 bp, Glycine max
  unsure (1)..(423): unsure at all n locations
cttctgaatttgctgaatgagagagagaatagttgggcttttataaaaaanaatgattntctttttcccttttttcttttttaaaaggcacttgccacatgtcctcttttaagtggaacaaaagggtccacctttttctcttgatgtgacttcatactcagccacaaggagaggaaaaattgtgaccttttaaatgctaaaatcctacctcggtttgcgtaccgcctctctggttctagttcctcgcgtttctctgcacccgtcggggcccgttttcgaaagtaggcaatatatatatcaaaacgctcagaatgagaccctgagcgtggttggttttgttaaaatttatgttgcacgcaaaatgataatttttagactaattaattgaggattaatctataactgtccagttatggattactc

SEQ ID NO: 76857 - DNA, 231 bp, Glycine max
  unsure (1)..(231): unsure at all n locations
tacccgtcatatgtggtactangtggctatcgggcgatggtgcaagtcgactcttcacatccacaaatcacacataaatccaccatcccaagttgcccacctttaactgagctcacgtagtcccacgtagcccttatcctgattcctctcaacaccgggtccccatcaatcccttcaagcttncataacatccaagcaattcaacatccaaacatcatgaattatcagaac

SEQ ID NO: 76858 - DNA, 421 bp, Glycine max
  unsure (1)..(421): unsure at all n locations
tctacattcaatntcgaggtctcgatatgttacgggacgcaatgagacatcccagtaaaaagttattgtcgtttgaattggctgagatcttcaacaattaatttccagcgtctcgatatgttacggtactcaatcagacatccgagtaaaaagttattgtcgtttgaattaactcaaagcttcaacattcaatttcgagcgtctcgatatattacgagcctcaatcagacatccgagtaaaaagttattgtcgtttgaactagctcagagattcaacattgaatttcgagcctctcgatatattacgagactcaatcagacatcccagtnaaaagttattgtcgtttgaattggctgagatcttcaacaattaatttccagcgtctcgatatgttacgggactcaatcagacatccgagta

SEQ ID NO: 76859 - DNA, 333 bp, Glycine max
  unsure (1)..(333): unsure at all n locations
agcttcatggtgaatcaaaggtgattcaaaggtgttntgatgataacaatgacgatgacaaaggtgatgacaaaggtaatgacaaaaagctcataggtcaatcaaagaacaactcaagtgaatcaaagatcaatcaaagaacaactcaagtgaatcaagaacaattcaagagttcaagataagaatcaagaagaattcangactcaagaagaaatttagagtcaagaatcaagattcaagttcaagatctcaggaatcaagatcaagattcaagactcangattcangaatcaagagaagacttattcaagataagtaagaaaaaaatttctc

SEQ ID NO: 76860 - DNA, 447 bp, Glycine max
  unsure (1)..(447): unsure at all n locations
ctatccgtgaccttcaaactcagctattcttctattcgaaagaancaacgaaattgngtataagaagagagactattgaagtttttgtcatgattgacaaaaggaggaaccaacagcccttgctattcagcacanatctggttagtcttctcgtcccaattccaataatcgtataccgctacattgttcccactataacaaaaatcattacacaagggagacatgttggaagttacatgattaaccaccaggacagtccaagcataccacgaattatcatttcaagtccaacgataataatcaatcttcagcaaataatgccaaagaaaccctatcagcacatgtttagccccttctgaatggattgactgaattacaattacaacaaattttgtctattatgcagggcaatggagcatctcaatcatctgttcccaaagaaaataa

SEQ ID NO: 76861 - DNA, 254 bp, Glycine max
agcttaaggcaagtggaatgaagttcttcctgaataggtctaagtttctccaaaagattttcttctttcttgactaattctgcctcaaatctatctattttcttagttggcccttgtattagcataagattctatttggcattctaaggaccttctcgagcttgaattaagttatttcaatcctgctctataagaaacttaatttatctcaccaatatcagcaatgtgtggactatataattgatgatctttga

SEQ ID NO: 76862 - DNA, 247 bp, Glycine max
  unsure (1)..(247): unsure at all n locations
tcgaaagacacattaacaacatcagaataaaggaattaagaatgtccagataagacaatttaaatcttcccttttatgcgctttggcacgagtttcttactagacatatgggcgttactttcttgtgattgtttttagttcttgagaatcgagntaatgttccattgctttcgtattatgagtcaagtgcaaaaacacttgtcttcttatggctagatgcagaagcagtatcgtccagtgactgatt

SEQ ID NO: 76863 - DNA, 382 bp, Glycine max
  unsure (1)..(382): unsure at all n locations
agcttaggtttaatggattaatctaaccatacatgttttatactaccgtttagtatgatttttaaactttacctcttcttccttaaaaaaaaaattgtctgtgttgtacttaattatgtacaaaacgagtatcatcttcttgatcctggacgatcaatttaaaaatggaactattatactagtgttaaacacttgctcgcatgtctagcataagctcgatattctttatcaattaatgtcttagtaacctatagccccaattcagtcttgaacttttaaattatgtaccaaagaacctcanatactttggttcagcttcattccaagttccaacaagaacaaaagattttgactggttattacacgtggactaagtttatgc

SEQ ID NO: 76864 - DNA, 338 bp, Glycine max
tttttacaaaatacataatcttattgcaaaaaaattaaattattaagtttctacaaattaaaattactattgggtccaaacgttattagtgtcacatatgtgtgtgtttactattataggagtgaaatggtaaccctggtgagtaagccacactactgaaatcaatgtattttctctttttttcttataactacctacctttcttaagaaaatatcttatggaaataacacctatttttttatacggatgactatttgttactaaatatctgcctgtgcaaaagtttgtcttgcgtgagcaagtgtctctatgggtgggtaaaaggaccaaagtccat

SEQ ID NO: 76865 - DNA, 315 bp, Glycine max
  unsure (1)..(315): unsure at all n locations
agctntatgngcattaaagtttctgaactttgactcanatgcagctggtgaacataggaagctccaactccatgaattggaggaactgagatttcaagcttatgagaattccaagctttataagtaaagagtaaaaatttatcatgatcaaaagctttcaaaaaagaaatttcagcctgtcataccctaattttgtccagggactatcgntcgttgatcttttgatccttgctagttgacttacggtcttgaatgccagttacagtgcaaagcaaggaaccattcagtgtttcgatcaggaatgcgaaaaatacc

SEQ ID NO: 76866 - DNA, 160 bp, Glycine max
tctagctcactccttccggatgtgtgtaacggccaacttgaactttttttttgcaaagttcgcctttccttactcgctgttgagagcttggacttctttgtgctcttccggtgcttcaaaactctcttcgctgacgacttttaacttggcgagccaatct

SEQ ID NO: 76867 - DNA, 338 bp, Glycine max
  unsure (1)..(338): unsure at all n locations
agctntgagccaattcaaacaacaataactttttactcgaatgtctgattgagtcccgtaacatatcgagacgctcgaaattgaatgttgaacttttgagctaattcaaacgacaataacatttttctcggatgtctggttgagtcccgtagcatatcgagacgctcgaaattgaatgttgaacctcttagctaattcaaacgagcaataactttttcacggatgtctgatagagtcccgtaacatatcgagacgctcgaaattgaatgttgaagctctgagccaattcaaacgacaataacttttttctcggatgtctgatagagtcccgtaatata

SEQ ID NO: 76868 - DNA, 418 bp, Glycine max
  unsure (1)..(418): unsure at all n locations
ntcaagaccatgagggtcagatgaattctcaaaataaccaatttggcaatgctgccttttctccgggatcaccttttccctttccaatgcctacagcagcagggcccactgcacctgctagttctgcaactactcaatctcgagcaccttcagcatctagtgcatctcaatccactatcacagtagatttacctgcagcaaaagtagaagctgctccaactactaatgttaaagatgaagtcgaactaaagaatgaacccaaaaaaattggtaacttaaacttagaatctctgcttagcaatcctatttctttcttgttagatgagacttactacttgtgaaatttattaatgatgacgtaatgtgttctgttcgttaggagatgtatgtggtttcaggttaattaaatcaatattat

SEQ ID NO: 76869 - DNA, 277 bp, Glycine max
agcttaaaggaagggataaattttgaaactttgatgggtgccagatgtaaattaacatgttcccaatatgaagctcgcacctcatgacagaccattaatctgtatttgtggtactgggacaggtttccacacccaaaagtcgttaccagaatgatcaattaacctttcaatccccagggaaagattttccggttcttgctacccaattccagtccacggtaaggggtaaacacctaatgtttggaggaaaccgaaattgcccccacttttttttttt

SEQ ID NO: 76870 - DNA, 423 bp, Glycine max
ctgtgtagctgggaaaccaagttctatctgaactgttgatgttctggctgctgcatgtagatagtctcttcaagatgaccatataaaatggcattgttgacatctagctggaacaaatcccatttattagtgaaagcaagagtgataatcagccacatcgttacaggatttatcacaggagaaaaggtttcatgaaagtcacaaccagcaatctgatgaaatcctctagccactaacttagtcttgaacctgttaacaatttgatcagcattctccttaattctgaaaacccacttgcaacccacagcttgtctgcctttgggaagaggaacatgatcccatggattattgttcagaagagcctcatactcttgtttcatagcgtcaaactattgtgggtcacctagagcctgttggacagtt

SEQ ID NO: 76871 - DNA, 255 bp, Glycine max
agcttctggtgggacatcttgacttgctttccaatctgacattcaccacagattctgccttcttctattttcagattgggaatgcctctgacagcacctttgtcaatgattttcttcatgcctcttaagtgcagatgtccaaatctttgatgccatattttgacttcatcttctttggagaatagacatgtggaggagtgactggtttcttgaggggtccataggaaacagttgtcctttgatctgctgccctta

SEQ ID NO: 76872 - DNA, 425 bp, Glycine max
  unsure (1)..(425): unsure at all n locations
ntgaaattcttcaatcgccataaaaaaaaagctgtgttgcacatactttgcttgatgcaaaaggaagtagtttgttgttgtagtagtcaacacgccaacaatgaagaatggttttttagcatgaaaaagtatgtgcatttaatgctccaacgatcacattatttatatgcaagcttaagagaagaaatatgtctatttagagacaacatatacttgattgagggagacttataaataccagaagctttgaagacataaagtatgtattgaagtgctctttattcaagttctttctgtaaaaaagctttttgtgcaagttcttgtaaagtttagaaaaattctcaaaacactttcattatcttgagagataagactaagtgttgaaagtatctatttgtctataagacgattgaatgttagtcatt

SEQ ID NO: 76873 - DNA, 382 bp, Glycine max
agcttctccgcccattttcttataaatatggggagaagtgaagagaaatttcgttcagccctcctggtaattcagaatcacttaaaattagtgagaaaaattggttccgtgaagaaaatccaagccgaggcgcttccgtaacgtttccgcgggtgatttcgcgaaggttttcgaccattcttcgacgttcttcattcgttcttcggtcttcaaccggtaagttccctagatcgaacttttcaattcattctatgcacccttagtggttctcattgtttttacgtgctctcatttacatttttcgtttactttccgcacccccttttgacgtgcttaagccatttatttaagtcatttctcgcttaaatctaaaaataaaata

SEQ ID NO: 76874 - DNA, 428 bp, Glycine max
  unsure (1)..(428): unsure at all n locations
nttgcaagctggaatcattatcctatctccgacagccaatgagtgagtcccgtccaggtagtcccaaagaaaaccggcctcaccgtgataaaaaatgagaaggaggagttgattcctactcgggtgcagaacagttggagagtctgcatcgactataggaggctgaaccaggttaccaaaaaggaccattttcccctgccattcattgaccagatgcttgaacgcctggtaggtaaatctcactactgtttccttgatggtttttctggttatatgcaaatcactattgttcctgaggatcgggaaaagaccacattcacctgcccctttggcacttttgcctataggagtatgtctttcggcctgtgcaatgcccctggtaccttccagcggtgcatgattagtatttttattgattttttagaaaa

SEQ ID NO: 76875 - DNA, 303 bp, Glycine max
  unsure (1)..(303): unsure at all n locations
agcttctaaagttttctggttttccaaaccttgaaaacagaagcgtgctatatcttttattctcttctcccttggtcaaatagaattcgccaaggactaaccgcctgaattctttntgagtctctcttctcccttttccaaaagaataaaagactaacttcctgaattcttttgtgtctcccttctcccttttcaaagaattcaaaatgacacaggctgagaattcttttgattcttccctttcccttaaacanaagatttcaaaggactaaccgccagagatatctattggttccccttcac

SEQ ID NO: 76876 - DNA, 441 bp, Glycine max
  unsure (1)..(441): unsure at all n locations
gcacttccatactaagctgggatttctttagtagggaattatccttcctaagatggagcccaacctagtcacccttattaagaactagctcttttcttcctctattgcctttagttgaatacacctttgtttggntctctatttggttcttaaccctctcattcaacttctttaaaaactctgacctagattccccttctttatgtataaaagaagtgtctagtgggaggggaatgaggtctaatggtgttaggggattgaacccatagataacctcaaaaggggactgcttggtggttctatgaaccccccagttgtaggaaaattctacatgaggaagatactcatcccaagacttatggttgcctttcagaagaacccttaaaagggtggataaagacctattcactacctctgtttgcccatcagtttgtggatgac

SEQ ID NO: 76877 - DNA, 252 bp, Glycine max
  unsure (1)..(252): unsure at all n locations
agctcgagatgagtttgtgagtgcttgtgatatcctagaggtgatggagacatcctcaccacttgtttttttttgcaatctttcatcttgttcttctctttngttgaaagaaggcttcttggtatggaaagctaaatcctctgttggatcttccctgtaagtacctgatgtaaatatacttctatctatttaatgatgtnttgggtgtctctgtgctatctgattttcatttcagtatgcctttaccttgat

SEQ ID NO: 76878 - DNA, 423 bp, Glycine max
tccttaagaagattctaaagaagctagagattagctacacatacctctctaatagctaagctcacctccttgagatgaaaagctagagcttagctacacaccccctataatagctaagctcacccccatgacaaaaaaaaaaaaaacatgaaaatacaaaaaaagtccttactacaaagactactcaaaatgccccgaaatacaaggctaaaaccctatactactagaatggccaaaatacaaggcccaaacgaaggaaaaacctattctaatatttacaaatataagcgggctcatacttagcccatgggctcaaaatataccctaaggctcatgagaaccctagggccttcccttggatctctagcccaatctacttggagtcttctacccaatgcccttgcgagataggattgcatcacc

SEQ ID NO: 76879 - DNA, 437 bp, Glycine max
  unsure (1)..(437): unsure at all n locations
agcttcattcctttntcactcatatgtccaagtctttgatgccacatggttgaattattgacaacctcagtaactgctaccatatcctcatctgcaatcatgtaaagagatcctcgcttctttccacgagccacaatgagattgccttttgttactttccaagctccatctccaaaagtggtgtgatgtccctcatcatccaactgccctatagatattaaatttctctttaaggtaggaatatgtctgacattgtgcaatgtccatagggatccactagaggtcttgatgttgatatcacctcttccgacaatgtcaagagattttccatctgcaaggtaaacttttccaaatcttccagaaacatagttagacaataaatctttagagggagtagtgtggaacgatgcacctgagtccatgatccatgaatcaac

SEQ ID NO: 76880 - DNA, 420 bp, Glycine max
  unsure (1)..(420): unsure at all n locations
ntgcactngataatggagcacatgaacagcgctaggcaatgacatgcatggtgctccgacaaaggtggagtatggaggattgccttgagggtccgcacttaggcaatcatgaaactcagctccaaactcgaaagtggaggacacatgaacaaccctaagcaataacattcatgtggctccggaataggatgagaatggaggattgccttgagggtcctctcttaggcaatcatgaaactcaactccaaactcgaaagtggagaacacatgaacagccctaagcaataacattcatgtggctccggaacaggacgagaatggaggattgccttgagggtcctctcttangcaatcatggaacacaactccaaacacgaaactggaggacacatgaatgacaacgcaattcattcatgtgac

SEQ ID NO: 76881 - DNA, 438 bp, Glycine max
  unsure (1)..(438): unsure at all n locations
agctntctgtaggtttcttactgctgggataaccatgtccatgattatgattntagtttcagtatcagacaaattaatacaagttggttgtttgtaaatgattggagacaaaatttgaagttgccaactcagtccattgtttactcagaggtgaatatgaaaagagtaagggtgttaagtgttaacccaacatgttgttacactagaaaacaaaagtaattctattctattaaagggctaatcaattttctttttcttttttcttttaaacaaacattactaccaagtacttatcacttttttagatgaggaaaatggttatgtaataatttcgtaaaatagtaatgttattcaatcacaaaatacaatagtatgataagtttgatgaaatttataaaattatttaaaaattatacattagtgtaaaattaatttaca

SEQ ID NO: 76882 - DNA, 417 bp, Glycine max
  unsure (1)..(417): unsure at all n locations
ccttgatctaactgcattaagcactgtcaggagtcacacatgacatgttcaagagtgcacaaatttagaaggaataatgaaggagtttagattcaagtttccaaccttcaagagtgaaaaataagggtttgaaactgcaagtgagaatagagcaacaaaatgaagtgaaaatcatgtttagagttgaaatggaggtcacttacctaagctcaatggaggaagggctcaagaactcttggtaaaacttggaagaagaagaaaaatatggtctcctctttcttcaaaagcttctggaaaatgggagaattgacctangctttggcttttaaaaaaacacttattgtaggtgaaatgcttggaccaatggaattgcaaggaatccttatcttcttaatataagcactttgaatgaccatt

SEQ ID NO: 76883 - DNA, 358 bp, Glycine max
cgacacctactatatgttgatttgaccaacgctgtatgggtatgctgcgacaatccttcaaaaccatatttatacatctctaaagagggtttgttggtcatggatggtcatattcgacaatcctttcgttatcagtaagccattgtgtccattttttctctttgaaaatgcgatcaatccatgttgctatggctggactcaactaacgaaatctttctaaattctgataaaaaaaatatgcttgcaaggagtgtaacctgcatgaaattagttagcaagaacaattttaagtatatatgaaacttaaattaacgtgaccatgataaattaaattttacccaatttcttcaacatttct

SEQ ID NO: 76884 - DNA, 389 bp, Glycine max
  unsure (1)..(389): unsure at all n locations
agctngtgataaaatctagagagatatcattctatactacttctaggatcggaataggttgcagcaaccccgctggagacaacacctggtacttgttatgttgataaacgtcacattggcggatgtactccattataatagctttcattctcttccaaaagaagctggaagacaaccgcttatacgtcttcgtgaatcccgaatggccacctgtaaccgtgtcgtgaaattcggccatcaaagtaggttaggcaacatcaaacagcctttgaagaataggaaaccatcgtgcagagtatagtgtggcagagaatcagaatcagattgcaattgggagctcaacttgaccaactcaaggtcattttgcacttcgttcttgatagcaggga

SEQ ID NO: 76885 - DNA, 408 bp, Glycine max
  unsure (1)..(408): unsure at all n locations
taaagataaactaagaataataattgatatcttatttcatattctgataatatattctatcaaatacaaactgattaactaggctaagaatactgatagaatatcttataatatattctatcacaccctcgtagtcgaagtgagaggtcgatgaacacgaacactgagactgtctcgaactggacccangaccaccgccactaattttttttttcataattcttgtgatatccagacggcttcccacgtcgttgttagtatgaatgagagaaatttgagtcataaatggattgtgaggtagccaacattgtcaatcctgcttcctcaagtgtgagcatcgaccgagcctgataaaatgaaggttgatgatcactctgctgaattaatgtccctacacctcgatatgca

SEQ ID NO: 76886 - DNA, 394 bp, Glycine max
  unsure (1)..(394): unsure at all n locations
agcttctagagaaagctacatgaagctgcctcggtaaaaacgcttcctggccttcattaaccgttggatcgtctcgaaatgtggtctgcaacttcacaaaacacgcttccatgatctgaccgttgggatctttgagaagatgtctggagtgtgctagaagcctcttaatgaagcttctggaggaagcctcttaatgaagcttctagagaaaactacatgaagctgcctcggtagaaacgctgcccagccttcgttaagtgttggatcctctcgaaatttggttntcaacttcacaagacactttaccatgatttaaccgttgggatctttgagaaaatatctggagtgtgctagaagcttccgttcccgagagcatctcttatntaagcatttc

SEQ ID NO: 76887 - DNA, 434 bp, Glycine max
actaagcttgagaatatggggtacccatcactgtggtactaggtggcggtctggcgatggtgcacaacaagctttccacatccacaatgcgcgcataaacccaccatccccttgttgccacctccatctgagctcacgtactcccacgtagcccatatcctcgtttctctcaacaccgggtccccatcaatcctctcaagctttcacaacatccaagcaaaacaacattcaaacagcacaagctatcacagccaagcaaaacagagcaaaggcagaaaactctgctcaacacatcaaccaaaatcacagcttttctcacttaaagaccccagtaacaattccttcgatccaattcgttaaccgttggatcgactccaaaattttactggaagtctatagtgtataagcctacattgtgaccgttgggatctact

SEQ ID NO: 76888 - DNA, 433 bp, Glycine max
  unsure (1)..(433): unsure at all n locations
agctntgaatgaggctgaagaagttgctactcatgttcaacaagatccggtggagattaatttatctcagcctgatttgtcacaagatagtgacatggagttgatggtaaatatttgtcacaacaaagtatttttatcttaacctaatttgttgcagcactccatttttatatattacaattattcatgtttggcatttgcatgtaggtccctgcaactattgttccaccaatagcaaggaataagctaaccataaaaagagccaaacaaaggaaggttgctgataaagatgatgcagtataaagaaaactaaagacccattttttgttgcattttaaagggtgctgatgaagaaaactgaagacccattttttgttgcattttgatattaggatgtgtagttgtatattttgaaagggtcactggtatgtga

SEQ ID NO: 76889 - DNA, 435 bp, Glycine max
  unsure (1)..(435): unsure at all n locations
actcagcttgaggattatggngtacccatccatgtggtactacgtggcggtctggcgatggtgcacaacaagttttccacatccacaatgcgcgcataaacccaacatccccggttgcccacctccaactgagctcacgtactcccacgtagcccatatactcgtttctctcaacaccgggtccccatcaatcctcccaagcttccacaacatccaagcaaaacaacattcaaacagcacaagctatcgcagccaagcaaaacagagcaaaggcagaaaactctgctcaacacatcaaccaaaatcacagcttttctcacttaaagaccacaagaacaattccttcgatccaattcgttaaccgttggatcgactccaaaattttactggaagtctatagtacataagcctacattatgaccgttgggatctact

SEQ ID NO: 76890 - DNA, 405 bp, Glycine max
  unsure (1)..(405): unsure at all n locations
agcttcaaattcttcttcaattccacacaaaatttcaagctaaagctatttttggagcctaggaacctacctctacatcaagggaccttcaattccaggtaagggtcgacttctcctcacttgaaatctgagggtgttgggttcttgggagctataatgggtagttctactaggttatcgcatttaggtagttgtttgtgaaggaaattgttgtaaatcatgctaaaacttgatatgtttaatttaagcaaaattgcccatgttgattgatggttaaataatgatgttttgatgtatatgtatgcttaanatgcagttagtaaactggtagagaagattggtagagttagcttagagttaaatgtgaggaaggtagtgttgtatgtggaaaagtgtgagattttg

SEQ ID NO: 76891 - DNA, 421 bp, Glycine max
cctcgcccagagaaggatccacggaggaaatgcttaccacctctaaagactggaaagcggtttctaatgactcctctgcggcctccacataaggcataaaggatgggcagttcaccaagatgtcttcctcgcctgatacgatgaccagatgcccttccactacgaatttcaaattttggtggagtgtagagggaacaactcccactgagtggatccacggacgccccaacagacaactgtaggggagttaatgtccattatttggaaagtaacttggcatgtgtgagggcctatctgtactgggaggtcgatctctcccctaacctctcggcgggtgtcgtcgaaggcacaaaccaccattgaactcggctttaggtgggaggcattgaatggtaatttctccaaagtgctcttaggcatc

SEQ ID NO: 76892 - DNA, 236 bp, Glycine max
  unsure (1)..(236): unsure at all n locations
agcttgtgtattagagttggatttttactgtgttctttcgtcaacnccgcgaactagagncactttcgctcattatgatccatactccctcatgcatgctttgaatggagaatcaatgcttgtggcggacgatgttttgtgggtgaccgtggtgattggactggaatgacataggtgggtggtatcttattgtctataacaatggaggaaccatcggaaatcatcttcgatgaaac

SEQ ID NO: 76893 - DNA, 324 bp, Glycine max
  unsure (1)..(324): unsure at all n locations
tatctcagcgntcatccttatcataccttagatgacataattataacattcattatcttcctattatctatactttaaatactactcatccctatcttttaaacacgtatatacttaatttcgctatcattaatccttatcctttatatattaaatcagtttaatctattcgctctctaacatatgggctctgcaattaattctaagatacaaaacaaaagatccctagtggattctgtgcactctcgacattctcgagttctcttactaccttgtgataaatcttgggacaccttgtcaaatgaacttaacaagtgcctcatg

SEQ ID NO: 76894 - DNA, 274 bp, Glycine max
aaattctttgtcaagagtcttatttttagacggggtataagatcaaacatttctaacttgtgtttggatcaaacacactttttttcctttctttgtcaccaaaaatgcacacgttttaacttcttaattattatgataaaacttttatgtttgattatcaaccacgtggatttatttctctttattactcccacattggacattatatcgttttttaaagggaacactttaatttgcataatttataaattttttattaaatcaaaaagctcat

SEQ ID NO: 76895 - DNA, 426 bp, Glycine max
ctcagctatattcgccttcatatagatctatgcgtgtagtaagagtggcttaattccttgaggtcagaaaaatgccatccaatagctgccttgtgtttcttcaaaacctccattaattgagattcctcctcctttctcaaagagtgctgatgatcactggacttgcttcattctctccctagaacacatatttcaaatgctctagcagaatttttaactccactttgtccttttctgcagggatgtccttcttcaattcttcaaacacaactttttcagaagaactttcttctaaaccttctaattcttccaggcagttctgcaattctttttcttcctcttttgtcagacaatccatagtattggtcaatgctttttctaggggggattgcaataccatagctctagccaccatgtccacctcat

SEQ ID NO: 76896 - DNA, 329 bp, Glycine max
agcttcatgcttgtgagaagtaattgattttagcattccatgatattcagttcatatggttgatgtccttgatgaatcaaacaccattttcttttgattggccactgtctttgtcacttgaggacaagtgaactgttctttctttgcttgaggacaagcaaaactgtaaatttgggggagtttgttagtcgctttatacgactaaattttgtatagaaatcattttccaaagctcgtatagttccccaatttatggttattttggagtaaaatttgtaaaataaaatctcgtttatggttaatgttgtctctagaacatcttcattgga

SEQ ID NO: 76897 - DNA, 419 bp, Glycine max
tctccagctaaagaaatgagaacagactcaacctgattgcatctgcaagcacacccgccagcctaatagtattgcatatgtaggtggccaagtgagcataagggtcttgattgggtagaccatgaaacagattattttgaatcagctatatcaaagaggaaggataagtaattgtctgagcttgaactgttggttgtgcaatactggtgaaaaattgtggcacatttgaacttgaataatccttcagggttactcttcttggctcttcatccatgattgggtcttcaacaggttctacatgagaatgccctgtaataggaaaaatagtgatgccttgaaagatcgaggttcttcttttggagctgctgctgcttctaaatactgcaaaaaaattctgattctctttgaattacgccttc

SEQ ID NO: 76898 - DNA, 469 bp, Glycine max
  unsure (1)..(469): unsure at all n locations
cgacccggattcttagagtcacctgccgcatgcaagcttagactaagtttagcttaccatcttcttactgatggccaaactgaatggaccattcagtcattggaggaccttttgagggcgtgtgtcttagagcagaaaggaagctgggagagttttcttccattgatagagttcacttataacaacagttttcactctaccattggcatggctccctatgaagctttgtatggtagaaggtgtaggacacccttatgttggttagagctcggagaaggcctcaccttatgaccgaaagtggtacaacaaaccaccgagaaagttaagttaatccaggaaaggtgaggactgctcagagtangcaaaaaatttatcatgataagaggaggaaagatctggaattcgaggttagtgatcatgtattcttgagagtcactccatggactggggttggtcaagcattgaaatc

SEQ ID NO: 76899 - DNA, 428 bp, Glycine max
  unsure (1)..(428): unsure at all n locations
ctcaatcttgcacaagtgcgagtatacgtatgcaatagtagcacttgactcaaaagtcaggatattgaacccaaaggaatagttgtattcccaattattaaacttattaaacaaacagtagaatggattacaaacaggatttaaatatttttgtggttttggtttttataataaagcaaataaacaaatataaagaggagttttagttatgataaaaatggcatgaagttatgactcactagtaccaattttcctccaaccctagtctaattgaaattcttccctagttaattattggtttccaaaatcaactaaaacttatgatcaaggtcagaagatgctctttgccttaaatcaataccccaatgaccatggatctatcattntaagtcaaaggataagattaattctacggatgattaattaaa

SEQ ID NO: 76900 - DNA, 428 bp, Glycine max
  unsure (1)..(428): unsure at all n locations
agctnntgtgtganaggatgtgactcttcatatttgatattgaatttcaacgttcaaaggcactggtaaccgattaccaaaacattgtaatcgattacaactttttgaaattagttggaacgttgtaaattcaatttgaaaactttttcaaatccatttttctactggtaatcgattacaacaatctggtaatcgattaccagagagtaaaaactctttggtagacatgttatgagaaaaaccatgtgctattcaatttttgagaaaaaccttttcatacttatcttgattaagccttctcttgattcttgaatcttgagtcttgaatcttgatcttgattcttgagatcttgaaccttgaatcttgattcttgactctaaactttcttcttgagtcttgaattcttcttgattcttaccttgaactc

SEQ ID NO: 76901 - DNA, 332 bp, Glycine max
  unsure (1)..(332): unsure at all n locations
atcctangncangggtntggaaaaaanccaatgtttggctcanaaggcctacaaatgaccggacatnatgtatgtccggatatcctttgtgccaaaggcttaaaaagaacggaatgcccnaatcaattccatgacctgcctattataagcattagaaattcatgaaaaattaatcatancaaacatccatgcggacactcaaatataaggctttttggccacacaaacactaacgcttatggttcgtttccacattcaggccaaaccagtgtttcaacgattgctctttttatcaagttatacaaacatccgagtccatttttgcatttggg

SEQ ID NO: 76902 - DNA, 426 bp, Glycine max
  unsure (1)..(426): unsure at all n locations
agcttgtntatttaatcaatattntgtcatgcctggaaagtaactaattacattgaaattgtttaaaacctttatatcctagagcaccctagccattttatttctcaactctcaaacctgtcatactttaagttctcagggattggatctatagatcaaaaaagaaattaaaaaataaaataaaaaaataaaatgtgtatattattaatgcagacnaattaatttcatgaaaattccccatgtcaactaattaacatgcaacaatgtaagtatagctgacaataattggcaacttcggtattttatacaataatatcctcgaggaaaagctatanattagtcaaagtattggaaaagcggcaaaagcaacagaggatgaaactcctnctgttctcaacaacccgctttagtaagtaacacagagca

SEQ ID NO: 76903 - DNA, 422 bp, Glycine max
  unsure (1)..(422): unsure at all n locations
tagaagacanaacacaattcatctgtatggaacacagganatacagaanatataccaattgataaagaacacagggcaaaaagaaagtgtagttacacttcacatataatgcaatttaaaattaaaacatacttattttctttcacctaccaacaaattttcttacaatttaaattcacccacagtaagtattcagtaaaatgattacaactcanatcagaaaatctacctaaatttaaattgccacacccttcttccttaccttagaatgaaaatcttcattccagcaaattttctttctattgtcaacagagttgtacaagagggagtttgacttgtccccttgaagaatgcctggtaagacactctgtagtacatacaatataaaatttgaaatcaaaacaacaatttacatttagaat

SEQ ID NO: 76904 - DNA, 390 bp, Glycine max
  unsure (1)..(390): unsure at all n locations
ctcgtcccgagaccctctaagtcacctgcggcatgcaagctntgcggatntggacttcgccagcggaaggatctaagcggttctgaaaagaggcaaatttaatcatcccacttggacgaatgagaaaactgnggcaaatgaagagggtgagaataacagatttcattcctataattaagtaaaattttaattacaaggtgtaaagtttctttatatttctcattattttaattagttttctaatttctgttaacaggttcttttttctattcctatagggtttccttaattctagaccaaataaaaatcatatcctatcatatcctacattattatacaaaaatcataatctatcatatcctaatacgtccttatacaaaaatcatatcc

SEQ ID NO: 76905 - DNA, 435 bp, Glycine max
  unsure (1)..(435): unsure at all n locations
aacaatgtcattactcagccaataacaaaccttctccttacccaccgcctagttatccacaaaggccatccctaaaatcaaccacaaagcctacctaccgcacttccaatgacaaacaccacctttagcataaaccaaaacaccaaccaagaaatgaattttgcagtgaaaaagcctgtaaaattcacccccaattccagtgtcctatgctaacttgctcccatatctacttgataattcaatggtagccataaccccagccaaggttcatcaacctccatttctcccagaatacgattcgaatgcaacgtgtgcttgtcacagagaagccccggngctttccattgagcattgtaaggctctgaagcgtaaggtgcaaggtctaattgatgctggctgaaatttgaggagaatcacgcgtaaatcttgacattg

SEQ ID NO: 76906 - DNA, 387 bp, Glycine max
  unsure (1)..(387): unsure at all n locations
tttatatgggtggggttaacttaacctctattttcaaggagtttcacaaaaaacctctcagggaagtttctatgaaaacttctcaaggaagtatttaatctataaataaaaacatggtgtacacttgttggaactttgatgaatgaaagtcttatgaaatacaaattcaagntccacttctctccctcttttattccttcaatttcgttctacccctttctctctttcttttcctccattaaagcatcctcttcaagcttcttatccaaggcaattcttggtggtgaagctccttcttccttggctgattccctagtggatggtgccacccctctcctcttctcctttgccttccgctgtatctccatggtgtaaaatcaccattga

SEQ ID NO: 76907 - DNA, 281 bp, Glycine max
agcttctagcacaatggacttaccttgaattaattcctttgatagcccctttgagcctatgttcccctttctttgttatgaagctcattaccagccttaagtgaaaaaccatcatatcaccttacccttaaggaattttggagctatggaattgttttgtgaataagtgtgggggggggggggggtctattaccaaagatagaagacactttggtgtacatgagatcatagaaaaaggcgctcttaggaccttgagaagaacatttcatacttatttgatt

SEQ ID NO: 76908 - DNA, 389 bp, Glycine max
  unsure (1)..(389): unsure at all n locations
gagccaatgcaatccttgngttcggactctcagccacttatgatagccgccgatgatcccattactgcttcccctaagctctctgtcctttcttcacgccgcatcccatgccttgcgaactccttggagtaccctcgcgttgtggtcactaaaaccccgtgcgatgaaaggcgtgatgctttcgtctaatggcgctcctctcatggggtagccaagctgtcttatggtgagaacgggattataattaatacaaccccttgttcccatcaagggaacatttggacatccttcgcatgaagatagaatcctgattcttccttccttctagcgagggaaccaattaacagacacccccccatgctagccaagagttggtcccaattcgcctt

SEQ ID NO: 76909 - DNA, 362 bp, Glycine max
  unsure (1)..(362): unsure at all n locations
agcttgtggatctagccgtgatcgatccttttcttgcttatcaccacaacaaggaaagcccggtcattgttgttttagcatatgcgtatgatacattcaacttaagatgcgagacaagcaatgcaagaattctctgctgtatgcctgctctttatgtatggttggtatcccacgtctttaatcatggaagtagatctatctgtcccctacaaggtcattgtatgtacttagganaggatgagacatatcgtgaagaactattggcatgcataatgggagcgtccattagttggttcccactgtggaaagagggaggggcaagagtattatgctcatgtgaaagattcaaaatgtcctttgat

SEQ ID NO: 76910 - DNA, 285 bp, Glycine max
  unsure (1)..(285): unsure at all n locations
gctcaaaagcctccnnttcanccccttnttttttctnnntggctccngnggccccggctatcaaacacgcgatcgtccctataatttccatagagacgcgtatcatgataattacaaattcatgaaaaatcattcatagcaaacatccatgcggacactcaaatataaaagtttattggtctccctctcattaaggactctggttcgctttccaatcatgccaaaccagagtttcaacgactgctctttttatcaagttatacaaacatccgagtccatttttgc

SEQ ID NO: 76911 - DNA, 318 bp, Glycine max
  unsure (1)..(318): unsure at all n locations
gtgcaagctttacacaaggatcagtccattcgttggaatgacgattgtcaagagggcgttggaaagatccagcaatgtctcatgaaccccccggtgctgatgcccccagtggctggaagacctctcttcctctatatgatagtgttggatgagtcaatggggtgcatgttgaggcaacacgatgattctagcaagagggaacgggtcgtctattacctaagtaagagattcatagcctgcgaaatgaattactcccttttagagagaacatgctacgccttggtatggngcgtccatcgtctgtgacagtacatgctc

SEQ ID NO: 76912 - DNA, 424 bp, Glycine max
  unsure (1)..(424): unsure at all n locations
tgtaggattatggngtaccatcacatgtggtactatgtggcggtcgggcgatggtgcacaacaagctntcctcatccacaatgcgcgcataaacccaccatcccctgttgcccacctccaactgagctcacgtactcccacgtagcccatatcctcgtttctctcaacaccgggtccccatcaatcctctcaagcttccacaacatccaagcaaaacaacattcaaacagcacaagctatcacagccaagcaaaacagagcaaaggcagaaaactctgctcaacacatcaaccaaaatcacagcttttctcacttaaagaccacagtaacaattcctttgatccaattcgttaaccgttggatcgactccaaaattttactggaagtctatagtgcataagcctacattttgaccgttgggatc

SEQ ID NO: 76913 - DNA, 423 bp, Glycine max
  unsure (1)..(423): unsure at all n locations
tacctccanatatgagatgcgaggagagatgcattatcggtatactttataagagctcaatttaaatgtgagttagcagaacaagcagctggagtattgtcatcatgtgaagagttctcccctctagcttcaacattgttctggttgctcacccctcctatggaacaaccctccgtatgatttgacaaagaagtacccacaactctattattttcactagtttcaagggattccatcaatcgggatacactatcaattccagaatttatctctctcctccttgtttctgaaccaagttttgacatggaagaactacgagagaacagcctctccttccatccccttgtgccttttgagattgactctctgtatcttagtcacaaaataggttaatatcagataagttgattagacgaatacagt

SEQ ID NO: 76914 - DNA, 422 bp, Glycine max
  unsure (1)..(422): unsure at all n locations
catgcaagctttgtgtgagagggtgtgactcttctctttcgaatttgaatttttacgttcaaaggcactggtaatcgattaccaaagagtaaaaactgtttggtaaacatgttttgagaaaaaccatgtgctattcaatttttgagaaaaaccttttcatacttatcttgattaagccttctcttgattcttgaatcttgatcttgattcttgagatcttgaaccttgaatcttgattcttgactctaaactttattcttgagtcttgaattcttcttgattcttatcttgaactcttgaattgttcttgatcactcgagttgttctttgattgatctttgagctnntttcatcacctttgtcatcatcttttgttatcatcggtgtatcatcaaacacctttgaataccttgattctcatg

SEQ ID NO: 76915 - DNA, 426 bp, Glycine max
  unsure (1)..(426): unsure at all n locations
tgttgtgtttagctagacaacttntattcccattattttcttttttccttcattctttttcattccttgcttgctctcttttccttttcctctctttttccttttttagttatttatcatttggtcatttcctctctcttctttctttttttatctctttttctctctgaaaaagtcgtgcggacaagggcacacactacctactcacgtctaaccacaaggtgaacgagaaacgcacaaaaatggtaggtcgtaatatggtgacgaaataaatgagagccataacgccgaaaatttctaacagaaacgagcaataatgatagtaatgttagtaaccatatgaacaaaatagaaaatagtaatgtcaacaacaacatgggcaataacagaaaacgttaatagcaaactaataaaaaaaacagatat

SEQ ID NO: 76916 - DNA, 336 bp, Glycine max
agcttagaaagaaagcttcaatggaggacatgaatgagagagaagggggggggggggacgatattgaaggagataatgagggtgagaagttgaactttgaagtgtgtctcacaagtttcacattcatcacacacacccctctaatagctaagctcacctccctacttgcttccttgagagacttctttgagaagcttccttgagaagatagaatttagctactcacacccctctactaactaagctcaccttcttgagatgagaacttgagcttacctacacacacccctctaatacctaagttcaccccaggctaaaatacatgaaaatacaaaa

SEQ ID NO: 76917 - DNA, 395 bp, Glycine max
  unsure (1)..(395): unsure at all n locations
gatgttgtaactttcacttattttctttcgtttgaaatgancnnancctaagaatagagctcgagtattaaaaagtcacaattttcaaccgactaaattatattttttggtatcataaggatcaagttatcaaactcgcgatcttacgtagaatcgtggaggttccgtaaactcgactcgtagaatcgaatcgtaaacttgaatcgtaaactcgtaagaatttactcaaataaaaaaatatattaatattcctttatataaaatcataagtaagcattttaaccataaaataaatgaaaataataaacgtaatggactcttatgtgggggagtgttaaaattatntgtgcattaactaaatgaattttaggattttagagcaactgatttagcac

SEQ ID NO: 76918 - DNA, 273 bp, Glycine max
  unsure (1)..(273): unsure at all n locations
agcttttgactctaggcaatntctntaaatctagttacttaaaaagttgtgacttttgaaaaaaatcttcagaaacaagtcacttgaagaattgtgacttttggaaatgtatntttcgaaatcagtcactggtaatcgattaccattaaggtgtaatcgattacacatcaacatatgtgactcttcatttgaatttgaaaataaaactttaaaaactctggtatcgatacagtattgtgtatgatacccagtttaaatgattgaaagttaaac

SEQ ID NO: 76919 - DNA, 423 bp, Glycine max
tataagaacaaaattccttaatcatttccaaatatgcatgtgaattatgacgcatcaacaagaatcaagccaaggctattgtgcaagcaatcaatggggcaaaacacaccaaatgattataatgatggatggctcaaattctcacaaaggtaaaatcatcactttcaaattgagctttcaaaactatcatgacatgtagagaagaatcaagaatttcaagtcacaaaatgtcaagaacttttattttcaaaacaattacccatttcttgaacatatcctataattcaaagaaaaacatgcaaagtcgtacgtgcacacaaaattgacccaaaatattaaactgaaaatccgacgaaactaacaacattaacaaattaacacaactaacaaattaacaaaaccaacaaaactagcaaaaccaaa

SEQ ID NO: 76920 - DNA, 370 bp, Glycine max
atctcgaccgggatgcttcagtcacctgcggcatgcaagcttatcaacatcaaacttggagaaagagttcttgtggtcaagacatgagaagcaatcaagtataatgttacttccttcactaaagcggtgatctatctccacacatattttatcaatagcaacataaaaaatctttgcacggtaatgatgaagattagtgatagtcctcccttctgctcttgaacgaccccgaaccggtatttcgtcatccatatttggtaccggaatacttttagctacacaaaatccttggacatcggcaaaaaaattattccagccactctctctcattgtgcccaaccgagctttgacaacatcaacttaattcatg

SEQ ID NO: 76921 - DNA, 426 bp, Glycine max
  unsure (1)..(426): unsure at all n locations
atgagagnctatgtcataaattagttatgaaacatacttaaatgagatgaaaaaagcgtntatctttgataactttactaataaagctaaaaccatntacaggagtcacaagctatttttataagcctaagggtctatttggatgaatntctctagaagtacttttggaaaaagaaaataagaagaagaaaaaagaaatgaacttctccataagctaatttgtaaatgtcctttcattttttttagaaaagctatatgagaaagcttttataaatcagctaataggaaactcattttagcttacagagaaactcattttctttttttcttcttattttctcttaaaagtgcttttagaaaatgcatccaagcatgccctaaataagctccattaatctacatacctggcataggctcactagtagg

SEQ ID NO: 76922 - DNA, 368 bp, Glycine max
agctggtggtttctttctcattctctcaacctaaggtgaaagaaagaagagagtgagagaagagaaggtgctcctcatctcaccgctctttagttcttcttccttcaaaactcgaatgacccatttctatgtttttcgtactcttgcaattcctgaggtaaagatacaagctttgctcttctgctcactggatcgggttccaggaattcaagggtaggttcaaaaggggttgtgttgatctgcaccaagatgcttaatttacgttgaaaaatccattcatttgcgagacttagcttcgaagatgaacctattagttgaaagctcaatgaatacttcaagggtctctagagttcaagctccactagtaa

SEQ ID NO: 76923 - DNA, 419 bp, Glycine max
  unsure (1)..(419): unsure at all n locations
taagcttgcacatgggaggganatctggcgaaatcctagatgaatcttctataaaacctacatgtncaagaaagaacgtatggtccgttcaaaagcaagatagggaaagaagtataacatcgatcttggccttatcgacctcaatacctctactagagaccaaacgccctaagactataccttcatggaccataaaatgacatttttcaaagttaagaacaaggttagtctcagtgcatcggtcaagaactctagagaggctatccaaacatgcatcaaaggaggaaccataaacagtgaaatcatccataaacacctttgtgcaactctctaataaatcagaaaatatattcaccatgcacctttggaagatgtcaggagcattgcataggctaaagggcatcctagtgtaggaaaat

SEQ ID NO: 76924 - DNA, 401 bp, Glycine max
  unsure (1)..(401): unsure at all n locations
agcttatagctggtaccctcactaccctcttcaacctcattttcctacagagtcacgcganaatatatatagatatcatgagaacaaaattgctaaaataaatcacctttatttatttttaaaaagaacatgttacaagcaaaatcaaaattaattacatgtgatctttaaaaattcgatatttagatttttacgactctaaatttagttatggaaaagagaccgaaatcgagatacctctttttggaacaatgacagcggctagaggagctaccgcactttccataacctaaattctcagagctgcactttctcttgaaagacgaagacgaaagcggaggcttccccgcggacgacacgtgagagaggctcttgatctgatagtgggaggtcatggtcgt

SEQ ID NO: 76925 - DNA, 429 bp, Glycine max
  unsure (1)..(429): unsure at all n locations
tgccctgcggtgcgaccgcaagtcccgagcgtaaacgacgacgctttggtcttgatctcgctgcggngcaggaatctggtgcggctgaagctgcgcgggtgcagggaagtcacggagctcggaatggccggcgtcgcgaaaaactgcacgaatctgaagaagctctcgtgcggctcgtgcgcgttcggcgcanagggcgtttacgctttcgttaacaactccaccgttctcgaagaggtttccatcaagaggcttcgaggggttgaaaacggtaacggtgacggcgcggaatcggtgcctctttccgttacttcctcttcttcgttgaaatcgatttgcctcaaggagctcgttaacggccacagnttcgcgccgttaataatttactcgaagaagcttgaaacgctcaaggtgattccgcgttcatgg

SEQ ID NO: 76926 - DNA, 408 bp, Glycine max
  unsure (1)..(408): unsure at all n locations
agctntatcaatgtttcttggttcaacctaataaacataagtcatgttgttacacagaaatctaagtctagaatgtgtagaaattaccctttcagatttctccaattatgttgtctaaggagagatatttctgagttctccactctctaggaaattctttaagcattgttgtagagatctctttattttgttgaaaatcttcaaccttgatgtcatcttcaagagcaaaattcttttcctaaaaaccagcatcttcttctaaagaattttcttgaacaatagttagtttcatcacaaaccacatgcaacaatagttagtgtcatgaggcatgtaaagcatgaaggacatgcacaaagtgtgactatatgatgtggcaacggggtgtagcaagcanatgctcaccctct

SEQ ID NO: 76927 - DNA, 439 bp, Glycine max
acggacctatgatactaagcttaagaaaaaaaatggcctcagcaacttcttatttccagaaagatattcagtcaataggccctccatctttaatggagagggttaccactactggaaaacccgaattgcaatttttattgaggcaatagacttaaatatttgggaagccataaaaataaggccttatatacccaccacaatataaaagaatacaatggatggaagcacatcaagtgaaagcataacaatagaaaaatctaaagatagatggtctgaagaggataaaagacaagtacaatacaatttaaaagccaaaaatataattacatttgtcctgggaatggatgaatatttcagggtttcaaattgtaagagtgctaaagaaatgtgggacactctacaattaacacatgaaggaacaacagatgttaaaagatct

SEQ ID NO: 76928 - DNA, 365 bp, Glycine max
  unsure (1)..(365): unsure at all n locations
cactgacaaaaacttatcttctccttcttggacaaagtatggcaggctgggggcaagtaaattttcttcccatcaaaccttggatgcaactgtggtcatatacccatatcagctagatcttgacgggtattcaagccatccttcgtcttgccttgaatgttaaggagcgtcccaatcacactgtcacaaacatttttctccacatgcataacatcaatacaatgcctaacaccaagatcacaccagtacggaagataaaagaaaacgaacctcttcttccatatgcaactctgacttttatccttcttttgggtcttcccaaatacattattcangtgtcgaacaccctaatatacctgctcacc

SEQ ID NO: 76929 - DNA, 452 bp, Glycine max
  unsure (1)..(452): unsure at all n locations
cggacctataaaactaagctggtaaaagcaganagaaagaataccaaagtatacgagatgtagaatgatttcaaacaaaacaataaatgaattcaaagtctcggattcgaacacttaccggttgaagactgaagaaagaacgaagaacggatgaagaccggtgaagaaccgcggaaaatctttgtggatttgctcacggaaacatctcggatgcgttacggaagcacctcggcttgaattttcttcatggaaacacattttttcacccaaaacacctgaaatgcatagcataagggttagggatcaatttacacagccccattcccatatttatagccaaaatggggtggcgcttgccgcttagaggcttcttgaggaagatttctgaacgcaccccaattactaagttcaccccccttttcgtactttatggaaaagttacagaaacgttt

SEQ ID NO: 76930 - DNA, 271 bp, Glycine max
gtgatggcgaggaacagatagatgtacaggttggtactgccatgaccactccagctcgatatgaatagtcggatgtgctacaaaactaccaagacatctatgcttggtcataccaacatattctctggttgaacccctgcattttacaacattggttaccgttgaataccgggtgttctcgggtaaacaaaagctactaacgatgaatcccgatagttcctacatataaacaagagtgaaaattaattctaacttgctttttggcagagct

SEQ ID NO: 76931 - DNA, 424 bp, Glycine max
  unsure (1)..(424): unsure at all n locations
gtagtcaaacagaataatcgaacatgtcaaagaattgtgcgttgaaatagcataacanaactatctgtgattggtttaaagatacaatctttgcagatgagaatgcttcagaaacattaagaaaactagcagatgggcctaaaagaaatgttataacctggcaaggatacgacataaacatgtattcattttacacaaaagcacaagatgacaaaagtataatgcagaacagcggggtcaccctaagggggtgaatctcaacactttgcaagtgtcaatgacgccaatcccagtgtagcttccatcccttactttgggttcattgatgaaatttgggagcttaattatgtgaaatttacagtatgtgttttcaaatgtaaatgggttgacagcaacaccggtgtgcgcaccgatgatataagat

SEQ ID NO: 76932 - DNA, 334 bp, Glycine max
  unsure (1)..(334): unsure at all n locations
agcttgagccaactcaaacgacaataactttntactcggatgtctgattgagtcccgtaacatatcgagacgctcgaaattgaatgttgaacctctgagcaaattcaaacgacaataactttttactcggatgtctgattgagtcccgtaacatatcgagacgctcgaaattgaatgttgaacctttgagccaactcaaacgacagataacttttactcggatgtctgattgagtccccgaacatatcgagacgctcgaaaatgaatgttgaagctctgagccaatacaaacgacaatacactttttctcggatgtctgattgactccggaaca

SEQ ID NO: 76933 - DNA, 369 bp, Glycine max
  unsure (1)..(369): unsure at all n locations
gagaaaaagttattgtcgtttgagttggctcagagcttcaacattcaatttcgagcgtctcgatatgttaagggactcaatcagacatccgagtaaaaagttatggtcctttgtattggctcagagcttcaacattcaatttcnagcgtctcgatatgttacgggactcaatcagacatccgagaaaaaagttatcgtcgtttgagttggctcagagcttcaacattcaatttcgagcgtctcgatatgttacgggactcaatcagacatccgagtaaaaagttatggtcctttgtattggctcagagcttcaacattcaatttcgagcgtctcgatatgttacgggactcaatcagacatccgagaaa

SEQ ID NO: 76934 - DNA, 433 bp, Glycine max
  unsure (1)..(433): unsure at all n locations
agctntgagccaaaatcctgactctccatataccttgacccagggtgagaatgtcaatccttaccctcggaagcaaagaaaaaaggagagaaggaaaatttccaatcaaaggaaaaaaggagaggaaaggaaattcccaatcaaagagtgggagaaagcaaaaagaaaagaaagaaaattcccaatcaaagaatgggagaaagaaaaagagaaggagaagaaggaaggaaagctcctgatcaaggatcgaaagaaaacagaagaaatgtgcagaggggatctctggaccagacaatatctaaacaaatacagaattgtcaccaaatgaacaaaagaaagaaaaggaaaccataacctanaagtggtcttctccctttgattaccaaccaaaatcctgtgcgtcggtgacttgttcgcctcgcgtcaaacaaaa

SEQ ID NO: 76935 - DNA, 425 bp, Glycine max
  unsure (1)..(425): unsure at all n locations
ngagctgcagatgtccagtgtaggttagacatccgcgcacttagccgacgtttcaaattcaaatcagtttttttttaacatagacttggattagcatgaggacaagtccacttagcgaggtctgcagatcagaaaagctgcaactctcgctgggatctgggctggcttagctaaaatgatgcatcttaagtacagaggagcatgcgcttagctgataaggactcacttagcactcacattgccgcaaggaattcagcttagctgccatgattggcgcttagcttcatgaacctcagttatagccgtaaagaattgagcttggcggcaatgcctaatgcttagccaaggataagttgtcgcttagcgatccggctgaagcttagctgaattcagatcgaatagaagttggcttatctcatccttgg

SEQ ID NO: 76936 - DNA, 364 bp, Glycine max
tgacaacagccccttcacaaagatgagtgtttattaagaacagggatgggtccttgttgtttactactaagaggcagaataatctttataagattaagatgggaaaactgacaaatcaaaatgtacattccttaatcttggtcaaataaattcactggacagaacataaaaaactcggacatgcaagcttcagattaatctcacagctgaaaaatcattacctcatgagaggtcttccaaatttttctttccagtctaattgtctttgtgaatcttgtgagaaaagtaaacaggtacaaacctatttccaaagtaaaatattgttttcactcacatacctcttgagtgttaacctattacatat

SEQ ID NO: 76937 - DNA, 422 bp, Glycine max
  unsure (1)..(422): unsure at all n locations
agcatctntattgcacgtgttaatttcttttaccatcattgtatgtantttgtagtattgatatattcttagggtttcacacaaatacttaaccttgtcattgaccatggtaggaaattgacgcaccaactgctcgggaacaagtgtcacctaactttaaaaggagattggccattctggtttcacccaccatcacaactgacattcatgaagttatgaagaccccttgaaagcgtttagttggtgcttccaacgttactctagaagttgaaaaccaacacacccagcaaaaaagaactctgacaagttctgaagtcctgcaatcgaaatcaaagcaaaccttatccncagcaacatcaacacgagaacattagaacattcccctcgtatataactaaattcagcctctaaattattatagt

SEQ ID NO: 76938 - DNA, 424 bp, Glycine max
  unsure (1)..(424): unsure at all n locations
tcagcttgagatattcnacacataactnttactcggatgtttttgtgtcccgaaatatatcgagacgctcgaaattgaataccgaagcgctaagcaaattcaaacgacaaaaactatttactcggatgtctgattgaggcccgtaatatatcgaaaagctcgaatgtgaatgtagaagctctgagcaaattcaaacaaccaataacttttactcggatgtctgattgagtcccgtaatatatcgagatgctcgaaatggaataccgaagctcggagcaaattcaaacaataataactttttactcggatgtccgattgagtcccgtaatatatcggaacgctcgaaattgaatgttgaagctctgagcaaattcaaacgacaataactttntactcggatgtctgattgagtcccgtaatatat

SEQ ID NO: 76939 - DNA, 242 bp, Glycine max
cctgcgaaggttatcatttggaaagttagtttacaagaccaatgactatcattacaaacaagggccaaacaacacttctcatggcccgagtgtcaacatgcactttataaaataataatattggggtcgggctatttaatgacacatacgtatttgccacataaaaattttgtgtgaagcattttacgacacctatccatgtccatatttttggacaaaccttttcatgctacatcctatat

SEQ ID NO: 76940 - DNA, 421 bp, Glycine max
  unsure (1)..(421): unsure at all n locations
tgtgcattcaataccttatgacgatgtgccatatgttctttanactggactgatccacttgttgcctaagtttcatggtcttgcaggtgaagaccctcataaatatctgaaagaatttcatattgtctgctctaccatgaaacctccagatgtccaagaagatcacatctttctgaaggcctttcctcattctttagagggagtggcaaaggactggctatattaccttgctccaaggtccatcacgagctgggatgacctcaagagagtgttcttagaaaaaaatttccctacttctaggaccacgaccatcagaaaggatatttcaggcattagacaactcagtggagagagcctatatgaatattgggagagatttaaaaaactatgccctagttgccctcaccaccagatttctgag

SEQ ID NO: 76941 - DNA, 418 bp, Glycine max
  unsure (1)..(418): unsure at all n locations
agcttataaagaatgatgatgacatggnntttactccaatcacattatgnnngaaaagngattgaagaagtctaattattttgatgtgaaacttgtttctacaccttatgactcatccattaagttaaagaaaattttgaataaaggaatttcttctcgtaaatattctcaaattattgattccttgttgcatttgacaaatttctctaggcctcacattgcatattcaattggtaaattaggaaggtatactaataatcctgaccattgtcattggactgcattaaaaatggtttttagatacttaaaaggaatcattaattatgacattcattatacatgttttcttactggaattatgtctttactttagctacagtatcatgaaaatctgttgaacaaactattatttcacatt

SEQ ID NO: 76942 - DNA, 420 bp, Glycine max
tcacctttggcacacaagtgttacagtcaaaccccatccctatgcatccaaggaaagatagaatgaattcaagtataatgaataaaagcttttaaatgtcaattgccaaaacaaaaattttgggtttatagagtattacatcacagcatgactacaatgcagtggttatcatatcagtgtcacctacacattcgaacgagaaatctgcccttccatcagtaatgcacttaataacctggaaattttcaacacataaatggttgttatgacttccaaactttgtgtgcatacttatagtttttgtgtgcatacttatagtttttgtgccgaagtaaaattatattcaaccaaaatcaaattcacaataaataaatttgtatggatcaaacatatgtaatatttgatctagcgggatacttt

SEQ ID NO: 76943 - DNA, 270 bp, Glycine max
  unsure (1)..(270): unsure at all n locations
agctttaactgaatttgcaaccgtccaattgatttcataatggtgtaattgattacaagatattggtaatcgattaccagtgtatctgaacgttgaaattcaaaatcaattgtgaagagtcatatcctttcatanaaagctttgtgtaatccgatacatggttttggtaatcgataacaagtgacaagttttgactgaaaagtcaagagatgtaactcttccaatggtttccttacccagacttgaagagtctataaaagcaagaccttg

SEQ ID NO: 76944 - DNA, 433 bp, Glycine max
  unsure (1)..(433): unsure at all n locations
tactaagctcaacaattacttttctaaacaagttntagaataccaattactaagtcctttntaactagacaattgaggtggtgcatgtttacatgtgcatccctacgaagcaatagtcaaaaatcatcaatcttattttccaagcaactaagctcatgaaatgatgcatgttcaatattaagcatgtagatattacctcattttctacctatgtgaacaacctcactagtttttgcttcacaaatgagacaacaattcttgttgaatgcaattttgaagcctttgtcacatagttgacttatgctcaaaagattgtgcttaagttcatcaacatataaaacattttttttatttgagtattgtgctaatttccaatatttccttctcccacaattctttccttattgttgtctccaaaagtgacatatccacc

SEQ ID NO: 76945 - DNA, 398 bp, Glycine max
  unsure (1)..(398): unsure at all n locations
agctngatttatgaatagattntagccttagtttcacttcggctattaggcaattcaatcaagaaagaaaaatcccaaagaaaaacgtccgattgatttttttttcttattttactaaaagatattttttgattattatattattattttgcctcttttggttttaaaagtggttatggcatgaccgaacggtcggatntcattntaacagaaattaaaagatgttacaatacgaatgatcggtggaaatttattttacttttttattaggtgagaaaatgacttaaataaatgactaaagtacgtcaaaaggcggtacggatagtaaatgaaataaaaataaaagcccgccaaccaaatgaggaccacctaggttcatagaatgaattgaaaaagtt

SEQ ID NO: 76946 - DNA, 428 bp, Glycine max
  unsure (1)..(428): unsure at all n locations
tatgcgcatatnntcctacgaacgtcacttgcacaagacattctattaactaagaanaatgcacccatatacaatcaaggtagcttccttacctagattatttacatgtacttccaaagtgtatttgttatttacatcatacacgccatcttgtcaaaatttacacacatgcatactcaaagcatttcggggtaccaaaaattgcacatgcgctcatcttggtatttctaatatctatacatatacaaacttcatgatgaatcttgactatctacacaataaagtgctacatttcatgccttttttcaagtttttgctacctaaagccgcatgcaacttcaagcatattttcctttgctgactaaaattgtattcaaattatatattttttttggaatatgttttctttcacataacattcaacatat

SEQ ID NO: 76947 - DNA, 431 bp, Glycine max
  unsure (1)..(431): unsure at all n locations
agctngtcactccacccatatctggccttcacattaaccacacttaacaccttcgacaacaatgttagtgtttagctctactgagctttaaaagattggctaagattttgttaaaacataagcacttagacaatgaaggaaagctggagttgctgcacatgatgtccaacgttatgtcaaggaataagatcgggctgcacaatgtacaaggcaagataaaatggcaaatgaagaattgaagttgcaggatccacgatgtcggatacaatgtcctgacatcctgcccgagaatactggagttgctgtacaatgcaagataaaagtcaagtgcagaagtgaagctgcaggatccacgatgtcggacacgatgtcctgacatccggcccgaanatactggacatataaatctgttatatctttaacagattatt

SEQ ID NO: 76948 - DNA, 420 bp, Glycine max
  unsure (1)..(420): unsure at all n locations
tggtgaaaacctggaaaccattggagagttacatctcttgactttttattcanaacttgtcactagtaatcgattaccaaaaccatgtaatcgattacacaaaacattntatgaaaagatatgactcttcacaatttagtttgaatttcaacattcagatacactggtaattgattaccaatatattgtaatcaattacaccatttaaaaaacatttggaacgttgcaaattcggttaaaagcttttgaaatcaaactttaccactggtaatcgattacaggtaattggtaatcgattaccagagagtaaataatttggtaacttagaaaaatttggaaaaacttttcttgtaaaacaaaattgtgctatgttttgtttttgaaaaatctttttcaatacttcccttgtgaagtcttgac

SEQ ID NO: 76949 - DNA, 431 bp, Glycine max
  unsure (1)..(431): unsure at all n locations
actaagctatgtgctttccttgagtgcaggtgctgaatgtgatatttcttattatacatcgnctcttgaatatgcctacttgagaggtggagaaaaagcggttctttttttccttttggactgaaatgcagttgaattaggtgataaaatatcacaaatcgtcatgactatttctggaaatctatttacataaaactggagaaacctttaacacattatcggttggtgtggtatcttatcacaaccgttattatgattattgctgcaagctgtcattgatgcaaatattattcttcctcttgttcaaattcttcttcatgctgagttagatatcaagaaggaagctgccttggcgatcttcaatgtaactgatggaggatcttatcccatatcaagtatggttcaccattacattgtatctgcccttatca

SEQ ID NO: 76950 - DNA, 357 bp, Glycine max
  unsure (1)..(357): unsure at all n locations
agcttgagatgnaggaagtgtgaagggngaaactttctgcttttattgntgaccacagagtggtacctggagatatgtcgcgggggtcaagagaccttggggacgtcaggtggggtgctattgcccaaaaccaagcttgaccaatcccgacccaacccgggcatagtcggtcagtgagaacctgtgatgtacctaaacaggcgagctcctggcagtcaacagataaaaggaaaacaagaccacaaagcaaggaggcttgtggtggctggccagctgtgaattttgtgtaatatgtggattgtggcctctggtaatcgaataccaagggtgggtaatcgattaccaggcttaaaattg

SEQ ID NO: 76951 - DNA, 407 bp, Glycine max
gttacccattaattgccccaactttcgtaaactggtgacctctaagctcttgattttgacttgataaaacctctttttaagcgaaggcttttgacttgatcccatgttttactaaagtgaaataaaatctaatgcaatcaaaacttccacatctatcatgggtggaatggatgaatgcatgaagaaatgcatatgacacaaatgcaatttacgaatacgggagcccgagaaactgtctccttcttagatacaacgtctaggggtagcaaagtgccccaacgtatgtatttaaaacggtgatacggacccttcgttggtttgctaaagtgaggggatcaaagacgaaacctacgcatgatgcatatgcgaaaggcacaacacggggatgtacatagtacgacaatatt

SEQ ID NO: 76952 - DNA, 426 bp, Glycine max
  unsure (1)..(426): unsure at all n locations
agctttgatctttaaagtagaanaatgaattatctacacaactaggtagggtccaacgtataaagatatatatgaattgtgacagccaaattgcaagtgtctttcgtctgtttctaaaatgaagtgggaaaggaaaaataaaagtaaactttatccaacatttgaaactacagaggaatcccatcctatngaagaaaatcaagaaataagaggggaagatcctttgtaccaaaagtatttagagaaaattgtataattagtggaatacatataaaatgccatagaaatatgtttatgtgatagtttattatttattattttatatgcaagaatatagttttagatcaatatagntttacgctttttagttaatttaattcttgaaatttaatacccaattatttgataaatataaaaataataaaa

SEQ ID NO: 76953 - DNA, 451 bp, Glycine max
  unsure (1)..(451): unsure at all n locations
ctattacgtgacactatgaaactaagcttaacaagggtaatgtngtgttgtcagcatggttgacgtactgctccgcangagggtacacattcctataataaaagagcatagttaaagatgttttgcacacaaaaaaacactaatctactaactatctacatttcaagatacatgcaataaaatttgcattctctgcactgaccttgtttccacagctttagattcgacagctagtgcaacttgccaatcttcaaacaaatttggatattcttcaggattagccaatgattcagcagcttttggattgacctgcaacaaaatatacgtatacgtactctctttaatccataagtcacttgtcaacatgataagactacccaaacaaggcaaatgaatgagaacggatgctcctacccaaacattggattttatgataaaataaccaaatata

SEQ ID NO: 76954 - DNA, 425 bp, Glycine max
  unsure (1)..(425): unsure at all n locations
agcttaaagcatatgatgtcgcaattgccttatcaatgtccaaatgtattgtgtctacattgacatatcctcgtgagtcatgaggtatgttctgaatgattcagtttagttgaagatattaatgatgcatattgcatagtcatacttctaggtgcctagccttgtgaatgaaacaacctagccattcccataatcaatttttaatgcttaaagcattttagaatagggaaaactgtattcagctccattggactntgggtcattttaataatccatcacaaacttagagttgtctcacttgtttcttaacctttaactattaaatagatcctccttatcagcttttgtttggtcagtagcagtaaatctgtgacaaaatctgattcatccaaatgttgtaatctagaccattgattaattaacgt

SEQ ID NO: 76955 - DNA, 427 bp, Glycine max
  unsure (1)..(427): unsure at all n locations
tcatgatgatgaatcaagttaattcaaggtagtttgatgatgacttaaagcccanaagaatgatgtcaagattgagtcaacaagttcaagatcaagattaaagaanagacatcaagaagaatcaagattcaagagaagaaaccaaaaagcaacaagtcaagacttcacaagggaagtattgaaaaatatttttcaaaaaccaaacatagcacagttttgttttacaagaaaagtttttccaaatttttctaaggtaccagagtatttactctctggtaatcgattaccaattacctgtaatcgattaccagtggtaaagattgatttcaaaagcttttaactgaatttgcaacgttccaaatgttttttaaatggtgtaatcgattacaatatattggtaattgattaccagtgtatttgaacgttg

SEQ ID NO: 76956 - DNA, 425 bp, Glycine max
tgggaatcttcttaagtagaaatctcaatatgtaatctttgttatatacaagctaaatcacatttataaatcacaaatttatataaactcagacaagtaattaaaatcacatttataatgttaggaataattaattgatttaaaggtacaatctctctctcatagaccaaaatatccttagtttaacatatttcttcttaggctaaaatacaatttctatttcctattttcttaaatttgcttttattttttctatttttaaattgaaatattttgttttcactttgaaaaaactctcaattttagttattttgatcaattttaaacattgatttatgtaccctatgtaaatgttaactaacacttatttatttattattcacatgataaattaacaaacttaattgattaaaaaatacattgtc

SEQ ID NO: 76957 - DNA, 299 bp, Glycine max
gagaacgtccatccttaaccacggacgcaaagaagcaacgagagagcgaaaattgccaaaccaaggaagaaaggagaggaaaggaacaccccggaagcagagtgggagaaagcacaaagaatagacaaaaaatggccaatcagcgaacgggagacagaacaagagaaagagaagaaggaaggaaagctgctgaacaacgagaccagaaaaacacaagaagagtgcagaggggaaatcaggaccagacaacatccaaacgagaacatgattgtcaccgagtgaacaaggtaacgaaaagg

SEQ ID NO: 76958 - DNA, 426 bp, Glycine max
tgcatacggacctataaatctcagctgcgctgcgatgcccgtgctgggtgcatcctttctttagtcgctgagcagattcacgacacttattttttatcatatactcgtggattcgtgaagacaaggtctctgatcgaggacgagccaccaaaatatgcgcaggtaccactgccatcatggctgcctccactgataggatgcgtatgccgtacacatgagcatgcactctgcttatagagactcactgatcactcacctgtgctggaggaagtcaggttatctgtgcatgatggcgcttagcttcataaaccgtcaatctacctcgtaagaatctgacgtggcaggatgcctactgcttaccagcgattatcgtcctttacaagactgctgaaccttgactgaagtttacctagtagaatatggctt

SEQ ID NO: 76959 - DNA, 329 bp, Glycine max
tgtgtcgatttatgatctggagaattgcctgagcgccactgctcgggcctgagccctgctgtagcaaaaaatcagaatttgaatttcaaacttgggctcagtgcacacaatcgctgagcaaacccctttgagaaacgaaacgacactgtggctcgcttatctctgcggctctctaagcgagaggctcgcacattgtgtaacgcgagtgaaccatcgttacactcacctttgcctaaattctcagagcatatacggcatgttctctctatcccaaatctgtgcaagctgcattcttgctttctttatgcatattctacgcatcatccgca

SEQ ID NO: 76960 - DNA, 398 bp, Glycine max
caagctaggcgtgattaacatttatgcttcagcttgagaagtgttaaaaatcattcagaataaaagaggtgtagaatgtgcacagacatagcccatgtgcctgcatatacttaagctactaatataaaatgagggtagctacatgtgtagagtacccaatgacagcttacctcatatgcctctctgactatatctcactgtttctatctctacatccacaaacgtcgtatttggcaatatcacacgacattgcacattctcattctataaagaacacactgttcaatattgccggagatataaagtgggttacatggttaatggagaagaatagagcagaaagggcatgggtacgatcccctctactaacaaaacctaacattgtaacaaactaacat

SEQ ID NO: 76961 - DNA, 302 bp, Glycine max
  unsure (1)..(302): unsure at all n locations
gaccttggggacgtcaggtggggtgctattgcccaaaaccaagcttgaccaatcccgacccaacctgngcatagtcagtcagtgagaacctgtgatgtacctaaacaggcgagctcctggcagttaatagataaaaggaactaagaccacaaagcaaggaggcttgtgtggtggctgaccagctgtgaaacttaattgatatgtgggttatggcctctggtaatcgataccaagagtgggtaatcgattacaggcttataaatgaaacaggacgctaagatagtctctggtaatcgattacc

SEQ ID NO: 76962 - DNA, 420 bp, Glycine max
  unsure (1)..(420): unsure at all n locations
tagccttgttcctccaaccttacatgtttcatcaaacttgtttctaaacacccactntgctccaacaacagattttcctttggggagttctacaagctcccatacatcgttattctaaaactggtgtagctcttcttccattgctttgacccagtattaattagacatgatatcatctatgtgtttttgctcaatctcagatagtagtgttgtgttcttaagagagttccttctctggactttgtccataggatcacatatgatctaggctctagatgttgtttcctcaacagacatccaattggttctctgaccttttcaggttaatcgtccaatggtgagttagacacaagttggttctgactcaacacaacagtagacttaacaatatcctctatcttcatttatacaaaagacact

SEQ ID NO: 76963 - DNA, 355 bp, Glycine max
  unsure (1)..(355): unsure at all n locations
actctcttaaatagttgatgtgattcctccaacatgaagtatctcatatnttatcttttgtctttttatttgcttcaaataatattattcaaatttcagtcaatctattataatctaaatttaaaatttaaattttatcgcaccatatcaaattaataaacatggtaaccaacatatgtatgtatatcattctgcaaaatgaaatttgcaaaaataacaaaattattatctaaaatttattaaaacttaaattctaaataaggctatagccagatctcgtaactttgacaatataattctgcaagagaattgggcaccaacccactaaagaggactggttgagttaaatcatcga

SEQ ID NO: 76964 - DNA, 418 bp, Glycine max
  unsure (1)..(418): unsure at all n locations
tcgacacatgagggagatattgaatcagtaagtgcttgtatagtntcaagttggagcataatttgctttgcaatttactttgtggtatttatagcagtgtttactggaaccctagttcattaagtttattttttagttcattggctaaagcaaagtactgcatttgcattagtctttttttaatagtccaacttctgtttttctttttctccctgttatggcattgtaactcanaacagntatttatttgttatgttatattaatagcttatattatctatttatttatttttctttcctaaatcaatacaaagagtgatgtgaaaatgaaagagataagtagaaggagaagctggcttctatttggtgcaaaactagtggtcttttttctgggggtttctcttagaaacacgctgag

SEQ ID NO: 76965 - DNA, 427 bp, Glycine max
tgcatgatttacattctccctcttctcaaaaaattcttaattcttcttgacatcatcaaaatcttcatgatttacattctccccctttctcaagaaaattcttaattctgcttgacatcatcaaaatcttcatgatttacagcctcagctggccttgcccttggtcttctggccccacaaataataattgttggatcatcagggttccaacaattcttccttatgtaggccagattaatgaccgggctcagacgttcaaagacaagactgtcggaggcaactcctctggtcctgcataaagctgtgataagagcaggaaacacgagttttgaggagttagactgggccatagaagtaatctgccctaaaatgagggctccgacattcatgtccagctgagtaactaggccaaagattaacctagctc

SEQ ID NO: 76966 - DNA, 441 bp, Glycine max
agcttgtgctcaaagagtttcttcaaccaactcactatgatcagtctagtggtaggagaatttggaaaattcaaacaaagtcctacactcttgtacaccaaaacagtttctttggcctctatgtatagtacccaaaaaaaaggtaaatatgaaagcgatcaagtcttacaatgattcatctactaaggtacaatgaattcagatccttaatgacattaatgttgtccacatccaaagcttgcttcaaattaccagaatttctaaggcaaaattcatgagaaatatatttgatgtgctctaactcatatatatatatatatatatatatatatacacacacacacacacaaatattaattacaaagacatctagaaaattttgttttctctctcacaatattaacaaagtagtgaatagaataatataactcaagagaaaga

SEQ ID NO: 76967 - DNA, 431 bp, Glycine max
ggaagataagactatacgaggtatctccttggatatagcaatatctctaatggctactatgtctacaaacttgcaactaagaaactcatcatcagtcgagatgttgaagttgatgagtatgcttcttggaattgggatgaagaaaattaaagtggagaagaacgttcttatacccgctcaactacctcaagaagaagctgaggaagaagacccaggtgaaccatcttcacctccaccacaacagcaagatcaagaactatcatcaccagagtctactccaagacaagtaagatctttggtggacatatatgaaacctgtaacttggccatacttgaacctggaagctttgaagaagtgtcaaagcaggaaatatgggtcaaggcaatcgaagaagagatacagatgatcgagaaaaacaacacatgggagt

SEQ ID NO: 76968 - DNA, 438 bp, Glycine max
  unsure (1)..(438): unsure at all n locations
agctntntggttgtgcatctgcttctgtgtttgttgatatccttcgnggctcggctggtaaacgccaaccacttctcccgtcaccgtaggatattcccaatacatgtctctcaccttttcaaaataaccagagtttaaggatgtcatcagtaccgcttttgacttgggaattcctgatgaattggtagcatcctgctggtggttaacatcaggcaaaatattcttcttcaaagtacaagctaagatctgatccaatacatgttgaaacggaccaggttcagtgtcaaacactctaatttgtatgcccactctntcatcagctntagataaataagcttgatagtatctgaccacaagtccccacacactgtttgtagggtggaacagatacctactcaagaaatggaacactgtttccttatttgggaagagatcatt

SEQ ID NO: 76969 - DNA, 198 bp, Glycine max
  unsure (1)..(198): unsure at all n locations
gcactgcatgaaattcctttccattcacgaggagtggagctattggtgttccaatatatgtaccctcctctgtctgcaagaattatgctgtccaggtacaatttcagcttcagcagaacctctttgtctttgtccaaagattcccctacaacagctttacctgccaaaaccaaacacaanagccaaaaataaaaaatc

SEQ ID NO: 76970 - DNA, 440 bp, Glycine max
  unsure (1)..(440): unsure at all n locations
agcttctccnnctatttgctataaatagggggagaagtgaagaagaaaagggttcagcctcttaggcacttctctctctctcgaaattgctgaggaaaattatttccgtgaagaaaatccaagccgaggcgcttccgtaacgtttccgtgagaaattacgcgaagattctcgaccgttcttcaagattcatccttcgttcttcgttttcttcagtcttcaacgggtaagtacctcaaaccgagcttttcaattcattctatgtacccgtggtggtccacattttgtttcatgtatttttattctcgttttcatttgctttttatatccccttttgacgtgcttaagccatttatttaagtcatttctcgcttaatctaaaaataaaataaatttccaccgatattttaaattgtatcatccattaattntggtaaaatga

SEQ ID NO: 76971 - DNA, 333 bp, Glycine max
  unsure (1)..(333): unsure at all n locations
ttgatctttgacattctttcgtggggagccgatggacaaataaaccgcacatgcaacagcttcagcccagaaatccttttgcatatttttagccttcaacatacatctagtcatattaagaataattctattttttctctccgctaccccattttgttgtggagatctaagaaccgttagagggcgacgaatcccatatttttcacaaaattcattaaattcttttgatgtgaattcgccacctctatcggatcttagagctttgattacataaccactctccttttccacaagagctttaanaattgtaaaagctacaaatgcctcagattt

SEQ ID NO: 76972 - DNA, 427 bp, Glycine max
agcttgttagaactaggctcaattctaaggatcttatagtaagtccctgttgctgacaagtaagtttccatcattgcaatagactttgtacctatagtctccacaattcgaacaagcactaaaggttgatgcattgattactagaccaagactagttagtagaaagagtagaaaggctaccatctttgtttgaatatggaactagctaggaagatttagttcacatttacataaattttcaaacttactattttttacaaaaaaaaaaatcaacatagttaatcaaatatatgatgcatcaaataaaaatagtggctgggaggataaaagttattagtttcattcttataataattaagaaggaaagaaagaaagacatgttgaattaggatttggaataattaattgtaacgctataaaattataa

SEQ ID NO: 76973 - DNA, 361 bp, Glycine max
tcatttttctatttgtcccaagggtctttttatccgtcaaggatcactataaggacaatgttattgcgttgatggtggtggcgtgatgataatggggttgcacaaagatcctcggtagtgcgagcacgacgacgatgaatttcacgaacaagcacacgggtcttttacaatgtgattctaaatctgaacttctctttttgagatctgatttttttatgtgtggttacaaagaatatgtgttgttgttcgcctgagagacatgttttagattatcactacaaaattcttggggcaaactctattcatttcttaactcgcccaagagacacctttttacatcatcaagaggtaaatgtgattc

SEQ ID NO: 76974 - DNA, 409 bp, Glycine max
  unsure (1)..(409): unsure at all n locations
agcttaagaaaaagcgctaataaactatatttcatttctcattcatcaccagcaaactgttggttatctgattagcttaaaactgttactctggttttgctaatgcttgttggtcacacagtgcaatttggttgctatagtggctaaaggtgatcagattcttaggcctaaaaaccaaatcactgtacataatattaatagttaagtggttaggattataatttatgtttttaaaaataaaattgtgaatgacggaataataataacaaattgatttgcttggctctatgtaattataaatggatgttgatntttgggttgcaggatctcatctcaagggcgtatgctggttatttgaacctgctgtacaatttaattgtgggatantcatgtatctcgggtttctttg

SEQ ID NO: 76975 - DNA, 418 bp, Glycine max
tgacatgctgctgctgaacaacagctatatactctacttcataagtagagagtgcaacaacatcctgattcttagagcaccagcaacaacatcctgattcttaataagtaggttagtttgatctgcttcatttaaatgtgaaccaaaaccaactaaaattatggatatattcacctatacaaatgattatagttatatttatttgggtttaattatattattttcctgaaaattggggtaaatttatctttaatccttcaaattaagaaaaaaaccattttagtctctcaattaaaaaatataattcccgaaaacaaacaacagtaacaaaagtggtgatgtatacttgaaagtgaatacgtgtcagatctaaatcatgtaagcactttaatcgttttcagtaactttggttcgcttt

SEQ ID NO: 76976 - DNA, 421 bp, Glycine max
  unsure (1)..(421): unsure at all n locations
agcttcactatcgaaagggtccttctcttattanattctattactacccttcctccttgtggcttcctatgtgtctaataagttgctgttgttggttagaaacttgatagagcgtaggaaatttgtccattaaacttttgtccccccctaaccatttgtcctcccaaaatctagtcatggctccacagcgcaccttccactcaaattggtcttttattttgattgactcctctatttgattgaactgccttaggtcctttcaccaatgggagtgtaagctgctatttcttccctcatctaaatttctccaccccccatatatatatttatctactgcccttctgtatatatattttgtgactgtcactgcccagccctctaatgttgtaagaaaaaatattcatctatgagttttcctctc

SEQ ID NO: 76977 - DNA, 427 bp, Glycine max
  unsure (1)..(427): unsure at all n locations
tatcagcagttatctagaattagtctctagagtggccaagctagataattgtgacccaagcatgaagggcaaatatgtgtntagcctttgaattcttcgaaaagaagcttgcctttatctgatctcctatctgaaggtagaaagtttcattctaagctcaaggccatagtctgataacactgaatctgcgaaatttagtctatcttcaagtgtctccaaaagaatctcctctatctgaaaagtctctccaaacttggtgcgatcccaaggaaggacaacattgagggcacagatgatgcctatcaaggattgatgctactgttctgtcgtgcaatttttttctctctgcgttgtttcttctaaaggttgcttcaatttctaaatccaatggaaccaattcacctacaaaagatctacgcatgcaaac

SEQ ID NO: 76978 - DNA, 380 bp, Glycine max
agctagagcttggttcaaccccgttatctattgtatggaaattcttattgccaatacttcaacaacatctcatagggatgaatgactcgggcatactttaagcttatgcactgaaaatgtaattatgaaattgagatgcccgaagaaacaccatttcctagttaaccatgcatgaggtaccatgttcaattattttgctttgttggtgtgtgtgtttatattacaaatgggtttatgatcccaacatggttggctcatggtgcctaacacatgcaactaagaatgtggtgtgaaggttcacgctttcacttttgtgttattgtttggcttaggaaaacgctaggatgagcgtagctcatttcttattggttgcaattttg

SEQ ID NO: 76979 - DNA, 425 bp, Glycine max
  unsure (1)..(425): unsure at all n locations
tgcctaattaacctaaaantggagagaatgattatttaactcataaaacgaaaatactaagtatgtattacctgtacttaacagaaaatacttataacattacaaaataaccataaattgggagagtttgatacaatttatacaagttgtatacacaaaagttagtcggtttctccgactaacacttatggtatattcctagtactcaaaacttgggatgaatcataagaatgtgttaaggaggtgttgatgatgagttaccaacttttaattaaaaattgaaattttaactaatttaatagtttttttttttgctttaatcatatatgtttttatcttttttctttagttcattctatcaattttaaaacccatagaaattgggatttaattgtttaaatcaatactgaaaattctaaaaacta

SEQ ID NO: 76980 - DNA, 424 bp, Glycine max
  unsure (1)..(424): unsure at all n locations
tctctaanagatcaataaatttacaaattaatatcacctttatattgagcttaaaaaaattatatcattttttcttccgtataaccccaatgaacctaacaaagtgaaaacgacccaaaataaattgtttgttcttcaaacctctgccatagaatatatcagtacatcatttgagcgaaagattatactcattactctcctttntctttttttgaatttagtattaaaatcgcttgattttagacttggtataactcaaagttataattctatttggtttgctcaaccaataaattattccaagaatatacaagaagataaaaaaaaatatgagattgtattaaaaattatataaaaaaaatataagaatatcctgtggtgttgagagaattggacaaataaagattcaaaaaagaatcgatta

SEQ ID NO: 76981 - DNA, 445 bp, Glycine max
  unsure (1)..(445): unsure at all n locations
gctattacgtgacactataaaactaagcttcatacattgctancatgcaacagaatcaacatcagttntttcccctgcttttctcatgtttattgaagggaaataagtagcaagcctgacactcccctttgatctataaataggttcaacatgttgagctatataatcttctgtaacccgattacgaaccttcacggcggaaattttatgtgttgatacataagaaggaacatccttaactgtgatataatacaaaaggatgatggggaggtgttagtttttgctgagtattttagatgttatttctcacttttcaactttcaaaataaatgcaagagtaaaccaaaagaaaaaagtataaatttatggaaaatgtggcagagcacataacatgtactctgcatgatctgcatgcctgcggatgcttttggctttttccatttct

SEQ ID NO: 76982 - DNA, 276 bp, Glycine max
gatcacgactacagctgtggagataattcaacattgcgatggcctgtccttgagacttattgatggtaattgcaaaactaagcttaatacgaaactgcttcctcagaagaacaaaggaaagcctctacattctttcgttgcctgagtttaactccaggtgagaaagttcttcttctatcacggcaacatgttaggattttaacgtctaacatattcataaaacaatcaatggcctagttgtcttgtcccattacacacgtgaaatttatggtctat

SEQ ID NO: 76983 - DNA, 415 bp, Glycine max
tgtggaaggtgactcgctggaacagtcactgctttctatgtaagtcaacaaatttcattcttaattcaattttttagtttattcattctcttaatctttaattaaatgcttgtcattataacaataatcaattaaatatagatactaactttggcatgtgtatgtggcgttaaccgttcattcattactcatctatggagatgctctacctttgggaccccattgaatgcatacaatttaaatcaatgtataactacatttccctaagtgcaaaacgttttttcctcttttatgttttggaatccatgtgaagattattaacacagctattaccctcgtgatttactttagatccaactaatattcgcatttattaatttttgtccccaactttccaatctacgaaccaatgcct

SEQ ID NO: 76984 - DNA, 369 bp, Glycine max
  unsure (1)..(369): unsure at all n locations
agcttatcagaaggggaatggtaaaataccactctcattctgatattaagaatgtggcaaagtgtttcttttgcaagaagaagggacacatgaaaaagaattgccccgggttccagaaatggcttgagaagaaaggtaaatcaatctcattagtatgttatgaatctaatatggttagtgttaatattaacacctggtggattgattctggatctactattcatattgcaaattctttacagggtatgcaaaacctaaggaaaccagtgggaagtgagcanagcattttatcaggcaataagctaggctcacattgtgaggccattggaacttgcattttgactttaagtagtggctttattttaaaat

SEQ ID NO: 76985 - DNA, 375 bp, Glycine max
  unsure (1)..(375): unsure at all n locations
atgatgccctattagaagttaaataccaatgttttttttttatcagcaaagataaaatatatatattaaagagtaccagaggtactagataaggtacaaattacagatcagattagattccaggtagacctaattctgaccatagatagagtgtggatacaggaatggttataatacacatatcaaggtattcttaaaaatcctgcactaagattggtagaccaatgtaatttctctcaatagctccaactgtgtttggcataggctntaaggaataatgacaggctcaaacttagtttcaagacacattctcagcaagccacaatttaatggttntacatagcaccagcaatgaaaactttcagctatggaaaa

SEQ ID NO: 76986 - DNA, 347 bp, Glycine max
caacttacgcgatttgatttttttgctacacccgcaagagcgatatctcaacaatgacgttccactcactttttataacagagctactcgttacgcatgttcctttgttactgagacgacgaacggtgaccttgatcactcccttctcctaaccattagatcttttattacatgagtacccattactacatacccggtttcggattatacaaggaagccctgatggcgggaaagtccatcattcaagagcttcttatgtgacttcagtatctcaagctagaagcgaggtgccaagcacagcccaaaaccttaatacatgtgattgaaaatgcatgtcccattcgatt

SEQ ID NO: 76987 - DNA, 431 bp, Glycine max
  unsure (1)..(431): unsure at all n locations
agcttgtagaatggctagacataatacatggcggtgtttggtttggttcaaggataaaagggatgccccacattatttccatgacacaaatgcaaagatgatgatttggaaattttaagcaaaactggtcatgcatgcacctatgcggacactcaactgtcaaatttttatggtcatatgatgctagggctcangattcatttcctctattttaaatcaacccaatgtttccaaaatatgttcttttatcaatttgtgcattcatcctagtccattttgggtactcgggaaaatttcacagcattcacccttcaggtgtacacacattttttcaaaaactagttatgatcagtgaattttttcaaagaanagttggaagtcatctcttttcaaaagcatgttggtttttcaactagacaactttatttttc

SEQ ID NO: 76988 - DNA, 327 bp, Glycine max
  unsure (1)..(327): unsure at all n locations
attcacaaaggccgggaccacaaatggagagggtctctatctaccgcattaacaaaagctcttgtagcacggggtggatgcatgagaatcangttgctgtgctagacgaagaaaccaaccaaaaagaagccaagttgggtgcagctgtgctccctgggtttcgaattggcgatcgtggagcgacccgagatttcggtgtcaaatccaatgtaatccagtagtttgaaccctattgctgggcctaagctntatggttntctccttttgtcaggcatgctttctttaaatgttctagtgattntaatatatgaccttctttattgatat

SEQ ID NO: 76989 - DNA, 442 bp, Glycine max
  unsure (1)..(442): unsure at all n locations
agcttattttgatgatgccaaagactcaagtcaagtatcaagattcaagcaaggtttaagaatcaaagagtcattcaatcaagaatcaacattcaagtgaagaatcaagagaagactcaagatattcaagaacatcaagaaaagcatcaagacaagtataaaaagaattttttaaagaaaagattgaatagcagaatttgtccaaaagaatttttgaaagaaaaatcttttatcaaagtttttactctctggtaatcaattaccatgaggcagtaatcgattaccagaagcccaaaacaattttataaatattttacaaagtagtaatcgattaccatgggcatgcaatcgattaccaatgtttttgaacgttggatttcaaatttcaagagtcacaacttgtgataaaatattttcaaacttgtgtaatcgnatacacaac

SEQ ID NO: 76990 - DNA, 108 bp, Glycine max
gccatgatctagctcttggaacttctggagatgctactcacaccccttatacgactgactctgaggatctacagtagactatctcccaccttttatagtaactcaccc

SEQ ID NO: 76991 - DNA, 381 bp, Glycine max
  unsure (1)..(381): unsure at all n locations
agcttgtcatgagagaataaaaggtgaagatagtgatgttagatatgcaacatatgtatttactaatgtctcatgattattgtttggcttctattgctagttctttgcctatagctctggaagaattattgaaggagtttggggatgtatttcctaaagacacctctcatgggttacttcctttgagagggatagagcaccaagttgatctcattccangaacttccttaccaaataagtcagcatatagaagtaacctgaaagagacanaagagatccaaagacaagtggagaacttgatggaaaaagggatggtgagagaaatcttgagccctatgtgtatgcctgtcatnnctagtaatcaaattctatcacaacttc

SEQ ID NO: 76992 - DNA, 422 bp, Glycine max
  unsure (1)..(422): unsure at all n locations
ntacttgtaatggaagctagaacgtctntatttgggagtaactactgaaactcttgatgtaatgctcttactatctatttaatgttattttttggtgttctttgcttctatctatacttattttacatgcttgtggcttgatcacccatttgtatgtatagttaggctttttagtattagaaaatgctttaaaaccttataacttgatagagcaagctagaaatatgtatgtctaggaatgaaatgcagtgatctagtatattttacactgtgtgcttagtgcaactcttttataacgagtttgttgaggaatcaagaacaaaagctaagagagttaggctcattaatgtgaggaatcatggtctgagcattttctcagtgtaagaacactaggataacattaaatagagaaaaatcctttt

SEQ ID NO: 76993 - DNA, 422 bp, Glycine max
  unsure (1)..(422): unsure at all n locations
agcttgtattacagattcatnngatcgaattttcttgaaaaagctaagctggtattgattagtttataatagaggagtgcatttgattagtttgtttcagtgcattaaacatgttatctaaatccaaataataactcggtccggtttaacaaattttaaatgatttaatttgttaaatttagtttggttggatntgtttttttcacatacctaagtcaagttgacaagaaaatgaaatgagtaaacgacaaggttatcaatggaggttggccaaaattctgtcataaagatgccattctgccatatggcgctgccatagcatgccttcttttacaaattggctatggcgaaagggtgaaaaaatgttacactatactattatagtgttatggcgacattataattattatttaacaacattg

SEQ ID NO: 76994 - DNA, 417 bp, Glycine max
  unsure (1)..(417): unsure at all n locations
ctccattagccttcaagtggtgttaaaaatgttggttccatttatggcactcacactntgttagtgttctccgcaccacctgcgggtaatggccattgggctccacacaagcaactagtggcatttcagaaacttcatattccttccaacgcccaacaacgagtgaatgtcaacattcatgtttgtaagctattgagcgtggttgaccggtctggtactaggagagttccaatgggtttgcacagtcttcacattggtgatgttaaacactacgtgtctcttcaggcagaaacacttggaattatcaagtcctgaatttttgggacatcacccaccaatcatattcatggcatttgattccttgcctttttttcccccccagcataatatacatatatagtacctgctaaataacct

SEQ ID NO: 76995 - DNA, 427 bp, Glycine max
agcttattacttggaactcggacgctccatctactagcctgtcattgttcggttaaggatatgcatccttgggacacgccctattgagatcagggtaattgatgtagatttgtcatttgtcgttggttttttttaccatgacaacgtttgcgagccaagtagagtacctgacttttctgataaaattaactctgaggagcttgtcactatgatatcgctaactctaaaacccagcatttgagtttttaagtggaaactccattaatttgattatgaaaaatgggattaaattattttttttgcgatatacattcaccaacaccgcacaaatacttaaataaatacatatatatgtattaaaccattatacatcatccacatgatagaaagtaatttaggttatacatgtatctaagcctgagattac

SEQ ID NO: 76996 - DNA, 424 bp, Glycine max
tgtctcagagtttatgcgaacggagaccaacatgctagctatcatcgccaagtaccaagaagagttaggtctagccacggcccacgagcataggatcgcggacgagtatgcccaagtatgcgcggaaaaagaggctagaggaagggtgatcgactctttacaccaagaggcaaccatgtggatggatcggtttgctcttaccttgaacgggagtcaagaacttccccgcttgttagccaaggccaaggcgatggcggacacctactccgcccccgaagagattcatgggcttctcggctattgtcagcatatgatagacttaatggcccacataattagaaatcgctaggaaacttgtatggtctctcagaccttgactagatacgactttctttttataataaaatgagttggtcccatgttt

SEQ ID NO: 76997 - DNA, 434 bp, Glycine max
cagcctttagaaaatgttgacctcgagtgtatatttgttttcttccatgtttcaattgtacgtagcttgtgtcttcttcacagatagggcatgcacgatggcccttaacactgcatccactcaaattcttgtatgctggaaagtcattaatggtagaaaataacattgcacacaatgtgaatgtctcatttcgatacccatcaaacacaacaacttccttgtcctacaactttgtcaagggttcaatcaaaggactgagataaacatcatagacaacatcaattatttttacttcatgcactaccaaggaggtaagttgtaaattactagcaaaacaagtcacaaactatgctgagttcttaaatggtcatagggattcattccatcactggcaagtccaagcctaagatttctggcattctttgtcaaaattg

SEQ ID NO: 76998 - DNA, 415 bp, Glycine max
  unsure (1)..(415): unsure at all n locations
tccgcttattagtgcacaactcatcaagaatntagcatatcttgtgaattgctntattgcatccagcagaggtatgtttacctatacttttctaaatgtttccaagatctccttctctgcctctttcattttttgttggaaatttctcttaaagggaatggaagagggatatgcagcttcagtaaatcagaattaccagtggaagattcacctacatagaaattgttaggtaacttactctttaaatttttgtcatcatctatttctagagtaaagtgaagttgggcaggttcatttgtggatgaggaagacgttgctggttgaggtccttgacactgctttcccgacctcaatgtaatgacactcatatttttgggattctagacagaatgagaaagtaatctgtcagaatttt

SEQ ID NO: 76999 - DNA, 426 bp, Glycine max
agctataagactgtatattgtttctctagtatgcacaccatgtgttcctttccttcaattgagaaccccattggttggtccatataaatattctcctctaaatatccatttagaaagacagttttcacatccatttgatgtaactccaagtcataatgggctactaatgccataataatcctgaaagaatccttttgtgagacgggtgaaaacgtctctttataatcaatgccaactttctgagtaaaccccttagcaacaagtctaaccttgtaacgttcaaaggtgccatgagagtcccgtttagtcttgaagacccacttacaaccaactctcttacaaccctttggtaattctacaaggtcctaaacactattatgttccatggaatttatctcttatttcatggcatttaaccacttctca

SEQ ID NO: 77000 - DNA, 423 bp, Glycine max
cttgatggtgtcaagagaaatcacatgtttgtcatcatcaaaaagggggagaatgtgaatgtatgtatacatgattttgatgatgtcaaagaagaatctaacaaggctgcttcaaatgataagcatttgcttcaagaataattcaagattgcttcaacaaacaaagccttgtttcaagattcactaaagaccaagccttgccttaaaacaatgtgctttcaagacatgcaaggctctggtaatcgattaccaggaagtgtaatcgattaccagaagacagggttgagaaatagctgttgaaaaaggttttgaatttgaattttcaacatgtaatcgattaccatatgtctgtaatcgattaccagcaacgaaactttggaaattcaaattcaaaagtcataacccttcaaattataactgtgt

SEQ ID NO: 77001 - DNA, 355 bp, Glycine max
tgacgcgtgccagcttctctggaatttctatcctgacattgttggggaaggatatgcatccttgggacacgccctattgagatcagggtaattgatgtagatttgtcatttgtcgtagcgtttttttaccatgacaacgattgcgagccaagtacaagacctgacttttctgataaaattaacctcgaggagctttgcactttgaatttgataattctatacccgatcatttgactatttacgtggaaactccattaattcgattatgaaaaatgggagtaaatcattgttttggcgtatacattcaccaacacctgacagatacttagtctaatcgtatatattgattaaacca

SEQ ID NO: 77002 - DNA, 415 bp, Glycine max
agcctgtccgatgcacagtaatgatggcccgagttatgttggggaacggctacgaacccggaatgggtttaggcaaagacaacggtggcataactagcctgataaatgccaaaggaaatcgtgggaagtatggtttaggctataagcccactcaggcagatgtaaagagaagcatcgcgggaaggaagagtgggggtcaaagctcgcggttgagacaagaaagtgaaggaagcccgccctgccacataagtagaagctttataagcgcgggtctgggagacgaaggtcaagtggtcgcgatatacgaggatgatgttccgagtacattggatttggtacgacgatgccctcctgatttccagctgagaaattggcgagtggaggaacgccccgacatttacgcagcgagcataat

SEQ ID NO: 77003 - DNA, 415 bp, Glycine max
  unsure (1)..(415): unsure at all n locations
ctgcagctnttattttttatatgcgctgttttgtagctcctcatgcactcctctatgactatggcatcatttatggcgctaaactgctgagagttggaagccatcttctcaattaaatttctagcttcagcaggagtcaagtctctaagggctccaccactggcagcatctatcatacttctctccatattactgagtccttcataaaaatattggagaagaagctgctctaaaatctgatggtgagggcaactggcgcatagttttttaaatcgctcccagtactcatacaggctctctccactaagttgtctaatacctgagatatccttcctgatggctgtggtcctggaagcagggaaaattttttctaagaatactctcttaacgtcatcccagctcgtgatggaccttg

SEQ ID NO: 77004 - DNA, 110 bp, Glycine max
ccaactttagacgcccgagccagttttttggccccatgaaaaggggttatgaattcacccgttccctacaaaatcctccttcaccatttaattctttgcaaagcttacta

SEQ ID NO: 77005 - DNA, 349 bp, Glycine max
  unsure (1)..(349): unsure at all n locations
atagaggctgagtggttgactnttcaagatgatgggcccaacatanaaacaaacccgcttgccaatcatggagggggggcggataatgccatcgaggtgagtaggtcacaccggcccaagcttttgaaggacgtaacgacccccagaaggtttatctacaaagcattgcaaaaggcgggcataattccctgcggcgggtgcaaaggagattcttgcttaatgcatccaggtgtactccatgacatggaaacatgttcggcagtgaaagatctattacaacagatgatagaccaacgccgacttgacgtcggcaataagagggaggaggaacaacatgtatacatgcagt

SEQ ID NO: 77006 - DNA, 435 bp, Glycine max
  unsure (1)..(435): unsure at all n locations
cctttgatagccctttttagccttggttccctttccttggtttgaagctcactacaagccttaagtgaacaaccatgatattaccatatccttaaggaattttggagctntggaattgttttgggaataagtgtggggagtttttgtttcattggacaacttgttttgttggctatgcttcatgatgtattttgggccatacttgatgtacattgtatattggttaaatgttggacatgctgaatgaaatgttgtttctcataggctaaaaaacaaaaaaaaaaaaaaaaattcgaaaaagaaaattttgataacaaaagaaaaaaacaaggccaataaagatagccataaagtgagtgaatagatcttaatggccaagaatatgaaactctggtctatctcaggtaactttacttactctttagttctattttt

SEQ ID NO: 77007 - DNA, 408 bp, Glycine max
  unsure (1)..(408): unsure at all n locations
gtgcgggtctaagacacgaaggccaagtctccgtgatatgcgaggatgactccctgaggagatcgtgattggtacggccatgtcctcctggtttccgactaggaaattggcgagtggaggagcgcccaaacgtttacgcgacaagtataatgtaaccgcttgtagctttaaaactctactgttgagcataggcttcagagttttcttttgttaaggcattatgtcttttgttcttgaatttataatataaagatctttcttcatctgttcctgcgcctctacccattctcattcatttgcatgcttatttctctatgcttaaaacgccagattcgacgacgagtccctcgaaggtactaatacgccggacccggncgtcgatntctagcaagaatcgggtctgatgga

SEQ ID NO: 77008 - DNA, 455 bp, Glycine max
  unsure (1)..(455): unsure at all n locations
aaaaccctatatgaacctactgtagtatcctgctaaaccaaggaaactcctaatctcaaacactaacttaggactttcccaactcatcatcgcctctaccttggaaggatctactgttatccctcccctggatataacgtgccctangaagctcacctnctctatccaaaactcagacttggataacttagcatacagtttgttgtccttgagggtttgcaacacaacccttagatgttcttcatgttcctccctagtcttggaatacaccaagatatcatctatgaagaccactacaaaactatctaggtagggatgaaagatcctattcatgtagtccatgaacacaccagggacattggtcacaccaaaagggataaccaagtactcataatggccataacgggtcctaaaggtagtcttcngaatatcctcaggcttcactctaatctggt

SEQ ID NO: 77009 - DNA, 446 bp, Glycine max
  unsure (1)..(446): unsure at all n locations
agcttctccgaagggcatggttatntccagtttcctgaatatatctaagaatctcgccaaatgaaggtccttctccttcttggaaggtaccaccggatatggtactttcacaccttcattcacaacttttcctcttttcttctctctagcttgttcacttctactcctctcttcattcttattttttttcatctttttcatttttttcattatctttttctttntctacttctttttcttggtcatttaattcttttttcttaaccattatttgtttttctttttcctgattgctttcacttctcacatcatctttcatttcatcagtacctttcttttcagcagctgtcttcttggatacaacactatcctcattcttcacctgcacaaacctcttactccttgtcatcacagctttgcattcctccttgggattctnttctata

SEQ ID NO: 77010 - DNA, 441 bp, Glycine max
  unsure (1)..(441): unsure at all n locations
gagtcctcagtgttcgctagcttcacctggcataacgggaagtcatcactcccacaagcctgaatggccaacttgcaacagttttcagtgcttgccaacttcacctggcataacaagaagtcatcactcccacaagcctgaacgaccaacttgcaagagtccttagtgctcgccagcttcacctagcattgaagaggagcaacactcgctgttgaggtgagagaggacttgtattttagaacgttgtccctcactcactcatagccagagacggtaaaggtggacgatggtgacccaatgttatggctaagtcacatgcgaggagatgccctgacatctctgccaccactacctctccttacacccncagaagcagaaggagggaggattatagtaaccgggacaagctccctggcacaacaaaaggtcacaccctctgcg

SEQ ID NO: 77011 - DNA, 361 bp, Glycine max
  unsure (1)..(361): unsure at all n locations
ntgcagcagaaagctagtacaggaattgagaatgacatccattgtctgtgaatccttntccagagaaatattcccctaaacaaccatcattccccctctccctttttctctctcttcacctccttacatactccacccactaacagaatgtgttagaatctcctatgccatgtcatgtaactaactcacactccctaatcctatattctgtctcctagaataaactttccatatagtgggcctatgtgactcctcaccaatatgaatatcantattattcaccggtgtcctatcagagacattaccttgggaactatcccattcacagcatgaggtagatntaatggttccagctgccact

SEQ ID NO: 77012 - DNA, 502 bp, Glycine max
  unsure (1)..(502): unsure at all n locations
gacctttatactaagcttgctgctntcttcgtttgagtttctctttttataattnttcgagaggacccataatgtgtagaacttgtgggtttagtttgagtttctatgctctaagtgggaactaggatctaaaagattagaattacttggcttggtgttaatttgcagcagagtaaaccaatgttttagttcttgaaagtgtattctcacattattagtcctcgaagctaaggaaattctaaataagtccctggaagtgcaatccgtctatcatgttagtccacaatttagaaaacatgtgacttatagctatatattaacatacgtttaatggatcaaaatgagagtaaatgattaagtttagggacttatatgaaacaactctaaattgtggagacttatttggaatttccttagtttaagggactaatggcatggtgcgttagggaccaaatggtatgttactctaatntgcactcgattatggattcatcttcttggg

SEQ ID NO: 77013 - DNA, 302 bp, Glycine max
  unsure (1)..(302): unsure at all n locations
agctngcctcaaagaggtccaggaaggacaatgctgtcgaaagaactagttccgctccggagtacgactgtcaccgctttaggagcgctgtacaccagcagcgcttcgaagccatcaagggatggtcgtttctcctggagcgacgcgtncagcttatggacgacgagtatactgattttcatgaggaaatatggcgccggcggtgggcaccactggttactcctatggccaagtttgatccagaaatagtccttgagttttatgccaatgcttggccaacagaagagggcgtgcgtgacatg

SEQ ID NO: 77014 - DNA, 456 bp, Glycine max
gaatgaagctctgataccacttgttatacaagtggcctcagatatcttaagaagggggggttgaattaagatattccaaactgtttcccctaattaaaaatttatttaactttttactcaagttatgaattcccttaatgacaatcttcttaaatattaattcaaatgaaacaatttgaatatgaatataaagcaataataaataaaggagattaagggaagagaaaatgcaaactcagttttatactggttcggccacacccttgtgcctacgtccagtccccaagcaacccgcttgagagttccactatcttgtaaattccttttacaagttctaaacacacaaggacaatccttcctttgtgtttagagatcctttacaacaagagactcacaatctcttaatcccttagagaatgagaagaagaagaagacaaatctctctagaaagagatg

SEQ ID NO: 77015 - DNA, 490 bp, Glycine max
  unsure (1)..(490): unsure at all n locations
nnagcttgtttaatgacttattgtaacaacaatccaccaagcagcagccttggatntactttgtggagtatcgtcaagtcctttcaaaacattgttgactacaaacatggatgcttattgtacaattaaaatattgatgttctcgactaatgctaatgcaaatgtattaaaaaataacattgacttgttaattattcatttgaggtagttgtctggcctattatgcaacgaacaaaaccagatgacaacattttccttaagcaaaatgacgatcatttgccaatgtgcactgcagtagagaccaatataggttattatactattatatattatntaaattcattngttcaatttaacttacccatataggtaggctcctaggtacacatcccattttgaattttgcatctagttcttaatgtaactntctgatntcaaatgtgattgttcaaatctctggatggattgtggcttgatgaatctatacaca

SEQ ID NO: 77016 - DNA, 430 bp, Glycine max
  unsure (1)..(430): unsure at all n locations
tcgccanataataagttccttgtgttagatactcanatcattccattttaattttaaatacttggtgacccagtgcgcttgctggtatatcacttcccctttgatataagtgtttgtaaatttaagaaaaaggaattgtgtagggagttgaacaagtattttggcgccgttgccggggaacttctttccatttggaaagtttagttcaatttgaaggcattgattcattgattatttttgtgaatatttagttactacataatttattgttcttttgaattggttaattggtgttatgcttgttttgcgtgcaaagaaggtcttttgtaggtgttttgattcccatagactgggaaattaacgctacttgcaggaaaagaaacgtagaaagaaacattaaatttttgcacgacagtgaggtagcagcaac

SEQ ID NO: 77017 - DNA, 490 bp, Glycine max
ctcgtccgggatcttaagtcacctgcggcatgcaagctttcacaagagtgttcacaaataaccatcatgaagcagaagactaacaaaactacccatcatatctgccaaaaccccatacccacgaaatttaagagagaaagaagtccacccaaacctgaaatttcgaagtcccactcgtagccacgcacttcacgaccccgaaaatgccctcctttcgcgatttggggcagaaatgagcaccaaaggttggagctttgttggggtttcaatggagaatgagggagaagaaaatggcaacgtgagggagagagagagctgtctgaaaaaaaaagtgtgggggctgagtgaagagagagaacagctttttggtgtttaaataaaagggttgtctctttttctatttatttatgtgagcaatgccacatgtctccatttgagtggagcaagaaggggcccacttttccttttgattgtgacccatactcagtca

SEQ ID NO: 77018 - DNA, 376 bp, Glycine max
cccatttcgaatcctctacgctgtccctatgcatacaaaacagtcctacaatcccaatcttacaagatcatattcatatgtcattggggcatttcgccgagcacttggtgggcgcttgtttatgcatgaatagcaagagaatgggggcaatgtggcatgccccattgcttcaaaatacaacacaggcctaaggccatcccctacaacccctcaaatcaaacaaatcaagcatgaaaacaacctaaaactgccacacaaatttaagcacattctcacaatttatagcaccaaaagatgaacaaaatgcactaatggaaagctaaaaactcaaggattaaatacttacttgctggagtgagtaggaataccacaaatg

SEQ ID NO: 77019 - DNA, 362 bp, Glycine max
agcttgagccaaaatcctgactcaccatatatctttgacccaggtgagaatgtcaatccttaccctcggaagcgaaaagaatagaagggaaatttccaatcaaagaaaaggaaagaaggaagatttccaatcaaagagaaagcaaaaaaagaaaagaaggaaaattcccaatcaaagagtgggagaaagcaaaaagaaaagaaagaaaattcccaatcaaagaatgggagaaagtaaaataggaagaagaaggaaagaaagctcctgatcagggatcgaaagaaaacagaagatatgtgcagaaaggtctttggaccggacaatatctgaataatacagaattgtcaccaaatgaacaaaaa

SEQ ID NO: 77020 - DNA, 450 bp, Glycine max
  unsure (1)..(450): unsure at all n locations
acacttataatactcagcttgagatgangaagtgttgaagggtgaaacttcctgcttttattgntgaccacacaatggtacctggagatatgtcgcgggggtcaagagaccttggggacgtcaggtggggtgctattgcccaaaaccaagcttgaccaatcccgacccaacccgggcatagtcggtcagtgagaacctgtgatgtacctaagcaggcgagctcctggcagtcaaccgataaaaggaaaacaaagaccacaaagcaaggaggcttgtggtggctggccacctgtgaatttgtgtgatatgtggagtatggtctctggtaatcgattaccaagggtgggtaatcgattacaaggcttaaaaatgaagacaggaggctaagatggtctctggtaatcgattaccacggggtgtaatcgattaccaggcttaaaaacgaagtca

SEQ ID NO: 77021 - DNA, 396 bp, Glycine max
  unsure (1)..(396): unsure at all n locations
agctcatgatngaatcaagatgattcaaagagttntgatgataacaaagatgatgacaaaaagctcaaaagtcaagaacacttcatgataacaaagataatgatctcaagaatctaagaatgcttcatgataacaaagatgatgatctcaagaatcaaagaatgagttcaggattgaatcaagaacacttcaaggttcaaaagggaaattgatttcaataatcaagaatcaagtttcaagattcaagttccaagaatcaagatcaagattcaagactaaagattcaagaatcaagagaagactcaatcaagataagtattaaaaagtttttcaaaaactaagtagcacatgaatttttcnntaaaaacctttaaccaaagaagttttactctctag

SEQ ID NO: 77022 - DNA, 458 bp, Glycine max
  unsure (1)..(458): unsure at all n locations
gcttctacactngcgcctggaggagtgttggaactttcctttcttcttcatcctctatttgaactttctagacatgaaggctacttcattatttgtggatccatcaaattcctgcatcttcacttttaaagctttagacaaactcttctttttcttctcttctgaagattatctcttcaaatttaaaggcagcggaattcttcttttgtagatgctacctattttgaaggtggacttcatggactcttaagatgtccaacaactcatcccatgcaagatttttcaaatcttttgcttcttggaaggttgtggtcttatgtaacaccctgagatgtattaattataaatcgatgtttgattgtgtttagattgttgtttgaatatatgtttgacttgaatgatttgaaatatgacttgaattagtcatttgtgaattcttaatgtggatgtgaataagt

SEQ ID NO: 77023 - DNA, 373 bp, Glycine max
  unsure (1)..(373): unsure at all n locations
agctntgcttggagcttcaatggagaatggaggagaaggaanaagcaacgtgaggaagagggagggagagagctgttctgaaattgggctgagtgaagagagagagggttgctntttgggttttaaaaggcttttttttttttttttcctctcttcttattattttattcaagctctgccacatgtccctatttgattggagcaaagagggcccactttctctttttgactgtgacccatactcagtcacaaaagtgagaaaaatctgacctttgaaacgctaaaatcctgcctcggtttgcgtgccatttctctggttccagtttctcgcgtttctcttcgtccgccggggccagttttcgaaagcaagcaa

SEQ ID NO: 77024 - DNA, 419 bp, Glycine max
ctgagataaggaagtgctgaagggtgaaacttcctgcttttattgttgaccacagagtggtacctggagatatgtcgcgggggtcaagagaccttggggacgtcatgtggggtgctattgcccaaaaccaagcttgaccaatcccgacccaacccgggcatagtcggtcagtgagaacttgtgatgtacctaaacaggcgagctcctggcagtcaacagataaaaggaacaaagactacaaagcaaggaggcttgtggtggctggccagctgtgaactttgattgatatgtgggttatggcctctggtaatcgattaccaacggtgggtgatcgattacaacgcttaaaaatgaacacacgaggctaagatggtctctggtaatcgattaccaacgggtgtaatcgattaccaggcttg

SEQ ID NO: 77025 - DNA, 393 bp, Glycine max
catataccagtgaggcatcttggctacctataatattgacaagtacttccaaggcgtgtttgttacctacatcacacacaataacctcgctaaattcacatacactgcataatctaaacactctggttatcagaaactgcatacgcgcacatcttgggctttctaatacctatacatacaccaacttcatgatgaatgttgactatcgacacactaaggagatacattccatgctctgcctttttgttagaagggggtttactacctaacgccgcatgcaactcaagtataatctcttttggtacgtaaatggattaaattaaaaggagttttgtacgtatttctaacatacatgcacatattatagaatttggaacatttgacacaaaatat

SEQ ID NO: 77026 - DNA, 447 bp, Glycine max
  unsure (1)..(447): unsure at all n locations
gtgttatgatgataacaaagatgatgacaaaaagcccaagagaatgatttcaagattgagtcaagaacaattcaagaattaagagaaagattcaagagaagtttcaagtttcaatttgatgataacaaagatgatgacaaaaagcccaagagaatgatntcaagttgagtcaagaacaattcaagaatcaagagaaagattcaagttttcaagaatcaagaatcaagaataatcaagatcaagatttaagactcaagatttaagaatcaagaaaagactcaatcaagataagtacaaaaaagtttttcaaaacaccgagtagcacatgatgttttcacanaagctttttaccatagagttttactctctgtgtaatcgattatcagtggcaagtttgtnttaaaaagctttcaactggaattacaacgttccaatcaatttcaaaat

SEQ ID NO: 77027 - DNA, 411 bp, Glycine max
  unsure (1)..(411): unsure at all n locations
tgtgaaacttattttttttatgattaaccgaggttatagcacaaacgatcggttggattttattttaacggtgattaaacgagattacaacacaaacaatcggttgaaattcattntaacattgattaagtgagattacggcttaaacaatcggtcgaaactcgcttaaaacaaagaaaaagatcgccgatcgtaggagaatgaaaatgaagacatgcaaagcaaggatggacccttaagggtgcatagaatgaattctaagcttcaaaatagaaaactaaccaatcgaagattgaagaacgatgaagaatagtcacanagttgatcggaaacattacggaagcgcctcaaccttgatntttctttntctttctccttcttctcactaatttcaatggaaaatcttacaaa

SEQ ID NO: 77028 - DNA, 409 bp, Glycine max
  unsure (1)..(409): unsure at all n locations
agctntannaattgaattaaaacgtttagaaactgctgtgtaatcgattaccatatatgtgtaatcgattacacagtgcaaactttgaattcaaattttaatagctgttgtaaatcagttttggccactggtaatcgattacatcctctggtaatcgattaccagagagtaaatttcttgtaaaagactttttaacttaaatttcttggccaaaccttttgctactttaattggaaatccccttctatgtaatataccttttctaagactagagacatgtcttgatcatccatcttgaatatctttaatttctctgtcttgaataaagctttgagacgcatgtgaacctttggcatcatcaaaacattcagcttgatcctttgtctacaatctacaccttcttgatgat

SEQ ID NO: 77029 - DNA, 487 bp, Glycine max
  unsure (1)..(487): unsure at all n locations
gatgttataaatgattacatgataacacaatatgttataaactttgcaaataaaaataaaatgaaggcttaaaagaaacttgaacttaccgaaatctagagctgattgacctcagggtcgatgtagccaagatgggtttcacgatctcccacgtcggactacatgtaccctntactaggagaacacaagagaggatctacaaaacanaggactccgacgctcaagtaagcgtgtgagtgagttgagaataaatcaaaaggggagatagaacctgatatttatagcgttgaatgagagcctcgagtccttgatggtcagggttgttacagtagaataacaacccttatagantaattgtatctactagataagtgagtggagtgtttgtaatttgaaaagaggataataatattatcattagaattcaaatatattggtccaggactgacgaggagggttgacgtgtatattctaatgtcatgtcact

SEQ ID NO: 77030 - DNA, 239 bp, Glycine max
tttttttttacagagacgggggggtgtttttataatacaccccctcccaacaactaacaagttattatatgtatgatgacatgaatgggctcttgaatattattcataatttacaacgttatttctcaatacaagactggcacatagatttgattaaaaagctatggcttcaataaatattagaattaatttttattgattcctaaaatatattggattgcattaataaacgaatgggc

SEQ ID NO: 77031 - DNA, 392 bp, Glycine max
  unsure (1)..(392): unsure at all n locations
agcttcaagaggtaagagagaagncaagtatatttagtcaatatantgncgcgaaacggttcataagaagcgaagattggaggctaggcttagtggcgtttagaaggagctggattgctagccttcatttggtatattagccttagaagtaaaaatccagaatgagcttagagaagcttggataaaattgattggtcgtaatactagtttcttcgatgcacaaactatttctagaacaaggtggaacaccattcactgtattttgttagcggctgggaactactttgaagatcccgagattctaaaataggaagttgttctttatttaagcaacgcttttttttacctgctagtgattatctagttgatatccctattagaacatttcctta

SEQ ID NO: 77032 - DNA, 323 bp, Glycine max
  unsure (1)..(323): unsure at all n locations
aactcacctgggcgagggatcttctcactctggcaagtgagcgtcaggcanaggcataaaatatggggtgaaatcagttttcttctaaattcaaaagcttcatcactcaaaacccacgagcacaccatttggcagcagcatcaaaccatctaagtgcgattnttcttcaaacctttttacatttctttcatcttatacaagcaagaatcatcttcagctcgaagtttcattttttgctccctattgtgctcgataatttgtgctttccttttgaacaaaaattaaacatagatgatggttgttcggttgtttcctttttgtgt

SEQ ID NO: 77033 - DNA, 338 bp, Glycine max
  unsure (1)..(338): unsure at all n locations
agctntctccccaatgttctataaataggggagtgaagtgaagtggaaaagggttcagcccgttaggcacttctctctctttcgaattngcttggaaaaattgtttccgtgaagaaaatctaagccgaggcgcttccgaaacgtttccgtaactgttccgtaaggaatttcgcgaaggtttcgaccgttcttcgacgctcttcattcgatcttcatcgttcctcgatcttcaacgggtaaatacctctaaccaagcttttcgattcgttctatgtacacgcggtggtccacattgcgtttcgagtattattattctctcttcattcactttatatacc

SEQ ID NO: 77034 - DNA, 463 bp, Glycine max
  unsure (1)..(463): unsure at all n locations
ccgagagagaccagtcgagaatcaaatgcatgatattgtatgacaagttgaaggcttgtcaaaggtcaaatagaagttnttccgaccaattcagcaagacggaagaaaacatgtgggccatcattgaccaatataaggagaagctaagtctagcggcaacccatgaacaaaggctagaggacgagtatgaaaaggtgtcggtcctgcaagcagaaagggaagcgagagaaagagttatcgattcattacacagagaagcaatgatgtggatgggtaggttcgctttcaccttgaatgggagtcaaaagcttccgagattgctagccaaagctaacgtgatggtagacgtgtactctgtccacgaggaagttcatgggctcctcaattattgtcaacacatgatcaatgtggtggcccacataattatgagtcactagggcggctgtttgttgcttaatattac

SEQ ID NO: 77035 - DNA, 407 bp, Glycine max
tactgaccatttgttttatcacatatcgcttgaagctcccagaaggtgcgcgtattcatcctgtgttccttagttccctcttaaaacccttccacagcgaccctgattccagttccactgccccactcccgcagcactttctcaatgatcagccgcttatcactcccttagcaatcctggactatcgccgccattctaaggaggacccatgggaagtgtagttcaatggaagggactgtctcatgatgagacctcatgggaggactgggcacagctgcaacaggatcatcaccttgaggacaaggtgattctccaagggccgaaggaagctgatagcaatatatcagcaccagaatgagacacagggaacatagcatacacgaatgcaggggtactaatgacaaaag

SEQ ID NO: 77036 - DNA, 426 bp, Glycine max
  unsure (1)..(426): unsure at all n locations
agctgaaattgaacaacagagactcactagatactaanatggtcataacatgtcacacggaagtccgattcaggtgcataatatatcgagacgctcgaaatagaacatcggaagctctcgagaaattccaatggtcataacttttcacacgaaactctgaatcaggcgcataatatatcgagaagctcgaaattgaacaacggaagctctcgagaaactcaaatggtcataacttatcacacggatgtccgattcaggcgcataatatatcgagacgctcgatattgaacaacgtatggtgtcgagaaattcaaatggtcataactcgtcacacggatgttcgattcatgcgcataatatatccagatgctcgaaattgaaccacggaagctctcgagaaattcacatggcataacttttacacag

SEQ ID NO: 77037 - DNA, 479 bp, Glycine max
  unsure (1)..(479): unsure at all n locations
ntgcacgtatcagtcaagtgtatggaccatgtcgtantcaaagtgctcatcgataatggttccagtttgaacgtgatgcctaagagcacnttggagaaattaccattcaatgcctcccacttaaagtcgagttcaatggtggttcgtgccttcgacggcacccgccgggaggttaggggagagatcgatctcccagtacaaataggccctcacacctgtcaagtcaccttccaaataatggatattaaccccccctacaaataggccctcacacgtctgttggggcgtccgtggatccactcagtgggagttgttccctctacactccaccaaaagttgaaattcgtagtggaagggcttctggtcattgtatcatgcgaagaagacatcttggtgagctgcccatnctctatgccctatgtggaggccgcagaggagtcattaganaccgctctccagtcttttgaggtggtaagcat

SEQ ID NO: 77038 - DNA, 436 bp, Glycine max
  unsure (1)..(436): unsure at all n locations
agctttaacatctctaggaggtggttaaccatgtatgattcagctntgatgaagcgaccatagttnttcctcaaacaaaatccaatgccaaaggttntggtttcttcaaataaagcaacatcaatgttgtgggttatgaaatcattcagaggaggaatccaccttatatcattatggctaggcggagcctgcgagtgcagtccgtttaccatactataattcttcatctctgtaacgcttgactcctctttcaatttaactcatttcccactcaagtctgctccgctcaacttacaccataaagtatgctcattctcttagtgagcatattcaccatcacatgccgatcctttccatattactttgcacaccacgctttcttcacacactttctccatcactcttcctcctcaatatctcttaatctctcatactc

SEQ ID NO: 77039 - DNA, 272 bp, Glycine max
cattttttttccttttcaaaatgtctattaggaaactttcatattaaggggcattcggaagagcttatctatgcatttcttatgacataagcactggtgtgtttgagagagcttatgaaaacagatgataacatgtccataagctgttttcagcttatttcaataagttctccagcttacaacttatataaaaaaaacaagttgaccttacttcctcattgaatatagaaaagactcacacacatgagctaacatgatatgcacctaagccc

SEQ ID NO: 77040 - DNA, 182 bp, Glycine max
ttttttttttctcaaacggagcggtgaacaaatactaataccccccccaataccagaaaggcttcccttaaatgagtcatggggtccggtcttctacgcacccgcggagtattgacagacgactcccaacataaagcctccacctgcagcaccctccaaaaaggaaaaactccctcaaacag

SEQ ID NO: 77041 - DNA, 400 bp, Glycine max
  unsure (1)..(400): unsure at all n locations
cgatatatgtcagggtttggccagcggttcgnngatanaggcgatgtcccacattatttccatgatatacatgcaacaatgatgatacagaaaatctatgcaaaactggtcatgctggcatctacctggccgcttaagtgtcaaatctttatggccatgcgatgctcaggctcacgcatcattaactctcattttaataactcaccgcttacaacattcgtcttttatactttcccattatcctgctccttatcccgtcgcattcatccttcctccgtcacctttctgctcaaactcctcctctacttcgaattccatcccaccctctttcgtcatcactactctccccctcatctctctcaacacccatctctcctcctctctcactccttctcactct

SEQ ID NO: 77042 - DNA, 117 bp, Glycine max
  unsure (1)..(117): unsure at all n locations
agaagagggaatgatgatgttcctagacanaaccgaatgatggtataaactcaacattctnncattaaaggaagaatgatccgaggcctacttgagtgtgcgatgaaaatagagcat

SEQ ID NO: 77043 - DNA, 450 bp, Glycine max
  unsure (1)..(450): unsure at all n locations
ttcatgagtctattcattgatggaaaagccgaattatatgttgcataatcatacacgcaagtcacagaattatgtttgtactataaaatacgctctgacttgtacactgtaagaatcaataattattttatcatattcaaggagaaaaaacaattagcacagcagcttacgcaataaataaataaaaaatatggttctacggctgagttacactttcgaatgaagctcatttccaacttcaagtatgcaaaggatttactaataacagaatgttatggttatttcccttcgtgagcagcagccacaatcgacatgtctgcatccttattcatantttaatttgagagagcgaccgcttgcatgtaaaataatgtctggggtcaagattatatcatgttgcttcgataattcctttgaatgaacacaatacatactcggcgagaacactct

SEQ ID NO: 77044 - DNA, 391 bp, Glycine max
  unsure (1)..(391): unsure at all n locations
atcaatatgctgggtaaagttgagaacaatctatttttgatattaaaactttgtcccagttgttgcacactttatactatgcaggcatgcagcattacatttgatgttctgctaggcagtgtcattacaatttttggtatcttccatccatatattgaagttttagactaagcaagtacttttaccagaggaaattatgtcagtgcatgctatttttttcctttntcctatttaatatgcttgcatgctcaaccatttattgccggtcaattggtagaaggattttgacaatgtatttagctgtatcttggagttagaatatgaaaaaaataagatgaagaattagatgtatttgtagtataatggaaataaaagaagagattcggtatct

SEQ ID NO: 77045 - DNA, 327 bp, Glycine max
  unsure (1)..(327): unsure at all n locations
agctgtgttcagtgtctccgtcanaccctaatctttctccacattaataantnntgggaatttcttttagaagtaatacttacattctcccttcacatatggcttgtcttcttcttcctcttcttcactgtcctaggtgcacctttctcctttctcttcttcaccatctcttccaaccaaattgctgctacaggtgcacctcttacaaaacaacgacatactaacaaaatcaatcaaccaacaactgagatccttataaaaacataaccaagaaatgagaaaatgaaacaaaaagaaaaagaaaaaaaaatcataacaaccaaaaaa

SEQ ID NO: 77046 - DNA, 309 bp, Glycine max
  unsure (1)..(309): unsure at all n locations
ctaagccgcctactaacctaaatggagatatgatattaacactctattttgtagtctaagatttattacctatcttaacaaaaatcttataacactacaaaataaccataattggaagagtttgatacaatttacacaaagtttatacacaaaagttagtcgtattcaccgactaacaattacttacctcacaaaacaattgattacactactcgattgagagcaagaaagcacttattgactaagagcaaacaaaaagatatttgggccaaagagtgaaagggggacctncccttatttataggagtt

SEQ ID NO: 77047 - DNA, 207 bp, Glycine max
agcttcaagatatagatggcctcagcagattccttatttctatgaaggaattctatcaatagacctccaatctttaatggagagggctaccactactggaaaacccgaatgcaaatttttatcgaggcaatagatctaaatatctgggaagccattgaaatagggccttatatactcaccacagtagatagagttcaattagatggt

SEQ ID NO: 77048 - DNA, 303 bp, Glycine max
  unsure (1)..(303): unsure at all n locations
acaagagcaaaaacnagaagaagatagcatagaaaagacgaacaagaagagaagaataatcaatcaacatagaaaagagctaggaaatagaaagaaaaaggtttttgaccaacgatgctgacacttgcaaatcgcaagatagaaaaggaagagacttcatctgcaactcacgtctatcgttccctccaatgattttcttccttttacccccccttcactcccctgctgtctcactccccacctcttcccttccccctcccttcttcatccctcgtatcctcatcctcccccctcttactcttc

SEQ ID NO: 77049 - DNA, 272 bp, Glycine max
  unsure (1)..(272): unsure at all n locations
agcttcccgtggttggttcttgatttgctctgttttccaacatggttgcttttaccccatggataggaaaaagacctatagaaatctagtttcttttctctaacactagtttttcatttntgtgatattatccttatatgtgcatggatttctctaaaagttatatacatattcatgcagatgtgatgttggttcgatcttgaactgacatacaaaaaggacgcttagtgcgagatacacaggccataatgtgatccttaagtcttcggttg

SEQ ID NO: 77050 - DNA, 464 bp, Glycine max
  unsure (1)..(464): unsure at all n locations
gccatcaatatatgcttacacctatgttatctgttcttccttctcccgcttttccccttcagtttgcccaactgtttgagtcaatctacgaacttcatcttcgagtgattgccggatttcttcccgggtcacattctctgttgcaaatcttttcagttcttcgtcaaatctcttgcgtgcagcttcagcattcttcaatctttcagcaagagcattnttctccttgactactttctgtatgtaacaagattgacattaattctcaattagatcccattatacacaatggaaagctaagggtcatttaatttaaacaagctctttctgttctcatataaaaaatgtcacactcttttcactttccttcctatgttcannaagtttgacaagaaacatcaaaaacaganaatgaatacagaaaccaatgaaaagttgtttcacgtgaaaacattgatttgacagat

SEQ ID NO: 77051 - DNA, 316 bp, Glycine max
  unsure (1)..(316): unsure at all n locations
agcttaagtagtgatcaaacttgctctntggaactggctttgtgaacatatcagcaagattgtgcagagtgttgatcttatgaactttgattcttctttctgaccgaatgaagtgatatctaacatctatatgcttggttctatcatgatgaacctgatccttggccaagcatatagcactaaggttatcacagtagatgttagcatattcttgattaattccgagatcatttatcagacctcttagccaaattccttccttcgcagctntagtaagagccatatattcagcctcagtagttgagagggcaacaga

SEQ ID NO: 77052 - DNA, 494 bp, Glycine max
  unsure (1)..(494): unsure at all n locations
actttaaactaagctctacacaatcttgaaacaacccagtattctgtgtcctaccatgttattgttagctctaaataaatcaaaagatttgaagtttggttgctcactgactaattcttaattgccttatagacggatatgaaatctaagctctagtattttctctttacatatacaaagtgttttgaaagcgtttcacactttacaagaatatacaaaaggctttatacaaaaataatttgaatgatagcgtgtaagttcatgtcttggttccttacagtttctagtatttataggtcttagtgtctattgtctctaaatggatagatttcttcacttgagcttgcatatgaagattgcggccattgaagcatttaatttttgtattaaatgctcatacttcttcatgttggaaaatcactcttggtagctntcttgtaggacattncaatatgaatccatatcttttgcttcaaaccatcgctatcacaata

SEQ ID NO: 77053 - DNA, 81 bp, Glycine max
  unsure (1)..(81): unsure at all n locations
ggtctgattcaacaagtagagaattngctcnattatcccttctgcattgagtactgtatcatgatataattcatactctct

SEQ ID NO: 77054 - DNA, 369 bp, Glycine max
  unsure (1)..(369): unsure at all n locations
gcatgcaagctntgatcattcttgattangtaacatgtgtttttgaaagcanaaatcctggcaaaaacaacaaacatggaagcctgctctgattcaaaagactcctgtaaaggaaaaatagtagttccttggtaaaaattcatttatataaaaccaatagtctaccagaaattgcaaacctgagaagacaatatttcccttgagttttccattaaacgatcatgaaatccttgaatttgntggtgacgctgaataagttcttcatgttgtctatgcccatattcagcaaaatattgtcgggctttcctgcaatacaccaaggagctcaacatatttacaatataatttctgaattcatatattatgaga

SEQ ID NO: 77055 - DNA, 212 bp, Glycine max
  unsure (1)..(212): unsure at all n locations
agatccttcaatctcttttcaatctcacaataaactgatggaaatgaatctggcgatcttgcagcagcttctatggcccgcgaagttagtttctcagagctttggtttccatcctgctgcttccatggtgcttggtcaatgggaaaccttgaactcatgattgngcttacagccaagttaggattttttcatcgaggggaagtcgcgtcctt

SEQ ID NO: 77056 - DNA, 441 bp, Glycine max
  unsure (1)..(441): unsure at all n locations
agcnttgtaaaccaaaagtaatagccatggacatctaccccccaatgaaaaccctcagagtggacttaaccctgtgtgctttccctaaaaaggcccccaaaacaacattatatagaaactatatatgcataattatctatatcttaatatgcacaaaggcattagtgtatcctcaccttaaaaccttaaggactgaaaatcatgagaaatacattaccttaagcaagttgctcagaaaattaaagcaatagacaggtcaaatacaatgaaaaaaaatataacttaactttgagtagcttgcagcacgtccattggtgttacttcatgatatacctacttaccaatgaaatatttaaattgtaggcactatttatctagntctttgcatcgagatcaccacattcgatcctgtacactatactgatcattatcacacgtatg

SEQ ID NO: 77057 - DNA, 307 bp, Glycine max
  unsure (1)..(307): unsure at all n locations
cgtcanactgtctctcttctcattgtgtatatatacatgttatttgaatgaaataaagntaagctgcgtgagtgatatttttcctcactacttcaaaatctaagtgaaatcaacttggatattgagagacacttcataaaagagaagatagattatggatctatttgtatggcatttacaccatgcaacaagtggtaaatattagcaccaaaggattcttcactgaccaaaacttgaacttcttgtgggcatgttgtgcacaattgatatctatgcaccagcttgagggggttgttgtctaatggaa

SEQ ID NO: 77058 - DNA, 415 bp, Glycine max
  unsure (1)..(415): unsure at all n locations
ctattagcctaggtgacatctggttaataacccgattgagatagtttggtgtggccatgactatagttctaatagcagccatgatattaaaagtccctttttgtctacctaaattcaggttagttaaaaaaaattcagttcccttctccctaatgttgatctcatgtttgccacttttttctccaatctctcttcattatctgantttatttcaatgattcaactctctccataacctgtcctgacatgttggaattntctttaacctagttagattgaagacaaggaatatcaataatgaggcataatattttgcctaaatatggttcattctatacttcaaattaaaattcgcaaacctttgatgctgctacttagagcacgggagaaaatgatcgatagcactggaaaaact

SEQ ID NO: 77059 - DNA, 420 bp, Glycine max
  unsure (1)..(420): unsure at all n locations
agctngcactcaatgtagatgtgaccagatgaatctctcgaatgtactttataatgtcacaagggatatacataaccaaaaattgactacaaattataaaggaggtctattttgttgtcaggacaacttacaatgcaagcaaatagagggttttcaaggttcaaggagaatggtttccttaagatacaaaattagttgggttgattggaacatataccaaataccagttaaggtttacatacttgattccaccgacaaagtgaggtcaaatggttccaaaatacttcatgattgtttggtagaataagttttcaagacagtactttatgataaaacaatatacttttcaatcttattagagtgagtgaacaaaagtaaatcttaattccttgcaggcagagtataccattccagcaactg

SEQ ID NO: 77060 - DNA, 476 bp, Glycine max
  unsure (1)..(476): unsure at all n locations
ctctaaccattccaatccagtcaaatcatattatttctcattcaaaccattctcaaacactcatttcataccaaacaatccactgcatatcattttcaatcaattcactgttcaaacatgcttttggtacaagcaaacaactcaaagtgctgaaattttaaataacttaaacataaaaactgaaattgactgaaattaaaataattgaacataaatcataaaataactaaaaataaactaaaatgttcaagatgcacaaatttaaatgtcctgctcattatgtagttgatcttcattaagatccagtgcttgagctatngatgaatcctggataggctgctctagctctgtgactggtgtagatggctaggtctcctcangagcaggtgcagaggatggctctagtatttgatctgtggaggtaccctccttctgagccatgtgtgcatctgcgtcgaaataaaagggctcgggag

SEQ ID NO: 77061 - DNA, 372 bp, Glycine max
  unsure (1)..(372): unsure at all n locations
agcttgaatcggacatccgtgtgagagattatgttcttttttatttctcaagagcttccgtggttcaatttcgagcttctcgatatgtgatttgcctgaatcggacatccgtgtgaaaagttataccagttgaatttctcaagagcttccgttggtcagttttgagcgtctcgatatgtgatttgcctgaatcggacatccgtgtgaaaagttatgaccatttgaatttctcaagaccttccgttgttcaatntcgagcctcttgacatattatgcgaccgaatcggacatccgtgtgaaaagttatggccatttgaatttctcgagagcttccgatgtttaatttcgagcgtatcggtatattataagcct

SEQ ID NO: 77062 - DNA, 394 bp, Glycine max
  unsure (1)..(394): unsure at all n locations
ttagagtatatctcttttatcttagtgagagtgattctcctaaattctcgagtgatgcaagaacaccctggctgtatcaaaggactttcacaacctttgtgtgttgccctcgctggaaagagtgattctttccttcctatcatctccacccttgttctttcaaaccacaattccagaaaatccacctctgcccaaaattatctcgtgaccataactcccatttcacacactcaaattaagtgattcttgagcctaaattgaatttcanaacgagaacctttcacctcgtttggaatcacctcatttggagctctgtagcttccgntattgccatatctatatttctgtacagccaccacttaacctacgttttacatcccattcatcatttatg

SEQ ID NO: 77063 - DNA, 430 bp, Glycine max
  unsure (1)..(430): unsure at all n locations
cttggtgggattgattagccgcatgtctcttttaacggatactcacggctgatattaaacttcatcgatcgtcaccaatggtctgctcaaaactaatgacatgtgtctctatctctatctctatacttcttaatttctcttttgcaccatatgaacaattcaaaatgattactcttcccatcttcatgttctctaatcttttaattagaacgatataacattcacttaattgtttgtaggattaaccacttctatttggcttcaagtcttgactttttctggttttggatctcatgctttatagcacttgaaattataaaggatatatatagtttgctttcaaattctttttatcatggaagtcanatgtgagccttatnacatctgcacatccccttaantccaaacgaagaagggaaaaagactccta

SEQ ID NO: 77064 - DNA, 408 bp, Glycine max
  unsure (1)..(408): unsure at all n locations
agcttagactgaaaaacttagtcatgatatatcttgcangtggtgttaaaatatggttgtgtttntagagaaaataatgtgctctctgcttggaaagtaagcaacttgtcttattcgtggtttgggtcaattattagaagtttaactgatttgtaaagaaaaattggaaagaaataggttcactagttctgaaataacctcaaatcaagacttcctgagagtagatcaattaagcatttaagtgggactgcgggtgattntatcacttctatcactaaaatgcaaaagaaaatggtctaaaagaaaatattactgataaatgttttaacaagtgtaatattttcctttccccaactcatccactacaaagtaccaaagcagatgttccctaaagtagtatctaactca

SEQ ID NO: 77065 - DNA, 434 bp, Glycine max
  unsure (1)..(434): unsure at all n locations
tcacccattcttaagataattaatgtctcttgtctaacacttctcttgttgacaccagttttcctattcaacggaaacttacaaaggacaatgatcatatttaaaacaaggtaaatggaataccgttgcaactaacagaggacaatgatcatatttgaaacaaggtaaatgccaacatctaactaatgttcaacgacaagggttatcactattggaaaacccgaatgcagatctttattgaagccatagatttaaagataatgggaagccattgaatntgatccctttattcctataatggtagagagaaaagaaactataaaaaaaacctagagaagaagaagatgatgatttcagaatttgtgaagagattcaataagtttttgagaaacaaaagatcaaaggaaaccatatattaatccaaagaagaaaga

SEQ ID NO: 77066 - DNA, 414 bp, Glycine max
agcttatgctgcatatatttacaatagacttcctcaacctcagcagcaaaatcaaccacagcagaacaattatgacctctccagcaacagatataaccctggatggaggaatcaccctaacctcagatggtccagccctcagcaacaacagcagcctgctccttccttccaaaatgctgctggcccaagcagaccatacattcctccaccaatccaacaacaacaacaaccccagaaacagccaacagttgaggcccctccacaacctttcctcgaataacttgtgaggcaaatgactatgcagaacatgcagtttcagcaagagaccagagcctccattcagagcttaaccaatcagatgggacaattggctacccaattgaatcaacaacagtcccagaattctgacaagct

SEQ ID NO: 77067 - DNA, 407 bp, Glycine max
  unsure (1)..(407): unsure at all n locations
gttggtttattattctaatggntgactataaatgggctgttacgagggaaaatctgcactatcacccgagactctgctgaaatacatagatgaacttncattgtgtgcaaggtattacgggttacaacattttttgttctaatatagaattgcttgacaatgagtttaccccttggttaaacataatctaggaatcanacagttgatcatcggactcaaaanagcatgtctgagggtttgtcacaattggtgacagtgtataagctatggagcactgcagttctggtaagatttagcaattgctttttgatcctgtgcactcatcatccactgttatagtcttattgttatcgcttttgaaacttcttctggtaatcttctaaaatacaacttgatcaattgatgac

SEQ ID NO: 77068 - DNA, 389 bp, Glycine max
  unsure (1)..(389): unsure at all n locations
agcttgctctaaattacattgatgnttgtatttatgggaggaggntatatgccattgttgctttaagagtaatgtcccactaaaactaactttccaaatgtttgccttcgcaggaatggccccgaggaagcttgcctcaaagaggtccaggaaggacaaggcggccgaaggaactatttccgccccggagtacgacagtcaccgctttatgagcgttgtacaccagcagcgcttcgaagccatcaagggatggtcgtttcttcgggagcgacgcgtccagctcagggacgacgagtatactgatttccaggaggaaatagggcgccggcggtgggcaccactggttactcccatggccaagtttaaccagaaatagtccttgagtttac

SEQ ID NO: 77069 - DNA, 484 bp, Glycine max
  unsure (1)..(484): unsure at all n locations
ttgcagatntggtcttcgccagtgaaaggatcgatgtgggtattataaaaaaggcananttgatcatcctactatgacgactgagaaaactggggcaaataaagagggtgaggatgagggagaaacccatgctgtgattgccattcctgtacggccaagtttcccaccaaacccaacaatgtcattactcagtcaataacaaacctcctccttacccaccacccagttatccacaaaggccatccctaaatcaaccacaaagcctgtctatcgcacttgcaatgacgaacaccacctttagcacaaaccanaaacaccaaccaagaagtgaattttgcagcgagaaagcctgtagaattcaccccaattccagtgtcctatgctgacttgctcccatatctacttgataattcaatggtagccataaccctagccaagggtcatcaacctccacttttctgaagataccactcgaacgcaacgt

SEQ ID NO: 77070 - DNA, 327 bp, Glycine max
  unsure (1)..(327): unsure at all n locations
tcccgagtatgacaaccaccgctttaggagtgctgaacaccagcagcgcttcgaagccatcaggggttggtcatttctccaggagcgacagcgtcagctcatggaccatgagtatgccaatttccagggggagatagttcgccagcggttggcatcattggttacccccatggccaaattcgacccagacatagtcctcgaatattatgccaatgcttggcctacggaggagggcgtgcgagatatgagatcttgtgtgaggcgtcagcggatcccgttcgatgcggatgctatcatccagatcctaggatatactttantgctgga

SEQ ID NO: 77071 - DNA, 483 bp, Glycine max
  unsure (1)..(483): unsure at all n locations
tttaatctcagctttttcttattttaatcctttaaattgttgttgtttcaattttagtcccattaagattctattttttttctcatttataatcctattaagtttacacttacaaggaccaaaatttgaaaaatgtaaacttaaatggactaaaaatgaacaaaaagacttacaagaatcaaaattaaaaaagtgcaaacttatagagactaaaattagaaattgaatttatagggaccaaaaaagaaaaaatattaacttacaaagactaaaaatatatttaagtcaacgtaatttatacaaattgcataaatntatattaacatgtaaattatctaaaaaattaaatattaaaattttatgaatttaaataattacactaaaataatttacatattaaactttttatgtaattncgataaattatacacaataatgtatataaataattaacatattaatttatataactttatttgatta

SEQ ID NO: 77072 - DNA, 364 bp, Glycine max
  unsure (1)..(364): unsure at all n locations
ctagagcctatccttaacanacttgtaatttgacttcttgtttcgcccaataataaaggggacctccaaataacgcccattacaagcccttctttaacaccaagcttggataagatgttttgtttcagaatttggtcaacatttctgctaaagaacactttcgaattctgcagattgatgacttggtcagaagctttagcataatcattcaacgcattcagaatatggtcacattctaccaaagctactctaaaataaatgacacagtcttcagcaaagagtaagtaagagatgatcggtgcacccctatagattctaatgccataagtatgtccttgcccctccaacttcttaataagagctt

SEQ ID NO: 77073 - DNA, 409 bp, Glycine max
acacacatcaccccaagtcttaaacttcccccaaaatcgcacttcattaacgtcgtctgtgaagttagtgaaagaaaaggatgtaatatcctccttgtctctccacatggggtgaatagacgagacgctatggaatgttctgttctgtgaagaattcttctttactacctttgcttacctcctactaatcacctttgtccattcgtcctttctaccaaggttgtcatcacaaacgttcttgttccagcattcctcgtcgcgtcttttgtgttcctgagtccccacccttcgagctttcatttgtttcttcatatcgcgtctttctggagttgctccaacaacgtgggaagatatgcatcgttctcctatctctatctctccccctctccctgctatgtctgcatactct

SEQ ID NO: 77074 - DNA, 442 bp, Glycine max
  unsure (1)..(442): unsure at all n locations
agcttccttggggccatttactaaaaagacaaactatttgggaagttagtttcaacaagaaatgctaccttcaaaacaaaaacggcattcagcatgcaacctcctccaataaacacaaacatcaatgtaaatttaaagcaaactcatgcacatatttccttacgaacatgcattcgcacaagatattctgctaactaaaaattgcactcatgcacaatcaaggcatcttcgttacctaggtcacgtatatgcacttccaagacgtatntgctacctaaatcacatgcatttcctttgctaaatttacatacatgcatactcaagggattttggctaccaaaaattgcacacatgcacattcaaggcatcttcgttacctatacatacacaaatttcgtgaggaatctnggctacccacacaataaaggtgctacattcatgc

SEQ ID NO: 77075 - DNA, 389 bp, Glycine max
tttaccagtgggacgttactcttaaagcaaaaatggcatataacctcctcccataaatataaacatcaatgtaaatttagagtaagcttatgcgcatatttccttacaaatgttctcttgcacaagacattctattaaccgaaaaaatgcacccatatacaatcaaggcagctccgttacctagattgtttacacgtatttccaaggtgtatttgttacttacatcacacacatctccttggctaaattcacatacatgcatacccaaagcattttggggtaccaaaaatttcacatgtacacctcttggtatttctactacctatacatacacaaactttatgatgaatcttgactatctacacaataaggtgctacatttcatgctc

SEQ ID NO: 77076 - DNA, 396 bp, Glycine max
  unsure (1)..(396): unsure at all n locations
agcttgtggtaaccacatgacagtgttaatgcttttctgccccncactacaatggaaagttgaaaccctgaatcctgctattggtggaaaaggtgttgtccaaccatggtatgattttcttgaagaaatgaattttgatgatggagatgaaatctctatttactataagtattatgaaaaaatttgggatatcataattaggacgcacgaggattgggaggatagtgacaacaactagactgtctttagttccaacaaacaatgttaatgtttagtcatgctatcttgctgttaacattntgctattaatttccatttccctgttaatcaactntatcattttggtgtccatgaacatgtagaanacgcttacgaaacaacccgtgcatgtgcacg

SEQ ID NO: 77077 - DNA, 472 bp, Glycine max
  unsure (1)..(472): unsure at all n locations
tatcaaaattntagaatggacttcagaagattataaacaacttttagggaaacacaaagaaaagatagattattcttcataaatttccactcaatcatgagatgactttgaaattctaaagttaacgacaaccaagcttcaccttgagaatgaggaaatttgttaagaaagatctagtctattgccagacctttagaagttgaaaaatcaattagaaggcttacaaaatgagtatgccaatactcaataaatttcatgataacctatatgaggaaaggtgaaatctattgaaagaatgttcacaagtccataagaattatgaaaacttggaggcaagtaaacataacttatgggctgaatgtgaaggatatatgaaatgctcgaaattcgagattgaatttctacgagagactctattcaaatttgttggaagcactgagaaacttaacaaaatattaagatacaacaaatg

SEQ ID NO: 77078 - DNA, 278 bp, Glycine max
  unsure (1)..(278): unsure at all n locations
tccacacagcaatgtcgtgttgctttttgatcaccttaacagtcacaatctcttaagtcaggtaagggaacttcattttaaaaaccgtgtggagacgatgtgctcctgagcctcacttgaattgtcttatcaagcccagtcacatgcataggtaagatgtattttgcatttgacacattaatttaccttgatttgtaaaagcctccctataagaagctggcccttgaccaatanggtgtgtcatgagggtctacgtagctctctggtctctacttctt

SEQ ID NO: 77079 - DNA, 421 bp, Glycine max
  unsure (1)..(421): unsure at all n locations
gctggttaatagtctaacttatgaggatcgaggtttantactttagtcttcagcatagaacacaagaacactcttagttagagaaatatctttatatgcatcaactcgtttggtagaaagacccaatgctttttacctattgttgtcaacttttaattacttgcattttctgctttttaacataaaatctaatttacttttgtttacattctctattatcaatgttgttcacacaatgcccttatttagaatacaactctgtctaataaacaagtttcctgtgttgaatactcggatcattccatctcaaatttaaatacttggcgacccagtgcatttgtcgggtccctttgatataagtgtgtataaatntaagaaaaaggaactgtgtggggaagcgaacaatatcctncattttctt

SEQ ID NO: 77080 - DNA, 450 bp, Glycine max
  unsure (1)..(450): unsure at all n locations
acacccacatttcctagtctcagtgtctcttctgataaattcttttttcctacacttatactcgccactcctttcacagccaattaacacaaacgtactccttcctctactacctgtgtttgtgtccgaccttaaaatcatcgccacaaatccgttttcatgagccacgaatcgagcccaccgcaaaacatcctctcggcactcaaatacctacaaaattcacataatttaagttttctaccagtattcattntattaaatatgtgacaaacattaacattataacctgagaagtcttgaacgcatccgaacaatcaacatgtagttcattcgcaccacatgattcttgcatttcataatccatatccgctcgttcagacattatttcatacatccactcatcttcatccatctaaccaaatcaaacaaaagatggccanntacaaaaat

SEQ ID NO: 77081 - DNA, 470 bp, Glycine max
  unsure (1)..(470): unsure at all n locations
gagttgctgctacanatgatcttgagtcacgaaaaagatttggttctcttgagaaaatntcaatataatgctaatatacattattttcttaataaatgaatgtggtggttntgtgagacagtnatatatattctcaataaaattcactcttgcttaaaaaaataaaattagttagtgattaagtgtgttgtaagtgtatcatttgatgccaagaagttaaatttggagaattggttaattttaatggaaaagtgtatatatgttgtttatgaaattgatctatttttatgtgtgaaaaaaattgagatataattnttccattaaatattcagactttcttgatntattacaattatagtntatattatatacaagtttaacttgtatttatttcttattttatgattaatcattgtaatcgatacgtgatgaaatcatcgatatcgaattctanaagagtctataatgat

SEQ ID NO: 77082 - DNA, 474 bp, Glycine max
  unsure (1)..(474): unsure at all n locations
tcttttgtttccatatcttttgtctatctttngggaagttatagttntactgagtcaaattattgtcttaacgttataagcctttgctctttaaggaaattttatcatgtaattctggtattattctatgaacgtcacaacgtcaattatgcacgttattgggtcagcttcagttttcttacattgtaacgttaaatatatagtttcctgctcacaaaacatacgagacaatacactagaaatacatatactgataaagctatcgttcaatataaaattctattgctatataaaaatgtnntggagcattaatgtttatttgttcaagaatccttcgttccacatactacggatcattttctctctaaggagataccgcataacgtactttaacctagatattcttacactcatttctagtttatntctctcctttgtataactcgttatataagtattgatgtgtatgatata

SEQ ID NO: 77083 - DNA, 481 bp, Glycine max
  unsure (1)..(481): unsure at all n locations
agcttataatatnntatattaattatacatatatttattntctaattattcatattctttcaacattatagagagtaatatcccaaaaaatgctatgcctttaggtttatatacgaagaaccttattattagttatatttatgtcaaaacatattcaaggtacatattatgttgatcaatgtcttatttttctattaaattttatactatttttttactattttataaaaatggaaaataaaaaatatacatttaatattctaaaatacaaaaatactttaatagtagtaccttttatttagtaaatataaaactaattgaataattaagagtattctcctaattttatgatatactatatgggaggcgaaatgcttcatgcctagttgttggatccttatcaagatttgaccaatttatgatgtgtgccgtatatggctgtgggcatgttaataagtgaaactctagctatattaaatat

SEQ ID NO: 77084 - DNA, 449 bp, Glycine max
  unsure (1)..(449): unsure at all n locations
aagccgtttacaactgctaggaaaactgtgttcttcctgtgggacgagacatgtgaacgagcgttccttgctttcaagaaaaccattactacaccaccgattctgagtcggcctatgcttggagtacccatactcctatacctttgaataacttacaaagctgtgtactcgacccttctgcacgaggaagggacgcataactccctatctagtgaccaaccgtatacttgaagacgccgagaagtgctcccaaatgattgaatatgtggtgctatcacttattacctcagtccgactactcaggccctacttcttgagtcattgagtggtaggaaaatgaactaccccataagctgctntgcgcagccagattcgatgaatgatgtggctggatgttaactttcaagctaacagtagtagacatccggccacatagacacattatggtg

SEQ ID NO: 77085 - DNA, 418 bp, Glycine max
  unsure (1)..(418): unsure at all n locations
agcttaagtcttcatgatgttccncatatcttctttatcttcaagctctgctcctagcttcgagctcttctccaatcttcaagtttaagtcaagcatgaaaaaacttaacacttaagaaaagataaattaatatcaccatcatcatcatcatcatcatatatcttactttataatttcactaatgctaatgcacatgcaaacaataaaagcaataaactggttctttccgaatgcttatgcaatgcaagcaaatatgcagttcatctcccctttttggcattaacaaggccaaaaagtttgaacttatacacaaaacaaaacacaatataattgaagggaaataaatcatagcatttcattaatcatgaaacagtacaaatcattaatcataggagcttctaaacaaacacttaattt

SEQ ID NO: 77086 - DNA, 450 bp, Glycine max
  unsure (1)..(450): unsure at all n locations
cacaatccaccacagaagctagatgtattgcagntataatctattgtgctcaaagtctctggatgaaacaacatcttgaagactttggcgtcatcgcctactcacattcctttaaaatgtgacaacacaagtgcaatcaatctaactaataatcttgtcatgcattctataaacaaacatatatagatcagacatcatactctaatagatcatgtttcaaagggtgaatgcaacattgaagttattgatagtgagcatcaactagttgatatcttcactataccactcgctagagataggttcttctttattaggaatgaatcggccattctacatggggtgtataatgaaagatattatgcttagtgcatgtatctcgctctaaaatgctctctacatctattaataccactttaaatcgcctacattgtcaattgttttgtatattta

SEQ ID NO: 77087 - DNA, 123 bp, Glycine max
ccactgggtctgacattttatatgacgtgcatatgttaacgcacttagattgcgtgcctagatagcctgaatgtatccatgcgtgagatcatcatgtgttcactcttcactgttaattatatc

SEQ ID NO: 77088 - DNA, 476 bp, Glycine max
gcttataatgattctattcacatataccttatgtcttataattatatatatatatatatatatatatatatatatatatatataactaaaactcagatatattggaatatgtttcaaaaataaataatataatatgaatatattaacatgatgtgtgaaatattatcgattaaagtccatttggtttgcaataatcaatttcttatatcataacacgtttcaatgtaaagattatgcctaagattagctcaagcacacattttaatcacattcaagagttaaacaaacaattctatgaaaattgaaaacacaacacatatatactaacgtcaaaaaggtgtattaatatataatacattattggctagaatatatagattttacatgatatatgaatcgaacattgatattaagtgaaatactcatctaacagttgatattctaaatcaaactctaaattaagtagttgatagatg

SEQ ID NO: 77089 - DNA, 327 bp, Glycine max
ttatgcattccaccactcaaaacatatattattccatatcatgccagttaatgtgaataaaataaatagcctattggaagcaagtttcaaaaaaagggaggaatcagaagactctatagtggtacaaactattatataagaaattgttgataaataaactgcaaggggagcaaagtttcagaaaactgcttcacctgcagcttgacatattagtccttttactattaagaagagaaaaagggtataccaaatttgacaaagttttttatgggcaagaaaaacactagggatagatagtgaattcaaaatagaaaaagtgataattat

SEQ ID NO: 77090 - DNA, 435 bp, Glycine max
  unsure (1)..(435): unsure at all n locations
agcttgntaatgttgagtgcacgtatgggaatgtattaagttaaacataaagctattgattgccgtaatcaattggcctaaaggccgaggtgagtatattaaatttcacgcgaacccttatttcgaatcaactggaagtcgatcagcaaatcttttaaattaacgaatgcgcctactctcaggaaggaaaaaaaaaacaagcaatgttgtacctaatatatagctgaattgatcatacgtatgtgtacaattagatttagtaaccgaaatctctctgtaaattctttagaaagagattgcacaataaagaatatttgggtagcagcttgatctttaagggggggagccacctattgaactacacctcgatgatcactgctcaccttcttaaaaataaaaccagatcataccctttagaacaaacctcaaatgacc

SEQ ID NO: 77091 - DNA, 472 bp, Glycine max
  unsure (1)..(472): unsure at all n locations
tacttactactactatattgaagatagagttatattanaaaaataaggataaagacacgtggggcatatgcaacatgatgagtacacgtgcaacacatgccactcatgcatgattataaaatctaagcaacaaaggcccacgggcactatttttccgagttctgtctcccaagcaataagagcaccattgtcacttcacactactttctaacaagtgaattatcttctatcgagaaaacaacgacacttatatgaagagttgttttttattgataactttttagttcctaataaataaaagatcttctactttaggtttttaaaaaagtctttagatatgaatcttttaatattatttacatcataaaaaatacagaagatcataaataatataatgtttcgagctactaataaaaatatttcaattttaaatgttctaaccaataacctaattataattagaatctctgta

SEQ ID NO: 77092 - DNA, 471 bp, Glycine max
ctcgtcccggatccttaagtcacgcggctgcaagctgaatcctagaagaaagaatttgatattattatagtaaattaatatagattaacatgcagtactcataacattaatgacgtttatttcattcactaagtttgctatctgtatttgcatggctaattgtcaccaagtatttctacttgatcaaattcatgctgaaatgccaaagtttcttagccaaatcaaattcccttgtctgtgagctctgctctggggatattattatctacaaaatattcgccactaattcccctcatttcagggtgcaatgctacataacatgttgctgctccctacaataaggtagaataaggtgaataatatcatatgttgagagcttaagggagtgaattcaattagaatttaagtttcttttgagatattaatcaagattttaaataataaagataatcttgtacattcatcaaacta

SEQ ID NO: 77093 - DNA, 455 bp, Glycine max
  unsure (1)..(455): unsure at all n locations
tgtgacattgtccatggatggttcctcaaagaagatagtatcatcagcaaattggaggatgttgattggaactctattcttgcctaccatgaaactgttgtancaattnttggacacagcttccctcatcaaacctgtcaaaccttcagcaaccaggtcaaacaaaaaaggagccaaaggatctccttgtctcaagccactttggggtttaaattcttctgttggacttccatttactaaaacagatatggatgctgatgtaaggcagccctttacccatccaagccacctctcatgaaaccccattcttctcatcatgtagaagaggaattgccaagacaccgagtcatatgccttttcaaaatcacttaaaaaccaggcaggcttcttagatctttagcctctctacaacctcatggcatcaaaccccgtgaacaattgctgccttaacaaag

SEQ ID NO: 77094 - DNA, 411 bp, Glycine max
  unsure (1)..(411): unsure at all n locations
gagcttatagatataaaataccaagactcattttgtttgttgctagatgacaagnngtgaggcccaccgagcccacacccacatgtgttggctttatgatagaaaaagaaaaggagtcggagatggagatccaaagacctaatcccgaaatatcatcttcttgtgtcccacagatgagtgtttcccctttaccttaccttctatatctctaattgagtgttttccttcttatcccttttgaaccctaagataggagagttaggaattttcattattagacttgattaagggggttattgaatatattaattaattggttcgacaggaatatacgtgatatgaatgtctggtatgcttggagttgattgaaagcatgccctgggagtggaattacgatatctcaattgcata

SEQ ID NO: 77095 - DNA, 440 bp, Glycine max
cactatatcattctgttatcactatcttatatatcatcgtcaacacgcctttaataaaataataaacatcggtgcttatctaaaaaaaatcgaaaagttcctccatgtgatagcagactaagcttttatttctttatattttctgacaatataaatttctcccaacaagatgggtaaggattttacattattctcaaatcaagtccagacaaacatgtacgtacggattgcactataccatgtgattttctctgtcggagatcttggtggagctagctccaagaggacccttccaaagctgtagaagaagcagcatcactgtagtgtttcttaattcccttttctttcaacattattagtattatattaaaagacgaataaaggagtcatttgatagtgatgaatcacgtcacatgcttagaacttacagagaaaacttt

SEQ ID NO: 77096 - DNA, 481 bp, Glycine max
  unsure (1)..(481): unsure at all n locations
ctaaaaaaattacaattatgaatattgtccatcgtctactagaaatnttgtagggaccgacaaaacctgttcatataagttaaaaatctgtaagtgcatgttagtaggacattgacccacggacactgatgggcccgtccattatgaaaggtatatagaaacagttgtttgacagtcactaaaagagctttaactatcaccatagccttaattttagttttggatgtcttgtgacagtaggcaaaaattattgacttatataactacaaattctagctgtaggtaaaagtagacattgataaaaaaaaaaaattaaagttaattaattgtttagtctttancatttttaaaattttaatttttagtttctcaaaatattntaaataactttcaatgntttgttaattntctattagcaatcntagttgttaatttaattttaagtccttctttatttttattattcaaaaattaattctta

SEQ ID NO: 77097 - DNA, 413 bp, Glycine max
  unsure (1)..(413): unsure at all n locations
agctngaaggtgattaacatatactgaanaatgactggttgctttctgtgcaatttttgcttgatcaacttccatcataaaatagatgtccccacaaacatattttgccaaatcatttagaaggtcatgcatgacaaatacttttttatttttgcttgattgttgaaagaaggaccttgatagtagatcattgaagtatagccggccaacttcttctggactcttactgcattgatcgcagtttaagaaattttcagccatccacagctgaattaaacactccctgtcaaagacataatccttggggaataaagcacagtaagcaaagcatgtcttgagatggggaggaangtggngatanctcaatgctaaagcaagaacaatatcactattctctgttttccatatctcac

SEQ ID NO: 77098 - DNA, 413 bp, Glycine max
  unsure (1)..(413): unsure at all n locations
ctctattggtcttattcatctttacttgggctatctcatatcttttatatttggtgtccaagattctgcatacacctccttcanagtaaagtgtgtagcctctctccatcatttggcccatgcttaaaagaatttcttttacgctgggaactagttagacatcatggatgagtcacctacctttatctgtctccaccatgacaatgcctttgccttttgattcaaccacactttcatttgccagtcgaactttgactttgacagactcatcaatacttttgaaaatagtctcatccttggccatgtgattgctacatccactatccaagtaccagcttcctcccttttcttttattgagtcttgagtggcgtagaacgtacattgntcttgatcatgctcctctgcaatattg

SEQ ID NO: 77099 - DNA, 310 bp, Glycine max
  unsure (1)..(310): unsure at all n locations
atataatatttctcttgagtaaagatataatatattattttcttatcgctgataaaaaaatattattttcttattctcactgaatatattntccggatctgtctctatcaactctttaaaaaagtgacactgttaaagtctcaccttaagttgaatagaaaatttaatgtgacactcaatcacttggacattgattcttgattcttaaatggagattgaacaccatgtttgctataaattctattttagtaatcgaacacatggatgagcgctccatcaacaatatgcacgttggtcttccactacttaa

SEQ ID NO: 77100 - DNA, 349 bp, Glycine max
  unsure (1)..(349): unsure at all n locations
tcttaaaaataagttgattactcatgtgaattcttgatataatcccatatctctccccctttggcatcaacaaatagccaaagtgcgtatcaaataaatttaattttaacatccatacaatgttcataaaanaaatatcaaccaaatcatgaagcaagaagcaagaaccatgaaaccatgaagcaaacaaccatgcatagataaattataaactccacatagtcaaataacatacttattcaaccaaaccatgcaaataaggaaatatattgttaaatactatagtaatattgagatttattttgataagtcactaacatctattaagtctaattctcttgttatgtat

SEQ ID NO: 77101 - DNA, 349 bp, Glycine max
  unsure (1)..(349): unsure at all n locations
catgaatgtagagtggcgagggcatcgaccatctgattctccttcctaggaacatggtgaaaggatatgtcatcaaagaattctatcaacttcctgatgtaggcctgatagggtaccaacttatgatccctggtctctcattcccctcttaattggtggattaccaaggctggatccccattgttggatcaagaggcctcagaataattaagaagggggggggggttgaattaattattcctaaacctttactaattaaaaatttattcttctaaggcttttactatgntgttaacagaataacgagtagaagagaaacttaaccagaagttaaagcggtaataaaatg

SEQ ID NO: 77102 - DNA, 116 bp, Glycine max
agcttggagagaatgatggcgacccggcgttgattattatactattataagggctacgtgggagtacatgagctcagtgaatgtggccaactgcggatggtgcgtctatgtgctat

SEQ ID NO: 77103 - DNA, 471 bp, Glycine max
  unsure (1)..(471): unsure at all n locations
tacgagagcanacattttggaaaatagttttacccaaggaatgctactcttnannnacaaaatggcatacaacatacaaacatcaatgtaaatttagagtaaacttatgcacatacttttttacgaacgttcacttgcacaagacattcttataactaagaaaaatgcacccatgtacaatcaaggcacatccgntacctagattatttatatgtacttccaaggtgtatctgttacctacatctcatgcacttccttgactaaatttacatacgtgcatactcaaagcatttggggtaccgaaaattgcacatgtgcacattccggtatttctaatacttatgcatatacaaactttgtgatgaatcttggctatctacacaataaggtgatacatttcatgctgtattcaagtggttttgctacctaaagccgcatgcaaattcaccgatattttctttgctgactaaa

SEQ ID NO: 77104 - DNA, 250 bp, Glycine max
  unsure (1)..(250): unsure at all n locations
agctttataaggatcctatccaggatccacaanttccctatgatttacaattgaatttgtagataattcactaagtaatgggtaattcagggatggatgattgcaagttttacgtagctccatacatctgttatttaaagtcttgtactcttttgcctggtaatgaggattctttcgaatcttactgttctcaccctcaggatacagactaatgggaccagttctcttttatcccatcttacactcctac

SEQ ID NO: 77105 - DNA, 375 bp, Glycine max
  unsure (1)..(375): unsure at all n locations
acatgcaaatggatatacatggagcattgtgccttcacattttatctcttgaataagaagcaagagttctggtaaaaagttgtgattggctgtgcctcagaaaatgaccataaatgcatgcctgtccatgggattaagggtcgaaataatcattagttattatttgtatatattgttgccggtgccacttaatgttacttatttttgcactttcttttaaatntactttgtggttggtgcgggtgcagatttggaaacggttgattcagtcacattgaaattatgttaataagaaaaaagggtaacgccttacaaaattgtcaaattttatgtatgtactttcggctcgtgtagccactgtctgtacatatacta

SEQ ID NO: 77106 - DNA, 391 bp, Glycine max
  unsure (1)..(391): unsure at all n locations
ttaaagcaaaggtggcatataattctcccnccacaaaacaaacatcaatgtaaatttagagcaagcttatgcgcatattttcttacaaaacgtctccgaaaaaaatgcacccatatacaatcaaggcagcttcgttacctagattatttacacgtacttccaaggggtatntgttacttacatcacacacatctccttggctaaattcacatacatgcatacccaaagcattttggggtaccaaaaattgcacatgtgcacattttggtatctctaatacctatacatacacaaacttcatgatgaatcttgactatctacacaataaggtgctacattttatgctctgttcagttattgttccctaagccgatgaaactaagatattttc

SEQ ID NO: 77107 - DNA, 168 bp, Glycine max
gggaggattttttttttaagcacaaaagggggggtttttttaatacccaactagtgctagtatagatgtttgtgaatatgggatggctggaaatgtgaactaatataatttagattaatatattaagtatgaaatgaggaaggatggattagggtatgaatgatgtat

SEQ ID NO: 77108 - DNA, 337 bp, Glycine max
  unsure (1)..(337): unsure at all n locations
agcttcaacaggactgagtgcgaactatttgttttctctttctttcatcgccacagatcaagcatcagagtttaacagagggagcttggtggcacagtcatttaaccatcaaccacttggtcaaggagtacatgcttcacagagcgctggttctcaaccggccaaggacaagtttgagacaaaatcgacaagttgggcagatacactaagcaggggggtggttaatttgaatatatcacgacgngagtgctgtgcttataccttctcaaactattttcaaagagtgatcttatctggatgaacactgactttttgagtagtcacttgcagcttaaag

SEQ ID NO: 77109 - DNA, 423 bp, Glycine max
  unsure (1)..(423): unsure at all n locations
ctattaaatgaagatacatgaatagttgtatattagtanttattaagcttacatatgaataggaatatattttcttgcattgtcaggtagctcggcaatagtagagtgagttgtttggactatttgtagtgttggatatgtccacctaacttaaaggttattcatttttctcaagctgcatttgaggttttggtggtgagctgaatatgatgtttcagaactgtgttaatttggttgatgtttgggtcttttgaatggcgtcaaatgccagatttgctgtggtttattctctcatattttgtaagacaggctcttcttagcttaattatgggcttcagctcatgggttctcttagtgcattccttagaaaatttcgcacagcccttatctagactcttctgggcttgcaacttgcttcttgta

SEQ ID NO: 77110 - DNA, 430 bp, Glycine max
  unsure (1)..(430): unsure at all n locations
agcttataagaacgaaattgcctaaatcatttccaaatatgcatgtgaattaggaagcatcaacaagaatcaagccaaggctattgtgcaagcaatggggcaaaacacaccaaaagattatgatgatggattgctcgaattctcacanaggtaaacttatcactttcaaattgagatttcaaaactatcatgacatgtaaaggaaaaacaaggatttcaagtcacaaaatgtcaagagacttttattttcagaacaattacccattacttgaacatatcctataattcaaagacaaacatgcaaatttaacacaacacaactaacaaaattaaactagaacccaacaaaactaacaaaattaaactaatttaacacaactaacaaaaccaaaaccatagaacacacttcccncccatacttaaacaatac

SEQ ID NO: 77111 - DNA, 445 bp, Glycine max
  unsure (1)..(445): unsure at all n locations
ntcacctttggtcctcctcatagttggtgcatgagatttcatgctctattntcatctcccactccaagtaggcctccggatcattctttcctttaaagggaggaatgttgagtttaataccatcaattcggttntgtctaggaacaccatcattccctcttctcctcctttcttcttcattatgatctctgttctccatttgatccaacctctcatggagcgcatcatctcgttgtttcattaacctctccatatgttgcatcaaagcttgcatttggaattgcgaaagcccccctccatcaataggatttgctcctgccatctcatacaaacaaatcaaacgtaacaagacacttatatgtgttcgttgaatacctcccccactcaagtgtatcacaccactatggcttttctctaatgaatcactccttccctttacctctct

SEQ ID NO: 77112 - DNA, 310 bp, Glycine max
agcttctgtttcttcgaaaagagattgttgaagttaagagggaacaacaagtggatacccaaatcacctaatattccctattacaagagttaggcctcttagaagcaacataatagacaggaaagacggcgagataagtagagactgcatcaaaaaaaaaataactcaatgaagccatcaatggagatgaaattctaactgataatgccaacagagagcgaaggagatgccagagagaaggagacgcgagagagagggctctagagagagaatggtgaacgagagagatagcgcgtttgtattgtctatc

SEQ ID NO: 77113 - DNA, 364 bp, Glycine max
  unsure (1)..(364): unsure at all n locations
cgacactgcaagntctgcagcaatctcaaggtgctgtttattttgaaaantaaaaaggcaaatatcttatcactaatatgaagntactagtaagaccaaacaataatcacaactcttaagtaaaggtaatacattgctccaaccaagaagaagtgcagtcatgagatctcccgttccctacaaacataagaaaatagttaaggttctagttattgaatgtttgaatctaaacagaatggattgaagaactttattgaataaatttatacgcttggtttttgaaaattttcttgaatgaaactttttcctattcattctttgngctttggataactacttactgcctaagaagcaccagctaaac

SEQ ID NO: 77114 - DNA, 197 bp, Glycine max
acctggattgtgaaaatggaatacaaattgcagaattgttaatgatctctagaatattccctttacacaaaatgacaaattccgttattagggaaccggtataaataaaagcatttgtataccatcgaggggcatgaatgaatgaaatagcagatttcttaccttagctctctttttctctttttctttctggggtg

SEQ ID NO: 77115 - DNA, 404 bp, Glycine max
  unsure (1)..(404): unsure at all n locations
tataatctaagctagcacctgaatcaaacactcaataacaaccgtgagctggtataggatgcgcttggcaggctattaacaggaatggggccatcacattttgtgactttatagagacacgttgcaagcaaatgaaaactagacttcctgatgaagttgcatggagggagcttgtgacttcttctttgacggctntacgccgctcttctcctatcttccttntcttctgagatataggtttggcatagggatagatggctagttcgtggaatattatgccgggatggattcccagcatgtccgatggctgccatgcaaataaattccgatttatctttagcatgtcagcgacgcaccgatgctcaagactagtgaggctcttactcgatcccgcgacactaccc

SEQ ID NO: 77116 - DNA, 241 bp, Glycine max
  unsure (1)..(241): unsure at all n locations
agcttgtagccattaaaagagaatgagcatgttatatatttatgactgaaaatgttagntagtttgtcagattgattgtgaaggaatgcattgaccgtatctcggtgagagtgtgatccttaaattntgagagaaaagactatcatttagtactgatttttgcatgaatctctaaagtatggactgaatgcatgaaattgaggatgatgaaggccatgttcgattgtgatagccactttat

SEQ ID NO: 77117 - DNA, 123 bp, Glycine max
ttttctagccgctgcgcgccagagaccggacgacttttttccaagagcgaacaatatgcgtattacacgcggactggaacccgcgaaccactaacgctgagacaacccttcgcagctgggaaa

SEQ ID NO: 77118 - DNA, 312 bp, Glycine max
gcttggaattatgatagtgttcattgtaaactttatgaaataggctgaatacctgtgccaaagagaaaaaagatgcaggggtgactataatctttctaatgatacatgaattggaagtactagcgatggatgaaaatatatgattaagggcatctagaggtaaatgatttctaaaattctcattcggatataagcacaaaaggtgggaagcaacattcaagctgtacactttccaaacataaaactattaagtcctacactgcttgcttcaattctcgggaagctaactataaatctggtttacatctttat

SEQ ID NO: 77119 - DNA, 392 bp, Glycine max
  unsure (1)..(392): unsure at all n locations
acactattaaactaagctcatgggctcttatctaactgtagcacttcaacactgcttttttatttaccatatttctgagagtaaattatggcctgnacagagaacaatgtggagtctaatgatggctgtgantaaacattggagatctcaaaagtgactgttttcaagaagagtccacaatgttgcaaanagtcctttacactctgcgacctangaaaggccaatatctgattcagttgatgatctgttaaaagctgntgcgtactattagcaaaatagtaaaaagccaagtcttccttggtttcctggaagtcttattcttcatcctgaaaatcccacaatgaaatcagtctacctacgcacagttgtactccatagaagtgcataaacta

SEQ ID NO: 77120 - DNA, 152 bp, Glycine max
  unsure (1)..(152): unsure at all n locations
gcttgtagtggagtgtcattctcagcttcagatatatctgtctacatatatatatatatatatatatatatatatatatatgcctacctgcacatccatctttgaggntggtgcaacattactcactggcaccatatcatgcttcatacacc

SEQ ID NO: 77121 - DNA, 422 bp, Glycine max
  unsure (1)..(422): unsure at all n locations
tgatcctttcaagcaacagatacaatccaggttggaggaatcatccaaatctgagataggcaagtcctccacaacaacaatagcatgtccctcctttccagaatgttgttggtccaagcaagccatatgttcctcctctaatacagcagcaacaacaacaattgtcacaacaaagacaatcggcaactgaggctcctcctcaaccttccttagaagagatagtgagacaaatgaccatccagaatatgcaatttcagcatgagacaagagcctncattcaaagtctaacanatcatatggngcagatggctactcagttgaaccaaactcaatcccaaaatttcgacaaagtgccttcacatactgtgcagaatccaaataatctgagtgcaatcaccttgaggtctggcaaccaaatcaag

SEQ ID NO: 77122 - DNA, 324 bp, Glycine max
  unsure (1)..(324): unsure at all n locations
tgcaagctttcattatggttcaaaattcattttttattataagctgagatatcaagaattgatttcttgctcatctaaaaatttgtgtagcttcatcaaggaaggngggtttctcaattcttgaccctaatgtgtgtctggnaatgaatgagtttcgatgtcaaaattgtagtattgcttggctggattgcgtgatgtgtgttctctaaaatttaaggtaaaatgatttcttgcgatcaaaacttagggtagcctaaatttacctaaacagagttctaataaagtatgaaaaacaagttaagaacttttttagacttactgtcc

SEQ ID NO: 77123 - DNA, 383 bp, Glycine max
  unsure (1)..(383): unsure at all n locations
aaaaacaagagcacgcctttgctttgcgtaaagaaaagcttactaaggcacttggtctaactcttcctgactattctaaaacttttgatctacaacgtgatgcctctggagtaggagttgcagtgtattgttacaaggaggtcaccctattgcttatttagtgaaacacttcatagtgccaccctcaactaccccacctatgatatagagctttatgccttaaaaagagccctccaaacttgggaacattaccttgtttccaaggaatntgtcattcatagtgatcatcaatcacttaagtacattagagggcacagcaagttaaacacaaggcatgcacaatgggtagagtacctagagcaatttccatactgtatcaaata

SEQ ID NO: 77124 - DNA, 177 bp, Glycine max
  unsure (1)..(177): unsure at all n locations
agcttgaccaatctcgacccaacccgngttattgnctgncattgagaacaagcgacgcacctgaggaggcgagctcctggcagtcaacacataaaaggaaaacaagaccacagagcacggaggcttgtggtggctgaccagctgcgaaatttgcgtaatatgtggatcgtgccctct

SEQ ID NO: 77125 - DNA, 93 bp, Glycine max
  unsure (1)..(93): unsure at all n locations
gtcttctttccgcgatgcttcttttcatggccgccttgaggggcttatagcctaaaccatacttnccacgatttccttgggtatttatcaggc

SEQ ID NO: 77126 - DNA, 300 bp, Glycine max
  unsure (1)..(300): unsure at all n locations
agcttggttcattacatgtacttaatgagaggcattttcagccagaactgagtaaaagaggtaaaagattcacaagtgataagtacctttgctctgaacttgaaattaccatatataatagaagatcacaaaataatccctattatctacgttttagggccggtgctgtgtgctttgtggaagagncctactcatcccccataaaaagcaaccctatttgcgtcagcacaatcattctcattcttaattcaacattattatattcgtcttcctacacttacaacaaaccaataattgact

SEQ ID NO: 77127 - DNA, 363 bp, Glycine max
actttaaactccgctttaaagacagggatgcacttttaattgctgaaatgttcatatctcatggaatcaattgcctaaggtggttattgattacaggtttagacagagagtaggactttatgtcttcatagaaataatcgatttgccaacttcgtagttgattataggtttacccataaagcctaaatatctgcctcagctcgaaataatcgattacatgatatgataatcaattatcatgcatgctaaaacaaaattttctagaatgaaacatgctaaagtgatttctatgaacgttaaatgttcatgatgtaaatcacatgtactaacaaacaagcacacaaatgtaaatgcatatgtaca

SEQ ID NO: 77128 - DNA, 471 bp, Glycine max
  unsure (1)..(471): unsure at all n locations
atactcacgctgggagaatggctagacatgatacatgtcaggagctgggtnggttcattgataaaagggatgccccacattatttccatgacacaaatgcaaaaatgacgatttggaaattttatgcaaaactggttatgcatgcacctatgcggacactcaagtgtcaaatttttatggtcatgtgatgctagggctcaggattcatttcctctattttagtcaacccaacgtttccaaaatatgttcttttatcaatttgtgcattaatccgagtccattatgcgcgtctgggaaaatcttcacagcattcaaccttcaggtgtatacacantttttcaaaaactagttatgatcagtgaatttttccaaagaaaagttggaagtcatctcttttcaaaagcatgttggtttttcagcttgacaacttatcttttcttctttccccttcttttttttttatcattatca

SEQ ID NO: 77129 - DNA, 155 bp, Glycine max
  unsure (1)..(155): unsure at all n locations
gcttctttactgcanaattccttcccggattgctgntgtgctgngattggaattgtcggtggngcgagattgtgtgggagccgagttttgacgccgagctctttgtggttgagcaggcaatctttgttggacgggcacccgatcgcaagggtctc

SEQ ID NO: 77130 - DNA, 186 bp, Glycine max
  unsure (1)..(186): unsure at all n locations
ggaggaagggcttggaaggcctaagtggaccagaatgctatctacacnccccttcttactaaatggcaccccttctattattttgggaatcctttttccgtaacgttagcaaaccatatgaattccatatcgactcttatatatactaccgacggctacaaatgcttaacgaaaatcatccgctcc

SEQ ID NO: 77131 - DNA, 374 bp, Glycine max
ttagagtcacctcggggcgtgcaagcttgtgaaatgtctctcaatcaagttcctgtgaaaagaaagaaagtataatggttatgcgtgtttgtttatattctgcttcatctctgtatatcatcacaacttcagaggcttggttctaggattcaacttccaaaggcttacttactctaatatatctctgattcaaggtgttctgtgagttttcttggtttagtctgaggctttgagctttgtttgatagatatgccaaaggcaaattgcagtttctaatttgttgaaactacaaagattgagtttagaactgatagaagagttaccatgtgtatcaaactagcattagaattggttatgggcgctcgccttccacg

SEQ ID NO: 77132 - DNA, 444 bp, Glycine max
  unsure (1)..(444): unsure at all n locations
ntaggcgaccaactntgatatcagttgtgtaaaanaagtcacattctgttaactaaaagatcccacanatcactattttctttaaagtagaaaatcctttctcaatttacgttttaagcttcattttatgttaggctgacattgaattggtgctcatagaatattaattagaatattntaaaaaaattattatataaatcacacgacattataaaaaaaattatgattaacataatttttcatctttcaataaaaatatttagactntaattnttntaatcgatatccttaaaataataattgtgatttggtatttaataaaaagataggtgcagtagttgtattttgtttgtagccataagtttgaaaatattatagagtatatgaaagggagctaaaaggaaagagggtaattgagattgatngaatggaatgaggtgagta

SEQ ID NO: 77133 - DNA, 132 bp, Glycine max
  unsure (1)..(132): unsure at all n locations
tactcagctattcaataatttatggtaagtcattatgagtctattattcnatcnatctttatatctatcaatctattcgactgttatttgtgtaggaacaatatccattcaagacacgctatgattgtaata

SEQ ID NO: 77134 - DNA, 385 bp, Glycine max
gcatacttaagaccaaaacttaatccgcaaatccctcttgtaagattaagtttcaattctgcttcattcaagttctaaggcaacaatacattttccaatgttaaaatcacctaactaggcacacaagtggttgatcatattaagagcatacaaaatttaagtactgaaagaagcattgaacacaagaaacaaaatcaattagatatgaaattaattacatcagctgttcattagaaatccccaacaagggtgtttagcgctagccaaccattacagacgataccctaacaataataagcttacaaaacttaggtatctctgcaaaagctgctcctctttctgcctccagagctcttttcccaaaataggcatagtggtgtgttgt

SEQ ID NO: 77135 - DNA, 216 bp, Glycine max
caatcacacgcccccatgcaaacagtgtgaaataggaatttcaattcagaatggatacttaataggaccatgcaaaaatattttatgattacactggtgaatgatgtagaaagctgattcttctaaccatgagagctggtatggcggcataatgtcaatatgctaagccattatgtgcctacttgttcagacgtgcactacgctaactatatgaat

SEQ ID NO: 77136 - DNA, 377 bp, Glycine max
  unsure (1)..(377): unsure at all n locations
tgcgagcttagataaaaacattgaacgcatgacaatattctcttatatataataaaaatatttacgtcaaggctcagtataaattctcaacacaggagtttagccttccattacaagggagtatctttacaaataggagaagggtttcagagaaaataccagattacaaagcaatggggatgtctcctccacctctacctccacctttaagaacctagaaaataactctaaaatctataatctacctaaaagttaggacctttgctttcttgctcagctnttcctctgttctctacacataattcgcagtcaattcagacctctgtcacgtcatcacgctctttctcaattatntatgtgcaaatcangcttaaaaa

SEQ ID NO: 77137 - DNA, 427 bp, Glycine max
tagcggcatacaacggctgaatgtaatgaaatggataaactacgatcaaaaaggagtgaggaaggagaaacaaactcgatgtttggaggcacagttagtcgtgaatggattcacacaccttatgatcaatttaaaggataaaatactgatagaagtgaatcataagacctgacaaggagagtgaatttcactagaatattaaatatcaataacactttgtaattaaaaatgagttgaccttccaccaacacggtctaattgatgttatttcatatgagtgattgatccttacttactatggaccgcgtggggaccattactctcaacgaatatatatctctataataatatttgagattaatcattatttacaatatgtatgtaagaactttatactatgatgaacttatgaatgtctttattacac

SEQ ID NO: 77138 - DNA, 222 bp, Glycine max
ggaccttaagcgactgcggctgcagctgattatactgggtcggtcactttctgtttctacgtccaacccacttgagatttgcggtctctttgtaaaactccttttacaaagtctgaaccacacagggacaacccttcccttgtgttcaagaatcctctacaacaagagacccacggtctcttaatcccttttcagaaataagaagaagcgaagaagaaatct

SEQ ID NO: 77139 - DNA, 467 bp, Glycine max
tcaggctgttcaattgcttcaaattgttgcacagaatggtatatgtccatgtggtagtcggcagaggagcataaaccagagtctggcgataggtgcagattttttattcatggccaattgggttaccaggttaaccaaggcatctagtttaccttcaagcttcttaatctcagctgatgaagatgaattcgtggctactttatgcactcctctaatgacaatagcatcacttctggcactaaattgctgggagtttgaagccatcttctcaattaaatttctggcttcagcaggggtcatgtctccaagggctccaccactggtagcatctatcatacttctctccatgttactgagtccttcataaaaatattggaggagaagctgatcagaaatctggtggtaaggacaactggcacatagtttcttgaatctctcccagtattcatataagctctctccactga

SEQ ID NO: 77140 - DNA, 486 bp, Glycine max
  unsure (1)..(486): unsure at all n locations
taatactcacgctgagataaggaagtgttgaagggtgaaactttctgcttttattgtttaccacagagcggnacctggagatatgtcgcgggggtcaggagaccttggggacgtcaggtggggtgctattgcccaaaaccaagcttgaccaatcccgacccaacccgggcatagtcggtcagtgagaacttgtgatgtacctaaacaggcgagctcctggcagtcaacagataaaaggaacaaagactacaaagcaaggaggcttgtggtggctggccagctgtgaactttgatcgatatgtgggttatggcctctggtaatcgattaccaagggtgggtaatcgattacaaggcttaaaaatgaagacaggaggctaagatggtctctggtaatcgattaccaaggggtgtaatcgattaccacgcttgaaaacgaagtcaggaaactaagggagcctttggtaatcgattaccagcctgtgtaa

SEQ ID NO: 77141 - DNA, 371 bp, Glycine max
  unsure (1)..(371): unsure at all n locations
agcttatgaaatgaaccaagcatttgatgatgccttaagcctaagtgatggattcaagagttcaagatcaagcatcaagaatccaatccaagattcaagcattcaagagaagaaatcaagaagccataagtcaagacttcatatatgataagtattaaaagaatctttcaaaaaccaaatagcacacgtttgttttacaaaagaattntctcaaattttctaaagttaccagagtgattattctctggtaatcgattaccagtgaccagtttagttttcaaaatattntccaatggtttgcaactttncaaaataattntcaaatagtgctatatgatacactatattagtaatcgactacaagtgaatct

SEQ ID NO: 77142 - DNA, 481 bp, Glycine max
  unsure (1)..(481): unsure at all n locations
cctctacanaggagaagaacaagtaaagaaggtgaaatctatactgatgaatgcaatacaacagtcgcaaatagaaatagttgttttctccaaaagctatactgaatctactttgtgtcttgaggagcttgaaaaaatcattgaatgcaataaattntaaggccaagtacttgtgcccatattttatgatgttgacccatcagatgtacgccatcagaagggtgcttttggaagagcattaaaagaacttgcacaaaacaaatattcaagagaccatgcggcagaagtgttgttgaggtggagccacacactcagcaaaactacagacttttggggttgggatgcaagagagcaaggttgttagactcgtgattctacgtagaatcgtgaagacttcgtaaactcgactcgtagaatcgaatcgtagaatcgtaagagtntactcaaataaaaaaaatatattaataacaatacaagtgag

SEQ ID NO: 77143 - DNA, 469 bp, Glycine max
ctgcagctgtgtaggaacagggacaagatttttcttctgaatttattgcaagatggtgggaatttgaacggtgcctaatatcattctgtttgggaaacatggaatgagtttgggatggtatcatatgataattccataataagctattgaaattaatatatatgcttccactaatttgtctcttggcaaagttatcaagcatgcaatgaaaaagatgattacagttgctcttacaattttcgttttcaaactcaagttctgtataagatgtaaacaatgttatatggataacatgtgtcctttagagtaagcattgacttggatcaataagtgtgcagatcttctttatttgattgaagatgggcattaccaagagattcatgctctgattctaatcctgattttttctctgtagagctctgctatgagcatcaacgtatcggatatgttcactcaatgactctgttga

SEQ ID NO: 77144 - DNA, 481 bp, Glycine max
  unsure (1)..(481): unsure at all n locations
tatctcatgtcagacaccctaatatcagcagttgcaaacaatcacagtttacttggtgccaacttaaagtggaattaaacaaggtataaacttaaagttcataanaaagttaaataatgctcaaaataggcaatcctagcttaaattntaccctttccttgatgtcacccaaagtcggcaagtacaacttatagaattcctctctgaatgcatccacaaacctaaataaagtttagaaaccatcaagaataagacaattagaatctggttgatttgtataaatttaagggacaacaagatacatctactatattatagtatnttcacttttaaaggactaaagacgaattattgaccacaatagatatattagcattnggtatatcactaactcgtgntacttagtttgtctctcaacttgcaattacaacttcattgcaactcaacatttgtgtaggctntaaatacctgatacagtaac

SEQ ID NO: 77145 - DNA, 303 bp, Glycine max
  unsure (1)..(303): unsure at all n locations
attggcggtgccacctgtgctgccaggtctttccacgcttgggtgtattcactgaaggatacatgctccttttagcacatgttctataggtgcatcttatccagagccatattagaattatactgatactgcctaaccaaggctaccattaggtctttccaagaatggacttgggaaggttccaagttagcgtactatgtaacagctaccccaataagactttcttggaagaaatggatcagcagcttcttatctantgcgtatgcccccatcttccgacaatacatctttagatggttcttg

SEQ ID NO: 77146 - DNA, 436 bp, Glycine max
  unsure (1)..(436): unsure at all n locations
ntacgaanagcttgccactggagctgacccatcaactgccctaactcctttagactggtggtccctaggctcttgaccttgacttggtagaacctctctttaagtgaaggcatttgacttgatcccatgttttactaaagtgaacaaaaatcggtgcaaatcaaaactccgacatctatcatgggtggaatggatgaatgcatgaagaaatgcatatgacatagatgcaatttatgaatacgagagcccgggaaattgtctccgtatttaagaaggtggcacggaccctccgttggtttgccaaagaagggggatcaaaacagaatccgtgcgtgatgcatatgcgaaaggcgcaacacgggaatgtacagtatgacaatattcacaaaatataagcanaagggtacgtgacacttatgcatggcagtgtgaaaat

SEQ ID NO: 77147 - DNA, 341 bp, Glycine max
  unsure (1)..(341): unsure at all n locations
tgcacgtggaccttcctctagtaattctgacttattgtagcctcctatccctcttncattcncacctagagcaattccaaaaaaaaaaaaatggaagaagcggaaaaggagatcttggagaccttcaggatagtagaggggaacatacctctactagatgccatcaagcagattccaagatatgccaagtttctaaaggagctgtgcacccacaaaaggaagctcaaaggcaatgaaaggattagcatgggcaaaaatgtgtcagtattgatacgtaaatctgttcctcacattcctgagaaatgtacggaccangcactttctgtataccttgcattatt

SEQ ID NO: 77148 - DNA, 444 bp, Glycine max
  unsure (1)..(444): unsure at all n locations
cgcttggggggcttctatggaggctggatctttgagcttcaatggngtcctttaatggtgattttccaccatggagatgcagcggaagagaaaggaaaagaggtgagaggaggcgccatccattaaggaataagccatggaagaaggagcttcaccaccaagatgagccttggataagaagcttggagatgatgcttcaatggaggaaaagaaagagagaggggggagcacgaaattgaaggaataaaagagggagagaagtggaactttgaagtgtgtctcataagactttcattcatcanagttacaactagtgttacacatgcttctatntatagactangtagcttccttgagaagctntcttgagaaaacttccttgagaagcttctttgagaaaacttccttgagaagctagagcttagctacacacacctctctcat

SEQ ID NO: 77149 - DNA, 387 bp, Glycine max
gcatgcaagcttgtactcctctgcaccaccataatgtacctatttacttctaacatgaagggttggggtcgtataaaatagttttcccttctgatcattctaatcaacatgaaagaatgttgaaggattgggtcaaatttatggtcatagctgtccctcactatcaattgtattgccatactcaattttacacaaccaaaagagagagaaagggaaataatttctcaaagcatcaaaacctttaaattttccaaggataccatagaatttcttcgccgaccaagacaacgacgactccctccactgcttctacgtcaaatacgtcaaggaaatgccctactacatctccgtactccaaatcagcgccgacattagctctgccgacgc

SEQ ID NO: 77150 - DNA, 374 bp, Glycine max
ctcagcttggtagatatccttggagacttaagggtgacttctatatctgagcatgataaaaccattgaaaatatccatatcaggattttttgcacttcactaatttgatcatggtgattggttagggacattgaatgctaatgagtgcttgttgactataatgccagagacgtccctggattatcatttaacaggacagcaagaaggtgggccacccactcgtgctttctttggtacaatggtaactcttttagcacaatcttccaacaaatatgttgaactgtatcacccgctagatgataagataactgctcatgcatatccgacttatttgatattgatcattcacacaatcggtgtttcatgctaacctt

SEQ ID NO: 77151 - DNA, 398 bp, Glycine max
actcagcttcttatccaggctcatcttggtggtgaagcttcttcttccatggctcattccttaatggagggcgcctcctctcacctcttttcctttgtcttccgttgcatctgcatggtggaaaatcaccattaaaagaccccattgaagctgaaagatccagcctccatagaagccccacaagcaagctgtcatcatggctggatttgtgaatcaaaataagtcttaagctctcttgaattgtgttattcaagataattaagcataagcaaacacaaattgtaactatccaagccttaagcaacataaacactactcttgatttctaagttgaaatcgctggtgctggcagcttgaacatacgaacttgtataaattactgggaatcggtcactacg

SEQ ID NO: 77152 - DNA, 271 bp, Glycine max
  unsure (1)..(271): unsure at all n locations
ttatttaattgaagtttgaaataaaaatttgaagtttgagtatttntttgtataaattttttagttggatggtattaatttaacattaattatttataatagcaactaaaatgtgtagtttgaagtttatantttgaagtttatattctgccttaaaatttgtagttcaaagcgtacaaattttaagttttgcatgnataattaatttttagtacataaattatatctgagtatgaggagtatttttaatagattgttatttgaagtatat

SEQ ID NO: 77153 - DNA, 451 bp, Glycine max
  unsure (1)..(451): unsure at all n locations
gatttaaatacattcttcacggtcaaaaacacaattntctcatccccctctctcaaaactccaccaaaccaccctagaaactcctcctccaccacccaggaccatcggtagccaccacaagccactgttgcttgccgccaaaccaccatacggagaggaaattaaaatgcacagcggaaattaaaagagtatggaagaaggagacaaacacacaagagttttatactggttcggtaacaacccgtgcctacatccagtccccaagcaacctgtggtccttgagatttctttcaaccttgtaaaaatccttttacaagcaaagatccacaagggatgtaccctcccttgttctctttgaacctagtggatgtaccctccactagaactgatccacaagagatgtaccctctcttgttctcagtcaataacccaagtagatgtaccctctact

SEQ ID NO: 77154 - DNA, 468 bp, Glycine max
  unsure (1)..(468): unsure at all n locations
gcttcttgagatgccttttgataatctcactagatgctttggtaaaatccacaatctcattagagccatcaacattcaaatagtcaatgaatcttgaggcaagtacagcataatgaaattcataatctaccagatanagactcttcaacataatgtcttcaatcaactatacccaattcatcttaatacctgatttcagaccatcaacaatctgcagatcatcaccttgtacccgagcatcattacttgacctcggagtgtgaatgtaggtaatgaggtatactagtattatgtcctctatagtcaatccaccaacttctaagtgattcctcaagttcattggtggatcaagaaagctttctctatatgtctgcatcttgctgtacccattagtcatttcatcgaacttgcagactccacccatgttcagaaccgactacttcttccacacagtagtgtcaatgacta

SEQ ID NO: 77155 - DNA, 472 bp, Glycine max
  unsure (1)..(472): unsure at all n locations
tagctcgctaagcgagatctgcagattntaaatacattcttcagggtcaaaaacacaattttctcatccccctctctcaaaactccaccaaaccaccctagaaactcctcctccaccacccaggaccatcggtagccaccacaagccactgttgcttgccgcccaaccaccatacggagaggaaattaaaatgcacacgcggaattaaaagaagtgggaagaatgagacaaacacacaagagtttttatactggttcggtaacaacccgtgcctacatccagtccccaagcaacctgtggtccttgagatttctttcaaccttgtaaaaatcctcttacaagcaaagatccacacaggatgtaccctcccttggtctcttttgacctagtggatgtaccctccactagaactgatccacaagagatagaccctctcttgttctcagtcaataacccaagtagatgtaccctc

SEQ ID NO: 77156 - DNA, 320 bp, Glycine max
  unsure (1)..(320): unsure at all n locations
gagcgaacaaatatagcaaaaacacttacaaaaatatattgatgttaggtgtgaaataacctagatatgcatgtatgtaaagcaaaaaacacttcacaaaatatatatatgtatgtttatgtagaaagataccttagatatgcatgtatgtaagacagaaaatacttcacaaaatatatattatgtatgttaggtagaaataacctnggatatgcatgtatatagcanaaataccttacaaaacatatatatgtatgtttatgtagcaagataccttggatatgcgtgtatatagcanaaatacctcacaaaaatataca

SEQ ID NO: 77157 - DNA, 292 bp, Glycine max
  unsure (1)..(292): unsure at all n locations
tattcagtgaaggatcaggatgaccgccccaaaaatgaagtggtgaagagcattgagggtgtctcttatacgctttcagttagaaaagtacttattcacttcatcatanggcttgcttaagctggaaaaaccaaatgacaacagcggttttataaattcgctggagaagttgttgcagttgtgtcaggaacttggtcgacagattgatgagaatggagcttgtctttatcccccacaagagattcctgccataaatgcagctgtggaggaaattcacagcattattgatgct

SEQ ID NO: 77158 - DNA, 403 bp, Glycine max
  unsure (1)..(403): unsure at all n locations
atgcttcttccctttctctctanggcactcctcttaacatcggtgtgtgtaggctcatatcccagcctgaaccttctgtgattctctatgaactctaccaaaattgccacgccatttgtgtttcgtcccaaaacccatttgggcttgtatccatgtcctaacatcactcgagctaccattaatgcggccccagatgagcacggntgtaccggnggagactccacatatgcattgcttaccacttccaaggcttgaaaggacgtttccatggactcctcaatggcttccacataaggcatagaagaaggacaactcacaagaatgtcttcttctcccgagactatgattaactaccattccaccatanatttcaacttttggtgtagcgttgaagggaccaccc

SEQ ID NO: 77159 - DNA, 452 bp, Glycine max
  unsure (1)..(452): unsure at all n locations
tgtcttcacaaataatcatcacacattagatacctagcaagactacccatcatatcttcccaaaccccatacccacgaatattaaaggagaaagaagtccacccaaacctgaaatttcgaagtcccactcgtagccacgcacttcacgactccggaaatgctctcctttcacgaattggggcaaaaatgatggccaaaggttgaagctttgtgtggagcttcaatggtggagaaagaagagagaaagctacgtgagagagggagagaaaaggctnctgaatttctttctttnggctgagtgaggagagagaacnagcttttggttttaaaataaagggttctctctttttctattattttatttaagctctgccacatgtccccatttgagtggagcaaanagggcccactttccctttttactgtgacccacactcagccaaaaagtgaga

SEQ ID NO: 77160 - DNA, 422 bp, Glycine max
  unsure (1)..(422): unsure at all n locations
agctnggtgttttggaaggtgtctatgccangtgtgaaaactaaagggaaatttatgaaccctataccagtcgaagtgatgggaagaatgtntttctcgtgattaagcagctggttagccattttgttagtatcctcacctttcaaaagatggcaaggacctaggaaataatcttggtaatgttcatcatagacagtgagattgttggtggtggaatagagctttggtttacgtgaatggacggaggtgcactggaaacagattgtttagaggcagacatgatgatcaaaggttatggttctctatgattgattgttgaggaaaaggagtcgagctttcttatagtgagaagcaaacataatctattgtagaagataagagaataggagataatgtgagaatgagaattgaaatttgaatta

SEQ ID NO: 77161 - DNA, 259 bp, Glycine max
  unsure (1)..(259): unsure at all n locations
aagtagacaatataatcaatatcttgtgatataaaaaaatttataaaatataaagagacatctaattacttagcaaatcataatttattaggtaacattatattatataagcaatttatttcattntaccttccttaaatttctcaaattccttaattgtaagcattagtaatggtgcctcttttaaccaatcttgagtgcaaataagagtttccactatttttggtgttaaggaagtgcaatatggatcaaacactct

SEQ ID NO: 77162 - DNA, 180 bp, Glycine max
ctttatttcaaacaataaccattttgacatatcttaattaaaaaaacatgcaagtgtcatcacacaaatgaccaaatataactaaaatcgacaactacacattacaattaccactacaattacaaccacaactgcaaacaaaacactcccctctaacaccatgtctatgaccaataaaat

SEQ ID NO: 77163 - DNA, 133 bp, Glycine max
gatcaagattcaagacttaagattcaagaatcaagagaagacttaatccagataagtatgaaaagggtttttcaaaaactaagtagcacatggatttttctcaaaaaaatgttaccaaagaagttttactctc

SEQ ID NO: 77164 - DNA, 457 bp, Glycine max
  unsure (1)..(457): unsure at all n locations
cgtgtccactttgcaatataatggcccaggaacatgttataatagtgtcatgggatntatcatatattacaatgttnttaaaaatcattctttcaatagaanaacatttctttgattacacttataattttgttaagaacaccaaccaacatttataattgatcacaccatgatttttacaattaaaactaattgaaattaaacccttacaatatttttccatctatatatacagaataaacatatcattctcgatcaataggaaaaagaaattatacattaataaacatatttttttccttgagtaagcgaaactaaattctttacatccactcacatatcacagctagtatctaattaatntagcgatattgaataaatatagatcatgaaataaacaaattacacaattgaaacatcgatcttaaaataccaagatctatttcaagcataatct

SEQ ID NO: 77165 - DNA, 95 bp, Glycine max
gtcacctgcggctgcagcttacattccacattccctaaaaaggcctaactcacaaaaaacagtccccagtggagtcaccaactgtcgcaacatgc

SEQ ID NO: 77166 - DNA, 230 bp, Glycine max
acagtctaacagacacatttttttttatatcgatctgcttatcatatttgaaagtaaaataagaatgagttttattaggttaataacatatcttgacatgcatacaaagatgggtgatatatactaatatattgtgtggtaatatattctaactaatcggggtgatggtaatttgtaaaaattcaaagtggtattcgacaaacgtgagtcctccttcctcttcctctctg

SEQ ID NO: 77167 - DNA, 353 bp, Glycine max
  unsure (1)..(353): unsure at all n locations
aatgaaattaaagccagtgagcataataaagaatttcacaatggagaagttagagaaattatggtttaagtccttccaatccttgatcaaagttcaaatttttattaagaaaaatatttacattttaatattgatcaatacgagtaaactatgtcaaanatacatatganaaagaaaaacttacatgatgagaatttctatctttcttattctttttctttctcttttggtacctacacagtacacaccctttngagtgtcaatgaatatctccaacacatattctttctggctagattccagaacaagtactactctgctcagcacatatcttctgacaataaaaacatgac

SEQ ID NO: 77168 - DNA, 382 bp, Glycine max
  unsure (1)..(382): unsure at all n locations
tgatatttagctaaatttctatagaatttagttcatgtacttgttctaacataatgtaattgattacacaaacttggaattgattaccttatgttgaacatgaattggtctaaaaacttagtgaatcattcaatctaatatcacacttgataatcatctaagcatatagaaagaaactctaactctgttggtattgcaaaatatatcagaaactaaaactaanagacttaaagaacgtcgtttcaaggtccaacgccttaacaactctttgttcacaattaatataaatctttcagaaatctaaaatcaatttaacccacaaacattcagacttaaagaactatgtaggtttgatttcctcatcgcatctggagatacgtag

SEQ ID NO: 77169 - DNA, 460 bp, Glycine max
  unsure (1)..(460): unsure at all n locations
agcttatcctanatgacacttcttgtaccaccaaatttctaactcagtcactnttaatgtcttgctaaatgagtacaaagtgacttgaaacaatttggtgagtaattcagcattgtatataattagtacaaaaacacatttgtttgtcaaattttaaaatcatatacatatctaagatgaacttaatgttaatttcaagatgtgtcgagtaccacgtattcatttatgaaaggtgtaggattcacccatatgaatntgaaagggattatagaatgcaggattgtttataatcattggaggaagtctacaaaaattggctatggatgaagggattttccagaatcacaaaaatntggaagatggaatatttgagttcctagatgcaatatttaactttgttttattntgaatntgtttggtaattaagtacattatactatactagccacattattaaaat

SEQ ID NO: 77170 - DNA, 207 bp, Glycine max
  unsure (1)..(207): unsure at all n locations
atgggtacaatgagtatcatccatatattgtgtatagtaaaggtgaatcatattatatcatgctcatgatatntatgggagtttgcttctcttatttgaattttcccgcaaatgttaactaaatacaaattctaattcattttaaacatttcaatctttcaggtatattgttatcacaaatcactactagtgtcaattgctactcat

SEQ ID NO: 77171 - DNA, 308 bp, Glycine max
  unsure (1)..(308): unsure at all n locations
ctggacatattcagacctggtagagggaactatgctgggaactaccccctagtcatatgcacatatttgatgatcatctaaagcagcgacaacaacttgctgatatatacactatacagatattgaactgaattgaatggttttttttgttttatgtatgattgatntttgtgttacaaaatgtgtgtgtggattatgacatttcatctgtgtgaggtatactgtgaaacatatgaaagaaaccctgcatcgttgacttataagcatacatgcatgatggaacgttaatgatacgctgagatgtgtga

SEQ ID NO: 77172 - DNA, 473 bp, Glycine max
  unsure (1)..(473): unsure at all n locations
gcaagcttgtgactctnggcaatntctntaaagctagtcacttaanaagttgtgacttttgaaagaatcttcagaaacaagtcacttgaagaattgtgacttttggaaatgtatttntcgaaatcagtcattggtaatcaattaccattaaggtgtaatcgattacacatcaacagatgtgactcttcattttgaattttgaaaaataaaaccgttagaaaacacttgtaattgattacaagtatttgtgtatcaattacacaagttgaaaatgtttgaacacaagttgtaacacttgaaattngaattcttaacatttttaaaacactggtatcaattaccaaagagtaaaactcttcggtaatgattttgtgaaaacttcttgtgctattcaatgtttggaaaactttttaatacttatcttgattgagtcttcccttgattcctgaatcttgagtcttgaatcttgatct

SEQ ID NO: 77173 - DNA, 462 bp, Glycine max
  unsure (1)..(462): unsure at all n locations
ctcatcttggtggtgaagctccttcttccatggcttattctcttagtggatgacgcctcctctcacctcttctcctttgtctttcgctgcatctccatggtgaaaaatcaccattaaaggacttcattgaagctcanagatccaacctccatagaagtcccacaagcaagcttccatcacccatcatttgagaaggccttataccaactnttctaaatgtatcaatttctagaatatctgtagcactcaacttcttatgcgctgctaacaccacacaataagcttagaccaaatgctaacgactatgtagatctgtaaatntagttacacacaaacgactattgngaaaaatatgaacatgaaacctggctttacaatcacacctaatttcctttcttggttcatgggtttgtgtttaagttggtagccccctctcttctctatgaccttttctagaacaaa

SEQ ID NO: 77174 - DNA, 419 bp, Glycine max
  unsure (1)..(419): unsure at all n locations
ttttatgatcacaaagatgatgacaaatttctcaaaagtcaagattacttcatgataacaaagatgatgacattcaagaatgagttccagattgagtcaagaacacttcaaggatcaagaggaaatttgatttcaagaatcaagaatcacgattcaagattcaagactcaaagattcaagaatcaagagaagacttaatcaagataagtattaaaaagtctttcaaaacattgagtaacacaaaaagttttcacaaaatcattaccaaagaagtttactctctggtaatcgattaccagattatagtaatcgattaccagtggttttaaaacattaagaatttcaaaattcanaatgaagagtcacatatgttgatgtgtaatcgattacacctctatggtaattgattaccagtgact

SEQ ID NO: 77175 - DNA, 450 bp, Glycine max
  unsure (1)..(450): unsure at all n locations
agctntgagcaatttcaaactacaataacattntactctgatgtctgattgagncccgtaatatatcgacacgctcgacattgaatgttgaagctctgagcaaattcaaacgacaataaatttntactaggatgtctgatatagtcccataatataacgagacgctcgaagttgaatgttgaagctctgagcaaattcaaacgacaataacattttactcggatgtctgattgagtcccgtaatatatcgacatgctcgaaattgaatgttgaagctctgagccaattcaaacgacaataactntttactcggatgtctgattgagtcccgtaacatatcgagacgctcgaaattgaatgttgaagctctgagccaattcaaacgacaataactntttactcggatgcctgattgagtcccgtcatatatcgagacgctcgaaatgaatg

SEQ ID NO: 77176 - DNA, 439 bp, Glycine max
  unsure (1)..(439): unsure at all n locations
ctcttgatgctctggtgattcagcaagggcgtttatctgaacagaagagtaagggtttctggattttatcttcgtttttattattttgttgctagatttatggattatataacatggtacacaatctatttgtgtatgcagctgttaataaagatgagttgcttcaaatggttagatttggtgctgaaatggtttttagttccaaggacagtacaattacagatgaggatattgacagaattattgctaaaggagaggaagcaacagctgagcttgatgctaagatgaanaatattactgaagatgctatcaaatttaagatggatgacagtatgtaacctttgaatataatttctggctttgctaaagttggtttgattgatgatgttaaaaatctattttgttggttaaatttctgtatataccacaagtttatgtg

SEQ ID NO: 77177 - DNA, 403 bp, Glycine max
agcttgaatcggacatccgtgtgaaaagttatgaccattttaatttctcaagagcttccgttggtcaatttcgatcctctcgacatattatgcacccgaatcggacatctgtgtgaaaagtcatgatcatttgaatttctcgagagtttccgatgtttaatttcgagcgtatcgatatattataaccctgaatcggacctcagtgtgaaaagttatgaccatttgaatttgacgagagcttccgttgttcaatttcgaatatcactgtatgtgatgcgcctaaatcggacattcgagttaaatggtatgaccatttgaatttctcaagagcttccgttggtcaattctgagcgtctcgatatgtgatttgcctgaatcggacattcgtgtgaaaagttattac

SEQ ID NO: 77178 - DNA, 263 bp, Glycine max
atctatccacacccctctattaactaaattaacttccttaaaaataattacggatgagaataacgcaacaaatattcaaacatcaaacataattactaatagtatatagatatatatatatcagggtgttacaactcttccacccttttagaaatatcgtcctcgaaatttaccttactcaaacaaggatgggtgagcttctcacatctgactttctaattcccatgtggcatcttctcctgatgcaccttcccagatcacct

SEQ ID NO: 77179 - DNA, 237 bp, Glycine max
tgtacggtatcctgcagaaaaaatgactggcaattgggtatgtcttgcacacaataactgcctacacgcgagcacacacacttttttaatgtgtgccaacaacatagtctcaccatatgcacacacacgcacaccttaatacaatatgagccctcgaacttcttgagaatggagaatatatcaacagcgttacagaacaaactcttaactaatataatgaaatgctccgtaatatac

SEQ ID NO: 77180 - DNA, 233 bp, Glycine max
  unsure (1)..(233): unsure at all n locations
ctgtaatagtgtaccctttgggtgcattccctacttnaacatcttagactttttaataagacctcattggaaatatcttcctaatgatgcagatgattactatgtgtgtgatctcttttgatatcatgtatagttcatttgattcatctaacaatcatattctgggtanggattatctagacctttacattatgttcttctggttactgtaggatccacatattttgcctctg

SEQ ID NO: 77181 - DNA, 165 bp, Glycine max
  unsure (1)..(165): unsure at all n locations
agaactaagaagggtcaatcaagatgattcttaattcttattatgttcaatcaacatctcanactccagatatttattacatgctgcaataatctaaattgaattgaatagttactgggtggcaattagcgttccccttgccaactncacacaatatccctgagc

SEQ ID NO: 77182 - DNA, 437 bp, Glycine max
  unsure (1)..(437): unsure at all n locations
cacaccatgtgttccctttcttcaaatgagaaccccattggttggtccatataaacattctttttcttaatctctattaaagaaagacanatttcgcatccatctgatgtagctccaagtcataatgggctactaatgccatgataatcttgaaagaatccttttgtgagaatggcgaaaatgtttctttataatcaatgtcatctttctgagtaaatctcttaacaacaagtctagcctcgtaatgttcaagggtgccatgagagtcacatntagtcttgaggacccacttacaaccaactcttctacaaccctttgacaattctacaaggtctcaaacaccattanntgtccatgaaattatctcttttttatgtcatttaaccacttctcagaattatcacagcttacagcttgtgaaaacgaaactagatcat

SEQ ID NO: 77183 - DNA, 387 bp, Glycine max
  unsure (1)..(387): unsure at all n locations
tggcattcacttgtgtctaaattattccttccatgaatgaatattttttgtggggggttgaaattaggtatttgatctttagtttatgactggaatgcatatctcaatactttgtgacattgacatattaccatttaccattcaatttcttgggaaaagaatcaagtcatgattccacaataaatacatgaatntcttctataaattgatctaagatgcttatgaaatgtttctctattattaacctgagcctaaatcttggtaatctgcttattgttcatgtattgatatttgacacgacaactgctgtctttcaatgtaatgcttgacttngaagacaagaacttgaaagaaaagaattgatattactangtgtgtttacaatat

SEQ ID NO: 77184 - DNA, 339 bp, Glycine max
  unsure (1)..(339): unsure at all n locations
cgctgcgctatgagagatattgttcagtggttgtatgacaagagatgaccaagccaagaatgattcagatttatcagacaaatctgaatagagagttgtttcagatcagacagagattcagtccagagagaaccctagacttacaggaagtatgaaagatttcaaaaacaacatacacattttgttttcaaagagtattctcaaatttctagtgacccnagtttactctccggaatcgatactagttcctgaatcgatccagtggcaagttgattcaaagtatcactgattgcgcgtccattgattcaaatgggtagcgatacagatttggtatcgata

SEQ ID NO: 77185 - DNA, 371 bp, Glycine max
  unsure (1)..(371): unsure at all n locations
agcaatcaatggggctaaacacaccaaatgattataatgatggatggctcaaattctcacaaaggttaaatcatcactttcaaattgagctttcanaactatcatgacatgtagagaagaatcaatgatgtcaagtcacaaaatgtcaagaactnttattttcataacaattacccatttcttgaacatatcctataattcaaagaaaaacatgcaaagtcgtacgtgcacacaaaattgacccaaaatattaaactgaagatccgacgaaactaacaacattaacaaattaacacaacttacaaattaacaatacaacaaaactagcagaaccaaagaacactccccccccccccatacttaaacaacac

SEQ ID NO: 77186 - DNA, 362 bp, Glycine max
tgaatagcaatacatgttaaaatagtatagcaagatggtctttataagtacttattagatataaaaccatagcttaataatctgcaagagacttaatgattacagtaagaatgactcatgtaggtcaggtaattatctattagctaaacttccaatgtttgtctttctgatttcaaccataacaattctgtatcgtcaagcttcaatgacatatttacctcaaagattattaatggaggtgcacgccttatttaagcattcaggtgaatagcaattatgttaagatagtaaagcaagctgttctttaaacgtcttattagatataaaccaatgcttaataatctgaagagacctcaattctt

SEQ ID NO: 77187 - DNA, 438 bp, Glycine max
  unsure (1)..(438): unsure at all n locations
gctngaattanatatatgtttttttgttaaagtacatatgttagatgaaatcctatatcttttttaagtgatcaagccgagcatcatataagtgaggagaagatccataaactcaagctttcatattttggattaaaatatggtgtcaagtttctgaccgtggatccaagcacgtgtctcgtgggtggaacaacgcattacatgtgtaaaaaactcatacctataaggaaagagcactgaagaagacgcataaaccttactccccttaattttcccacattctttacctaacctgctttgatcccatgacaggtttatcctgaatccaccgaatgaaatataggagattttttttcaaggtatagtatcacgttctcaaggaccacattcttataaatataactatggaaataattttcgtgtgtattttaagaaaac

SEQ ID NO: 77188 - DNA, 290 bp, Glycine max
  unsure (1)..(290): unsure at all n locations
tgtagactatatcaaaatgtattcagtgaaatttaacataaaaatctaaaaggcataaaaatacaccaaatagtccttcaatntgcccctttccaggtaagtcccacaagatgtcagaatacactagcattcaaatatactntttaatgttcaagcagagtaatagatgaatgagagctaagttttgacggaccaacatatgaaaatatgacaataagtcaagctactcttctgaccctactagattatataatgaaatcagcccaaatgcagaacaaaagaaacaaaaa

SEQ ID NO: 77189 - DNA, 328 bp, Glycine max
  unsure (1)..(328): unsure at all n locations
atatatgtatgggttgatgctttactanggtaaggatatgtatnttatagctngtgcgtgcttctctagtttcccttgactctattctataatcttatagntcctgtctatcataatcaatgactatcagtttgtttattgttcgaaatacattgctaaatgcatganagttcaaattatgcatgatcatttgtacagaaaaatgataaagaagaagttggacttctgctattctgctgaatatttttaattaaatgagttgctaattaccttcctaanactttattgaatatcttttcttttattcttttcaatttgcagctatata

SEQ ID NO: 77190 - DNA, 328 bp, Glycine max
tatttatgttatagtactattatataaatatgaaaggtgcagttataatatgatacgagtaaattttaaattcagtttgggggcttttcctttatgtttacaagttaattaaataatttataagcaccaggacccttaatagatacccatatttaataattatgcttgtgctatgtaacttcactagtgtgagatctgggccttcagagggggtgttctatgtacaaatcactgcctctttttctttcatttagtgttcagaaattctgacttcaaccctttcacacgaaatgaattatgtctgcttgttgaattaattaagtttttt

SEQ ID NO: 77191 - DNA, 184 bp, Glycine max
  unsure (1)..(184): unsure at all n locations
tataatttgagttccaataaggtttcaaacaataaaaatttccatatttggttatgcatcttatttgataatanatcagtatttgaaatattaaatataacaatttactttattaatgaatgaacattngatcatgagtttagtgcctgcttatttcaatgattctcagtgaaaagctactact

SEQ ID NO: 77192 - DNA, 437 bp, Glycine max
  unsure (1)..(437): unsure at all n locations
tgtatggtttcctcgagcctcgacattacattcaaacatgagtgaaggaatcataacgaggcatgtacttaggaagctacttgaatcagtaagtaatatttatctagtacattcaaaaatatatgcattatacgtacctaattatatttggacttcnggcacattggagcttgttgtagtccacgagccatattgttgttggttttgcttttacgtaggaagcctaatataacatcaaaagtgcaattaacaggttatggataaaattataattcatttactatataacaattataggaaacgcanacatanatttaatcttatatatggttatgtgtttttttaccaatgcaatgaagactaatcactagnttggaaggtaatcggatcaacctgtacctcggtggattgaagtaaaggttagtcattatttaatc

SEQ ID NO: 77193 - DNA, 335 bp, Glycine max
  unsure (1)..(335): unsure at all n locations
ctgcagcttttaccaaattgattaccataaggagcaacaattagtaaccaattgggtataaaaaaccttggcttctagagtgagccctttttcaaccaagataaccttgagcttcttttgggaaaggagagacccgacaacaaaggcaggtttcaactcgcttccaaatccattgatcatcccttaccttgaccaatgaaagaaaaaaagtcataacacaccttatgtccagtgaagggatcactactaacaacatttgaaaatgatcatagaattattanataagctactatgttttttaaacaaaatttctattatctgatcgaaaggatctt

SEQ ID NO: 77194 - DNA, 446 bp, Glycine max
  unsure (1)..(446): unsure at all n locations
ctgcagcttggatatgaaccctcatggcacaagggctgacctattatcatctangattataccttgatggaaaatgcggaaattgattaaggaaaggatgtgaaaatatgtggttaatttcgtgggtcttaataaggtggttcttggcataaaatggatgaatgggatggtaaaatgtacgttaagtggtggctggacagaaatatagaaatggcaataactgaagctacagggctccaaatcatgtgattccaaaacgaggtgaaaggtctcgttttgaaagtcaatttacgctcaagaatcacttaatttgagtgccgtaaatgggagttatggccacgagataattctgngcagaggtgaatcttctggaattgtggtttgaaagaacaagggtgaagatgaaaggaaggaaagaatcactctttccaacgagggcaacacac

SEQ ID NO: 77195 - DNA, 447 bp, Glycine max
  unsure (1)..(447): unsure at all n locations
agctanngtatggatcactctatggtntcctttgatctcattgtatccacaatgcanagaacaaacgtgaagatcatcaacattacattcaaacatgggtcaaggaatcacaatgagaagtgtacttgtgacccttacctaatcagtaagttgaattgatgttgtacaatatggatattatgtgaattatttgtgcctaaactaatgttttcatcttcaaggcacattagcaacttgntgttcggtgtccacgggacaatgttgttggtgggttttgttctttgcgtaagaagcctgatgttaacatcaagactgtagtgaacatgttagttttaacattaaaagtcaattgaaatattgcaattgtacggtaacaaaacaatgattatttgattatattcgttaacatcanttttaaaatagtgcaatgaanacattaagcactac

SEQ ID NO: 77196 - DNA, 390 bp, Glycine max
  unsure (1)..(390): unsure at all n locations
tcggagtagcttttgttgaagtgcttcacttggccctaatcaagaaggagaagaagaanggggcttcccctctgcttctgtttcgagtgatgaaaacgttaaatcgtccaagaatanatctgagaatatggatgttgatgtttccgctgaattttcgcgtggagaatgtcaagatactggtgatggaattgaacattccggtgtctcngtcggagaagacgcgtgggaggaatatnggttgcatttgtgggatttagctgccagtaaaacacacgcggaactcatggtatatcaatgctggttttggtttattgtgtttatttcagtttctttcttcatattatatagtaagttcatttcanaacatcttctaagcaggtttgatgtact

SEQ ID NO: 77197 - DNA, 412 bp, Glycine max
  unsure (1)..(412): unsure at all n locations
agcttctaatggtngctttgtatagatccaacagaagtttgttatcccaaacatgttgncatcaattagtcttgcttcaaacaatttccaataagcaaaaaagttcanaatctcataaatgaaaatatctatagatttggaataagactttccaaaatgaactgaaaatcaaaacaacttacgagcacaagcacacactatagagcttatacgctcttgaaaatcaaattacttttagtctgcaaaagattaacacacagngactatagattaatttcttggttgaaatatagataattccttatagagtagttcanaatcttgcttggctatagattaattcattgtgatgaatttgtgtggtttagtaatggaatttgtgcatcaacatttacagatcatggttagaact

SEQ ID NO: 77198 - DNA, 429 bp, Glycine max
  unsure (1)..(429): unsure at all n locations
agcttcatcctcagatcctctcttgttggactaggctcaatttagatagccctcctaggtttagactatcttaaactaagcttcatcctcagatccctcttattggactagacttagcttaaatagctttcgaaagtttagactaatgtagcctaagctntgtcctcagatccctcttgttggacttgtgacatcctagaatttctacctggaattttgtaagtgttacatctaaataattatatatgtatgtattatttagggtatgtatatatatatatattcttggtagaaatatgtacattgggggaaagatacgcagggtaaactaattgacaaagagtaatccataactggacagttatagattaatttcacaataattagtaacaaaattatcattttgcgtgcaacttnnaaattaacaaa

SEQ ID NO: 77199 - DNA, 321 bp, Glycine max
  unsure (1)..(321): unsure at all n locations
tattctcttgaggtacttttattttgctgtaacatttgaagccaanaagtntcccttattttactatgttatctgtgtntggcttttgttaaaaatctttgctctttgttaacttaaggtcatttttttccttctttctcttgggtcttcaataactgataatntttaatctttgaaagcaggacgaccgcaagtttgaggatgatagtgccaaacggatgaaattaatggatccatcatggaatagtgatcccatcagaaagaggggtgtgggattattagaaagccaacatgatgaanaaaaatccttctgagcgtttc

SEQ ID NO: 77200 - DNA, 303 bp, Glycine max
  unsure (1)..(303): unsure at all n locations
tcactgcaataccgaagagaagttttagacaaaggagcctaatttaatactatactacagaaatattatacacaaaaggtttacacaaaagttctaccttaccgacttacagtcactagcttgacgcatcgtcctggtatctaggatccaacagagtttctacttcaaggaccttcttctcaggtctttttttctccatcacatgcactntaagacagacattttggctaggtgtatctttgcctcatggacaaatcaaagttgtcttctgatctctattccatctacagatcttcttcccat

SEQ ID NO: 77201 - DNA, 370 bp, Glycine max
  unsure (1)..(370): unsure at all n locations
tcccttagacacttctctctctctcgaaattgctgaggaaaattagttccgtgaagaaaattcaagccgaggcgctttcgtaacggttccgtgagaaattacgccaagattctcgacccgtcttcaagattcatcgttcgttctttcgtttcttcagtccttcacggggtagtacctcaaaccgagcttttcaattcattctatgtacccgtggtgggccacattttggttcatgtattttattctcgtntccattacttttataccccatttgacgtgcttagccattatttagtcattctcgcttaatctaaaataaataatttcaccgatcgtngaattgatcatccgttaatttggtaaaatgaat

SEQ ID NO: 77202 - DNA, 407 bp, Glycine max
  unsure (1)..(407): unsure at all n locations
ctatgnattcacttagtgagagtgacctgacttacccattgtgaggcatgtcttgtcatgtactcctagacgtccgatgagggttttcactaaaaaatggtgtcacattgcatgtagactngagtctagtgtatttgttgcataatggttgtgttgactttcattgagttaacaatngcggtttgatgttatttttttggagtgtgtgaacttgagtgagtgtgaataatgtgtgtgaatttgtgaagtgatgttgtttatataaaattagctctaagtattatatgtttcacatgttctaatgttntattatatacgaatgtgataactcattttcggtgtgtggttgtgtttgggctaaatgtcattntgtttcaagtgagccagcatatgatgagttccatgct

SEQ ID NO: 77203 - DNA, 414 bp, Glycine max
  unsure (1)..(414): unsure at all n locations
ttctggaggttttntctggaagacccaagtgggcctagttgctatttgcacccccatttttactaaatacaccccctttcacttttttggtgattctttattcgtaacgttatgaaactttacgaattttgtaacgatgcttgttttctttccgtaatgttacgaaaccttacggattatgtaatcatcccctttttgccttccggaacgttatgaaacttcatggattgggcactaacactttcctttaatttctggcatgtcacggaacttcacggattgtgctacaatgctttcctttgacttccggcatatcacagaacttcacgaattgcctaacgatgggtgccaagtacctcgaagtggtaaatgaagctcgcacctaaaacggatggccctggacaaaataggatg

SEQ ID NO: 77204 - DNA, 428 bp, Glycine max
  unsure (1)..(428): unsure at all n locations
acttcattactggttgtcaagacatacaagtgagcttgtaacaaatcttctatacttggagtgatgacatgcagtcctcttgaacctttaccacccactctgtcatcatgccgagactcangaaggtcaataggtttagccttctcaatgtattctgaacaaaattcaatggcttcttctgcaatatacctctcaacaatagatgcttctggatgatacaaattctttatgtatccttttaagatcttcatgtatcactcaaccgggtacatccaccgcanataaacaggaccacaacatttgatttctctgaccagatgcacaatcaagtgaatcatgatgtcaaagatggtagggggaaaatacatctncaactggcatagtataattgcaaccttgatttccagctcatcaaacttgacaggatc

SEQ ID NO: 77205 - DNA, 352 bp, Glycine max
  unsure (1)..(352): unsure at all n locations
atcgtaagtaaaaagaactcccgtatgtgacctcaacgagagttnttgtaatgcgggcttgatgtgtgaagggaggatcaccatgatccgcgatgaagttccncaagagaaatcaaacttggtgtggtcctgccctcttgagttcaagttgggaaattagcaaattatcgaacaactcggagttttcgtggcaaacataatgtaatttgttagtcttaaccctatagctaggcctannggattaagttttntctttctgtataggctggtctttngctatcatatatttaaaaatgatctttcttaatttgttcttgcacttccatcgattctcattcatcttcatgtttac

SEQ ID NO: 77206 - DNA, 457 bp, Glycine max
  unsure (1)..(457): unsure at all n locations
gcaagctntgagctctgagcacccacgagtgtttcaacaccctagtatcaacagtgtatgtatggttntcttcgagcgaagacaatgtgggttttctgacagtgtaaggggttctgtgggttccagcgaggataatgtgggtttttcggcagtgtanggggttatgtgggttcgagcgaagacaatgtgggtgtcgagggagccgttntcgacagatntcaggcgggaggagaaagagaagagcgatttcatgcaggatgatgacaaagagaagagggagggcaatggtttcgagcgcgcgcggcttgtganatctcaatttttaacttataaacataacaacatcngttntttatggataaccgatgttaactgaatatagttaaacatcagtttgtaaaaaccgatgtttacatcaaatacattacatcgatttcttacanaccgatgtaaaatc

SEQ ID NO: 77207 - DNA, 362 bp, Glycine max
actcggatgtctgattggagtcccgtatataacgagacgctcgaaattgactgttgaagctctgaactagttcacacgacaataactctgtactcggatgtctgatagagtcccgtcatatatcgatacgctcgaaattgaatgttgaatctctcagccaatcaaacgacaatacttttactccgatgtctgatgagcccgcaatataacgtacgctcgaaattgatgtgaactctgagcctttcaacgaaataactcttactcggatgttgatgagtccgaaatatcagacgctcgaattgatgttgagcttgacatattaacgacaaacttttctcgatgttgatgagcccgaatattca

SEQ ID NO: 77208 - DNA, 288 bp, Glycine max
  unsure (1)..(288): unsure at all n locations
ctggagaatataacacgataatcttatcatctaatgttggttgattatttataaagctgtgtggaatggaaaagaatcctcaatcttttctattcttcagtaaagctgtcttttaaatgattggatgctatactatctgtccatcattcatttagtgattaaacaatcagctacaagcgagatgcgccanaatatatatttgaaatattctactattgcaagttgtatggataagaaggatgactgccgagcaatggatgtactattttgagtttagaaatgcaatct

SEQ ID NO: 77209 - DNA, 421 bp, Glycine max
  unsure (1)..(421): unsure at all n locations
agcttggaaatagtagattnttgctaactggacctcatcttcctctaaatatacccctcactaaaataaaatacacatatnttaagtccattttcgtgaaaaccaactaaacataccacaccacataaaccaatcaccgtatttttattaattaacttatttaaaaaatagtttaaatttatcaatcacttatttaatataatggtaattcataaattgaacttttgaacacaattaataagaaagctagctagatataaattactaccatttattgacgatacgaaaataanaagtatcattttacttgggatactggaggttttaacatttcttgaatgtccaactttccttttctgcccagaactattattcgaactatgataaaggctatcttctttaataaccaatagaatctttg

SEQ ID NO: 77210 - DNA, 457 bp, Glycine max
  unsure (1)..(457): unsure at all n locations
gcagcttgattgccatacttttgacacatatcatagatatggatgattaggacatacttatgctatgcatggcanatgtaattatgagatcgacatgagatgctcgaagaatcatcatttnctaattaaccatgcattaagtaccatgttcacatgatnttcaacattnttttagagaaaagagtgtataatcccaacatggttggtttctagccatcatcatggtacccaacacatgtaactaagaatgtggtgtaaacttccatgcttcattgtgactntctntngttctttnntttttgtttngccgaggaaaatgcaaggatcatgcatgagtgaacataacatgtgaatgatgaaaatagaatgtatgcagttggcagaacaaaagcatgctaaatgaagatgcatganaatgcaatgacttatgcaaatgcantgcattgaatatgataat

SEQ ID NO: 77211 - DNA, 444 bp, Glycine max
  unsure (1)..(444): unsure at all n locations
gcaccgccgctgcagcttgtnaatttcacccacaaacaagaaatatggtcttggtggaatggagttgaaagaaggtccacgcattgtgccagcacggcacccatgttcttttgctcactaactgctgaagcacacaaaaaaagttaactgtgtcccagtgcagtgcaatagcaatagcaatagcaacattccacctattattcccttaagacagctaattatgtctatgttagaatggaagtggcatgggactgtggggaactaaagtaaaaaagagacatatgaggctntgggcttccatgatgtggacaccactctaagataccttacattaattgttcaatggtttggttcaataagaaaacgtgagtgangggtagctgtgtgtcatcctaatgatatttatatctaanaagtagaaagttgaaagtagaaagcagaaag

SEQ ID NO: 77212 - DNA, 168 bp, Glycine max
cgctgactatacagcttaatagacattgagaaaaagtattgccgtttgatttgctgagagcttcaacattcattttgagcgtctcgatgtattacgggacttaatcagacattcgagtaaaaattattgttgtttgaattgctgagagcttcacattcaatttcgagc

SEQ ID NO: 77213 - DNA, 294 bp, Glycine max
  unsure (1)..(294): unsure at all n locations
tgttcacttcttcttatgaatcaaccacaagaaactttctcagctcttccacggcagcccgagccttacccacatgagcaatcatgtcatggctggtttgcttgagggctgtaaccttcatggttgcatcaaataagctctgaatatcatttgcaacaaattcttgagccttctttcaaaggaacgacancgtttaaaatgatctaaaggatatcccaaaatattccggctcaacatgattgccataacacagcacacagttgataatcaagcttctcccattcggctcttttg

SEQ ID NO: 77214 - DNA, 459 bp, Glycine max
  unsure (1)..(459): unsure at all n locations
ttagctctaatatattatcacgctcgaaattaaacatcataagctctcgagnaaatcaaatggtcataactnttcacctagatgtccgattatggcgaatcacatatcgagacgctcaaaattgaacatcggaagcccttgagaaattctaatggtcataacttttaactcggatgtccgattcaggcgcatcacatatcgagacgctcgaaaaggaacaacggaagctctcgagaaattcaaatggtcataactcttcacactgaggtccgattaaggattataatatatcaagacgctcgaaattaaacatcggaagctctcaagaaattcaattggtcatcacttttcacacggatgtccgattcgggcgcataatatattgatacgctccgaaatagacatcggaagctctcgagaaattcaaatggtcataacttttcacacgagatgtcgatt

SEQ ID NO: 77215 - DNA, 466 bp, Glycine max
  unsure (1)..(466): unsure at all n locations
agcttcattaccatttataatatagtagtattaactnttcttcttacttttattcattacatataactgtaagtggtgcaacatcttgtttctttctttaagcttgtgagatatgttactgctntactagtatgctnttaaggactctacttaaggtgatgtatactatgctatggatttctctgctaggttatcaattaataatgtgtgttccaatcttgtaatttcttattggcaatcgttctagctagaacccaaaatgtttgtgaatagaaattattacgcaccttctcctttaatcgntaataatttattctttggaaaaattgtattggtatttgtatatattggttgggaataatatataactatgataggaaagtaattaagatagcgaanaacagaattctaaaacaccatggtaaaaatatataaataatataattgtgtttggttatgataagat

SEQ ID NO: 77216 - DNA, 435 bp, Glycine max
  unsure (1)..(435): unsure at all n locations
agcttgggtgatgttgcgcgtactgatgggtaccatgagggtgtttgctgtggttgacccacgcgggtgttgaagagacggcatgggcatctccttcctttccttttgcccctgttgccccgattcttttggcattcgcgtttgtggaggaaacgtaatcaaactttcctcttttcaatccaacctcgattctttccccggcaaacaccagatccgcanagctggacggcatgtaacccactagcttctcatagtagaacactggcagagtgtctaccatcatggtgatcatctctctctcaaccatgggaggagctacttgtgccgccaaatccctccatcgctgcgcatattctttaaaggtttcgccctctttcttgaacatattctgcagttgagtacgggcaggagccatatcagaattgtactgatact

SEQ ID NO: 77217 - DNA, 435 bp, Glycine max
  unsure (1)..(435): unsure at all n locations
gatcaaagatgttttgatgantacacagatgatnactatagatgatgaccaagaggatgacnaacagctcacaggtcaatcaaagaatgagttcaagatattcaagatagaatcaagaacactttcagattcaagaggaaagttgaattccagaatcaagaatcaagatcatgagatcaagattcaagactcaagagaaggcctaatcaagataagtatgaaaaggttttctcaaaaaatgaatagcacatggtntttctcaaaacattgttaccaaagagtttttactctcttgtnatcgattaccagattgttgtaatcgattaccagtagcaaacagattgggtaatcgattaccgtaacaaattgatttgaaaagtnttcaactgaattacaacgttcaattaatttcaaaagttgtatcgattataatgt

SEQ ID NO: 77218 - DNA, 392 bp, Glycine max
  unsure (1)..(392): unsure at all n locations
agagagaaagtggtgagtttatgagggctgaatggaanggatttggttcaaaatctaaatgtgtttggatggagaatgatggtttanaatgatgaagaaggagaatgaagaatgtggttggaagaatcactcctccggaattggtgtcacacacaatgtggtgttcctttgataactaatttcttgaatcactcaagtaactaaggagattcactctcacactttagaaggtgattaaaaactcaattcaaggtctgttgtcttctcctcttattagaaaatgcacagcccataaacaggaatgacatcaagttggttacaaaagtgagaagatgaaatgatcaccaataaaaacaactgatggtgtcattatatctaattaaaactagaat

SEQ ID NO: 77219 - DNA, 449 bp, Glycine max
  unsure (1)..(449): unsure at all n locations
gctgatgtacaaaccaatttataaataatattatttgttataaaagaattaatatttaatacaatattatatcattattntaacaagtagtaaaacattatattttttttctttcttacttgagtgcaccggtctggctataaaatctagtttatttttgcgggggnaacaacttttagtgcgatcatttattaacctcgaagcttattaacttgtntggtgataggtgatctattggccattaaatctattgaattttcagccataggtcccataacnngngagccctctatatgttagcctttttaaagtccatcagcctatttaaaatcttatatgaaatagagatntaaatntaacctatttccaaccctgatgaacatgtaaaanatattggatataacaatnntaagtagaaatntcaattaatttatgataatatatcattc

SEQ ID NO: 77220 - DNA, 429 bp, Glycine max
  unsure (1)..(429): unsure at all n locations
agctttcactctctcttttcngattaacaatgcacccttaacatgaattactcanaagacaattcaaaataaacttctttaaagcaaaagataaatagcaataaataaaagaagtttaagggaagagaggaatgcaaacttgatttatactggttccgccacttcccgtgcctacgtccagtcctcaagcaacccacttgagattttccactctctttgtaaaatttcttctataaagtctgaaacgcacacggacaacccttcccttgtgttcaagaatcctctacaacaagagacccactgtctcttaatcccttttcaganataagaagaagagaagaacaaatttctcttaaaagagatagattgtacaatgaagatcaatcaaaattccttattgaatatgcangtggttgaccaatgaatctt

SEQ ID NO: 77221 - DNA, 343 bp, Glycine max
  unsure (1)..(343): unsure at all n locations
gatatcatcaaaatcttcatgatttacaacggcaaccctcatctgggatacaaccgaacggcttacccttatggattgccgccaactactcaccacccgtnctgcaagacgatgcgggcaatattgcttctcctgtccttgaaagagagccttctcaacagcccgacgaggtccacgaagaccctcaagactatgctcgaagggatgtcgagttctatcccccgattcccgaagggccgacacccagcatgttgcctcagcccaacatcacgacacaaccaatagttttgtccatggaaggactgcccccggcaactgaagaaaggaagaagctcgatctcct

SEQ ID NO: 77222 - DNA, 400 bp, Glycine max
catcaaggacacattggggatcaatttccaacaccacaagtgcccttatgttataaattcaccatttacctaatcctgataaataagagcacacctaactattattatatacctagcgaggcattctacatgatgaacccttaccctgacaacatccatgattgtctgtatggggaaatttcataactattactcacaaaccaatactataaatatttgaaattagtttggagaccacttaagccataaccatcatcgcttaagccacactgctgctagaaatcaccctacccacaactatgaccttgcttaagccataacatttcttgttaaagctaccaatcattggttacatgctagtgtagacacaggccatttcatactttttcacctacatcac

SEQ ID NO: 77223 - DNA, 336 bp, Glycine max
  unsure (1)..(336): unsure at all n locations
ataaatctatacccttcctcttgattatacgctttgcaactaatctaaccttatttctaatggatattccatggtcatctaacttaattctaaatacccattgtgctcctataatgggatagtttttaagcttctcgacatgttcccacacattgttctaataaatagagacagatcctcttgcatagcaattatccaactatcatctattatggctgcttttatatttttaggtttaatcatagatacaaaatccatattattgcataattctttaagagaatgtctagttgttaccccttttgagatatacanaaatgttgtcaggggatgatc

SEQ ID NO: 77224 - DNA, 330 bp, Glycine max
  unsure (1)..(330): unsure at all n locations
agctaaaanaacaagaaatgaattgaatgtctctgtttcgaaaacttacccgttgaagaacgaagaacggatgaagaacgatgaagaacggacgaaaaccttcacggatttgcttacggaaacatctcggaagcgttacggaagcacctcggcttggattttcttcacggaaaccaattttttcacccaaaatagctgaaatacatagccagggggctgagggatccttagaacaacacccttcagcctatttataggaaaaagggggaggaggttgccgcccaggcgaccttagctcgcccaggcgaccttagctcgcccaggcgagct

SEQ ID NO: 77225 - DNA, 421 bp, Glycine max
ggacactatgatactcagcttaccggatgatgccgatcgaacatttcctaatcgacattatccaattgttattcagggattgaatataataaacaatggccggtgtcggtcgatatatggccccgactgatatctttctgccgacattgcgcaatttcttttacaaacgctggccgataatgtttttttttacggtagaggatgatttttggattggtgttgcctaaaaaacttacaacgtttgacgtctaggttatttcgtgcgagctcaaccgagggtacagtccgaccgacactggcatgttgttcttttcatttaggaggataagaaaacgttcgcccaccccggcacaaacaaaaaagaacattatttatggagaatgatcgaataaaatgataactgacgtcggcatggacagat

SEQ ID NO: 77226 - DNA, 330 bp, Glycine max
acgatgaataatgagggaaaatcaaactagaggctgaacacaggaagagaggtggatcaagatagaaagcttaaaaggatgttgccaaggttcatcaagtctgagttgatcttgagcaatctagcacaagagaaacataacaggaaatggatgcatccattcttgatactactattaaaaaacctatccatgagtccactcaagcttagcagtctcaagaagtcacctttgtccaacaagaggtcattgtatactccaccagctaaagcaatccagttgatgttcctctaatcaactacactacccctactgcactcattgaggaacgca

SEQ ID NO: 77227 - DNA, 464 bp, Glycine max
  unsure (1)..(464): unsure at all n locations
actaagcttttatccaggcacattcttggtggtgaaactccttctttcatggcttattccctagnggatggtgcctcccctctcctcttttccttttccttccgctgcatctccatggtggaaaatcaccattgaaggacctcattgaagttcaaagatccaacctccatagaagctccacaagcaagcttccatcaactntgcttgctttattggtgttggagaaaaaaccatacggttttaggtcttagagacttaatttcttcttgttctttggtaagggagtattgtatcttcatcttcttccaccaatcttcatctcttaagctcatttttctcactactttcttgttntggtaaaaaaatggtggtttaggtgttgctacacactaaatgaagctntcttgatccacttctcattccatttccacttncaatccctacgtatggagagggttctactc

SEQ ID NO: 77228 - DNA, 396 bp, Glycine max
  unsure (1)..(396): unsure at all n locations
atcaatgattatgcttacaagatagatctacttggtgaacatggtgttagcaatacttttaatgtgtctgacttatgtccttttgatgtaggagatgaggatttcaattcgaggtcgaattcactcaaagaaagatgggatgatgagaatcaagcaaagaacaagggtattgaatcaatacaaagacttggtggaccaatgacaagggcgtgtgcaaagaaatcaaaggaagtcttgaaccaaatggtggcaactctcattgaagcatattcacatctagaaggattaaagcccaagttggtcaactacataaagcaacttgaggaaataagataatggactgatttggatgatggcccatgaagatataatatctagttntattttatattaaat

SEQ ID NO: 77229 - DNA, 408 bp, Glycine max
  unsure (1)..(408): unsure at all n locations
ataagccccataggaacacttccagtgtgctcttagttagtaatgctgccctagtaatgtgagtgtgctagaatttgttttgacagtctaaaatttaaaatttcctaacagccttagcttagtggcatcaagtccattttggggactacatgatcatgggatgaatcctagccaagccatttacttcacaataacagntagcctatcatctctctctccatactaggtcataccttagtaaccaaaataaataaataagtaaataaaattaagggttaattatccttttggtccctaaagttgcaaacatgcaacaactnttcctttcaatccctataatataaaacattccatttcggggggaaatcttttntatttatttattttttctaattgctatctcattct

SEQ ID NO: 77230 - DNA, 326 bp, Glycine max
  unsure (1)..(326): unsure at all n locations
tgcttcaaaatgcttcaacactaaactcgcttgctttttcaaggagagtaaagaaactatgctttcaagcatattaagtggtgaaggaagatgagaaactgagtgagcactaagattacaatttcggactcaaaccacttcagcttgaccactaatatcgtcatgaagctgaagtgagccatccttcatcaaatttatgctcaagctcttgaatctctcccttgaatactgccttgatgcgtttctccagtcagttccagttttcatcatggccacaaactcttcataactgatgcgaccatcctgngaaaacagaaaaataaaaa

SEQ ID NO: 77231 - DNA, 397 bp, Glycine max
  unsure (1)..(397): unsure at all n locations
gtaaatgccacattcttcttcaccagctcattgagaggcgatgcaattgtagagatattatgaacgaaccttctatagaagcttgctaacccatggaagctcctaatatctcccacactttttggggtgggccattcttggatggccttgattntctcagggtccacttggaccccatttctaccaactacaaaacctaagaaaactatattatctacacaaaaggtacacttctctatatttgcatagagggtgtttttcctaaggactgaaagaacttgtctgagatgtcctaagtgatcatctatgctcctactatacactaaaatatcatcaaaataaacaactacaaatctacctatgaaatcccttaagacatgatgcatatgcctcataa

SEQ ID NO: 77232 - DNA, 450 bp, Glycine max
  unsure (1)..(450): unsure at all n locations
ttctatacatgggggagaagtgaagtttatatggttcagccccttttgctcttctctctctttcgaatttgcttgaaaaaattgtttccgttaagaaaatccaagccgaggcgcttccgaaacgtttccgtaacgtttccgtgaggaatttcgtgaaggtttcgaccgttcttcgacgttcttcattcgttcttcatcggtcttcgatcttcaacgggtaagtacctcgaaccaagcttttcgattcattctatgtacccgtggtggtccacattgtgtttcgtgtatttttattctcgtttcatttacctttntatacccccttttgacgtgcttaagccattttctttaagtcatttctcgcttaacctaaaaaaaaaaaaaaatttccacccgatatttgaatngattattcgttaacttccggtacaatgaattccgacccgtccg

SEQ ID NO: 77233 - DNA, 358 bp, Glycine max
cttcacacacctgtctaatagctaagctcacctccttgagatgagaagctagagcttatctacacaccccctataatagctaagctcacccctatgaaaaaatacatgagaatacaaaaaattccctaatacaaagactactcagaatgcctcgaaatacaaggctaaaaccttatactactagaatggcaaaaaatacaaggcccacacgaaggaaaaacctattctaatatttacaaagataagcgggctcatacttagcccatgggctcgaaatctactctaaggctaatgagaaccctatggccttcccttggatctctggctcaatctactaggagtcttctatccaatgccc

SEQ ID NO: 77234 - DNA, 341 bp, Glycine max
cttgcgcgtatcagtcaagtgtatggaccatattttatccttgtgctcatcgataatggttccagtctaaacgtgatgccgaaaagcactttggagaaaataccattcaatgcttcccacctaaagccgagttcaatggtggttcgtgccttctacgacagccgccgagaggttaggggagagatcgacctcccagtacagataggccctcacacctgtcaagttaccttccaaataatggatattaaccccccctacagttgtctgttggggcgtccgtggatccactcagtgggagttgttccctctacacttcaccaaaagttgaaattcgtaatgga

SEQ ID NO: 77235 - DNA, 447 bp, Glycine max
  unsure (1)..(447): unsure at all n locations
agcttatgctgtanacttctactatatactcttctaacctcagcagcaaaatcagccacaatagaacaattatgacctctccagcaataggtacaatcctgggtggaggaatcatcccaaccttagatggtcgaatccttcacaacagcaacaacaacaacaacagccttattttcagaatgttgttggcccaagcagaccataagttcctccaccaatccaacagcaacaacaacaacagcaatagccccagaaatagaaaatagttgaggctcctccgcaaccttcccttgaagaaattgtgaggaaaatgactatgcaaaacatgtagtttcaacaagagaccagagcctccatttagagcttaactaattagatgggacaattggctacacagntaaatcaacaacagtcccagaattatgacagattacctttctaatctgt

SEQ ID NO: 77236 - DNA, 381 bp, Glycine max
  unsure (1)..(381): unsure at all n locations
acccaatcacctggttcaagcacgactttctttctgcttttgttgtctcgccttgcatagctcgcatttttcttttcaatttgaaccttcacttgctcatgcaacttcttcacatactcagctttagcctgtgcatccttatgcttaaacatagcaatgttaggcataggcaacaaatcaagaggagtcaaaggattaaatccatacactatctcaaatggtgaacaattagttgtgctatggacagcccgattataagcaaactcaacatgaagcaaacagggcttccaagatttaagatttttctttaaaacagtcctaagcagtgtgcctaaagtcctatngactacctcagtttgaccatcagtttgtgggtgacaa

SEQ ID NO: 77237 - DNA, 358 bp, Glycine max
accctcggaagccaaaaaagaatagagggggaaaatttcccatcacaagaaaaaagagaaaggaagaattttccaatgaaaagcaaaaaaaagaaaagaaggaaaattccccaatcaaagagtgggagaaagcaaaaaaagaaaagaaggaaatatccccaatcaaagagtgggagaaagcaaaaagaaaagaaaggaaaattcccaatcaaagaatgagagaaagtaaaaaaggaagaagaagaaggaaagaaagctcctgatcagggatcgaaggaaaaacagaagaaatgtgcagagaggtctttggaccggacaatatatgaacaatacagaattgtcaccaaatgaacaaaaa

SEQ ID NO: 77238 - DNA, 235 bp, Glycine max
  unsure (1)..(235): unsure at all n locations
tgcaagctatgctgcatatatntacaatagactttctcaacctcagcaaaaaaatcaaccacagcagaacaattatgacctctccagcaacaaatacaaccctggatggaggaatcaccctaacctcagatggtccagccctcagcaacaacaacagcagcctgctcctttcttcaaaatgttgctggcccaagcagaccatacattcctccaccaatccaacaacagcaacaac

SEQ ID NO: 77239 - DNA, 142 bp, Glycine max
ccatgaccaggcggcttaccaaaaaactgaccgatcgggcattagaagccggcctagacggcaagggtggaggagaacccccgggggggaggaagggaaaaaaagagagaaagagggaaaaaaagagggggaaaaaaaagga

SEQ ID NO: 77240 - DNA, 382 bp, Glycine max
aaaacttttgtgagtaagttgaatgaaccaacgggataaagttaattatagcaacttttttattttgaacagagatggggcatggaaacaaaaacagggtccccaccctttgtattttttttatttactgtgtaacatcttttgttgatctggctaattaagacaaaacaattaatttatttgaagaattgatcacattgtgtcaaaggaaaacattcaatatgttattttgctttgaatatgtctgagagccttcaaatacagggatatttatttttagttatcatatatttcttctgaggtttatatacctgcgtcttttttcttaacgtgactcggccgtagaaataaaaaatggcttatatattttgtaaaatatatg

SEQ ID NO: 77241 - DNA, 336 bp, Glycine max
gctcttgggtcatcaattgcgtgcctgagaaattgcagtcacaattatacctatcaattgacaacaacaacatatactaagaaacattaaatagaccaacaaagaatagtgaccacaaattgaaatcattgaatggactgttgatccacgctgccttgggaataaataaaccatttcaattatagtaaacattttgcaacaaagagaaggcatagtacaatgggcaaaagtgaattatagagatccctctcttaagtgaatattcctctagaatcaaccaagaaggatgagagaagcttataattgaaccatgaagggtggtacttcttcacaaca

SEQ ID NO: 77242 - DNA, 350 bp, Glycine max
  unsure (1)..(350): unsure at all n locations
agtcacctgcngctgcaagctttgatcctagaaaaccatgttttgttgtgtttctaaccccattactagcctagaaagtccttccgattcattntgtgtgttcattgttgtatgatatgagatgaattgcaaaggttgggacttgtgttagttgtttatgatggaatgagcctatacacttgagcttgagtgaaacaatgactgtgagggtgtggttgatgatccttcctttgattctgccatccttactagcctatttcagttgagactctaatgtgtatgtncctatctttgaaaagcccatgtttgagataagcattggattgaagcngcccatgatattcaattca

SEQ ID NO: 77243 - DNA, 355 bp, Glycine max
tacaattactggacaacatatctagttctatgtctttcaaatttggttattaaaaaagcttcatttgtgaaaaaggtattatccttgaattatgcactattcaacccttcattctagtgtgagtgttggtatttcatcattctattttaaaatcgagacatttgatcattctatttaaaaattctgaattttggtcccctatttaaaatacaaacatttggtctcatattaaaaaatctgaattctggccctatatttagaaatcctaattttgttaagcttaatttgctacattttattctacttgtatactcaacatttttgaggatctaaagaaatgtaggttagatcaata

SEQ ID NO: 77244 - DNA, 410 bp, Glycine max
  unsure (1)..(410): unsure at all n locations
gcttctatgattggtggatcttagagcttttatattttgtcttaatgcggattancagccatggagttgctgcggaagataaacgaacagaggtgagaggatgcgtcatccactatagaataagtcatggaaggagaagcttcaccaccaagagagtgccttggataagaagcttagagaggaagcttcaatggaggaagaaaatgagagaaagaggcatggaaactaaaggagaatacggagagaagtgaactttgaagtgtgtctcagaagtttctaatcatcaatgtgtgacagtgttcacatattttattatagcctatgtactaacttgtgatatcatttcatttcatgggaattaaaaagaaactcaagaatgtgccaaggtatttacatatctccttaatgcc

SEQ ID NO: 77245 - DNA, 445 bp, Glycine max
ctgtgtcactgaacatagcctacaggttctctttgtctcctcttggcatcatttcatctatgatcgctgccttgtccaaaaatctgttgcaattaaatttcgttttaacaatgatgtggtaatagaaagtgtcaactttgaagcaacaaaaaggcaggaaaaaagagagtctagtagttccacaatgaattgttggtggtatcaactcagaaccatagacccaaccctagtgtggcccccatgagttttgatgtttcagagttgactccattgtaaaagctatctagagcaattctccaaatggattattattaattaagtgttgtgggaataattcttgtatgagtgctacaactaattagatacttataatgtataaataatgatgaaagtctattatatttaggtggtggaaagtctatgttgaacctatgttatgttattt

SEQ ID NO: 77246 - DNA, 447 bp, Glycine max
ctgcagcttcacacatcaagcattaacatttttcatcatgaactatccaaaccaagaaaatagggccgaggcagaaaactctgcccaaaacacattccaataccacagttttcctcactcaaataccccagtaacattctcttcgttttgatttgctaaccgctggatcgactctaaaattttactggaggtccctagtacataagtctacattttgaccgttgggatctgctataaaacgtccataacccaatatgtacaacctttttcacaaccagccatgcataagcattttctgcacaagcacaaaattctgctgcacatttcaacagcaaaattctacataatagtgcagattttcgaaatcactcttgccttcattccaatttgcccaaattggatcctacaagtcctaaatcaagtataaatcatacctaaaccaaagac

SEQ ID NO: 77247 - DNA, 400 bp, Glycine max
ttactcacgcttttatgatggtggcgctaagcgctatgtctcgattttagagcctatttaaagcctgtgttgtgcagaattagggtagagaattcctagggcacagaatttacatatccacagtcctttttgggaaaagagccttggaagcagcaaagatgagcaacatgtgcattgaagcctaggttttgtcattagagagagattattgagtagagagtgagtgtgagatgttgagaaggggaaggggaataccccttcttgtgtaaggaacaatcaatctctgcttttaatcttatttaattgtagggtttctttgaatggctggctaaaaccctaatttgggatttctatgaatagctgatgtaatccctatttctaatgatatgtttctttgttc

SEQ ID NO: 77248 - DNA, 116 bp, Glycine max
accaagggtgacagctacatcaaaaaacggccaccactcggaatatcactaatcagccgagcaccagcgataacggaccaaaactgcgcaaaaaacaccccgcctgcaccatacag

SEQ ID NO: 77249 - DNA, 286 bp, Glycine max
ttactaaagatagagacagctcttgagaatatggagtgaaaagcaagcacatttactgcatcaagttctcaacaacctactgatgaaaaagatttcagcctggaatagcctcaacagatggatgatccatataacgttagcctttggctaaattatgtaaacgcctcatgatgcatccattctattaaacgcttctcttatattgtcatcggaatatatcaattatgcgagccaaactgttaatgtccacgggcagtctgaattagatctctatttgactgacaca

SEQ ID NO: 77250 - DNA, 213 bp, Glycine max
ctccccatttcaattacatggtggactctaaggtaccaacgaataacttgtataagaataacccttaacatatcacactttaattgtaacacgctctcaaatgaatttattttctgaaccaacgtgaaaaaatttatagtttcgtgtaacggagtattggaatgatctcaattctcattaacttgtttatatcgaaccaatttaatccacata

SEQ ID NO: 77251 - DNA, 387 bp, Glycine max
  unsure (1)..(387): unsure at all n locations
agctngccgcccagctcgcccagtcgagcttggttgcttcctccataagcaacaaccttctggaggaatcttctggagggcccaagtgggcctggttgctatttgcacccccctttttactaaatgcacccccttctattttttggtaattctttntccgtaacgttacgaaacttcacgaatttcgtaatgatgcttatttttcttccgcaaggttacgaatccttacggattatgtatttactcttttttagctttcgaagaagttacgaaaacttacggatggcgcaaaaacacctcttttcgacttccgccacattacggaatttcacggatcgcgcaagcctgcttccttttgatttctgagacgtctcgggacttcattta

SEQ ID NO: 77252 - DNA, 440 bp, Glycine max
  unsure (1)..(440): unsure at all n locations
ggctgaanaaaactatataacagcaccattgttctattttatggagccccctctctccctcgcgggagactctctctctctctcctctctctcttctattcttcgtttttagttttagtctctcttctctttctcttttattttcgattttttttcaattccagttcagacttttagttttatcaataaaatctcattctctatttgattaatggaaggctaagtccgcagcgttgttttcccttgaggatcaagcacagttctctttgaggttctattattactgttaaattctgtttagtttttcctcttcactaattactctgaatttggtgcttttaattcatgcatgcttagtgcttgataaatggctctgcgctaattaacgtcatgctaatgatcgntatgagtaatggtgatgtgtgcttatccatatgatg

SEQ ID NO: 77253 - DNA, 344 bp, Glycine max
  unsure (1)..(344): unsure at all n locations
agctgcagctttatcgattctacttttattttgtaattaagnnntccgcaaaggcagtacaaaatgattgttcgaagtgccattggaccaataaatttgtatctcttgaggtacttatttgctgtaacattgaagccaaaagtttccttattactatggtatctgtgtttgcttttgtaaaatctttgctctttgttaacttaaggtcatttttttccttctttctcttgggtcttcaataactgataatttttaatctttgaagcaaggacgaccgcaaagttgaggatgatagtgccaaacggatgaaattaatggatccatcatggaatagtgatcccatc

SEQ ID NO: 77254 - DNA, 372 bp, Glycine max
  unsure (1)..(372): unsure at all n locations
ggcaattgccagctaaaaaacacacgctcacacaaattaaaacatctactccctcccacataccaacccagttatgttagtcataattaactttacttatgatgattatcattataaatacataaatattataaaacagagaaaagtagcctggataccaagttcttctttgattcttgagaggtggttggcgattttagcctagcaaacaactcctggataaatgtatagtcattcttcaacanagagacaatctgaaataacagagcagacaacaataatgacaatagcctctaccagaaaatcctcacctacctcgattctcttccctctgttgaagattctgattaccccaatccctccgacatcttc

SEQ ID NO: 77255 - DNA, 317 bp, Glycine max
  unsure (1)..(317): unsure at all n locations
ttatcattcaaactatcatgaacaagtattctcaaactaaatgcaatgaacataaaaataaaaaggatngggttgcctcccagcaagcgctcgcttaacgtcattagctngacgcatcttactttatggatcaaggtcaaacttggttccaaccttcaaaaccttctcctcctcaacttcatccatctcaaaacaaaacattttggtccaacaacttcttttcttcctcaaataagttgaagttaatcttctgattatcaatacccatctccaagcttttctttctcgtatctaccacacaactgtgcaataacatg

SEQ ID NO: 77256 - DNA, 420 bp, Glycine max
  unsure (1)..(420): unsure at all n locations
atcaagtcttctacattacttatgggaagaattgggacctagctacagtagaagtctttgtggaagcaaatgcctcccttactcagtattatgaccagcccctaaggtgcttcacatttggggacttctagttagtaccaattgtggaagaatttgaagaaatcctgngatgtccgcttggaggaagaaagccatatctcttttcggggttctatccctctatggtaagagtagaaagggtagttaaaatctcggtaaaagagntggaccgtgtgaagcaaaatatgaacgaggtagttggaataacaaggaaacatttggagggaaaggaaaaggcattggcagatcaagaaggaatgggcctcgttattgacgtcttcgccctattgatatttggtggcatcctcttcccatatgtgg

SEQ ID NO: 77257 - DNA, 418 bp, Glycine max
  unsure (1)..(418): unsure at all n locations
tttcttttttccattaatattaatattaccatctcatcctttcatataaggaaacaaaccaataatatgtttctgatatttaattatgagaaacatgtaattacatttaagtgtattaattattgactctattttatatctntaatttatcacgaaatttattatggaaatattacttttttttatgaaagtagatgtacttattgatttatgacaatataacttatattcattagcaaaaaatattattccttttaatgtgttattatatataattattacttaaaccaaagcaaaattgtcaaaagtgatataaaataacattaaaaaattgagaaatctaggtaaatataaaattatcctcaccgataattaaatagcatgataaatgtataaaaaaataccatagacaagtatc

SEQ ID NO: 77258 - DNA, 422 bp, Glycine max
  unsure (1)..(422): unsure at all n locations
tggtctgttgactaactcactgtataactgttataatgtttgcagagtaatatactcatatatgtaaggtgtgaatgtttgttcttttttttttttggtattttacctggaattttgagtaaacaactttattaagcgcttattcaataagctcttatcacattagagattggtaggaaccagtgtcccaatctatcaagtaaatagtaaaagatgcaacaagaaaggtagggaatatgtattattcatgaaatgagggaaattacagaggaagagaattcctactgccgcagagcaaggctcctttagagagctactgctctctatccataactaacataatgatttacctctgataccctnctcatgcacccacagcctatatgctaaccaaaaatccctaaaacacatactattctctt

SEQ ID NO: 77259 - DNA, 408 bp, Glycine max
  unsure (1)..(408): unsure at all n locations
ctttntagttggatctatacaattcacctagcagatgtaaagagtccagggggctgaaaaaggatgattatataatgcacaatattgagaatattgttgtatgattgtgctaatcctaatcgtattgagaatattgctacatgattgtgctgatcttaattgattcgatttcttggcggtggttcgataccccgagtgagtggccaacattgtgtcgatcccttagaaagatgggaaggtatgaatgtgtgtggactatctggacctgaatcgagccagtcccaaagataatttttctctgtcacacatcgatgtcctcgtagacaacacaaccaatttcactttgttttccttcatggaggtgttctcacgctacaatcatataaagatggcgccagaagatatgga

SEQ ID NO: 77260 - DNA, 394 bp, Glycine max
  unsure (1)..(394): unsure at all n locations
ttaatgttgtgtatgagcctactattctatgtttatngatgtttctgtcacaatcaagtgatagttgatgtctccatatgtgcgtacactgtgattatgttttcgtttctagaattcatttggagtatctactgttgattctagatgagtgatccttcttgatttaaaattattgtctcctaatcaatcgagtgttcatcttattattggctgctcatcttccaatcatgtctagttaaactgcttgataatctttctcgttgttacttctaattcgaataaagagagacttcacctttgacaatcacgttaagatgttttgagaggaaatactcgagtagacatgatcattgttacctatagacgaaagtcaaacttagtaagacgtgtacct

SEQ ID NO: 77261 - DNA, 383 bp, Glycine max
  unsure (1)..(383): unsure at all n locations
gcttncttcttcaattcaagcgtctattatattatgattctcaatcggacatctgagtcaaaagatatggcagtttgaatttgcacggagcttccttatttacttttagttgtctcgatatgatatgagactaaatcggacattcgtgtcaaaagttatggccgttcaaattggcaagggggttcccttttcaatatcatgtgtctcgatacattatggagatcaatcgaacaaccgagtcaaaagttatggttgtttgaattttcccggagctttcttttccaattntgagtgtctagatatattatgagcttcaattggacattcgagtcaacaattttagcactttgaattcccacggattccttggtcaatttctagca

SEQ ID NO: 77262 - DNA, 356 bp, Glycine max
tgctcgcggagcttctatggaggctggatcttgagctttttgatgttcttaatggtgatattccaccatggagatgcaacggaagacaaaggagaagaggtgagaggatgcaccatccattatggaataagccatggaagaaggagcttcaccaccaagatgagccttggataagaagcttggagaggatgcttcaatggacgaaatgatagatggagagacagatagaggggggagcactaaattgaaggaagaaaataggagagaagttgaactttgagttgtgtctcacaagactctcattcatcaaagttacaacaagtgttacacatgcttctatttatagactaggtagc

SEQ ID NO: 77263 - DNA, 397 bp, Glycine max
  unsure (1)..(397): unsure at all n locations
tataagctccatggaacacttcagtggctcttattagtaagctgcctttaatgtggtgtctagaatctgtttgacagtctaaaatttaaaatttcctaacagccctagcttagtggcatcaagtccattttggggactacatgatcatgggatgaatcctaaccaagccatttacttcacaataacaagtagcctatcatctctctctccatactaggtcataccttagtaaccaaaataaataaataagtaaataaaattaaggtttaattatcctcttgggcccttaagttgcaaacatgcaacaacntttccctttcattccctataatataaaacattccatttgcgggggaaagctttntatttattattttttctattgcatctcattctt

SEQ ID NO: 77264 - DNA, 434 bp, Glycine max
  unsure (1)..(434): unsure at all n locations
acctattcatcttctttccaacccaaggtaaatcagtatgcttcaaaatgcttcaacactaaacttgcttgctttttcaaggagagtaaagaaactatgctttcaagcatattaagtggtgaaggaagatgagaaactgagtgagcactaagattacaatttctgactcaaaccacttcagcttgaccactaatatcgtcatgaagctgaagtgagccatccttcatcaaatttatgctcaagctcttgaatctctcccttgaatactgccttgatgcttttctccagtcagttccagttttcatcatggccacaaactcttcataactgatgcgaccatcctgggaaaacagaaaaataaaaaattggtataaggacttgtggaaactatgcatnggcagtattaataagaaagtaagaacctgctaaatgga

SEQ ID NO: 77265 - DNA, 440 bp, Glycine max
  unsure (1)..(440): unsure at all n locations
cctctataatttntatatgataataagcttcacatataaggttataagaggtataatatttcacaatgcaaagaatctaagaataaaactcgttaagttctttaataaagaatctcacacaaaaatatatatactaaaagaaatcatcattgaaaagaaaaatccaaaataataacttgctaatattaatatatttaagtccttccccttcctttttggtcatcatcattaactctagttcatcaagaataaattaacaattttaagaattttattctcatcaagtgatccaaattcatctcctacaatgtcctacagtttagtttcctcttgatggtattgtaggaaatatcttgaaaggagacgaatattgttatatacaaatactagatcctctgtccaangaggcggcaccctattacttttatagaatgaatgaa

SEQ ID NO: 77266 - DNA, 209 bp, Glycine max
tagacagcccgcttatgtttatacttacttaaactaagctgcatcctcagatccttcttgttggactagagctagcttaagtatctcacgaaagttaaactattttagcctaagctttgttctcagatccctcttggtggactagacttagaccaaacaacatttttgtaacagcattcttaatacctaaacttaatcggcagatccct

SEQ ID NO: 77267 - DNA, 422 bp, Glycine max
agcacagcaacacagaatctaggggtccatcacccctccattcaatgggttttctagggttgaaaagtgaaatttagaatgaggtaaatttgaagcaaactctcacctcacaccagtccatgacatccatttagacttgttcaaactggatttacacctaatatctcaccgaatcaaaatttgactcttcaacacccaaatttgccctagaaatggctctttgttcactctggtcatttatttttttctctctagcacagtccaagctttctcataagtcctaaatgacatttcaagctagtattaactcactttaacctccatttaccacagaattcagacttagccttccaaccctcaaagtctcactctttttccactcataacatcacattctcactttctaatccctaggggtagtc

SEQ ID NO: 77268 - DNA, 356 bp, Glycine max
  unsure (1)..(356): unsure at all n locations
tttttacatatataggaaaattcccttagcaatcccccaaattaaggacttatcataacttgaaacccttatgctctcttagaatcctaaaacaaggtcaaggatatcaaaattaggcttaggggtgtattcaaacaaatcattattacttntgactcaacaggggtgtaagggataaattcatcacaggttggctttttggctgagtggctaaaataaaaagaaacatgacattgatcatatccaccttatgcaaataatctaacattctaagaatgatgcaaaattaggaatataaaaatagacattctctcattattaaattcacacagctcactgggacaagataaagttat

SEQ ID NO: 77269 - DNA, 283 bp, Glycine max
atgtgtaaagccttgggctcatacctccattacacttcaactggacccgagcttgcttccctatttttatttattctgctcattgtttatgagagatttgaatcttccccgccatgacaaatatgtaaataaaatgtatatctacgaactccacatgatgtcttaaatatttggactaaaaaaaattatcacgactatacgactaaaaaagtacttaatcaaaataaaatgactagtgcatataatggttggtgggtagacactttaatactaatgtctcatg

SEQ ID NO: 77270 - DNA, 402 bp, Glycine max
gctgcaaccatcttcctaagagtcctctcacgaggtggagattgagccatgttcttagtatgaaaattagcagccgaatgctcaaaatcagaatgttcagaccatctacagaatgctcaaaatgcacagaatgattaggatgcacagaatgataaggatgcacagaatgatcaagatgcacactatgccttactaatatatgaaaggctctatctagttcatgatcaaagggttggaaatcacctggattggccctaagcatgcactatatgcagcaattaatgtatttctcaaactagcacccaaggtgggtaaaactacaactatactcatacgatatccattagagctaaaatttgtgagcacaccctaaatcatgaaagatagacaaaatgttcagac

SEQ ID NO: 77271 - DNA, 417 bp, Glycine max
  unsure (1)..(417): unsure at all n locations
ctcagcaaaaaattctccacagcagaacaattatgacctctccagcaacaaatacaaccctggatgaggaatcacccctacctcagatggtccagccctcagaacaacaacagcagcctgctcctccttcaaaatgttgctggcccaagcagaccatacattccttcaccaatccaacaacagcaacaaccccagaaacaaccaacagttgaggcccctccacaaccttccctcgaagaacttgtgaggcaaatgactatgcagaacatgcagtttcagcaagagaccagagcctncattcagagcttaaccaatcaaatgggacaatnggctacccaattgaatcaacaacagtcccagaattctgacatgctgctttctcaagctgccaaaatcacaaaatgtaagtgcatttca

SEQ ID NO: 77272 - DNA, 445 bp, Glycine max
  unsure (1)..(445): unsure at all n locations
tgttaaagccccacttcatcattaggattattatctgacatctcanacaaacaaatcaaacgtaacaaaacaattatagttgctggttgaatacctcacccactcaagtgtatcacacaattatggctnttctctaatgaaacactcttgccttttaccactctaattccccttgagttcttaggcaattcaagagattatggtcacaacaaagaacaattcaccaatatgtgtaaggtaaggctagagagacaaggaaaaggttaaccaagaaaaaggctaacaatgtttttaggcacaaatgaaggaaataaaattcagaatttaggaattcaagtaacaatccttcatgcaaccaatatattaccttanagagatatatntttttttaaagntcttcaagcatgaaccattcagcccaaatttttttttaaatttgcttata

SEQ ID NO: 77273 - DNA, 333 bp, Glycine max
  unsure (1)..(333): unsure at all n locations
tcacaagcaattaacacaaaacgcactccgtcctttactacctgtgtgtgaggccgagcttaaaataatcgccacacatccgcttgtgatgagccacggaatcgagcccaccgcacaacatactctctgcactcatatacctacaaaaatcacataatttaanttttctaccagtatggcatttattaaatatgtgaccaacattaacatcataacctgagaagtcttgaacgcgtccgaacaatcaacatgtagttcattcgcaccacatgattctgcattataataacccatatccgatcgttcagacattatttcatacatccactcatc

SEQ ID NO: 77274 - DNA, 371 bp, Glycine max
  unsure (1)..(371): unsure at all n locations
gcttaccagatgcgccaatcagtggacttttgtttgctgtgattntgcctgagctatcatgagtaaagatcngttacccactcattaatacaactagcttattgctagcaaaatcgagtcatattcatagtcctgatgctttcaatgttaatttccttattgtggtaatgcttcttctgatgatgagatggcttttgatctgaggatgaatcttcttcaccctgaanaggatcctgcagtgcaagattgaccaaagttgaccaaaaaaagtcatctgtgtccattttttacaaaggagtacactntntcgaatggaaacgaccttctaaggagactgcattccctactagcaatgtgttgattgatatttt

SEQ ID NO: 77275 - DNA, 420 bp, Glycine max
  unsure (1)..(420): unsure at all n locations
tctcctgaagtaggcagctgcacctaagtggattgttgttattgctagtgatatgtaccatgtgttattgttgtctagttattgcatgaattatgaatgtatagatattcaaaattttttcatatgtagagtcacgttcaaaccggatgttatgaatgtggatattacgtaatgcattggatgtggaacatcataaccagcgagataaagagtgactggtccatggtatgcataaacttgagtttctaacattgttgactgcaattggaactgaattttgttatttgcagtactagcttttaaatattaatacttgtagtggtttgctgatgcgacatcgttggacatcgacaacatcacanatattcgaaacatatgggcaagatattnnttaaagacttcgtgtaaaagggctaatga

SEQ ID NO: 77276 - DNA, 347 bp, Glycine max
  unsure (1)..(347): unsure at all n locations
cttccttggagagcatgttgagattgtctccctactcaattgatactgtgaaacacaggtattgattgttcatccctatgtgttctatgcgagaaaggtcttgagaattgcttctatgtgtttggtggatgtgaattaagtcagcaatgttggagggaaacttacttgtggtaccagatcagttttgagatgcccaattgtgatagttttcagaagctatgttcttctattctgcaaaatctcgatggcaaggatggtggcatgtttgctatgattatgtgcaacacttggtatgccatgaacccaatgctggatgattntggaatgtaactctgtcaatgcattct

SEQ ID NO: 77277 - DNA, 301 bp, Glycine max
caaccggaaaataaatgccttgctctaaaattggaacatcatagatgccggtgttgcaccatataaaatcgtcgctgcccacaaaaactttgaatggttcaatattagtgacgtgaacccttaaacggcgagcaactgcaggttttataaaatagaatgaactgccactatccaccaatatgttaaaggtatgcccctggtaagtcccttttagtcataacgtgcaaggactatattctcttgatagggagttaaaactaatgtctggaacccccgttccctcgatggctgaattgtactt

SEQ ID NO: 77278 - DNA, 376 bp, Glycine max
  unsure (1)..(376): unsure at all n locations
atgatttcatgattaaatcaagaacaaaatcgagaatcacgagaagtttgatttcaagattcaagaaaagatgaattcaagttccaagagaagaacccaagaagacttcacaagggaagtattgaatagatttttcanaaaacaaacatagcacaattttgtttttcaaaagagttattctcaaaattttctaagttaccagagtttttactctccggtaatcgattactagtttcctgtaatcgattaccagtggcagagtttgatttcaaaagttatcaactgaatttgccacgttccaattgatttcaaaatggtgtaatcgattacaagatattgtgtaatcgataccagtatatctgaacggtggaattca

SEQ ID NO: 77279 - DNA, 379 bp, Glycine max
cgtttatgcgagacggagaccaacatgctagtctatcatcgccaagtaccaagaagagttatgtctagccacggcccacgagcatagaatcgcggacgagtatgctcaagtatacgcggaaaaagaggctagaggaagggtgatcgactctttacaccaagaggcaaccatgtggatggatcggtttgctcttaccttgaacgggagtcaagaacttccccgcttgttagccaaggccaaggcgatggcagacacctactccgcccccgaagagattcatgggcttctcggctattgtcagcatatgatagacttaatggcccacataattagaaatcgttaggaaacttgtatggtctctcagaccttgactagatac

SEQ ID NO: 77280 - DNA, 400 bp, Glycine max
  unsure (1)..(400): unsure at all n locations
acctgcggcatgcaagcttagctctntaactgcctatcttctttgatattgaagagtatccttgtggaaccttcacccaacgaagacactgacaaaaacttatcttctccttcttggacaaagtatggcaggctgggggcaagtaaattttcttcccatcagaccttggatgcaactgtgatcgtatacccatatcagctagatcttgacgggtattcaagccatccttcgtcttgccttgaatgttaaggagcatcccaatcacactgtcacaaacatttttctccacatgcataacatcaatacaatgtctaacgtcaagatcacaccagtacgatagatcaaagaaaatggacctcttcttccatatgcaactctgactttatccttcttttgggct

SEQ ID NO: 77281 - DNA, 382 bp, Glycine max
acatttatttgtagttttatgtaaaaaaatcaagttttacttttgaagtcaaaaagtaacttccaaacatgcaattcttcatctttctagtgttggatttacatttgtactgagttttattgcagttgaagaatccactaccatttaatttatccttttgcataacaggttgggtttgtgaattccttggcttttgcaaaatcaggagaattcttagttgctggagttggacatgtgaaaattttctcaaactgtgtcctgcttgtatgcttcttttttttttttgtatactatttactgaaatttcgctggaaacactgccatggacagaaaagctatctgtgatgttggggggtaagataaatatttaatgcttttctct

SEQ ID NO: 77282 - DNA, 406 bp, Glycine max
acatttattgcttgctttgcttttagacctgcttgttttgcttttaggatttaagttttgtttcttttaggggcaaatgaaacctgaggagatttgggttatgggggtgctcctcgtgtagctcagcttatatcttaaactaaagggtggagcatgttgttcctattttatcattagcttgccattaccatgcttatatgtgtgcttatgtgtggaattttcatattttcttatgacacacatatttggtatataatgcatgatttgaaactattctcacatttcaagatagtgatttcacagatgtttattacttgtaactcgtaagtcaatcatatgtacgatttttaaaagcgatactaacttagtaaactaaaatatctattaccaatatcaactagttcaa

SEQ ID NO: 77283 - DNA, 356 bp, Glycine max
aaagtaagatgtgaagcattctaattctttgaaggttctgggagagaataacttccaaagagtcagtttggtgctatagccaacctgaggaatggtgcaattctgctgctgtctaccttaactgtgcactgatacagcttcctttctgctacttaggaattacaattggtgttaatccaagaaaaagggtggggtctgggatccaattataagcaagtttgaggctaagctgagtaaatggaaccagagaaatatctctatggttggtagaaccactcttattaatgttgtgttaacagcattacctctgtttatctgtctttttcagggcccctcagttgcattaataggatctc

SEQ ID NO: 77284 - DNA, 445 bp, Glycine max
  unsure (1)..(445): unsure at all n locations
agctcgcgttcctaggcctagaatctcattctagcactcatttaaacctctacgtgttgtccttatacatataaatcagtcccacaatcccaagcttacaaaaccatgcccatatgtcattgaagcatttcaccgagcacttggtggtgcacatgtttggcatgaatagcaaaagaatggtggcaatgtggcatgccccattattccataatgcaacataggcctaaggccatcccttacaaccccataagtgaggggggagagttttgggtggaggaaaactcctcctcactcngtttntatttgcaggtgcaggggagctcgcccaggcgagctaacctgcatattttttttggcgaacaaataagactctaatggcagcgttcgcttactcgaaccctcatgtacattatgatctaatactcatttatagacacacaacata

SEQ ID NO: 77285 - DNA, 382 bp, Glycine max
cacacaggattgaggcccattttgatttagatttttctctaaatgtctttatttgggttcatttattatgttgtgctttcacttattttatttttatcttaatttcttgcatttatgacagtttaatttcggcagtttaatttcagtagtttaaatttagtcatttaattttaattctgatagagaagtagaaagttattgattggttgccacacattttgagtgagaagaactgcgtactaatggatatttttgtgaattgttgattctcgtgcaagtaagcaccagtgtaaatgatggagtgtgaactaacaatacaagagtgaaaatgttagtatttctgacagaaaaacatggaatgagaaccttgatacttcaatga

SEQ ID NO: 77286 - DNA, 288 bp, Glycine max
cagcaccgagctgcagctttgaaactaataatttttcttatcttgaaagagaatgaggatctcaagaaagatcatcaagctcacttagttgattttgtcctggaatccactttgcctggtagtgtacaagatgcctctagttgtgaggaagtcaatgcactatctgacaaaagggaatggatctagtggatgccaaactcttcttaaagaatttcatgatttggaagagaccggaaatgcttaacccactcttgagattataaaaagggcgcaggaaatgcttaacaa

SEQ ID NO: 77287 - DNA, 402 bp, Glycine max
  unsure (1)..(402): unsure at all n locations
ttgggttagatatgttttatatatgacttaggactttgttgatccaatttgagaaaaaatggatgaaggcaagaaggaattacaaaatctgccctattatgcagaaanattgttgttgaattgtgcagcanaaatattttgtcttgtgcagaaaatgcttgtgcattgctgggtatgggaaaggtagtacatattggggttctggacattttctagtagatcccaatggtcaaaatgtagacttatgtactagggacctccagtaaaattttgcgagtcgatccaacggttagcgaatctgaacgaagagaatgtactggggtatttagtanggaacgtgtggtattgaatgtgtttgggcagagtttctgctctgcctgtttcttgttanggagtcatgag

SEQ ID NO: 77288 - DNA, 150 bp, Glycine max
  unsure (1)..(150): unsure at all n locations
taattttttttggcttacccttctcttcattgtggctcttcattntttctacatgtatctcctcatatttcttgtgctaaatgttgtaacttgattctttagagtttccattgattaaacctgctatagaagctacatttgattttctat

SEQ ID NO: 77289 - DNA, 311 bp, Glycine max
aacatcttttctatcttgtttggtacgacacaatgcaactcaagtagcccataactcgttcattaaatggtcataatcctcacgagtaggttgatactagtactcatgcagtatctcaatgggatccatgaatttaattatgacaaaccattcgcaatgaaaaatgtaaggatgttgggattgtgtgatgattaacattatgcttaagtttttcagtgttaacatccttaaaaacacatatgtgcatgcattctgaggtgctcaaaatgaagctcagaaaggttgtctcaaaactattgtcaagggaaaag

SEQ ID NO: 77290 - DNA, 417 bp, Glycine max
  unsure (1)..(417): unsure at all n locations
atcgaagtgggtctgagaagaggcaaatttaattatcctgctttgatgaataggaagcctacggcaaatggagagaataagaaggagggaggaacccatgttgtgactgtcggtcctacatggccaaatttcccaccacctcaacaatatcaatactcagccaatatcagcctttctcattacccaccaccctttcagccaagaacacccaattatccacaaaggccacccctaaatcagccacaaaacccgcttgctacacatcccataccaaacaccacccttaacacgaaccanaacaccaaccaaggaagggaatttccaaaaaagaagcttgtagagttcaccccaattccggtgtcgtatgctgacttacttncatatctactcgataatgcaatggtagccataatccca

SEQ ID NO: 77291 - DNA, 142 bp, Glycine max
aaagcttctcaaggaagctacctaggctataaatagaagcatgtgtaacacttttttgacctttgatgaatgaaagtcttatgagacacacttcaaaagtccacttttcttcctcttttattccttcaatattatgctcccc

SEQ ID NO: 77292 - DNA, 381 bp, Glycine max
aaagatttcatgtgcgatattatgaagatggagagcctaccctacccctctaatctaccaaagtaacttttgatgaaatattatcttgatttaaaatatgtgcaattaatagattacaacaagttgcatcgtttcattgaacttgatatacatcatggaggaggataaaagcaatgcatatatgaatttaacctacacttctttttaagttgtcaattaattaacaatccctttgtatatagctgttaaaatatatagtatgtcctattaaaaatatctatgtttaaaactaaaaaactaatatctatcatcatctatgatgtaataataaaaataaatatactcctgtatatatacatatatttgctatacgtttttaat

SEQ ID NO: 77293 - DNA, 177 bp, Glycine max
ttttggccgcactctcggtttggtttgtaaacgaaggggtgggaaaccccacactaattcttcaatgggtggaaaaccaaccattggtccccacatgtacaatgccccgctataccgggcttaaaagcgtgatcacttatgcttttataacaaaagacaggaaaaataatacccaag

SEQ ID NO: 77294 - DNA, 307 bp, Glycine max
  unsure (1)..(307): unsure at all n locations
ttatgcaatgcatgtcatctggtgtttttatagacagaacctacaaaacaaacaggtacagactcccactacttgactttgttgggagtgacaccaacggcgatgacattctctgctgggtttgcatatctggaggctgagcgtgttaataatattgtttgggctttggaacgatttcgaggcctacttttaaaacacgatcgcctccctcttgtattgtcactgacagagaccttacactgatgaatgcagtgaatactggcttcccgagtttacaatttgttggcangttcatatcatagaatgg

SEQ ID NO: 77295 - DNA, 293 bp, Glycine max
  unsure (1)..(293): unsure at all n locations
ttcatctcttttncctttgcccaaaagaattcgccaaggactaaccgcctgaattcttttgtgctctttctccttttcaaagaacaagactaccgctgaanatccagtgttcctttcctgtcagaataaacacatgctggaatctttgatctgcctttccttatacaaagtgtttaaaggactaaccgcctgagaattcttttgtatccccattcacaaagtatcaaaggtttaaccgcctagaatctatgacgtatcacaattganggtacattcttttgggacatgtagag

SEQ ID NO: 77296 - DNA, 270 bp, Glycine max
acattaatagaaaaacaaatcactccaacacatgtagacagattcaaatacgagaacaaattaactgtcaacctattgacaatattaagaataaaaaagatatagatgctattaatagcattgtaccaacttcaacaagaattgactaacttgtactctgactataggaaagagagattacaagataggccaaggaacccaattcacgcattatgccttttgcacacaatttcagacttcagctgctttcacaaattactcaggcagtga

SEQ ID NO: 77297 - DNA, 341 bp, Glycine max
  unsure (1)..(341): unsure at all n locations
cataattaacgngaacgaattaagcatcagccaataataatgttaccactacagaaattatacgttcgcatctcaagtaaaatattacatatttcaaagttgtcttaacgttcatatattttttgcatggattatatacataacttttcattatttattgagaaaaatataaaactgccatagattttattttccgtgtagatcaaaatataaacatgtgaatgcgtatgattaaaaatatcaattgcatacaagtctacaataataaaatattgagcacttatttgtgaaacttttattgacaaagcacgatatgtcttgtgaattaatggatctcaatc

SEQ ID NO: 77298 - DNA, 182 bp, Glycine max
atctagtcaaggtctgagagaccatacaagtttcctaacgatttctaattatgtgggccattaagtctatcatatgctgacaatagccgagaagcccatgaatctcttcgggggcggagtaggtgtctgccatcgccttggccttggctaacaatcggggaaagtctttgactcccgtcagg

SEQ ID NO: 77299 - DNA, 392 bp, Glycine max
  unsure (1)..(392): unsure at all n locations
acttgctttccaatctgacatttttcacagattctgccctcttctattttcagattgggaatgcctctcacagcacctttgtcaatgattttcttcatgcctcttaagtgcagatgttcgaacctttgatgccataatttgacttcatcttctttggaggatagacatgtggaggagtagctggtttcttggggtgtccataggtaacaattgtcctttgatctgctgcccttcattagaacttcactcttctcatttgtcaccaagcattctgacttagtgaagtttacattgaatccttcatcacacagctgactgatgctgatcaagtttgcagtcagtcccttcaccagcagtactttgttcagactangaagtccatcatgaactag

SEQ ID NO: 77300 - DNA, 420 bp, Glycine max
  unsure (1)..(420): unsure at all n locations
tggctccttgcatctatgtgagcaccaatcctcacacagatggttggcttggatcaatcattggcaaattggaaaagattagaattctactatgcgtctcaaactcgtgcgaaggtaaaaaaaattgaaggtacagttgcgtatgattaagaaagataagtcaattttggaatatttacttgcaatcaagaaaattatagattcactagctgcgattggttctgtgatttctaatgatgatcatataaaagcgattttagatggcttgcctgaagattatgattctttngttacttttgttacatcatgtttagatccatacactgctgatgatattgaggcacttctattggctcaagaagagccgttngagaaacacaagatagcttattcgaatttgattctggctaatactgcttc

SEQ ID NO: 77301 - DNA, 412 bp, Glycine max
  unsure (1)..(412): unsure at all n locations
gatgcagataggttgagctaccttatgcactcctctaatgactatggcatcatttctggcgctaaactgctgggagttggaagccatcttctcaattaaatttctggcttcagcaggagttatgtctccaagggctccaccactggcagcatctatcatacttctctccatattactgagtccttcataaaaatattggagaagaagctgttctgaaatctgatggtgggggcaactggcacatagtttcttaaatctctcccagtactcatacaggctctctccactgagttgtctaatacctgagatatccttcctgatggctgtggtcctggaagcagggaaaattntttctaagaatactcttttaaggtcatcccaactcgtgatggaccttggagcaaggtaatac

SEQ ID NO: 77302 - DNA, 293 bp, Glycine max
  unsure (1)..(293): unsure at all n locations
ttgtgggagnatgctcaaanatatagggcaaatatggtttggcatcttgctagattaagatgaaataagggtgggtatgggatggccctacgtctataatgcatttttgacaaagggacatagccacatgtccccgttctcttgctattgacgcctatacgcgcgcccaccaagtgttcggtgaaatgcctcaatggcattagcgcgtgacttttgtaaggaaacaacccatggcgcattatcggtttgtacaccattttcttctttttgaatatgtattcattcctgaaaag

SEQ ID NO: 77303 - DNA, 361 bp, Glycine max
  unsure (1)..(361): unsure at all n locations
gacccactaacctataagttttataacttaatgccactatcctanggaagtaaaataaaacttaatggctgagtgcaactgaaattgtggcaaccaatagtcacccccaacagccatcaatgtagccaccatttggtctcccaaaggctgatgcctacgtttccaattgggcccttattcaacttgaactaaacctaactaagcccttttagttgattaacccagaacatatttttgtcagccaactctacaaggattgagccattatttagacaaactaaacactctaaaattgtgaccaagtggngccatttagtcctcctccatttgggccatgatacaactcacaaccttggacttt

SEQ ID NO: 77304 - DNA, 301 bp, Glycine max
agaccaaaacacatgatcaggtttgcacaagatgcatgagctcatataatgacattgatatgaagaatttttgtgccaaatacatcaagctcaagaggtaatttgatgtatctattactattgcatgatgtaacaactataaaaaactatagttagggtttagctatattgacttgtctttcttgagctttagataatagggctgactttaagcaagaaaatattggaggatgcacgttgcttctccaatcatgggtgtaggactggaatacatgcatttcttcatatgtgtaagtatgca

SEQ ID NO: 77305 - DNA, 378 bp, Glycine max
cttcatggagaatgagaaatggagctgaaacgatattgagaaaatgtcaatatatggccctttgcatgatcaagatgagttaattgatgatgtacccatgagaggcactagattgtacgttctcacatatttatgaaagatgcaacgcagcatctctagaacctagaggatactgggatgcaaaggatgatccaaaatggagggatgcaatgccgaaagatctaataggagtttgttattttctaccaactgtttgaccaagtctttatgattagttgtttatgtccaatacttgtagttgtatattagggttgtattgtatatgagtggtgttattattaagaagcagtatacggttcttctttatacaatctattt

SEQ ID NO: 77306 - DNA, 340 bp, Glycine max
  unsure (1)..(340): unsure at all n locations
agctngccaagacaacgcacacgtnctcttttttcagggcctttgtactttgaatatatatcatttgtccaatcagtagaatcttgcgtgctttgtaaatattgcgaactctctgcttcaaccattttctttnttagttcatcctacataaatacaccttataaatacaccttataaattattatcatacatcaatatcctgaatacttcaatatcactaaacataactcatctccacattagttacttcccctcaccccataaccttctattagaaaattgagcanaacaaagagaaagtattgaaataaaaattaaaattcttacaattacaatagca

SEQ ID NO: 77307 - DNA, 346 bp, Glycine max
accgaccctttctctcctgccgcacataacattattaacgcgaaagcctcagtccaattctatgatgtactgaccaaaccatgtgaagaaacttccatcaagatattttacattaaagatgaatatcaaatcacaatgataaataaagtcaagagcagaaaccaaagaccacatgaatttggcactatgcataaagtgtatgtgcaaaaaacagaaggcggaacagataatccttcagatatggatgcataaaagtgtagagtcatcatctccgcgcacattttttacatttcattctacagctgttagataaaatatagctctggacaaatagtaaatgaagttc

SEQ ID NO: 77308 - DNA, 185 bp, Glycine max
ttttattaaaagactttctgaaaagatccctatggaccagaaacggataacgtgctgcgagaggaataatactatcaatggtagcaaattgggcacaaagtaaccctttttttggattaaaggatgacagaaaatgcggtgtaccaatattcacttaaggtcgtggatcaaaaacaggggcgtta

SEQ ID NO: 77309 - DNA, 288 bp, Glycine max
  unsure (1)..(288): unsure at all n locations
agaagaagaatttcaaagagactcacaaatcaaaggggaaaagttgcttgcaaaggttgtgttaagaatgaattggaaagatagattaattgaaatgccaaacaaagtcttacttttatagactcttcatgtctggtcaagagaaccattagaagagttatgacctttataaaaacttaaaaccaatttgaaaaagtcaaaaactatttgaagagttacatnctttgatttgntcagaaactatcactggtaatcgattaccaaatcagtgtaatcgattacacaaag

SEQ ID NO: 77310 - DNA, 166 bp, Glycine max
tgagaaacaaaaacttttgtaccagtgttggagatacttaaaccttcaccgctgcctatgaaaatctgctcaggtccatcaaaatgagtaaaatggttaatcatttgagaatcaccacgtacatgaaaactggctccaaaatctggtatttaagtggagccagatg

SEQ ID NO: 77311 - DNA, 189 bp, Glycine max
  unsure (1)..(189): unsure at all n locations
ccaatcaataacataaaggagaactagaaggaacctagtcgttccaaccacaatgataaccaatgttctaataatagagaaacgaacaaatgggggggggggntntntttttaacttatttttttaattacttaatttataaatttaaatattaataaaatttatattaataaatttaattaaataaaa

SEQ ID NO: 77312 - DNA, 330 bp, Glycine max
gtagtgactatgttatgggtgcagctctaagacagcggcgaaacaagatattccatgccatataatatgcctgcaaagtcttgattggacatcgtctatgccttagagaagttatggtcttatctggtgggggccaaagttcttatcttcacagatcatgcaaccatcaaatatcttttcaccaaggcagattcaaagccaagggtgataagatgagtcctgttgattcaagagttcgacatcgtcatcggagataagaagggatccgagaatgtagtagttgactatctctcttattagtgaatgaagaagtgacacagaaagagaaag

SEQ ID NO: 77313 - DNA, 337 bp, Glycine max
aactcttccacattcacaaattacacatgaacccaccatccccagtggcccaccttcaactgagctcacgtacccccacgtagcccttattctctttcttctagcaccgggtccccatcaaacccctcaagctttcacaatattcaagcaattcaatatccaaacgtcatgaactaccctataccaagaaaacagggtagaggcagaatactcttgccaaaacacattccaatacgaacaactttcctactcatatatcccagtaacattctcttcgttccgattcgctaactgttggatcgactcgcaaaatttactggaggtccctagtacataa

SEQ ID NO: 77314 - DNA, 455 bp, Glycine max
gcttaatggaggaaaagaaagagagaaggttggagtctctaaatgaggaataaaagagggaaagaagtggaactatgaagtgtatctcataagactttcattcatcaaaggtacaacaagtgttacacatgcttctatttatagactaggtagcttccttgagaagctttcttgagaaaactttcttgagaagcttctttgagaaaacttccttgagaagctagagcttagttacacacacccctctcataactaagctcacctccttgagaagcttccttaagaagattcctatagaagcttgagcttagctacacatacctctctaatagctaagctcacctccttgagatgagaagctagaacttagctacacaccccctataatagctaagctcacgcccatgacaaaaaatatgagaatacaaataaaagtccttactacaaagactact

SEQ ID NO: 77315 - DNA, 376 bp, Glycine max
cttcattttgagttttgcttccttttactttttaattcactcccctcaagtgagtgcaatttcccttggtcatctggctctccattgatgtgttttggtgctttagttgctcactttttgcaaaattcgtgaagcaatttgcatctgaatccatgcttgttttgtggagatgacgacttgaatgaggaggccttaggcctatattgtattctgaagcaatggggcatggcacattgcccccattctcttgcaatttatgtccaaacatgcgcccatcaagtgctcggtgaaatgccccaatgatatatgactatgatcttgcacaattgtgatggtggcgctgttttatgtatgtagagacagcatatgaaagtca

SEQ ID NO: 77316 - DNA, 390 bp, Glycine max
  unsure (1)..(390): unsure at all n locations
ttataccccggtgacgtgctaagccatttaattaagtcatttctcactaacttaaaaataaaatcaatttccaccgaacgtttgaattgtattatcccgtaacttccggtaaaatgaattccgaccgttcggtcgtgccgtaaccacgttggaaatcaaaaagaggtaaaaaataatataataatcaaaaaaacatcttttagtaaaataaagcgaacaatcaatcggacgttttttctctttgggagttctcattcttaatcgaattggataataactaaagtgaaactaaggctaanatcaactcgcctagtcaagctcgtccacaaaaataggcttttcaagtttgtcatttcaatttctcactaagtaanatggatcatttttaag

SEQ ID NO: 77317 - DNA, 402 bp, Glycine max
  unsure (1)..(402): unsure at all n locations
gcttcttccgtanacattccggatgacgttctttttattttgttcctgagcacttncggaaatcacatattcttcttccggaagaaggttcttccggataatttccagaaagaggttttccgacaagtttccgaaaaaaatcttggttcggaagaagaattgctgaagggcagtttcgccacttcactgtttgctgggtgccccagcaataatgctgggtgcacgtaacaactcccctcatattggaccaactaaaactctgattgagctaggtgggttaaaaaagattgacaattgctatttccactcctctaagtactaatatatttgcttttncaatttattttccacaattacccagaaaattacactccccgtcttactctccatacgctatttgtt

SEQ ID NO: 77318 - DNA, 388 bp, Glycine max
  unsure (1)..(388): unsure at all n locations
ctagatggaaaaagcatccacgaacgtggaatgcccctcctctgaagatatactttaactaacctacactccaaacccaatgttggactctctttcctacctcaggttttttgtccaagaaataaaaaatacagggttttggcttgaaggtttttaacaaagcacatctatgcgtaatgaagggaatttgtactcaattaaatacattgaataaaattctgcatcccttccctttcacatttctctgatcaagacaacaacatgcatagtcatacctccgaggctctcannaaccctangtctggcccttggtgagcccattcttctagcattatgactccagtacatgtcacccatattaagtgacatgtacgcacgagcacactac

SEQ ID NO: 77319 - DNA, 443 bp, Glycine max
  unsure (1)..(443): unsure at all n locations
gcttagtctcgcatgatgtcctaagatgatttggtttatatacaaattgaagccatttcgtatggctatgtgttgaaagtattatgaatgctcaggtctgtagtcaactagatgtaagctttgcagttggaatgttagaatgatatcaaagtaacctggcaatagaactctggaaagttgcaaagaatgttgagatacttacgaggaacaaaggatcacatgcatacaaatagaacttttgaccattacgaaagctgaatttgtagcatgttttaaggctacaattaaggctaattggttggagaacattggntttggatttggaattgtcgatagtattggccttgtcactgaaaaattattatgataactctatagcaacatttttataacaacaacaagtaccctataggtgtgcaacatgtggaattaaagtactttgt

SEQ ID NO: 77320 - DNA, 401 bp, Glycine max
  unsure (1)..(401): unsure at all n locations
ctgacagctatnggttcactcaagcacaagtgtttaggttatccatcaatcaacaaccaacataagtctcaacctttgcacttcatctcatgccatacagtcaagaacacacaaactgaatccgaaggacttttctaggcttgtaacgaggctgggctgcaatcaattcatggtttttctaggatgcaaaaacttaggttctaggagagcattcatccttagatcaacctttttctttttattccagctctattacttgcttttccacacttagtttttctttttcttaattagcagcacacacacttttattttatacttacnaatttttttaatacttgctacttattagatgactgtgtgtgtgttcttttcttaccatntcaagctttcaccccata

SEQ ID NO: 77321 - DNA, 215 bp, Glycine max
atgagaggttggatcaaatggagaatagagaccatatgaattgctcaagagcttccattgttcaatttcgagcgtctagatatataatgcgcctcaatcggacctccgagttaagagttatgaccatttgaaatgctcaagaagctccattgttcaatttcgagcgtcacgatatattatgcacctgaatcggacctgcgagtgacaacttatga

SEQ ID NO: 77322 - DNA, 368 bp, Glycine max
  unsure (1)..(368): unsure at all n locations
cactacgcttcactcggggcccgatcaggcgcatatatatctagtctctcgaaatngaacaacggaagctatcgagaaatacaaatggtcaatacttcgaactcggaggtcctattatggggcataatatatctagacgctcaaaattttacaatggaagctctttggctatacaaatggtcataacgtttcactcgaaggttcgaataatgcgcataatatatcgagacgcttcaaattgaacaatggaagctcttgagcaattcaaatggtcataacttgtcactcggaggtccgattcagctgcataatatatcgngacgctccacattgaacaatggaagctctcgagcaattcatatgggcat

SEQ ID NO: 77323 - DNA, 384 bp, Glycine max
  unsure (1)..(384): unsure at all n locations
attacctgacatctcanacaaacaaatcaaacgtaacaagacaattatagttgctatttgaatacctcacccactcaagtgtatcacacaattatggcttttctctaatgaaacactcttgccttttaccactctaattccccttgagttcttaggcaattcaagagattatggccacaacacagaacaattcaccaatatgtgtaagggaaggctagagagacaaggaaaaggttaaccaagataaaggctaacaattgttttaggcacaaatgaaggaaatacaaatcagaaattaggaattcaagtaacaatccttcatgcaaccaatatattaccttaaagaggggtttttttntaaagntcttcaagcatgaaccattc

SEQ ID NO: 77324 - DNA, 373 bp, Glycine max
  unsure (1)..(373): unsure at all n locations
catgcgaagcgcgtggaattcctatagcatttcccttatgttatcaaacataagaagggaaaaggtaatattgtagccaatgctctttctcggcgtcatgcattactttctatgctngaaacaaaattgattggtcttgaatgtttgaaaaacatgtatgacaatgatgaaacttttggagaaatttttaaaaattgtgaaaaatttcagaaaatgggttctttagacatgaaggctttctttttaaagaaaaccaaatgtgtgtgcctaaatgttctactagaaatatgcttgttcgtgaagcacatgaaggaggttttatggtgcattttggggtccacaagactctataaacattacaagaacattttta

SEQ ID NO: 77325 - DNA, 462 bp, Glycine max
  unsure (1)..(462): unsure at all n locations
agctnttcgtcttacagnatgcttaaagnttanacngataaccactcgngtatttccgcccgtcagcgtgactcaaaagtcagtatgaccgatcttgtgagcgcggaagataacgtaaatctccacgtgtcaacgggcttgtcggccgcgattgacgaagggcgcagaagacgacgttagtctctgcgtgctatcaggcttttcgtcttacagacaacaaatagtttatacggataaccactcgggtatttccgcccgtcagcgtgactcaaaagtcagtatgacagatcttgtgagcgcggaagatgacgtaaatctccgcgtgtcaacgggcttgtcggccgcgattgacgaagggcgctgaatacgaacgtagtctctgcgtgctatcatgcttttcgtcatacagacaagcaaaacgtttatacggataaccactcgggtatttctgcccgcagcgtg

SEQ ID NO: 77326 - DNA, 415 bp, Glycine max
  unsure (1)..(415): unsure at all n locations
atagcacgcagagactaacgtcgncttctattctctttgtttatcgcggccgacaagcccgttgacacgcggtgatttacgtaatcttccgcgctctcaagatctgtcatnatgacttttgagtcacgcagactggcggaaatacccgagtggttatccgtataaactttttgctatctgtaagacgaaaagcttgatagcacgcagagactaacgtcgtcttctgcgcccttcgtcaatcgcggccgacaagcccgttgacacgcggtgatttacgttatcttccgcgctcacaagatctgtcatactgacttttgagtcacgctgactggcggaaatacccgagtggttatacgtataaacattgtgctatctgtaagacgaaaagcttgatagcacgcagagactaacgtca

SEQ ID NO: 77327 - DNA, 346 bp, Glycine max
ttcacataaaccccttcctctaaatcacaattaagaaaagttgttttcacatccatttgttgcaacttaaggtcaaaatgagcaactaatgccaagattatacgaagagaatctttcttagatactggagaaaaagtctctttgtaatctattccttccttttgagtaaatcccttagcaacaagacttgccttggatctcttaatgttgcctaatgaatcccttctggtcttaaagagccatttacatccaatggctttgcctgaattgcatcttacaggttccaaactttgtactctgcatgaatcatctatcctcatggatataccataattgacttttacac

SEQ ID NO: 77328 - DNA, 224 bp, Glycine max
actgatttttatgaccgcggatctaaagaagaatgttttccgtttaaattgaaaaatagtgggggttctacttataatacacctgtttatacacatgagtctactaatgtttttttttttaatgaaccttaaagaagtaaaaaagtaatgtcttttttaatgaaccttatagaaataaaaaagtacatgtacctaaggatttaagcctaatttatacttataac

SEQ ID NO: 77329 - DNA, 362 bp, Glycine max
acagaatggcctgctcattattaaagagccattatatagagatggacttaattctcattaattgattgaatgcaatatataggcatatgcccattctggcgatacaaaatagatccttcctattagaaaactaataaactcctttctggaaccccctcaattatatatctacttgtaagacataatcagtccatttctatggtgctaccacattccttatgggtctgctagaatctaccacataattagtccatttctacttgtatgactcttatagacatgtacctgtagctcttttctagattggcttctaggccataatagtcattacctcgagaagccattcttttttactgaagata

SEQ ID NO: 77330 - DNA, 392 bp, Glycine max
  unsure (1)..(392): unsure at all n locations
ataaaaagggatgccccacattatttccatgacacaaatgcaaaaatgacgatttggaaattttatgcaaaactggttatgcatgcacctatgcggacactcaagtgtcaaaattttatggtcatgtgatgctagggctcangattcattttctctattttagtcaacccaacgtttccaaaatatgttcttttatcaatttgtgcattcatccgagtccattttgggcgtctgggaaaatcttcacagcattcacccttcaggtgtatacacattttttcaaaaactatgtatgatcacgtgaattttcccaaagaaaagtggaagtcatctctttttcataagcatgtgggttgtcagcttgacaacttattttttctttttctccttct

SEQ ID NO: 77331 - DNA, 310 bp, Glycine max
ctcagcttaagaaagaggaataatccacaggaagaggaaagagacaaatcagactactacatgagacacacttttgaagtctgtcaatgacgaacaacaagagtcttttgtctggcataagcacagtgggaccggactctccctgcagacttgcgacacataatataagaagcaccattgatatttccccactatgtatgccattgcatttgcaccaccattcacaaaaaaaacgcttcatttcataccatgttgtttactgctaggcggttgtgaaactttcctatgcttgcaagacaaaatcaccctc

SEQ ID NO: 77332 - DNA, 217 bp, Glycine max
  unsure (1)..(217): unsure at all n locations
ttcgatatacattcacccaacaatgcaccatcacttaaggggatgaatatctatatatatatatatatatatataggggcaggtactcaatacacatcattcacataatggaaaggagatatgtgatntaccttctccattcaacgaagagaaatatgggaccaactatggaggagttgattataaaacacaactctgccaaaataatcccaactta

SEQ ID NO: 77333 - DNA, 395 bp, Glycine max
  unsure (1)..(395): unsure at all n locations
gcttctgngtcaactaaaggggctccattttctttttctatctaactccactggagcggcgagaagaaatggttcctcctgctccatccagaccaaaaccaataccttcacgtcttgaagtctcccctctacgacttcttggatacataccaaagagggtacgactataacggtgtgcaaacctctcccgcaacatatttgcctcagcaacaagagcaggtgtaagattggcaaggatagtatctggtgatgtcaagagaacctgaacagaanaagaaaaaaaagaaaagataacttaagaccacagaaacaatctcactattatataacagctatgaactgacanacttgcctcttctcgtatatctgatggaaaagttgcaattattgagact

SEQ ID NO: 77334 - DNA, 360 bp, Glycine max
  unsure (1)..(360): unsure at all n locations
tataacttgcctccttccaaacaatatctttatttgtcgcaaatataatactaccaatatgaatcatactaaaggccaatagggaaccatggaaaaccatcagatttataaagcatattctgattcagcaaataaccagaagcaacaaaaagcgtattagacaacaaaaggtaccatgtaatgctcaggataatggccatgcaagtgtcaatccaacttcatccaatactggagatcattataaccaaccaaagacaccaccgcatatgggtcatggcactgtaancgagcttcacacgatgctgaagatcattgaagctatcaaagaatatcattttatatctttatattccactcata

SEQ ID NO: 77335 - DNA, 389 bp, Glycine max
  unsure (1)..(389): unsure at all n locations
aaaaaaaagtgctcgagggtgacctaaagtatgctgacctcccttgtttgctggttggtatgtggaaattttgtaccatggggacatttgaacttgagatttttacttanngaatggttgtaatctttgcatgcttgtcttgtacaagtcatcatcattatttttgtgtcttctgcaaacttattaagaggtgttgtcccattttgacatggtggtatgcatagttattttgatgttaacaaaaatataaagtattgattatttgtgttatcatgtgttagaaaaagcatgacatactacataatgagnctttaagttngacacgtattctagaaagctattatgaggaagcgtcacactcaatggacgactatgtgtaaactggcgta

SEQ ID NO: 77336 - DNA, 318 bp, Glycine max
  unsure (1)..(318): unsure at all n locations
tatattttaggatatctaagntatgtggttttttcccttttattgccttaataccatccttttgcattatctcatattggtattttttggttcttcattctggattaaaattgacagcgactggaataaggttgaagccattgttgtatcaaagacagtcatccaagtaatttcaaatgcaagttgtgactggatatttacattatctgttgtttctgnggtgttatccataaatgttgtggattgaattangcatcttatatgttttgaagtgtgtttgattattgtacattaagtattttggcactctccaaataa

SEQ ID NO: 77337 - DNA, 479 bp, Glycine max
  unsure (1)..(479): unsure at all n locations
attacgtgacacatagaactactcaacctctctgagtggaagaaggatctctctagacttgatgcatagttttttccatgggtatatccttggtatcattccatgaatacgatctttatttgtgggaattnttcaagtgtgcccttgatagggccaagaggatgtgtatcatacaccctaacaatagctctaagataactcanatagactcaaggtgtgcccaggacagaagagttaggaggtctaagtgtccaatatgttctaggtgatggtaataggcaacaagcagaagttaaaacagcttatgagatgttaaaaagaaatgggggaaagagcttggaaagtcttgtgtggctgcatttctagagtattaggaatagagaaaggctagaggaatccctatttgtaaagaagtctcacatggagatagttcatctcatgaatctagccgagcattggcttctttgagttcttaattg

SEQ ID NO: 77338 - DNA, 474 bp, Glycine max
  unsure (1)..(474): unsure at all n locations
tcacctgcggcatgcaagctngagatgaggaagtgagattggtgtttcttcctgcttttactcgttgaccacagagtggtacctggagatatgtcgcgggggtcaggagaccttggggacgtcaggtggggtgctattgcccaaaaccaagcttgaccaatcctgacccaacccgggcatagtcagtcagtgagaacctgtgatgtacctaaacaggcgagctcctggcagtcaacagataaaaggaacaaaggccacaaagcaagggggcttgtggtggctggccagctgtngaaattgattgatatgtgagatatggcctctggtaatcgattaccatgggtgggtaatcgattacaaggcttataaatgaagacaggaggctaagatggtctctggtaatcgattatcaagggggtgtaatcgattaccaggcttganaacgaggtcangaagctaanggagcttctggta

SEQ ID NO: 77339 - DNA, 369 bp, Glycine max
  unsure (1)..(369): unsure at all n locations
tcaccatggcagaacaagccagacaggggttttacgtcctatatctgtgtgactcaagatggntagtggttctacaatgaataacaagtggtatcaatcaccaaaatgatgcttcaacacttgatattaatgagacacatgttttctcccaacaaatgccttccataaatgcagaacatgaggatgatgatgtacatgcaaattgtaatgatcataatgaaggtttatgggagagtatccgtacataactacggtataccaaagtaatgtatatcatatcacattaattgcaataaatttttttaatggcacatatttttatttcatacttatatgttgtttcaattgctttttctttaatgaatttgt

SEQ ID NO: 77340 - DNA, 206 bp, Glycine max
ctgctccaagggaagattctctatagctacaatactcagaataactctgatgggagtcatttttacaacctgagaagaaagctctgtgaaatcaattccatgttttagcttataccctttcaccacaagtctcgccttgtatcttcttctacccgcagattacttgcttagcctatagacccacctattctaaaacgctttctttc

SEQ ID NO: 77341 - DNA, 324 bp, Glycine max
ttcctatacagccaagtttctcaccaacccaacaatgtcattactcagcctataacagaccttttccttacccaccgtccaattatccacaaaggcaatccctaaatcaaccacaaagtcttgttaccgcacttccaatgacgaacaccacctttagcacaaaccacaaacaccaaccaaggaatgaattttgcagcgagaaagcctgtataattcaccccaattccagtgtcctatgctgacttgctcccatatctactcgataattcaatggtagccataaccctagccaacgttcattaaccttcatttctccgagaatac

SEQ ID NO: 77342 - DNA, 283 bp, Glycine max
  unsure (1)..(283): unsure at all n locations
gaaatattattgaacccctattaccacgtcgacagtgatgtggaaagaatgtttttcttcgtgattaaagcagcttgttagcccattnttgttagtatccctcacctttccaaaagatggcaagtgacctaggaacataatcttggtaactgctcatcatatacagtgagattgttggtggtggaatagagcnttgcgttacgtgaatggacggaggtgcactggaaacagaatgtttagaggcagacatgatgatcaaaagttacggttttctatgattgat

SEQ ID NO: 77343 - DNA, 378 bp, Glycine max
  unsure (1)..(378): unsure at all n locations
ttataatatcacattataattaaataatttatatattttttggttcaataagtaattcttaaataataagaaaatattttttctcataaagaattattattatatatatataattataggttaattttaaacaatttaatgtgacatataaataatctacaatagtaaaaaaaattaacaataatatctaaaaataaaccattccgtaaataatgagcattgaagatgctctaagataggaatactcccataaataataaatcatgccattatgttattcctggatgaatatctaatcatgtttctttttttactcctcaatntattactattatatcctttgaaaaatatactttataaatatttgatggtatttta

SEQ ID NO: 77344 - DNA, 293 bp, Glycine max
caaccaccttgtaaaacccgggcaaagtagcatggataacatcctatggcaagtaatttgtaatccaacggtaaccaatcctgaacaatgtatcaacagataatcagacatgccactaggcacaatccacattattagcaattatttctataaaataatctgaaccaagtgctcaaactacatttaagtgagcttatacttacaatatgtagcctaataattacgaagaatgctataccggatataacacagttcattataagttctcatgtttgccaccctttatattatta

SEQ ID NO: 77345 - DNA, 343 bp, Glycine max
gaagagatatcaagagtaaccaaccttgtcaactgagagatctctattggaatctgtcccataaaggaagcctctgacagaatcaagtgagttaatctctctaacttgttgaatccagagggaatctccgagaagaagtaatttgcagctaaatttaaattctgaagatgttggagaccgaacagactagttgaattgtcgaatccgccagagattatttctccactgagatcaagaccgataacatgcccatcctcgtcacaggttactcccatccacttgcaacaatcattactcgctttccatgaattcagcctgctgctatttctgtcaaccgtgtcta

SEQ ID NO: 77346 - DNA, 454 bp, Glycine max
  unsure (1)..(454): unsure at all n locations
ctgcagcttttaattattacgaaaattgttatttacactacagctgagtcccgacaggctggtgggcctcatgttcggntggggtggcttcaggacgtgtatgagagccagtgcagggccaaacaatgggttgtagtagcctgcacgtatctgctccacttggtgggttgtactcttttcgccaaaagagtttaacccatgtacatgtcgtgcacttggaggctttcagggacctagcctaggtagagggattcgcttggggagcggctgcattggtccacatgtacgagcatctgaacgacgcgtcgcatgcctctacacggcaggtgggccggtacattagacttcttcagggagtattattatngataatttaaattgaagtagcattgaatccttttttttttgtgatgncactatgtngttgtagtttggatatacgagcacttcctac

SEQ ID NO: 77347 - DNA, 349 bp, Glycine max
  unsure (1)..(349): unsure at all n locations
atctttcttgggcgactttgctttattccgcacctggntctagtactcagccaactccttcatctgcatatacttaaccgctctcgttcacagtttggcaagaacaaatgccagtttctttcgtagtttggtgaccaaaagtctcacgtgtaacattattatcaaattgtgtatagccaatactgggtccaagtttcggatattcaacgcaacctttttgtaatgttccatgaaggttngcaacaactccctcttctcctactatatgttgacgaaggccacaaatgtcaagtggtgaggccaattatcgacaaactatgttctataagcggagactacggtgttgaac

SEQ ID NO: 77348 - DNA, 381 bp, Glycine max
  unsure (1)..(381): unsure at all n locations
gttaaatggatcatttttaaaggcccacctttaagtgatcacctttcaagtaaaagaatcgcttgattcactcttaaggaagaactacgtaggtctgatttcctctttgatggagggtacgtangagcaagagccccgctcttgtcgacctcaaaaaataaaaagaaataaaagtaaaggtaaaacaatttccacaattctaaaaatgaggctgttgtcctttgagataaatgtgagaggtgctaataccttcctcaaacgtaaatacaactcccgaacttagaattntcattttgaccagtttccttcggttnttccgatgttntccacanataaatngtggtggcgactccgcgcatctttccttctttggaaagcaca

SEQ ID NO: 77349 - DNA, 310 bp, Glycine max
  unsure (1)..(310): unsure at all n locations
actcctctaatgactacggcatcgatgacggccctaaactgctgggagatggaagccatcttctcaattaaatatatggcttccgcacgagttatgtctccaacggctccaccactggcagcatctatcatacttatcttcatattactgagtccttcataacaatataggagaagatactgatcctaaatctgatggtgggggcaaccggcacatangttattaaatatctcccagtactcatacaggctctatccactgaggtgtctaatacctgacatatccttcctgatggctcgcgtcctggaag

SEQ ID NO: 77350 - DNA, 422 bp, Glycine max
  unsure (1)..(422): unsure at all n locations
tacagcacctgctgctgcagcttctctactattgangggttcatcctctatatgcaagaccatcagttggtggtttagtttgtcttgtttttgttgaagctaaactaccattccttgaccaggaacccatgaattctgattaagagagtatggacactccttaagcatgggaaacctttcccgagcagtgacaatggctcttctcattgtagctctagaatatttgtgcaagtccaagagaaaacaagagcgataaggaggagtatcatgggttatacattgataaagctcatcatctccttcnttccttggaaaacacatatgccaatcatcgaagtgatgtatcttggctggacttaaaatctacaccatgcatatatgattggagttatcttccatttcataaaccgaggcgggcgcat

SEQ ID NO: 77351 - DNA, 456 bp, Glycine max
  unsure (1)..(456): unsure at all n locations
tgtagaactccncaaggaatatttgntggtggagcaaagtgggtgcttagaaacaagttatgcgaaataggtaagggtatgaggaacaaggctaggcttgtagccaagggttacttacaacaggaaggtatagtttatacataaacttttgctcctattgctcgtctagatgcaatacgcattttactatcctttgttgctcttcatggtatgattatgtatcaaatggacataaaaagcatgttcctcaatggactaatcaaggaagaggtctatgtggaacaatcccctgngtttgagagttctatctaccctcatcatgttttcagacataacaaatctttgtgtggtttaaaataagctcctcgagggtggtatgaaaagttatgttcattnttaactgaaaatagctntataagatgaaaggtagatactactttgtttcgcaaaaatatg

SEQ ID NO: 77352 - DNA, 356 bp, Glycine max
  unsure (1)..(356): unsure at all n locations
tatgcatgtgaattangacgcatcaacaagaatcaagccaaggctattgtgcaagcaatcaatggggcaaaacacaccaaatgattataatgatggatggctcatattctcacaaaggtaaaatcatcactctcaaattgagctctcaaaactatcatgacatgtagagaagaatcaaggatttcaagtcacaaaatgtcaagaacttttattttcaaaacaattacccatttcttgaacatatcctataattcaaagaaaaacatgcatagtcgtacgtgcacacaaaattgacccaaaatattatatcgaagatccgacgatactaacaacattaacaatataacacaactaac

SEQ ID NO: 77353 - DNA, 305 bp, Glycine max
  unsure (1)..(305): unsure at all n locations
ccggatataaggcgggctgcagcaccggctccactttcctaaccgtactggaggcggttgcgcgggctttatcctctatagntttctggagtgttaacatgacctccgagatggaagccatttgatcttttaaagccgatagatcggccttcatctgtttctgcatgccctctttattattcatttttctggatcgagtgttataggggtgccttggtgttttcttagttatgatgaaattcctaaagaaataaacaatggtgagtatgccaccaaaacatgaatatgcaaatgaatgatcggag

SEQ ID NO: 77354 - DNA, 347 bp, Glycine max
tcttatatcccaatagcatattggaatatagaaaaggaaacatggaaacactttttttagaaaataagcatagttttatggaatacaaacttttcaccttaccaagaaaattaacttattgcctaccaaaatttggttcctaaactggtttttgacaacaaaataccttttaccattcttaaaacttaacaacaaagcatattacgggcccgcaactataaatgtgcatccttggagattgcaggttactccacattgggtagaaaccaacttggactgcaaaaaaatacaatctctattaaatgactagtattagaaacttaaatatcaccaaaactctaagccta

SEQ ID NO: 77355 - DNA, 274 bp, Glycine max
  unsure (1)..(274): unsure at all n locations
gtgacacatagaccactcacgcttccatatgaccagtcgctaatgactgaaaggactggtcttcttcatcatccaatggcgcnttgaccctactcatggagggatgaatgcgttggtcattaccctcatcttctgaaaaagacattccaatttaggcaaccgtgagccaacgtattctgtaaaaatataatgaatcaggggaaccactgaaaaacacattatattgccccagcaaaaattaaggtttaagccccaaaaatatccatatggtaaa

SEQ ID NO: 77356 - DNA, 380 bp, Glycine max
  unsure (1)..(380): unsure at all n locations
agcttgtttcatttgaatcattcaacctttgtcttgttgaatgtgtgtcttccccttcctctggctcgaaaagaccctatacttttccctcttnctttacctcttccacttttctcatcagccaccatctgcatgacctgctcctcttctgctggaaacatcattctctgctcgtgaaccaatagactactttgcagttcgtctgttgtcatagtatccctggtggtggattcttcaatggagcacaccatgtagttaaacttcgtcttcatagatcgccatattgttgcagttatgacactctcttgcatattttctccatatgctttcatacttgtggcaattttcaacgtccgagcaaagtatgaatccactgactc

SEQ ID NO: 77357 - DNA, 199 bp, Glycine max
atgcctactgtagactggttttctcccatgcttaagatgtatgtaacctgtggtttcttcacagaatgggcatgcatgatgacccttaacactgtaaccactgagattcccatatgctgaaaagtcattaatggtacaaaaaagcattgcacgcatttcgaacgttttcttgcgaaacgcattaaacactacaaacccc

SEQ ID NO: 77358 - DNA, 407 bp, Glycine max
  unsure (1)..(407): unsure at all n locations
gttgctgccctatagagcccctcgagacttggttgtgccctattcttcttttaaggctctctatggttcccgctctaacgctcggccgcggtcatgttgacatcccttaactcgtcacactctttcctaaccctagtgactgtcatctttagttttccttggccacttctattctttcaagctctggtttcaggcttgcacttcttcactctcctcaggacttcaacttcttcacacttggactctttagctacagagccaaggtatcccttgcgtgcgagcctaaaccattaggatagncgccatgacactgttgtacttccctaagctcttatattttctttcactatatccacgcttttcgattctctgagcatgtttgattggcttactggaacccgtgtgac

SEQ ID NO: 77359 - DNA, 375 bp, Glycine max
  unsure (1)..(375): unsure at all n locations
acactatttctatgtgaagcctctgcgacggcagttatgaatcttaccaacatttaattttcaatgtctttttttctattagaatttggaattaggtccaatctttattcaattgtgaaatcaaccttagctacatcaatgagcttttctcatccaatactactggntggtccaaacatatgcacggcatggctttggcagcaactatnttttatatttacggaatatggcattgtaaaaacaacaagtgtttcaataacaaagccatttctttgttaagtctagacgaccactcatctcatccaccttggaactttatgtattacaataagtataaatattaatggtctaatgagttctgacgagtggacatga

SEQ ID NO: 77360 - DNA, 429 bp, Glycine max
cacccctgagaacccactattcacctgagtctgactcagtattcaacttgtcatcgtctggagacaaaaggtcatttctctaagagtgtgtttggatggagaaattttaaattctgagatattctaaattctaagaattctaaatacttcaattgaaattcttttatcttcacaattttgtgtttgataaaaacaattatattatgacgatataaaaatgaatgtaaaaaagagaaaatatggttggtgtgctagttatatgttgtcctctgtgctccacccgatcgaattttatgagctcatactgtgtttctttaagacgactgtaagaagagaatttcattccttcacctttagaagaaaagtgtaattccagacttctcgttgtttacattttgtctaatatccaatatttaattcttctaaaag

SEQ ID NO: 77361 - DNA, 476 bp, Glycine max
  unsure (1)..(476): unsure at all n locations
tcccctttggcaacatcaaaaagccaaagaactcggaaatcaacacagttataacaatggagtagcaagatataagtatcagagtattaaatacaataagcccaactcataaacaagaaataatcaaaccagaattcanataacataaaatgtcaacaaccacaaaacatccaagactgaaatttaaaaacacaagataaataagcaaagtacttagcataataatataaattctaagaaactaaaagccaaaatacacggcttataaaagataaataatcagaatctaaaatctaagaagacggaggtggtggtggaagatcgaaactctgacgaatgtatccgacatcctcttcaagctgtgtaagacgaatgtccataccggcanagcgtgaatctaacgagtcgaagcggtcaccaacatacgaacgaagaccccgtaattcggagaggacttcattcatgagtgcagaatc

SEQ ID NO: 77362 - DNA, 460 bp, Glycine max
  unsure (1)..(460): unsure at all n locations
gctgggtagagcttacatgtgtaagagccanaagtgaaagtgaattttacttgtaactttgataaantagtggaaacttggtgggttgctaagaactagatgtagtctcgggtttgagacaaaccaatataattttgtgtgcttttctgtattgctttaactaacaaagggtttggatctatttttagatcttatatttntgttggttntacaaagaaaactattttgctcatcgtctgataaagattcgacctctaagggtttnntangtctatctacatcaaacgaataacatattnttagtcttataaaaagttnttaaatttctaanaacacaattcaaccccatttcttgtgttatttgcttctgcacaatgagagccggatttgacacaaaagacttggacatgccaatctaaacatatttcaaattattcacaatgtttattaaaagactgct

SEQ ID NO: 77363 - DNA, 241 bp, Glycine max
  unsure (1)..(241): unsure at all n locations
agatgtgcgtcaacaatgtctcatccctagaatattcgcccatcttgcgatcaaacatcttaagatggttcttaggacgagtcatgccctgtgacctatcgaagacaagtgcctngaatctcggggggatgacgacgtgcgacactaaacattaatcaggcatgtccgcgaacggatagncgcttaagccttcaacagccctcaatctctctgcgatgagatcgagttgcctcttttcttc

SEQ ID NO: 77364 - DNA, 380 bp, Glycine max
  unsure (1)..(380): unsure at all n locations
agcttgtagatgcttcgaggctctccaagggcaaaccttgtgtttgatgagcctttggagaagcaagactcactaagggtggatcttgggtttgacgagcctctggagaagtgagactcaactaggacagaccttgggtttgacgagcctttggagaagtgagattcaccaaggatagactttgggtttcaaaaacctataagtctcaccaaggacaaaccttgggtttgatgagcctttgtaacacaagactcaccaaggacggaccttgggtttgatgagcctttggagaagcgagactcaccaagggcaaaccttgggtttaacgagcctttggagaggcangactcactaagagcangcattgggtgatgagtctt

SEQ ID NO: 77365 - DNA, 510 bp, Glycine max
  unsure (1)..(510): unsure at all n locations
atccttgagtcacctgcggcatgcaagcttacataggagctacatcatgtggtatcaagagcatcttcatctatgtgatattcttttgcttcctctatctttttgttcagtcaatacactttaattccttggtcttcatcttattctacatgtatatcctccattgtcttgtggtttggtgcttgttaaagtagattgaaaaaaataaaccgattaaatcttagatctacacttgttcttgcatttctatgggtcaaattntatagataaactcttgaagtcatgttttgtgttgatttaaggctctatcattttcagtcataatcttcttgtgctgaacctttagatctaaattttcttccaaatattgattaganaaaaacacaaaaatctaagtgtagatcacttaattcatgtngtcttagagtcatgttaatcataataatgcacattatgtctaagttgtgttgaatttattctgtgatagatctagattattgtcatgatctt

SEQ ID NO: 77366 - DNA, 474 bp, Glycine max
  unsure (1)..(474): unsure at all n locations
ttttgatataggcatcatgtattataacttgatttagatgtagagactgaaattaatgttaacaaagtctagattgaacgatcgtacgatcctatnaattttatcctctatcatgtcctacaacattgcatgctagattgaacgaacgcacaatcctataacttttatcctctacatgtcttgcaacaaaagaaataataaacttccacggtatcacaatctttctcttgcataattgcattttatgatccatgccatgttaggtcgggtttcattttgagactcattcgtttggctctacccggntcaaaaatctaaatcaaaatttcaatagctntgattttcaatggaatgcattattttcatgaaagagagtaacaataaactacctctccaacacaaataatgaanatataattctaaataaatatgaacattgatacttcagaaaatgtncaattattcattaaacta

SEQ ID NO: 77367 - DNA, 361 bp, Glycine max
ctttatcccttcatatatccataacacaatgggagcaaaaccaccaatgagaacccaaaattcacctaagtctgactcagtatccaacttgccatcgtctggagacaaaaggtcatttcgcttagagtgtgtttggatggagaaatttaaaattctgagaagatttaaattctaagaattttaaatacttcaattgaaattcttttattttcaaaatcttgtggttggatttaaaaaattaaattatgaggataaaaaaaatgaatgaaaaaaaagagaaaatatggttggtgtgctagttatatgtgttcctctgtgctcacacccgatcgatattatatgagctcatactgtgtttctt

SEQ ID NO: 77368 - DNA, 433 bp, Glycine max
  unsure (1)..(433): unsure at all n locations
tggaatctgtgcctcattttgatgtcctatttgcttatgatgttntacatttaagttcatagagttctgattgctttccaatgtttattttcacgtaaaatatcatggttgcagcgagttttactgtcgtttcagagtcttttacgagttacggcattgcttatttgacttctttttttcttggcaggattggcttatggctgaattctcacacattatttgtatattttgatgatgcatgtcttataattaaagatgctccccattgaaatcattgttacctttaattcaagcttccttacatctacaagtgtaaatggttccccgactgtgaatcattagtgacggacttgacatatctctgataatactgaggtgaaaatatgatggaataatattttagatggaaaatatatcttggactctgaatcat

SEQ ID NO: 77369 - DNA, 438 bp, Glycine max
  unsure (1)..(438): unsure at all n locations
gctatgatgatgtcgagaagaaatacatgtttgtcatcatcaaaaacggggagaatgtaaatgtatgtatacatgattctgatgatgtcaaaagaagaatcaaacaaggctcatttgcttcaacattaatacaagagtgtttcaacaaacaaagccttgattcaagatttcttcaagatcaagccttgcctcaaaacaaaaaggtttcaagttatccaaggcacatgtaatcaattaccaaggcacatgaaagtgtgtaatcgattacacatcatatgtaatcgattaccagagactctgaacgttgggaattcaaattttaaatgaagagtcacaactgttcaagaanaacaattgtgtaatcgattacaccaatgctgtaatcgattaccagagaggattntcatggaatatcgccaacagtcacatcttatcatt

SEQ ID NO: 77370 - DNA, 404 bp, Glycine max
  unsure (1)..(404): unsure at all n locations
gccctcttggtactggtcaaggcctttgcagtaactgcatattcttctcgaacccagcacactcttttcagacatctgttgcgacctacttgatttttctttggcaagactcgcatttcctagtgcgggtttcagagctcgaacatcttcatcctcttccggagcttcgaaattctcttcgatgataatcgttaacttggcgagccagtctaaacctcatgtacagaacttcagccattcatgataaccaccaatgatgccattacgaatgcccctatatgtcttatctgtccttaacgggctttcccacgccttatggactctntgtataaccttgagatattgcgcaccaaaatctctcacatagaaaggagacaagctttctttcggcggagctcccctca

SEQ ID NO: 77371 - DNA, 403 bp, Glycine max
  unsure (1)..(403): unsure at all n locations
agctagctctanattgacatcgatgttaagatttatggtaggatgttgcatgtcaaattcgtacatgattagngtcccactggtganactaacttctcaaatgattgccttctcaagaaatggcccccatgaagcttgcctcacagaggtccaggaaggacaacgcagcctaaagaactagttccgctccggaatatgatagtcaccgctttaggagtgctgtacaccagctcttcttcgacgccatcaagggatggtcgtttctctcggagcgacgcctcctgctcaaggacgactagtatactgatttccatgaggatatanagcgcctgcggagggcatcactggttacttccatggccgagtgtgatccatatattatcctagatgttatgtcaatgct

SEQ ID NO: 77372 - DNA, 194 bp, Glycine max
  unsure (1)..(194): unsure at all n locations
acttgcccaatattgcttatgtgctcaatctgcactggaaaatgacatgccttttctaagacaaccacatgaggagacattcctatgggtgctatggaggcagccctatantgcccaatgagcatcatctaacctgagactccaagctttgctggcttggctgcacaatcttctctaaaagtctcttgatctct

SEQ ID NO: 77373 - DNA, 438 bp, Glycine max
  unsure (1)..(438): unsure at all n locations
acatgtattgatatacgtatatatatgttatttcaagagtgcgttaagccctatcgtttcaactctaggaaattctgtgaggaacaatacacaacttttgaatgccttagaaagtggttgaggtgaaagattatttcccagcgaacgcgcaatattaataaaatgaatgtgcgcttttatctgatcaaaggttggtgtgtcttggagcaacttattatctatgtaaagattgtagaaggttttgaaatgttgaacaataaccgctttgcacatgcaagcatattactcgatgtctcaaggcttcaaaagaattacatacattgattgatgagaatatagctgcatcaattcgtggtattgtatcgctgatgaatagactaagagagagcattattgtangtttaaatacctctgtttaaaacatatggtatgatttca

SEQ ID NO: 77374 - DNA, 393 bp, Glycine max
ccatctagtggtaatcacagcacagagagctgcttcttttctcttctctaacctccattggtgcttactcatattttattcatgtatttcctcacatatcctgcgttgaatgctgttaacaagattatgtagaatttccaccgattttacttgctatagtagccagacgcgattttctatgactcaaatattcttgctttgttctagaaccatgaattgtgacgatgccagggtcctctgagttttcttgcctgatttgcttttgtgaccgaagcctattccgttaaattcttactagagactcatagtagaagctcatcccggaattcaatagtgacatgatcacctattagagtgatgtcatagaagacacgtctatatgatactagacac

SEQ ID NO: 77375 - DNA, 498 bp, Glycine max
  unsure (1)..(498): unsure at all n locations
agctttctttgagcaaagcanaggctngctcttngttntcaccccaggtaaatgccacattcttcttcaccagctcattgagaggtgatgcaattgtagagaaattaggaacgaaccttctatagaagcttgctaacccatggaagctcctaatatctcccacactttttggggtgggccattcttggatggccttgattntctcagggtccacttggaccccatttctaccaactacaaaacctaagaaaactatattatctacacaaaaggtacacttctctatatttgcatagagggtgtttttcctaaggactgaaagaacttgtctgagatgtcctaagtgatcatctangctcctactatacactaaaatatcatcaaaataaaaaactacaattctacctatgaaatcccttaagacatgatgcataagcctcataaaggtgcttggtgcattagtgagcccaaaaggcaccactagccattcatacaaac

SEQ ID NO: 77376 - DNA, 406 bp, Glycine max
  unsure (1)..(406): unsure at all n locations
ttgcttgatcggaaacatggaccgatcacaagcatataatcaacatgttactgtaccacttttgcaagaactacgtaagtatgatttcctcatcgcaattgacgatacgtagaagcgagatccccgcttttgtcgaccaccccaagagatcgttaatggtccaatgccttaacggttctgtcctttcataaaccaagatatggttaatggtccagcgccttaacgttttctctcctttcaaaaacagagagatcgctaatgtgccaacaccttaacgttgctctcctttcaaaataaaaagatcgtttaatggtccatcaccttaaatgaccttctgtgtantcagaatatatcgttgcagaaaagatgaaaacaacttaaccaacgttcaggtcttaaagaacta

SEQ ID NO: 77377 - DNA, 451 bp, Glycine max
  unsure (1)..(451): unsure at all n locations
atgcaagcttttcttgagcttcaagctttaaccaagactactatcatcttattatagtctaccatcatctaccttatccccatgtnttgtatntatgccaatccgacctcccgatgttgcacttacaccatcttcacctgcgactgaagttagaccatcttcatctcatggtgatgcacgtggaccattcttgatacctacattcacatcattcccatcctcgattgatgcacgtgggccgtccccaatacctacatccacacctttcctatctccggctgttaccaacatgcctatagatgaagatgctttggacatggaagatatgacacccttctacccgacatatatatatgagataatcacatatataaaaatctcgtggaccaatatcacatgggtaaaagcttcacattcacttcactatgagcaattataacttattaaacat

SEQ ID NO: 77378 - DNA, 313 bp, Glycine max
tcaagcctatgtatgtgttatggggtgccaccatgctggggatgtacaacgataatgcccccttgtacataatgcatgaacaactcggagaaatagtatgcgacggccaatgcatgaacatcattgccataccattatggatcatggaagggatttaaattgccgtcaatacgcaaatccagtgttgtaaattgatgtataatctactttatgtaacatcaataggcatatgaattaaacaagtatgtgatgagggaatatcttatgtgatggattccttgagttggcacccataccgagatatgggcaattg

SEQ ID NO: 77379 - DNA, 400 bp, Glycine max
  unsure (1)..(400): unsure at all n locations
actatggacaatcttgtcacctacttgtngagttggaacataaagcttattgggcattaaaatatctgaacttcgactcanatgcagctagtgaacacaggaagatccaattccatgaattggaggaactgacggttcaagggtttgagaattctaagctctataagaaaagagcaaaaatattatcatgacacaaagctatcaaaaaggaattttcagcctagtcaacaagtattgttatttaattcttgattaagattgtgtccaggtaagctaaaatccaagtggcctggaccattcattatcaaagaagttatgccacatggagcagtgatattggaggacccaaccaccacaagtcatggaccatgaatggcagcagaatcaacactgtctagat

SEQ ID NO: 77380 - DNA, 370 bp, Glycine max
  unsure (1)..(370): unsure at all n locations
acctctgcacttgaataattgggctgcaaaattgaactctgctttgtgtaattagtttaattaggtagattagatgggcctaatcaaagctcatcacttccttctaagtagtaactgtatgtattagtggaaattagttatgtaaggagttagtttgatagaggtgccaccaatctgtctaatgatcctttacattggatagaggtcctatgacaaggtccaagattaagagggtgaagcaagctntgcaatgtttaattctaaatatcaaagagaaagaagaccaatgtgaattaagtgatgcatccaattgggacgctcttctacaaattgatgaagaatgcttggtgctaacttgaagaatcacttt

SEQ ID NO: 77381 - DNA, 428 bp, Glycine max
  unsure (1)..(428): unsure at all n locations
ctaacatggaccatctttataagtaattcaaaatgaatcattaatatagattaatctaaatccacattattatggtacacctttcataatatattttttctccctcactgccatagtcttgtcaatcaacctacagcctcctacctcctatgtccgaccccatcctctaattntaatttntttataattgcaaaacanaaatatctgacttagaaaaacataattttttttagttgattcaagtcttcccttgttgcaatcatccaatctaagctntaaattgatttcttttttttacatcgcatcacttgaatannattaattcttcgtattgactatagaanaatattgttctcaatcgtgcttataccttgagcacctttagattcatctctttttcattttttacaaagacaatcatagtcata

SEQ ID NO: 77382 - DNA, 482 bp, Glycine max
  unsure (1)..(482): unsure at all n locations
tactaagcttgaacccacggacncnccttgtaaatagttntataacagaccctgattggtttattctttctaaataggacccttcgacataatattgcctcatagaaatattgctgtcccaatttaaaataataaatagtaagagaccctcattcccggttttaacttatcctggtttaacctgtgcaacaaactagccatttctgctatacatgttttttttttctctnttttaatagaattactgctcatccttgtaatttcaacatgaaaacaccacactagggaaatatagcaaaatagcatctttatctatctgatacatacaataattntacaaatctattccatacattctataatgttacaacatggacttcacattatataaactaaaagaagagtaactataaataattagaatgtatacatcacaaatctgagaactcanactcttttataagtgtattntatctttgaat

SEQ ID NO: 77383 - DNA, 494 bp, Glycine max
  unsure (1)..(494): unsure at all n locations
tgcgtagcccaccatcttttcatagtattgtatcgataatgggtctaccatcacgattatcgtctccctttccattcattggggtaccacttgggccgccagatccctccaccttttaggcgtgttctttgaaagatccgtccccctttttgcaaatgttctatagttgcatcctatccggaaccatatncaaaatgtactgatactgcctaacaaaggcaaccattaggtccttccaagaatggactcgggaagattccaagttagtgtaccaggtaacagctaccccagtaagactttcttggaaggaatgtattagcaattcctcatcttttgcgtattcccccatcttctgacaatacatctttagatggttcttgggacaagtagtccccttgtacttgtcaaggtccagcaccttgaacttgggagggggtgatgatatgggttctangaacaactcttntatggtagcaaagacataatcttcacct

SEQ ID NO: 77384 - DNA, 479 bp, Glycine max
  unsure (1)..(479): unsure at all n locations
gcttgagcttattgtngctacctcatagagcctctcatatcttgtttctgtcccattcttctntttaggccctctntgtttcccgctctaacgcttcgatcgtggtcatgttaacatcccttagctcgtcacactctntcctgaccctggtgactgtcgtctttagtttttccttgaccactcttgtcctttcaagctctgctttcaaggcttgcacttcttcgctttccttagggactatagcttcttccccacttggactctttagctntgggagccaagttatcccttgcgtctgagccttcaaccacttaagatagccgccgatgatatcgttgctgcttcccctaagcaccttatctnttctttccaatgtattccacgcttttcgtgattctctgaagcattttgcattgccttcatagggtagcctagttgtcctatggccaatatgggattataattaatacacacccctt

SEQ ID NO: 77385 - DNA, 423 bp, Glycine max
catgcaagcttgaggcaaactggatgcattggataacttgtgtattccttctggccttgaataataaatctgtacctgttgcaagggattgtgggttgtgctcctctgctgaccaccatacagacctttgcccttccatgcagcaacctggagcaatcgagcagcctgaagcttatgctgcaaatatttacaatagacctcctcaacctcagcagcagaatcaaccacaacaaaacaattatgaacctctcagcaacagatacaaccctggatggaggaatcaccctaacctcagatggtccagccctcagcaacaacaacagcagcctgctccttccttccaaaatgctgctggcccaagcagaccatacattcctccaccaatccaacaacaacaactaccccagaaacaaccaacagttg

SEQ ID NO: 77386 - DNA, 414 bp, Glycine max
  unsure (1)..(414): unsure at all n locations
aagtcacctgccgcatgcaagcttctagccaaatggacttacctcgaattaatttctttgataaccctcttgagccttgattccctttccttggtatgaagctcactacaagccttaagtgaaaaaccatgatatcaccatatccttaaggaattgtggagctctggaattgttttgggaataagtgtggggggtttttgtttcattggacaacttgttttgttggctatgcttcatgatgtatttcgcgccatacttgatgtacattgattattggttaaatgttggacatgctgaatgaaatgttgtttctcaaaggctataaaaaaaatattcttttgtttcattggacaacgtgttntgttggctatgcttcatgatgtattttgggccatacttgatgtacattgtata

SEQ ID NO: 77387 - DNA, 526 bp, Glycine max
  unsure (1)..(526): unsure at all n locations
agtcacctgccgcatgcaagcttcaacatcagaccacttncagggtgctggaactattcatatggattngatggggcctatgcaagttgaaagccttggaggaaagaggtatgcctatgttggtgtggatgatttctccagatttacctgngtaaactttatcagagagaaatcagaaacctttgaagtattcaaagagttgagtctaagacttcaaagagagaaagactgtgtcatcaagagaatcaggagtgaccatggcagagaatttgaaaacagcaggttcactgaattctgcacatctgaaggcatcactcatgagttctctgcagccattacaccacaacagaatgggatagttgagaggaaaaacaggaccttgcaagaggctgctcgggtcatgcttcatgccaaagaacttccctataatctctgggctgaagccatgaacacagcatgttacatncacaacagagtcacactgagaagagggactccaccaccctgtatgaaatctggaagggag

SEQ ID NO: 77388 - DNA, 311 bp, Glycine max
  unsure (1)..(311): unsure at all n locations
ttgagcgtctcgatatatgacgagactcaatctgacttctctagtcanaagttattttcgcttgaataggctcacaggatcaacatcccacttcgagcgtctcgctatattacgggactcaatctaacattcgagtaaaaagttattgacgttagaattggctcagggcttctacattcaatttcgagcgtctcgatatatgacgagactcaatcagacatccgcgtaaaaagtcattcgccgtcgaattgtctcagacgttcaacactcaatttcgagcagctccatatgtcactggactcaatcagaca

SEQ ID NO: 77389 - DNA, 399 bp, Glycine max
  unsure (1)..(399): unsure at all n locations
agcttgatggaacagngcacttatattattcagtggttgatgttngantntggaaatcaatgcttggtgattgatttgaatggatcgatcgtatgatgtgagtgaactagaatgcataaatcatatgctttgaatgagcatgcagtcattagaagagaaagaacatggaattaggatcatgactgaaaatgttagttggtttgttaggttgattatgaaggaacacgttagccacaacccggtgagagtgtgatctttaattgtgagagaatgactagtagtaagtaatggttttttcatgaatctctgaatatggaatggatgcatgagtttgaagatgatgaacggccatgtttaattgaagtagccacttagccaaaaagcttaccttgtgtatga

SEQ ID NO: 77390 - DNA, 190 bp, Glycine max
  unsure (1)..(190): unsure at all n locations
ccgatcattaatgctgcaagttatctctaagaatggattgaagattaatgatccaaaaccaaataaaagcaactcataaactttntcattgcacaaaagaatcaagagatcattcaaaggtccaatgccttaatgattctctctttgcaacaatcaagagatcattcanaggtccaacgccttaacgatt

SEQ ID NO: 77391 - DNA, 84 bp, Glycine max
agaacagcccagaaggagaggagaggaaggatattcacggaaaggaggaagaagacgacaccacgggagagaaaggcgaacgga

SEQ ID NO: 77392 - DNA, 433 bp, Glycine max
  unsure (1)..(433): unsure at all n locations
aatttcatggttggtgaatggtttgaaatgattgatgcctgaattaagtgaagtgtaatgcatagatcatattcttggaataagcctgcagtgattaaaagagaaagaacattgattatgatcatgacttgaaatgttagttagtttgacagaattgatgtgaagggaatcattagccacacccagtgagcgtgtgatctttaattgtagagaatgactagcatngagtaatgatttttgcatgaatctctgattatggaatgaatgcatgagtttgaaaatgatgaaggccatgatagatngaaacaaccacttagccaaaaagcttaccttgtgaatgaatgatatatccttttcacccatgttgagctgaaaatctgattgcttgacttgaaccttgagcttgtgaacatatatctccatctaccttgtc

SEQ ID NO: 77393 - DNA, 486 bp, Glycine max
  unsure (1)..(486): unsure at all n locations
tgactgacttctactcatatatctcttccagtgctcatggtgatcctnctcatcattaccttctgaagagaaagaagtgatcatcaagtcttaaaagtggattgaaagagtatcaaagatatctttgaggatataacagtgacaaggcgtagtctagaagaacaaatcatatagaaaaatcttcagctaatcatgtaaagacattgtgagtgcattaatagaaccaatatatggatgaccatttcacttgcagtgtatcatcaaatactatagtgtatctatattagtctaactcacaccaaggtttaaaatactttgtagtatctacaaactattttcatgccggaagaaaacttttcattttgaaaagcagattttgttgcctcatcatatganaccttttgcaaaacattccgaggaaacatataaaagagacctcannagctttaccacacgtatgcgactattgtcaatctcatatcattc

SEQ ID NO: 77394 - DNA, 356 bp, Glycine max
acataagcgcgacataccgacgactgatggactgagtcttcaataaaacatcatatgaatatggcgagtatatgtggacgacataggttcaagtgtcataacataccccaacatgtggaggacaaagaagaagtcgtcgtggaactacaaaaatcgaatgcgccttaaccctaaaatatgtactttcggagtatgcggcgacaaatttcttggttgtatgatcacccaccacggtgattgagctaaccccgacaaatgcactagcatactggagatgcatatgccaaccaacatacaagaagttcagaatctctacggtgggctagcatccctgtctaagttcttgccaaagctca

SEQ ID NO: 77395 - DNA, 312 bp, Glycine max
atattctgatttgcgattgtagtcccgaatatatcgagacactccgaattgaaaacagaagctctgagcaaattcaaacgacaataactttttattcggaatttcgatagagtcccgttatatatcgagacgcatgagattgcgaacagaagctctgagcataatcaaacgaaaataactttatattcggatttgcgattgagtcccgtaatatatctagacgcacgaaattgagaagagaagctctgatcgaattcaaacgacgataatattttactcggatgtacgatggagtcccgtaatatatcgaga

SEQ ID NO: 77396 - DNA, 245 bp, Glycine max
  unsure (1)..(245): unsure at all n locations
acaataactttntactaggatatctgattgttctttttatatacgagacgctcgaaatagaaagatgaagctcttagcaaaatcaaacgtcaataaacatttactcggatgtctgatcgtgtcccgtcatatatcgtgacactccaaaatgaatgttgaagctctgagcccattcatacgacaataaaactgtactctgatgtccgaacgtgcccgcaatatatcgagacgctcgtaattgaatg

SEQ ID NO: 77397 - DNA, 433 bp, Glycine max
  unsure (1)..(433): unsure at all n locations
accagagggacactactcttaaaacaaaaatggcatacaaccctcctccataaatacaaacatcaatgtaaatttagagcaagcttatgcgcatacttccttacgaacgttcacttgcacaagacattctattaactaagaaaaatgcacccatatacaatcaaggcagcttcgttacctagaatatntacatgtacttccaaggtgtatttgttacttacatcacacacatctccttggctaaatttacatacatgcatactcaaagcattttggggtaccaaanattgcacatgtgcacatcttggtatttctaatacctatacatacacaaacttcatgatgaatcttgactatctacacaataagggtgtacatntcatgctcttttcaagtnnttgctacctaaagccgcatgcaaattcaagtatat

SEQ ID NO: 77398 - DNA, 512 bp, Glycine max
  unsure (1)..(512): unsure at all n locations
agtcacctgccgcatcgcagctatgtctaatcgattacatggtnttggaattctattctctttgacaagttntgaataaaaatcaaaagatgtaactcttccaatggttttcacgttttttttaaaggttataactcttccaatggttttcttgaccagacatgaagaatctataaaagcaagaccttgacttgcatttcaataacttttgacaacctttacatacaactttttgataaccttttgatatctttcttcttcttcctttgccaaaagctttctaaagttttctggtttccaaaccttgttctttcacagaaaacaaaagtgtgctatatcttttcattctcttctccctttgccaaaaagaattcgccaaggactaaccacctgaattctttntgtgtctctcttctnccttntccaaaagaacaaaggactaaccacctgaattcttttgtgtctcccttctcccctttcaaagaattcaaaatgacacaatctgataattc

SEQ ID NO: 77399 - DNA, 496 bp, Glycine max
  unsure (1)..(496): unsure at all n locations
agcttcaatggagcttacatcacatgccanatatgtagtttatctatagtaattcccttatgtgatcaaacataagcaaggcaaggctaatgttgtggctgatgccctttctaggaggtattctttactctcaatgcttgaaactaagattcttgtgtctgatcatataaaggagttgtatgcttgtgatgatgacttcttcaatttgtttaaattatgtacaaaggtttctcataacggatactttaggtatgatggttacctattcaaaggtaagagattgtgtatgcctaagagttccatgagtgagttgatgggacattttggagttactaaaacattggacattttgcatgaacatatcttttggacacattgttagagatagggggagtagcaacatgagtgttcgactagaatacttgtttactccctcttccanattggtattacttgtttttatatacgagtggtcttaccggccagtgcactgggt

SEQ ID NO: 77400 - DNA, 380 bp, Glycine max
actggtaattctatactttccaaatgtttgccttcgcaggagaagaccccgaagatgctcgcctcatagatgtccagtaaggactatagcaccgaagatactatttccgctccggattattacattcaccgctttaggagcgtagtacaccatcatctcttcgaggccatcaaaggatgagcgttctccaggagcgacgcgtccagctcaaggacgacgagtatactgatttccaagaggaaataaggcgccggcggagggcaccactggtttctcctatggccaagtttgatccagatatagtccttgatgtttatgccaatgctctgccaacagatgaaggcgtgcttgacatgatatcctgggtaaagagcagtgga

SEQ ID NO: 77401 - DNA, 486 bp, Glycine max
  unsure (1)..(486): unsure at all n locations
ctcaagctccgatcaagcacacaattntcacttncatatacagcagctaggactctttctcatcatttgtgctatttctcttccagagaatccctcagttttagcagctgcttgctttatgatatcatcagacaatcccttaatttctatttgttgagagatgtctttgaacaaatctttaacaaaaccagattttcctgatccagcttgagctatgtacttatccagatagagcttaagaagtttgaaacgctcctcttccccatgcaagggaaattctaagacttcatcgattctgtctcgctcagctgaatcaagatcaccaggacgatttgtggcaagagcaacgactatgtctttagactaggcaccagttccgtagagaagggcatttaatgcacttctttgagcttcactcatcgtagtcttgttccgtctgcgaaatccatccaatgcaatgatatgaatccattcatacaattgtac

SEQ ID NO: 77402 - DNA, 414 bp, Glycine max
  unsure (1)..(414): unsure at all n locations
ctctttcagatacaaatatacaatctctgttttattcaccttccaactnttccactgctcttaccatactggatctttcttcaaataagctgacatcctcaacatttcaactgttgtcaaactatagccttaatcttcaggagctgtatcttggtcataataacattgctatgacatctcctctctgcccaaactttncttctctagagacccttgatctgtcctataataatatgacatcatcaatctttcaaagcgtgttcaacttcagctcataacttcaaaatctttatttgagaagntgtagtcttactgatcgaagctctcttatgtcatcttctttcaatatgagttcttcatcttctatgtttcccttgatctctactcaatctgtgaaacatcaacttatttact

SEQ ID NO: 77403 - DNA, 518 bp, Glycine max
  unsure (1)..(518): unsure at all n locations
ttagagtcacctgccgcatgcaagctngctaatgctnggaanaggcaataagttagaaattatgatngctttacatttcttagctgtcaattgagatacttatatcatgttttgataatttcaagaagactctaattttattagcattgtgcttgtaatcaaatataacttaccatgtattatatcaataatttacgtgcatctttctcgtaatcaaaatttcgggtttacaaagacattgttgagttaagcattttgataaggccctcattttcaattttttaangaataaaggaaattataaaattgcatgcacatattttgaatgaatgaatntatatatcatcataattntgtcataattagaacaaaataatttgatcacatatgcttaaattatatggagatcactccaatttccaaactatgcatgccttntattntaagaaagaaataataataataataataataataataataataatctatattattaattattaatctacactaat

SEQ ID NO: 77404 - DNA, 314 bp, Glycine max
taaaactgaccctctcactgcacagcggaatggcttgacagaaagaatgaaaatgaccactttggaaagagtgaggtgcatgcttctaagtgcaagactgccgtagacctgttggggagaagccgcaaatgctacaacatattggattaatagagaggcatcatcagccttagatttcaagacaccaatggaagcttggagtggtgaaccagctgattactcagaatcaaaggtgtgagatcactggcctcttctcatgttacacaacgaaagctggatgcaacggctgtatagggtgagtcattggctatcct

SEQ ID NO: 77405 - DNA, 440 bp, Glycine max
  unsure (1)..(440): unsure at all n locations
cacatccctggtccaaagctcgatagaccccaagtctactcttagtgagcctctcttgtgccaaactattcatttgcggaaatctaagctacgcaaggtctatccttggtagtttccctattattaaattgtatctgcgcaggaatacaagtttgtatgaacacccganacctatggtccactcttggtacgcactctcacaaaaacccagggcacgcccttggtaaaatcaccccttgggaactacaagaccatagtcaaaagtacaggttccacaaggcaaaatgaactaccaccaaattggtcagcaagaccttcacgcaggtggaagtcatactaactcctcacaagcatcangggagaagctcccatagcnaggaagcatactagatagtgacagaccttaccaggtggatttaatctgaatgactcatgcatta

SEQ ID NO: 77406 - DNA, 480 bp, Glycine max
  unsure (1)..(480): unsure at all n locations
acttgagtcatcaaaagattataaatatgtgatcatgtgttggattttctaaaaaataacaatcaagaaatctatctttcaatcttctctctcaacatcattcaactctttcaacagattttttctgattcatcttctcttcatctttctaaaagtttctgttcaaaactttttctttcaagaaaagttctttgataaaaaacttgttctattaatctttttcattctcttctacccttgccaaaagaacaaaggactaaccgcctgaattcttttgtgtctctcttctctctttccaagagaattcagaggacctcgcctgagaattcttttgattcttcccttcctcttacacanaagatctcaaaggactaaccgcctgagatatcttttgttctccctttacatagattcaaaagactaaccgctctgagaatctttgcccaacacattggagggcacatcctttgtggacaagta

SEQ ID NO: 77407 - DNA, 403 bp, Glycine max
tgagtaccttctggagttggttactttattgcttattcaagctttcactgcccattctctcaaattgaactctgacacatctctacttcttgagctataaggaagtgattcacctggtaaggccatgaattttagttagaaaataattcacccgagtggaatgttggtgttgtaaatgttggttcaagtcactcttactccaacctcaactagtgaatgagcttttgagaaaagtgtattgtttctataatagctaattgaatgagcttttgaaaaaacaagaaaagttaagaacattctagctacaacatttgcagataagagcattctggatatcatgtcgcttaaacaatacgcctacatgtatcacatcctttctatagtaatagagatgtcgagttca

SEQ ID NO: 77408 - DNA, 225 bp, Glycine max
ccactaatattattaagattgatgccctattgtgggctgaggctgaataggcacctagttgcttatatgtgggcctctttgcaacgcatgaataaaactttgagccattgtatcctcataatacttaactgaatcgtgcccacagccaacgtaatcgtaattggtcttatgcacacagaacaatgggttctgagaaaatgaatccagataccgctcaaaagctca

SEQ ID NO: 77409 - DNA, 451 bp, Glycine max
  unsure (1)..(451): unsure at all n locations
gttttcaccttctcgctaagcctttattctgtgttagcgagcttctgctatgcgcaacactcatgggctaagcgtgaggaagactctggaagaagatgagctatacaggttcactaagcgcactgcttcatctcactaagcgcaccgcttcaattcatccgctaagcgagaatggcacgtgcaagccaaaattcactatggtgtgcttagcgggccataattgcgctaagcgcacgagcacgaacaaggccacctatttaagcctgaaatcagattttagaagggagtttggactgggattcagagctttgcatgtctagagtttctagagagagaaagggtccagttccagagaagtttgagagattttgtgtgtgaagatctgcnagaccnagcttgaacaggagccgattgaagcttggatgagttgtgagtgtgtccaacgttcctt

SEQ ID NO: 77410 - DNA, 280 bp, Glycine max
  unsure (1)..(280): unsure at all n locations
agcgttgtacatcagcagcgcttcgaagccatcaagggattggcgtttctcccggagcgacgcctccatctcatggacgacgagtatactgatctccaggaggaaataaggcgccggcggtgggcaccactggttactcccatggnctagtttgatccagaaataatccttgagtttatcccattgcttggcaacataagaaggctgcctgacatgatgtcctgcgtttggggtcagttgatcctgttcatgccaacgctatatgcatcttctggatttt

SEQ ID NO: 77411 - DNA, 421 bp, Glycine max
  unsure (1)..(421): unsure at all n locations
gcttctcttggaccttanacaaaccttcaactcatcctttattatcaaactttctactcgcgaatggtccttttcctctcttcggagcttaagctcgctgttatagccccacagagcccctcataatttgttccagccatgttcttccctacgagcccttatggtctctagttccaaggccttggtggtagctatatttatgtcttagttcgcattctctttcgatctaagactactgattgaccttctttactgttggctttctcgagttgcctaaagcctgccctttcgctcctcgggcttaacttcaccccttagtggtctaaactcggagccaatcaaccttgctggggattaaccactaggaccaccagggccgtgaacgcttgagtctttctttttgaccattcatgctgagact

SEQ ID NO: 77412 - DNA, 385 bp, Glycine max
  unsure (1)..(385): unsure at all n locations
agatacaatctttgcagatgagaatgcttcanaaacattaagaaaactagcagatgggcctaaaagaaatgttataacctggcaaggatacgacataaacaggtattcattttacacaaaagcacaagatgacaaaagtaccatgcagaacagcggggtcaccctaaaggctgaatctcaacactttgcaagtgtcaaagacgccaatccctgtgtagcttacatcccttactttgngttcattgatgaaattcgggagcttaattatgtgaaatttacagtatgccgtttcaaatgtaaatgggttgacagcaacaccggtgtgcgcaccaatgatataggatgtaccctcggagatctaaagaaacttggttaccacaatgac

SEQ ID NO: 77413 - DNA, 448 bp, Glycine max
  unsure (1)..(448): unsure at all n locations
agctntnntagtttgttgattaanataataaataaaaattactactttctttntaattgggtttgtatattattcataanaatggtttcgtctgtcaactatataacataacctccgtgtccgtcttttattcatgatcgagactatagcaccaatagcactttcttggactgcatttacacagacctaaccaataaagcataacaataattnttaattttatttagttgcattaagcaaagaagaaagccatgcactgctgaattaaacaacctagaaaaagataaacaaaaaaaaaaaatatgcaaagctaaacaatttagaggatatgtgagcatacccccaatcttcgatgaaaataagggtgtaactcttcatcaccaagcgacttgctatgcatatgcatcaacgttaagaagctagagtcaaatganggaaaaaagaagag

SEQ ID NO: 77414 - DNA, 500 bp, Glycine max
  unsure (1)..(500): unsure at all n locations
agcttagacttaacatacatcttgcagttaaacattctattntcttagacaaactgaacagcagcacaggccagatacttctcatattgccactaatcacaatcattgttacaattacgcattagcaataagatcaacatttgtttaatctaacccgcccccaaaacaacatttgatataataaaattgcaagggtctccatcccaaaatttatgtagctcaacagcaaataaccaatcaaaaagataccatatgggtagctcaaaggtctattaataagagagcgatgtcaagcaaaacattagagtccatgtgtgactgaactgggaaaaataaaacaatagaagattntagcacgtctaaagaaaactagatntgaagtttctttactacagaaatcgtanatttaaatgataccatatgggtagctcaacagcaaataaccaatcaaaaagataccatatgggcagctcanaggtctattaataagagagcgatgt

SEQ ID NO: 77415 - DNA, 353 bp, Glycine max
ttataaagaaactagtcattcatgccagcccagacaaaagaaattaaatccgtttccttgtcaaaacataattctgaagttgtgtttttcttatctcatactgaatcgctaaattatgcttatatgtaaagccctgaaagaagaactttctcagaattcttcatagcagtatgacccggactttgctaatacacgtgaatctgttgtccaggtaataatgtaatatactaaaaacaaccatgtcatcctttcaattttcaagaacgcccatattatgtgtgcatcaaaatgatttatacatgcaacttagtatagtggatagctgctgataaagttattgacacataatcttc

SEQ ID NO: 77416 - DNA, 136 bp, Glycine max
cgagcttctgccacgcgcaacactcatgggctaagcgtgatgaaaactccggatgaagatgatctatacgagctttctaagcgcgctgcttcatctcactatacgcaccggttctgttcatccgcttagcgatatt

SEQ ID NO: 77417 - DNA, 477 bp, Glycine max
  unsure (1)..(477): unsure at all n locations
agctnntagaacttcttgcagaaattcaatcatattcttgtaagcacactacttattatttgtaattggctaatggctttagctggtgtaggctagagtcatcactcatcagccatggcttggttttgtgtactctttcaaagggtgctcaatagtgctccattgctgtgttttccaatataggaaatatctttagaaagacatgagataaatgattcttttgatgctcactttccaattggtttcaatataatttttgtttcacagggtttaaaccatgtgtggttaactgccatgatacctgacctaaaacctacccgtgaatcagacatgttaggctgcaactctgctacagcagtccaacttagctctgtgttcttttcaatgggaataatttctattggagctggatgcgtcagaccgtgtccatagcctntggncagatcaactgacaattaaagaaagatctaatgatga

SEQ ID NO: 77418 - DNA, 412 bp, Glycine max
  unsure (1)..(412): unsure at all n locations
gcttcgagcacaaatcctaactcaccatataccttgacccagggtgtatatgttttttcttatcctcggaagcaaaaaagaagagaaagaatattttcaatcaaagagaaagcctagaataagaaataaaaaagaaagaaggataatttcctatcctatgaaaaaagagaggaaaggaaattccccatcaaagagtgggaaaaggaaaaaagagaggaaaggaaatttttaatcaaagagtgggcgaaagccaaaagaatagatagaaaattcccaaccaaagagtgggagaaagttaaaggaaggaaagaaagcacctgatccatgatcgaaagaaattanaagaaatgtgcagaaaggtctttggaccggacaatatctgtatcatacagaattgtcaccaatgaacaaa

SEQ ID NO: 77419 - DNA, 492 bp, Glycine max
  unsure (1)..(492): unsure at all n locations
agctngaagctcaagggaaagtttgaagaagtttacatgtatgtttggcttttacatgcctaactcctttgagtggcatttatattggttgttaacttgattgttgcatcttagtacatttgatatttgtttgcattgtgaatcatcatagtctgagtgaagaaaattttcaaagttggaaaattttcttcggaggaaaaaactctttgttttaattgattacatagttgtcgaaatccgataaaccaagccttttgaagcttaaagatttaagtctcatatttgtttaatcaattatagttctactttaatcgattacacttttgtttgagacaatgactgattnttcaagagtctctgctttaattgattaccaggtggatcaatcgattacttctttcttgttaaattgtcanaggcgaacaaagaacactntaattgataacttangtcatcntaatcgatacattgttctttgagtggtttccaaat

SEQ ID NO: 77420 - DNA, 409 bp, Glycine max
acattatttcatgacacaaatgaaaaatgatgattcggacactttatgcgaaactgtgcatgcatgcacctatagtgacactcatatgtcatattcttatgagcatgtgatgctaaggctcaagattcacttcctctattttagtcaacccaatgttgccaaaatatgttcttatatccaattgggcattcatccgagtgccatttgggcgtccggagaaatttcacagcggtcaccctgcgggtgtacacacattttgtcaaaaccagctatgatcggcgaaattcccaaagaagagttggaagtcatctcttttcaaaagcatgtcaagttttcagctaaacaacatattgttctgttcttatgtctcgctttgtacgtactagctctcattgtccctacttgctct

SEQ ID NO: 77421 - DNA, 445 bp, Glycine max
  unsure (1)..(445): unsure at all n locations
acttcattagaaaatggatactctaaaggaaaccttacccaaatttttcaaaggaactgaatgtcttgaccagttgttaagatataagagtggttctgtgaacaaatctagtcatggttacagatttatgaagtttgatcatgacgaagttgttgttgtctttttttttttttgtaggaaagttggacacaaaaacatgtaagtgccacgacctaccatagagaggcacattgaatgcctacaacactaacaaaagaggacccaaaaagatttggatacctaaagaaacaactntggatgagtaccctagataaaaatggactatgcttcttttcattaggatgaatcttgtgaagtctattntgaaaaaagacccaatacgaattatggaatgatcaatagtccaacatttgaaatattnggagatagatagagtagtatcttt

SEQ ID NO: 77422 - DNA, 424 bp, Glycine max
  unsure (1)..(424): unsure at all n locations
gaaaaatatttggacacttctctatagatgagaaactangaatcaaggggagtctaactcaattggttaaacaaaatgcttgagctaattgaaactttttgatggctggcttctacacgataaaaaaccaaaaaaataaaaaaaaatgagaaactaagacattttttgaaggaaatgaaaattaatataggcacatcatagtgatcataccataaaagaaacacaagcaaatgctctagctaaaagagaggacatcacaaaacaagaatgtgaacaatatctgttaaaaactgcattgggtgatggctatcattgaagtagaaaatagaacccntccttcaacccgtgatcatgaactgacgatatngagaaactcaagtggcaactgactaactgctataactataacgattgacatgatctt

SEQ ID NO: 77423 - DNA, 492 bp, Glycine max
  unsure (1)..(492): unsure at all n locations
gtctgatggtntttcattttcattttatggntgattgctatatgggaagctggcagttgttatttatgtgcagttgaataggaaatttcctaatttctaattctatggatggttttatttcaatttcctgcattttattgacaaccaaaatggttcaattgtgttaagtatttcgtaagtaagccacaaggtttcttctttccccccaatagaatccatttccggtggtatttaagttgaagatccaacgatttttgcatcgatctctttgaattntttggcaagtagaatntacgtagcatagtttaaattacctggttcttccccactttnnntttttaatataattgtcaagaactcaagataacttatattttctgggtttgacatgacctcaagtttctttcttttcttttttattggagattcatgtttacttgtacctgcactttccaatgtcaagcaaatgacctattaattgtttcaatatac

SEQ ID NO: 77424 - DNA, 497 bp, Glycine max
  unsure (1)..(497): unsure at all n locations
taagctactgctaccactgatggctatcttcctcgtgctctctttgccaatgctcttgttccaaaccccacccatcttgcttcanatgattgataggaatgtaaatattaactagtntctgaattctgagtctacatatcactggatttgatttgattgtagggttgaacaaagaatctgacgcttatgcagagaagctttttgatactcttgctaagcagagaggtattcaggggggttccattaactagatccagatgaaggaattctgagatcatatctctgaccagagctntgatactatgctcaaaacattctttgacatgtaattcatagcnttgagttatttggattctctgtaggtatatatcacccttgagatgacttatattaatacggatttggaatgcacggctgataaagatgcagatggcagaatcaccgaggaagatatgatagaggtcaggacanaatatattattcaccacttactgttc

SEQ ID NO: 77425 - DNA, 465 bp, Glycine max
  unsure (1)..(465): unsure at all n locations
cgttcacttgcngaagatattctattataccgaaaaatgcacccatatacaatcaaggcagctttgttacctagattatttacacgtacttccaaggtgtatttgttacttacatcacacacatcttcttggctaaattcacatacatgcatactccaagcatttggggtaccaaaaattgcacatgtgcacatcttggtatttctaatacctattcatacacgaacttcatgatgaatcttgactatctacacaataaggtgctacatttcatgccctttttcaagtttttgctacctaaagccgcatgcaaattcaagcatattntcctttgctgactaanattgtattcaaaatatatatatattntgtggaatatgttttctttcatacaacattcaacatatttatatatatnntttttttgtgagacattttgactaccaannaatatatatacataca

SEQ ID NO: 77426 - DNA, 494 bp, Glycine max
  unsure (1)..(494): unsure at all n locations
gctgcagaatataatagcccactnataacattggattttttatatatttttacttagagcatcaaatctctgcggcaacttataaacatcactcacctcatacttacatagagccactcttcttgagtaaggttcctttttgctcttccattggctatagtttgaagccacaacctcaagaattccaacaatgacttcctttagtgggttgttcataaaaggttcactaggtgtggagtctaaaatcattttactttagtgaattggatttgccaccactacttaaatccatgatgcaatcatagttctaacaagactttataccactcccatgcttcatatagggaattcaccacccctctggtggaaattggtgattngtatcctcacccaattagtcttggaaggtgggtagaatctaagaaagctcgttcacataatttcaaagtagtaattacatccatgggtatcaaactcatgatgtcaactcgaga

SEQ ID NO: 77427 - DNA, 468 bp, Glycine max
  unsure (1)..(468): unsure at all n locations
ttaagcactgcagctgcaagcttgaaacagaccgagtctnaggaagagtcctgttttattgttgataaaaacaacaaaatcggtcagagcccgcatacgagcaatgctttctggtaccttcccagataactgattgctatacaaattcaagtattttaagttattgagccttcccaaatcatctggtattttcccactaaggttattctctgaaagatcaaggtctgtcaagtggaatgcttcaaccaactccagtatcttccaaaaatgcttgtcctgtaaagatacagtatgctcagatttttcagcatgaacaaatcattgggaatttgtccacttaaatcattntttgacaaatccaattcctccaatgccaccatgtgtccaatggcttcagggatttcccctaccaagctggattcatacatatgaaagaccttcaatatngtcaactgggtcaagcttgat

SEQ ID NO: 77428 - DNA, 342 bp, Glycine max
gaaatctaataatatattactttataacaaacctcacaacagaagaccactatggctttctacgaaaacctcaaacagaaacacatatattacacgaccaatcttttgatttctaaaaaaagacataaaaaattctcgggaatgataattataacataagaaggtaaaatcgagagccctttttcacgttatgaaatctgcttatatataagcgaaaaacgtgcgttatctatctatctttataaaaaagtgatattctgagaactcttaaatcttaaaataattaatataacatactgtcgttaaaatcgcgcgctatccacatccacagaatcattcatc

SEQ ID NO: 77429 - DNA, 508 bp, Glycine max
  unsure (1)..(508): unsure at all n locations
agctntaagtntccacttctttaagtgcacatttatcttttataattntnttaanaagaaggagagagagagagagagagagagagagagagnatgatgtaacgactcanatctcattaaaattttttcgaaaactatntttcaatcatggcaaaaattatgacgcacatttctcaataaaaactgaaatgtttttgtctttttgaacacgtccctccttctgtctatacacttcaacaaacattagtcccaacttgataatgaaaataaagtaagatgatgctatcgtctaaaaagaaatctctctaatccgataaactagtcatatttaaatgttcccttatatagacgaaccatntttcaagcaaaggcttagtgaagataccaaaaacatctttntgcacataatcatgaatgaaatgatatcttatctcaatatgcttagcctntaaatgttgtatgccaattttatatannngttggtgcactagtgtgtcacaatacactg

SEQ ID NO: 77430 - DNA, 189 bp, Glycine max
agacatggatatatctgccgcctatagctgcctcatgggaagacctaggattcatgctctgcgagagagccctatgcacgataccagaaattgacgtgctcttgtgatactcttaccgatatgaacgctgactatggctgttcttgaatagcacctcctccgcaccgtacatagtagcggtggatgaat

SEQ ID NO: 77431 - DNA, 352 bp, Glycine max
  unsure (1)..(352): unsure at all n locations
cctggaatcgatacccaacagtgtatcgaatacgctttttaaattaatcggaaattgtaattgagttgaaaccttcttcaaaaatttggctattggaatcattacaccatttggaatcgataccaagagataactctttgaataatgttgaaaaatatggctactcattttgaaaaactttatctatctgataatcctctttgatcttgatctgactgatctaaatctgacttgatctgatctgatctaacttctttcttgatttatntgaacctgaatgtctgattacttagagtcttgatgatctgacttttgatcaccttgcatcattttgtatatctgttctaaacac

SEQ ID NO: 77432 - DNA, 497 bp, Glycine max
  unsure (1)..(497): unsure at all n locations
agcttgtacgcacatcgttcgcgtgtatgatatccactccacattgtttgaagtagaggagagcttcaaccctataacgcaacgtggcggacaaaagtgggcagtaaacttgaatggtcgtcatagtcaatgcggaaggtattctgcgcttcactatccatgtttacacattattgcagcttgtggttacgtgagcatgaactactaccaatatatagatgttgnttatacaaacgagaacatcttanaagcttactccgcacaatggtggcctcttgggaatgaagcaactattcctccttctgatgacgcatggacacttatccctgacccaactacaattcgtgcgaaaggtcggccaaaatcaacaaagataagatatgagatggattgggtcgaaccatcttagcaccgaccaatatgtagtagatgtggagccgaagggcataacacgcgtcgctgtccaatgcaatctgagcgtgggagtcgttcaaatc

SEQ ID NO: 77433 - DNA, 470 bp, Glycine max
  unsure (1)..(470): unsure at all n locations
tcagatccttcaactgcacaaagctcttaatttatgaagagaattcttatgtgtccttcacccgatgaagacactgacataaacttatcttcccctttttggacaaagtattacaagctgggggcaagtgaattttcttcccatcagaccttggatgcgactgtgatcgggtccccatctcatctatatcttgacaaggattcaagctatccttcgtcttgacctgaatgttaaagagcgtcccaatcacactaccacatacattgttctcgacatgcataacatcaatacaatgtctaacgtttagatcagaccagtacggaagattaaagaaaatggacctcttctttcatatgcangtcttactgttatccttcttttgagtcttccaaatacactatttaagtggtgaacccactggtatacctgctcactagtcaacggtatcggtgcaatatcgtgatcttgac

SEQ ID NO: 77434 - DNA, 471 bp, Glycine max
  unsure (1)..(471): unsure at all n locations
agcttacgggagatgaagggtattgtgtaacaattctgttatgtcgttaggctgttacgtaaccaaactgaatgtataaaaggctcaaaatgagcttatgaaagctattaggaataatatacgtagcttccttctattctctctctctttctctctatctcttcttcttcttcacgtagctaacatcatttgtggaagtcaccactaacataaaccctttatgtagacctcaactgcttttctggttgtgatatttgcagctccaatttcttgtagttgtgattgtgtagaagagaaaagaatggaagagaagtggagaaaatatttaaattagaataaagaagagaatatgagatccacacaaaagtttggaaactatttttcttatttttntcactatcaaacacacacttagacctaaatctagcatctaggactgctatagcctcgatccacggtgggagttacatc

SEQ ID NO: 77435 - DNA, 468 bp, Glycine max
  unsure (1)..(468): unsure at all n locations
agcnttgatggcactatngcaacananaaacacaactcacaacaattcacatgtgaatcanattgtggcagttagcaacataggtagtactctatccattacttgtagtgtaagcaagactagtcaagataggtggatccttgactcaggtgcaacagaccatgttacaacctttcctcatttgttttctttgtgtaaaaagataaatcctataattgttagacttcctaatgctcatacagtcacttgtactcatgcaagaaaagttcaattttctcaacttttataccaagaggatgttttatacatacctagttttcaattcaatttgatttcaatatccaaattggtcttttctttgtcttgcaaactaactntcatgaatgacaaatgctntatacaatatttacagagcatgtagaggattggtatagtgatatggggaaggcttacagacttaacatggtc

SEQ ID NO: 77436 - DNA, 509 bp, Glycine max
  unsure (1)..(509): unsure at all n locations
ttaagcaccgcggctgcagcttaaaaccacctaagcaaagattttacctggttactcatcanagactgcttaccaacgaagctgaacctaagagggagacaagtggagataactgacccaatgtgtccgctttgtaataattccgaggaggatgcagcacacctcttcttcagctgcagcaaggtcctccccttgtggtgggagtcactttcatgggttaagtcagtgagtgctttccccaaagaaccccanataccaatttatgcaacatactatatcgaacgctacacgatcaaaggatatgagatggagctgctggtggatagccctcacaaggaccatatggcaacacagaaacaagctgttatttgataatcaaacttttaacgcaaccaagctgatggatgaagcacttcttcttttatggtcttggcttanagcaatgganaaagaatntgatacacatttcaatcagtggtcctctaatctggcagatgcctttatgtaat

SEQ ID NO: 77437 - DNA, 436 bp, Glycine max
  unsure (1)..(436): unsure at all n locations
actcagctcctgaatttaagacttaaactttgagggagaatgtttatgaatcgcctcggccacacatagtggtgtcatgtttgcnaaactcttaccacagcatacaactctctgtcgtacatggcataattcaatgttgtcccatgaaactcttcactaaagtagctagcttagagtcctacatcaatacaacccttattccatcaccagaagcatcacatacgatttcgaaagctttatcaaaattacgcacacaaagaaaaggtgcattggtcaacttatctttcaataaattaaaagttatctcatgcgcaccaatcaacttagacactggattcttntttacaagttcatgtaaaggtgcagtaagtgaactaaagcttttcacatatcttctatgaaaacttgcctaaccatgataactgcttaccttatt

SEQ ID NO: 77438 - DNA, 378 bp, Glycine max
  unsure (1)..(378): unsure at all n locations
tcaactcatatataccacttggtggttttcctaacaacaaacaaattatggttctcattctccataacaacaatggccctctttctaaggacacattgaacaagacttacccaatgactattagaaataagaatagatatacctgcattcaacaacttaattatctctcccttcactaccgtcatcatgatangggtgagcctnctttggggtagtctcctaggagtcaatcactcttcagtgtttatcttgtggtgcatatggtagggggtcaagaccctntatctcatgaatggtgcacccagaggcctccttattgtctctaagaatcatcagtagtttctcttcttcatttntatgtagactngtagaaatcac

SEQ ID NO: 77439 - DNA, 468 bp, Glycine max
  unsure (1)..(468): unsure at all n locations
agcttataagaacanaatngcctcaatcatttccaaatatgcatgtgaattatgacgcatcaacaagaatcaagccaaggctattgtgcaagcaatcaatggggcaaaacacaccaaatgattatgatgatggacagctcanattctcacaaaggtaaaatcatcactttcaaattgagctttcaaaattatcatgacatgtagagaagaatcaaggatttcaagtcacaaaatgtcaagaactttaattttcaaaacaattacccatttcttgaacatatcctataattcaaagaanaacatgcaaattcgtacgtgaacacaaaattgacccataatattaaactaanaatccgacgaaactaacaacattaacaaattaacacaactaacatattaacagaaccaacanaactagcataaccaaagaacactcccccgccacccgccatacttaaacaacacatt

SEQ ID NO: 77440 - DNA, 484 bp, Glycine max
  unsure (1)..(484): unsure at all n locations
gatactaagctccgatggtgcgtagccccaccatctttcatagtagagtatcgagaatgtgtctaccatcatgattatcgnctccctttccatcattgagggtaccacttgggccgccagatccctccaccttttgggccggttctttgaaagatccgtccccctttttgcacatgttctgtagttgcatcctattcagaaccatatcataattgtactgatactgcctaacacaggcaaccattaggtccttccaagaatggactcaagaaagttcctaagttagtataccaggcgacagttgtcctagtaagactttctcaagaaaaatgtatcagcagtttctcatcttttgcgtatgcccccatcttccgacagtacatctttagatggtccttggagcgagtagtccccttgtacttgccgaagtccggcaccttgaacttgggaatgaccatcgttggtattatgaacaactcttcta

SEQ ID NO: 77441 - DNA, 350 bp, Glycine max
tgacgcgtgcaagtctgatatcatgcagagactaacgtcgtcttctgttatctttatattcgcagccgacaagcccagtgacacttgtatatatacgttatcttctcgctctcactagatctgtcatatagactatagagctccgctgactggcagaaatactcgaatggatatccatatatacttgttgctatctgtaagacgtaaagcttgatatcacgcacagactaacgttttcttctgatgcctacataatcgctgacgataggctcgttgtacacgcggtgatctacgttatttttctctctcacaagatctgccttactgacatttgatatacgctgacgtgc

SEQ ID NO: 77442 - DNA, 384 bp, Glycine max
  unsure (1)..(384): unsure at all n locations
agttatcggataccactcggtattttcgttcttcagcgtgactcanaagtcaatatgacagatcttgtgagcacggaaagatgacctatatcaccgcatgtagacaggcttgtcagccgcgattgacgaatggcgcanaaaaccacgttagcgtctacgggctatcaggcttttcgtcttacagacaagcaaatgtttattccgataaccactcgggtattttcggccgtcagcgtgactcaaaagtcagtatgacagatcttgtgagcgcggaagatgacataaatctccacgtgtcaacagacttgtcggccgcgattgactaatggcgcacacgacgacgatagtctctgtgtgctatcaggcttctctgcttacagacag

SEQ ID NO: 77443 - DNA, 506 bp, Glycine max
  unsure (1)..(506): unsure at all n locations
ctaagctccgtctacaatctccccctttgatgatgaaacttctgaaatcttgtttctcttctcacatacatattttcctaggcgatcactcacataaatgctccccctttggttttgaatttatgcttctcttaagattaaggtgattactcatgtgagttcttgatttaatccctatctctctcccccttttggcatcaacaaaaagccaaagagcgtatcanatttgaagtattcaaatataactaaacatccatacaacattcatggaaaaactataaaccaaatcaagaagcaagaaccatgaagcaataatcatgaatagattaactataaaatccacatagtcaaataacatacttaatattngctcaaacataccatgcagataaagaaatagtaaattgttcanataccataataatatagagatttattgtgataagtcactaacatctattagtcctaattctcttctaatggttgagaaggtatctntacttagt

SEQ ID NO: 77444 - DNA, 323 bp, Glycine max
  unsure (1)..(323): unsure at all n locations
agctntggagaggttatgtggnggagcttgnctgngtgngtgttatgttngtgaaggataaggtaatgatggatatacccttgagatagtggtggagatgtggatctccgtatgatgtgttgaggaactcgtgtgtttagttgaccactatcgggtaccattaatagaggagcttacacagacctagttaggacaattctgttggggaacgtcgatgaggagctagtcctcacaagattgtgttgaccttgatcattacttaaagcacgttcgctgtcttgctattttgtgggggtgttatgctgacattgtggtcaatttct

SEQ ID NO: 77445 - DNA, 435 bp, Glycine max
  unsure (1)..(435): unsure at all n locations
agcttattaagaggcttctagcacactcgagacatcttctcatttatcccaacggtaagatcatggacaagtgtcttgtgaagtttaagaccaaatttcgagaagattcaacggttaatgaaggctgggcatcgtttttaccgaggcagctgcatgtagctttctctagaagcttcattaagaggcttcctctagaagcttcctcgtggcttctttgagaagctttctcaacaggcttctttgagaagctagatccttatctatccacacccctctattaactaaattaacttccttaaaaataattacggatgaatataacgcaacaaataatcaaacatcaaacataattactaataatatatagatatatatatcagggtgttacaactctcccacccttntagaaatttcgtcctcgaaatttaccttact

SEQ ID NO: 77446 - DNA, 98 bp, Glycine max
aagggaggaggggtcaaagggacgagaagggagtactatggaaacaaagaaaaaaggaaagacgtagaagagggggaaagggaagtggagggaagaaa

SEQ ID NO: 77447 - DNA, 122 bp, Glycine max
agtgagagcgattctcctacattcctgagcgatagaagaacaccctggctgtatctaaggactttcacaaccttcgtgtgtagccctccctggatagagtgatacactcgttcctttcatct

SEQ ID NO: 77448 - DNA, 467 bp, Glycine max
  unsure (1)..(467): unsure at all n locations
agctntgcagcagatgccactctactctanattcttgaaagatattntaacaaggaagcataaatatattcattaggaaaacatcatagtggaaggaaactacagtgttgtgatccaaaagatccttccacccaagcataaagatcctgagagtgtaactattccatgttcaattggagaagtcaatgtaggaaaagctcttattgacctcggagccagtttcaatttgatgccactcttcatgtcagaagaatgggatagttggaaataatgcccactcgaatgactttacaattagttgatcgctccattaccaggccatatggagtaattgaagatgcgttagtcagactaaaacattttatcttcccggcagactttgtggtaatggatatctctgaagatactgacatccctgtaatatngngaaggccattcatgttgaccgtaagctacatagtttatat

SEQ ID NO: 77449 - DNA, 449 bp, Glycine max
  unsure (1)..(449): unsure at all n locations
aattccagtgtcctatgctaactngctcctatatcttctctataattcaatggaagccataaccccaaccaaagttcctcaacctccatttttacgaggatacgactcgaatgcgacatgtgcttaccatggaggagcttcggggcattccattgagcattgtaagaccctgaaacataaagtgcaaagtctaattgatgttggctggctgaaatttgaagagaatcgctcgtgaattctgacattggcaagcaacactatgcatgggcaatttgaaagttgttgttagatgtctctaataagctcgtaggattttcaagtttataccattattgtaaaccacaattacaatgctaataatatggataagtgtgacatccttgtctctcatccttttacaattacatctttgcttatttgacttccattggaatgtgagtgtaagtcat

SEQ ID NO: 77450 - DNA, 444 bp, Glycine max
  unsure (1)..(444): unsure at all n locations
agcttagtgtttgtggttcctaacccttaatttgtaactcatcatctcanaagccaagaaagaacttagggagaggtcctattaatgttgacttaactgttgtgagtgactagcctgctccaaatctgatccagactcaaattccttttttggccatcctggtcattctccatgtttttagcaagtttccccaagagtaggttatagaagaacatttgactatcacaggtgttgaaggaccaatgaagaaagttggtcttgtaggtgccttgaaggccttaaagttttttagcttaatgtcggctaatgtnttgttggattgggaaggagtatggtccttggtcaaagacaaaagtttgtgggtttcatgatcaaaccatgaaatatgtggttgtcctcagaattactaggaagaggggacgatcgttcattgttgaaaagtga

SEQ ID NO: 77451 - DNA, 362 bp, Glycine max
gatccctaagctcttgaccctgacttgataaaacctctttttaaaccaaggtgtttgacctgatcccacgttgtacttaagggaaacaaaattagtgcgaatcaaaactccgacatctatcatgggtgggatggatgaatgcctgaagaaatgcatatctcacagatgcaatttatgaacaccggagccccggagattgtcttcttcttagataccacgtcttgaggtagcacagtgcccgacctatgtatttaataatgtgacacggaccctctgttggtttgccaaagagaggggatcaagacataacccgtgcatgatgcatatgcgataggcgcatcacgggacatgtaatagtatga

SEQ ID NO: 77452 - DNA, 449 bp, Glycine max
  unsure (1)..(449): unsure at all n locations
atcctctgagtcacctgccgcatgcaagcttgtcaagtgagcttatcaataacattatgcatagttttgtatcatttatcatcatttcttaccattntctctccaaaaactaaaacttgaacattcattttcttcttcttgcccgaagctttggtatcttaaatctcttcttttctactcatttcttcatcttttatgtgcaaaaaattttcatccttcgaagcttgggaatatctagatctaagttcttgagtcatctgagcattttcgtgcaagcttcatgttgatggattgacaagtgcaataattcgtcccaagtagtaaagttaaaatggaagtctaagtgtcaaattcatggaactttgtttgtacttaggtagaatgaatattttttaataaaagaagttaaagaaaattgacttgaaagggtataaaaaaagcagtaattt

SEQ ID NO: 77453 - DNA, 412 bp, Glycine max
  unsure (1)..(412): unsure at all n locations
agctggctcacaaaatntcaagtcatctgtatatcatttaatggtagctgtagttcaaacctacattgttacttgcataagaagacaactagttgtgtgcatgctgaatgtagtgtatgactagaggcaatccatctgacttacaatcctttgaacctaatatagataggacatttcatagagtagttagacatcattttataccttttgagcatcctgagcattctgttactggagagaatgtccatcctggtattggagaatttgacatctcgattttgacatataatgttaacatttgattggaacattttagaacaggacaacctccctcggagagactctaggaaatggtgccctgattacctacaaagctatgcatcagaccctgagagatgccattgtctaaact

SEQ ID NO: 77454 - DNA, 494 bp, Glycine max
  unsure (1)..(494): unsure at all n locations
cgcaagtganacatatcaacagactgatgctaattgtctggttcctttttgacaccttcagggatgatggatctacagcttcaacagcaattctggttgatagccatctttatgtagctaatgttggagattctatgactataatatcaaaagctggtaaaggtactatttatataacctactattttatgatatcttcattttattgtcactattaattaacaataatattggtagagtttaagttcgcatatcctttttagattctgatngcagactttggtatattagtcaaatttctttttttataatgaaaaaagagtgtctatatcttaatgatgtgatgttggggaaaagctgcttgataatgtaaatactgagatcatgtggaagatagagcatttcagacaagagtccttgtctggtcatatgatagagtatctactatagctccacttgaatacactttagaaataagactgatatcttgaata

SEQ ID NO: 77455 - DNA, 362 bp, Glycine max
  unsure (1)..(362): unsure at all n locations
tgaggaagtgtggaagggtgagacttcctattttattctttgaccacagagtggtacctggagatatgtcgcggnggtcaggagaccttgnggacgtcaggtggtgtgctattgcccaaaaccaagcttgaccaatcccgacccaacccgggcatagtcagtcagtgagaacctgtgatgtacctaaacaggcgagctcctgccagtcaaccgataaaagaacaaagaccacaaagcagggaggcttgcgtggtggctggccanctgtgaatattgagtgatatatgggatatggcttctggtaatcgattaccaagggtgggtaatcgattacaaggcttaaaaacgagatcaggaagcta

SEQ ID NO: 77456 - DNA, 145 bp, Glycine max
ttcatcccaacaacttaccattaattcccaattgtgcgtttcatctcattccatgccatcatatacacacaatggggatcctaaagactttaataagctttgaacgtgactgaattggtgcacttaatggtagtgaatgggccct

SEQ ID NO: 77457 - DNA, 505 bp, Glycine max
  unsure (1)..(505): unsure at all n locations
actaagcttcatagagggtcgtcctaatntctctacaattgcctcacctctatatgtatcttttaagaagaatgtggcatttacttggggtgaaagacnaaagcaagccttctgtttgctcatagataagcttactaaggcacttgttctaactctttctaactttttctaaaagtttgatctagaatgtgatgcctctggagtgggagtcagatgtttgtacaaggtgggcaccctattgcttattttagtgaataacttcatggtgccaccctaaactaccccacctatgataaagagctctatgccttaataagagccctccgaacttgggaacattaccttgtttcctaggaatttgccattcatagtgatcatgaatcacttaagtacattagagggcaaagcaagtttaacaaaaggcatacaatatgggtagagtcctagagcaatttccatatgttatcatatacaaaatgagatcaacaaatgtgggagttgatgc

SEQ ID NO: 77458 - DNA, 467 bp, Glycine max
  unsure (1)..(467): unsure at all n locations
atttctgcctcgcatcatctattgtccttgcatacccaatttaaaccaacatacctatacccaggtgatgtcatctctcccaatgaaatgacattagtagtagcagaaagtacaaatctgacattctgaaaagttgaatgatgctgctgtggatgttcattctcacagtctcaatgacttcaaccttcattttctcaccatttcctaagttgaaatgaccaaactccccattagttgtcaaagtatcgaacatcgctcgatctctacaaatgtgcttcgaagcaggggaatccattatccatcttgatttatcaacctcattagtagttgccaaatacaagtcttcatcttcaaagttttggaccacatttgcctcagacttgcatcagttgtctcataactcaacttngtctatcctctcgcattcatgacacattgtgtgatgacattcttctcacaataatacc

SEQ ID NO: 77459 - DNA, 499 bp, Glycine max
  unsure (1)..(499): unsure at all n locations
agcttcgattgttgaaaggtacgttgctaaagaatgtattgagttttgtttgcagtacattgacacagttaaatctgtcgggattcttgaaagtcattatgacaagacaggtggaggtaagggtacacgaggatacaatgttgtcacaatgactcgacaggaggtctcacaagtgcatctatatgtattaaacaacatagcagacatgattccgtacatagaagctcacaaacaaattctcagagttagtcaacaaaaaatgaacatgatgaggatgttgcaagagcacaatagaactttctttaacaggtttagagaatcaatctttgttgatcagagtgcttcgagaacattaagaatngtagttgttggcccatatctcaatgtgccgacatgaaagggatatgatatcaacaattattccttctacaccaagtcacaggatgatanaagtagcatgcagaacagtngggtgagtggtcatgctgattcggatcac

SEQ ID NO: 77460 - DNA, 498 bp, Glycine max
  unsure (1)..(498): unsure at all n locations
atactcaagcttntactcatgtggcagggcgggcttccttcaccttcttgtctccaacgcgttctttgaccattgntccttcttcccgcgatgcttcttttcatgtacgcctgagtgggcttatagcctaaaccatacttcccacgatttccttgggtatttatcaggctagttatgccgccgttgttttttcctaaacccatcccgggttcataaccattccccaacataactcgggccatcattaccgctgcatcggacagacaaggctgcccaaagagggagtccacggaggaaatgctgaccacctcaaaagactggaaagcagtttctaacgattcttctgcggcttccacataaggcatggaggatgggcagcttaccaagatatcttcctcgcctgacacgatgaccaagtgcccctccactacgaatttcagctttnggtggagtgtagaaggcacaactcccactgagtggatccacgggcgccccaac

SEQ ID NO: 77461 - DNA, 500 bp, Glycine max
  unsure (1)..(500): unsure at all n locations
gcttcgaagnagtgatgaggtcaagccctanattctttctngatagagcccgggtagtcaaagagaagttcaagtacatagccatctaagtctgaagagagtatgatgaagtaagggacgtcaatatagccaccaatgaagccttggaatgagaaaccaagaaggcccgaaaggaagaacactaccaacacaagttttgaggggctgtataaggcagcaatagtgagctcaagctcccgaaaggtgaaaggaatcatcacgggtcaaaggcatgatctggaaggacgagccaaaggcttgccttatgtcgaaaagaaatttgtcccaacagttaaagcgagactgaagggaatatatgggtcatcatcgatgagtgcaaagagaagctaaatctagcggcgactcacgagcaaaggctagaggatgagtacgccaagatatcancaggaagggaagcaagggaaaggggcattgattcattgcaccaagaggcaataatg

SEQ ID NO: 77462 - DNA, 145 bp, Glycine max
cagaactgcagatgtcaagagagaggcgcctctgcttctgtcgtgatgactagagttcccctcgcgcgggttgacctaatcagcactacctaggtccacagtgggaagaagaggacgtacctgcatgactaccagatcctccaca

SEQ ID NO: 77463 - DNA, 407 bp, Glycine max
tgccttgacttgtgtcatcaagagattataaatatgtgactatgacatgtattcaaaagattgatctatctttcattatctatcgttcaatcttctctcaacatctttcaacaatatatctttcaactttgttctacagaattttctgattcatttctcttcatatttctaaaagtttttgttcaatactttctctttgaagaaaagttctttgatcaaaaacttgtgctattcatctttcttagttctctcctccctttggccaaaataatagaaggactaaccgcctgaattcttttgtgtctcatttctcccttacaaaagattccaaggactaaccgcctgagaattctttgtcccaacacattgaaggtacatcctttctgtacaagtgagggtacatctac

SEQ ID NO: 77464 - DNA, 508 bp, Glycine max
  unsure (1)..(508): unsure at all n locations
cgcttgggaagctacaatggaagctggatctttgagcttcaatgatactttttctatggcgattcccctccatcggagatgcttccggaagataaagataaagatgtgaggggagacgccctccactatggaataagccatggaagaaagagcttcgccatcaagagaatgtcttggataataagtttggagaggatgcttcaatggaggaaaataaatagggagataaagatagaggggggagaccgaaattgaatgaagaataaagggagagaagttgaactttgagttgtggctcacaagactctcattcatcatagctacaacaagtgttacacatgcttctatttatagcctatgaagcttccctgagaaacttccttgagaagcttctttgagaagcttccttgagaagctctcttgagaaacttccttgagaagcttctctgagaagcttncttgagaagctagagcttatctacacacacccctctaataactaagctca

SEQ ID NO: 77465 - DNA, 482 bp, Glycine max
  unsure (1)..(482): unsure at all n locations
gcttcnttcgcaaatacctcttgtaagtctagtgtctatattaaacaacantantggaagagcataattaaaaccaaaacttaatctgccgatccctcttgtgagaataagtttcgatcctgcttcaatcaagttctaaggcaacagtacatttcccaatgctaaagtcacctaactatgcacacaaatggataatcacaccaaaagcatacatacttttagcattgaaggaagcattgtacaccaaataacttaatcaattagatattaggtatttacatcggtcgttcattagaaatccccaactagggtgcttagccacccattacaaagaaaccccaacaataataatcgtacaaaacctaggtctcaatgagcacgctacctctcttgatgcttctagggctcttttccacaaataggcactgtggtgagctccggaatctatgccctttctttctgctaccatctatctaaaagtt

SEQ ID NO: 77466 - DNA, 475 bp, Glycine max
  unsure (1)..(475): unsure at all n locations
aaatatgcatgtgtatttatgttcatcaacaagaatcaagccaaagctattgtgcaagcaatcaatggggccaaacacaccaaatgattatgatgatggatggctcaaattctcacatatgtaaactcatcactttcaaattgagctttcaaaactatcatgacatgtagaggagaatcaaagatttcaagtcacaaaatgtcaagaacttttaatttcaaaacaattacccatttcttgaacatatcctatgattcaaagaanaacatgcaaagtcgtacatgcacacaaaattgacccaaaatattaaactaaaaatctgacgaaactaacaacattaacatattaacacaactaacaaattaacaaaaccaacaaaactagcaagaccaaagaacactgcccgcccccatacttaaacaacacatagttctcaatgtagcacaagtaaaagattataaacaattaaatcatc

SEQ ID NO: 77467 - DNA, 332 bp, Glycine max
  unsure (1)..(332): unsure at all n locations
agcttgtaatcgantacacatatactgttatctattactatagcanatnttcagaaaatattctcaacagtcacatctttntatgtggttcttgaatggctatcacaggcctatatatatgtgacttgagacacgaatttgctaagagtttttcagaacagagaaggtcttatcctcttataaagcaaaatcgttttatcctcttacaaattccttggccaaaatacttgtgattcaataaggaatttattgagtgctcaaattgttcaatctatctctttcaagagagatttcttcttttcttcttctttattctgaanagggattaagag

SEQ ID NO: 77468 - DNA, 377 bp, Glycine max
  unsure (1)..(377): unsure at all n locations
agcttgcaagtgagcttatcaataacattaggcatagctttgtatcatttatcatcatttcttaccattttctctccaaaaactaaaacttgaacattcattntcttcttcttgcccgaagctntggtatcttaaatctcttcttttctactcatttcttcatcttttatgtgcaaaaaattctcatccttcgaagcttgggaatatctagatctaagttcttgagtcatctgagcantttcgtgcaagcttcatgttgatggattgacaagtgcaataattcgtcccaagtagtaaagttaaaatggaagtctagtgtcaaattcatggaactntgtttgtacttaggtagatgaatatttttttaataaaagaag

SEQ ID NO: 77469 - DNA, 464 bp, Glycine max
  unsure (1)..(464): unsure at all n locations
ctcagcgccataaataccagctgagcgatgatgcaaaacacctttttgctgggatgtctgcttttatcatntatatgacaccacctactagctttgtcaaataggtgaagaacataaggtatgtctgctcaatcgatccttatatgatcttaaacaagctcctagaatgcggtataggcgctttgatgattatatgattaaaaatggactttctaggaggggttatgactttcgagtgtactagagatgtcacacgaatgagaaactaatacactcggcggcagatgtaggtgatatatatgctactgaccagcttaagcatgactgaaactgctatgagtaagatattgctgaatctagagtttgagatgaacgatcttggacatgctgagaagatccttggtatagaaataaccacgaatagggaggaaaagtgttgtacctatctcacattagatacctca

SEQ ID NO: 77470 - DNA, 404 bp, Glycine max
  unsure (1)..(404): unsure at all n locations
ctgcagctttagatgagtatgtctgcaatctgacatctttgttattttgaccatctgaattnctcgagtgctctcggtgttaaattcaagcgtctcgatttttatgtcctcaaatcagacattggagcgaaatgttatgaccattcgaatgtgtcgagagcttccgtctttcaatatccagcgtctagatgagttatgtctccgaatcagacatctgagtgaaatgtttgaccattcgaatttgtgagagcttccgttgttcaatttcgagcgcttgatgagttatagcaccgaattggacatccgtgtaaatgtatgaccattcgctgtgccagagcttcgttgtcaatttcagcgtctgatatttatgtccccaaccgacatccgtgtgataagtatgacca

SEQ ID NO: 77471 - DNA, 351 bp, Glycine max
acatttccttcaagagagggttcacaagcactcctcaaagatcttccacacatacatactaggagagccaacaatggttctttgtggccctggagcaaacaaatttgtctccaccaatgagacaaagcttgttaaaatttgatacatgaagactcagcgcagattcttcaacattctgatcaaacacattcacctatgccataaccaacacaagaagccgctccatctgctgctccagtgaagaccttggggattctgaaaccagagggaatatctaggtacatagggaacaagattgaaccaaccatgcaccatacatttacgacacactgcgaagggaaaaaagaagtg

SEQ ID NO: 77472 - DNA, 174 bp, Glycine max
  unsure (1)..(174): unsure at all n locations
ccttggatcttctntatcaanggagacctttgtttcttgaatatcaatggtagcaaaagggagaacgaggaaaggttattggagacaccacttcaangagaagatgagtcaagaataagctcaccaccatatgaagccatggactataacttgaaggtatgaaaatatgagtgg

SEQ ID NO: 77473 - DNA, 509 bp, Glycine max
  unsure (1)..(509): unsure at all n locations
tctactgggaaatccatccttgtactcaccatcanatgtggnactcctcttctctcatctactgaattcaagagctcgggtaccaattgatatgatgggaccagggtatgatgataaagaaagtgaaataatgcaacaacgaacaaagagtgtgtattcactggcgagtggtgatgagagaattacagggaaaataacagccaagtaattcgaggaacctgacccctccattcaacgtcaaaaatctttcttagccctctctntacacctttggccttttactacaacctgaccaagtcaaaaactacctcctgctaactaactaaccgttgtctagtaagttacctaactgtttccttttatatcttctcttatgaacctgagtaatagaagactgtgttctatcaaagagattaaggttaggaagagagtactcagatatggcanatcctctagagaatctaccattaactaanatcacttcagaatgtccctataataacacatag

SEQ ID NO: 77474 - DNA, 433 bp, Glycine max
  unsure (1)..(433): unsure at all n locations
tctcttccatattctctcatttcatttcacctcttatatctgcaagcctctcatgacaatgagaggctgaaatcacctgttattgggagctttgcanaccaaactctctctgatgtaatgattctaaactatctattaatataatggagatattattggtctttcttgtgctcattcacaggtatatggtctgatcatccattttcatgaaatgttctatgatctagacattgtaaaatgtttatatgctaagaacttgagaagaacatctaggtgatccatgcctaggtatagaatggtattgtctagcctatgtatgcatctctactcataatgcanattatntaatataactcttaagctattacgagcgatattaagtgatttaggctctctcacttgatggatcgcggctagagtatgttagaagatg

SEQ ID NO: 77475 - DNA, 378 bp, Glycine max
  unsure (1)..(378): unsure at all n locations
aagaaggagtgctctcttgatatcactctttgctgaaaatgactttccttcttaacaattgtgcttggaggaatccttttccttcttttccttccccttggcctttgaagacaacgccttactatccttctttntcttttatttttctagataatcttgctcatccctcttatctttcatagtaagttgatctttcgccacctgtgaaggtgttgaagatgcaacgcanatatactgccaagatgggtaagggtaatctcatttagtaggccagttgagatgatcttcctatcacattgtcatggccttcctaaacgaatatgccctgtctccatgggaaccatataccaattaacttcattcttatatgtgccaatg

SEQ ID NO: 77476 - DNA, 480 bp, Glycine max
  unsure (1)..(480): unsure at all n locations
aaaaactcagctccgcagaacatnatagaaaatatcgtcgtcaatacatactctttattatttanacgatcatacgtacttaatagacatttactgacatactctcaagcttcgaagatacaagtacattgaattgctaacaaatatatggaaggacatgcacatattacttaaccattgcattcagacataataagatatacgtctaagtgagtgccgatctatggtaacctgaaaaagagttgcatttttgcattcatgttttgcatctaacggcacatttccttactcataataatgggcaccaacctgtaaatgagttaaaaacaataatggttaagagccttgcatcgcgtcattcacatcaatgcataaaaaatctacataacattacctgcattataccctttacttccactggttggtttcatcttcgaacacagtataccatactgaacacctacttccgttgctataaac

SEQ ID NO: 77477 - DNA, 425 bp, Glycine max
  unsure (1)..(425): unsure at all n locations
agcttagtggtgagacttgtctttttaccgtttgaagattgttcatatgcaacatttgccaggtccgcttcaggttctatatctctcttggttacttgatgtttggaccaggaaacctgcatgtctagcattcatttaagtattgttcgcttcttctttagttttgtttcttcatattgcaaatttcttttggggtgtaattcttaatttgcccctcatttctctctctttcatttacctcggtagttgatttgtctagtaggattaagtatcagtactctcatatattagggccataacagaatcttaatttaatcctatgtaatatattaagaggtaaaaaaaactttaagtatgacatggatcataaaatagcccgataagtggattgngccaaaggtggtgagaatattcacatttcatcg

SEQ ID NO: 77478 - DNA, 488 bp, Glycine max
  unsure (1)..(488): unsure at all n locations
ctaagctatgacttagatattactctggtttcttttccttcttatggtttatttgttcacagnagntaatacttaatattgggcactagttaaacttaatattcactttaattggtttacaatacattatgcatcctttgtcaacatattatacaatatcggtataaccagacacacaaaagttatcaataactttttcaattttcaaccaaagtattatttcttgctttattccttaatagggatgagagataacaaaatgaacataaattcacttaagcttttatatgtattatagaaaataaaaaccactttttccaaaagagctgcatctgaattacttttagttatcaaaaactcaacttctacatatggatctggctcgcaatatacaaaggtaattagagccttttggttattctcccaaactttgaatattataaaatttcattaaacttctggtaattcgaacccaagtggagagttat

SEQ ID NO: 77479 - DNA, 309 bp, Glycine max
cttcctttctgagatacttttccttatgtcaacttgcgtaggtctatagcctaaccaaaacttcccgtgatttcctctggtgcttaccaggctggttctaccgccgttgctcttgcccaaacccattccgggctcgtagtcgtaccccaacatcacccgggccaccattattggcgtatcagataggcgagactgcccagagagggaatctacggaggcattgcttactacctcaaaagattggaaagccatttccaatgactctttcgtggcttcacatatggcatagaagaagggcaacttaccaag

SEQ ID NO: 77480 - DNA, 463 bp, Glycine max
  unsure (1)..(463): unsure at all n locations
ctgctgctgaagttgtgttaaatntgtatatgacagagcagtaccacacactggatttcctataagactganaagcatgagggacacatcagacaatcaggcattataaacgaaacagcatacagagaatcagattgaagtctaaattctttctcacatcaatatatttttgtattgtgaacggagtgtcactgaggaaatctcattgtcttgcanatctacaagctgcagttgtggacaaatgttgtcacccatgtccaatgtattgttcaatgcattgtttcgtagtttcctgtgaaaatatgaaaattatgatgactatcattctattgtttggataactacttatgatcaacataaaagttagggacttacacttgctgtatttgaggaatgtcaaagagttntgatggaagagtaccttgaagggatccaaactccataatacttcagcacattgaag

SEQ ID NO: 77481 - DNA, 117 bp, Glycine max
aattttttctaaagcccaaagtggggggatctgtgggaccaactaccctaataccatttttttatgactctgcgttgatcaaccaccgtctcccagggacgaattttttcaaaccca

SEQ ID NO: 77482 - DNA, 365 bp, Glycine max
taacaacagtcacgagagaactagaacagaagtttatatgcctatgagacagtgaaaaagtcaaggtggaaaactaaattcacatttatataaaccacacatacagaaactgaaacttttatccaagttattaaggaccaaaagcataagatatagcacatgacaagaagactttgttcaaaagaattcaagatgcaaagttatgtttggtgaaacccaaatattaccaggatattgagctttaaagcttatgacggatcaacatagatacacaattatataaaatatcctcatgttccaccaatacaatattacaccatatacatggcaacaatatgagtctccatgtgcaagtggatgggcat

SEQ ID NO: 77483 - DNA, 398 bp, Glycine max
gccgccgagagtgtcagtggtgagttttgcgtgtcgccaaataacaaaccagacatgtattataatctttagatcaaaaaatactataatattctgtacgtactaataataagtaatttcaccaaaataattataataatagcccatcggttaatataacgactcaattacccaatttattaaatttctaaagaaagataattaataataataaatttatctttaaattgataatctttttaaaattatttttgttattaatacttttatctttcaatgacttggtgacatattttatctttttaataagagaatttggatttagaaataattaatattaagaatattatagattgaatttattatataaaaaatattatttaaacttcaatttatgt

SEQ ID NO: 77484 - DNA, 102 bp, Glycine max
cgcctagtgagggtggagggcttgaacccccctgcatcagggggggttttgttacacctcaacccaagtcgctcaacgtgatccatagtaataatctcacat

SEQ ID NO: 77485 - DNA, 435 bp, Glycine max
  unsure (1)..(435): unsure at all n locations
taaaatgtanggngtangtccttatggtttgtcagcccagacacaatataatctaaacaccagtcaatactcctaagactagcaaccactantgtgtggttgtctactggatctcacaagcatcttaaggcatcactttttttttaataaatcaacatatatatcacattggtcaggtaagcaactaccactggaactgatgcaatccttcctaggaagggaccagtcactagagccatgagcaagaggctccaagaggattgggctaaagttgttgaagaaagccctanggttctcatgaacctcanggtagatatctgagcccatggngccaagttgggtccaattctctttgtacatattagactaggatgtcattatatttgatccttgtatttanggctccatattgtaagtaggggaccctaaaaatat

SEQ ID NO: 77486 - DNA, 421 bp, Glycine max
attcttgactccatttatttaagcgcatatccacttgcaattccaaagtatcaaacctctcaccaacaaatggttgaagaccatcaaacctttccaaaatctttgaaagaagagatgaatcttcttcctcatgtccttcttcaccaacatttctagcaccccttcatacccaagagccatcattcttcctaatataacccaaggatgctatgactgaagcgcttataaagaatgatctcttgattggaacattaggttcataatgaaaaggatgtttgaagtgttaacaaaagggttataatatgacgattatgcagaggggcattcaatcgcaatgccttatgcatgccatatctaacaaggtgtgcccaatcaatttgtaacccttatgaaaggcccacatgacaatgagatattcttc

SEQ ID NO: 77487 - DNA, 403 bp, Glycine max
  unsure (1)..(403): unsure at all n locations
tcgattaccaaaagagatgttcagaatacattttcaacagtcacatctttttgtgtggttcttgaatggctatcaaaggcctatatatatgtgacttgagacacgaatntgacaagagttttttgaagaacaaaaaggtcttatcctcttaacaagcaaaattgttntatcctcttacaaattccttggccaaaacacttgtgattcaataaggaattatttgagtgctcaaattgttcaatctatctctttcaagagaggtttcttcttttcttcttcttcattctgaaaagggattaagagaccgacggtctcttgttgtgaaagaattctaaacacaaaggaaggattgtccttgtgtgtttagaacttggtaaaggaatttacaagatagtgaaactct

SEQ ID NO: 77488 - DNA, 292 bp, Glycine max
  unsure (1)..(292): unsure at all n locations
cttcctaccataaagctgtgaaataaatntctggacactgcttccctcatcaatcctgttagcccttcagcagccaagacaaataataaaggggccaagggatccccttgtctcaatcctctntgaggcttaaattcttcagttgggcttccatttacaagaatggatattgaagctgatgaaagacatcctttaatccagccaattcacttttcatggaaccccattcttctcattatataaaagaggaatngccacgacacagagtcataagctttntcaaaatccactt

SEQ ID NO: 77489 - DNA, 217 bp, Glycine max
atatactggagtcatgatattgatacattcttgcatgcatgccactggccgtgggtggtatacactggagtcatgatggtgatatgctcttgcatgtatgtcactcgccatgggtgacatacattggagtcatgatattgatacgctctggcatgcatgtcacttgccgtgggtggtatacactggagtcatgatgggaatatgctcttacatgtat

SEQ ID NO: 77490 - DNA, 437 bp, Glycine max
  unsure (1)..(437): unsure at all n locations
gcttatataagtatacatagtgtgaattgatgcaaaaatagaatnnaatcgnatatattatggtttagaaaataatatataagattatacaaatataataaattaaaaaataataagtttgaattatgaactctctttgcataaaacttatattaataatatattttacatgaaatattcatatgatcatgtgggtgcagtgataaaggaatgtgtcattcactctaatgatcatggntctagttcttcctcaagtattttcttatgttcttatttttttaagaaaatattaattaactttctagtctaatcaatatttatcgcatttgggatatgatgaaataggatgaattaagacgaaattcactatttctttaatttttttatcgcctagaaagaataagatgtttcttntgctctttcttcaacctctcagt

SEQ ID NO: 77491 - DNA, 206 bp, Glycine max
tatcccctaactaggggggtttataatgaatccacgccaatatctttcccccaacttactgtgttgccatagctccctatcggaatgttataatgcacagctcatctgtcatcgttataaacaaactgttcgttctccgaaattctgtctcatgaacattcatttaacagttttctggagtatgaactcaaatatctgtgccatta

SEQ ID NO: 77492 - DNA, 525 bp, Glycine max
  unsure (1)..(525): unsure at all n locations
ctcgtacccgngatccttagagtcacctcgccgcatgcaagcctttatccatggcctcctatggtggtgagcttcttctagactcatcttctccttgaagtggcatctcctctctcttcctttctccattccgttgacattcatcttccaagaagcaaaggaattcattgatgaagaagatcctatgcctactagctccaatggagcttacatcattatggctttcactcttatccaaggaaggaccaagcccaaggaattttgggggctgcaccttcaaaacccaaggaagataagggtaagaccatagagaaatccacccctaagactagttcccaagagaggactagcaacattaaatgcttcaaatgtcttgggagaggtcacattgcctctcaatgccccacaaagaanaccatgattatgaggggtcaagacatttatagtagtcaagaggagactacttcttccccttcctctagtggaagtgaagaatgatgtaggggtgaaaagtatagtgaggaa

SEQ ID NO: 77493 - DNA, 277 bp, Glycine max
ccaagcatatggggagtatgaaatgagtgaacgcaatatatcctacctatacctttcttggatctttgattcaggaattaaattgtcatcttcaaaaaggggaagattgtggaagcaaagactttgcctttaatgttttgatgatgccatatgatcccgatgttttgatgccttatgaaaatgcgcttctcaagttttattttagaccaaaattaaagaatacaagattccaaatccagaagatctctagtgtttttaggaagggaattccaaattg

SEQ ID NO: 77494 - DNA, 293 bp, Glycine max
  unsure (1)..(293): unsure at all n locations
tactttacaatattaattttataatgtaatttggatacatattcttttttcatgtgggtggttttgatgccactatgcangcatatactgaaacttccggaaaccttgaaggcttaccacaaggtataatacaagctacttcagatcttgagttaaggcatttatggtcgccaagtaatttgaggtcaaaggtcagcatctttgcaattntatttattttacattatatagntctatttaaatcgatagatgatgaccgaatttgtaaactacaagcggcacgtcatcaatta

SEQ ID NO: 77495 - DNA, 414 bp, Glycine max
  unsure (1)..(414): unsure at all n locations
agctgggtggagtgatcctccgttgcctaactcttgcanattggaaacttctacgcttttgattctgacgtgattaaactttttctaaaagaaggtgcttgagtctatcccatgtttttgctagaatgaaaaaatctgttgatcaatactccgacaccctattatggaggaaatataatgaatgcatgagggaatgtttatgctatgcatgacacaaatgcattttatagacacaagtactcggaagatcgtctgctcttactcacaagcattgggcctcatggttcattcataggcattaccatggtgccccatgcatgcatttaagaaagtgatgcggacctttcgacttcccgtgacacaatgacgagactaatgcaatgcatgagtgatgacacagtatgggcatacatg

SEQ ID NO: 77496 - DNA, 381 bp, Glycine max
  unsure (1)..(381): unsure at all n locations
agctntacacacacaacatgaatcttttaggcatgagtcaaagaacatcttgttcaaatatgacttttgagaaatatatattagaaggattagagttaatcacaaatgataaaaggttaacaattatttatgatatactcttttcatcaagtcatacaaacatccgagtccattttggcattcgggaaaatctttcattgttttcaccctctaggtgcacattttttttccaaaaaacctttcgtgttttgatccatgaatttccaaagaaaactggcgataagttctttttcaaaagaatgttagttttgttagttnttntagttttttgtttgaaaaaagtataacctaggaaagggtgtacctgagatacacttataa

SEQ ID NO: 77497 - DNA, 366 bp, Glycine max
gatattgcttaagtgacacatcattttgtgagagaaaataatccaaagaagttttcttctactctagtgagttttttgggcaaggtcagcctcctaacttttttaattgtgcccctcaaatataaaggtatgtgtgttagatgcttttgtttgttccttgtgattgcttggtttgatgtctcaaagttatgacaactacgataaacccaatttatagagatgccaaagttcttttcactgaataatgaattgaaaaagcttgactgacatattattagtttgaagatcccagtcaatgagaagcatgagactggagtctttaaggccgttgcaaagacaatggtatagaaatttagtagtttctta

SEQ ID NO: 77498 - DNA, 87 bp, Glycine max
aaaccgattcgctcagacgagaccatgcaaatatgacagaaggatctgatttcttaataagtatacccaaatgataaggacctgcta

SEQ ID NO: 77499 - DNA, 382 bp, Glycine max
  unsure (1)..(382): unsure at all n locations
caacttgnatgtgaagggatgtgttaaaatgacacaagtcctcctgcctatatgaatataatcaatcagaaaatgagcaataaagatcatactctataccatgtgggcatagagggcactattacaaccgattctcctaattcctaagagcttaaatgattagtgaaggcacatgattatatatatatatcactccacataaggagagaagcatgaacagcatatgataatattgcttaaactggaaactgaatttctaattctttatgcagataaattaacccttgagctgctccagttgctatttaatgtcttgttttccaggaagaagatattatcttatcgaaaggtgaaacttaatcttattcgcatgtatcattac

SEQ ID NO: 77500 - DNA, 339 bp, Glycine max
caccttcaactgagctcacgtactcctacgtaagcccttatccttgatccctttcagcattggggtccgcatcaatccttttcaagctttcataatatccatgcaattcaattccaactatcatgaactaccctaaaccaagaaaacagggcagatgcagaaaactctgcccaaaacatattcacatattacaggtttccttactcaaataccccaatagcattctctgcgttccaatatgttaaccgttggatcgacttgataatcttattggaggtctctagtacataagtctacattttgacccgtgcgaatctgtaataaatgttcagaacccaa

SEQ ID NO: 77501 - DNA, 395 bp, Glycine max
  unsure (1)..(395): unsure at all n locations
gaaatattgccatcaatccagagagatgacaatntagagagtgatcccagacttttcaatggattttcacttgaattattaatagagagatcgagaaatggtaaatctatctcccttgagtgcggagattcccacaaaagtcngaattgtccttcaagttgattatatgacaaataaagtgcaacaagagaagtcaaatttcccaaagaagttggaatggttccttcaagttgattagctgataaatcaagttcaacaagagaagtcaaatntcccagggcatcagatatagtcccatgcaagttgctggatcttaggtccaaagacttgagacgatgaagaccgtataagcaatcaggtatagaagatgagaatgaatttccagacaagtcaag

SEQ ID NO: 77502 - DNA, 268 bp, Glycine max
  unsure (1)..(268): unsure at all n locations
gtggcttctcaatcattgggaaattgggtgcgtttgtcacccttataaaggcatactatatatggaaaaaattgatggattgcagctcaaaaactaacttcacttggcggcctacctgttctggcctttactttcttcctgaattatattattatattaatttggtaaggtgctttttctcttttgcgtaaaacggcactctctttttagatatataatggtttaactaagagtctctttgaagaanaacactttgcatccggataaa

SEQ ID NO: 77503 - DNA, 358 bp, Glycine max
  unsure (1)..(358): unsure at all n locations
aaagaacaatactgagcggagcgttttatgttattagaagaaaacctgagcatgcctatggaattcatcgtataaaacctcanatctaaacctctagaataccaccgccggtcttatctttcttcccaggtctcacctcaccggtgcgatctcacgttggctataacggtaataccctttcatcctctatgcatcttcttcttcttctatttcgccaaaaacaaaggcaaattagggttttcaccgtattttattcccttttccaattacttaagatatttgaaggctgcactacttattgactcgattctcanaatcgattcccattatagttcaattaacgacgtggtaaatcgca

SEQ ID NO: 77504 - DNA, 368 bp, Glycine max
  unsure (1)..(368): unsure at all n locations
cccttttaacaacaagttcaatgctgtcaaagtaacaacccaatgggaaacctttgactctggaatggaaagcttggatgctccatccgataaccgttttccaaaatactcagaagggagcgttgatagctcgaaaccgttttggaacattaagtataaatgtgacaacatcatttactggccttcatcatattagaggcttgcacaacgatgtgccttgtgaatggacgctgaaatttaagtgcaaaatgtctctccgtgaggaaagctgatatgttgatcatctcgtgccttattttangcaaatatgaaaccaaatgtattctgtactgaatatatatgcatttcgacattggttgctttgttgc

SEQ ID NO: 77505 - DNA, 336 bp, Glycine max
atgaatcgctttagaccccagtgttattataggaaggggaatcgttacccacctactctagattttgcagattaacgtctgatcccacatagattgaggctagcctgtgaattcctggcaagggctttggtctgaacactgaaggccaaccatggaagctcctcagaaaggatcttactaccttggcccacacatggagtatcttttgttactccaacctagcttctacctcccacacctgatacttgaatatggacagagctaggttggtttatggcttactcacaaggatggacatgaaccatggtggcttgatctctagacagataccattat

SEQ ID NO: 77506 - DNA, 308 bp, Glycine max
  unsure (1)..(308): unsure at all n locations
aagctcttgagaaattcaaatggtcattactntttacactgaggtccgattcacgcttataatatatcaagtcgctcgaaattaaacatcggaagctctcgagaaattcaaatggtcattaactttcacactgatgtncgattcagcgcatattatgttgagaggctctaaactgaacaacggaagctttcgagaaattcaaatgggcataactctttacactgagctccgattctagcttactatatattgagacgctcgaaatttaacatccaaagctcttgagaaaataaaatgggcattacttt

SEQ ID NO: 77507 - DNA, 425 bp, Glycine max
  unsure (1)..(425): unsure at all n locations
tcagacccattatctacaaaaagatgagataaattactataaagtagccaagatatctaaatattatactagaattcataaactaataaaaacaatacaattagagtcaaaacaaccctctaagtctaagaaaagataaagaaaatgccttaattagtacattaaaagtacacatatttggcacttaacatggctgagcttagttgtccagtcacttttgtgaaggaggtggctgatatcatcaatgaggggctgcaactgcttggacatagaaatcctggtgttaaccaattgaacggccaacaaagagtccatctctaaatgaaaatgcataggtgagatgcaagttccttactagcttgatacctttgtgaagggcccataactctacccataaagcattgcangagcctagattcgagcgg

SEQ ID NO: 77508 - DNA, 284 bp, Glycine max
taaaagaattgttcaaaacccaatagcacagttttgcttttcccaaaaattatcctcaaattttctacattaccagagggataactatctagtgattgattaccagttatccattaccgattaccagtgacccagtttgattttcaaacatgtttccaaattttttataaccgtccaacatgatgttctaatagcgtaatcgattactcttattagtattcgatacagggaatttgaccttgcaattcaatcccatatgaagagtcacacttttcattaacaca

SEQ ID NO: 77509 - DNA, 454 bp, Glycine max
  unsure (1)..(454): unsure at all n locations
cgccgcatgcaagctnttntgtgaaaggatgtgactcttcacatttgatattgaatntcaacgttcaaacacactggtaatcgattaccaaaatattgtaatcaattacaacattttgaaatcaattggaacgttgtaaattcagttgaaagctttttgaaaaccattttgctactggtaatcgattaccagagagtaaaaactctttggtaaaagggtttgagaaaaattcatgtgctactcagtttttgaaaaaactttntaatacttatcttgattaagtcttctcttgattcttgaatgaatcttgatcttaattcttggaagcaccttggccattctctatgtggggaatagatgtgattggagttattaagcccaaagctttgaatggaccaccacttcatttggtctccattgactacttcaccaaatgggttgaaatgacttcgta

SEQ ID NO: 77510 - DNA, 329 bp, Glycine max
tttaccaattgaatcaaccgaagggttatgttattaatttccaaaccccatggtcctcctgtacataacaggtctacttctactccataacaattccacactcatatcacaagacctattatactccatactaccgatgttgatagacaaagcacatcctgacttcacaaacatactaaccagtgtgaattcatcatcaagaagcattgcattaagaaaataaaattatgcatagtacaagttgtcgacacactcaactatgaaaaaaaataagacaatctgctaacatggctcatgcttgttaaaaccctgcctataacatcttcccg

SEQ ID NO: 77511 - DNA, 245 bp, Glycine max
ttcacattcaccaagcacacataaacccaccattccctggtggccaccttcaactgaggtcacgtactcccacgtaacccatatcctcttttctctcaacaccgggtccccatcaattcttccaaagcttcccaaccataaaagtatacaacattcgcacagcacaagctatcacagccaagcaaaacagggcaaaagcagaaaactctggtaaaacaccaaccaaaatcacagcttttcttact

SEQ ID NO: 77512 - DNA, 278 bp, Glycine max
  unsure (1)..(278): unsure at all n locations
aaatggggcaataaaggtgagatatggaaaaatttggtggaatgtattttgttgggaaatttttantaattaaatattttatagtaataaaattttttttttaaccaacattgttaaaaaggatattaatttcaaaagttgttacgatttctatgagaaacattttagaaattagaattatgaaatgatttgagattaattgtaggtactaatttgtgtaatgtaattgtcatattatgtattatgagatacatttatgtattagttatttttaataa

SEQ ID NO: 77513 - DNA, 409 bp, Glycine max
  unsure (1)..(409): unsure at all n locations
agctntcatctagtcgagattatacaaaggtgttacaagagaacctaacggtttctaattatgtgggccatcaaatctatcatgtgttgacagtaattgattagcccatgaatctcctcgggggccgtacacacttcggccatggcttttgctttggctaatagacgtgggaggtcttgacttccattcaaggtcaaggcgaacctatccatccacatagtcgcttcttgatgcaatgcatcaatcacccttcctcttgcttatttttcggcgtacacttgtgcaaaatcctccactagctnttgttcatgggccacagactggttcaactcttccttgtattgccctataatagctagcatgctntgctccgtggcttccaaagtgttgagccaaactctcttggatc

SEQ ID NO: 77514 - DNA, 354 bp, Glycine max
  unsure (1)..(354): unsure at all n locations
cagtcgtgcgcttaacctggctgaagaccactgcttcgcttaatgcactgatctcaagcttaacgtgcggccttgatattgatgccctaccagaatcttctggcgcactaaacgcgctgaaactgcgcttagccgtgtatgtccgcttaacccattgatgagcttagctcaactgtcacctttggcacttcatgacttaacctctttttcacttgaaattgcacatatttcatcattaaatccaatggacatattctagagacaactttatccatacnagaaaatttatttaccaaaaatcacaaaataataaccattaagtgggggactatacaagttttgaaaatgattcta

SEQ ID NO: 77515 - DNA, 399 bp, Glycine max
  unsure (1)..(399): unsure at all n locations
tctttctttccttacccactcctcacgtgtggttttttagggaaaaacaccataactaaacgcgccacaaggcatccctatcgcaccagatccaaatctagaacgatgggtgatcaagaggagacacaggaacagatgaaagccgacatgtcggctctgaaagaacaaatggcctccatgatggaggccatgttaggtatgaagcagctcatggagaagaacgcggccaccgctgccgctgtcagttcggctgccgaagcatacccaactctcttggcaactgcgcaccatccttcctcaaacatagtaggatggngaagggacacttgggcacgatggcagccctcacctgngatacaaccgagcggcttacccttatggattgccgcccaactactc

SEQ ID NO: 77516 - DNA, 347 bp, Glycine max
  unsure (1)..(347): unsure at all n locations
accacatacccttgccacacgtacagatntctgattcaagggcaccttggttaccaagttaaccaatgcatccagttttccttcaagcttcttagtttcagatgatgcagatgggtttgtagctacctcatgcactcctctaatgactatggcatcatatttggtgctaaactgttgggagttggaaccactttctcattaaattctggcttcacatgagtcatgtctccaaggctcaccactggagcatctatcatactttctactattctgagccctcttaaatatggagaaaagctgtctaaactgatgtggggcactgcacatattattaatcttcctatact

SEQ ID NO: 77517 - DNA, 132 bp, Glycine max
  unsure (1)..(132): unsure at all n locations
ggggggggggggtttntttttcaccaacacccaggggggggggttattaatttgctcccctcttaccccctatagagtgagtatcatgtagtgtgagagggcgaggtagtgatggtggggaaaaagtcggga

SEQ ID NO: 77518 - DNA, 347 bp, Glycine max
  unsure (1)..(347): unsure at all n locations
gctcatgcttttacaaaaaggttcatcaagtcaagttgaaatatggaagtaaccgtcttgcaaaattggggcaaaagatgaatcgagtcacatcactgcttcgtctactgccaaacatatttaggattattgatgcccttgttacttccacgttcaccttgacaaagatgtcatggaccatgttgaaaatctaaattgattcaaccccatatcttgcgtaaaaattcgcaatacttcaactgtacatcattcgcatgcatccatgctnttcataggttgcattgctcagtgcattctttccttgaanaatanaatagaatgaacttaatcatttgtataaaaaagaa

SEQ ID NO: 77519 - DNA, 409 bp, Glycine max
ctcttctcttctctatctactctgctgtctctcttctctcatctctctctttttcggtttaggtttagagtgctactctcaattcgttttagtttctgtttcgttttggagaataattctagttttcttcgcttctactacaatttcgttttctattgaatactggaaggctaagtctccagcgttggtttctcttgaggatcaagcgcagctctctttgagattgtattattactattaaattctgatgagtttttcctcttcaccaattactctgtatttgatgctattaattcatgcatgtttagtgcttgattaattgtctttgcgcttaatttaccgtcatgcttaatgatcgttcatgattaattggtgtatgtgttgcttaatcacataatgaatgtcttat

SEQ ID NO: 77520 - DNA, 450 bp, Glycine max
  unsure (1)..(450): unsure at all n locations
gaagcttgagcttatctacacatacctctctaatagctgagctcacctccttgagatgagaagctagagcttatctacacacccnctataatagctaagctcaccctcatgacaaaaaaacatgataatacaaaaaaaaagtccttactacaaagactactcaaaatgccccgaaatacaaggctaaaaccctatactactagaatggccaanatacaaggcccagacgaaggaaatacctattctaatatttacaaagataagcgggctcatacttagcccatgggctcgaaatctaccctaaggctcatgagaaccctanggccttcccttggatctctagcccaatctacttggagtctgctacccaatgcccttgcggngtaggaatgcatcattcccttcaccttggaaaggatttgnacctcaaatccgaggttctcatactct

SEQ ID NO: 77521 - DNA, 288 bp, Glycine max
  unsure (1)..(288): unsure at all n locations
attgaacaacaaatgctctcgagaaattcaaatggtcataacttgtcacacngaagtccgattcaagcgcataacatattgagacgctcgaatatgaacaaccaaagctctctagaaattcaaatggtcataacttatcacacggacgttcgattcaagcgcataatatatcgagacgctcgaaattgaacaacgtatggtgtcgagaaattcaaattggcataatttgtcacaccgaagtccgattcaggcccataatatatcgagacgcttggaattgaacaacag

SEQ ID NO: 77522 - DNA, 408 bp, Glycine max
taaataaatctagattagataagaatagatctaattatgtagaataaaatagtctggcctcttcaagtccaagcccaattctggattcaagcctaagcccaattctggattcaagcccaatgcttcattaattcctgaaattagattaaaaacatcaaattagctgaatgggcccacataataaaacggcctaattaatttgacaattaagactaatcagtacttaaaatggtgcaaaaagggttaagaaataggagaaaataatggcacatcacccacccaaaaccttataaacttcaatggctcaatgagcaaggggaaatgatagttaaccaacaagtgaaggacctttctcattggacatataggatgaagttaatgtatatagttccatggaggaggacatat

SEQ ID NO: 77523 - DNA, 320 bp, Glycine max
  unsure (1)..(320): unsure at all n locations
gcttcatggcaatactgatccaagaaatgctttcaccggatttatcanttgtactacataccgtgagcccaacaaaccaggataataattgtgtggaggctgaaattgcttctggccttggtgaaactctagcttctggaacccggcgtacaccatggcgtatatcatctgggaaatttgacgggcaagtgcaaacattggcttttgcnaacttcaatgaggaaatgctggtaccaagtgcacggcctgcaaatggggaggttattcgnttgactgttgattacagcaagaaaccactgacagttgactcattttttccg

SEQ ID NO: 77524 - DNA, 285 bp, Glycine max
agttcacatttgaacctgaaaaactttgtgcatggctctgaattgctttctaaaccaagtggaaaggagtccctttttgttcagaacagtaattaaatcctctcaaataaaaattcattgatctttttatgattcaacttggatagatccaacaaccatttcttggtattatttgaccaacattaagcccattttttcagagcaagttgcacgagataaaaaagataatgacagaacgttaattttagatatattgtctacagtgaaatattgaacagcgtgtct

SEQ ID NO: 77525 - DNA, 361 bp, Glycine max
tcaatggggcaaaacacaccaaatgattatgatgatggatggctcaaattctcacaaaggtgaactcatcactttcaaattgagctttcaaaactatcatgacatgtagaggagaatcaaggattttcagtcacaaaatgtcaagaacttttatttttcaaacaattacccatctcttgaacatatcctataattcaaagaaaaacatgcagagtcgtacatgcacacaaaattgacccaaaatattaaactataaatccgacgaaactaacaacatttacatattaacacaactaacaaattaacacaacccacacaactatgcaaaccaaagaacactctccccatacataaacaacac

SEQ ID NO: 77526 - DNA, 292 bp, Glycine max
ctagatatctaaaagagcgctgattaaatttaaaactactcccattaacaatctatttgatttatgcagttcaagccctttaagataattctaaagagattaaaatacccatctgatgaaatgtaaacacctattttaaaagttttgggaaaaaagtcaactcagtttttttggtcggccactctgtgcctactcaatcccagcatgcctgaatgtccttctataaaccctacaagttgacaccaggcacccttcttgtgtaattgtccacaaaacctttctctatgtttta

SEQ ID NO: 77527 - DNA, 399 bp, Glycine max
  unsure (1)..(399): unsure at all n locations
tatcatatgccaacaatagccgagaagtccgtggatctcctcgggggcggagtaggtgtctgccatctctttggccttggctagcaatcggggaagttcttgactcccgttcaaggtaagagcanatcggtccatccacattgttgcctcttgatgtaacgagtcgatcacccttcctctagccttcttccgcgtacactcgggcatactcgtccgccactttatgctcgtgggccgtggctagatttagctcttcttggtatttgccgacgatagctaacatgttggtctctgtctcgcataaccgctgagacaggtttctcttggaccttgagcaaaccttcaactcatcgttcaagatcaaactgtctactcgtgattggtccctttctctctccg

SEQ ID NO: 77528 - DNA, 232 bp, Glycine max
tccaccaacccccatgcgttcctttttttaaaaagtcaacctgggtggcataggttggggacaccatgaactaaactttggaccctttctcattcagattcttttattgtagaaaaactctttaggttaaattccagcctgatcttgcctatgcaagttaaagagtacttgaagttgaccatgaaacctggcccacattactgggcaataataaactctgaagggtgaccta

SEQ ID NO: 77529 - DNA, 475 bp, Glycine max
  unsure (1)..(475): unsure at all n locations
agcttgtacacaaagaataacttagtgttcacctttattaatctatggggtagctcttgaagttgtctatcaatcacttggtaaaataactcaatttgaaagtgaagatttgaaactttntgaacttttggcttctgtcttccttaagtaatggatgcatcacccatatttggaatgttaatatcttgcttgtcacaaaataatgatacttcattcaataaagtatgccaaccatcatttctcatgctttgtaatatcttgcacactttaactaatgctataacatttacaatatcttggtcacttcattgtagtgcttgagacaactcattagtaatccccaatatatgcctcttcaagtgcaagctaaaaataaattcaaaagactaagatagattcaataaatgacatgcttcgacatgtngttctgagcttatgccattttcctcaacanatttcaggacattaatcactg

SEQ ID NO: 77530 - DNA, 321 bp, Glycine max
  unsure (1)..(321): unsure at all n locations
ttaatgtgatctgacctctttttccatactgtcattttctgtgccgctgaacactgggtggttatcatctctgcaagacccattcgactgctttgatgggtgtcacccctgcatcataattctatacacaagttcattctanatatacttcttatantaatatgataagaacaacatattaaaattattgtatttaattnttcaatataaaatatatttttcatatattatatccctataatataatgaagacacatattaaaataactatgagatataaataatttgtaaataccaatattttatcattttattttctta

SEQ ID NO: 77531 - DNA, 256 bp, Glycine max
gtgacatacgcctgtaaaaataaaaaataaatcataaccaactagtaaacaacatataactgaattgaatatccaaagaaaagatatactgattataataaacatcttggttacaaagtcatagggttctccaaaacctttgagacatacagtgatgacatatctctatttcacttaggagattggggaaaaggcattttaacaaaggtgaactaaatcaagtatcactgttttctgaaaacgactttagactaat

SEQ ID NO: 77532 - DNA, 462 bp, Glycine max
  unsure (1)..(462): unsure at all n locations
gcaagcttaatatatcgagacgatcagaatngaacatcggtatgctctcgtgaaattaaaatggtcataagttttaactcggatgtccgattcaggagcttcacatatcgagatgcacgaaattgaacaatggaagctctagagaaattctaatggtcataaattttcacacggaggtcctattcangcgcttaatatattcagacgctcgaaattgaacaatggaagctctcgagatattcaaatggtcataacttttcactcggatgtccgattcaggtgtatcacatatccagacgcttggaattgattaacggaagctctatagaaattcaaatggtcataactntncacacggaggtcctattcaagcgcttaatatatcgagacgctcgtaattgaacaacggaagctctcgggaaattaaaatggtcatatatttcttactcggatgtccgattc

SEQ ID NO: 77533 - DNA, 406 bp, Glycine max
  unsure (1)..(406): unsure at all n locations
aacccctttatttaatggattntctatgctcgagaagtgaaatttataatgaggtaaatttgaagcaaactctcacctcacacaagtccataacatcaatctaaacttgctcaaactggatttacacctaaaattccaccgaatcaaaatttgactcctcaacacccaantttgccctagaaatggctcttggttcactttggtcatttgtttttctctctagcatagcctaacctttctcataagtcctaaatggcatttcaagctaggattaactcattttaacctccatttactacagaatccagaattagcctttcaactctcaaagcctcactctttttccactcataacaccacattctcactgtctaaccctaggttaactctacctttcatctctaac

SEQ ID NO: 77534 - DNA, 423 bp, Glycine max
  unsure (1)..(423): unsure at all n locations
atgcacgatatccattcccacgatgccgacacccatcatgcagatcttgttgtggcgcctggtcgaagagggaggagtcacgctgcttactcatttagggtttcactatgaatagagaaagggagaatgagagagagaggaagggtcgcgcacactgctcgataagagagaggaaaaagggaatttgaaaagccaaccattcaaagacggttttttaaatgatcgtccttaaatatatcattttaaggcattttttanaacccatcttcgttgntaatgaatnngtatcgtgcactattntcaaaaatgggttttgtggaccgtctntattagcgcgtcgtaataaattggttttgcagtagtgttttgatagttggtgattntgatacctctgatngtggaagagacanttgttctcgtcac

SEQ ID NO: 77535 - DNA, 371 bp, Glycine max
tagagcctactaattatctaggtgttttccatataatatactatccaatctaaaaagtgaaagctctaacccttgaggttagagaattttatacacttatctttcttttcatgttgaactattaaaatacatatcttttattatcaaagattgattctactgatccaatcgaattttagactccactcatttatattattcaataagtcataaagagaattcgaatcatcattttgaatctcctttaaataagaatgatcatttaatttttagaaaaaatttttaatatttaaaataatgtaatatttctatttcttgatacaaccatttgaacctttttttatctgaaataagtcgtcaacattgaatta

SEQ ID NO: 77536 - DNA, 395 bp, Glycine max
  unsure (1)..(395): unsure at all n locations
tttgaatgttgagtnggtaaaattataaaataatataactntgatnaataaaattgcaattaagcctaaattaaaggtaaaagttagttaacatagattttttctgcctctaaatataaagcaaattctatggtggctcacccatgaaccattgtcttttattagttaaaagtcactttcactctcattttttacaattggatataaaataaaatgattggatggtgtagattaaaaagtactaactaataatttggttgaaaattatattaaaatgaaatatattntaatagaccattttaactctgcattcaaagcagttgttgtggtgcggcgtttgttgtcaagtatgtctggtgtgggcaaaatgatgtaagcatgttccttttacaaac

SEQ ID NO: 77537 - DNA, 420 bp, Glycine max
  unsure (1)..(420): unsure at all n locations
tcttccatggcttattccttaatggatggcgcctcctctcacctcctttcctttgtcttccgctgcatctccatggtggaaaatcaccattaaaggaccccattgaagctcaaagatccagcctccatagaagccccacaagcaagcttccatcactatgatccagagggtgctaggttatggttagttgagactgagaagattttcgaggcgatgggttgccttgaggagcataangtcccttatgcgacgttcatgctccagggagaagctgagaactggtggaagttcgtgaaacccatattagcagcacctagaggtgttattccttggaatggcttcaaggacaaatcctataacaactattaccacgagatctcaagaagcggaggcgagtctgaacacggaacatgtccgttg

SEQ ID NO: 77538 - DNA, 408 bp, Glycine max
  unsure (1)..(408): unsure at all n locations
gcttatcatattctgtggctaagcgcgactcgttgtcgctaagctcatttccttgcagccagaactgatgttcattgagctaagcgccactcatggcagctaagctcaattctttgtggcctagactgggtttatcaagctaagtgccactcatgccagccaagcccaaatccttgcaacaatgtcagcgctaagcaatcccttttccgttgagcgcatgctcctctatactcaagatgcatcattttagctaagcgagttcatcttttgaggatgaacactcatcctcttactgaaaatacatgtggctaagcgaggctgattcgctaagcccaggtaacttagtcaaattntttgttataagccgtgcgctatgccaagcgtacctgagctaagcgcatttctttt

SEQ ID NO: 77539 - DNA, 415 bp, Glycine max
  unsure (1)..(415): unsure at all n locations
agcnttggaatgttaagccgagtggagaatatcttattgtgttccattagcttctcaggacgatatgtggcatacagaactcccaactcagtaaagatacccatatgtgcacgctccaatcctaacccactctccattagagatatgagttcattgaagcatcctctgttttgataatactcgctaacctcctccaaatcatccaccttcaatatataacagatagttggtattcagacaacgccaaaaggttagataaagcaatcaaaagtttttctgtcacttgttttagtattttgctactagctacatcctttaacttgtatttaaaggatttccaacatgggaggacttgtgtagtaatctttggagtgaggaggggggcaatcattccttgcatgtacaaattccacat

SEQ ID NO: 77540 - DNA, 382 bp, Glycine max
  unsure (1)..(382): unsure at all n locations
ggagaatggatgaaagtgagagtatacacttttgctccgatgngacaatgcttgcaacagaataacttgataccgtatctacctgcccagttgatttaactgaaacagaggtcacaaaatataccactgaaactgatagagtgtaaatggtgaacataaaacagaagaaaataagtatgaccctctctgggctgattcgaaaaaatgctgtatgcactctatgcgaagttaaccctgacaagttctttgcagcaatacctttgcccttggaaactttaaagtgtatccttgatgccgtaattaaataaaaaatatatctttaattgcccccatttttactgaactacttatttttatactcatactttaaatcatgaatgag

SEQ ID NO: 77541 - DNA, 362 bp, Glycine max
ttccacacctccactccaaaatcagggatattctcctatatatcgcaattgaattacaatctcaaactgatatccttgtgcccctccttcacggcgccttggaaccaatattcaatcttggagtacaaacggtctctcattcttatttatgttccactgcggcacatattgtcataaagattcttaatgccttttctgccccccttacttctggaaccctccatcacttgattcttctctcgggcatggaaaaatttcaattggagaacatggtatcatttatcaatttcttcgaccgctaatgtcatacgattctcacgccttttgccccttactttgaaccattctcactatgctgtacc

SEQ ID NO: 77542 - DNA, 391 bp, Glycine max
  unsure (1)..(391): unsure at all n locations
agtcacccgcggcatgcaagcttgaaattgaacaacggaagctatccataaactcaaatgctcataacttatcacacggaggtccgattgaggcgcataatatatcgagacgctcgaaattaaacaacgaatactctcgagaaattcaaatggtcgtagcttgtcacacggaagtccganttaaccgcataatatatcgagacgctcgaaattgaaattcggaagctctagagaaattcaaatggtcgtaacttttcaaacggaagtccgatttaggcgcataatatatcgagaaggttgaaattgacccacgaatgctctcgagaaattcaaatggtcataaatgtgacacagaagtccgatcaggcgctaatcatccaatgctgaaatg

SEQ ID NO: 77543 - DNA, 291 bp, Glycine max
  unsure (1)..(291): unsure at all n locations
tagatgatcattggatagttgttatgcaagaataactaaatcagtttgagagaaacaatgtgtgggaactagcagagaaaccttgaaactaccccatcataggaacaaaatgggtatttaggaataagttagatgaacatggcataatcattagaaataaggctagattagttgcaaaagaatataatcaagaagagggaatagattacgaagaaacgtatgttctagttgcaagattagaagccattagagtgattntagcgtatgcatcctgtcatacccttaattcgc

SEQ ID NO: 77544 - DNA, 255 bp, Glycine max
gatcgagattacatggcttctttggctactggccacacatgattgagctaaataatttaccaaacaaaactagggactattgatatccatgttttattctaggtgcaagagaaaatgaaggctgacctgaacgtcatgaaagagccaatgaccacaatgatggaagccatgatgagtatgagaaaatcgatggaagttatcacggctacagtcgttgtcgcaagtacctgcactgaggtggaccccactcaccca

SEQ ID NO: 77545 - DNA, 244 bp, Glycine max
tgatctttatgatcgcagtcgcgtgtctttaattttaacctccccaccaagttgaaacacaactgtccaattttgaaaaaagaattctcccaagcaaggcctttaacatggcaacccctttaccccagacctctgctctaggggccatgtgcagcaactcccttttaaagatttctcgtacctgggtaatcaagatgatctttacgataaggtttgactatgcaggcattctgatttctcatga

SEQ ID NO: 77546 - DNA, 402 bp, Glycine max
  unsure (1)..(402): unsure at all n locations
catatattacaccgataatgtgtctactattattgtgatcatttccttctncgtcattggaggtgccacttgagatgccangtctctccacctttgggcgtattctttgaaggattcatgcccctttttacccatgttctgtagttgcatcctatccagagccatatcagaattgtattgatactgcctaacgaaggcaaccattaggtccttccaagaatggactcgggaaggttccaagttagtgtaccatgtaacagctaccccagtaagactttcttggaagatatgtaccagcagttcctcatcttttgcgtatgcccncatcttctaacaatacatctttagatggttcttggggcaagtagtcccctatatttgtcanagtctggcaccttggac

SEQ ID NO: 77547 - DNA, 268 bp, Glycine max
aactccgatatctcatgggtggaatggatgaatgcctgaaagaatgcatattacacagatgccatctatgaatgcacgggtccggggaatttctctcctttttaaacacaacgtctaggggtagcaaaggcccccacgtcattttttaaaaagcgacacggacccttcgttggtttgttacacagtggatcaaaacaaaacccatatgcgatgcctatgcaaatacacaatgcgggaatgtacacagtatgacaatattcactgaaca

SEQ ID NO: 77548 - DNA, 197 bp, Glycine max
ggtaactcccgaaaggcctcaaacccccttcccaaatgtataccctaatcaacttgaaatccatggggtccccgggatttcgcgaaaatgcttgccctaacaccaagccaacttaatggatccgatggttactttcaaaagaacgccccatggagacaaccgcttctatatggaggggagcactatgcatttatcca

SEQ ID NO: 77549 - DNA, 296 bp, Glycine max
  unsure (1)..(296): unsure at all n locations
ggggggacctttttttcncccaaagaggcggtggagtttatggcgcgatccacccccgacggaaaacctgcgtaccacttattgcttgcgcaattcccctttgcactggctatacgaaaagccgcacgatgctctcccacagtgcgcacttaatggtaatgcgcctgagccgatttcttctacgcattgtgcgatttcacccgatattgggcattagactattgtctgatgccgatgtaaatcgccgacaccgcactccgtgaccaaccttgcgcctttgatttccactaaagttc

SEQ ID NO: 77550 - DNA, 443 bp, Glycine max
  unsure (1)..(443): unsure at all n locations
ctgcagctttgagtttctggtttgcaaccttgtaaacttgtgttattcatcntttcattctcttctccctttgcccaaaagaattcaccaaggactaaccgcctgaattctttttgtgtctctcttctcccttttccaaaagaacaaaggactaaccgcctaaattcttttgtgtctcccttctcccttgtcaaagaattcaaaacgacacagtctgagaattcttttgattcctccctttccctaatacaaaagtgttcaaaggactaaccgcctgagaattcttttgtatccccattcacaaagtatcaaagggttaacagcctgagatctttgtctcaacacattggagggaacatcctttgtggtacaagtagagggtacatctacttgggttngactgagaacaagagagggtacatctcttgtggatcagttctagt

SEQ ID NO: 77551 - DNA, 402 bp, Glycine max
acagcttctggaagtcacgctcagacatgatgttatttccaccgtcgccaccacactatgcaacggtaacatcgattgcacgctctccctttcttcttatcctggatcttctagaagaagcgttgtatgctttgaacttccttccatactcttagagatgtgtctttgtatcttgaattgcaagttggttccttctttgtgagacaacaatcgaatcttgttcaccagttttactccgattccagtggcatgattcacgttgatggagattcatgtgaaaccgtgtgtgacgtgttgcaacttcattcaattgtgtagttactgaattttactacgattgaaatcaagacaattaattctcttgactcctgggatggaggtgcgcttttgatgggctcgggt

SEQ ID NO: 77552 - DNA, 486 bp, Glycine max
  unsure (1)..(486): unsure at all n locations
gcttagatgtattacacgctatgaatngaanacatattntaatcatttatatcataacttctttcactttttgtgtggtgaggctttttcaaatttaagaaaccagagaattaaaatgatttatatttggatatgggtaattggagtagcagtatgtattagtagtgtgcacgtggttgagcacaggacaaagtacccacttgagtttgcgatctgattgtatcggaagaacattnggaaagcttgttagatattactcttgtgaaggtgcccataatgtgttgcagaaagtttgtctgctntctttcgccatttcgcactttttcttccgtcttatctttgctccaattcattcatctaatggttaatattaaatatgaacctattcttgtttggcttattgaaactaagggcagaggcagaatggcgtaataagaaacacaataatgaagctttcctagatgtatttacgcataaatgctttac

SEQ ID NO: 77553 - DNA, 356 bp, Glycine max
ttcttttatccctcttatgtccacaaaatcttaacatttctccttacttgtactctcatcaaaaattatctctttattatataaatcatcaaaactttaccatatagttttcaagatactaaaccggtcaaactatcttcatccatttagcaaagatggttttacattagcataagaaatattattctaatttgctagatggaaaattatttgcgatcaataaaatataaaaggtgatattatttcagaacgtaatcacccatttatgtttggcccaaataaagaatctcttatgtaattacacttacctaattactaatacttccactagttacaaatatttacacgatttatta

SEQ ID NO: 77554 - DNA, 430 bp, Glycine max
  unsure (1)..(430): unsure at all n locations
tctttactgcaagggacaatgactatgctgagcccgtttctacctgtaatgtgctgaatactctgatacttgatggttgatttttgcataaagatgcagaattcctctctatatcaaattctagcctctctagtttgaccataagtggtagctntgaaggaggagctacaaaattgcgcgttctactccaaaccttagttctctcacagtcacgggtcataataatcacacaatctcctccgcatgcaatctgtctttccttgaagaagtaaccattgacaccctnggttatacacttnttccgattacagacttactcatcatatgctggctgcaagttctcaccaatgtaaagatactgaggctctattctggtactcctctgacaatactacagaggtagtactatgctttctcctctttacatctt

SEQ ID NO: 77555 - DNA, 394 bp, Glycine max
  unsure (1)..(394): unsure at all n locations
aagattggctaagatnttgtaaaacataagcacttanacaatgaaggaaagctggagttgctgcacatgatgtccaacgttatgtcaaggaataagatcgggctgcactatgcacaaggcaagataaaatgtcaaatgaagaattgaagctgcaggatccacgatgtcggatacaatgtccaggacatcctgcccgagaatactggagttgctgtacaatgcaagataaaagtcaagtagtgaagctgcaggatccacgatgtcggatacgatgtcctgacatctggcccgataatactggacatataattctgttatatctttaacagattattgtgcagttagcaagagattagatgatctatctttaggaacgaattaanagatattaaag

SEQ ID NO: 77556 - DNA, 275 bp, Glycine max
atttgttgggatgattttccagattacctgggcacttttagaaaaatagacccttgagtttcagagtgattaacttcaaaaagatggatcaaatagatgactgaaagttaacacagtcctgatttgccttgaagatactcagattcttgcaccattcaccacaactaatggatattgaaagaaaatagacttgcagagctctaggcatcttatgcaaagaacttccttaatctttggctgaaccatgacaccgatgctcattccacagagtacac

SEQ ID NO: 77557 - DNA, 345 bp, Glycine max
ccccagaatgggtcggtgatgtcatacacccgtcaccagccatttgaacaaaacactaaataggatgaaattgaattaacattcctccgactaattatgacgttaagtcaacactattcaatctggcacttgacaggttatcagagtccacactataccttgaataataaacctttcccatttatgaagcatactagctgctgaaatgaatttctgctctggaccttataataatgaagctaccgcacttgtacttttccaaatatttattcagaacggagggaaccttattgcacttttctaccacctttggtctgccatcttagccacctacttttactcatc

SEQ ID NO: 77558 - DNA, 317 bp, Glycine max
  unsure (1)..(317): unsure at all n locations
atgggaacccctttgatactatttaaaaaaataagaanagtaatgcaataaaacataccttttctgtattttcatgttgattattcctaccaaaaagtatgacaaacctaaggtgtcccatatgagtacctaagtttgtattgaaactaaaaataagaacaaacctacctaatgagtccctatgtacacaaatcatgaagaatgtgggtgcacgagtgatttacaaaagagggttgaccactcanaacattcatcataccacctattttagggatttggtgcctaataatacctactttgggcaccaacaaagcaca

SEQ ID NO: 77559 - DNA, 256 bp, Glycine max
gctttcgagctctgtacgggacaagatactatttcatatacatgtgatgtatcagttgcccttccctttttttattatattaaaggatggaggaatacacagattgatctaaataaaaactaaggtacattcaagctccccaacaaattttatatggattatgaacaaaaagccattattaacaatgtcattttgacaaaaaagctatattaacttaagtaaaaaattaagttgattaactctaccttgaaataac

SEQ ID NO: 77560 - DNA, 295 bp, Glycine max
  unsure (1)..(295): unsure at all n locations
ggggggattttttttcncaacactcgggtgtggggtgttatgataacataaccccctaaaatggaactcttggtgaaatgtatacttttaataatatgccaattttaaaatcttaatcttttattaaaggatattatgaatcttaaagatggggtttgtgggtttaattttttacttaaaatctaattaaatatttggggggatattattttcaaaatatattgatctctgtggattttatttaagagggggactatggataattagtagtggtctttgcaatattttttaatat

SEQ ID NO: 77561 - DNA, 362 bp, Glycine max
cccttttttatgtgggaatttatagattcctcaccctcgggttttatactaaatcccacaaatggccccggaaaatatccaccgaggccttcgtacgtttccgtggtgattcgcgaagtttcggcgttcttcacgttttcattcgttctccgtcgttcttcggtcttcaacacggttaatgtcctctaaatcgaacttttcaattgattctatgtacccttagtggtcctcatttgcttttacgtgctttcatttacatgtactttactgttcgtaccccctttagacgtgctttagtcatttgctttagttattacctcgtctaatcaacaaatacaataaaattcccccgtcctttgatt

SEQ ID NO: 77562 - DNA, 297 bp, Glycine max
  unsure (1)..(297): unsure at all n locations
atttcgttcaggggattggattgaatacttcgtaggcgacatctgtcgtgaaaagctaccgatatttttcagccgacattgcacaattctgtttagaaaagctcgctggtcgataatggtctttttaccgcataatcacatgtcttagtttggagttgaatataaaagttacaatgtacttccgctatggttttcgtgcgagttcaaccgacattntgtttcggccaggaaaacattagcccacctctgcaaaaatatattggctaaccgtcttcatgcatatttcattcaacgatt

SEQ ID NO: 77563 - DNA, 223 bp, Glycine max
ttcaaggtccgcggccaaaaagaggtgtgtcttagaaaccaattaacacattatctacgcaaaccaattttgtgaattctttcaacaacatggaagatcctcggtctcgaaaattctggtgtggaagacctccggtaaactatgtcctgaaaatgggctcctccttctgaaaaaaaacccttttaccctctcaaatggcggcctgacttatttggtttattta

SEQ ID NO: 77564 - DNA, 408 bp, Glycine max
  unsure (1)..(408): unsure at all n locations
caattattgccttaacaacctaatagggtaattgtcttacttctgattttggaactacataattaggaagaattataatatgtantttatttagtctaccatagttacaacatattatcattagtgcttattctacggttagtatgacagtaattattatatctttattgcaacaacttggaaactcagtttaccaaacttctagtatgtaataaatcataatatatcttgttgtgttatggtatgttgatagtaaaagatttaatttaactaatattctttaatttattcaaatctatctctctaanaatgaatttttcattgatcttttttcaaaacaatattttattttagaagggttgctgaaccattgacgttggacangtactatttgtaaaaaactataat

SEQ ID NO: 77565 - DNA, 355 bp, Glycine max
tgtgcttcaccaattgcttggccctggtcatcaaaattcacaatgatgtgtaacttcctaggtaagctattgactcccctaactttcaccttaatctttttgatcggttcttcataaggcttaacaataaaagaatctctcaataagaaaatgtaatatacttcatatgatgataattacaaaaataaaaataaaatacaatacttgtatacctattgcctcaacagtccaacattgtgtagactcacgcccaacatgacgtctagttggttcatcttcttgtggaacttcagatgttgatacatgagaaagaaggacatttccagttgggacttcaggagcttgtgtggaatca

SEQ ID NO: 77566 - DNA, 313 bp, Glycine max
  unsure (1)..(313): unsure at all n locations
aaaaaaatttttttttcnccnccaggaaggggttatttataaaaacccccccccccccaaaaaattgataatttttattgatataaataataaaaaataaaataaaaaaatattaatataaaataatataaaaaataaaatataaaatataaataatataaataaaaaaaataaataaaaaataacatattaaataaaaatataaaactaaaaaaaaaaaatttacaaaaaaacaatataaaaatatataaatacaaatataaataatatattatatataaataataaaaaaataaatcaaaattaaaaaaaa

SEQ ID NO: 77567 - DNA, 462 bp, Glycine max
  unsure (1)..(462): unsure at all n locations
agctcagaaccagattctgaagctagtccgagttgatggtactatatcaagaaagacaccgcctagaagacgagcgcaccatccatattcaacaattnttaattcttcataatttatagttggttcattcataaatcccaaaatttgttcatgaatgttttgatagtggacacatcgcttttttttttaagctaacgttagttgttaatttattatttttattagtgggagaaatataactaatgatttctttttcctttntttctctttgtccaccanacaaaccttgagaggcaaaaactggaccctaagaaaaccgatgcctaaggattattaagactggcatatatggttcttaaaaataaaaatgaggtttctgcataggaggattatgagggtgatgaaaataaaatatatctcttagtaagataaaagagagattaaattattttaaaatattat

SEQ ID NO: 77568 - DNA, 285 bp, Glycine max
ggtaactgtttgtatgcaaatataaacagtcataatcttttccattttatcaaaattgttaacctcttatcgaaagtaattgaaggatcttgaaagaacgtgtattgaggtataaacttttttactgaaagcctatgcttaatattggggggaacttttttttcaaaaatttgcgttactccattgttatttattaaagagaagagcgaagaaaaatagagagatgaactttgcaaaagttattcttatttcttttaccgaataaaaatttttgtacaataattt

SEQ ID NO: 77569 - DNA, 419 bp, Glycine max
  unsure (1)..(419): unsure at all n locations
gaagccatcagcaaagcacctaaaggtctttggatctatatgctacattcatattccagacgtgaagaggcacaagcttggagacaagactatacgaggtatcttccttgggtatagcaatatctctaaggtctaccgtgtctacaacttgcaaactaagaaactcatcatcagtcgagatgttgaaggtgatgaatacgcttctgggaatngcgatgaagaaaaagtggagaagaacgttcttatacccgctcaactacctcaagaagaagttgaggaagaagacccagctgaaccaccttcacctccaccacaacaacaagatcaagaactatcatcaccagagtctactccaagacgagtaagatctttggtggacatatatgaaacctgtaacttatccatattggaacctggaa

SEQ ID NO: 77570 - DNA, 348 bp, Glycine max
ttaaattccacacattcctcatataattttttagttaccatgtaggttcttaaaaaaaatacaaacttaaagcagttgaacatgttgtgaattattctgaagtaaatttgtgtgttgttggtggtttttgttccgttatgtacgctcattaaaatatgagaaaattaatctgttgtcttataataaattaaaaacactgcgaataaataattattttatctatgtttttaatacacctaaacttaaacacgtccgtgatggtgatgagagacattgatacatacattatagacatatcctatattaacactataacaaaaagtactaataactaattgaacacataat

SEQ ID NO: 77571 - DNA, 464 bp, Glycine max
  unsure (1)..(464): unsure at all n locations
atttagccttagtttcactttagttattagtcaattcaattgagaaagagaaatcccaaagagaaacgtccgattgattttttttcgctttattttactaaaagggtattttttgattattatattattattttacctcttttttgatttccaacgtggttacggcacgaccgaacggtcagatttcattttaacagaaattaacggatattacaaatcaaatgatcggtgaaaatttattttatttttttattacgcgagaaattacttaaataaatgactgaagcacgttaaaaggaggtacggaaagtaaaatgaaacgagaataaaagtacacaaaacaaatggngaccaccacgggtacatagaatgaattgaaaaaggtcgattgnggtacttactggttgaagaccaaataacaatgaagaacgaatgatgaatgtcgaagaacgggtgaaaatctt

SEQ ID NO: 77572 - DNA, 285 bp, Glycine max
tattaccccaaacggggggtgttttttttattccccccaccaccactatattattaaaagatattataatgttctttttataaataatattttaattagtatattaaaataaattttatatattacatttaacttataatatgtaaataataaataattaacaattattacactataaatataatttacaatgaaattttatatatttattttttaaaataattttattatttatttatttatattataaaatatttattatacaatttatttaatatttttata

SEQ ID NO: 77573 - DNA, 368 bp, Glycine max
tcatttcatatgacggagtgacttcatgatatgctaacaaacgcccgccccgagctgcgatgatgattatgctgccgcgaccaaaccgatcacgtcttacacgcattgcttgcaatcgggcgtgtgtgtcaacatcatctattatcaagagaaccgtgtttcccttgagcctaaacttgatgattgaaattccttgttgcttactagtaagctgatgctcttctctccgattatatctaaaagcaactattcttggacgtgttctaacccgtgtttggttgagttttccctgacatttgcatgagtacacaaaccatccaacttcctatcaattatcagtgtcatatagacagctcgaccagtgttca

SEQ ID NO: 77574 - DNA, 280 bp, Glycine max
  unsure (1)..(280): unsure at all n locations
gatcataatgcatgagttaataaatctcctaacattatatttgattcttaccgatcaaaaaaagataaaatggataaaattagcactaacttattttctcttttattctttacattcataagtaaaaaaattacttaatgggccaattgctcccataactagaaacatggattggtccctaattaacatattataactataattgctcttaagatacgtgtgtatgtgtgtgtgcgcttgcgtatgtgtgttgatatgtactccgntatatgtcctatac

SEQ ID NO: 77575 - DNA, 297 bp, Glycine max
  unsure (1)..(297): unsure at all n locations
aattattttacgacattgagaaggaatataaatatattataaccctacaaataaaatcacattacaggagacatctatcttaatcgagtaacatgggaatgaacgtaaacttcattacatactcaactganattgagccaaaatgccgacaaactcagtctgacatcatgaatgttcctcgggattngggacgcccaatgaanaccaatataaactcatgtaagtattcagattcatccacccaagtcgtaggaaaattggtgattagtaacagaatttgcgtgaaaggaagtttat

SEQ ID NO: 77576 - DNA, 343 bp, Glycine max
  unsure (1)..(343): unsure at all n locations
ataacctcacactgatatgtagntgcttcatagatttgnggcgtacttatgccgacaactctcattattcacttgcattaaatcaaagtcactcattgtgctatgacttggcaacatcctgcattcttcatcgntcagcaactcatgactgtgaccattatgaatatatgatacataccgaagccttgagttaatgccgatatgcaccctacactctgttctacacccacaccttgtttttcgccttatataccttntgtgcttctcatttgtcaacccacggtcctctctntttcctttcctatgacaaaaaagtttgtcgcaaaattttatacctttctta

SEQ ID NO: 77577 - DNA, 310 bp, Glycine max
  unsure (1)..(310): unsure at all n locations
tttctcccccccccnccgcgggttttaaaaaaaaccccccccccccccnacacatnactcctcctcataccaccacccccccaccacaccaacacgcccactcaacaccccccactcactcccacccccaccccaacacccaccaccaccactcaccccctcccacccccccccccccctccaccccccttcccccccacccaccccccccccactccccccctcccccctcaccaccccccctcacccccacaccaacccactcccccacaccactctcacccccccctcccacaccccccccaccccc

SEQ ID NO: 77578 - DNA, 421 bp, Glycine max
  unsure (1)..(421): unsure at all n locations
agcttacttgtgaggctgttatggaggctggatctttgagcttcaatgaggtcctttaatggtgattttacaccatggagatgcagtggaagacgaaggagaagaagtgagaggaggcgtcatccactanggaataagccatggaagaaggagcttcaccaccaagatgagccttggataagaagcttggaaaggatgcttctatggaggaaaanaaagagagagagaaagagagaggggggaagcatgaaattgaaggaagaaaaagggagagaagttgaattgtgagttgtgtctcacaagactctcattcatcaaagttacaacaagtgttacacatgcttctatntatagactaggtagcttccttgagaagctntcttgagaaaacttccttgagaaacttctttgagaaaacttc

SEQ ID NO: 77579 - DNA, 293 bp, Glycine max
ccgataatttctcagatattcgaaaagcttagaaggtgacaccttcaccaagcacctggtgacggtgcttactgatggagcaaaactcccatgtaccaagccagcgatgcaacacctctccacccccgagaaattcatgggcttctcggctattgtcagcatatgataaacttatggcccacatattaaaaatcctcgaaacttgatgtctctcaaacttgatggatccacctttcttttttttattattttttctgaaaaaaaaaaatggcccttttttactccaaaacttg

SEQ ID NO: 77580 - DNA, 304 bp, Glycine max
accaagggggtgtttttttaatgtacccccaccacatgcacccattcatgatagactattttattgaagcaaacgctattattcttgtgtgtttttacatgacaagtctcttttctaaatttaaaactacgccttgaacatcacagtcatggagattcatgaggccagaaacatgatattttcctcaggaaaggtatataaaactgaaactcttttcatgcgtattttcccctgaatgctatgtcaaactaaccatacatgggttcaatccatatggaatacaccccaaatctaaacttaagta

SEQ ID NO: 77581 - DNA, 351 bp, Glycine max
tttcgtgcgagctcaaccgaagctgtgtttcggccgacactcgcgtgttcccatgcactcggccaaggaaacattagcccacatcgaaaagagaaaaaaaacattaatcaccgatattgatcggaaaaaatgctggttgacgtcggccaggaaagatgaccgatcgaggtctaaaaataaaagaatcaccggatgacgccgatcgagcatttcctaattgacatcatccaaatattgttcagggattggatagaaaaaacaatagctgataccagtcgttatgtagtcccgactgacatttttcagccgacattgcacagtatttttttacaaacgctggccgataatata

SEQ ID NO: 77582 - DNA, 392 bp, Glycine max
cgcagaaaaatggtagtctttgctatattacgacccgatgtccgtatttttgtttcaattcaatccctgaataatttttggatattgtccaataagaaatgttcgatcggcgtcatcaggtgatgcttgctttttattttagacctgctggaccggtcatctttcctggccgacatcgactatcattttttttatcagtgtcggtgaataatggtttttggccgaggtgggctgatagttttttggccgagtgcatgggaacatgccaatgtcggccgaacacaacctcggttgagctcgcacgaaaaaccctagcccacctacattgtaatgtttgtggcgacaccgaacatacaaacctctctaccggaaaaactttatcggcctgcgtt

SEQ ID NO: 77583 - DNA, 243 bp, Glycine max
cattttttttcccagccacttgccgtgtttttttccggagccctttcagcccccgagggctatacctaacatacttcaaatttcttggacaatcagctatatgcgcattgcttgctaaccatcgggtataccgtcccaaataatggcctcatacgcgattgaaacaagtgccaagaggattcacgagaaagctacactaaaatggaatcgttaacatctccgggttactatgatctgatggat

SEQ ID NO: 77584 - DNA, 189 bp, Glycine max
ctttaggttctttgatggttatgggattgagttgggatgattgtgctgaagttgatcctaagaaatgactctaactggggaacatctatgagtacatcatagaagtgaagtagccacgcatatatacatcttaaaaaatgtgggtggcgttgaatctactgaaaatctgaatggtactttattgatgaa

SEQ ID NO: 77585 - DNA, 333 bp, Glycine max
  unsure (1)..(333): unsure at all n locations
agaacaatagagcgcgaggaatatagtatggctcgcgttctcatattctaaattataagtacaacatcgggtttcttttataaaaccgatgttaatccatagatgttaacgctaacatcggttttatgagaaaaaccgatggtacatcattaggttacatcaggttttgaacaaccgatgttaacgtgtatgcattaacatcgggtttttgaaaaaccgagtgttagaagatactttatttacaaattgtagatgcaatggtctttgatggtttgatgatgatcatgatgatgtgntacaattgatgcaaatgggcttttaagaatgattcaa

SEQ ID NO: 77586 - DNA, 264 bp, Glycine max
gaaacctgaaaaaagaaagattgaattttaaaaaaccgaagtgttttttttttttgaataaccccctcaggcaatggaacctataaccaacaataaattcagttcaatggagaaaaaaacaaatcaattcaattttgacaatctgaaacgtaatggaacattttataaaaaatttgataccctaacaaacattaaaattatttggaaaagtaaaatatacttctcattcactgcaataaagaaaataaccaaaaaccaaattta

SEQ ID NO: 77587 - DNA, 344 bp, Glycine max
  unsure (1)..(344): unsure at all n locations
tggatggaggaatcaccctaacctcagatggtccagccctcagcaacaacaacagcagcctgctccttcttacaaaatgctgctggcccaagcagaccatacattcctccaccaatccaacaacagcaacaaccccagaaacaaccaacagttgaggcccctccacaaccttccctcgaagaacttgtgaggcaaatgactatgcagaacatgcagtttcagcaagagaccagagcctncattcagagcttaaccaatcagatgggacaattagctacccaatngaatcaacaacagtcccataattctgacaagctgccttctcaagctgtccaaatcccaaa

SEQ ID NO: 77588 - DNA, 358 bp, Glycine max
  unsure (1)..(358): unsure at all n locations
tgagaaagttatgttaattcaggaaaggatgagaattgctcagagtaggcaaaaaaaaagttatcatgataagaggaggaaagatctggaattcgaggttggtgatcatgtattcttgagagtcactccgtggactggngttggtcgagcattaaaatcccgaaaactcacacctcgctttattggtcctttccaaattcttaagaaagttggccctgtggcataccaaattgcactacccncgtctctttctaatcctcacaatgtctttcatgtgtctcaactccgtaagtatatctgtgatccatcccatgtgattgaattggatgatgtacaagtgaaggagaatttgacatat

SEQ ID NO: 77589 - DNA, 444 bp, Glycine max
  unsure (1)..(444): unsure at all n locations
gctgcaagcttgggtcactatgaacgtacaccctatccttatacctcaagactccatcagttgccactctataactactctctctccctgcgactatggactctaactgggctgacaagaatgggtcaaacttctgaccctcacggatctcgctcaagagttcgctggtgactctcaacatacccaacttaatgctactagaggtgatctcacatgccaaactcatgtctctaaactgctctaagaggtccaactctctaaccatcaaagcagacatttgaagggattntctacttaaggcatcagctactacattggctttacctggatgatagctaagcttanaatcgtaatccttaaggaactctaaccatctcctctacctcatgttaagctcttttngatcaaacaaatatctaaggctcttatggtcactaaacacct

SEQ ID NO: 77590 - DNA, 269 bp, Glycine max
aaaccatgttgtgacttccattcatacatggccaaatttcccaccagctcaacaatatcaatactcagccaatatcatcccttctctttaaatatttcttgtccttgaaaattcattttcgagaacttgcataatttcttttggtttttatccttgctataaggtcatgaaaaaagacagcgatagatacctcagaaccctacactggggcaatgagaggcaccatgcataagcctcaagaaaacctaagggcagatcaaaagttctta

SEQ ID NO: 77591 - DNA, 403 bp, Glycine max
  unsure (1)..(403): unsure at all n locations
actagatgcctgggtaacctgtttacccaactagccatgaataagaaatctacacctgtcaccagactctatggtttatgctcctctaccgaccaccacacagaccttngcccttctgtgcaacaatctgaagcaattgaacagcctgaagcttatgctgcaaacatctacaatagacctcctcaacctcagtagcaaaatcagccacaacagaacaattatgacctctccagcaataggttcaatcccgggtggaggaatcatcccaaccttagatggtcgaatccttcacaacagcagcaacaacaacaacaaccttattntcaaaatgctactggcccaagcagaccatacgttcctccaccaatccagcagcaacaatagcaacaaccctagaaacagc

SEQ ID NO: 77592 - DNA, 418 bp, Glycine max
  unsure (1)..(418): unsure at all n locations
agcttgacatagagatgtgtgtgnggcttccttcttagtctcctataggcataacatatcaattgactcctttttcaccatttttcttattgaggcccattntagacccctccccaaccctcttacattgtaggttataatcttcatgaatcccctacattgtttcccttcctttcttttatgccctttgccctttcctccaaattgatcagttttcctataattgttcccttntgattgttgtaattaactcttatgttttttgccatttccaagggtattattgcctcttataataattcacagcttctggatgttgaatctgaaactgatgtttgtgtggcctttntatccttggagtattcnttccacatgacaactttctttcacccactacttgtcttctgtttaagggatg

SEQ ID NO: 77593 - DNA, 451 bp, Glycine max
  unsure (1)..(451): unsure at all n locations
gaccgcacatggtagatccatacatgaccaacacaatggtccctgtaaggtcaaagcaaggacatcaactggacctcctccaaatagatgtccaagaatgcccactaattgtggctctacatatggtccatgtggctctggctttaacccttcctgatggcattaaccatgtgttgatgttgttagcctcagatgcctctctgtagcatcttccccttcatgtgagaggccctcataagaagggtcacgttctacaacgtatgaggtctactttatctgagccatttgaatttaaacaaaaaacaattaaactagtaataaacataatacaaaaaacattaacatgcacaacaaaaacacgattctgatgtgtgttttgataaaatatacaacggaatcatgatttcgttgtgtgttntacaaacatgtatattttgtgaaacactcaata

SEQ ID NO: 77594 - DNA, 331 bp, Glycine max
agtatttgaaaagcacaaatgattggccaagtgaggttctatcttaacaaaaactgttccaagcatgttactctctagaaatctattaccaaagaggttgggacggattaccacaagtccaaacatttatggaaatggtttttcaaaggtgtaatcgattaccaaaagcttgcaacgtttataaatgattttgacagcgtggaatcgattacatatcatatgtgatcgactactagttgctctcgacggttggaaattaaatcttaactgaagagtacaacttttcaagaaagataactgtgtaatcatcacaccaagattgcatccatta

SEQ ID NO: 77595 - DNA, 274 bp, Glycine max
acgctacagcatataacacaaaagcacgattgattagagaaacatctttatattcatcagttggtctgttataaaaacccaacacttctacctactgctgtcaattttacttacttgcatttttattgtttttatcctaaacttagtataattatgttctaaaccatcaattatcaatggcttcttcaataatgccttatttctgaatttaaccctgtcttagactagattcctgagttcgatactcggattatccgttttaatatacatactt

SEQ ID NO: 77596 - DNA, 373 bp, Glycine max
gcttgtagacgatgttagagataacttgtcagttatggaacccaaatgctaagggacaagtgtttgtgctcttattgcaggactggcgtgaatggttgacacgtgtctcaaagtgccatgtaggatgtcacatgtattttgtgggtcttggacagtacataagctccctaagctctgagccggcttgcaagagaaagagatggtccaatgcccaaggagattgtcccctgtcgagggagtctgtctgatgtccgaggtagtagtcttaacaagtagaggatgaacgagttgtcgagcccccaagtgtggatgaatattgtccagtgtcaagtgtggtaacctcaacaagtgtgagagaattgcaggtcaatgt

SEQ ID NO: 77597 - DNA, 364 bp, Glycine max
  unsure (1)..(364): unsure at all n locations
tgctctttctcggcgtcatgcattactttctatgcttgaaacaaaattgattggtcttgaatgtttgaaaagcatgtatgaaaatgatgaaacttttggaagaaattttaaaaattgtgaaaatntttcagaaaatggtttctttagacatgaaggctttcttttcaaagaaaacaagttgtgtgtgcctaaatgttctactagaaattttcttgtttgtgaagcacatgaaggacgtttaatggngcattttggggtccaaaagactctagaaacattacaagaacatttttattggcctcatatgaaaaaggaagtgcagaaattttgtgaacattgcattgtatgtaaaaaggcaaagtct

SEQ ID NO: 77598 - DNA, 426 bp, Glycine max
  unsure (1)..(426): unsure at all n locations
agctntacagcagatnttagtaatgacccactaacctagaattaaaataacttaatgccattaacctanggaattaaaacaaactaaatggctgagtgtaactgaaattgttggcaaccaaaagtcacccccaacagccaacaagtcagccaccatttggtctcccaaaaggctgatgcctaggttgccaattgggcccttattacaacttgaactaaagcccttttagttgattaacccaaaacatatttttggtcagccaactttacaaggattgggccattatttagacaaactaaacactctaaaattgaaataaagtggtgtcatttagtcctccatttgggccatgatacaactcacaaccttggactnttctccttgaaacttgggcttgtattcaaatagtatggacagcacttgttg

SEQ ID NO: 77599 - DNA, 229 bp, Glycine max
  unsure (1)..(229): unsure at all n locations
tgtctaccgcactttcaatgacgaagaccacctttagcacanaccannaaaaacaccaaccaagaaaatgaatttgcagcgaaaagcctgtangattcaccccanattccggtgtcatatgctaacttgctcccatatctacttgataacgcaatggtagccataacccctgctaggttccctcanacccncattnttctgaggatatgactcgaacgcaacatgtgca

SEQ ID NO: 77600 - DNA, 379 bp, Glycine max
caatatagctattacgtttcacagcactgaaatcatgtttgaaccacaacttagttttttttaatgtttctaattatttatttaatttctcgtttcaaattattttcattcaattatgaaaaatttattgttttatttttattttattcaatggaggctcacaggctactacattagaaaactacgtggcaggaaaacatcaataaaatcatttcatagtaagagtgcttattcgattagatgttttaaaaactcatgtaatcctagtggtaggttatgagactattgcctacaaaccaattaactgcaatgttagcttctttatgcatatttatgttatttgggcattaatcgactccacggtataaagttttaaatt

SEQ ID NO: 77601 - DNA, 391 bp, Glycine max
accccttattgatacctctcagaacgttgattgagtttgggtcatgtgcaaatcgattacaccaaagatgggctctcacatataagtaataactcgctacaaaagaaaataaaagttgttcatacagaatatgcttttacttttatctattccagtgagcgaccgtaaataagttgaataattaataatgatatctgacgcgtaggatttctcagcatatatttggggctcttacatagtagtggtaattaattaggtgttgttgttctgaactttgaaccaatttagtgtaggatggtttgatgtgtacaagggattgcaaacagtcgaggaaatagcacaatagaggaactagctatagtggccgacacatctcattggacccctctct

SEQ ID NO: 77602 - DNA, 429 bp, Glycine max
  unsure (1)..(429): unsure at all n locations
caagcttctcgngaagcaaggaagaaagcttccttgagaagctagaggggggctactcacacccctctaatagctaagctcacccccatgccaaaacatattaaaaataaaaaaaatccctactacaaagactactcaaaattccctgaaatacaaggctaaaaccctatactactagggtatccttaacttgtagggtatgatgcccttaatttgtacggtactgtcataccctaattttgtctggttaccattgtttgatggcatgaaacctttgtttgaccgcttcaaggtactcgacaccctttgttgcacaatacgtgaagttccgtaacatgccagaaatcaaaaggaagcattgttacgcaatccgtgaggttccgtaacattccgaaagccaaaaaaggagtaattacgtgacccgtaagg

SEQ ID NO: 77603 - DNA, 316 bp, Glycine max
  unsure (1)..(316): unsure at all n locations
cagttatttgacttgaagattttcgtaagaactggatcattggagtcatcagaattctgaatagttcctttatatcattggagatagtatggtttgtataaacattaaaaagagcctgctagctagtcactcataataatacttgtgttgtaggtaacaagaagaaatcttgaatgggcgtccatagaaaaatgtttttttgccattgaactttgaaagattgacttccgttagaaggatccatgctacttcttaaagaagaagtgtctcaacttataaacgtcatggcatccttgtgctttntcttcccattgga

SEQ ID NO: 77604 - DNA, 415 bp, Glycine max
  unsure (1)..(415): unsure at all n locations
agcttatgctgcanacatttataatagaccctctcagcagtaaaaccaacaacaacagaataattatgacctttcaagcaacagatataatccaggttggaggaatcatccaaatctgagatggacaagtcctccacaacaacaacagtctatccctcctttccagaatgttgctggtccaagcaagccatatgttcctcctccaatacagcagcagcaacaacaacagtcacaacaaagacaatcagcaactaaggctcctcctcaaccttccttagaagagttagtgaggcaaatgaccatccagaatatgcaatttcaacaagagacaagagccttcattcagagtctgacaaatcagatggggcagatggctactcaagtgaaccaagctcagtcccaaaattctgacaaa

SEQ ID NO: 77605 - DNA, 482 bp, Glycine max
  unsure (1)..(482): unsure at all n locations
cctctgatactcagcttcggttgcccattgactccagattgctgcanagaaggacaaagatcttaatggtgatctgcagaagaacatagaccacagactcttgcaacaggtgtagatttctgattcatggcaagttgggttactaggttaaccaaggcatcaagttttccttcaagctttntattttcagtagatgaagatgaatccgtggccacctcatggactcctctaagaacaatagcatcatnttttgcactngaatgttgggagttggaagccatcttctcaatcaaattcctagcctaagtagggatcatatcaccaagagctccaccactggcagcatcaatcatactcctctccatgttgctaagtcccatatagaaatattgaagaagaagttgcttataaatttggtggtgagggcagcttgcacacaatntcttgaatctttcccaatactcatacaagctctctccact

SEQ ID NO: 77606 - DNA, 450 bp, Glycine max
agacctctgaggcatgctgccgcatgcaagctattatgtgaaaggatgtgactcttcacatttgaatttgaatttcagcgttcaaaggcactggtaatcgattaccaaaacattgtaatcaattacagctttttgaaattaattggaacgttgcaaattcaatttgaaaacattttcaaaacaattttgctactggtaatcgattacaacaatctgataatcgattacaacaatctggtaatcgattaccagagagtaaaaactctttggtaaatatgttttgagaaaaatcatgtgctactcaatttttgagaaaaacttttcatacttatcttgattaagccttctcttgattcttgaatcttgagtcttgaatcttgatcttgattcttgactataaactttcttcttgagtcttgaattcttcttgattcttatcttgaactcttg

SEQ ID NO: 77607 - DNA, 438 bp, Glycine max
  unsure (1)..(438): unsure at all n locations
ggatctcttcctatctctcanaggaataggctcacattctacaactctctatgcatatgggaacaatgaccttggaattttcaatcggctatggcttcactgcttaatgaggttccttatgacatatggaagtatgcctccgtggttgaagtaagcaagttcgacctgaaaatacaacagtgaagctctagtatgcgatgcgaccataaaaaaaatgcatcaatgagaaggttaaattacctcagtgtcaaagcgtgctgtgcaagtgaaagattttccattatcggttgtgactgtcacatcttggccaggcctaatctcattgataatacttggtagttcaattgtataacgttcatgaccagntaatcccaatgtgtccgcatcctcaccgggtttgaagcaaagaggaatgatacccattcctaccaagttact

SEQ ID NO: 77608 - DNA, 410 bp, Glycine max
  unsure (1)..(410): unsure at all n locations
agcttgtagaatggcatgacacgatacatgtcatggttntgttcggttcaaggataaaaggggatgtcccacattatttccatgacataaatgcaacaatgatgatttggaaattttatgcaaaactagtcatgcatgcacctatgtggacactcaagtgttgaaaaatttttggtcatgtgatgctagggctcataattcattctctctactttagtcaacccagtgtttccaaaatatgttcttttatcaatttgtgcattcatccgagtctattttgggtgttcgaaaaaactttcacagcatttacccttcaggtgtatacacattttttttcgaaaactggttatgatcagtgaatcctttcaaagaaaagttggaagttagctcttttcacaagcatgttgttt

SEQ ID NO: 77609 - DNA, 483 bp, Glycine max
  unsure (1)..(483): unsure at all n locations
cgtagtgaggctaggctacanaaattcattggctnttctaggatgctaaggtttagattctcagagagcacagatcccanatttatcccaatggtctttctaatacacttagctagctcactagctttttactttcgtttgcttttgaccttgttccatcagcacactttattctttgttttatttctaacatacaacttatttgttgagtgtgttgatgcttaacctttgtcttttcattctaattgacttccctctcccaaatttagagtaaatttgccttgaaccatatgctctcctaaaatctaaacaaggtatcaggagataattatttaagttcagggttcaattcatgacaaaatcatacagcttatatagggagcacaggatgaaattatcattcaaggtaagctntttggtcaaaaggcttatgtatgtacaactatggccttcatcatgttctagattatacattacattcta

SEQ ID NO: 77610 - DNA, 418 bp, Glycine max
agcttagccaaattcagatcgaatggaagttggcttagcttatccttggctagcttagctgaccaaatcagcctcagatgcaagggttgggcgctaagcacttgagactcgtggcttagcgcatgatcaaagatgcgcttagcgcgaagctcacgcttagcgaaaggactattgatgtgccattattttctcctatttcttaaccttttttgcaccattttaaataccgattagtcttaattgtcaaatttattaggcagttttattatttgggcccattcagctaattgatgtttttaatctaatttcaggaattaatgaagcattgggcttgaatctagaattgggctcggacttgaagaaagcagactaatttattctacaaaattagatcttatcttatcttatccatatatta

SEQ ID NO: 77611 - DNA, 473 bp, Glycine max
  unsure (1)..(473): unsure at all n locations
nnggttcctttgtaacanactataaatgtgtgaaagcgccttgcaaaagagaagaagaaataatactcctttctctatctctctcttatctctcttatctctctttccctttgaggaggttgctgggcctcgaagaccagctactaacattagtgctttcatcatcgttgccatggctgacgacactcgttcgaaaacaagtactgaccgatgggaggacgctttcgctaagctttcatcatcaatatcatccaggttcgacgtgcttctccagaggatgactcagttggaaacatcgcaggccaatccttatggtccttcaccttcgttcgttcctgcaccaacaaccaacatgagtacggttcaccgcctaaagctcgaggtccctcggtttgatggctctgacccaactgggtggatattcaagatctctcaattctttgaatatcacgcaacgcctgatcatgaacgtc

SEQ ID NO: 77612 - DNA, 411 bp, Glycine max
agctagtatgatatcaaattgtattcagcatgtaaatactactacatcaaatagttcgtgaatgaattccgctacttgaagttattatgacaaaaaatatttattccaatggtgagcacttaaaagcgtctgttgaaagtagaaggttaatcttgcgctctctgtcagtgaactgctataccaatctgatattcgcttatattcaaagtcgcatagtattcatttgataacacattatactttttaaggaaaagcatggaatgtccgttgctgtctagtaaatcttatgagcctgttgttatgacttcaaataaacttacatgtttcatcataattggtatataaaaaaaatttattgaaatgataacttaattttttaatatacatttaatgattctctcactcacatta

SEQ ID NO: 77613 - DNA, 476 bp, Glycine max
  unsure (1)..(476): unsure at all n locations
tccattgttgcacaacaagtgttttcccattggagtaaaagctcctcctctctgtaatgggtaaggaattctgtcctttttcttgaaatntatattaactgaacacatatttatctctctttgagctcattntaattgaaaactcatttctcctttggttgaacaatacaaaatgcatttgaaattgttggaacatatttcgattataatttaaaatttataataaaaatatattttcttttcagaatcagatttttaaagtatgatattcacacactatatcttttaactttgttagttcctaatttttacgaaatatattgattgaccaagtattgttttgttgttgcacttcattatanttgggctgcatanttggtgcctagtggctatctttgcttataaatagctccctcttgataaaataaaataaaaggcacatgagacagtacattagatatacatatacggatatg

SEQ ID NO: 77614 - DNA, 279 bp, Glycine max
agcagctgaaggagcgctgagcaccaccagcgcttcgaggccatcaagggatggtcatttctctgggagtgacgcgtccagctcacggacgaagagtataccgacttccaagagaagatagttcgccggcgttgggcatcactggttacccccatggccaagttcgacccagacatagtcctcgaattttatgctaatgcttggcctacagaggagggcgtgcgagatatgcgatcctgggtgaggggtcagtgaatcccgttcgatgcggatgctctc

SEQ ID NO: 77615 - DNA, 484 bp, Glycine max
  unsure (1)..(484): unsure at all n locations
gctcgccagggtggttgctaattggaggcccgactaanagagtcagtgttctggttggaagagtctgagctacaggtggttgaggagagggaggacaacaaggagcttgaagaggagttgacgatgtataagaaggaggatgtggagaagcatgaaaaaaggggtttcaaaaggccctcaagaaggctgtgttcttcgccaaggaccttaacttangtctttttgatcctttcaaggatgtgaaggacgatgttatgcttgacaaagaagaaatttttgcgacggaggagacaactgatgaggagcatgtgctgaggagcgaggcgatgatgctcaagtttaggctaccttatgtntattttcttcttttcttattggttggaatttggccacacaggccttgtaattatgacaattngttattttcttcaatgtgcatggttttcctttgttgacgaattctgccctgtgntgtatgtatgta

SEQ ID NO: 77616 - DNA, 409 bp, Glycine max
  unsure (1)..(409): unsure at all n locations
agctatntntatgagctcgtttaacatactttatgatacaaatcacaacatcttaatgactttcacatgcagaatacaagagttgactaacccaccttccctacaaaagggatgtttggatgggtaaccatgaagtagttgtacttcttagtatttgggcttagggcataactcagtcccacgaaactggcttgcaaggtgagaactgtccaagctttataaacactgttaaagttctatctctaggctgtgtgagacaaaacataccccttcaagactgcaattaatgcaacccaaagaggctgctattaaggtgggctagaggtgactgcaattaagattggatttctgacacaccttctcatagcccacgctatgggcttggagcgacacacgtgaccattgatga

SEQ ID NO: 77617 - DNA, 477 bp, Glycine max
  unsure (1)..(477): unsure at all n locations
taagttgtgcttcaatggcagttgtactagagtaagaagaaacaagtgtgtaatttgacacccaataaaaatgttntagttgggaacgcctgtgtcgcccatcagcgattagaaagaggataagctgtagcgctggtgacattgccaaccaggaaagagttaatttgcttgcaccaaggaattgagtgctggtacagtgcacgtacaagatctttggggtcaataatagcaccaaatgggatagaagctcttcagtaatcactggcaataattttcaataggattagttaaccaatagttgcgtcagttcccatttaatgaattcatagttataacaaaacaaatgacatgcaaattggtaaattatctggataccgtaaaatttctctaattaagtaatgttcacaagggatatattctagcaagctatttcaattacnagccatggtagatatgatcatagtaattaaattcaaa

SEQ ID NO: 77618 - DNA, 373 bp, Glycine max
  unsure (1)..(373): unsure at all n locations
agcttaagctccttcaactgcacaaggctcttaatattngaagagtatccttgtggaaccttcacctgacgaagacactgacaaaaacttatcttctcctttntggacaaagtatgacaagctggggcaagtaaattttcttcccatcagaccttggatgcaactgtgatcgtatccccatcttagctagatcttgatgggtacttaacccatccttcgtcttgccttgaatgttaaggagcgtcccaatcacattgtcacatacatttttctccacatgcataacatcaatacaatgtctaacgtctagatcagacccctaggatgatgaaagaaattggacctcttctttcatatgcaagacttactttta

SEQ ID NO: 77619 - DNA, 302 bp, Glycine max
  unsure (1)..(302): unsure at all n locations
tgaatggaaagtctcggattcgaaaacttacccgttgaagaacgaagaacggatgaagaacgatgaagaacggacgaaaaccttcacggatttgcttacggaaacatctcggaagcgttacggaagcacctcggcttggattttcttcacgaaaacaatttttttcacccaaaacagctgaaatacatagccagggggctgagggatccttagaacagcccccttcagcctttntataggaaaaagggggaggaggttgccgcccagctcgcccaggcgaccttagctcgcccaggcgagct

SEQ ID NO: 77620 - DNA, 426 bp, Glycine max
agcttaagggatcatctcagggagatctctatacatctaccatttcatgtttctatatacttaagcaagcaaaagagttatgtgcgtcatatgtccagtttccagttcataatttccaacagaataagatgttaattagagagagagaatgagagagagagagaaagtaatcaacacttgggttcaatactattgtgttgtcatttgtcataatgatgtatcctcaaaatacaatgttattgtcaataacaagaatttgtcaattgttactattttcattgagatcaaagtgtttgttataatattggtagggcggtgctaatcaatgacgatgaaagtatattttgtttttacgatatgataaactgagataagccatgagtccacgaccttgattatctaactaacttgacaatgatatcttcg

SEQ ID NO: 77621 - DNA, 371 bp, Glycine max
  unsure (1)..(371): unsure at all n locations
cacatcntccacattattttgtatctttctgggtcctatcggccctagattggtgatatgttcttcttctctactaatgagctcactcatgtctcctacgccctacaaatcttatagattatttttttatcatcaacatatcttatagattgcgcagacatagcatgtttctgatattcaaattaaattggccaaaatgtttctctctagcatttcagcctangacagaacgttccttggaagcgtctgtgaaaataaccatctaatttcatgtaaaatgtttgaataatgaaaaagaaatctattttattgcacgatatcccaaatttataaggattatatgctagatgtggacctcatcgcataaatag

SEQ ID NO: 77622 - DNA, 448 bp, Glycine max
  unsure (1)..(448): unsure at all n locations
agacctctgaggcatgctagcgcgtgcactctgtctgacaatagagacatttgctctatatctagnggaaacacaagacgcgcaaccaagtatctgtgtctaccatggcacaacttgtgagtttcttgttttgcttagatttttaaaaacttgcgagtttataatactggccgttggttcacatttgatctattttttcaattgagcgcttcacaattctgaaagggtgcagagaagctagcattctcttctgatatcccaccaattatgttacattataatctgagatatatgttcgtatttcgcttgcacagacgtttgttcttaaagcacacatgaactgtcaaggatgcatgaacatagttaggaaagtactccaaaatattgaacgtcacgtcgaattttctttttctctatgtcacagatctatactcacctgtaagaacta

SEQ ID NO: 77623 - DNA, 343 bp, Glycine max
actaagctcgctggggctttatggggctgatctttagcttattgatgttctttaatggtgattttccaccatggagatgcagcggaagacaaaggagaatatgtgagaggaggcgccattcactatggaataagccatggaagaaggagcttcaccaccaagatgagccttggataagaagcttggaaggatgcttcaatggaggaaaagaaagagggagagaaagagagagggggagcacgaaattgaaggaataaaagaggggagaagtggaactttgaagtatgtctcacaagactctcattcatcaaagttacaacaagtgttacacatgcttctattt

SEQ ID NO: 77624 - DNA, 426 bp, Glycine max
  unsure (1)..(426): unsure at all n locations
agctngaaggcaaactggatgcattggttaacttggtaacccagctggccttgaatcagaaatttgtacctgttgcaagggtttgtggtttgtgctcctctgctgaccaccatacagacctttgcccttccatgcagcaacctggagcaattgagcagcctgaagcttatgctgcaaacatttacaatagacctcctcaacctcagcagcaaaatcaaccacagcagaacaattatgacctctccagcaacagatacaaccctggatggaggaatcactctaacctcagatggtccagccctcagcaacaacaacagcagcctgctccttccttccaaaatgttgctggcccaagcagaccatacattcctccaccaatccaacaacaacaacaaccccagaaacagccaacagttgaggcccctc

SEQ ID NO: 77625 - DNA, 496 bp, Glycine max
cacttagacactcagcttctatatagctgacaccatttatcaataaacaccaagtggagtttattcagaaaattagagtttatctcttttatcttagtgagagtgattctcctaaattcttgagtgattcaagaacaccttggctgtatcaaaggactttcacaacctttgtgtgttgccctcgctggaaagagtgattatttccttcctttcatcatcacccttgttctttcaaaccacaattccagaaaatccacctctgcccagaattatctcgtggccataactcccattttacgcgctcaaattaagtgattcttgagcctaaattgaatttcaaaacgagacctttcacctcgttttggaatcacctcatttggagccctgtagcttcagttattgccatttctatatttctttccagccaccacttaacctacgttttaccatcccattcattccatttatgccaagaaccaccttattaagacccacg

SEQ ID NO: 77626 - DNA, 422 bp, Glycine max
  unsure (1)..(422): unsure at all n locations
agcttccttgctatggagagctaaatcctctgttggttcttcctatggggtacttgatgtaaatattttcatatctatctaatgatgttntatgtgttcactgtgctatcagtacttaattataatgtgtctttgccttgatcacgcaactgcatgcttagttagggtcactcaacattgngaaatggtttgatccttagaacctgatagggcagggctagcttattgtattttcacgagacatcggggtacggtaacctagtttttgttatgttatgccttaatgcgtttctggttaagtttagtccaacaagaggcatatgaggatgatgcttgattaggattagactaaacatgcacgagacatcggggtttagtagtccaggagacaacatagaacacatgaacattggtaggtagag

SEQ ID NO: 77627 - DNA, 449 bp, Glycine max
  unsure (1)..(449): unsure at all n locations
aaggttcatggagtcaagttgaagtatggaagtaaccattcttgcaaatattggggcaaaagatgggatcgtgtacatcggtgcttcntctactggcaacacattagggcgcgatgtccttgtctttcagttcacttgacaaatgtctgacatgtgaaatctaatgatcaccccatattctgcgtaaaattcgcaatacttcagctgtgcatcattcgcatacatccatgttgttcattggttgcattgctcattgcattctttccttanaaaaaaaaagaacttaatcattgttataaaanaaaaacatgatttacggtgccctcatcgaacctgtgctagagctagagtaaggggtgaagtagaggaggtataagagaagataaaggccgacatggaggccatgaaagagcaaatggccacgatgatggaagtcatgatgatcatga

SEQ ID NO: 77628 - DNA, 424 bp, Glycine max
  unsure (1)..(424): unsure at all n locations
gcttgtgactcttggcaatttctttaacataaccagtcacttaanaagtatgacttttgaaagaatcttcagaaacaagtcacttgaagaattgtgacttttggaaatgtgtttttcgaaatcagtcactggtaatcgattaccattaaggtgtaattgattacacatcaacagatgtgactcttcactttgaattttgaaaatcttaacgttttaaaacactggtaatcgattactacattctggtaatcgattaccagagaataaaactctgtggtaatgatnttgtgaaaacttcttgtgctactcaatgttttgaaaaactttntaatacttattttgattgagtcttctgttgattcttgaatcttgagtcttgaatcttgatcttgattattcttgaatcttgaatcttggaactcga

SEQ ID NO: 77629 - DNA, 482 bp, Glycine max
  unsure (1)..(482): unsure at all n locations
ctaagcttgctaacaaaatttttatgcaggtggaccttcttctagtaattctgacttacagcagcctcctatccctcttccattcccacctagagcaattccaaacaaaaagatggaagaagaagaaaaggagatcttggagaccttcaggaaagtagaggtgaacatacctctactagatgtcatcaagtagattccaagatatgccaagttctataggatctgtgcacccataaaaggaagctcataggcaatgaaaggattaccatgggtagaaatgtgtcagcattgataggtaaatctgttcctcacattcctgagaaatgtaaggacccaggtactttctgtatacctcgcattattgagaacagtaaatatgagaatgccatgctagatctaggagcatcagttagtgtcatgcctttgtccattntcaattctntatctcttggacctttgcaatctacagatgtggtgattca

SEQ ID NO: 77630 - DNA, 389 bp, Glycine max
agcttgtgacgcattgaatatctcatgagcttccattgtgcaattttgagcgtctcgatatattatgcgccttaatcggacctccgagtgaaaagttatgaccatttgaataactcaagagcttccattgttcaatttcgagcgtctcgatatcttatgtgcctgaatctgacctccgtgtgaaaagttatgaccatttgaatatctcgagagcttccgttgttcaatttcgagcgtctcgatatcttatgcgcctgaatcggacctccgagtgaaaaggtatgaccatttgaataactcaagagctttcatggtcaattacgagcgtctcgatatattatgcgcctgaatcgcgacctcgaggtgaagggtttgaccatttgaatttc

SEQ ID NO: 77631 - DNA, 416 bp, Glycine max
  unsure (1)..(416): unsure at all n locations
agcttctggtgactnggaagcacgttattctgttgntttccagatcggntccttcgccaagnatgtgtatatgtgtatatatgtattatattcgctgttctggatgttgtttgtatattgttttgtgcagaagaaaaaagaagaagtagagatgatagtcgtcatcacggaaagggcagggtggacgaaatcagtggcctatctttgctttcctcttatctccgatgagaggtaagtaaagaggggcaactgtcataccctaatttcgtccggggattattacttgatgaaatgcaatatatgaagtcccgagacgtctcagacatcaaaaggaagcaggcttgcgcgatccgtgaaattccgtaatgtggcggaaatcgaaaagaggtagttatgcgcaatccgtgagttttcgt

SEQ ID NO: 77632 - DNA, 278 bp, Glycine max
  unsure (1)..(278): unsure at all n locations
ccgatggattcagtctaactagggatcaaggtttagtaatttatgctacaacatataacacaaaagcataatcgattagagaaacatctntatatgcatcacctggtctgttagaaaaaacccaacattttacctactactgcatttacttgcattttactgttttagcctagacttggttaatcctatttaaatcatcataacaatgttttttcacaatgcttattctgaattaaccctgcttaactaatccctgagtcgaactcggattctcattt

SEQ ID NO: 77633 - DNA, 419 bp, Glycine max
  unsure (1)..(419): unsure at all n locations
agcttgaactaatctccagcatgtatggtaatgtcctcgacaggagaaggaaaagggacaagaatttgagggcggctccaaattctaatgccaccaaatgctccagcagctttgtgcattccaagagatgggaagtagaaatagctaccaatctggtcttttacccggatagcatatgtgaggttcctcccaggtgggattggacagtttgtgccatacactccatcctgccatgagttcctcctatgctgtaagccattcctgcagaagatatgatatgatcatcaaattctgacaaatggcaattattttctagctgctaaatgtatacattatatcattcactntgtttgtgtttgtaaaaatcattggtattggatgcacattaaataaacctatgaaatagcattaattctaaa

SEQ ID NO: 77634 - DNA, 478 bp, Glycine max
  unsure (1)..(478): unsure at all n locations
nggaacatatgaatngaagcataananaataaaaaacaactccaagataaaggactccagtgtgcataatacaacaccataaaactcaagattcttcttctaactcagatgttgcgaagaagccaaacaatggattcaaggtcacctcaagtaattctactcagaatggattcaaggtcacctcaagtaattttactcagaatgaaaatcccaacaataattatgtccaagaaggaatgcaagaaaatgttgaatagtccaataatgacaacactgctagccatgatgttcaactcaattttgctgagcaaaacaaagatataacaataattatgctaacttgaatggctntaacaacaatgaaaatgcaaatgctaacaaaaatataaacaacacaatgggacttanaacaagtagaggaagacgattgttgaaaacaattgngataaaattatatccatgatcccagtggttggga

SEQ ID NO: 77635 - DNA, 412 bp, Glycine max
agcttgtgaatatcaaatttgaaagataggggatatatttttcgtatagtaccctttgaaaactaaggatcacattataaataaaggatctacatttgataaagtcactgtatacaagactaatcaaatcagaagagcctctcatagtatagtagaaaggattttagtgatgattttgtagattacaagctattggtctgcggtatgggattttagtaggatgaaattcacaactgtatccttgatttaggatagattgcaacttgttttgaagtatacttgcactgtgggtattacatttcctcaaatgattcccaactcattttgtagaaaaggcaactattcaattatgtttggaagttacagctcaggttttaccgcacacctttaatcaagttttaaaatttaatta

SEQ ID NO: 77636 - DNA, 464 bp, Glycine max
  unsure (1)..(464): unsure at all n locations
ngagatgaggaagtgtagaagggagaaacttcctgctnttattcgttgaccacagagtggtacctggagatatgtcgcggnggtcaggagaccttggggacgtcaagtggggtgctattgcccaaaaccaagcttgaccaatcctgacccaacccgggcatagtcggtcagtgagaacctgtgatgtacctaaacatgcgagctcctggcagtcaacagataaaaggaacaaagaccacaaagcaaggaggcttgtggtggctggccagctgtgaattttgtgtgatatatgggttgtggcctctggtaatcgattaccaagggtgggtaatcgattacaaggcttaaaaatgaagacaggaggctaagatggtctctggtaatcgattaccaaagggtgtaatcgattaccaggcttgaaaacgaggtcaggaagccatgagggcttctggtaatcgattacc

SEQ ID NO: 77637 - DNA, 428 bp, Glycine max
  unsure (1)..(428): unsure at all n locations
agctnntaaaaggctctgaatcctcaatgatgtatgctccattgtagcttgtaggcctagaatcttcttcatcaatggattcctttgcttcttggaagatgaatggcagcagaatgaagaaaggaagagagagaggagacgccactttaaggagaagatgagtctagaagaagctcaccaccataggaggccatggataagaacttggaggaagaaggagatgaatgaagggagaggaagagaagagcacgaaattttgtgctctaaatgtgctttgcaatctgaagtttaatattcaaatgatcaaagttgaaaaaaatgcacacacaaggcctctatttatagcctaagtgtcacacaaaattggagggtgaatttctattcaaatttcacttgaatttgaaattgaatttgtggagccaaacttt

SEQ ID NO: 77638 - DNA, 464 bp, Glycine max
  unsure (1)..(464): unsure at all n locations
gctcggtttgggcataggaccccacctggcatccncaaggtctcctgacccccgcgacatatccccaggtactactctgtggtcaactaataaaagttggaagactgactcttccacgctttctcacaccgagcttattgggttatggngcacccgtcatatgtggtactaggtggcgatcaggcgatggcacaaaccaaacatcccatttccacaagcccaggcataagcacaccatccccagttgcccacctttaaatttagctcacgtacacgtatgtagccttctcctcgttcctctcatcaccgggtccccatcaacctctccaagatttcacaatatccaaacaattcaattccatttgtcatgaaactaccttaaaaacagagtgaaggcagaaatctttacacaagattcattcaaattccacagagtttttcctacccacatacctcagtaaaat

SEQ ID NO: 77639 - DNA, 407 bp, Glycine max
agcttgtgaataaatacattctgaaatagtttagtgcgttaacttttgagccacattaaatcattcaactgaaattaaaaaatctctttatgagtagtagagaaaatgaaaatgtgattagattacctgatcccagtcgtcgtcatctattgtgcccttgatgtttctaaagaattctgtcgattggctgcctctttttctctcagcaagagatgcagcaacaccggcatatatatcaacagctgcatgatacaatacaaaaaaactagctaagtatgccgacaacactgtgtggagctaaaaacacaagacaacaaaaccagattgtgaagaggaaaatcaatgttaccaggaagattgaattcatagatcaattggaatgccaaatcataattcttctcaacaag

SEQ ID NO: 77640 - DNA, 467 bp, Glycine max
  unsure (1)..(467): unsure at all n locations
cttctannaatatttgagtgacaaacagagagaatcatgagatgcgtgacattntcatttacgactattcacaatttggcaaagccaaaatagagcctaaaataaaaattaagctaaaagtaagataatctggaacttggaaagttctgtttggcttggcttttggttctgaatggggaagacggacaaaaagtacgtcttcactgaggcctctcttattgggtatctaaatgattataatgtgaaattatcgtacataagaaaacaacttgtaaaattgtagccttccatgtatattcatgtgcagacacagagactgaactagtctagaacctatcttttctcatagccatccattgatacgtaacacaattcaccactgctgtctagtgtgcatcatagcctagtttcaacgatccctcatatagatcaaatcatggcgttaaatctaatgttgcttacattcg

SEQ ID NO: 77641 - DNA, 410 bp, Glycine max
  unsure (1)..(410): unsure at all n locations
agcttcttaaacgagattagtatattcattgacatagattaaaggatgaagatgttgtacatgatatcttttggtgtcatcctaacgcagtgaagttatacaatgcctgtaatttagtatttttgatagatagtacctacaaaacaaatagctataggctctcattacttgactttgttggtgtgacaccaacaagaatgacattctctactagttttgcctatttggaggaagaatgtctaaataatgttgtctgggctctagaatggtttcgaggtctttntctcgtacgtgataccctccctagaattattattattgacagagatttagcattgatgaatgcagagcanatngtattccctgagtgtaccaactttgtgtgtaggtttcacattgacaagaatgtc

SEQ ID NO: 77642 - DNA, 499 bp, Glycine max
  unsure (1)..(499): unsure at all n locations
ctttagcgacctataaaactcagctctgggacanagaagaagaagaagttcanagagattcaaggcttgtataggattgtaagagattgattggaaaagtattcaagattattgaaatgcaaaacaaagccttgcttttatagactcttcatgtctggtcaagacaaccattagaagagttatgacttttagaaaaacttaaaaaacaatttgaaaaagtcaaaaactatttgaagagttacatcttttgatttaattcataaacaatcactggtaatcgattaccaaattagtgtaatcgattacacaaagcttttatgtgaaaggatgtgactcttcacttttgaatttgaatttcaatgttcaaaggcactggtaatcgattaccaaaacattgtaattgattacagctttttgaaattaattggaacgttgtaaattcaatttgaaaactttntcaaaaacaatttgctactggtaatcaattacagcaatctgg

SEQ ID NO: 77643 - DNA, 252 bp, Glycine max
ctgatctatcttttttgatgcgatggagaaccttgattgagacaatcttttcaggagggagtgatgaggacataaccaagggcaaggaccatgaagcacttgaaggtcccatgaccagaggcagacttaaacaagcccaacacatcatagagacaaggctggtcatttgtatagctgtcattgatgatgattgaaggcccaagtggagaaagatgaaggcccagaggcagaggcactaccaagactactaat

SEQ ID NO: 77644 - DNA, 427 bp, Glycine max
  unsure (1)..(427): unsure at all n locations
agcttatcantatttacatagtgttgttttgtacatctcatagtaactatatattatataaacaacgatgatgttggatatttcgaattttagttgactaaaaagtgtctaattaaaatgattaataataccgcaccattctgtccattcatttctgtcaaatccaaacttttcttttattttcttaatttaatatttaatcaataatatctacatgtttgcttttcctatcatttcatacgaactctttaatactaattaatataggaaaaagatgtacggacattgccctgttagtaatcacagagaaagaaaaagataaaagagagaaatatataaatatatacgatatacataacaaaaatagatttaaaaaataaaaaataatgaatatttatgaaatggcctaaaattgttactcatatca

SEQ ID NO: 77645 - DNA, 447 bp, Glycine max
  unsure (1)..(447): unsure at all n locations
catgtgtttgtggcatntagaacacatattcatggtatctgcacttccaaaaaatccacagntgttgatgcacaatatatgaccttcaggaggagcttggacccaggcttgcatggccattttttccaactacctgcgcaaatgatacatagaacatctaagatcacgtcatcactaatttataataaacaaacagcactccggagaaataccagtaatcaactatgattatagtccaatctatgtgaggcaacaatatagcacccttttcccaatgcaaaatattgatgaaacaagcttttgagcagatccatgtacttaaacaagaaatgacatacagatggtggtgcattgccaagttgcataaacaaataaacccaaattttcaaacattaattgtacccaaagaaacaactgaacccttgataatggcaaaaaaaaatactc

SEQ ID NO: 77646 - DNA, 434 bp, Glycine max
cgcggcatgaagctttagctaacttatagttgttcaactggtcgcttcaactagcttatcagctagtttggctatgttttatcagctcttatttattcattgtctaaaaaaagttgatatttatttaactttactttcttacacacacacgatacacaagacaatcaactcatcaattgttattactacaccattctttaaggttaaaaattctttaaatcatatcaactttacaattatttgatgaaccattctatgttttttctaaaattatgtgacctaatttctaatttgtttccttgcatgatttttatattatcgattcaattcataaaataaaaaatttcactttttgtaaactaaacctatgcacaattgactatcttgttttatgtcttttgacatttatctgtcaacatatcagttagtcttac

SEQ ID NO: 77647 - DNA, 478 bp, Glycine max
  unsure (1)..(478): unsure at all n locations
cactaagctctaaaggacccaccgggcaatgttggccataggaaaaatgatgcagaanaagatcataatgccggcgcaccttatgtacgatggggatgaccccaggctattngaacactactccgcggtggcgcaacgtataggcgtgtacacggccaatgactatgccaacatcttggactttctggttggacggtggagaatggagaaactggaaagtttgacggctgagggaaagagggcacaggattacgtgtgtgagttaccaccgaggattangaagttgcaagagcgagctgatgagcgagcgcgtaagatgaagcctaatagcttcaagttcaattggatatttaacaaagagttgcttttggtgaattgggatagattatgatttgtgggtgaggaataaaggtgacatgcccttattagcatagaagctttagataatgngaagtgcaatggatatcatgctacgagt

SEQ ID NO: 77648 - DNA, 438 bp, Glycine max
gacgcatgcaagcttagctggcttctcttgcttagcgcattttattctattggatcgcgcgcttagagggctcttctcgcttagcgcattctatccaggtatgcacgcttagcacctattgcgcgctcaacacacgtgacaactctcgagcttaacgcctctcttagcgcttgtgccttcctgacccgcttagtgcatgttgcgtgctaagcgcgagctctgggctgggcctttctgatttcttctttgtcttctttgctatttctcactttttgcttttagcacctgcagttattatatttgcagccaaaattaaacaaaacatcaattctttaatattgaagcgcaaataactactaaataattattttaaagacaattttgcttgattttctactatcaaagtacaattatttagcagttatcagtatatgatgg

SEQ ID NO: 77649 - DNA, 484 bp, Glycine max
  unsure (1)..(484): unsure at all n locations
ctaagctntgatctaccaccaccaccgccaccatcatcttagttgtctattattgttaatattattagtatattgatgtctagccatgtatttgttggaccttgtggcctcaataatcttaagagggataggcttataatacagaagaagcaacgacaatcaatgtaacaatgttctttaaacatgccagacacaattgattgcaacaaaataaataagataagggaagagagaatgcanacacagttttatactggttcggccacaacccgtgcctacgtccagtactcaagcaacccacttgagatttccactatctttgtaaaatcctttacaaagtctgaaccacacagggacaacccatcccttgtgttcagatgctntacaacaagagactcacagtctcttaaccaatctcattgaataagaagaatagaagaagaattctctcttcaagagaagaatattacaatgaagatcatgt

SEQ ID NO: 77650 - DNA, 351 bp, Glycine max
  unsure (1)..(351): unsure at all n locations
aacataacaaacaagcttaccatttcattttgcaataatgtcagtaaccctcttctggtacctctcacattgcatgtctgcagacagaacaacctcctgaacctgcattttaccacagcagaagcaaccaagccatcaacacaaaactctagaaatatccatcaccaaaaacctcaaaatagagtgtaagctaaactaaaacacaaacctgaggcattgacaaggactccatagaagctagactagtcccactcccaccaagaggaaaaaaaccctttggtcttcttacaccaacaaccagttcttgaacctctntattagcaccatcttcacaatccatacctgtgatta

SEQ ID NO: 77651 - DNA, 246 bp, Glycine max
aaaaagcatgtcaacattcgacctagacgttcttaccttggctcggacttggcgctatcggtcacctgtgtctatgcaaactctaccttttgtggatgagcgaggtgaacttgaggtggggtgtctcccctaccctgtctggggccagacttttgatgaaagcccgtaagcgggcctaatgaccttgtgggcgacgacctcgtaaacgacagagccatatcaagtaaaacctaaccctgcgacttt

SEQ ID NO: 77652 - DNA, 399 bp, Glycine max
  unsure (1)..(399): unsure at all n locations
agcttctaaactntgtacaataatgaagatcttataccacttgttggacaagtggcctcaaatatcttaagaaggggggggggggttgaattatcatattacaaactatatgccctattaaaaattatactttgatttcaatacaagatcccaaatccctttaagatggatttctatacaaacattcacattaaacaatctcaatataaatttaaagcaattataatcaaagaattattggacaacaaagctcatctcagaatatactggttcttcacacccttttgcctacgattattccacaccaaccgattgaattacactattttgcaaatccctttacaattttaacacacctgacaaccctccttttgtttaacttttacaaaaaatacctta

SEQ ID NO: 77653 - DNA, 417 bp, Glycine max
aggcttgctcttgttattcaccccaggtatatgctacattcatcttcactagctcattgagaggtgatgcaattgtagagaaattatgaacgaaccttctatagaagattgctaacccatggaagcttctaatatctcccacactttttggggtgggccattcttggatggccttgattttcttagggtccacttggaccccatttctaccaactacaaaacctaagaagactatattatctacacaaaaggtacacttctctatatttgcatagagggtgtttttcctaaggactgaaagaacttgcctgagatgtccgaagtgatcatctaggctcctactctacactaaaatatcatcaaaataaacaactacaaatctacctatgaaatcccttaagacatgatgcataagcc

SEQ ID NO: 77654 - DNA, 419 bp, Glycine max
agcttcccagctatggagagctaaatcctcagttggttcttcctacgtgatacttgatgtaaatactcttatatctatctaatgatgttgcatctgttctctgtgctatcagtccttcattttagtatgcttttgccttgatcacgtagatgtatgcttagttagggtcattcaacattgggaaatggtttgatccttagaacttgataggacggggctagtttatcgtattttcacgagggatcaaggtacggtaacctagttgttggtatgtatgtcttaatgcaattctggtcaagtttagtccaacaagagggatctgaggacgacacttgattaggattaggctaaacatgcacgagaaatcagggtttagcagtccaggagacaacatagaacacatgaacgctgttatgtag

SEQ ID NO: 77655 - DNA, 459 bp, Glycine max
  unsure (1)..(459): unsure at all n locations
cagtgagcaccatacttatgttccttgaggatgtgcttagtttactatctatgtgcgagattgagaatcttgtatgtgtagtacccatagaaacttgtaaccgtagttcctgngagatgcttggtataaagttgtttaagtgtgtatagtagttggcaaagttacgagaagtagttaggaggcttagtgtgaaaccttatataattgcaagtcgttagtagggcgttgctttcctgaccatagagaggttcgagagtgagtgttcttgcaaaaggtagatgacctaaagtattagtgatgataattttatgattagtgagatagatcttagttctctttaccttaatttaggcaaagtctaaggatgctccaaggactaccttagtacctaccatgacctctacatgtaccttgtcacgtcttgacatgatcgatgccnctatgtnngtcatggatgca

SEQ ID NO: 77656 - DNA, 287 bp, Glycine max
  unsure (1)..(287): unsure at all n locations
agctnnttgaagtttctggttttccaaccttgaaaactcgtgttattcatcttttcattctcttctcctttgccaaaagaattcaccaaggactaaccgcctgaattctttttgtgtctctcttctcccttttccaaaaaaacaaaagactaaccgcctaaattcttttgtggcttccttctccctttgcaaagaaatcaaaacgacacagtctgagaattcttttgattcctccctttccctaatacaaaagtggtcaaaggactaaccgcctgagaattcttttg

SEQ ID NO: 77657 - DNA, 480 bp, Glycine max
  unsure (1)..(480): unsure at all n locations
atactaagctgggccttaatttcccattaactatgtaccctgagaaagtgctcgacagcttctggaagtcacgctcagacatgatgtcattcccaccgtcgccaccacactatgcaacggcaacatcgattgcacgctctccctttcttcttatcctggatcttctagaagaagcgttgtatgctttgaacttccttccatactcttagagatgtgtctttgtatcttgatttgcaggttggttccttctttgtgagacaacaatcgaatcttgttcaccagttttactccgattccagtggcatgattcacgttgatggagattcagttgaaaccgtgtgtgacgtgttgcaacttcattcaattgtgtagttactgaattttactacgaatgaaatcaagacaattaattctcttgactcttgggatggaggtgtgctttntgatggtctcgggtttgggaagataaaggatatcagt

SEQ ID NO: 77658 - DNA, 410 bp, Glycine max
  unsure (1)..(410): unsure at all n locations
agcttatgacgcattgaatttctcgagagctttcgttgntcaattttgagcgtcttgatatattatgcgcctgaatcgggcctccgagttaaaagttaacccaaattgtatttcacgagagctttcgtttttcaatttcaagtgtctcgatatattatgcgcctgaatccgaccttcaagtgacaagttatgaccatttgaattgctcgagagctttcgttgttcaattgcaagcgtctcgatatattatgtgcctgaatcggacatccgagtgacaagttattaccatttgaattgctcaagagcttccattgttcaatttcgagcgtctcgatatattatgcgactgaatcggacctccgagtgaaaagttatgaccattggaatcgctcaagagcttccattattca

SEQ ID NO: 77659 - DNA, 458 bp, Glycine max
  unsure (1)..(458): unsure at all n locations
tccgttcccgagagcatctcttatttaagcatttcagcctttgctttcttgtagcttaagaaaaatgtcatttcttcttctttctttcttccatatccatttctaaagttccaagtactttctccatcacccacatccaccattagccaccacaaaccatcattgttctccattgaaaacccacaccgagaggaacccttcaaccgaagcagaatttccaacttggcttgcggtttcggtagagaacgaaaaccctaatctgatctttcgttttctttcgaggtaaccatggntctatgcttggttcttgttagttccatcttgtctttgcatcttttctaactntgcaaccgccattgcatgtcttatgcttcctttgaaaaaccctagagaaagagactttgtaaacgctatcctntaatgaaacacatggtattttcgtaacctacacttgaccc

SEQ ID NO: 77660 - DNA, 422 bp, Glycine max
  unsure (1)..(422): unsure at all n locations
agcttgtttcatttagtttcatcaaaagctgattttgtattgtgcataagctaattttgatttatggagaaatttatttcatattaccttcttattttcttctccctcctatgagtgtgtttagattagtttatcaaaacaggaccaatatctaacagtgaccagtgcagcaagcatcaatgtagatatggagaaaatcagaacatattagcttatgcctcacgtgtatacctccaggttgtcaaataggtgcattgcatttaaatataatgaatgagcaaaaattaaacaattcatgcattaaaaaaataattgttgataattgtttttaattgagcttataaatcattttaattggctccctangtttcgtcgaagtacagtttataggggcctatatgaagattctcanataactgaag

SEQ ID NO: 77661 - DNA, 458 bp, Glycine max
attaaattcccaggatcctgagcaactatgtgtgttctactatgacttgagaaacaaaggtgatcaaataacaagcagagatttaaaaggtactaggttgcctcctagtagcgcttctttaacgtcttgagctgggcgcttgatgacttgtcggtcacggacctagtactttgcttacctttggctttggacttggtcgcctattggtcgaccatgtgtcgtaggcaatacttcaaaccttttgtggatgagcagaggtgaactctagaggtggtggtgtctcgccctacgcctgtctgggggcgcagtacttcttgatgaaagcccggttaatgcggtgcctaatgaccttgttggggcgaccgacactccgtagaactgacagaggcccataatcagagttagaaaccctaagaccctgtcggacttctccgggtccactgggtgtcttgcgggca

SEQ ID NO: 77662 - DNA, 409 bp, Glycine max
agctatataagcgcgggttcgggagacaaatgtcaagcgttcgcgatatgcgaagatgatattccgagtactttggatttggtacgaccatgccctcctgatttccagctgggaaattggcgagtggaggaacgccccggcatttacgcaacaagcataatgtaaacctttacggttttaaaagctctatagttgggcctaggctttagagtttttttccttttgttaaggctttgtgtcttttgtttttgaatttataatacaaggatctttcttcatctgttcctggtctctactcattctcattcatttgcatgtttacttctttttctgaaacggcagatccgatgacgagtcccccgaaggtactaatacctgtgacccgtctatcgacttcgagcaagaaatg

SEQ ID NO: 77663 - DNA, 490 bp, Glycine max
  unsure (1)..(490): unsure at all n locations
gacctataaaactcaagctttaagcgcgggtctaggagacacaggtaaagcgttcgcgatatgctaggatgatattccgagtactttggatttggtacgaccatgccctcctgatttccagctgggaaattggcgagtggaggaacgccccggcatttacgcaacgagcataatgtaaacctttacggttttaaaagctctatagttgggcctaggctttagagtttttccttttgttaaggctntgtgtcttttgtttttgaatttataatacaaggatctttcttcatctgttcctggtctctacccattctcattcatttgcatgtttacttctttntctgaaacggcagatccgatgacgagtcccccgaaggtactaatacctgtgacccgcctatcgacttcgagcgagaaatgaatcaaatggaagatgaaggagatgatgatgtgggacttcccccagaactagaaagaatggtcgcccatg

SEQ ID NO: 77664 - DNA, 396 bp, Glycine max
  unsure (1)..(396): unsure at all n locations
agcttcacaaaagtttgtatggcttgaaacatgcaccgaggcagtggtacaagaagtttaatgagtttatgagcaactcaggattcaaaagatgtgacatggaccattgctgctatgttaaaaaatatactaatagttatgttatccttgttgtgtatgttgatgacatgttgattgcaggatctagtatggcagaaattaacaggttgaagcagcagttggcagaaaactttgaaatgaaggatcttggtccagctaaacaaatccttggtatgagaattcttagaaacagatcagaaggaatnttgaagctgtctcaggagaaatatatacacaagttgcttgacagggtttacctttggagattctaagaaccaggaatacccctttgggatc

SEQ ID NO: 77665 - DNA, 410 bp, Glycine max
  unsure (1)..(410): unsure at all n locations
cgtccatggtttagacatgattggacatgatttgngacttgtatgattcaatttgnggaaaattggatgagggaaaaagtggttttcgaaatctgcactttatgcagaattntgtataagtgcagaanaatgcttgtgtatggctggttgtgaaaagggtagtacatatggggttctggacattttctagcagatcccaacggtcaaaatgtagacttatgtactagagacttccagtaaaattttcgagtcgatccaacggttaacaaattggaacgaagaaaatgttactggggtatttgtatgtgaaaagttgtgaatttgagttgtgttttgggcagagtttcttgctttgccctggtttgcttggttttgtagtccatgatgattggatgtggaattaactggat

SEQ ID NO: 77666 - DNA, 426 bp, Glycine max
  unsure (1)..(426): unsure at all n locations
agcttgcctcanagaggtccaggaaggataattcggncgaatgaaccagttccgctcccgagtatgacaaccaccgctttaggagtgctgaacaccagcagcgcttcgaggccatcaggggttggtcatttctccgggagcgacgcgtccagctcagggacgatgagtatgccaatttccagggggagatagttcgccagcggttggcatcattggttacccccatggccaaattcgacccagacatagtcctcgaattttatgccaatgcttggcctacggaggagggcgtgcgagatatgagatcttgggtgaggggtcagtggatcccgttcgatgcggatgctatcagccagttcctaggatatcctttagtgctggaagagggccaggagtgcgagtatggccagaggaggaaccggtctg

SEQ ID NO: 77667 - DNA, 486 bp, Glycine max
  unsure (1)..(486): unsure at all n locations
ntatatanactntagagcttcaattcattgagagatcctagctagtcgttgtctaacaactngagtgctttacacgtggcatgttatagtgcagagagagagtgtgaggaccataaacatcttttgcaatgtatcttcagagaagtacatcttgctagtttcgctttgtgcgtagagccaacttttagtgtatagttcaaatacaacgttaataacataggacaaaaggaataaagaatgtcaagacaagacaattcanaactttcttcttgtgcgctaagacaagtattgcttactgaaccatgggcattacttttttatgataattcttagttcttgaggattgagtaacaatttcattgcctttggactatgagccaatagttaaaacacttatcttcttgggacaggacactgaggcagtattgtccaatgattgatacttcagctatcgttcaaagtctttcttctcattcttcttgtatt

SEQ ID NO: 77668 - DNA, 428 bp, Glycine max
agcgttaagaaaaagatggcctcagcaaattccttattttcagaaggggaatctatcaatagacctccaatctttaatggagagggttaccactactggaaaacccgaatgcaaatttttatcgaggcaatagatctaaatatctgggaagccattgaaatagggccttatatacccaccacagtagaaagagtttcaatagatggtagttcatcaagtgaaagcataaccatagaaaaacctagagatagatggtctgaagaggatagaaaacgagtacaatacaacctaaaagccaaaaacataataacatctgccctaggaatggatgaatattttagagtttcaaattgcaagagtgctaaggaaatgtgggacactcttcgattaacacatgaaggaactacagatgttaaaagatctaggat

SEQ ID NO: 77669 - DNA, 488 bp, Glycine max
  unsure (1)..(488): unsure at all n locations
tactaagctgtgctattaactaatagaatcttacctgcaccaattgcatagacanttttctagccacccatgacctcatgggtgacaaggtcactgttgtcccagacaataaaatgtggttgtcgtagaaactttgcaagaggttttctccatttctcatctccgcaaattcgggcattggcatactccttggtgtatatttctgaggcaatatttggaccaccaagatacagtatgttctccataggcactccagctgtcaaagtatgcattgtaaagagttgagaatgaggaaagataaaaatagatatactaccaaattaccagcttccattggtcgttatcaaacaaattctagataacaaatagcagtacctagctggtggactatcagtttatatggatttggattctttanagtgagaagtatacttcagaggacaagtacagagtaatcaactattgaaatnttaacgacttccccttga

SEQ ID NO: 77670 - DNA, 413 bp, Glycine max
  unsure (1)..(413): unsure at all n locations
agcttgcagattggtctcgctgtgaaagatcattgttggacgtatagacgcagnnattgattcatcctactaagacgactgagaacattgtggcaaataataaggtgatgatgaaggagaaacccatgctgagactgccattcctgtacgggcaaatttcccaccaacccaacaatatctttactcagccaataacaaacttttctccttacccaccacccagttatccacaaaggccatccctaaatctaccacatagtctgtctaccgcacttccaatgacgaacaccacctttagcacaaaccaaatacaccaaccaagaagtgaattttgcagcgagaaagcctgtagaattcaccccaattccagtgtcctatgctgacttgctcccatatctactagataattcaat

SEQ ID NO: 77671 - DNA, 441 bp, Glycine max
gtagggaatctatccttcctaagatggagccaatccctgtctctctcattaagaactagctcttttcttcctctattgcctttagttgaatacacctttgtttgggtctctatttggttcttaaccctcttatgcatcttctttacaaattctgacctagattccccttctttatgtataaaagaagtgtccagtgggaggagaatgaggtctaacggtgttaggggattgaacccatagacaacctcaaaaggtgactgcttggttggtctatgaacccccctgttgtacgcacattctacatgaggaagatacttatcccaagacttatgagtgcctttcagaagagcccttaaaaggagggataaagacctattcactacctctgttcgcccatcatgttgtggatgacaagaggcagagaacagaagtatacttcct

SEQ ID NO: 77672 - DNA, 375 bp, Glycine max
  unsure (1)..(375): unsure at all n locations
agctgtaacattcaatttcgagcgtctcgacatattacggtactccatcaaacatacgagaaagaaattatggtcgtttgaattttctctgagcttcaacattcaatttcaagcgtctcgatatattacaagactcaatcagacatccgagtaaaacgttattgccggttgaattggctctgacggtcacaattcaatttcgagcgcctcgttatattacgggactcaatcagacatccgagtaaaaaggtattgtcgtgtgaattggctcagagcttgaacatacaatttcgagcgtcccgatatattacgtgactgaatccgacatgcgagtaaaacgttattggcggtngaatagggttagagctttaacat

SEQ ID NO: 77673 - DNA, 327 bp, Glycine max
ttgagcctctagataaacgttactcggatgtcaatgattcttttatatgaccctcaaatgatgttgacttgaccaatcaacacatactttactggagtcgatgaggctaatatatcggacgctgaatgaatgtgaaccttgacaatcaacgacatacttttatcggagttgatcattcgtatatatcgaacgctgaaatgatttgaacttgaccattaaacaaatacgtttactcgatgttgatgagcccgaaatattgaacgctgaattgatgtgaacttgaccattaaacacaataactttatcgatgatgatgatctgaaatac

SEQ ID NO: 77674 - DNA, 414 bp, Glycine max
  unsure (1)..(414): unsure at all n locations
cccacttgcactcgctgtcgatcatgtcctcgctctcggtgaccactctncgcagcagtgacgactttacaaaaggagagttgtcggtattgacgacgaggtatgtctttcttttacctttggcaaattaattgaatgaattccatttcaacgctatgttaggtttccacttcttccctatttatgaaagggacagaaacagaatcaaaatgtatgccatggtgaaaaaggtgacgatgttggcatggagctcgatggtgaacgtggagttgcattgggagagctngaaccatttcccaactctagttgtggctacgtgtaacgccccattcttcataaaataaattaaaaaaattatttataataaatagagttttaggaaaataatgaagtttttgtatctaaatagataag

SEQ ID NO: 77675 - DNA, 487 bp, Glycine max
  unsure (1)..(487): unsure at all n locations
tgagtaagcctctctgagagagaagatatatagcttgagaagtctctatcctcaagcttgagtgagccaccatagggtgactcaatccaagtagagagcctctcatagagagaagataaatagcttgagaagtctctatcctcaagcttgagtgagccaccatagggtgactcaatccaagtagagagcctctctgagagagaagataaattgcttgggaagtctctatcctcaagcttgagtgaaccactgtagaatgagtcaatccaatgagagagcctctctgagagagaagaanaatagctcgggaagtctttatcctcaagcttgagtgagccaccatagagtgagtcaattntgtaaacacatccttgtaaccctactatcactttgtatagtggaagaatcttcatattggagaattataatcggttggccccattactacctttaattactaagtgtctatcttaaacttcacgaagcg

SEQ ID NO: 77676 - DNA, 379 bp, Glycine max
agcttcctctgccgtaaaaaatatattatcgttcagtgtttgtaaaacaattgcgcaatgtcggctgaaaaatatccgtcggggctatttaactaccgatgtcggctattgttttttctattccacccctgaattatatttggatgatgcctattaggaaatgttcggtcggggtcatccggtcatgcttctttttgaggcctcgatctgtcgtctttcctagccggccgacgtcggctagcatttttttcgatcaatatctgtgtgaatcatgtttttttttgccaaagagggctaatgttttcgtggccgacaaaatgagaacatgccagtgtcggtcgaaacacaatcccgcacgaaataccctagccgacctaca

SEQ ID NO: 77677 - DNA, 469 bp, Glycine max
  unsure (1)..(469): unsure at all n locations
tagcgacactatgaaactcagcttcttataagctngaaccatttatcaataaacacaagttgagttttattcagaaaattagagtttatctctnttatcttagtgagagtgattctcctaaattcttgagtgattcaagaacaccctggctgtatcaaaggactttcacaacctttgtgtgttgccctcgctggaaagagtgattctttccttcctatcatctccacccttgttctttcaaaccacaattccagaaaatccacctctgcccaaaattatctcgtgaccataactcccatttcacacactcaaattaagtgattcttgagcctaaattgaatttcaaaacgagacctttcacctcgttttggaatcacctcatttggagccctgtagcttccgttattgccatttctatatttctgtccagccaccacttaacctacgttttaccatcccattcattcat

SEQ ID NO: 77678 - DNA, 417 bp, Glycine max
agcttgagacttaattgctttgttcttcctatattcagtagtcagtagtgcactctcacccatctccattacaagcctttcttcttcctgaacacacatggtcattaattcattgatagaccatttatctttatgtgtgttgtaggaaatcttaaatggcccatattcatgcggaagggtgttcaaaatgaaatgcactaggaaggactcagacatatcaacctctagtttcttaagttgagctgaaatatctcgcattttcatgatgtactcacgcacacctttcacactggtgagccgaagagaagaaaacttcatgatcaaggtgcttgctatagtcttatctgaagtgatgaactggtcatcaatggccttaagcaagtctcggaccttttcatgctggtcaacagaaccacg

SEQ ID NO: 77679 - DNA, 422 bp, Glycine max
  unsure (1)..(422): unsure at all n locations
agcttgtaggattatggggtacccatcacatgtggtactaggtggcggtcgggcgatggtgcaaaacaagttttccacatccacaaatcacgtataaacccaccatcccctgttgcccacctccaactgagctcacgtactcccacgtagcccatatcctcgtttctctcaacaccgggtccccatcaattctcccaagcttccccaacatcctagtaattcaacatccaaattatcacaaactaacaaaccaagcaaaacagggcaaaggcagaaaactctgcccaaaactcaaaccaaaatcacagctttttctcacttaaagaccccagtaacatttcctttngttccaatggttaaccgttggatcgactcgaaacttttcctggaagtctctagtacataagtctacattttgaccg

SEQ ID NO: 77680 - DNA, 473 bp, Glycine max
  unsure (1)..(473): unsure at all n locations
tcttatccaggcacattctttgtggtgaagctccttcttccatggtttattccctagnggatggcgcctcccctcacctcttctcctttgtcttccgctgcatctccatggtggaaaatcaccattgaaagacctcattgaagctcaaagatccagcctccatagaagcttcacaagcaagcttccgtcaagtggtaatcagagcataagagcttcaagtaagtgctccttaaacctccattcatttttttgctttaccttctcttccattgttgtttcttcatttttctccatgtatctcctcacatgtcttatgctaaatgtttttaacatgattctttagagtttccaccgattaaacttgctataggagctagatttgattttctatggttcaaatttcttgttcttgttcttaaagagatgaagcggtgtgcttagcgaacctgtacagctcatcttcttctgaattc

SEQ ID NO: 77681 - DNA, 416 bp, Glycine max
  unsure (1)..(416): unsure at all n locations
agcttagaagtctagctcaaggaggagccacttaattattnttttaatttcatattaataaaaaattgaaatacatcggactaaaaattgtcggaagcttattaatcaagctcacattacgcatatatagacgaattcagatttatttattaaataaattattgttgtgaatgtttattaacaaagaaagcagggctactaggaggattagtatcaggtgctatgatttttaaatctaagagggtttttatgtggcttttacatttctcttgttcgaaatttttatactgaatatctttggtcttaattatcaaatctaggtttataatttctaatttgcatgtaacacatcctttttccattagtttgtaggatcttctcttattatactagttttatttaattcatctatgatc

SEQ ID NO: 77682 - DNA, 421 bp, Glycine max
agcttgtaaagatatcccagctgactgtaagatcaattattctaatcacagcggttataggaaaaaaaattaaatttatgcatgtaaaatcttcaataattaacataagtaagaggataataaattaatattttcatctaaaaataattctacacattaactttgctcatgtaagataaaataaaacattcaataaaattagttgactaataagatttttgttgtgaatagttaactcgtcatatagtaagcaagaaaaaaaattctatctatattaaattattatattcatatataaataaaatttaatgtaacattaataatttaaatgttaacgtcgtttaagtgaataattcatcacaagttaagtgtaaattttgtacttgctttcagaaaaaaattattacttgtgaatttatat

SEQ ID NO: 77683 - DNA, 496 bp, Glycine max
  unsure (1)..(496): unsure at all n locations
acctatgaaactcagctcaaggtttattacagcttctagctaanaaataaacacttattgttatatctgtgtgcaaaagcacaattcactagcaatttctcccttaaaagaaaagggtaaagagtttgcatagtcagcccttcagtatcataaactccatgtgtatgatcttgagaaagaaaaaactaattctaacctggggatcaacaacctttactgtgtcaactggaaggggcttcaaaccaagcatccttactttatcatatcttgataacttcaatttcatacctggacacttttcaaataataagaaattagaaaaacaaaaaacaatataacaaggagaaaacaaaactaaatacaaagaaccaccaccttctcttgtcaatntggttaaagctgctagagtttgaacaganaaagcaagatcgtgacttcctgcatttccacgcaactagaaggaaacaaaatctggcaataatattntagtttccat

SEQ ID NO: 77684 - DNA, 225 bp, Glycine max
  unsure (1)..(225): unsure at all n locations
agcttataaactttatacaagattgaagctctgatanccacttgtagacaagtggcctcagatatcttaagaaaggggggttgaattaagatattccaaatatttcccctaattagaaatctatttcactttttaacccaagtattaattccctttatggaaaatcttctaaaattttattccaatgaaaccattttgatatgaatattaagcccttattaatta

SEQ ID NO: 77685 - DNA, 380 bp, Glycine max
  unsure (1)..(380): unsure at all n locations
tcacccttcgtcccaaacttagtccanacttatcttcttttaacttctcatcctctagccttcaccacttctctcgcacctctatttcccatctccttccttcctttttcgattccagttgctagtcattataggatctccattggagctcatgcttccaagaagatataacatatgtcaacctatatctaaacatgcaatccaacttcatataaatattttcataaaattagtaaatactcaacaaaatatcatgggggattattcgtacttncattatgaggggtcgcttattctctacgaccaccaaaatgggtagtgagtcatataccacctacatctttctcactacctcctctctttgatgatcacgcacttat

SEQ ID NO: 77686 - DNA, 415 bp, Glycine max
  unsure (1)..(415): unsure at all n locations
agcnnttgtgccttgatatattaatttagtgtgctaattatttatatttgataaatatgatagaaattacgtctaaattaatatcaaacttaacattgccgattcattttaaatgtttaccaaacaagcacataatcgtcaaacatctgtgtacaaaatatataaaatttagtttgcatattttttctctattataaaatttgacaaaaattaaaaaacaacgaaactacaaatggtaccgagtacgttaaccatataaaaatattgcatgattgtataattgtgttccagaagtgacaatctaatgtctcttatttcataatttgatcaattcaaattgaaatatatgtttaaatcaaatttaattacaaatcttcctttcaaaacaaaatttagtgctaaccaaaataacaat

SEQ ID NO: 77687 - DNA, 468 bp, Glycine max
  unsure (1)..(468): unsure at all n locations
cttgatggtgtcgagaagaaatcacatggttgtcatcatcaattggttgagaatgtgaatgtatgtatacatgattntgatgatgtcaaagaagaatctaacaaggctacttcaaatgataagcatttgcttcaagaataattcaagattgcttcaacaaacaaagccttgtttcaagattcactaaagaccaagccttgccttaaaacaaagtgctttcaagacatgcaaggctctggtaatcgattaccaggaagtgtaatcgattacccgaagcagggttgagaaatagctgttgaaaaaggttttgaatttgaattttcaacatgtaatcgattaccatatgtctgtaatcgattaccagcaacgaaactttggaaattcaaattcanaagtcataacccttcanattataactgtgtaatcgattacacaaacattgtaatcgattaccagtggaaagttttc

SEQ ID NO: 77688 - DNA, 425 bp, Glycine max
  unsure (1)..(425): unsure at all n locations
agctntaacaagggtacaaagcttctcctgacttatttacctttgtacccttgtggctatttgttgaatccatataattcctaattatgaagatttgcagggtatgttattttaacctgttcattgttcacgaatgtttaaactttaaagtaatccaaatgttntggtgttgtaataagtatttatctttcttaaaactgctgcaagttaatgaaaagaaatagatgttctcatgtagacaaaagaaaaacattgagtaattcaaaacatgttaagcatcgttgtgttttttcctcaatacatgcaatgtgagaaattcaaaacattatgttttactgaattgctatctttcaattttcatgtcaaatagaactttctgtcgattttcccctttgaaattcttgtgttnttaatagtggatattg

SEQ ID NO: 77689 - DNA, 136 bp, Glycine max
  unsure (1)..(136): unsure at all n locations
attaactcacattggcactatattcctaggctcgggttggatgaaatttttagcaaacacttaatatgagaagaaaatcaagaaataaaatanatcgaacttctctcataagttaacattgacttatgcatcttaa

SEQ ID NO: 77690 - DNA, 454 bp, Glycine max
  unsure (1)..(454): unsure at all n locations
agcttctcacancactaccctctatgtcagtgtctagggagcattaaacactaacgagcatcacatactagtagtctgatgagtcgggtcgcttatacggaccaaaatattatctcggatagtatcacaccgatactcttggcgctgctctaaaattgcatacagagactatttctataaataacttcttataagatgtgtccgcttacactctcgtcttatcatatgaaaggagaaagagtcttgcatttgtgagctacgcaaattgtactattcatattcattttagagaacattaagtgacttgtttaatattaaagcggtatctattgaattgtttacatccacacccttggatatgctctgatgaaatgattggtgttgccacaaaaatctctacaattctagagatgcatgagttacccctatcttgtgtattacatcaaatatgcat

SEQ ID NO: 77691 - DNA, 427 bp, Glycine max
  unsure (1)..(427): unsure at all n locations
agctngtgactctnggcaatttctttaaactagtcacttataaagttgtgacttttgaaaaatcttcagaaataagtcacttgaagaattgtgacttttggaaatgtatttttcaaaatcaatcactagtaatcgattaccattaaggtgtaatcgatttaatcgattatacatcaacatatgtgactcttcattttgaattttgaaaattaaaatgtttagaagctctggtaatcaattacaagtattgtgtaatcgattacacaagtttaaaatactttaaaactatttaaacattgttggatcgagtggcctcagaataattaagaagggggggttgaattaattattcttaaacctttactaattaaaaatttactcttctaaggcttttactaagtttttaagagaataaggagtagaagag

SEQ ID NO: 77692 - DNA, 473 bp, Glycine max
  unsure (1)..(473): unsure at all n locations
cctanaattgagaganaatgattattaaacacacaaaatggaagtactaagtatttattacctatacttaacagaaaatacttataacactgcanaataaccatgaattggaagagtttgatacaatttgcacaagttntatacacaaaagttagtcgtattcaccgactaacaactcccccaattttatagttntgcttgtcctcaagaaaaaagagaacaactcacttgtcctcaagtgacaataacatgcagtggctatgtacaaaggtgtatgcaacaaaagttactgattgcatgataagagaatgaagtattatgtactcatcacttgtctttcaaaaggtatgcagttatccagagaaaagaataaaatgtaacatgaacaattagatggagttagacataagacaaatatcaaggaaagtagcttataccacagtctcacgactactggtttactcaagcacaag

SEQ ID NO: 77693 - DNA, 428 bp, Glycine max
  unsure (1)..(428): unsure at all n locations
agcttgcttctacatccatatcatttttatcccatgtaatgtaggccttcttagctttcttatcattaaaagctttcttttcagatttctccattcttttcttgaaaaatggacaatcaaccctcagatgtcctggttgattgcattcataacattttggagtagaggatgaatcttttgccctttttctttgatttgaaattgttcttctttgatttcctctaactcttagaaaattgttgaatcaatttacaaaaagactgagatcatcatcttcgtctattttatttgaatcctctntatcacgtccttcttggattgaagatgaagctntaagagcaattcctttctttttcttaccattctcctcatgctgattcaatctcattaattccatttcatgtcctgcaacttcccaaacaaagtag

SEQ ID NO: 77694 - DNA, 479 bp, Glycine max
  unsure (1)..(479): unsure at all n locations
tgtgtattgctgcattctactaatatatggagttgtccactgctntgcctgagaataacaattgcttgagcacaacaacgctggaggcggtaagggacaatgatctttcaaataaacctgttgtacatgaacaaagattatatcatgcggtgaccgtgtcaaatgaaccagcgaagtcattgcataattgttatactaactatattcaatgtacctgaacaaaatgatttccaaacacgtgaccgacacatatcatgcggtgcccagaagaatcaggtggtggttgacttctaagaggaaaaaatgtcatgctttgttgtcgggacaacgatacaaggaatacgttataccgtgatgcaatcacatatcccatctccgttatatccatccacttgtccacactaacctgaatcaaccaaacatacacatgtaagtaatttaaagtttgttattaaaaaaattaacctanaaacatacct

SEQ ID NO: 77695 - DNA, 113 bp, Glycine max
gatgagaatagactaccacacttggtttggcgtgatggcacaatgcaaatgagatatcccatgtttagtgatgttttggcatttgatgccacatatagaaataataagtatga

SEQ ID NO: 77696 - DNA, 493 bp, Glycine max
  unsure (1)..(493): unsure at all n locations
taagctctgctgcanatatgtacaatagacctcctcaacctcagccgcanaatcaacctcaacatagcaattatgacctctccagcaatagatacaaccctggatggaggaatcaccctaaccttagatggtccagccctcagcaacaacgacagcagcctgctccttccttccaaaatgctgttggcccaagcagaccatacattcctncaccaatccaacaacagcaacaaccccagaaacagccaacagttgaggcccctccacaaccttccctcgaagaacttgtgaggcaaatgactatgcaaaacatgcagtttcagcaagagaccagagcctccattcagagcttaaccaattagatgggacaattggctacccaattgaatcaacaacagtcccagaattcagacaagctgccttctcaagctgtccaaaatcccaaaaatgtcagtgccatttcattgaggtcgggaaagcagtgtcaaggacc

SEQ ID NO: 77697 - DNA, 414 bp, Glycine max
  unsure (1)..(414): unsure at all n locations
agcttctactnttagcttcttttgataagcttctttgtgtaacttatcaaaataagctcttctcagctttttccgaaaagtttcacggttaaaatatggctcatgtgatatgggccgattgaataaatgcttattgaagtaatttaaagagagaattctgaactgaaactttattgaaaatgtgaaaatgtacaaaactgatgagcctctgttagactgttacaacccctatatacaatgtagaagctcttcaaggagagatgtcaattataactgtctaactgacacttgactaacaacagaaagctaaaagcttagagagaaaaatgagagcatatatgatacagttatcaagaaacttatgctcttgcaatgcttaattaaacaaacacatcctatatttctatctagtat

SEQ ID NO: 77698 - DNA, 443 bp, Glycine max
  unsure (1)..(443): unsure at all n locations
cgttctagaagagaactcactngaatatatgaaatnttggatacggtgtgtgtacaaggatgatgaacatgtggcaaatgaggtaatgcaatgtctccccattttcctttttcatgtgacagattttactaacaatgatacaatatgattggatttactttacttaattttcttttcttgttctatacaacatttcaatagctttttcatgccaaatgtactaataggtaatcctacgtgttttgcctcatagtcttttatccaccagcttcatttagaaagcctcttacccaccaaatgaaggcaaatgaacaaaggttaacaaatggtaaatttattgtatatatggtattggctattctttcttactctaactttcatttcattacgtcttcattccaaccatagatactatggaaccttcttcataacaaacaactact

SEQ ID NO: 77699 - DNA, 412 bp, Glycine max
  unsure (1)..(412): unsure at all n locations
agcttcttctctttntctataaaaagacatgtaaaggaaggcaatgatacacacaacaaaagaagaaacgagaggaaacacgcaacaaggaagaaggagtaagaaagtggtggagcccgagcgctgcggagttgtgaccatggatcatatccttcatcatttctcatgttaatcttgtgatctacgtaatgatcggttagtttctccaaattggatgtaatcttcgtacccttatgtatctcatttgatattttatatatgtatggatattttctactcattactggtgatttcattatgttcgtaatgcttgattctatttgatcactagtttcatgataatggattttaggtttgactagaaagtacttttagaatttgaacggaatgaatntactctctacgtcacact

SEQ ID NO: 77700 - DNA, 329 bp, Glycine max
  unsure (1)..(329): unsure at all n locations
ctcagctttctctatcattgtctactaccatgttggnttttttttttttcaancccgccgatcttttatccccaacacgcaccgcccacgcctgtcctggagtataagtcctatcctcccacgactaagatgtcatatatacgcggatcgagaggtactctttgctctactaatagctctaacggaccttcatctttcgtttacaacgcaactaaaccgtctcctcaggtacctaatagacaactctttgaaccctcctattcactttatcctcgctgtatcccctcattccatcccttccactagataatcagtccacattattcgcc

SEQ ID NO: 77701 - DNA, 420 bp, Glycine max
  unsure (1)..(420): unsure at all n locations
agcttctatataagctgaacaattntatcaataaacacaagttgagttttattcagaaaattagagtttatctcttttatcttagtgagagtgattctcctaaattcttgagtgattcaagaacaccctggctgtatcaaaggactttcacaacctttgtgtgttgccctcgctggaaagagtgattctttccttcctttcatcttcacccttgttctttcaaaccataattccagaaaatccacctctgcccagaattatctcgtggccataactcccattttacgcactcaaattaagtgattcttgagcctaaattgaatttcaaaacgagacctttcacctcgttttggaatcacctcatttggagccctgtagcttcagttattgccatttctatatttctgtccagccaccact

SEQ ID NO: 77702 - DNA, 477 bp, Glycine max
  unsure (1)..(477): unsure at all n locations
tcaccaagccatttatggcctaatacaagattctagagcttggtttgaaaaatctaaggctactcttctttaatacaatttcaggtccagcagatgtgatacttcattattcatctacgctgaatccaccactgtgatctacatgttggtgtatgttgatgacattattgtcataggcaacaatcctaatttcattaaatccttgattactaaacttaattctgagttttctttgaaggatttaggcaagctagattattttttgggtattcaagttagacctcaaccttaagtatgtcaaggtcatttggtagagtacacaaaccattaagtatgtgaaggtgaatataaacatgtaaagaatgaactgctcttcctttntacatattgaaatacatgacanaatctttttaaattttgtgatatagaagtcattcaagagccatagtaggtctttttgctttgaaagttttctaa

SEQ ID NO: 77703 - DNA, 397 bp, Glycine max
agcttgactaaacatacactacatcatgatacctgtcattgagaaacatggcttgccctcaggatataatcacaagatcatattctataccttcacgtgagccgcatgttcataacaaagcatctccagtgcgacacaacatctctcacacacagtccattacccaccatcacatagcccgtcacagtgatcattgcacagacgtggtgcaacatatatactaagactcaatcctatattgaatgtggtatcttatcagagaaaaataacgctagggcacctagggatacataggaaaatacaccacacaatgggtaagccgggcactcttattaaaagatatcataaggtgatctattgtgcgtattctgtgtagcgtgattgctctatccatatg

SEQ ID NO: 77704 - DNA, 455 bp, Glycine max
  unsure (1)..(455): unsure at all n locations
tgatcagatgctgaatatgtggatcagcacctactatcgaagaccgatatgcacgcacttgcattaggcactgcgctttatcgaggagtaactgccgacattgagttgcttcagcggtagcaagacgtaattcgggtgcaccatcgactatgtcgtatcagacacatagatcatctttaactccttactcagatncaccggcgaatggacggacgactaaggacttcgccgactcatgattatgaatcccacagagcaacttcgccgtacaaccgtgccctccacgcactggtgtcccacgaagcctggagggacaaccacagttcctactcgcggtggcttttataacgaatactctatgtctacactcgtacgtaccactgctttcgcacccagttaacacagatgaacttcttactctgctaccggactgtgtgtcagagctcataatcact

SEQ ID NO: 77705 - DNA, 417 bp, Glycine max
agcttgaagcagtgaattcaagacttaactctggtattgatgcgtttcctcctaaagatgtaagtcttaaacatcccttgctttttacattgaatttctgattgagttaaaaactgatttttatccctcttgttttaaattcttatgttcctgagatggctgttagggtttgaatcatcttttgtagatgccattcatgtcatcagagtgttttatttgcaaatctgttcatttggtacttgaattttttttgggttgaatcttcagttgcttcttttcttcaaacgactggagtgcttcttaatgcttttcagagctggttaattcagtaatactaattcacgaaataatatatatggttgaggacgataacagtgtgtagaaattaggacattctgttaggtaaataaaaagttc

SEQ ID NO: 77706 - DNA, 467 bp, Glycine max
  unsure (1)..(467): unsure at all n locations
taagcgtaatttcacttgggcttaagtgccataactagagaataatgatttgtactctggaattcacgcttaagcaataaataaagacgcttaagcgccaaaacctgttttaacttgaataatatggnttctaaatgaatttatcacattcctttgtatcgtatgatctctaatgtaatgaatgttgttgacttatcattattatcacgtaatgaactttgttttatgaactaatataagatgattacaatatgttatgtttgagtaactatatgtacatgaggatttataattacaaatgattgaagtgatgatacatgtatatgtcttaattgttgtagtatgaaatacccttattttgtattgaaaaagattattgttgaatgcataattgaataaactacaatgttttgataaagaaatgagatgatgctatatgtaatgtgacattgatgaanagtgtgatg

SEQ ID NO: 77707 - DNA, 409 bp, Glycine max
  unsure (1)..(409): unsure at all n locations
agctngttatgctggtaaaatttatcactgattgtatgtgaatcagaaaagtaaaagttatatatatccatatgttattttattttgacattttcttcctcctccttcctcagccacggaattcttctccatcttgtgagagcagaaggaagcagatttctttatccaaagcctatatatacattgataacatatacaaatgaaatctcagaacagattttgaaggaaaaagtaaggaggatgggtgaaggaatgaatacttacgtcggaagcattgctgataaattcgccgattaatgtttgtgagaatgaattctccactgttctgttcacgctgaatacacaaccattatactcccctnattaatttttcaagtgtctaaattattgtaatatgaatttatggatg

SEQ ID NO: 77708 - DNA, 477 bp, Glycine max
  unsure (1)..(477): unsure at all n locations
tcanaaacanatataagggactcaacaatntactaaattgaataatataaggaaaaaaatggacgataagttactaggtgcaaaatgaaggaaattgaaaaaccaaatgaaagagggaaaaaagaaaggaacaaaataaatacaaaagggaagtgaaggattgttcatagtcatactggtggatcgggaggacggtgactgattggggaatgtctacgacaagcaggagcgcaaatggcatcaaatcgatgctttgagttttgaacaatttgatgaaaatgatctctgattgtacgagttagggttacacatagataatgacatatatacttatagaaataaaaaatatttattattaatattatatgcacatggngttgggttgggctaattgggtttgaaacctattaactcgcaacccaacccaattataattggtttgngggaattgccatcaacaacccctattttacttat

SEQ ID NO: 77709 - DNA, 401 bp, Glycine max
agcttgtaatcgattacacacatacagtaatcgattaccagagcacattttcaaaaaatattctcaacagtcacatctttttatgtggttcttgaatggctatcaaaggcctatatatatatgtgacttgagacacgaatttaagaagagtttttggagaacaaaaaggtcttatcctattaaaaagcaaatcgtgttatcctcttacaaattccttggccaaattacttgtgattcaataaggaattatttgagtgctcaaattgttcagtctatctctttcaagagagatttcttcttttcttcttcttcattctgaaaagggattaagagaccgagggtctcctgttgtgaaagaattctaaacacaaaggaagggtggtccttgtgtgtttagaact

SEQ ID NO: 77710 - DNA, 467 bp, Glycine max
  unsure (1)..(467): unsure at all n locations
tctcttggaccttaggcaaaccttcaactcatccttcaagatcaaattgtctactcgtgattggtccctttcctctctccggagcttaagctcgttgttactgccccacagagccccttggaatttgttccgaccgtgttcttccctacaagccctcttggtttctcgttccaaggctttggtggtagccacatttacatctctcagttcggtattctcctttcggattctcagagctgctgatttgaacctttttttaactgtttgggcttgctcgagttctgccctaagggcctacacctcttcgtcttccttcggtgcctcaacttcctctcttttagcagttctcaaacttggaagccaatccaaaccttgcacctgngctnttaaccacttacgatagccaccgatgggcccattgttactgcccctgagttccttgtccttctttttgcaacacctccatg

SEQ ID NO: 77711 - DNA, 422 bp, Glycine max
agcttgcagctcttaatctctcaatagtttgctgcaatggtttgccgtttgcaaattccgctctgaacattacttgcattgctcaggtatacaccaatattgtagtgtgtttggtatttatattttcgctcaaacgtgatcaaggtcattatactttctagtgatgaattttttttcaaaattaagaaaacatgcatgtgaatgcagggacagatctatgttcctttttaatatatactatatttaaaaattataataattctttttatttaaaaatttgactgtaggaataaagatatttaagtactttatttttatttttcataaaatggtaattatctttttctagtttgatggtaaggataaatatttgtaaccctatgaatatgtaaacctttgatttcttcgtgatgcgctctctc

SEQ ID NO: 77712 - DNA, 448 bp, Glycine max
  unsure (1)..(448): unsure at all n locations
tcgtgacatctncatgtacaggtattagcttatttttcaattcattcagatcacttcaacaactttcatcttgttatgagccagctagtgataccccagatgatgaatcttggtgatttgatcaactttttatgtaaaaaaattagttttacactgaattttcatgtggagcttaaagtttcttttctttttctgtgttggagaccttaattagntttttcagatctagaanaaagtagatgcaataattctttgattagttttatttttgaaaggccaaagaaaataatattattaagcaactattgaactaaagcacaagatgataattctttgattagtttgagaaatttgttgattnttttctcctattggccggattaatgcaattaatatttcataaagtttggtctttggactcaaacaagcaacgttgtgagatactcag

SEQ ID NO: 77713 - DNA, 423 bp, Glycine max
  unsure (1)..(423): unsure at all n locations
agctcnagctatcgcatgctataggtcatatccttttgactctccaattcaaatactcaaagcaaagaggagaaagaataaggaaatcgtgtgtaactttatatctatataacatttctaaaaaatatctatcactgctctctgtttttntagctaaggataatctagctttcctataatgatgggacactaaactccctgaataataaaaaaaagacctcttcattacagggggcaactatggaggttcgaataagatataaatgaaatttatattcactntgaaattgtagtaaaataatgcatatttcacacttgtttgtaggtcactatgttccataacttgcacaacttattgttcacaccaagaccaaattcaatctcaatggaatagcagtgagtagttgagaagggaaaatctaa

SEQ ID NO: 77714 - DNA, 357 bp, Glycine max
  unsure (1)..(357): unsure at all n locations
atgatatattcacaaacatatttgacttttttattcgattgaaactctggagctgcagagttcagatgtatatagctaagcaaataagttgggtacggaagaatgagcctaaagctacatagtcaatagaacaagcagatattaatttattccacacagggcaattatagttgacaatgcacgggcccgtctaaattttgtgggtaaaactaataccgacaaacatcattatatgaatcgaataattagttctcatacttatttaanaactgggtagcgtgatatggtatggatacgggaacaattaacattaccaatggcaaattcagtgctggcatgcacgatgagtctgaaact

SEQ ID NO: 77715 - DNA, 468 bp, Glycine max
  unsure (1)..(468): unsure at all n locations
cttcgataaatatcactgcgcaaataaatcacaactctaaacaccatattgtatgaaatcaccataaatgatacgaaaataaacatttacacgtaaaaatcctgtaacagctagacagcaggcataacacctttgaacaattaaacaacggaggcacttgacctacaaacaactattagttactaatactgcagcataaaagataatgacataaactaagatcaataaagcgagcggaagagaacatattatacccttcatttatataattntatttaatagtaacagatagagtgagatataacaatatagcatattctcgttaaaaaaataatatataacatatttatgcaagtagtcaagccaaagcttatagaagacaacctcaatattccgaacctgttttacctcaacctttgatctgtgagaaaaaaactcgctagtcttcatctttttgaccttgcaact

SEQ ID NO: 77716 - DNA, 422 bp, Glycine max
  unsure (1)..(422): unsure at all n locations
agcttgatgcacatttggagagggtaatgaaaccacgatatgatgcgcttcatgagagggtgggatcaatgggaaatagagatcttatgaaaagaaaggaggaaagaggaatgatagtgttcctaaacaaaaccgaattgatggtataaactcaacattccctccatttaaaggaaaagaatgatccggaggcctacgttgagtgggagatgaaaataaagcatgttttctcatgccacaactatgaggaggaccagaaagtgaagcttgccgccacggagntttccgactatgctcttgtgtggtggaacaagctacaaaaggagagagcaagaaatgaagagccaatggttgatacatggacggagatgaaaaagatcatgangaagcggtatgttccggctagttacttcagggacttg

SEQ ID NO: 77717 - DNA, 481 bp, Glycine max
  unsure (1)..(481): unsure at all n locations
tgagatgaggaagtgttgaagggtgaaacttcctgctnttattgntgaccacagtgtggtacctggagatatgtcgcggnggtcaggagaccttggggacgtcaggtggggtgctattgcccaaaaccaaacttgaccaatcccgacccaacccgggcatagtcggtcaatgagaacctgtgatgtacctaaacaggcgagctcctggcagtcaacanataataggaacaaagaccacaaagcaaggaggcttgtggtggctggccagctgtgaactttgatngatatgtgggttatggcctctggtaattgattaccaagggtaggtaatcgattacaaggcttanaattgaagacatgaggctaagatggtctctggtaatcgattaccacggngtgtaatcgattaccaggcttgataacgaggtcaggaagctaatgaagcccctggtaatcgattacccacgggtgtaatcgatta

SEQ ID NO: 77718 - DNA, 430 bp, Glycine max
  unsure (1)..(430): unsure at all n locations
agcttttctntgtgggttgatgaactctgttgcacagaatgttatgatcgctggctgacatattctcaattagctcagntgcctcttcaggggtcttcagctttatttttccccctactgaagcatctagcaattgcttggtttgtggtctcaacccatctataaacatattcaattgaattggctcacagaacctatgggtgggggtctttctcaataagcctctaaacctctccaacgcttcactcagggactggtcacggaactgatgaaatgaagagattgcagctttcccttttgcagtctttgactctaggaaatatttcttcagaaacttttcaacaacttcttcccaggtttccaaactgttacccttaaatgagtggagccacctttgggcttctcctgccaaggaaaatgaaaatagact

SEQ ID NO: 77719 - DNA, 479 bp, Glycine max
  unsure (1)..(479): unsure at all n locations
tactaagcttctatccaggcaattctaggtggtgaagctccttcttccttggcttattctctagtggatggtgcctcccctatcctcttctcctttgccttccgctgcatctccatggtgaanaatcaccattgaaggacctcattgaagctcaaagatccagcctncatagaaactccacaagcaagcttccatcaagtggtaatcagagcataagagcttcaagtaggtgcttcttaaacctccattaatnntttgctntaccttctcttccattggtggttcttcattnttctccatgtatctcctcacatgtcttgtgctaaattttgttaacatgattctttagagtttccaccgattaaacttgctatagaaacaagaattgattttctatggttcaaatttcttgtttntgttcttgaaccatgaattgtgttgagtttaggttcctttgagttntgtcttggatatttttg

SEQ ID NO: 77720 - DNA, 419 bp, Glycine max
  unsure (1)..(419): unsure at all n locations
agctntagctngaggnggagtgttgttgacatttaggaatttaatgtataatgatgtgataggatattataagtgttttactgtgtaatgttgcaagaattatttattgttgtgttgtgtgtatgaccacacaacctttatttataatgagtaaataagatcaatattgattacataggatcattctaataatgactaaatcactaattactatctaatcataataaaagagtatgtaattttaacactccccctcaagctcgagcatatacgtcatatgaatcaatcttgttacagatgtggtcaacttgatagaaaataaaggcagttcgagtcatgtggttgtgctggataaacatggctcggcggcagtagccagcaaagccccaccatgataatggagaccagtgtgacgcttg

SEQ ID NO: 77721 - DNA, 300 bp, Glycine max
  unsure (1)..(300): unsure at all n locations
tatgcatggaanatggtaattatgaaatgagatgcccgaagaaacactatttcctagttaaccatgcattaggtaccatgttcaattattttgtttttgagtgaaacgggtttatgatcccaacatggttggctcgtggtgcctaacacatgaaactaagaatgtagtgtgaagtttcacgctttccccttttttgtttttgttttgtagaggaaaacgcaaggatgagcaaacatgaaaacaaatggtatgcaattttgcagatcaaaaagtttgttgaacgcatatgcatgatgatgc

SEQ ID NO: 77722 - DNA, 415 bp, Glycine max
  unsure (1)..(415): unsure at all n locations
agcttctcaaggaagctacctagtctataaatagaagcatgtgtaacacttgttgtaactntgatgaatgaaagttttatgagatacacttcaaagttccacttctttccctcttttattccttcaatttcgtgctccccccttctctctttcttttcctccattaaagcatcctcttcaagcttcttatccaaggcaattcttggtggtgaagctccttcttccttggcttattccctagtggatggtgcctcccctatcctcttctcctttgccttccgctgcatctccatggtgaaaaatcaccattgaaggacctcattgaagctcaaagatccagcctccatagaagctccacaagcaagcttccatcaagtggtgatcagagcacaagagcttcaagtaggtgctcctt

SEQ ID NO: 77723 - DNA, 479 bp, Glycine max
  unsure (1)..(479): unsure at all n locations
tatgcgcatatttccttacaaacgttctcttgcacaagacattctattaaccgtaaaaaaatgcacccatatacaatcaaggcagcttcgttacctagattatgtacacgtacttccaaggtgtatttgttacttacatcacacacctacttggctaaattcacatacatgcatactcaaagcattttggggtaccaaaaattgcacatgtgcacatcttggtatttctaatacctatacatacacaaacttcatgatgaatcttgactatctacacaataaggtgctacattntatgctcttttcaagtttttgctacctaaagccgcatgcaaattcaagtatattttcctttgctgactaaaattgtattcaaattaagaggtatacattntttggtaatgtatcttctttacataacatgcaacatatttatgtatatntttttgtgagacattttgactaccaaaaattatatg

SEQ ID NO: 77724 - DNA, 421 bp, Glycine max
agcttcatcctcagatccctcttgttgggctgggctcaatttagacaaccctcctaggtttagactaacatcaaactaagcttcatcctcaaatccctcttgttggactagacttaggtttaatagcttacaaaattttagcctaatttagcctaagctttgtccttagatccctcttgttggtttagacttggcccaaacaacattattgtaacaacatacttaaaacaaaaacttaatccgcagatccctcttgtaagactaagcttcaattctgcttcattcaagttctaaggaaacaatacatttcccaatgttaaaatcacctaactaggcacacaaatggttgatcagaccaagagcatacaaaacttaagcactgaagaagcattgaacacaagaaacaaaatcaattagatat

SEQ ID NO: 77725 - DNA, 461 bp, Glycine max
  unsure (1)..(461): unsure at all n locations
tcagcttaggctattcaattgcttcagaatgtngcacagaagggcataggtctatgtggtggtcgacagaggagcatataccacagagtttggcgacaggtgcagattttttattcatggccagttgggttaccagattaaccaaggcatctagtttaccttcaagcttcttagtctcggctgatgaagatgaattcgtggctgcttcatgcactcctctaatgacaatggcatcacttctagcactaaactgctaggagtttgaagccatcttctcaattaaatttctggcttcagcaggggtcatgtctccaagggctccaccactagcagcatctatcatacttctctccatgttactgagtccttcataaaaatattggagaagaagctgctcagaaatctggtagtgagggcaactggcacacaatttcttgaatctttcccaatactcatacatg

SEQ ID NO: 77726 - DNA, 423 bp, Glycine max
agcttgcttgtgaagattctatggaggctggatctttgagctccaatgaggtccttcaatggtgatttttcaccatggagatgcagcagaaggcaaaggagaagaggagaggggaggcaccatccactagggaataagccaaggaagaaggagcttcaccaccaagaattgccttggataagaagcttgaagaggatgctttaatggaggaaaagaaagagagaaggggggagcacgaaattgaaggaataaaagagggaaagaagtggaactttgaagtgtatcttataagactttcattcatcaaagttacaacaagtgttacacatgcttctatttatagactaggtagcttccttgagaagctttcttaagaaaacttccttgagaagctttcttaagaaaacttccttgagaagtttc

SEQ ID NO: 77727 - DNA, 422 bp, Glycine max
  unsure (1)..(422): unsure at all n locations
ntactatgcaaagaataaccaaggagaaatccttcatctgacttagcatcaaatnttcctaagttatcttttccattggttaatacaaaacacttgcaaccaaagacatgaagatgtgagatgtttgggttcctaccattgaacaggtcatatggagttttctttaagatgggtcttattaaagccctattcatgatataacatgcagtattaacgacttcagcccaaanatattttcgaagaggagtatcattcaataaggttctagcaatttcttccaaagacttatttttcctttgaacaactccattttgttgaggggttctaggtgcagaanaattatgttcaatgccatgcttttcacanaataaatcanattctttatttttaaactcatctgcatgagcactactaatagatat

SEQ ID NO: 77728 - DNA, 425 bp, Glycine max
agcttcattaagaggcttcctcaagaagctttctcgtggcttctttgagaagctttcttaagaggcttctttgagaagctaaagcttatctacccacacccctctattaactaaattaacctccttgaaaataattacggataaaaataacacaacaaatataatcaaacatcaaacataattactaataatatatagatatatatcaaggtgttacaactctcccactcttttagaaatttcatcctcgaaatttacgttactcaaacaaggatggataagcttctcgcatttgactttctaattcccacatgacatcatctcctgatgcacctccccagatcaccttgaccaacagaatctctttccctcttaggtgttttgtttgtcgtcataccctaatttcgtctagggaccattctttg

SEQ ID NO: 77729 - DNA, 461 bp, Glycine max
  unsure (1)..(461): unsure at all n locations
cgcttctacaatgattaccttgcatctttacatatagtgatgactcacttggactcttgaggaatctatgctcgacgaggtatttgtctattntgttgttccatgcttggggagcttgtttgagaccataaagtgcctttttcaagtgatatactttgtcttcttctccttgaactttgtatccttgtgggtgctccacgtagacttattcttcaatctctccattcaagaaagctgattttacatctagctgatagacttgtagctntaactgtgcaactaaggctagtatagttctaattgtttccatgcgcacaacgggagcaaatgtctcaatgaaattaactcttggcagttgtaaatagcctttagcgacaagtcgtgctttgtgtttctggattgttccatcctcattatantttaatttgtaaacccatttcaggccaatgatctccttatct

SEQ ID NO: 77730 - DNA, 404 bp, Glycine max
agcttgtatattatcaaatcttagactcactggcacaattattggaaggcaaagaatatcataagatgcaaaatcctactgtagaaacaaatgatcatccacatgcccctgcagattctaatatttacacccaaccagaagatgtgagttctgattctgcagcaagagaactaagaccaccaaaaatgggatactgtaaaatttgtgaggttcatctaccctattgcaaaacattggaaatgcataaccaagaaaatagtcatcaaagaatgttgaaactatatgaggaaatacagagactaaaaacttgaggttccagtactaacacccaaactacagatggatgttctaaagctgaacaaaggatagatattctcacccatcagtcagggacaactcatctg

SEQ ID NO: 77731 - DNA, 471 bp, Glycine max
  unsure (1)..(471): unsure at all n locations
ngaggaatgtagcttanaccacagtctaatggctactatttcactctagcacaagttnttaaaggagcttgaggtggtatctgagtagatgcaggaggaatagctggagtctgaatgggaggtactagagctgtggaagaagaaggagttgttgtctctggtgatgctaaagtagtggggacctctaatctcttacccctggccttccttggccctctaaatgtcactattggatcatctagattctaacagttcttcttaatatatgccaagttaatggcagagcttatgctctccagggatctagaatctgattggactcctctggccttgcatagagctgcaatcaaggcagggaatcgaagtctggatgaatcatgttgtgcagtaagaaagatctggtgggagatgaggtaccccatattcatatccatctttataatgatgccataaattaatttggctttgtct

SEQ ID NO: 77732 - DNA, 414 bp, Glycine max
  unsure (1)..(414): unsure at all n locations
agcttgaggganaacttgatgccttggttaaccttgtaactcagcttgccatgaattangaatctgcacctggtgcaagagtctgtggtctatgttcttctagagatcaccatacagatctctgtccttctttgcagcaatctggagtcaatgagcaatctgaagcttatgctgcaaaaatttataatagaccctctcaacagcaaaaccaacaacatcagaataattatgatctttcaagcaacagatacaatccaggttggaggaatcatccaaatctgagataggcaagtcctctacaacaacaacaacaacatgtccctcctttccagaatgttgctggtcaaagcaagccatatgttcctcctccaatgcagcaacaatagcaacaacaacaaagacaacaagcaacta

SEQ ID NO: 77733 - DNA, 428 bp, Glycine max
  unsure (1)..(428): unsure at all n locations
tcacctcactgctngaggtagtgcacaatctgcttccagaggacaacacgctgcctaaaacttactataaggcaaaaaagatactatgtcccatgggtttggagtatcaaaagattcatgcttgccccaatgattgcatactctacaagcatcaattctaagaaatgtccaaatgccctatctgtgggacttcatggtacaaaatcaaggatgaagaggaaagcagttatgatgaaaactcaaacaagggcccgccagcgaaggttttgtggtatcatccaatcattccaaggtttaagcgtctttttgctaatgaggatgacgcanaagaccttacatggcatgcaaatggaaggatttctgatggactggtccgtcatccagctgattactcacagtggaagaagatngatggtttgtatccggat

SEQ ID NO: 77734 - DNA, 337 bp, Glycine max
agacttgcgagaaacttgccgctggagctgacccattaactgccctaactcttttagactggtgatgcctaggctcttaaccttgacttgataaaacctctttttaaacgaacgtgcctgacttgagcccatgttttactaacgcgaaacacaaatcagggcgaattagaactccgacatttatcatgggaggaacggatgaatgcatgaagaaatgcataaaacacatatgcgacttatgaatacaggagcccgagaaattgcctacttcttagatacaacgtcttggggtagcaaagagcctgacgtatgtatttaagaatgtggcatggaccct

SEQ ID NO: 77735 - DNA, 370 bp, Glycine max
  unsure (1)..(370): unsure at all n locations
gtttgttaggagggcaaaaatactactttcagtgtggtagttgggcaccttatcccaaaaggaggcacatcataagcccatgctttaccattgatgctctaaagattgacactacaccttatcgattggtaggtgtctgcatagataatcataatcccttatattatttattggtgactgcttatctttagtcaccgtgttccttctaacctaggttctgccaccagaggcttcaatttatttaacttgctacaacaaatatatgactgtatatcgtggtagtggtatgcatcacagatggatgatcaccatgaagtgtgagctatcatgtgttgctgacgcgtggatccattatgtangtgactgtcat

SEQ ID NO: 77736 - DNA, 309 bp, Glycine max
agatgctctggaggcatgctgccgcatgcaagctatatgtgaagaactcgtctagcgcacttactgcactacgcgcgctcatatttagaggatgaacactcatcctcttgctgaactacctgtggctaatcgaggctgaatcgctaagcccaggtgacttaaccatttttctctgtgagagcctcatgttagacactgggccacatatatcccaagaaggggggccgtattaagacttccgccaccatcttacccgaaaaagcagactactatgttgatattgaaactatatattcccttaacaatgaa

SEQ ID NO: 77737 - DNA, 476 bp, Glycine max
  unsure (1)..(476): unsure at all n locations
gcttattcttcatctccatctagccccaagatctcagtanaactccttattagctttcgattgtcccttcatgcaaagntntctttctcttatttctaaccttcatttctgattcaccccactatccattattctgctataatagaagtttgaagatggctgttctgcaccataatctgggattgataatgctngagttgtcaccacttgattcttggattttgaacttttcagatttattgtttagtgtttacaactttttaaaaggaacattaaggatcaagactctgttgtgtgtaataaaactttctcgtggaattacattgcatttcttccaaactctnttatcggaactccttataaaaaagaaatcaatttgtgaccttgaggtattactcttataagcaattagatgtttctgtcacttctgaaaaccaagtgttataatattgaaatcatataccattgcgaaatca

SEQ ID NO: 77738 - DNA, 445 bp, Glycine max
  unsure (1)..(445): unsure at all n locations
agcttcttatctaaggctcatcttggtggcgaagctncttcttccatgggcnnttattccctagtgggatgggcgccctccttctcaccctatttctccttttgtcttcccgcttgcatctcccatgggtggaaaaatcacccattgaaaggaccctcatttgaagctcaaagatccagcctncataanaagcccacaagcaagcttncatcaatacctctggtacttcatcactatttacataatgaaaatatttatatatntttgccgactaaaaaaaaccatgcagatgatagcaacacactaacagcagtaccagatatcacacagataacagcatcagacaataattccaaccaagaggaaatcatgactacaaatagcggaggcaataacagaccaaaacgcaacacacacaggcccaagtacctcagtgaaatggcta

SEQ ID NO: 77739 - DNA, 453 bp, Glycine max
  unsure (1)..(453): unsure at all n locations
gcacacaacacanagaatagtntgcactagaattagaaggtacggtcaaaagagtattctttatgaaatatttttttttatgagtcattgaactataaagtatcaccatcgctaagaacaagaatctcaaacaaccatactctttatgcaattaagggaaaacaccatactacaagtatacatagaattataaggttcttataataagtatacaacttacatataagaagtaagaattaaatagttaataaggatgtattaaggaatcataaacttcaactactacattcacgactacgcacaaaataaagggagttaagtagtcatgcgtttacacatcaagaaagacacactcatccaagacatatatattgttcanaagattntcacaacactaatccacacatcaagataganataagtntattaacaacatacatgcaggaagataag

SEQ ID NO: 77740 - DNA, 429 bp, Glycine max
  unsure (1)..(429): unsure at all n locations
agctngaaggcaaactagatgcattggttaacttggtaacccaaatggccttgaatcagaaatctgtatctgtcgcaagagtctgtggtttatgctcctctgctgaccactatacaaacctctgctcttccatgcagcaacctggagtaattgaacagcctgaagcttatgctgcaaacatttacaatagaccttctcaacctcagcaacaaaatcaaccacagaagaacaattatgacctctccagcaacagatacaaccctggatggaggaatcaccctaatctcatatggtctagccctcaacaacaacaacaacagcctgctccttccttccaaaatgctgctggcccaagcagaccatacatttctccaccaatccaacaacagcaacaaccccaaaaacagaaaatagttgaggctcctccgt

SEQ ID NO: 77741 - DNA, 479 bp, Glycine max
  unsure (1)..(479): unsure at all n locations
ntccacatccacaatgcgcgcataaacccaccatccnctgttgcccacctccaactgagctcacgtactcccacgtagcccatctcctcgtttctctcaacaccgggtccccatcaatcctctcaagcttccacaacatccaagcaaaacaacgttcaaacagcacaagctatcacagccaagcaaaacagagcagaggcaganaactctgctcaacacatcaaccaaaatcacagctnttctcacgtaaagaccacagtaacaattccttcgatccaattcgttaaccgttggatcgactccaaaattttactggaagtctatagtgtataagcctgcattttgaccgttgggatatactagcaaacatccagaactcattctgcactagactntccacagccaaccacacacaagcatttttctgcacttgtgcaaaattctgctgcacaatttcacagcaaaaactctgcataagt

SEQ ID NO: 77742 - DNA, 335 bp, Glycine max
acatgctggatgatctaattctatgactttgttcgaggagtggtagactgttctcgacacaggcaaacgaacacaggacaagctcgcggctattatgactccaacaattgagggtgttggcaacattgttctaaacagagacgatgagaaggcaacactaattaaaaatgtgttgtttttcctatgaggaaatgcaacttcatgagtgttggacaactagctgattttttttcattatgaaccatgactcatggattttatttgatgcacgaccgagattggtattaagttctcctctctcagagaataaaacctttcaggccaacataaaaaca

SEQ ID NO: 77743 - DNA, 450 bp, Glycine max
  unsure (1)..(450): unsure at all n locations
tgccttcattaattaagtgatagtctttctagcactacttgttgagcaaaacaatttacactttatctaaatcctttgaatacactagccatcttcgatcatatttttctccatttggcgttacgtgctcgggatgaaatgaagaaaaatgcctattattttcatctttttatcattatatctatgtggaccattctccacaattaaatctatgaagttccatcaacatttntccattgtcttggatcataaatattattagaagcttcattcgatgtactattgagctccttatttgtttctaaactataagctcggatattgccgtgactcatttgctcgtgactacgatcaggactattcatatcggtaagatgctctacttcttgaatgttttcattatcagcattttgctttaccgtattaatattagttagaagttttagagga

SEQ ID NO: 77744 - DNA, 350 bp, Glycine max
  unsure (1)..(350): unsure at all n locations
agcttataagcgtgggtctgggagacaaatgtcaagtggtcgcgatatgcgaagatgatgttccgagtacattgganttggtacgaccatgccctcctgatttccaactgggaaattggcgagtggaggaacgctccggcatttacgcaacgagcataatgtaaacctttatggttttaaaagctctatagttgggcctaggctttaaagttttttccttttgttgaggctttgtgtcttttgtttttgaatttataatacaaggatctttcttcatctgttcctacgtctctacccattctcattcatttgcatgtttacttctttttctgaaacggcagattcgatga

SEQ ID NO: 77745 - DNA, 439 bp, Glycine max
  unsure (1)..(439): unsure at all n locations
ntntagctattcattggtggtatttgatctncctttggtgctctaaattgtgggaatgtgctcaaatatgtggggcaantttggttggttttcttgcttggttgggttgaaatggggggttgtatgagatggccctangcctataatgtattttgaagcaatggggcatgccacattggccccggtctcttgctattgatgccttaacccccccccaccaagtgttcggtgaaatgcctcaatggcattaacgcgtgatttttgtaaggaaacaacctattggacaatttggtttgcacatggtntatattttttgggacatgtgttcaagttcctaagggccttaagtaatggtccacaccttttctatgcctatgaaccaaagtttttattccagagaacacaagaatgggtgcatattgggtgaagctaccctttt

SEQ ID NO: 77746 - DNA, 404 bp, Glycine max
  unsure (1)..(404): unsure at all n locations
agctntatctgaagaactcgccaagcgcacttactgcactaagcgagttcatcttttgaggatgaacactcatcctcttgctgaactacctgtggctaagcgaggctgaatcgctaagcccaggtaacttaaccatttttttttgtgatagccacatgttagacaagtggcctcagatatcttaagaaggggggttgaattaagatatcccaaactacttccccaattaaaaatctatttatctttttattcaaattataaattcccttaacaatgaacttcttaaatattgattcaaataaaacaagttgaatatgaatactaaagcataataaataaggagtttaagggaagagnagtgcaactcatattatactggtcgccacaccttgtgctacgtcagt

SEQ ID NO: 77747 - DNA, 498 bp, Glycine max
  unsure (1)..(498): unsure at all n locations
ctttagcgacctatgaatctcagcttaacatcagaccacttccagggtgctgngaactacttcacatggattgatggtgcctatgcaggttgaaagccttggaggaaagaggtatgcctatgttgttgtggatgatttctccagatttacctgngtcaactttatcaaagagaaatcaaaaacctttgaagtattcaaagaattgagtctaagacttcaaagagaaaaggactgtgtcatcaagagaatcaggagtgaccatggcagagaatttgaaaacagcaggttcactgaattctgcacatctgaaggcatcactcatgagttctctgcagccattacaccacaacagaatggcatagttgaaaggaaaaacaggactntgcaagaggctgctagggtcatgcttcatgccaaagaacttccctataatctctgggctgaagccatgaacacagcatgctacatccacaacagagtcacacttagaagaggcac

SEQ ID NO: 77748 - DNA, 423 bp, Glycine max
  unsure (1)..(423): unsure at all n locations
agctngtatgggtgagttataaattataatacctcagcttgtttcaaaagatcatgtttactccgtcgcacgttgagcaagttttgcacagcttgcccctctatggacatcctcacccgactagctcttactctggcctgaactcgaaccaatgcctgcatgcaccttaatgtccccgctgtctgcttcctcacctgtctccccccgaacaagtgcttgaatcctcaccactgccttcaatgccctcaaagcccttcttgcctgcaatcaccacacaagtgatgtcgaaatataaggttggtctagtggtaaaggccgaacgcagaaggaaaagggggagaggccatatgttagaaactaacaatcctagcaattaatatttgtctataaaaaaaaatagtgaatgtaagatggtataccaag

SEQ ID NO: 77749 - DNA, 479 bp, Glycine max
  unsure (1)..(479): unsure at all n locations
nngctaacccatggaagctcctaatatctcccacacttttggggtgggccattcttggatggccttgattttctcagggtccagttggaccccatttctgccaactacaaaacctaagaagactatattatctacacaaaaggtacacttctctatatttgcatagagggtgtttttcctaaggactgaaagaacttgcctgagatgtcctaagtgatcatctaggctcctactgtacactaaaatatcatcaaaataaacaactacaaatctacctatgaaatcccttaagacatgatgcataagcctcataaaggtgctcgatgcattagtgagcccaaaaggcatcactaaccattcatacaaaccaaacttggtcttgaaagcggttttccactcatcaccctttntcatcctgattnggtgataaccacttttaagaatcaattttgaanagatattggcaccatgaaactcat

SEQ ID NO: 77750 - DNA, 418 bp, Glycine max
agcttcacgatgtacaaaagatactatgttgacttaaatgatgattgaaaatgtacctttgaatgaatgatcattttgaatttgaatctgacattagagttatctatctttgtttatttgttatgttaacataaaaattattagttaattgttgctttttcgagagagaaaataattggtgcaacgaaaataaagtacgcatgtatgataaatcgttgtctgagttgacaatacattgggaaatgcaagcgtgttaacataaagcgtgacaggacactgtaagacttgactacacattgtgaaatgcaagcatgttaacataaagcatgacaagacactgtaagacttgactatacattgtgaaatgcaagtgtgttaacataaagcgtgacaggacactgtaagacttgactacaca

SEQ ID NO: 77751 - DNA, 473 bp, Glycine max
  unsure (1)..(473): unsure at all n locations
ggggaggatngatggngacccggtgtgttagacaagtggcctcagatatcttaagaagggggggttgaattaagatattccaaactgtttcccctaattaaaaatctatttcacttttttactcaagttatgaattcccttaatgacaatcttcttaaatattaattcaaacaaagcaactttaatatgaatataaagcaataataaataaaggagattaagggaagagaaaatgcaaactcagttttatactggttcggccacacccttgtgcctacgtccagtccccaagcaacccgcttgagagttccactatcttgtaaattccttttacaagatctaaacacacaaggacaatccttcctttgtgtttagatatcctttacaacaagagactcacagtctcttaatcccttagagaatgagaagaagaagaggaacaaatctctctagaaagagatggattttacaga

SEQ ID NO: 77752 - DNA, 324 bp, Glycine max
agcttctctggaatattaacatattgaattgtgcttagcgagcagatgcactaagcacagggcttttaaaactcaaacgtcatatggatacgctaagtgcaactgtgagctaagtgcaccatacgaaactgcaaaaaattataaggtactgccttatgcagttaccatttcactcttgtgcattaaggcctcactacatctgtcctcaccttgcttcatctccctgcattcctgcactattggtttttttttttttttgcattcatctgcacaatccaagaaaggttcttcactttacttcattttcattctaaagtttcaacc

SEQ ID NO: 77753 - DNA, 431 bp, Glycine max
  unsure (1)..(431): unsure at all n locations
ngagatgaggaagtgttgaagggtgaaacttcctgctnttattgttgaccacagagtggtacctggagatatgtcgcggnggtcaggagaccttggggacgtcaggtggggtgctattgcccaaaaccaagcttgaccaatcccgacccaacccgggcatagtcggtcagtgagaacctgtgatgtacctaagcaggcgagctcctggcagtcaacagataaaaggaaaacaagaccacaaagcaaggaggcttgtggtggctggccagctgtgaattntgtgtaatatgtggattgtggtctctggtaatcgattaccaaaggtgagtaatcgattacaaggcttaaaattgaggacaggaggctaagatggtctctggtaatcgattaccaaggggtgtaatcgattaccaggcttgaaaacgaagtca

SEQ ID NO: 77754 - DNA, 411 bp, Glycine max
agcttaagaaaaagcttaacaaacttagaaatcaagtgatcatgtattccgaaatatagggggagaaaacggatgcacattttatctataaacaattgtttgttgcttgcttgaatcttgatttcaggtattgtattgtcatcatcaaaaagggggagattgtagatgcaattggctttgatgttttgatgatgatcatgataatgtgttgcaattgatgcaaatgggctttttaagattaaaattcaagacaatacttcaagattacaaggcacaacatcaagatgatcactataatattaggaagggaattcctaattgaattagcaaaggtttggccaagtgatttaaaataaaaagtgtttttcaaaggttttactctctggtaatcgattaccagaggatgtaatc

SEQ ID NO: 77755 - DNA, 474 bp, Glycine max
  unsure (1)..(474): unsure at all n locations
tctanactntatacaagaatgaagctctgataccacttgttagacaagtggcctcagatatcttaagaaggggggttgaattaagatattccaaacaatttcccctaattaaaaatctatttcacttttttactcaagttatgaattcccttaataacaatcttcttaaatattaattcaaatgaaacaatttgaatatgaatataaagcaataataaataaaggagattaagggaagagaaaatgcaaactcagttttatactggttcggccacacccttgtgcctacgtccagtccccaagcaacccgcttgagagttccactatcttgtaaatcccttttacaagttctaaacacacaaggacaatccttcctttggtttagagatcctttcaacaagagactcacagtctcttaatcccttagagaatgagaagaagaaaaagaacaaatctctctagaaagagatggat

SEQ ID NO: 77756 - DNA, 414 bp, Glycine max
agcttgcagctattcttatgggagatcatattttttatttgtctcctcaggagtgtcattatattttaccgagtgattctgttggtatttgctctcctagaaacattcctttgttggggctgactccgcttatatatagtttgagtttgagaaaacttaattatcatgtcaatttgagtttaatagttgcctactattaatgtaaatgttgttttttaagggaattagtgtagatatcgctaatcagtatttataaattgttaacattaaaatattatagtttagataaaagaataaataattcatatatcttttacgatataatgcaatcacaaataattttgtccatacaaataagtaatttatgaaaagaattctgcttgcaatctttcttattactaatacactcccttt

SEQ ID NO: 77757 - DNA, 403 bp, Glycine max
  unsure (1)..(403): unsure at all n locations
ctacatcacgatacgtacccaccaaagcgacccacagattaattngatttgtctttcagcaaggctatggctatgcacatgcatggtgccctctacaggctctagaggccggtgccagataaggcacaatggatgctgccttaagactaagacatatagcagctcacaagaactttcaacatttatattgtgacaactaacaagcattcgtgcccttttgttttcgcgtatgttgtcgagacttcataaagatctatgaagtatttttaacattatacgataaaacctagaaaatattttcaaataaacttcacattatcatgtactctttgtgtctcctaaataaataaaatcaattaaaatacacgttcaaatatgaaatatgattttaccgtgtgtttgg

SEQ ID NO: 77758 - DNA, 421 bp, Glycine max
  unsure (1)..(421): unsure at all n locations
agctngtgcattctaaagacatgtgtgtggtgatgtgtgattgggatatatggtctatcgtactggtcaccacataataaattgtatctatcgatatcagatgtatccgagacgtttatccaccccgaggcgctaccatacctataacgttggtgatggctgtacgatgatacaccgttcttctgcagaaaacgccagcttattatgatggctaagactgcggacggttaaataatgtaattgtgcgttattactgatcttttgaaccattaaggcgtaccatttgtatcacagtgtatgattttcgtatatttgactttacaaactccacatttggcgtgctccacacatttttatgatgtgattttttacaagaattacatccggcgctgatgtgaatcgtacagcctgatctatctat

SEQ ID NO: 77759 - DNA, 434 bp, Glycine max
tcgacgcagctgcagcttacaatctgttttaagtccaagcccataaataaaatataatctagataagataagataagacaaaatctagatgaaataaaatctagataagataagatctagatgaaataatatctagatgagataaaatctaaatatgataagataaaatctagatgaaataatatctagatgagataaaatctagatatgataagattttgtagaataaaattgtctcctctcttcaagtccaagcccaattctgaattcaagcccaattgcttataattctcctcaaattaaattaaaaacacaaaattaatctagtaggcccaaatgataaaattgcataattaatttgacaattaaggctaatcagtaattaaaatggtgacaaaaagggttaagaaatatgagaaaatgatgacacatca

SEQ ID NO: 77760 - DNA, 442 bp, Glycine max
  unsure (1)..(442): unsure at all n locations
tatgttcacaagggagttgaccacgttgagcccgcctatgacgttgtcaagaacacgtgggacttcgccgtttcgcggagggtctacggcggcgacgacacgtttgaggccctctaccagacatcccaccagggtcttggaagtgagtggtcgccgaatccccaacacactggttggttcaggggaatgaggttactaatgaatgcaatgttggttgtagtgggctgatgacttggtttctttttgaggaatnttgatgtttaagttaactttgatggtggtagggtttatacattagtgtgagaaatttgatgtttaagtttagcttgtttggtagagtttatagaatngcggtggagatcctatattgactagtgatagagtcagaatagtctatataagcaggatgcgttcatctcatgatgtaattntgggagttgag

SEQ ID NO: 77761 - DNA, 428 bp, Glycine max
  unsure (1)..(428): unsure at all n locations
agcttattatagtaagtatacaaaataaacatttagtggtttaatgattcatgaataattttcacanaataaatttggaagtgtgcattattttcaacaaccatgcaacccaccataatttggattggttcttgtctttccttgatgctttcatccatgatatttgagtccaagtggtatttttttccaatcaaagcaaagcacaaccaagtaccaatgaccaatgttgccatatactagaatgtaatctacaatacatgcaaagcaaaaaaagtatgtgtcattcaataaccttacattcaaatattgatgtcaaaaacataaaagaatggatgcacatgattaatattgttgtatagccaatttaatttttcatgtaaacgcaataaatcacggtcgtacaacaagttgattngtgcatgttcaac

SEQ ID NO: 77762 - DNA, 487 bp, Glycine max
  unsure (1)..(487): unsure at all n locations
taagcctactcttagagtgcgaacctaaggttngataaaaaataacatagagaaagatcaaggaacttacttgtgctgcgatgattgatgagaacaaaaggatgcaaggaaaaagaaacaaaacgcacggagagcagtttgagggagagagggagcaaaaagggcgcaaatttttggaaagtgggtgtaactgacattgcacccactaagaatgtttcgttctttttgcttatcggcgagggtcgctgagcgagaaggcgacacatttggtttctcaatttttcccgcttagcggcccgcgcttagccaaattcaaaattcaatttttttttttacacatccaaaaagaatttggcttagcgcgagggtattgtcgcttagcgggatctgcagatcaaaaaacctacaacttccgcttagctgaaattatgcattttaagtgcagaggagctgcactgagcggttaataacatcgcttagcacgcat

SEQ ID NO: 77763 - DNA, 432 bp, Glycine max
  unsure (1)..(432): unsure at all n locations
agctnngcttncatttaagtcatcagagtcaccttccctatgccaacaatcttgcttgtgacaaggttgcccgtcttcactgtaccaaaatcccctttttgatatgacgagaaaaatccttcataagtagtaacatggaaggatgctctagattcaattatccatgtaaaataattagatgcaatatttaaataatattcattaccaataagaaaaacattctcatcgcctgatgtcacaacagtagtggttctaccttcattcttcttcttttggtcaatttgattagcatggacagttctagtcttctaacctctcttcaagaatctgcactcaaactttntatggcttgaatttccacagtagtagcaactcaagcctttggggtgagacttggatctttctcgtgatttcccatggcctccttcacca

SEQ ID NO: 77764 - DNA, 505 bp, Glycine max
  unsure (1)..(505): unsure at all n locations
tgcgaactcagatactaagcttaaccttataggcaacactattgctntcaggaagaatcagaagctaagtttaaggtactttggcctttntcctgtggtggaaagaattggtgttgttgcatataagttattattgcctccttcgaccaagatctatccggtgtttcatgcctcacagctcanaccttgccatggaaatcacactcaaccttatgctcccttaccattcacttttaaggaacaactaccagtcattcagccacgagctatcctataagatcgtgttcttctcaagggacagaaacaggttcaacagttattaattcagtgggaaggttttgatgagtctcaggcaacatgggaagataaggacgcatttgaagctacatatccatcattcaaccttgaggacaaggttgtttttaaagggggaggaattgtaatggatgaaaataacgtgggatccgaattagaggctgataaccaaaggaggaatcccgaacac

SEQ ID NO: 77765 - DNA, 409 bp, Glycine max
  unsure (1)..(409): unsure at all n locations
agctagaaggtgtgtaccccaccattttttcatattaaaacactggtaatgtgtctactattattgagaccatctctttctcagtcattggaggttcttggggcaagtagcccccttgtacttgacaaagtctggcaccttgaacttaggaggggtgatgatattgggtactaggaacaactcttctaggttcgcaaaggcataatcttcgcctccttcaatggccctgagcctttcctcttgatgatcctactttcccatatctgccatagcatgaggngttttacccgctgtaaaatgcaaggggtgtggttgtgggtgatactaacggccttccaaagtgttttgtaggagtataccaccaactgcttgcccttcnatggcatatccgatgcaaggctggaagtct

SEQ ID NO: 77766 - DNA, 470 bp, Glycine max
  unsure (1)..(470): unsure at all n locations
tcccatntcacatctagaatttggttgatatctcatcatgaatntggtatctcagtgtggcaagtgagttccaaaatctaaccattctttcaacaaaacggtttggaaaggtatgttttcttggttcttgacagcctatatctttcttttatagcaaagattctgaatgcattttatgttttcgtcatgttctcccaccacagtccacacacacatgatacttataatcttcatgcatctaaccatcaaacgcttagtcatgcatgtggatgaaatatcttgggtgtttatcacatgcatgcatcttttctttttgattagattgttgctctattatgggttgttctgtacattcaggttggtacatatatatagttcccggtgttgttattactattgaagttcacttatattataattaaatttaagcttttattctcccgctnccattcaattaaccgaactttaac

SEQ ID NO: 77767 - DNA, 418 bp, Glycine max
agcttctttggaccttgaacatgcaactatctcctctttcaaaaccatgctatgtgctcgcgactggtccctttcctcccttcgcaacttgagttcattattgctaccccatagggctccgtgaaatttgttccggccatactcttccttgcgagccctcttggtctctcgttcaagggctcttgcggtaattgtattctcttcccgtaacccggcacactccttccgaacgtgtgtagcagccaacttgaacttctccttggcgaagtttgcctttcctaactcgcttttgagagcttggacttcctcgtcctcttccggtgcttcaaaattctcttcgctgacgacttttaacttggcgagccaatctaaacctcgtatgcgaactttcagccattcgtggtacccaccaatgatg

SEQ ID NO: 77768 - DNA, 496 bp, Glycine max
  unsure (1)..(496): unsure at all n locations
tagcgacctatgaaactcagcttcagaatagaatttccnactcccctacatttctgattntaggcttaaataggtggccttattggtgcttgcgcgcttagcgcaactctagctcgcttagcacgcataagtgaatttcggcttagcgctcatcttctcgcttagcggatgcatgcaagtggtgcgcttagcaggatgagctctcgcttagtgcgtgtgtcaaactcatccttcttccagatatttcctcgcgctcagccgcaagaggggtgcgctcagcggatggctcgctaagccgatagattggcttagtaagaagctaaaaataaacacttcacaaacttgcctaattaacctgaaattgaaaggaaatgattattaaatacacaaaatgggagtacaaagtacttattacctatatttaacaaanagtaattacaacactacaaaataaccataaataggaggagttagataaaantttcacagatttctt

SEQ ID NO: 77769 - DNA, 368 bp, Glycine max
  unsure (1)..(368): unsure at all n locations
cgattaccatatatgtgtaatcgattacacagtgcaaactctgaattcaaattttaatagctattgtaaatcagttttggccactggtaatcgattacatcctctggtaatcgattaccagagagtaaatttgttgaaaaagactttttaactaaaaattcttggccaaaccttttactacttcaattggaattcccttcctattaatataccctttctaagactctagagactgtcttgatcatccatcttgaatatctttaatttctttgtcttgaataaagctttgagacgcatgtgaaactttggcatcatcaaaacattcagcttgatcctttgtctacaatctcccccttnttgatgatgac

SEQ ID NO: 77770 - DNA, 473 bp, Glycine max
  unsure (1)..(473): unsure at all n locations
tactcagctcttgtcttttctgaatcatcataattgttcttagtatctctgttatatgaaagattttactttattcttttagaaggactttatgtttagcaaattatactaatcaatgtaaggtttttatattgatactaacctttcagaaagaatacatgatgtaatggtgttcttggataacaggggctatcattgtaatatataaatataagtatataaggagtagcagtgtaacgattttcaaacaattaaaggggttaatgtaaaaataaaaatatatataagggtattagagcaaatataatgaaaccttagtaggtgtttagtataattcataatttgcctttgtgggtcttcactcttcacttctagcatttctctagctatgttgtcattgnntatggtgaagtttgtgtgttgtggatatggcacgaccaattntctgggtctcgagaagaatatattcatgg

SEQ ID NO: 77771 - DNA, 422 bp, Glycine max
  unsure (1)..(422): unsure at all n locations
agctnttatgtgaaaggatgtgactcttcactatttgaattgaatntcaacgntaaggcactgataatcgattaccaaaacattgtaatagattacagccttttgaaattaattggaacgttgtaaattcaatttgaaaactttntcaaaacaattttgctactcgtaatcgattacagcaatcatgttttgagaaaaatcatgtgctactcaatttttgagaaaaacttttcatacttatcttgattaagccttctcttgattcttgaatcttgagtcttgaatcttgatcttgattctttagatcttgaaccttgattcttgactctaaactttcttcttgagtcttgaattcttcttgattcctctcttgaactcttgattcacttgagttgttctttgattgatctttgattcacttg

SEQ ID NO: 77772 - DNA, 422 bp, Glycine max
ctcagctttcacaagagtcttcacaaataactatcatgaagcagaaatctaacataactacccatcatatctcccaaaaccccatacccacaaatttggagcttcaatggagaatgaagaagaagagaatggcaacgtgagggagagagagagctgtctgaaataatgtggggctgagtgaagagagagagagttgctttttgattttaaaaaggctttttcctcatttcttattattttattataaactatgccacatgtctccatttgagtggagcaaaaagggcccactttcccttttgactgtgacccatactcagccacaaaagtgaggaaaatctgacctttgaaatgctaaaatcctgccttggttggcgtgccgcttctctggttccagttcctcgcgtttctctgcgtccatc

SEQ ID NO: 77773 - DNA, 426 bp, Glycine max
agcttctcaaggaagcttccataattctatttcttacataaaattacctttttgtccatgaaaatcatttgtaattgttgaccatgaagatctttgtatgcttaaaatatttatgattctcacaacaaattttcaagtttctttggagttttcaatctccttaatgaaatttagtttaaaaaccatccttagttgttccaaaactgtaaaaaaaagacaaaattcaccatgtgagactattttagaaaacaacaaagctagcaaaacacacttggcgaaatatttgtctatgtagtcaatatcctctttttcagcacgccatccacccaaccgatacaacaacaaaacatagtgtattaaataacaacacacattataatataacactgtgcaaataagcatttcatattttactaattaaaaatt

SEQ ID NO: 77774 - DNA, 467 bp, Glycine max
  unsure (1)..(467): unsure at all n locations
tgggggtggagggtattntgctccccgtttctgacacctatctatattactcaatttctgcaccttctgtgtgagtgttatggttttgtaccatgcgccattcatttgagtttttctggtttggagacctattatccatttacactaaacaaggtaaattgctaaatccaaacatgggaattcagaaccctgttacaaatcctatctattntttcaaggaaacaactgcacaaaaacaaggaattagacaagttttgaaaagtgaaaactatgttccctaaatgttctgtttaaaataccaacagcatataagcaaactgttttccaattccctattataaatgtgaaatggatgccacatatctttaccatttaaagaaattagcataaaaatccaataacccaagttgagttccaattgagcaaggtgagccaaataagatatatctcaagactcanaccaatca

SEQ ID NO: 77775 - DNA, 408 bp, Glycine max
  unsure (1)..(408): unsure at all n locations
agcttcccagttatggaaagctaagtcctctgttggatcttccttgtaagtacttgatgtaaatattttttttatcaatttaatgatgttttgtgtgttcactgtgctatcagaacttcattctaacatgcttttgccttgatcacgtagatgcatgtgtttttaagatcattcaatagtggaaactggtctgattctaagaacttgataggacatggctagtttgtcgtattttcatgaggaatcggggtatggtaacctagttgttgtatgtttgtcttaatgtgatcctagtcgagtttagtccanaaagaggaatctgcggatgatacttgatcaggattaggctagactatcatgaggaatcggnngttagcatttcangagacaccatagagcgcatgagca

SEQ ID NO: 77776 - DNA, 433 bp, Glycine max
  unsure (1)..(433): unsure at all n locations
ngaggaatcttagggaaacttttgagatgccgctatctcttttagaatatacatgtgagcctacttagaggtaagagatgagtttattgcaattggggttagaatgaacatgtgtaggggttcttaaaggatcaaattgagatttattttgggatgtctattgtattgaaattcttcttgtatgattatgtgaaattgtttgaggggttttactccctgtggattgagaaattatgtttgtgttttgaataagattagcgtaataaatagttatattgggattatgaaattatgattgaaattgtatataacggataaattgaatatatgatgaattatagaataatatattactttgagattataatattgttatggagattgagtataagtgcaaaattgaatgtgttaaattgagagatacacgtaaaca

SEQ ID NO: 77777 - DNA, 417 bp, Glycine max
catgcaagcttgtcagttgaaagctagaccaaaaattgtacccaccttgtcttaagggtttaccccttgtgtacccatggcacctatcaataaacatcacgtgaactccttgataatagacagatatgtagcctttttttcgtagtattttgttgcatttatatgttattattattcaaggccacaagggttggtactttttatataccatagcattattgagttttgaatctataacttcttgcaaactatgcaaatgcaaaacccttttcatcatatatgggtggcatttggttaatgatctatacacaatatctttagatggtaccaaacttctaacgatatcagtgtaaaagttttgcttttgaagacattcaaaagcttctggagttcagttttcaatggtagtgattgagt

SEQ ID NO: 77778 - DNA, 447 bp, Glycine max
  unsure (1)..(447): unsure at all n locations
cgtccttgggtttagacatgatggtacatgatttgngacttgtagggattcaattgagcaaaattggatgagggaaagagtggttttcgaaatctgcactttatgcagaattttgctgttgaaatgtgcagcagaattttgtataagtgcagaaaaatgcttgtatatggctggttgtgaaaagggtagtacatatggggttctggatatttgatagcggatcccaacggtcaaaatgtagatttatgtactagagacttccagtaaaattttcgagtcaatccaacggttaacaaattggaacgaaggaaatgttactggggtatttgtatgtgaaaagctatgattntgagttgtgttttgggcagagttttctgcctctgcccttgtttgctttggtntgttagtccatgatgattggatgtggaatttcttggatgtcgtggg

SEQ ID NO: 77779 - DNA, 401 bp, Glycine max
agcttctatgccatgtcgttttatcttttctgagagagcacggataattatctcataagttacaacactaggaatgaaaccagcatctttcatttttgacacaaggctaaagcttcatcaaacaacctctctttacaaagtccattgatcataacgatatatgtccaaacatgtagatgatagcctctaataaaaagatattgaaaaaccccttgtgcattcttaagtcttctaccttcgcacaacctataactgttgtgtatgagtacacatttggtcaaattccatgatctttagttttcttgaataatgcaattgccctatttacattgttctttttgcataaacagtctaataaagaattgttagggaatatattagcatgttggcctctatccttc

SEQ ID NO: 77780 - DNA, 472 bp, Glycine max
  unsure (1)..(472): unsure at all n locations
ctccttggtatgaacctgcaagaaaggcactgaanatagtccaatctctgtgacgcaggccataattgagcttgactcttgccaacttggcttgatcttccaacaaataccctatcatctttctgtcaacagtgataaagtaggctaaatatctgaaatgaaattctatattttgaatcagcatgttttcatctatgaattgatggaacagaaaataacctgaactggactgcatttgtattcatctagatataacttttcatcaatctctaagcctgtagtaattgccaacactccattttggtcaccaagaccagtaggttgctgctctagtttggagccaaacactgtcttgtatctgttgcagaaaaccataaacataaaagcacgtacataactacaaattgcatatatttgtttcatacaaaaagatggttggtgtggggaaagtaagatgtttatatcacttaca

SEQ ID NO: 77781 - DNA, 375 bp, Glycine max
  unsure (1)..(375): unsure at all n locations
gcttggacaaggtaatgtaaaaggatgacaagtatcatgagcatcatcataaaattgacgtaatatctgataataatgaatccaaagttgcatgtgaatgtaagatatttgagtccaatggcattccttggtgccccataatttgtgtcatacgacataaccatgtgaattcctttcctccaagtttgatntgtgatcaatggtttaaggatgcagagaataaatntatttactattatgaataagaataattggataatgaccttcgtagttctagttttgttcgtgttgggcttctagctgcttgttgtaacaaatatgtgagattattgataaatcacttgagagntttaatttgtcaagaatgaaattctg

SEQ ID NO: 77782 - DNA, 226 bp, Glycine max
  unsure (1)..(226): unsure at all n locations
ccctttcccttgtttgaagctcactacaagccttaagtgaaaaaccatgatattaccatatccttaaggaattttggacctttggaatggttttgcgaataagtgtggggggtttttggttcattggacaactngttntgttggctatgcttcatgatgtattttgggccatacttgatgtacatttgtatatggttaaatgttggacatgctgaatgaaatgttg

SEQ ID NO: 77783 - DNA, 325 bp, Glycine max
tcattgtctctcacagtctttagatatgggagccaatccaatccttgtgtccggactctcagccacttatgatagccgccgatgatcccattactgcttcccctaagctctctgtcctttcttcacgctgcatcccatgccttgcgaactccttggagtaccctcgcgttgtggtcactaaaaccccgtgcgatgaaaggcgtgatgctctcgtctgatggcactcctctcatggggtagccaagctgtcttatggcgaggacgggagtataattaatacaaccccttgttcccatcaagggaacatttggacatccttcgcatg

SEQ ID NO: 77784 - DNA, 424 bp, Glycine max
  unsure (1)..(424): unsure at all n locations
agcttctattttcaattacgagcgtctcgatatattactggtcttcatcggacaaccgagtaaaaagttattgtcgtttgaatttgcttaaagcttctgttttcaatttcgcgcgtctcgatatactacgggacaccatcggacacccgagttaaaaggtattgtcgttngaatgtgctcagagcttctattttaaattacgagcgtctcgatatattacgggactcaatcggacaaccgagtaaaaagttattgtcggtggaatatgcttagagcttctgctttaattacgagcgtctcgatatactacgggacacaatcggacatccgagttaaaaggtagtggcgattgtaattgctcagagcgtctgttttcaattacgagcgtctcgatatattacgggactcaatcggacatccgagt

SEQ ID NO: 77785 - DNA, 455 bp, Glycine max
  unsure (1)..(455): unsure at all n locations
aatatattctgcttcacatgttgacaaagcaactacactctgcttctttgagcaccaagagattggtgatgttccaaatttgaaaacatacccagcagtgcttttcctatcatccttatcaccacaccaatctgaatcactataaccaaacacttctccttctatattcttctgactgtaaggatataaaatgtcaagatccaatgttcctttcacatacctcacaattctctttgctgccagaaagtaaggtgtctttgatttctccataaacctgcttatcaatgttagttggtgaaaacgactacactttatgtataaaacttcgtataaatggtatcaaactctccaatttatgggtattttggagtggtataagtattttctattaagtataggcgataaatacttagtacttccatgttgtgtgtntaataatcattttctctcaattt

SEQ ID NO: 77786 - DNA, 444 bp, Glycine max
  unsure (1)..(444): unsure at all n locations
agctntattatatactttaatcatgctcaactgttcttccactttntatcaactatttggagtaaaacatcatgtggcttctttaaaaagtctaaccatctantttccaattacaatcatcacggtgttagagaggatgcatgtgatactttacctggcaaaatacataggagttgaatatcaaagtgttgagcactatagtcgcatctggaccattaattctcagtagcctcttcccatcaaaagtgaggaccgcaaggacaattagttgatataaactttgaccaaaaatattcctccacatgggtttggtgataaaatatgttgtccttccaactggnggtcttagcataagtccatcattgggagggtcagtggccaaagccaatgcacccagagtgtccataatcaagttgacccacagcaactgaacagctgtgaggg

SEQ ID NO: 77787 - DNA, 386 bp, Glycine max
  unsure (1)..(386): unsure at all n locations
ttataccccctgttgacgtgcctaagccattttacttaaatcatttctcgcttaacttaaaaataaaatcaattttcacccaacggttgaaatggattatcccgtaacttccgataaaataaattcccaccgttccgtcgtgccataaccacgttggaaattcaaaagagggtaaaaaataaatatgatcattcaaaaaatatttttttagtaaaagaaagcgaaaaatcaatcggacggtgtctctttgggatgtctcattcttaatcgaattgactaataactaaagtgaagataaggctaaaatcaacttgcctagtcgagctcgtcacaaaaatangctgttgaagttgtcattaaatttctactaagaaaatggatcattt

SEQ ID NO: 77788 - DNA, 303 bp, Glycine max
  unsure (1)..(303): unsure at all n locations
ttgtcttccgctgcatctncatggaggaaaatcaccattaaggaacctcattgaagctcanagatccagcctccatagaagccccacaagcaagcttccatcaagtggtaatcagagcacaagagcttcaagtaggtgctccttaaacctncattaattttttgctttaccttctcttccatgggtggtgtcttcattttctccatgtatctcctcacatgtatggtgataaatgttggtaacatgattctttagagtttccacccgataaactcgctatagaagctagattntattttctat

SEQ ID NO: 77789 - DNA, 451 bp, Glycine max
  unsure (1)..(451): unsure at all n locations
gtcttcaacaaataaataaaaataatttttttatatttatgctcagntncagcttntgtgtgcctatatcaactatgcaactcacacgttacatgaatggcctttccaatattataagaatggcattatctttacagatattcatcaccacaaagtntgttgggaagataaaatcttntactctgaccagcacatcttcaattacttcatatggtctggtaatggagcagtcagcaagtggtaaagtcatcttggtgggcatgatctccaactcttccaaccttctgcacatggagagtggcattaagttaatactgtgctccanatcaataagagtctttcccacaatgacttcttcaaatgaacaaagaatagntacacttccagggtcttatgcttggatggaaggatcttttgaagcacaacactancaattccttccacaacaatc

SEQ ID NO: 77790 - DNA, 528 bp, Glycine max
  unsure (1)..(528): unsure at all n locations
atccttaagtcacctgcggcatgaagcttgatgattatggggtacccatcacatgtggttctatttggcggtcgggcgatggtgcacaacaagttttccacattcacaaatcacgcataaacccaccatcccctgttgcccacctccaaccgagctcacgtactcccacgtagcctatatcctcgtttctctcaacaccgggtccccatcaatcctcccaagcttccccaacatccaagtaattcaacattcaaacagaacaaactatcacagccaagaaaacagggcagaggtagaaaactctgcccaaaacaccaaccaaaatcacagcttgtctcacttatagactccagtaacaattccttcgatccagttcgttaaccgttggatcgacgcgaaaattntactggaagtctataatacataagcctacatnttgacgcgtgggatctactagtaaacatccagaactcattctgaactactctnntcacaaccagcaatacatagcattnttctgcacttatg

SEQ ID NO: 77791 - DNA, 412 bp, Glycine max
gactctgactggtcaccttatgtatttacttaatgaaagagaccttgacatactcattgtgtagcgtgttttggtatgtagtactaaactccccagtgtggtttctcactaacatgggaccacattgcatatatgctcgagtcttagtataattgctgcataacatctgctaattggttattatgaaattgatgagtgttgttatgtattaattccagtgtgtgaatcatgtgtaatgtgattggtgattgaaaaatgaattctaaatgataaagtggcgaagtgatgtggattgtattaacgtgagttatgctatacatacttctataatttatcttgatcatgtctgttgttatgtggatttcattagaaaagtgataaatcactccctatgcgcattaagatttggatc

SEQ ID NO: 77792 - DNA, 467 bp, Glycine max
  unsure (1)..(467): unsure at all n locations
tcacatgtttgtcatcattaaaaagggggagaatgcgaatgtatgtatacatgattntgatgatgtccaaagaagaatccaaccacgctcattttgcttcaagaataataccagattggttcaaccaacaaagccctgattcaagatttcttcaagatcaagccttgcctcacaatgaaaggtttcaagtcattccaggcacatgtaatcgattaccaatacatgtaattgattaccaatggtttgaaagtgtattacacatcatatgtaatcgattaccagagactctgaacgttgggaattcatattntaaatgaagggtcacaactgttcaagaagaacaactgtgtaatcgatttcactaattctggtatcgattaccagagaggatcttcaaagaatatcaccaacagtcacgtcttatcatttggatttgaatggcatcaaagcctatattatgtgtgact

SEQ ID NO: 77793 - DNA, 402 bp, Glycine max
ctcgatatattactgtacttaatcaagcatccaagaaaaaatttattgtcgtttgaatttgctcagagattcaacattcaatttccagcgtctcgatatattacgggactcaatcaaacatccgagtaaaaaggtattgtcgcttgaattggctccgagcttcaacattcaatttcgagcgtctcgatatagtacgagactcaatcagacatccgagtaaaaagctattgtcgtttgaatttgctcagagattcaacattgaatttcgagggtctcgatatcttacgggactcaatcagacatccgagtgaatagttattgtcgtttgatttgctcaaagcttcaacattcaatttcgagggtctcgatatattacggtactcaatcagacatccgagtaaa

SEQ ID NO: 77794 - DNA, 470 bp, Glycine max
  unsure (1)..(470): unsure at all n locations
cagcttanctacccacacccctctaatagtaagcttaccttctttatatgagaatctagagcttaactactgatgtggcatcattttctcataattcttaaccctttgtggcaccattttaattattgattaaccctaattggcaaattaattatgcacgtttatcatttgggcctactggaataattttatgtttttaatttaatttcacgagaattataaataattgggcttgaatccacaattgggctcgcacttgaagagaggaanacaatttattctaccaaatcttatcttatctagagttctcatctggatattatttcatctagaatttatcttatcatatctagaatctatctcatctagatattattntatctacggcttatcttatctagattctattttatntatgggctnggacttaaaacagatctgtaagctttggnggctgagaactatattac

SEQ ID NO: 77795 - DNA, 194 bp, Glycine max
ttaattagaaaataagaaatatacaacatgttgttcccctcgattataagcaagctctatcctaagtacgaagattatccctaaccagtcaccacttatccaccattaataaatactaagagaaataacatagggtatcatatgtgattagcacacatcaccaataatcatgaataaactgatcatagcatgac

SEQ ID NO: 77796 - DNA, 306 bp, Glycine max
  unsure (1)..(306): unsure at all n locations
agttaaantgcacgcgtgcgagcttcatctggacctagaacaggcaactaacttctgtgtcttttctatgctatgtgcacgcgactgtgttccttacttcctttctcagactgagttcactattgctactccagagagctccgcgaaatatgttgcggccatactgttacatgccagccctcttggtcttgtgttgaacggctcttgctggaattgcatctcttttgcgtgaccccgcacactccttctgtacgtgtgtagtagccaacaagaacttctccttggcacgataagcctctcttaact

SEQ ID NO: 77797 - DNA, 484 bp, Glycine max
  unsure (1)..(484): unsure at all n locations
atctctgagtcacctgcggcatgaagcttatatatatcgatacgctcgaaattaaacatcttantctgtctagaaattcaaatggccataacttttcacacggatgtccgattcgggcgcataatatgtcgagaggctcgaaattgaacaaccgaagctcttgagaaattcaaatggtcataacttttcacactgaggtccgattcatgattatactatatcgatacgctcgaaattaaacatcggaaactctcgagaaattgaaatggtcataactcttcacacggatgtccgattagagcgcataatatgtcgagaggctcgaaattgacaacggaaactctcgagaaatcaaatggtcataactttacacagatgtccattcnggctaaatatattgtacgctcgaaataaacatcggaactctcgagaaatcaaatggcataacttttacacggatgccgatcaggccacacattcgaga

SEQ ID NO: 77798 - DNA, 494 bp, Glycine max
  unsure (1)..(494): unsure at all n locations
gcttctanccaatggacttaccttgaattaatttcttttatagccctnttgagccttgtntcccttttcttgtgttgaagctcactacaagccttaagtgaagaaccatgatattaccatatccttaaggaattttggagctttggaattgttttgggaataagtgtgggggggttttgtttcattggacaacttgttttgttggctatgcttcatgatgtatcntgggccatacttgatgtacattgtatattggntaaatgttggacatgctgaatgaaatgttgtttctcacaagctaataaaaaacaataaatattcgaacaaaaaaaagaataacaacagaaaagcattacagttgagtgaataagatcttaaatggcacagaatgatgaaactcttggtctactctgcatgttaaatattatcttacttcttttatttcttattttttcttaaatgcactattccctctgctctctattctttggatt

SEQ ID NO: 77799 - DNA, 358 bp, Glycine max
cacccatacgcacccttcttacaacattccgacataggactcgctataatgctaaaattctggataaagcgtcgataaaatgatgcacgaccaaggaaagatctcacctccgaaactgctgtagggctcggccaagtcttgatagcatacacttttgtttgaacaacggatactccatctttagacaccacatattcaagacacaccacactttctaccaagaaatcacacttttcccttacccataggagttccggcgcctacgagcttatatatttgtctcagatgagagaaatgctcctctatagattggctcaacaccaacatgtcatcaagataaacgacaacgaacttaccc

SEQ ID NO: 77800 - DNA, 357 bp, Glycine max
attcttcagttaccttcaagagcgcagacactcataggaacctttatgaaaactgtctattagattccgactctcacttgaagttagtgccatgcggcagataactagttatatcgcatttcctgtgtcgcctctgtattaactatcaagtaagaatcataatcctgggcttaatgaacatatgacaaattgctgaacataataatcgtcatgtatattgtttgattacttagtcaaatgaaatttctgtatcatattgatagccatgtgctcatattgcagtcataacagactaactacttctctgctggacatcaaggtccgctcgagattatttcacttactggttcgtatgtc

SEQ ID NO: 77801 - DNA, 243 bp, Glycine max
aaacttttttttataggacccttattccaaccgtcctatatttgccgggccctctaacgtcaatctcggaaaaccgtatcttataggggctaaagaaaatgatcttctatggccatggggaaattggaatgacctttaaattaagacggatgggcctgagagggacccagaattacacccttgacccccctcactgatgtcaaatgagatcatcggcccatttaacaaatgggaatgatccgg

SEQ ID NO: 77802 - DNA, 425 bp, Glycine max
  unsure (1)..(425): unsure at all n locations
ccttatagtcacctgccgcatgcaagcttcaccggatgacgccgatcgaacatttnctaacttacgtcatgcanaattcgttcagggattgaattgaaaactcgttaggcgacatctgtcgtgaagtagcgaccgatatttttcagccgacattgcacaattctttttataatagctcgctggtcgataatggtctttatacggcagagtaagttttcttggtttggtgtcgcataaaaaagttacaatgtacttccgctaggtttttcgtgcgagttcaaccgacattttgtttcggccaggaaaacattaacccacctctgcaaaaaaaatatttgctaaccgtcttcatgcatatttcattcaacgatggaatagaanactcaatagccgacaacggtcgtgaaatagtcccgactgatatt

SEQ ID NO: 77803 - DNA, 422 bp, Glycine max
  unsure (1)..(422): unsure at all n locations
tgcagcgtttggagtataacatgggaccactcatttatttcaaaagataagtcgatctaancaaggtctgagagaccatacaagtttcctaacgatttctaattatgagggccattaagtctatcatatgtctgccatcgccttggccttggctaacaagcggggaagttcttgactcccgttcaaggtaagagcaaaccgatccatccacatggttgcctcttggtgtaaagagtcaatcacccttcctctagcctctttttccgcgtatacttgaacatactcgtacgcgattctatgctcgtgggccgtggctagacctaacatttcttggtacttggcaatgatagctatcatgttggtctccgtctcgcataaacgctgagacaagcttctgttggaccttgaacaagcaactaact

SEQ ID NO: 77804 - DNA, 499 bp, Glycine max
  unsure (1)..(499): unsure at all n locations
agcttattctaaaatgaaccttgttaatcaagaaaacatgattttctaatacaacaatntgggactctggttcgaagtttaatcctgactgattttctaaatttccaaattggttagaatatagtgtattaaaagatgtggtaattcttcagtcagatggtcaattnttaaagttaaatgagattatcgatgtttctcaaatgttgaagataactaacgagcatatggtatatccaatggtatacttgtgaaaatagccttgatttttcctataacaactacaacagttgaaagatgtttctctgcaatgaatctttgagaagaatacaatgtgcaatcgcatgggagatgaatgactaaaagattgcttgattacatgcatagagagagatatantttttatagtattgataatgagaaattatataacatttcccacgtatgaaaatgtgtacaggacgattgagaattgatatatattaggatttcagagtctttg

SEQ ID NO: 77805 - DNA, 352 bp, Glycine max
atgagctgcgcccctcgggccgttctgcaagcgacatattaatttttttacaggggacctctttatacgaaatgactagacctactccataatcaaacataatggaatttagcagctatgccatattgcacaacgctactgccaaaatctatactaaaaagcccctatacacaagacttctcctaatattacatgacctcaagtgttcgtattactacaacgctctggctatgaatctgctactcaacattgggaccaaatgccagcctcttggttctatccttcatatcaaccatataactgaaccatcataaggctctcctgttttttcagtttgtataacccatgcaac

SEQ ID NO: 77806 - DNA, 330 bp, Glycine max
  unsure (1)..(330): unsure at all n locations
tccacttggaccccatttctaccaactacaaaacctaagaaaactatattatctacacaaaaggtacacttctctatatntgcatagaaggtgttntcctaaagactgaaagaacttgtctgagatgtcctaagtgatcatctagccctctactatacactaaaatatcatcaaaataaacaactacaaatctacctatgaaatcccttaagacatgatgcataaacctcataaaagtgcttggtgcattattgagcccaanaagcatcactatgccaccatacaaaccacacttggtcttgaagcagttttcactcatacccttttcat

SEQ ID NO: 77807 - DNA, 419 bp, Glycine max
tgtcggcagaataatatcaatcgtggctatataacgaccgatgtcacgtattcttgtttcaatatcatccctgaataacttttggatattgtccaatacgaaatgttcgatcggcgtcatcacgagatgcctgcttcttatttaaacctgctggatcggtcatctttcctggccgacatcgactatcatttattttatcaatgtcggagaataaatgattttggtcgatgtgggctgatgtttttctagccgagtaaatgagaacacgccagtgatagccgaaacacatcttctgttgagctcgcacgaaaatcaaagctacctacttgtatttttgatgcgacaccaacaacaaacctctctaccgaaaaatatttcagctgccgttgaatgaattcacatgccacataaatatcctc

SEQ ID NO: 77808 - DNA, 484 bp, Glycine max
  unsure (1)..(484): unsure at all n locations
atcctcttagtcacctgcggcatgaagcttctcataatnggagagttctagagagagaaatgttctatttccagagagtgtgagagaatttattgtgtgaagatctgtagagaccagagctggaagaggaaactgtcctgagtgttagacaaatggcctcagttatcttaagaagggggggttgaattaatataacaagaactattccccaattaaaatttcactctctctttttagattaacgatgcacccttaacatgaattactcataagacaattcaaaataaacttcttttaagccaaagataaatagcaataaataacagaagtctaatggaagagagaaatgcaaacttgattcatactggttcggccacttgctgtgcctacgtncagtcctcaagcaacccacttgagattttccactctcttgtaaaatccttttacaagttctaaacacacaaggacaatccttcctttgtgt

SEQ ID NO: 77809 - DNA, 481 bp, Glycine max
  unsure (1)..(481): unsure at all n locations
agcttggaaggatgcttcaatggaggaaaagaatgagtgtatatatagagagaggggggagcacgacattgaaggaataaaagagggagagaagtggaactttgaagtatgtctcacaagactctcattcatcaaagttacaacaagtgttacacatgcttctatttatagactatgtagcttcttgagaagctttcttgagaaaacttctttgagaagcttctttgagaaaacttccttgagaagctagagcttatctacacatacccctctaataactaagctcacctccttgagaagcttccttgagaagattcctaaagaagctagagcttagctacacacacctctctaatagctaagctcaccttcttgagatgagaagctagaacttagctacacaccccctataatagcttagctcacccncatgacanaatacatgaataatacaaaaaagtccctactacaaagactactc

SEQ ID NO: 77810 - DNA, 431 bp, Glycine max
  unsure (1)..(431): unsure at all n locations
gatgcccgagtcattcatccctatgagatgttgttgttgtattggcgaacagaattgccattccttggattatatggttgaaccaagctcatgcttttacaaaaaggttcatcaagtccagttgaaatattgaagtaaccgtcctgcgaaaatggggcaaaagatgaatcgagtcacatcactgcttcgtctactgccaaacatatttaggattgttgatgtgcttgttacttccagattcaccttgacaaagatgtcatggatcatgttggaaatctaaattgattcaaccccatatcctgcgtaaaattncaatacttcaactgacatcattccatacatccatgctttcattggtgcattgtcattgattctttctgaaaataaaaaataaataaatgaactatcttgtataanaaaaaagacacctt

SEQ ID NO: 77811 - DNA, 218 bp, Glycine max
aaacattcaactatgagcgtctcgatatattacttttctcgttcagacatccgagtaagaagcactggctgttgaattggctcataggctcaaaactccactcttagccgctgcgaatatttacggactccatcagacttcccagtaacaatgtactgtcgtttgagttggcttagaccgccatcattctatttcgagcgccccgacatattacggca

SEQ ID NO: 77812 - DNA, 490 bp, Glycine max
  unsure (1)..(490): unsure at all n locations
atcctcttagtcacctgcgggctgcaagcttgtcttcatgtacttggtggggctctaattatctaaccttattattagattcaaccaatttttgcttggtatcttcctacctgggatcttcctacacaaaattccttagaattcaatttatataccanaatagaaccatgtccgcttcccaatcccattaacacaaaccttccttattttgtaatgcttntttataaaatagggaggtaatgtggggtcaaaaaatggaagggtctcaagtgcaatattggtaaagttagaggtgtaatttgaccaacacatttaagtgttctgaaattntacatagaaagacaagttcttaaaattcgagctgaaggcataactcaaccttccaagaaaatgtaagggaaggactggctgaaccttataagtacttcctaggctatataactagggcatgtgggactaaacaccctatctcataatagatcaccatgac

SEQ ID NO: 77813 - DNA, 324 bp, Glycine max
attaacacataacggtgcgcgttgaagtactaatatgtgcccatatctgtctagaagagatagaaataacactatatcttattataaaagaagatattgaagccatgtatactcatacctttctccgccttttggctaagatcaaaagtagtatctgttcttatcaatataatatctgatatgagggccattcggccacacgatattaaattactctcttaatggggagagtacaacacaacagcttgctactgtgcctctcaagtgtcgcccaagcgttgcactatagcatgggcctggacaccctataactaccttaatctt

SEQ ID NO: 77814 - DNA, 385 bp, Glycine max
  unsure (1)..(385): unsure at all n locations
tattatcctgctttgatgaatacgaagcctacggaaaatggagagaatgagaaggagggaggaacccatgccgtgactgttggtcctacatggccaaattttccaccaattcaacaatgtcaatacccagccaatattatcccttctcattacccaccaccctatgagncaagaacaaccaatcattcacaaaggccacccctaaattaaccacaaagcccgtctatcgcatgatcgataccagacaccacccttaacatgaaccanaacaccaaccggngaatgaattnttcagcanagaagcctatagaattcactgcaattgcagtgtcatatgctaacttgctttcatatctactcgataatgcaatggaagccataaccc

SEQ ID NO: 77815 - DNA, 370 bp, Glycine max
tgcagcttgttttttggggtggattggtccccttttattgttaacattggtattgtcaggccagtctatgtcttatgtgtatgatgccgatgttattacaaatgtgaagaaagaggcgttgtgtgaatggcaataaatgcattaatggtgtttggaggaccaatataatatccattaacattcatttaatggcatgccactagtataaaacatacttggtggcatggaccggttcatatataataaagaatagggtgtgtgtgtatgtggttgagagtgcaaatgtttatttgacaccttcgctcatatatatgtctctatatatatatatatatatagatgaatatatatatccgatctgttgacacca

SEQ ID NO: 77816 - DNA, 304 bp, Glycine max
aacataaaacttcttgactatggccacatctatgtgaccatcaagctgcatggtcaagggtttatgccatctctggctctcgagctccttacggaacttatcatactgggtcacatacaaatcaacattcctctcaaggaggatgtttctggaatgcatggtttggtcattaccgtcccaggcgacctcggaaatgaatctaatcgtgtcatatggctcttgaggtctggagatggatgattttctctttttggaggccatctgcatccaaagaagcgcaatagaaaaagttagacaggtttta

SEQ ID NO: 77817 - DNA, 434 bp, Glycine max
  unsure (1)..(434): unsure at all n locations
attaaccttcataaaggatagacatatccttcatggaattctgatacttaatgagggggnggaggaagctatgaagagaaagcagcccctcatggtcttcaaagtggattttgaaaaggcctatgattctgcatcttggtctttcttggattatatgctcgctaaactangcttctgtactaaatggagacaatggattgctgcctgccttcaatcagcaactatttccattttagtgaatggcagtcctactaatgaatatgcccctactcgaggtctgagacaaggagaccctctagcccctatgctctttaatatagtgggtgaccgtctcactgaatcgatgagaggccattttganaatctttatagaagatacttggtgggaaacagaaagacctattactatctcatatgctatgaactgttttatg

SEQ ID NO: 77818 - DNA, 377 bp, Glycine max
  unsure (1)..(377): unsure at all n locations
ttatgcactcctctaatgactatagcatcatttctggcgctaaactgctgggagttggaagccatcttctcaattaaatttctggcttcagcaggagtcatgtctccaagggctccaccactggcagcgactatcatacttctctccatattactaagtccttcataaaaatattggagaagcagctgctctgaaatctgatggtgagggcaactggcacatagtgttttaaatgctctccagtattcatacaggctctctccactgagttgtctaatacctgagatatccttcctgatggttgaggcgctggaagcanggaataaatcctctaagaatactctcttaaggcatcccagctcgtgatggaccttgga

SEQ ID NO: 77819 - DNA, 414 bp, Glycine max
  unsure (1)..(414): unsure at all n locations
cttggaccaatgagaaaactggcgcccacgacagggtgaggatgaatggaaaacccatgctgtgactggcattcctatacagccaagtttcccaccaacccataaatgtcattactcaacccttcttcttacctaccgcccatttatccacaaaggccatgcctaaatcaaccacaaagtatgtctaccgcactctcaatgacgaacaccacctttagcacaaaccaaaaacaccgaccaaaagataaatattgcagcgaagagcctgtaggattcaccccaaattctggtgtcatatgctaacttgctcccatatctactngataatgcaatggtagccataacccctgctaggtccctcaaactcccattgttctgacgatacgactccaacgcaacatgtgcatatcgtgg

SEQ ID NO: 77820 - DNA, 418 bp, Glycine max
  unsure (1)..(418): unsure at all n locations
agctngntcctatcattnggtgctctcgttaccatgtctgttcctccctccaccgccagttcctctaataaccttgaagctgccatcctcaaactcactgacctccatgcctcccttggtgagacagtccacacaatggcccagaagtttgatgcccttatgctccgccttcccccatcctctttctcatcctccgctgcaactccacccattcccaccttcttccttattcctgcaacacaatacaaaatgaaacttgacatcccatgatttgatggcactgaccctttcgggtgggtgttcaaaataaatcaatatttccaataccatgccacaccaaaacaatatcgacttaccatctcttcattctacatggatggtcgcaccctcgcgtggttccagtggatggccaacaatg

SEQ ID NO: 77821 - DNA, 439 bp, Glycine max
  unsure (1)..(439): unsure at all n locations
agcttaaatgtgctcatgggtcattctcgttatatgcgatatgacttgtctgatgcacaacatgtcatntttttatcatgccttagctcgattattattgattatttctctctaaaaaattagactttgtatattcttggttgcatttcaattttgcagattgcaagaaccaaacatcaatcttatgaggaaccttcttctaagaagatgaagcaactatccaagggacaacccataaagaagcaacctttccaaaacctcaaattcaaggacccttgagccgccaatgatattgataggttctttaacaaattatgtcgaggcaagatattatgttagcctcaagagggagggttatattgagagaaaggtatagctaaaggaatatgagttcactattatttaagaaacatttgaagatagagaatggaataagatg

SEQ ID NO: 77822 - DNA, 452 bp, Glycine max
  unsure (1)..(452): unsure at all n locations
aagtttttcttaaagttataactcttctaaatggtcttcttgaccagacatgaagagtctataaaatcaaggttttggtttgcattttttaattcaatgaattctatacttttcacattcatttgatcaatcctttacaagccttgaatctctttgaacttcttcttcttatttgtaccaaaagctttatgaagttntctggttttccaaaccttgaaaacttgtgctattcatcctttcattctcttttgcctttgccaaaaagaattcgccaaggactaaccgcctgaattatntttgtgtctctcttctcccttttccaaaagaacaaaggactaaccgcctgaattcttttgtgtctcccttcttccttgtcanagaattcanaacgacacagtctgagaattcttttgattcttccctttcctttatacaanagtgttcaaaggact

SEQ ID NO: 77823 - DNA, 296 bp, Glycine max
acactgtgacattcggcacaatcttctataatcaaatgggtgaacctcttgtctttcataaagaaatacatactacttggaacatcttgacataaacaataacttagtttgagaaatgatataataaaaaaaattgacagataaaagtgcttttgaattaattaagtatatagctaagtaacttacccagttggtgcacatgaccttgtattcattccgaagcaccttgaaagtgaatgaactcggcactttgatggataatgcatgccatcttggaaaaatttttacattactac

SEQ ID NO: 77824 - DNA, 483 bp, Glycine max
agctcggagaggatgcttcaatggaggacaagaaagatgtgtgtattttagagaggcgggagcacgagcttgaaggaatataagagggagagaagtggaactttgaagtatgtctcataagactctcattcatcaaagctacaacaagtgttacacatgcttctatttatagactaagtagctggcttgagaagctttcttgagaaaacttccttgagaagcttctttgagaatacttccttgagaagctagagcttagctacacacacgcctctcataactaagctcacctccttgagaagcttgcttaagaatattcctaatgaagctagagcttacctacacatacctctctaatagctacagctacctccttgagatgagaagctagagctcagctacacacccgctatcatagctgacctcacgctcatgacatagaacatgagaatataataataagccttattacacagacaactc

SEQ ID NO: 77825 - DNA, 423 bp, Glycine max
  unsure (1)..(423): unsure at all n locations
ttggcacaatctgaggaattctaacatccaacgcaaggaacttgtggaggatgttagatggaacattgtgtttggtgcaaccttggacagaatttggtggaggagaaatgattctgtttttataaatataaggacgaatgaggttggagtattattgagtggtaaagctttggtcatggacattaatcaaatgaagcggatcggatgtatactgtgatgaaccctgcatatgcttgcaatgctgattatacatgagaacggaggagagcttgggagggctctgtcaaaatcaactgagatggagcatattctcttggtaataatattgcatcgcgtggagttgtgattcgcatcacgatggggactttatccacgctttngctaggagaggcttgaaccttgtccattcagaaacctgactat

SEQ ID NO: 77826 - DNA, 377 bp, Glycine max
  unsure (1)..(377): unsure at all n locations
tgtatgcattccttgtgcctctttttcttacaatgcaaaggatagacatggtgaatgccaacaatacatctaaacatggcttaaggaatccaaacgagaggtgtacctcggagcttacttgcatcagtaagtcatatttatcatatgactgttaacaatgtgtttgntatacctatctaattccgttgaaattcaatgcccattggcaactggttattttgtgtcttatgcaagatgttgtcgttaggctctattcgttgcgtaagacgcctgatattcatattcaagtcgcaattaacaagttaagtcttaacatttaacttataatgtggtcttatcagaagttcaagcatanatatgttcgccttctatatatg

SEQ ID NO: 77827 - DNA, 445 bp, Glycine max
  unsure (1)..(445): unsure at all n locations
agcttctatataagctgaaccatcttatcaatattctctttgttagttttattcagagaattagaggttatctcttttatcttagtgagagtgattctcctaaattcttaagtgattcaagaacaccttggctgtatcaaaggactttcacaacctttgtgtgttgccctcgctggaaagagtgattcttttcttcctttcatcatcacccttgttctttcaaaccacaattccagaagatccacctctggccaaaattatctcgtggccataactcccattttacgcactcaaattgactgattcttgagcctatattgactntcanaatgagacctttcacctcgttttggaatcacctcatttagagccctgtagcttcagttattgccatttctatatttctgtccagccaccacttaacctacattntaccatcccattc

SEQ ID NO: 77828 - DNA, 470 bp, Glycine max
agcttgctaacccatggaagctcctaataatctccactctttttggggagggccacgcctggatggacctgatattctcatggtgcacttggaccccatttctaccgactacacaacccaagaagactatattatgtacgccacagggacacttctctataattgcatagagggtgtgtttcctaaagactggaagaacatgcctgagatgttctaagtgataatctaagcttctactggtcacgtaaatatcatctggatagacaactacacatctacctatgaaatccattaagacatgatgcataagcctcataaacgcgcttggtgtgttagtgagcgccaaatgcatcactatccattcatacacaccaaacttggtcttgaaagcggtgttcactcatcacactttttctactgattggtgataccactttaagatcatttttgacagatattggaccatgcac

SEQ ID NO: 77829 - DNA, 379 bp, Glycine max
ctacccatggaagctcctaatatctctcactctttttgttgtgggccattcttggatggccttgattatctcaaggtccacttggaccccatttctaccaactacaaaatctaagaagactatattatctacacaaaaggtacacttctctatatttgcatagagggtgtttttcctaaagactgagagaacttgcctgagatgtcctaagtgatcatctatgcttctactgtacactaaaatatcatcaaaataaacaactacaaatctacctatgaaatccattaagacatgatgcataagcctcataaaagtgcttggtggtgtagtgagcccaaaaggcatcactatcccatcatacaaaccaaacttggtcttg

SEQ ID NO: 77830 - DNA, 376 bp, Glycine max
  unsure (1)..(376): unsure at all n locations
acacaatcggacatccgagagaaaaggtattgacatttgaatatgctcataacattcgttgtcaattacgagcgtctagatatattataggattcattcggacatccgagtaaaaagatattatctttgtattttgctcagagcttctgttttcaatttcgagcatctcgatatattacaggactcaatcggatatccgagtcanaagatattgggcgttggaattgctacgagcttccggggtaattacgagcgcttaatatgctacaggacacaatcggacatccgagagaaaagttatggtggcgtgaagatactcacaagcttcgccgtcattacgagcggctcgatatattcacgattattttggcatccg

SEQ ID NO: 77831 - DNA, 433 bp, Glycine max
  unsure (1)..(433): unsure at all n locations
ctttctcattatacaaaagngngctatatcttttcattctcttctccctttgccaanaagaattcgacaaggactaaccgcctaaattctttttgtgtctctcttctccctttgccaaaaagaaatcggacaggactaactggctgaattctttntgtgtctctcttctacctttgccaaanagaattcaacaaggactaaccgcctgaactcttttgtgtctctcttctcccttttccaaaagaacaaaggactaaccgcttgaattcttttggtctcccttctccttgtcaagaattcaaatgacacagatgagaattctttaattcttccctttcctaatacaaaagatttcnaggactaaccgcctgagaatactttgtttcccctcacaaagttcnaaggacgtaatcgctgagaactattcttacac

SEQ ID NO: 77832 - DNA, 508 bp, Glycine max
  unsure (1)..(508): unsure at all n locations
agctcgctcccatacgtgntcaccttcatcacccggcctcttgtttctctaactcttcattttagntgtcaactcctctacctgaatgtaggtaatattttaattcactggctacatcattcatgtggattgagttaaaaacctagccaaaatagcaggctttaatatcaacttttggaattccactaggaataacaccacgtatgctttgtgcatgaaacccaaaacaaaggccatcttctatatacaactaataacatatatgagagaattgaaaataaatatttggaaatggaaggaaggggtatctggcgtgtcataacagaaatgatgagactcattntggaattccaattcaagtggagttattagatagagattctntataacttacattaagctgctttcttcaggtaagtttctaggctgataggcagctntgtcataatagtagatttctatccctttttcgtattgtagcgtgtaataaaacggactactaatatta

SEQ ID NO: 77833 - DNA, 401 bp, Glycine max
atacgaacatggcttccgatcggtaccaacttcacagtatgacttagcgagagcatgaagtccttaatgaatatgcccaaagatggagagatctcgcagcccaagtctgaccgttcatgacggagagggagatgatcaccaatatggagcatacgttacccacgctcgactatgaaaagctgatcggctacatgtcaactaactttgcagatctcatcttcgtcggagaaaggattgaatccggactactagaaggcgagttcgaatatgctgccaatatggcccccaacaacaacagaagagcctcagtagtgtgcgcgaggaataaggaaggagacgcccacgcggtcaccaccgccccgacgtggatgaaagcacctcagaatattcaaagctcatac

SEQ ID NO: 77834 - DNA, 491 bp, Glycine max
  unsure (1)..(491): unsure at all n locations
agctntagcctgatcgctaagcgacatcttattcgtggttatttgttacctattgncgccaagtgcaactctctacggccataactaaggtcgatgaagctaagcgccaatgatggcagctaagcgagattcattgcagcaatatgagcactaagcgagtacctctcagctaagcacatgctcctctgtgcttaagatgcatcattttagctaagctggccagagccaggcttagtgagagttatagcttttctaatctgcagacctcgctaagcggacgtactctggcgctaagccgagtttctgttcaaaaattcaaatttgaaacatcggcttagtgcacgtgttcgctaagcaagcctgggtgagaaaccaaacgtctctgttgcttgttagcgcacggtccgctaagcaaagtatcaaaaattgctaaggagtgaacaacagtacactacatttgcagaaacagaacctgcattatatttactctc

SEQ ID NO: 77835 - DNA, 491 bp, Glycine max
  unsure (1)..(491): unsure at all n locations
agcttcaagaaaaagatggcctcagcannatccttatttttataatgaagatctatcaacagacctccaatctttaatggagagggttaccactactggagaacccgaatgcanaattttatcgaggcaatagatctaaatatctgggaagccatagaaatagggccttatatacccaccacagtagaaagagtttcaatagatggtagttcatcaagtgaaagcataaccatagaaaaacctatagatagatggtctgaagaggatagaaaacgagtacaatacaacctanaagccaaaaacataataacatctgccctaggaatggatgaatatttcagagcttcaaattgtaagagtgctaatgaaatgtgggacactcttcgattaacacatgaaggaactacagatgttaaaagatctatgataaatgcactaactcatgagtatgaattatttagaatgaatgctaatgagaatattaagagtat

SEQ ID NO: 77836 - DNA, 503 bp, Glycine max
  unsure (1)..(503): unsure at all n locations
agcttataagtgcctacaatggcaagccagtgctttctttttctcaacacaaattctttaaggtatatacaaatgtatctatctcttggtttaaaatatctttcttcaaatatcaatctttagcatcagtgatctacacttgtttgacgggtgcacttccactccttcacttttaaaaaattacttataaatattttttatgtgtatatttttttctcccttattttatatattcccgtgctcctaattttctactctttgtgctaaaaattattaattntaatttttaaataaattaaacctcctgacttaggctcctatatctaacactgtttagcatattcattctatnggagttgagtttatcgagtatgggaaattttatatacaactntagtcattattttgaaatgttttgatctacttacnaaccttttacctttgggcatctcctcaaccttatnggataatntctctcatatacatacataaataatataaac

SEQ ID NO: 77837 - DNA, 383 bp, Glycine max
  unsure (1)..(383): unsure at all n locations
agtccacggaggaaatgcttttcttcttataagactggaaagcgggttctaatgacttctctgcggcttccacataaggcatagaggatgggccgctcaccaagatgtctttctcgcttgataccatgaccagatgcccttccactacgaatttcaacttttggtggagtggtgagggaacaacttctactgagtggatccacgggcgccccaacagacagcttgagggggggtaatatccattatttggaaagtnacttgacaggtgtgagggcctatctatactgggagatcgatctctcccctaacctctcggcgggtgccgtcgaaggcacgaaccaccattgaactcggttntaagtgggaagcattgaatggtaatt

SEQ ID NO: 77838 - DNA, 361 bp, Glycine max
  unsure (1)..(361): unsure at all n locations
gaaactggnttggtaggcccacaaagcatcatctaacttggcagcccaatccttccttgtacatgccatagtcttctccaatatcttttttaactccttgttagagacctcagcctgaccatttgtttgagggtgataaggtgaggtcaccttatgcattacattgtagtgccccaacaccttctgaagttggacattgcagaaatgtgagccatcgtcactgatcaagactctnggtaccccaaagcgtgaaaatatgttcttctttacaaacttgacaacagtctttgcatcattcttcggagtagcaacaacctctacccatttggaaacataatcaacgaccaccaatatgtactca

SEQ ID NO: 77839 - DNA, 526 bp, Glycine max
  unsure (1)..(526): unsure at all n locations
ctttagtcacctgccgcatgcaagcttgtctcagcgtttatgcgagacagagaccatcttgtcttctatcatcgccaagtaccaagaagagttatgtctagccgcggcccacgagcatatgattgcggacgaatatgcccaagtatactcggaaaaagaggctagaggaagggtgatcgactctttacaccaaaaagcaaccatgtggatggatcggtttgctcttaccttgaacgggagtcaagaacttccccgattggtagccaaggccaaggcgatggcagacacctactccgccccccgaagagattcatgggcttctcggctattggcagcatatgatagacttaatggcccacataattagaaatcgttaggaaacttgtatggtctctaagaccttgactagatacgacttcctttttgaaatanaatgagttggtcccatgtttctactnccaaaagcttgtgcaaatcaaatcactcctacattncatctctagcatgcatctttcttcttacccac

SEQ ID NO: 77840 - DNA, 346 bp, Glycine max
gcacccccatttttctaaatacaccccctgcctttttttggtgattcttttttcgtaaagttacggaaacttatgaatttcgtaacgatacttgttttcttcctgtaatgtcacggaaccttgcggattacataatcatcccttttttgacttacggaatgttacgaaacctcactaattgtgcaacgatgcttcctcttgatttccggtgtgtcacggaaccttacgaattgtgcatcaatattttcttttgatttccggcacgtcacgaaatttcacaaatttgctaatgatgggtgtcaagcacctcataatgacgaaacacaagttgcataccaccaagcac

SEQ ID NO: 77841 - DNA, 411 bp, Glycine max
  unsure (1)..(411): unsure at all n locations
aacattgtaatcgattacagcttcttgaaaataattggaatgctataaattcattcgaaaactttttcaaacaatttgctactggtaatgattacaacaatctggtatcgataccagagagaaaaactctttggtgaaagggtgtgtcacaaactcatgttgctatcagagttttgaaactatttttaatacttatcttgatggagccttttcttcattcttgaatcttgaggcttgaatcttgatcttgattcttgagatcttgaaccttgaatcttgattcttgattctaggctgtcttcttgagtctagaattcttcttgattcttttcttgaactcttgaatngttctagattcacttgagttggtctgtgattgatcttagagctttttgtcatacctttgcatca

SEQ ID NO: 77842 - DNA, 342 bp, Glycine max
  unsure (1)..(342): unsure at all n locations
ttaatgagctgcaactgactatgctgctctacgggatacttattttatcttcanaacattgatgctgacaagaatgctcttgtaataaggtatactactcacaactaaatgtctggcaaaactgatttacaagggtatatcagacagatcataggattcatcttagttttccaaacttattggtgaactatgcactacagctaattaatcatgtggcccgctcatcttctacggngacaagatggtctgctatctatgtttcaatcaacctgctagatctatgttttcttttattgtgantgaactaccataattgtctttcctagatatatctgatgtaat

SEQ ID NO: 77843 - DNA, 292 bp, Glycine max
  unsure (1)..(292): unsure at all n locations
tgcagcttttagaatctntatggagcttctttgttgntgtgtctcacnnacgagaagggggtgtgtaactaatctctatcttctcaacgaagtcctcctcacaaaacctatttaaggaagctactctattctataaagagaagcctgtgttacacttgttgaaactctgatgaatgacagtcgagtgagacacacactgcaagatacaactctcactctctttttcttccttcaattgcgtgctcccccctctctctttctatctcctcattcttttcctccattgaaacat

SEQ ID NO: 77844 - DNA, 426 bp, Glycine max
agcttgagtgtcattctggtgaggctgagctaattttctatgctacgctaagctcaagtgctcttctatttcaaaaattgtagacttaagctaagcctatcttgatgcgctaagcctaatatgcaaaaaaatattttatgtgtttgcgcttatcccatgagtaaaatcttataaggtgcgctaagcgcccagtcaaaatttaagctttattcttttgtttttgttgaaaataacatgtgctaatctcttgagttttatcttatattttgcagatggcatttaagataaggatggctccttctacaccttcccaagccagatatgacagatctatgttcacctctcaagaagcttgtgagagatatactgatataattgtgccaaggaaactactaccagagagaaatgtagtagtatattacactg

SEQ ID NO: 77845 - DNA, 516 bp, Glycine max
  unsure (1)..(516): unsure at all n locations
gtcacctgcngctgcagcttgttaataattcaccattgtgcacctactcctatattggacttgntcttccttagttccctaatctttngtttagctctgtcactacatttgaaaggtttgaataaaggtttttctatggggatatttgactgagattcttcaaaagatttttgtgtaggaagtgtcttggttttgatagactcctaaaatttgcaaatatttattggtataattagcctgttccatgaggcttttgatgtctttagaagttatctcttcgttaacatctttngtcttaaatggactagccatgacaggtttattattactgtctttgacctttggtagttgatattgtgtngtgggaggtaattccgatgggattaactcaccatcnnttgattaccaattggtaattacatttgttgttggatcacctatgatatcttgttccacgggtaattatatccctcttaatggataagcatgaaccaatcanagaaaaaacattaattt

SEQ ID NO: 77846 - DNA, 442 bp, Glycine max
  unsure (1)..(442): unsure at all n locations
tcatctctgatntctcctctgagcttagagattcagacatcttttcttctcctttaagagcttctgcacaaccatgatgaatcaagattgctctcatcttgattctccataacccaaagtcattttcccctgaaaacttctctatatcgtactttgttgttcccatctttcttgatcttgatcctttccccacagacgacgccactngttggttctagttataaattctgctactcttaatctgcacaagatcaaaatcaagaanaacacagataacacaacacagcaatacacagtagagcaagaacccaaagatttacgtggttcggcaatatgtaacactatgattattataatgctcgattaagtgtctttattatattgcaagagtaattgaatttaatttaagtgtatgtacttaattaaactattataacggtat

SEQ ID NO: 77847 - DNA, 398 bp, Glycine max
tatgaagtactctctagcttatgaatagtatgagtaccgaacttccttgaaattttgttgtttggcctattacaagtacataccactcataccattggttcttgtcaatggtagtgaaggaattgggacaggctggagttcttacattcccaattataatccaagggacatcattgccaatgttaggcgtttggtgagtggggagacaatggtgcctatggatccatggtacaagggattcaaaggaaccattgagagaagccccaacgaaggtggatacgtagtcaatggctcagtggaggaaataaatgaacaaactttcataatcactgagctgcctgttcgtaatggacccaagatacaagcagtccttgagtctatactgatgggcacctaat

SEQ ID NO: 77848 - DNA, 352 bp, Glycine max
  unsure (1)..(352): unsure at all n locations
ttataccgattttattccatctagaatttatttcattcagaatttatttcgtctagattttatttcatccaatcttatcttatcttatccagattttattttatttcgtttatgagcttgaacttaaaatagaatttgtagttttgaggctgaggacctacataacagcaccaagattttagtttagggagttttttttctggagaggaaaataattntagaattttaggattccagttttcattactgttcatgcacactgttcacgtagaataaaatttggtttctgcaatttcgtttcggcttcaatctacagtttcatttctactgattaatggaagactaagtctct

SEQ ID NO: 77849 - DNA, 364 bp, Glycine max
  unsure (1)..(364): unsure at all n locations
attaactttacttacgcgnggtgtggtcagttgattttatttttacttgaaataaaaaaatgatgataaaattgtgtttggttagatttttatttttattttcgataaagatattttttttctaacgagcaagaaatcggaaataataagatcttattttaattgtgtaaataaaaatactataacaaggaatataattttaagcaaatataaaaatacatctttttttgaaaatacattgtcagtgtgtttatttcttgaaaggagaacataataagtgcaaataaacattttttaaaattttaatattttaaaaataaaaaaaattttcctaaaataaaaatgcaaaccaaatacaatgaaa

SEQ ID NO: 77850 - DNA, 381 bp, Glycine max
  unsure (1)..(381): unsure at all n locations
tattcttaaaaatttactttgcgacgtcacaataatccatcaagaattaagaagatacacttttgtacacatacatgaaacattatgcatatgtcatatattacaacttttcaaanaaaggaaaagaaaggccttacgtgtgtgaacctaaccaactataaatttgggtgtacaaaatacatcaacaagatacatgtggactcatataatttaaccaaattatacaatttactacagtacttttatattaatatatttatatttaattattacattctatttttatattgagatattacagaatttttgttcactaaaattntttaaggcttanaatgtttagatattaattaatctgtttacaaattcctgcgctgactc

SEQ ID NO: 77851 - DNA, 377 bp, Glycine max
tttcaccaaataataacctttacacctgcacacaaacaatactttccttgatttagtctcctttcatggatttcatggtcagaggaggaagtcaaggtggtgacaataatggcttccaaatttatgggtgtgaagttataaacgctagcaacaaccctcctttgacagccataggcatagataggttcttatgtggccactttcctcaccagcaacaacatgcaaggaattacaatgctgcaaatgtttttgctgatgaggaggcttttaataataagtggacacacatcaaccaaacccctacattgtgcccgaaaggtatgcatgttttatgtaagaatgcgaaagtggtgggaaggaaaagcaagaaaaaacag

SEQ ID NO: 77852 - DNA, 382 bp, Glycine max
  unsure (1)..(382): unsure at all n locations
tgttctatttcacagctcctaagtcctgaaactatgattagtacttagaatccttttgtttccgaaggatcaattcaactttcttaaagatgtcaaattgcaatttatccttatttttaagtactaccacctccacctcattttgtaggtcccgcacctagtgtcctattttttaaactcggtgacatgcgtgtgttggagataatttgtatattccttcctagtaaggtatcgtgcgaacgcacatatcattcttgttttgacatattttttgaaatacattagtttataaaattaatattntttattgagacaaacataatcagtttattaagttatccaaaatggcagaaagattgaaagagtattcaagtagcaagaa

SEQ ID NO: 77853 - DNA, 430 bp, Glycine max
  unsure (1)..(430): unsure at all n locations
tctggtgggacatcttaacttgctttccaatctgacattcaccacagattctgccttcttctattttcagattgggaatgcctctaacaaccaccttgtcaatgattntcttcatgcctcttaagtgcagatgtccaaatctttgatgccatattttgacttcatcttctttggagactagacatgtggaggagtaactggtttcttgaggtgtccataggtaacagttgtcctttgatctgctgcccttcattaggacttcactcttctcatttgtcaccaagcattctgactttgtgaagtttacattgaatccttcatcacacaactgactgatgctgatcaagtttgcagtcagtcccttcaccagcagtactttgttcagactangaagtccatcatggactatgcttcccattccagtgatctt

SEQ ID NO: 77854 - DNA, 397 bp, Glycine max
agacagacctactatggtcttgaaggcagttctataagcccataatgcatcatccaacttgcttgacccatcctttttagtggaggctacaggtttctccaaaatcttctttggctccctgttagaaactttagcttgaccatttgtttgtgggtgatacgatgagactactttgtgtgtgacattgtaatggctcagcatcttctgaagttggttgttgcaaaaatgagagccccgatcactgattaggaccctcgacaccccaaagcaagcaaaaatattcttcttcaagaacttcactatagtttcagcatcgttctttggggcagccactgcttcaacccacttggagacataatccacagccacaaggatatattcattgccaaaagatgga

SEQ ID NO: 77855 - DNA, 418 bp, Glycine max
tgcatgatatacatctccccctttctcaagcaaattcttcttgatatcatctaaatcttcatgatttacaaaacctagtcaaattctaaaaaaccctaactgacataagctaaaaaaccctagtcggcatcaacttaaaaatagcactgaccgatgttgatcgaaaaaaccctagctaacatcgactaaaaatagcctggctgatgtcggcaaaaaaaccttagtcgacgtcaaccgaaaatctgtagccgacattggctaaaatatcctagccaaggttgaccgaaaaatcactagctaatattgactaaaaagtagctctaactaatgtcgggtgaaaaagcctagttggcatcagccaaaaaaaccatggatgtcggtcgaaaaaacctacctgaagtcaagaaaaaacaaccta

SEQ ID NO: 77856 - DNA, 289 bp, Glycine max
  unsure (1)..(289): unsure at all n locations
tctataaatagaagcatgtgtaacactttgtgtaactttgatgaatgagagtcttgtgagacacaactcanagttcaacttctctccctctttcttccttcaatttcgtgctcccccctctctctttctctccctctttcttttcctccattgaagcatcctcttcaagcttcttatccaaggctcatcttagtggtgaagctccttcttccatggcttattccttagtggatggcgcctcctctcacctcttctnctttgtcttccgctgcatctccatggtggaaaa

SEQ ID NO: 77857 - DNA, 420 bp, Glycine max
  unsure (1)..(420): unsure at all n locations
ctaggtctaatttttcaaatttgattcatccgagagctctagaatgaaagaggagggtacttgnttaagggacaaattgaccacttcgaaagagaatgtcaagacattaaaaaatgtcatgcttgcatacatccatatgaaggaagggcatattccttttgagttgggtgctatgttttgtcataacactagtaatttagttgtaagtacttctcttattcttgtgttaaatttaatatattactaacatttgacatgataagatttttatttcatgggatgaaggaagtggacaagatgggccaacaccaagaggaagatcatcattagacagtaatttccatgcaacttgacatatgttgcttaattccttttgatatatacttttttgggtgtaatatatgtttcaaaagttcaata

SEQ ID NO: 77858 - DNA, 316 bp, Glycine max
  unsure (1)..(316): unsure at all n locations
tgaattttaagaagagatcaatcatctatctttcaatcttctctcaacatcattcaatatctttcaactctttttacagaattttctgattctttttctcttcatctttctaaaaatttttgttcaaaactttctcttccaagaaaaggtctttgttcaaaaacttgtgatattcatattnttaattctcttctccctttgccaaaagaacgaagaactaaccacctgaattggtttgcgtctctcttctcccttacaaaagattcaaaggactaaccgtcggatggttcttttgattcttcccttccccttaagc

SEQ ID NO: 77859 - DNA, 416 bp, Glycine max
  unsure (1)..(416): unsure at all n locations
gtggtaatcagagcacaagagcttctaagttgtgctccttanacctccattattttttttgctttaccttctcttccattgttgtttcttcattttttctccatgtatatcctcacatgtcttgtgctaaatgttgttaacatgattctttagagtttccaccaattaaacttgctatagaaggtagacttgattttctatggttcaaatttcttgttcttgttcttgaaccatgaattgtgttgagtttaggttcctttgagttttgtcttgttatttttttgtggctgaaacctaaaccataaaattcttacaaaaatattaaagtagaagaaaacctcaaaaatctagagtgacttgttcacctattgtagttttgtcatagaagtcatgtctagtcatgaaacttgtcacat

SEQ ID NO: 77860 - DNA, 392 bp, Glycine max
cgagctcatctcgcccaggcgagcaaggttgcttcctccagaagcaacagccttctggaggaaggatctggaaggcccaagtgggccatattgctatttgcactcccattttactaaatgcacccccttctatttttttggtaattctttttccgtaacgttacgaaacttttacgaatttcgtaacgatacttattttccttccgcaaggttacgaatccttacggattatgtatttactcttttttagctttcgaagaagttacgaaaactcacggattgcgcaaaaacacctcttttcgatttccgccacattacagaatttcacggatcgcgcaagcctgcttccttttgatttctgacacgtctcgggacttcatttattgtgcaac

SEQ ID NO: 77861 - DNA, 415 bp, Glycine max
actaactttaccaacctaaagtttaaatctttgaaactaaaagcaagttaaaaggcttacttggattgctgaagatgaaagcaaaaagggagcaaggatacaggcaacgaggaagttgagagcacagcgcagagaaaatggcaatgaatgggagaagaaatgcacttaaaggcataaaatgtaacttcctagggcagttacgccttattgctttttggcagtttggactgcctcgcttatcatgtcaactcgctaagcgagcatgcaatgacatttgagtttccaaactcatgcactaagcgggcatgctcacttagcccaattcaaaaatttcaaaattttaaattccagagaagtttttgggcttagcacgaagctacgcgcttagcgagttctgcagctctgattggcctac

SEQ ID NO: 77862 - DNA, 419 bp, Glycine max
  unsure (1)..(419): unsure at all n locations
gcttctcccctattttgctatagatagggggagaattgaataaaaanagggttcagccccttaggcacttctctctctctcgaaatttctgaggaaaattagtttcgtgaaaaaaatccaagccgaggcgcttccgtaacgtttccgtgagtaattacgcgaagattctcgaccgtttttcaagattcatcgctcgttcttcgttatcttcagtcttcaacgggtaagtacctcaaaccaagcttttcaattcattctatgtacccgtggtggtccaaattttgtttcatgtattgtttattctcgttttcatttactttttatacccccttntgacgtgcttaagccatttatttaagtcatttctcgcttaatctaacaataaaataaattttcaccgatcgtttgaattgatcatt

SEQ ID NO: 77863 - DNA, 151 bp, Glycine max
aatgggataagaaatgcacttaaaggctttagatggtacttcctagggcggatacgccctattgagttgtgggcgcttggactgccgtatttaacatgtgaactcgctaaactagcatgcgatgacctttggatttcatacttaagcctaa

SEQ ID NO: 77864 - DNA, 417 bp, Glycine max
agcttagcatctgaaattatgttgcgttttagcatcatcagcattatttcaaaaggcattagaattaaatttcgaagctaacacagagtgcaaacctggatacacaatgaccaagggttttctggcctcattctgtagagtacgtggaccatttaaccctatcaatagatgaagacttctccaaatacttcttcaccaagcagagatagagacacctcttgcatgatatctgtaattcaaataatccttctcatgaaagcaagtctcacattcataaattaacttaaacacttataccaggtctgggtcttcctttatttctttttcttctcccaattaacacacactgactttgtctctctctcgaacacaatgtcaaactccaccatcggcaccaccgcggccttaccaccaaag

SEQ ID NO: 77865 - DNA, 415 bp, Glycine max
ttgatggtgtcgagaagaaatcacatgtttgtcatcatcaaaaagggggagaatgtgaatgtatgtatacatgattttgatgatgtcaaagaagaatctaacaaggctgcttcaaatgataagcatttgcttcaagaataattcaagattgcttcaacaaacaaagccttgtttcaagattcactaaagaccaagccttgccttaaaacaatgtgctttcaagacatgcaaggctctggtaatcgattaccaggaagtgtaatcgattaccagaagacagggttgagaaatagctgttgaaaaaggttttgatatttgaatttcaacatataatcgattaccatatgtctgtaatcgattaccagcaacgaaactttggaaattcaaattcaaaagtcataacccttcaaattat

SEQ ID NO: 77866 - DNA, 348 bp, Glycine max
tcattatgccatataatttggcgtaagccatttataaccaattaatattattaagtactcgtttcgttaagaaaaaaattagttggtccaacaaaaataaattacgcgtgtatgatacatcgttgtcataattgacaatacataatgacatgcatgcatattaaagtttgagcgcgaaaccacattaactaacttgactacacattctaaaggaaacataaacacgaaacatgttcacgcatgtctatttttttgtaaaaaaagtgaagcaatctgttggtgagaaccatgtatatatatgagacacaactaataaatcacatgttatcttgctttcacacagtttcc

SEQ ID NO: 77867 - DNA, 426 bp, Glycine max
agctacacacacggcctgtaatgacttagctcacctccttgagaagcttccttgagaagattcctaaagaagctagagcttagctacacacacctctctaatagctaagctcatctccttgagatgagaagctagaacttatatacacaccccctataatagctaagctcacccccatgacaaaatacatgagaatacagaaaaaaagtccctactacaaagactactcaaaatgcctcgcaatataaggctaaaactctatactactagaatgaccaaaatataaggcctaaagcgaggaaaaaaaacctattctaatatttacaaagataagtgggctcatacttagcccatgggctcaaaatctaccctaaggctcatgagaacccttgggccttcccttggatctctagcccaatctacttg

SEQ ID NO: 77868 - DNA, 420 bp, Glycine max
  unsure (1)..(420): unsure at all n locations
agcttgntaacccatggaagctgcgaatatctcccacactttttagggggggccattcttggatggtcttgattttctcaaggtccacttggaccccatttcttccaactacaaaacctacgaaaactatattatctacacaaaaggggcacttctctatatttgcatagaggttgtttttactaaggactgaaagaacttgcctgagatgtcctaagtgatcatctacgctcctactgtacactaaaatatcatcaaaataaacaactaaaaaaatacctatgaaatcccttaagacattatgcataagcctcataaaggtgcttggtgcattagtgagcccaaaatgcatcactagccattcatacaaaccaaacttggtctatgaaagcggtttccactcatcaccctttttcatcc

SEQ ID NO: 77869 - DNA, 389 bp, Glycine max
ttgtctacaattgcatcacctctcaatgagctagtgaagaagaatgtggtatttacctggggtgaaaaacaagagcaagcctttgctttgctcaaagaaaagcttactaaggcacctgttctagctcttcctgacttttctaaaacttttgagctagaatgtgatgcctctggagtgggagttggagctgttttgttacaaggtgggcaccctattgcttattttagtgaaaaaccttatggtgccacccttaactaccccacctatgataaagatctttatgccttaataagagcactccgaacttgggaacattaccttgtttccaaagaatttgtcattcatagtgatccataatcacttaagttcattagaaggccaagcaagtt

SEQ ID NO: 77870 - DNA, 365 bp, Glycine max
atgatatggtattggaaagcgacatcctttggccagaaggggtttcattgggatggcactaagcacatgatcacagttgagaatgaaaaatgcttggaatgaatattgcactcgtagtattctttactatattgctatttgttattcaaagcagattggatttgactttttctttttttcccatcgcataaattggctaaaccatttcgatttaaggtgcttcaaaactaggatgatatagtggatttgtgtgctaaagatagagtcactggtcatggagctggaactgctatggatgctgatgaagcgatgagtagagaaacaaatgaagtggaattcatgggtttaggtgctgctgctactat

SEQ ID NO: 77871 - DNA, 372 bp, Glycine max
  unsure (1)..(372): unsure at all n locations
cgcatgcagagctgtagtgtatccgggccagtggcaccaggagaatggattaaccaaatatgggatgaagggaacatanggaggcgcgtcagcattgtcatcagagacagctttcacgaaaatggtaaaaaggaggaaacaaagaacgttgaaggagaagtgtacgaagaagacaaaggcagttttaaatcacctccatccatgtcacgtgacaaggaggtgatggggctagtggacttangccgtgttattgacaccacccctaaaccattttcacctaataaaaaaggcccattgttacaagaagcagtgcttttaacttcgtggttagtgtattcccgtaaagggagtaagacaaaaagaatagcccac

SEQ ID NO: 77872 - DNA, 404 bp, Glycine max
atatgcatgtgaattatgaagcatcaacaagaatcaagccaaggatattgtgcaagcattcaaacgggcaaaacacaccaaaagattatgatgatggatggctcgaattctcacaaaggtaaacttatcactttcaaattgagctttcaaaactatcatgacatgtaaaggaaaaacaaggatttcaagtcacaaaatgtcaagagtttattttcagaacaattacccattacttgaacatatcctataattcaaagacaaacatgcaaatttaacacaacaaaactaacaaaattaaactagaacccaacaaaactaacaaaattaaactaatttaacatgactaacaaaaccaaaaccaaagaacacccccccatacttaaacaacacattgtccttaatgt

SEQ ID NO: 77873 - DNA, 395 bp, Glycine max
  unsure (1)..(395): unsure at all n locations
tagtcgtataaagcgactaacaaggagcaggatcgagatgaatgacaggatttgattacctgtccttattattattataattatatcgntctgagtacattttatttattatgtttgtgtagtatagtggttgtatggttttagtacgtatgaactattttggtttgtggcatgtgaatatggtttacatcatactttntgttttgaaaacantttgaaagtcctgatgcataaagaatagtttaacttgactctttgaaaacgcagtgttgatatgagtttgaaatggtgattatggattgaatgcatgattgaaatgaagagtgtgttttatcatgagttgagcaagtgtgtatgttagatgagaaagaacaaganagtaggctcacaattag

SEQ ID NO: 77874 - DNA, 417 bp, Glycine max
  unsure (1)..(417): unsure at all n locations
ccatttattaataaagacaagttgagttttattcagaaaattagagtttatctcttttatcttagtgagagtgattctcctaaattctagagtgattcaagaacaccctggctgtatcaaaggactttcacaacctttgtgtgttgccctcgctggaaagagtgattctttccttcctttcatcttcaaccttgttctttcaaatcacaattccagaaaatccacttctgcccagaattatctcgtggccataactctcgttttacgcactcaaattaagtgattcttgagcctaaattgaatttcaagacgagacctttcacctcattttagaatcacctcatttggagccctgtagcttgagttttttccatttctatatttctgtccagccaccacttaatctacgttntctca

SEQ ID NO: 77875 - DNA, 373 bp, Glycine max
tctagcttctcaaggaagttttctcaaagaagcttctcaaggaagttttctcaagaaagcttctcaaggaagctacctagtctataaatagaagcatgtgtaacacttgttgtaactttgatgaatgagagtcttgtgagacacaactcaaagttcaacttctctccctttttcttccttcaatttcgtgctcccccctctctctttctctccctctttcttttcctccattgaagcatcctcttcaagcttcttatccaaggctcatcttagtggtgaagctccttcttccatggcttattccttagtggatggcgcctcctctcacctcttctcctttgtcttccgctgcatctccatggtggaaaatcac

SEQ ID NO: 77876 - DNA, 391 bp, Glycine max
attttgattctaccgagagctctagaatgaaagaggagggtacttgtttaatggacaaattgacaacttcgaaagagaatgtcaagacattaaaaaatgtcatgcttgcatacatccatatgaaggaagggcatattccttttgagttgggtgctatgttttgtcataacactagtaatttagttgtaagtacttctcttattcttgtgttaaatttaatatattactaacatttgacatgataagatttttatttcatgggatgaaggaagtggacaagatgggccaacaccaagaggaagatcatcattagacagtaatttccatgcaacttgacatatgttgcttaattccttttgatatatacttttttgggtgtaatatatgtttc

SEQ ID NO: 77877 - DNA, 426 bp, Glycine max
agcttgttgattaattatcttgaattgcagaatctgtgtattaaatgtgggacagatcttattttcttacaaattggatgccaaatcatgtgaagaatcttgtataagtctgcatgtgttttttaacccctcctaggggtgtcgtgtgccattccctatcacgtcacttcctagggcttgctccctcctgaattacacacacacacacaaacaaaatgttatattttcttgtttaaagcatgcatttccatgttttcactttccaaaggtgacttgcatggtgaagaatgtcatacataatgagtgagttatttcttaatgtacaagtctgtttgttttgccaatgtcagcaatatgttgtatttatttgtttgtcataactttgtttctatttctctttgcatgcatgattcaattgagttggca

SEQ ID NO: 77878 - DNA, 426 bp, Glycine max
cgagccgctcttggtgctcagaatatcccaaaaacaaatccctcttattactaactattgtgaattctttagatcctgaatgtacaaccttcaaattgttgctcgatcccctcttagttttctgcgaactagaatatcattatgtaagaaaacatggatgaagtcctcacgatgccacgtacatgtgtctttatgaagatataggatttatattccatcaagcatacattgactattgattacatgtaatagactttttgttacatgggtcccccaaatcacaattaaaaagcacaactaccaatctttcggagacccttggttaatatgtcttgactccttctgaggcggggctttgttggataatattatactttcgccctcccaaaaatacttatgactgaacctctgttcattaatcctatt

SEQ ID NO: 77879 - DNA, 374 bp, Glycine max
gatcaagacttcggtgtgacagaatccaacacatgctggaccacagtgttgccaaagattgtccatgaagttacccgacagtgcttgttgaaagctatcccaactatagcagcgttgccataccttataagaaaaggggaggagaaaaataaatgggatgatgattcaacttcggactggcaaaggggacaaagtaaattcatatcccttcccacaatttgtcttttccaaagagtctctttggattagactctgtccaaatacattctccaagcaagaactaacactttggaagggacattacacctccacaacaccttgagcataggggaactcatatattgcggttgggaatgtagtaccatatagtatat

SEQ ID NO: 77880 - DNA, 432 bp, Glycine max
  unsure (1)..(432): unsure at all n locations
gcttttatgtnttntacatgaattttgattctcaccgcggaaccaaacaccgccatagatttttttttatgtttctttntttgtttgagagcgtaaatcagcaaagttgcatctaaataaatgactgaaatgtcatttgtgcaataatttatatattaaattatacaattaggagagaggaagaaaaagaaaaaaaagtatgaaatgtaataaataatgccatagagagataaagacacacaaacattattgtataaaatgtagtataagttgtatgaataacacaaagttgatttctattgccacatgtaaattatagagggacagcaaaccaaacatgttactatccttacatggtttctatggggtccaaacgccttactttctctttggcgggtaaactatttcattagaaagattatgaaaaataat

SEQ ID NO: 77881 - DNA, 357 bp, Glycine max
  unsure (1)..(357): unsure at all n locations
tctcacgaatgtgccaacactcacaaatgcttcaaaatcaaaatgctctaaattattatgcctaagatcccgatgttcaatatcaccaataacatgatgcacagattccccagttattgaatgctcacaatgatcaaaatgtataacatgatgcctcactaatctatgaaatgtcctatctatctcangatctaaaggttgtaagtcagatggattgactctagtcatacactatattcagcatgcacacaactagttgtcttgtcatgtagataaatgtgtacgtttgaacctcagctaccctcaaatgatattcaaatgacttgaaatttngtgagcagccttataaaatgatga

SEQ ID NO: 77882 - DNA, 349 bp, Glycine max
  unsure (1)..(349): unsure at all n locations
gagcctctacatatattacgggacttcctcnaacatccgagacacacgttgttgttgtatgaatttgctccgaggcttaacattcaatttcgagcgtctgtatttattacgggactacattctacatcgtagtacatagttattgtcgtttgaattgcctcacagcgtcaacattcaatttctatcctctcgatttatgacgggactctttcagacatcctagcaataacatattgtactttgagttgagtgtgaactacctcattcaattccgagcggcatgacatatgactggtctcaaacagacatccgagcaaaaagtttttgtcgtttaattggttgagaagtg

SEQ ID NO: 77883 - DNA, 409 bp, Glycine max
  unsure (1)..(409): unsure at all n locations
gaagttttctcaagagagcttctaatgaagctacctagtctataaatagaagcatgtgtaacacttgttgtaactctgatgaatgagagtcttgtgagacatacttcaaagttccacttctatacctcttttattccttcaatttcgtgctcccccctctctctttctctccctctttcttttcctccattgaagcatcctctccaagcttcttatccaaggctcatcttggtggtgaagctccttcttccatggcttattccttaatggatggcgcctcctctcacctattttcctttgtcttccgctgcatctccatggtggaaaatcaccattaaaggaccccattgaagctcanagatccagcctccatagaagctccacaagcaagcttccatcaggatgtctt

SEQ ID NO: 77884 - DNA, 301 bp, Glycine max
agagaagggtattttcttatcctcctaagacatgctcatttgggctaacgcggagaggagccattttaataaatttggttcacagagtatgttcaaggctcatactggcacattatatacttttcatattactgagccttataaaaatattgaaagaattgttctgaatctgatggggggcaactgcacatatttttaatctctccatactcatacagctctctcatgagtgttatacctgaatatcttctgaggctgggtctggacaggaaaaatttctagaaactctttaagcatccac

SEQ ID NO: 77885 - DNA, 421 bp, Glycine max
agcttgatttgggggttgattatagctttagtttcactttggttattagtcaattcaattaagaaaaatcccaaagaaaagcgtccgattgatttttttcaatattttattcaaagatatttgattattttattattattttgcctcttttggttttaaacgtggttacggcgtgaaagatcggttggattttattttaacagagattaaacgatattacagctcaaatgatcggtggaaattcattttattatttactaggcgagaaaatgacttaaataaatggttaaagcatgtcaaaagggggtacgaaaaacaaacgaaatgaaaataaaagctcgcaataaagtggggaccactaagggtacatagaatgaattgaaagatttgattttcgggaacttaccggttgaagaccgaa

SEQ ID NO: 77886 - DNA, 345 bp, Glycine max
  unsure (1)..(345): unsure at all n locations
ctgaaagtaggaaccaaaacataagatcacctagtgaggtaaaagcgtcaagcaaatgacgttaaagaagcgcttcctaagaggcaacccagttttaaattctactatttttattttttttgttttatgcatttaaatcatttggaacttgctatatagtctatacataggagtatatcatccaatctttgaatgcttaacataagggtttcaatttcatggaaaaaaggactgaaaaataacttagaaaaatattttttgaanaaaaatagtcctttcgctaagcgcaagcctcgcactaagcgcatctctgttcatgtgttaatctacgagtctcaagcgctt

SEQ ID NO: 77887 - DNA, 410 bp, Glycine max
  unsure (1)..(410): unsure at all n locations
ccgcttgtangccatggatcttcttcgtcaatggagtcctttgattcttgaagatcaatgtcagcggaatggagatagaagaaagatgattgtagatgccacttcaaggagaagatgagtcaaaacaagctcaccaccataagaagccatggataagagccttaaggtaagagaaaatgagtggagggagaaggagagaaggagcacaaaattttatgccttacacattgcctctatttatagcctaagtgtcacacaaaatgaggtatgaactttgaagtgtaattctcaaatgatcaaagttgaaaaaatgcacacacatggcctctatttatagcctaagtgtcacacaaaattggaggggaaattgaatttctattcaaatttcacttgaatttgaaattgaattt

SEQ ID NO: 77888 - DNA, 389 bp, Glycine max
atgaaacaacgagatgatgcgctccatgagagggtggatcaaatggagaatagagatcattatgaagaagaaaggaggagaagagggaatgatggtgttcctaaacaaaaccgaattgatggtattaaactcaacattcctccatttaaaggaaaaaatgatccggaggcctacttggagtgggcgatgaaaatagagcatgttttctcatgcaacaactatgaggaggaccagaaggtgaagcttgccgccacggagttttccgactatgctcttgtgtggtggaacaagctacaaaaagagagagcaagaattgtggtttgaaagaacaagggtgatgatgaaaggaaggaaagaatcactctttccagcgagggcaacacacaaag

SEQ ID NO: 77889 - DNA, 424 bp, Glycine max
  unsure (1)..(424): unsure at all n locations
ctcgtattcgtacttggaaggatctgantactgcctttctaaggcaatatcagtacaattccgatatgggttccgatcgcactcagctgcagaatatgttcaagaaagagggcgaaacctttaaagaatacgcacagtggtggagggacctggcggcacaagtggctcctcccatggttaagagagagatgatcaccatgatggtagacactctgccagtgttctactatgagaagctagtaggttacatgtcgtccagctttgcggacctagtattcaccggggaaagaatcgaagtatgattgaaaagaggaaagtttgattacgtttcctccacgagtgcgaatgccaaaagaatcggggcaacacgggcaaaaaggaaggaaggagatgcccatgctgtctcttaatgcccgcgtgggtc

SEQ ID NO: 77890 - DNA, 422 bp, Glycine max
  unsure (1)..(422): unsure at all n locations
agcttcacgatccacaaggggttgttgaataaaactcttctaatcacttctcccatacccatagcgaaaccagaatcaaaatacatgatgcaagaaggatgtaccttaaagtgaggaagatagttgaaggaaatcacaagagcacacaagatgtagagagattaaagaagatgaacaaaaactcaacaatggcgatgaccgaaacctaacgtacacttcatttaagtaagaatgcaatcctccagcaattgccaggagttgaaatgacgcactaagaatctgtgccataatgtgattcaaccaacccacgtaacgcatctctaagatgtgcccgctcacaaagtaacacatgtaaaaaagcaatgcacacgtacaacacacgctcactatgaagaanaataaaacgcccatctttaatgcac

SEQ ID NO: 77891 - DNA, 423 bp, Glycine max
  unsure (1)..(423): unsure at all n locations
cagcttgaatgttttagttgcatgttggaaaaaatggggtttttaggtttttctcaaactatttttgtaaagctttgaatgttntagttgcatgcatgtcttcttctcttcttttttcttttttgggccttggaagagctcctaatacaaaggagactctgtccaatttttcttaagatttttaaacaaactttggatttcaaaatttggggctatgagaagggagaggtgattgagcatttttagtttactatttttatatttttcttagcttattttacctttctttgactcttattttctcaccttaacttagttttagtcttaggcaaataattgggcttaattgacaattgttgcttattttatggatgttgtgcttacttgacctatttgntcttcattcttcttcctctcttcact

SEQ ID NO: 77892 - DNA, 364 bp, Glycine max
cttattccgaatgaacggacactttcttatacattaaagggaatgaggttgagttctgaaatgcctaaatgcatttaaaactctcattggaaaagaaatccatgttaatgaattttggctcgaaaatggaacgagaagaaaaaagaattgtgtaccgtattcgttggtcttctgatgagaacaacgaggaagaggaaatggaggagggaatctgcgtttcttgagcctcggaatgtcgttggcttccactcgaagagcccttgcgcttctttgatggttctgccatttgagggagttatttgaaattcaatcgcgtcaagtgacagagactgaaaaagatgaagtttgggctttgtgggaagtg

SEQ ID NO: 77893 - DNA, 373 bp, Glycine max
aacctctgatgccccatgtgtcgaaattcgccattggcatctcctctttcaactcctcttgctgaagctactcctttggtaacaagacgtgattaaatagaataatttagaacggtaagattttaaactctgaagtataggtacttctaaaaaattatgttgtaggattcattggatattcttgggtatgtatgtgcatttttttttaaaattggatatttttgaataggtatcaaatctgtatccaagttttatttgttccaagagaaacagaaggtacatattcttttatttattccttgcaaagagacaagttcaacctcaagacttagagagttgaagatttaattttatagatacaaaaatctttcta

SEQ ID NO: 77894 - DNA, 379 bp, Glycine max
  unsure (1)..(379): unsure at all n locations
cgatatgtgaagatgatggtgcaagaactctggatttggtccgaccatgccctcctgatttccagctgggaaattggcgaagggaggaacgccccggcatttacgcaacgagcataatgtaaacctttacggttttaaaagctctatagttgggcctaggctttagagttttcattttgttaaggctttgtgtcttttgtctttgaatttataatacaaggatctttcttcatctgttcctggtctctacccattctcattcatttgcatgtttacttctttttctgaaacggcagatccaatgacgagtcccccgaaggtactaatacctgngacccgtctatcaacttcgagcaagaaatgaaccaaacggaagatg

SEQ ID NO: 77895 - DNA, 412 bp, Glycine max
  unsure (1)..(412): unsure at all n locations
cctacccttcgngggagggcgacgcgtgactcgctgtatgcgtgttccacgaaaggaatacgcgcagagtcgccaccaacgtttatttgaggaagacgtcggaaaagacgcgatctacgaacttttaagtgaaaggttcgggagttgtatctacgcacggggaaggtattatcaccccacacgtccgttccaagggacggcagcctttaatcgaatgtacaaacatgactttgatttttcatgttcccttttatgtccttatatcctttataccctttttatattattctctttttgtgggcgacaagggtgtttccctttgctcctacgtatttctcaattgcgatgaggaaatcagacctacgtagctcttttttatcaagtgattcttttttacttaaaaggtgatcat

SEQ ID NO: 77896 - DNA, 405 bp, Glycine max
ctatttgaatctcctatgctgtacctacatacataaaaacagtcccaccattttaatttttacaaaatcatattcatacaccattggggcatttcaccaagcacttggtgagcgcatgtttggacatgaattgcaagaaaatgggagcaatgtggcatgccccattgcttcagaatacaacctaggcctaagaccttttcattcaaatcctcaattcaagaaaacaagcaccaaagcaaaccaaaactgcctcacaaatataagcatgttctcacaatttaaggcaccaaaagatgaagaaaacacatcaatgggaagcaaaaacatcaaggatggaatacttacttgttggagtgaattgaaacaccaaaaatgaaagcaaaaggcaaccaaaagtggcttgag

SEQ ID NO: 77897 - DNA, 429 bp, Glycine max
  unsure (1)..(429): unsure at all n locations
atgctgatataataatntcctctgacctaatattacatagaaggaataaaatagagatggatattcaatatatagatagaagaaaagaaaacacaatcattttctactttctagtttttctaccaagctagtaaaatggaattgtttcaatccacatctttcatagaaacaaactaaatttgtcactcagtcaatagtaaagaggatacaaagtataatttaattgatgacattgtcatactgttagtccttcaaatgtattattattgttgatcacgcaaacttgttcatcaagtggttccccaacacctcgactatcatcatggagaatacgccttgagtagtaaacattgtgttaatactttgtttgcaataaaataatattgaattagcattaataaaagaaagcttgaatacctatgaagcatc

SEQ ID NO: 77898 - DNA, 430 bp, Glycine max
ctttaactagaaagcttctcatagactttctgagatgtttatggatgcccgaaatgaaaataaaaggccatattggattggagatcgtgtttggaatgctctgttatcacattggaatgcacctgagtatcgtaccaagtgtgcccaggcaaaaaaaaaccgggcatctgaaaagggtggatgtatgcacacgggtggttctattagcttgcaggatcatgccattgttagacaaatgacctcagtatcttaagaaggggggcggttgaattaagatatcaaactatccccaattaaaatttaactctctttttttaattaataatgaaaccctaattatgaattatttcaagaataattcaaaataaacttctctaaagcgaaatataaactgcaataaaataaaagaaagttaagggaatagagaatg

SEQ ID NO: 77899 - DNA, 422 bp, Glycine max
  unsure (1)..(422): unsure at all n locations
aggaatctcanggaaccactagagatgtctatattgctgttggactacacacatgagctcgcttagaggtaagggatgagtttatcgcaattggaattataataaatatgtgtagggatccttaaaggatcaaattaggatttttttgggatgtttattgtaatataattcttcctttgtgattataatcacaagattgctatgtttgacggaccaattgatctctagatacgaattggttgataaattgagtgtgcttggtgttttcgtgtttttagcctatgattttgattcctttaattttgatatgattatgtgaaaatgtttgaggggttttactcctcatggtttgagaaacattattgtataatttggttgtgttttagacaagttttactatatttgcgtgataaatngttatt

SEQ ID NO: 77900 - DNA, 376 bp, Glycine max
gaacatctaattcttctcatagagaagatgatggatatcaacaggatgaacgagagaggaggaatgaaaggtatatggagagaagaaatcatacaagatatggaggtagacaaagagaggaaaggattgagggagtgaaggtgaagatccttacttttaaagggacttgtgatccggaagtgtatcttgagtgtgagatgaatgttgagcaagtctttgcttgctacaactacaatgaagagaaaaagatcaaattggccttcctgaagtttgagggatgcgccttagtgtggtggaatcaagtgaggagtaatgttgagagtatatgaaggcctttgattaatactctacaagacatgaagagagttttgggaga

SEQ ID NO: 77901 - DNA, 419 bp, Glycine max
  unsure (1)..(419): unsure at all n locations
tgtggttcttgtaaatggccatttgtaaaacanattaggaaattgtgtagttgtcttttgtttgttcacaagctgaatataaagctggtagaggtctgattttgggcaagaggaaacgtcattcaaagaatgtcactaggtgtggttgttagtcaatctatcattttcatgttgatgtgtataatggtagataatatctgacattttggaacttcgaccacaatcatgcccttttggaggtagtactttcatcattgtttcttgtacataggaaaatgacatgccattgatattatgtagattagcaattttagaaaggtcggcattagacctcctcacatgtgtgcttcatttctcaaccttgatggggatatcacaagggaaggtttattaagaaggatatctatatctaacaagct

SEQ ID NO: 77902 - DNA, 404 bp, Glycine max
  unsure (1)..(404): unsure at all n locations
ttgagaagctagattcttatctatccacacccctctattaactaaattaacctncttaaaaataattaccgataaaaataacacaacaaataatcaaacatcaaacataattactaataatatatatatatatatatatatatatcggggtgttacaagggaggcaaagaattgggaagtacaggcggcccccattttgtgcaagttcaaaacaagcatgccttcccaccatacggcttgtctcccaactatacaccacccaatgttgcacacactcccgatgagaataactccactcccatactcattgagagccaacaaccttaatatgatcatgcacatgtctctcaacccatgggggagacacatgaagtaccccaccacaatctagccgactttgagcc

SEQ ID NO: 77903 - DNA, 400 bp, Glycine max
  unsure (1)..(400): unsure at all n locations
ccaangatataactctactttttttggttaanattcttcatcaccctctgtactaatgggtgtggatttaataatctactgctcggggacgaatttaatcataaaagcaaatctatagcccccgcggattctctcggcatatgaaaggagagacgttgatcaagttgtgactgacctgattctctttacgtgctggcccataaaggacactaatatatctggtggtcatcacattaaactaacgtttgcgcgtaacccttccatttcaataaacacgtgtatatactacaaaatgcatatctctccccgcttgaccaactttgctcttttatttcgaggtattaagaattgagggcggtttgtcccgttttaaaatgtgattaaaataaacctcttttat

SEQ ID NO: 77904 - DNA, 382 bp, Glycine max
  unsure (1)..(382): unsure at all n locations
ttaaatagctgtgaaaccttccattggagttcttaaattgaatatttcatggattgagttatatttgctattaagttatgtgattgtattaaacttgtttctgtgtggcttataaagtacaagatgttgctgagttacttggcatgatggttgaggatcacaaacgtatacagccaaatgcgaagacccatgcgtaagacacatattatttttcttttacaaacctgactaacatgttggatgtaaaattgtttgaatttgttagtgtataatttagtttttttattttaaaaaatagtagcagttataataaacagaaatttgcagcaagtcctgtgacaaagcaatagatngcatagaagctttagtctgtatgtgtata

SEQ ID NO: 77905 - DNA, 419 bp, Glycine max
attatggggtacccatcacatgtggttctatgtggcggtctggcgatggtgcgcaacaatgttttcacatacacaatgcgcgcataaacccaccatcccctgttgcccacctccaactgagctcacgtactcccacgtagcccatatcctcgtttctctaaacaccgggtccccatcaatcctcccaagcttccacaacatccaagcaaaacaacattcacacagcacaagctatcacagccaagcaaaacaaagcaaaagcagaaaactctgccaaaacaccaaccaaaaatcacagcttttcccactcaaagaccccagtaacaattccttcgatccaatttgttaaccgttggatcgactccaaaattttactggaagtctatagtgcataagcctacattttgaccgctgggatc

SEQ ID NO: 77906 - DNA, 411 bp, Glycine max
gcttatgcacggaaaatgtaattatgaaattgatatgcccgaagaaacaccatttcctagttgaccatgcattaggtaccatgttcaattattttgttttttaagtgaaacgggtttatgatcccaacatggttggctcgtggtgcctaacacatgaaactaagaatgtagtgtgaagtttcacgcttccccctttttgtttttgttttgtagaggaaaacgcaaggatgagcaaacatgaaaacaaatggtatgcaattttgcagatcaaaaagtttgttgaacgcatatgcatgatgatgccatgactcatgcaaaatgtgaggctggaatatgataacgaacaaatgcaggatatgtccattatgatgttatgaagagatgcttatgcgatgcatgatatgaatgcat

SEQ ID NO: 77907 - DNA, 412 bp, Glycine max
  unsure (1)..(412): unsure at all n locations
cccaccacacgtggtactatgtggcggtcgggccatggcgcacaacaagtgttgcacattcacaatgcgcgcataaacccaacataccctgttgcccacctccaactgagctcacgtactcccacgtagcccatatcactggttatatcaacaccgggtccccatcgatccttccaagcttccacaacatccaagcaaagcaacatttacacaggacaagctatcacagacaagcaaaacaaagcaaaagcagaaaactctgccaaaacaccaacctaaaatcacagctgtttccactcaaaaaccccagtaacaattgcttcgatccaattatgtaaccgatggatcgactccaagatttactggaaagttatagtgcataagcctacattntgaccgatgggaactacta

SEQ ID NO: 77908 - DNA, 354 bp, Glycine max
gcttgctgtatttctttattattggaattatattattgatgcacgttattgagtgtatctaaatgggcctgtcaacatttgccaatgtcttaacattcatgcaggacattctttattactttcttacattggattgttttgcataaattgggaagtttagttgattgatatacacaagcatctacttttatgtattgagttgtaaatacttcattactaaagagattttaacaatatcctggtgatctagttggtattatagccggcttttatgataaccccatgactttatttacatcaatcattataaattctgcagatctccctttgcaaaattgtggaaactcatgagca

SEQ ID NO: 77909 - DNA, 371 bp, Glycine max
  unsure (1)..(371): unsure at all n locations
tcctctggntggtatgctagggttgccattcattatatagnaagagaagggattggagcctccgtttcactgtctccatgcaacggatgtttctctcttcacaaacattattctttaaatcccaaaggtggggatgtgagaaaatgagttcagaatctggtgttcacatttcacgataatccaatgggtaaaagtttgatattggtatttcactgggatatggttggatgtatgtgggaaaaaaaaactaggtatgagggatacttctttctccataaacattattttacaaaatcccacggggggaatgtgccaaaatgaggtcccaattccatggttaaatgtcatgaatatataaccggttaccagtc

SEQ ID NO: 77910 - DNA, 396 bp, Glycine max
  unsure (1)..(396): unsure at all n locations
tctaatatctnccacactttttggggtgggccattcttggatggccttgattttctcaaggtccacttggaccccatttctaccaactacaaaacctaagaaaactatattatctacacaaaaggtacacttctctatatttgcatagagggtgtttttcctaaggactgaaagaacttgtctgagatgtcctaagtgatcatctaggctcctactatacactaaaatatcatcaaaataaacaactacaaatctacctatgaaatcccttaagacatgatgcataagcctcataaaggtgcttggtgcattagtgagcccaaaaggcatcactagccattcatacaaaccaaacttggtcttgaaagcagttttccactcatcaccctttttcat

SEQ ID NO: 77911 - DNA, 426 bp, Glycine max
  unsure (1)..(426): unsure at all n locations
ccgctgtaaaattngaattaaaacgttcaataactgctggtaatcgattaccatatatgtgtaattgattacacaatgaaaattttgaattcaaattttaatagctgctgtaaatcatttttggtcactggtaatcgattacatcctctggtaattgattaccagagagtaaatctcttgaaaagactttttaacttaaatttcttggccaaaccttttgctacttcaattaggaattcccttcctatttaatatacctttcctaagactctagagactgtcttgatcatccatcttgaatatctttaatttctttgtcttgaataaagctttgagaaacatgtgatcctttggcattatcaaaacattcaacttgatcctttgtctataatctccctctttttgatgatgaacaatcctgaaatc

SEQ ID NO: 77912 - DNA, 414 bp, Glycine max
agcttctagccaaatggacttaccttgaattaattcgtttgatagcctttttgagccttgtttccctttccttgttttgaagctcactacaagccttaaatgaaaaaccatgatatcaccatatgcttaaggaattttggagctttggaattgttttgggaataagtgtggggggttttgtttcattggataacatgttttgttggctatgcttcatgatgtattttgggtcatacttgatgtacattgtatattggttaaatgttggacatgctgaatgagatgttgtttctcaaaggctacgtaagtaaaaaaaaaatcgaaaaagaaaaagaaaagcaataaagttgagtgaataagatcttaaatgacaaaagaatgatgagactcttggttctactctttatgtttaaa

SEQ ID NO: 77913 - DNA, 419 bp, Glycine max
  unsure (1)..(419): unsure at all n locations
tgaaggtttgtaacccaccatttntccatagaagggttttgcaggggtataccaccaactgcttgcccttcagtggcatatccgaggcaaggctcaaagtcggctagattgtggtgggtaaattcatgtgtcttccccatgggttgagagacatgtgcataatcggattgaggttgttggctctcaatgagtatgggagtggagttattgacattctcactgggagtgtacgccacattgggtggtgtatagttggaaggcaagccatatcgcgggaaggcatgcttgttttgaatttgcacataatgggggctgcccgtagttccctaatctttgcctaccatatctgaggttggatgattcatttggttgaggccagatgggcgcgtcaggttcaccttagccacagcgctggtagc

SEQ ID NO: 77914 - DNA, 401 bp, Glycine max
cttggatctcagcttctttaatggtcacttcactattggtaaatttggagagatgatcagctaccacattctcattggccttcttgtatttgatttccaaatcaaattcctacaacagtaaaacccaacaaataagtctaggttttgaatttgatttagttaaaaaaaacttaatggtagcatggtcagtatatactatcacttttgagccaatcaaataagatctataattttccaagacatacactatggctaggaactctttcttagtagttgcataattcacttggtgttcattcagcaccttgctagcatagtgtatgggatgaaaaaatttattctttctttggcctagtacagctcctactacataatcacttgcatcacacaactttgaaatg

SEQ ID NO: 77915 - DNA, 418 bp, Glycine max
  unsure (1)..(418): unsure at all n locations
attagaggcttagtcatcttattaagcctagatctataaatactcagaaactcttaattgtaggaacttttttacatcattgaaattaagtttgtgcttagagagagcttaacctcttctttggtttttgactaaaaaccaaattgactnttatcaaagaagttattcctttatggaaaatcccccttcggcttatcaattctccgtgaaatgtggcatcgttttgttcatcttcttcatctcctccatcttttttggttttctattcttctgttctttgaaggtcaacagtggtgttcttgaatttgcatccagaatgatccgaaccaagcgtccatggcttggattgcatcacgtggtaatcagagctcgaatctggagagcagttcaaaaattatatccaacaattaagtgcaat

SEQ ID NO: 77916 - DNA, 387 bp, Glycine max
  unsure (1)..(387): unsure at all n locations
aatcatacaattgctcattcaaatcattctcaaacactcatttcatgcaaaacaatccactacatatcattttcaatcaattcattgttcaaacacccttttggtacaaacaaacaactcaaagtgctgaaatttatataattgaaatttaaaaaaattgaaatataaaatctgaaattaaaatgactgaacataaatcataaaataattgaaaataaactaaaatgttcgagatgcacaaatttaaatgtcctgctcctgtggttgctcctatgcatgctcattaaggtccaacacctgagcagctggtgcagatggtgtggcataatcaagtatgggtgctagggatggctntgggatctggtttgtagaagcatcctcctcttg

SEQ ID NO: 77917 - DNA, 352 bp, Glycine max
ctatttccgctctggagtacgacagtcaccgcttcaggagcgttgtacaccagcagcgcttcgaagccatcaaaggatggtcgtttctccgggagcgacgcgtccagctcagggacgacgagtatactgatttccaggaggaaatatggcgccggcggtgggcaccactggttactcccatggccaagtttgatccagaaatagtccttgagttttacgccaatgcttggccaacagaggagggcgtgcgtgacatgaaatcctgtgttaggggtcagtggatcccgttcgatgccgatgctatcagccagctcctgtgatattcgatggtattggaagagggccacgaatg

SEQ ID NO: 77918 - DNA, 415 bp, Glycine max
ctaaatagtctaaactttcgtaagctatttaagttgagtctagtccaacaagagggatctgaggatgaaacttagtttaagttagtctaaacctaggagggctgtgtaaattgagcctagtctaacaagagggatctgaggacgaagcttggattgattcatcctaaccagggatcgagatttagtaatttaggctacaacatagaacacaaaagcatgattgattagagaaacatctttatatacatcagctggtttcttagaaagaccctacacctttacttactgctgtcaatcttacttacttgcaatttttattggttttagcctagacttagtttaattctgttttaaaccatcaattatcaatgtggaagcaatgacttccaagattattttgatgatgccaaagaat

SEQ ID NO: 77919 - DNA, 421 bp, Glycine max
  unsure (1)..(421): unsure at all n locations
agtgcatagttcccatgccacttacatcatatatgagtcattaacatgccttcctagccttaaaccaagacctttcttctgatggaaatctttaatttttaatccttatataagtttttctttattctttatgcggaagcctagattcacaagtatacaacctagaacaattaccaaaggtcctaagatctacaacatgtntgactattaaggattagatcgataaaatacttggatctatagttggtttctggtctaagtattctttgagagttgttataagatctttgcggctatccatcacaaatatagacaatgaaattatgatttttttctcaatcgaagtctctttattcctcaacaaaattttcataactctttgtatgggaaaaagagaaactatgtgccacgatttgacata

SEQ ID NO: 77920 - DNA, 363 bp, Glycine max
ctctgatgtgagttcaaaacctcttgatcttgtacacttgacccattacagtgaattgcagtgctagtgctactgctgctgctactgcttgtggttgtagtggtggactcatcagatgagtcatctgaatcacacacagataactcattcgattcataagaactccattgctcaacttgatcatcaactttcccattatttttctccccaaggcatgtcactttgtctacaaatgctctaggcaagtcatcatgaaaatttctcagtttcaataagctcaatgaaacctgctcatcaaaagtattactaatcaattaattatccataagagttgcagagttccgacacataaaaataaaataa

SEQ ID NO: 77921 - DNA, 336 bp, Glycine max
  unsure (1)..(336): unsure at all n locations
tatcactcatgttggctttggataccaaattgttatggaccttatcataagatcagaacacaagcccctgacataaaaaacttttgggttttatattnttcatcctccatatctaaattttaatcactatcttactattcattcatatatcaccctctaacttatttcgtttcgctcttaaacccaatctcttatctcccttttttatctctaaactcaatattttctatttttatcctttattacttacttacttatttttattatatacttatattcatttacgcttaactctattcttctcaccaacactattagaactatactttcatattc

SEQ ID NO: 77922 - DNA, 323 bp, Glycine max
tgtaccctggaacccagataccttatttttgggcggccattctggaggcctgatttttcaggtccaataggaccccatttctaccatctacaaaacctaagaaaactatattatacacactgaaggtacacttctctatatcttgatataaggggtttttactaaggactggaaaaactagcctgacatatgctaagagagcatctaacctcctactatacactagaatatcatcctaataaacaacttctactcttcctatgaaagtccttaatacatgacgcctaatcctcatataagtgcttggtgcattactgagccca

SEQ ID NO: 77923 - DNA, 418 bp, Glycine max
tattcactctgctcaggcgtgttaggctcttctcttctcagactcttttgccttgggagctaagttatcccttgcgttttatacttcaaccatttgtgacagccagctattacacgattgctacttcccctaacttctttatcgtttctatctactatattccatgccttacagagactctgaagtgactctgcattcacttcattgaaacctcacacgatgaaaggcgcgatactctcctctgatggtgcacctctcataaggtaacccaactgtcttatggtgcgcacgggataatgatatatataacccctcatccctatcaaaaggatatatggagattgctcacatgagcataacatctctgctccttcttctttccaccgtgggaacgaactaacggatgcctatatcatgc

SEQ ID NO: 77924 - DNA, 357 bp, Glycine max
  unsure (1)..(357): unsure at all n locations
tgataagtgccaaatttgagtttgttttgggaataaattgttagcacttatcctttgattgtaatagttttcttccaaactacccttgaatctagatgtatatatatatattggatagttactaatattgttgcttaaatatgaaagattcatccatgattctgtaggttttntatggttgtttgacgaatctagaaacaaagctttaacgaagggcaaaacagtcatttcatggagatttttggccttaaattcgcccaggctaacatctagctcgcctgggctaaagaggaaacttcacctataagcaagccactcgcttgggcgagctgattacttcaggcttaagtcacaaac

SEQ ID NO: 77925 - DNA, 418 bp, Glycine max
gtgctagcttgaggtaatcgcaaagtttcatttcatagcctcgaaagaggacgtctcatgctatcatatcaagatgatcctctttgtgacgcttgccagaaagggaaacaagctaaaagttcttataaagccaaaaacattgattccacttctaggccattagtgctcctacaccttgacctgtttggaccaaccaacactgcattcttatcctgatgcatatatggactaatcatagtggatgattacactaaatggacatgggtcaagttcctaactcataaggatgggtcttctgataccttttataaaatctaccaaaagattaaaaatgaaaaaggcatttgtatttcttcaatcagaagtgatcgcgagggagagtttgaaaatgatctctatgaaatttttgttagaggat

SEQ ID NO: 77926 - DNA, 370 bp, Glycine max
tcatataaacctcttcctctaaatcaccattaagaaaggttattacatccatttgttgcaactcaaggtcaaaataagcaactaatatcaagataatatgaagagaatctttcttaaatacaggagaaaaagtctctatgtagtcaattccttctttttaaagaaatcccttagcaactagtcttgccttgtatctcttaatattacctaatgaaatctcttttgcttttaaagacccatttatagccaatgtcctttgccccatttggcaactctataaggttccaaactctactctgcatggaattcatctcatccttcatgacatcataccaaaaatttgactctttgcaactcatggtttgatcaa

SEQ ID NO: 77927 - DNA, 404 bp, Glycine max
caactataatcactggtccagttatcttagatcagggtttctgtattagctgaggaaagaaatgtatgtcacacatacacgataggcttcttttgtacccagacttgggttccgatcaagactacatcaagtctgaactggaaccttatgtctgctgtcctaatttgtatcattagtacctctggtactcagattaatatacatatattatatttttgctgataaaaaaaaatattattggggagaatatgacgcttaaaaggtttatgctataacaaatgatctactgcaaataaaatgaaatgtttaatataataataactttgaggtggggaataattgaatatcatttggaaaaattatccaaacacctcgtgtacaattcattattgataggatatatc

SEQ ID NO: 77928 - DNA, 413 bp, Glycine max
agatgtgtatgtacatataatatctgtgagctaaggagtaaaatttcaatgaaatcaacaaacagaaccatcacagtcaaattatgtcaacctgtttagaactgatcacaagaatgcaaaattattttttagaagaaaaagtaggtgctgggcagttaactagttaaccctttttaacatatccctatgcctgtcctttcaatagcaagtggcagaatgatgtaatcacatgatatattttacccaacaaaatggtaactgaattcattactacatattcaactgatcaagatataatagttaagttattcacattcatagaccacaagagatgtgaaaagataagtcataaagaagttcatgaaggactactagtactgcttttcaccgtggaagacaaaaggatataaagc

SEQ ID NO: 77929 - DNA, 424 bp, Glycine max
  unsure (1)..(424): unsure at all n locations
ctgaacatgagctgaagcataagagagattcttcttcttagttagatgtngcggggaagcttgattgcttgattgaaacccatgactgatactcagttgtctgccaaactggaaagggctccctcctaatggagttgatgcttccaaatacaaaacttgattgaactggggcaggctgctgacttgtgtggatgtaaaggctgctgctgttggagtgaatgaagattgaggagttgatgcattggaggttgattaaaaacattgagggagaactagcagaagtaacaaacacagtggatggcgatgatgtactaaatgtggaaccaaatgcaaacttagtgggtttccaactaaagtagaacttggaccacattggagctaacagagtagaccaccgaataggaaacangggtgcccagttcaa

SEQ ID NO: 77930 - DNA, 265 bp, Glycine max
attgaacttaggggggagcatttaattgcgctgacctcaccattggaatctcgagatccattgtgttccctaagtctatctttttgatcggctcatgcctttggaccttgaaaatctgattgggaaatgaacctggcgagaaagggggacttatctgacggctcattatggggaccagagtttatggaaggagaatatatggaatgcaacctattcgacgggaccttgtagagacatgcatatgtggactggagtgttgatcata

SEQ ID NO: 77931 - DNA, 248 bp, Glycine max
ctggtttcagacaactaagctcatgaatggtgacggccactggttacatttaaatagcacctatcctgttgccgatgtggacgaccttaccatacgtgggttcctaataagacagcagtttctaatgaattcaagtttgatacctttgttaacaagctgactattgctcaagaagttatgctttgtggcatcaactataatacaatttgtatttatgacaaaaacaatttgcccatttgcttgcccca

SEQ ID NO: 77932 - DNA, 423 bp, Glycine max
gcttccatcaataagttttcactcggaggtccgattctggcgcatcacatatagagattctcgaaattgaacaacggaacctctcgagaaattcaaatgctcataacttttcacttggacgtccgattcagatgcataatatatcgagacgctcaaaattgaacaatggaagctcttgagcaattcaaatggtcataacttttcacttggaggtccgattctggcacataatatatcgagacgctcgaaattgaacaatggaagctcttgagattttcaaatggtcataacttttcacttggaggtgcgattcaggtgcataatatatcgagatgctcgaaattgaacaacggaagctcttgagaaattcaaatggtcataacgtttaacctggaggtccgattcacgcgcataatatatcga

SEQ ID NO: 77933 - DNA, 358 bp, Glycine max
  unsure (1)..(358): unsure at all n locations
caattccgagcgtcgcaatatattatgcgcttgaatcanacatccgagttaaagggtatgtccatttgaatttctcgagagcttccgctggtcaatttcgagcgtctcaatatattatatgcctgaatcggacattcgagtgaaaagttatgactatttgaatttctcgagagcttgcattgttcaatttcgagcatatcgatatattatgcacccgaatctgaccttcgtggtaaaagttatgaccatttgaatttcttgagagcttccattgttctattttcagcatctcgatatattatgcacctgaatccgacctccgggttaaaaggtatgaccatgtgaatttctcgagagc

SEQ ID NO: 77934 - DNA, 418 bp, Glycine max
agcttgagacgcatgtgaagctttggcatcatcttaacatcagcttgatcctttgtctaccatctccccctttttgatgatgacaatccctgaaatcaagacaagctatatacaagatgatagcacgttcacacaacccttactccccctatcttttggcatgtatgcctaactttacttaatgatgaatttctaattgataattgatttgtaacccaagttctcctctcaagttctctccccctttggcaacatcaaaaagaactaagcaacataatcaatatccaaacagagccaaacaataaaccaaaataaatccatacattgtcataaccaagcaaatcaatgtcaagaaatataatataagtgcaagattacgataactaagcaataataagccaaatacacggcgataaac

SEQ ID NO: 77935 - DNA, 416 bp, Glycine max
  unsure (1)..(416): unsure at all n locations
ttgactcatgagtggtcagttgatgtctaagtggattgttccttctggtattactaatgtctttccttatggtacagntgagatcaaaagcaactccataaacaagaacttcaaggtcaatggacaccgacttaagccattcctcacaaacccttctttagtggacgtagtggtggaagagacttccttactccaccctactctttctccaccatgacttaaggagtttttctttcctatctccttctttacttttattacattatgctgattctatttgatggtctaattgcttttaatcttttaaatatgtgttggttaaatatggggggaggggggggcgggcaatatttaatatcatttagaaaaatatccaaccacttgcgtcaatctatattccatgtttataatttacc

SEQ ID NO: 77936 - DNA, 421 bp, Glycine max
  unsure (1)..(421): unsure at all n locations
gcaagcttctagtatatataggtcatcttcttcatgtgttctttgnctctaaatgaatataattcttctcttgagctaatgtctaatgtttatggtcgctggagcatataatgcttacattaaatgcatgtattttttcatgttgaaacaccattctggttggcttttgtgttgagcactatagtagaaaccacttcctttgactaaaggaaaatatcacaagaaggggtattgaattgtgattttatatttttttttttttaaatccttttcacaatcaaaccaagttttccttcgaaagaaaaactntgtaaaatagataacaaattttcaaaaacacaatcaaatgatgaaagatgattttgccaagccaaagatattttcaaatgtataaatgaaaattcaaaccctaggtcaatta

SEQ ID NO: 77937 - DNA, 396 bp, Glycine max
tgcttctacactagatgcaggcattgaaagacaaattttaccccaaggtgaagaagatcatgttccttatggtatgttggtcactcaaaccatgaggaatgttggtgaatatgagaacctaataaacgtttcatatgattatgagaacctaatgtcaatgtgcatttgctcatgttcagaagatcattatgttggatcaagtgggcttgtaataattaagaagggggggttgaattaattatgaatatgtcttgactaattaaaaatttatccttcttaatgttactagattcaattaggctttactactaagttatgagaaagtaaagaacataaacaataacttagacaaaagtaaagcggaaataaaaactgcacagtagaaaagtaaagagt

SEQ ID NO: 77938 - DNA, 362 bp, Glycine max
  unsure (1)..(362): unsure at all n locations
gcttcatcaagcattgatgcagtgtccatcttgcttccctcaggcacaatcttctgcaaaaccctaatcctttcacttattctctcccttctttgcctggcagccacagtctggggatcagaagatatcctaacattcttccttttaggcttttccactgcttccaagcccaagttcactggcctanaagctgcagccctatatatcatttccttcatttgtgctatggcttctggatcaggttcttcaaaggaaggtgtcacagatgaatttggctgctggaagttgatatttgatgaaccaggatacttatgatcccatctgggtctcttggactntggtgaagtctctgagataagcgt

SEQ ID NO: 77939 - DNA, 431 bp, Glycine max
  unsure (1)..(431): unsure at all n locations
acataaacgggtcctttaagcattgaccttcgatgtctgtaagctattgtaaggtatggctactataccatattcatcatgtagttagggaattactttcacaaatcaattaagtaagcttctacaagcaaagaaacagaaggaggagtacaaggaacaaaggtgaaagcagggcatttcgatcctcaatagttacaacacaaaattattattatttaagattttaataagaattacaaataattattaaatacttttagcttcaaaaaaagtatatacaattcattcgattatatgattctcttgcttgacaatnttatttcattttatttagtaaaaatataaaacagacaattaaagttaaaagattaaaanaaaaaaaccaacacaacatcccttatacagttatacacatttttcatatattatac

SEQ ID NO: 77940 - DNA, 377 bp, Glycine max
aagatgatgacgagaagcccaagagaatgagttcaagattgaatcaagaacacttcaagaatcaagaggaaatttgatttccagattccagaatcaagtttcaagatttaagtttcaagaatcaagaatcaagaatcaagaataatcgagttgaagattcaagactcaagtaaagactcaatcaagataagtacaaaaacgtttttcaaaacattgagtagcacatgaatttttcacaaaaccttttgccaaagagtttttactctctggtaattgattaccagtttattgtaatcgattaccagtagcaaagattgttttcaaaaagctttcaactgaatgtacaacgttccaattgatttcaaaatggtgtaacc

SEQ ID NO: 77941 - DNA, 419 bp, Glycine max
atagttacacttatagattcaagttaaacatttttattctactcaatataggcttctttctactattttaaaaggtgaaatatattagttttatgatttggcatcaaatatgttcgtgacattgtgaaccaaaaactacattaaggaatgagcttagactttgttgttgcttgtaatttatcttgacacaggtaaagttagaggaaaattgtgaaggggtttggatgagaaattatattcgaggggggaaagttcaaaatttaaagagttttaaaaatttggggagggaatgacccctgaggcatccaaaagagccacctttttccccgagagaagctcgaattgtatatttgtttggttttccttaaattctttaaattggtgtggatctttaaaaataaaatgaaattctcaaatat

SEQ ID NO: 77942 - DNA, 397 bp, Glycine max
tgcttagttaacctggttacccagctagcgttgaatcagaaatctatacctgtcgcaaaagtctatggtttatgctcctctgccgaccaccacacagatcttttcccttccatgcagcaacctggagcaattgagcagcttgaagcttatgctgcaaacatttacaacagacctcctcaacctcagcagcaaaatcaaccacagcagaacaattatgacctctccagcaacagatacaatcccggatggaggaatcaccctaatctcagatggtctagccctcaacaacaacaacagcagcctgctccttcctttcaaaatgatgctggcctaagcaagccatacattcctccaccaatccaacaacagcaacagccccagaaacaacaaacagttg

SEQ ID NO: 77943 - DNA, 419 bp, Glycine max
  unsure (1)..(419): unsure at all n locations
gactctgaacaggcaactaactcctctntcataatcatgctatgtgctcgcgactggtccctttcttcccttcgcaacttgagttcactattgctaccccatagagctccgcgaaatttgttccggccatactcttccttgcgagccctcttggtctctcgttcaagggctcttgcggtaattgcattctcttcccgtaacccggcacactccttccgaacgtgtgtagcagccaacttgaacttctccttggcgagttttgcctttcctaactcgcttttgagagcttggacttcctcgtcctcttccggtgcttcaaaattcccttcgctgacgactnttaacttggcgagccaatctaaacctcgtatgcgaactttcagccattcgtggtacccaccaatgatgccattacgaat

SEQ ID NO: 77944 - DNA, 395 bp, Glycine max
  unsure (1)..(395): unsure at all n locations
aacatttggaagttagttttacaagataatgcttatcttaacgcaaaaaatgtcatgctaatccctctgattttaaaacaaactcatgtaatctatttatgcacacgcgtatgtgtggaatatcctaccatttatatcaacatagaggccatccaacacattctaattgtcacacacatatatgcatttgaaaagaacatacattcttacgctcgaggcattgcgtcaaaattcacacctaatttatatcttaaacatatgctattacaaactacctacatatatttgaaatatatatcatacgaatntttattgtttcactcacatttattcatattggcaagctatttacattatgcacacacttgattcanaagggaattccgtgctatcat

SEQ ID NO: 77945 - DNA, 411 bp, Glycine max
gatgatgcagaatggatggatgtcattcatattgttagttgtagactatggtgcaaactagttacttgtcaaattgaagttataaaaaaaaggagtgctttcaagtttttcttaccatttgtagtgtgaaatttgaaatgatcttctatatatgaatgaaggagataatagatagatggagtggttttctttttcgttatggctgtgttgtttagtttccttctttttttcgctcggtgtgaaaaagactacatattgtacacattctattgataacaagcatgtctttttctactgctatgagtggcatgccaatgatcaagattttagcaatggctcttcttgtgcttccccaatgaattctagaagaagaaaatcaccaattgaatctatgccagaatcaattactaa

SEQ ID NO: 77946 - DNA, 422 bp, Glycine max
  unsure (1)..(422): unsure at all n locations
aatagataatgtccgcagtagtaacataattattccaggaaaaaaattgaaaagactaggaaagttctagatatcaacaatcaactaaaatacagatagttgcatttctgcgtcgtctttcaagagaatgggcaacctcaatttcaccaagagccttcacctttgagtatcaggaataaactaatgtcaatggctaaacaagcaaatttaattataagtttatttctagaataattacaaatgaaagtatataggttatgtatattgtttaactcatcaacaaaaaagagcattttgtgtaaattaaaaagggcatgaaggttgaaaagacaacatgtgttctgtgcatttatagacacactactagaaaagtaagttttaatatcgattatttaggactnttaacatcggttattaaccga

SEQ ID NO: 77947 - DNA, 432 bp, Glycine max
  unsure (1)..(432): unsure at all n locations
ggtcgccaccatgattggccggggaagcaggagtcatgatcatgcttcgttgactntatgtaataatagaaagtgataacgatatttattatatgatgcgatcaagctcaggatgtgtttggatggatagaatgctccctagagaatatactgaaaatatctacatagtttcgtgtccacttaagtagtttggaacataattttaaaaatcgaattcctataatggaaccgatcaaattactgaatcattaattcatccatatgattcgatctttattaaaaaaataaaaaatttatatcctaatttaaaaatattttcttaattcaaaacttgtgtgtcagtattacataatattgtgataaaaaattataattgattataaatatatctattgtaataaacttataatattattataaataaatataact

SEQ ID NO: 77948 - DNA, 400 bp, Glycine max
  unsure (1)..(400): unsure at all n locations
atgcaattttactctgaatatatgcctatcatacattaccatttgtctcgcattcctttttcttttttttttttgccgaagtttgtctcgcattccttgtatatgcatatttgtacaagtgacgtaattggagtaaacatatagaaaatagggtaggccaaacattgattggatgataaaaactgtgcaaaaatacaatgttgtctcacgtatgtttgtgtatcatgcattctttgtttctataccttatagaggttcggccagtaagattttacatgcacagagaaggagtaaccttcccaaatttgcaatttgtcacctaaccttccattccatttgaagcacanaagattagaatcctaggatttagtttgtagtgtaaccatgcaattgtgatata

SEQ ID NO: 77949 - DNA, 407 bp, Glycine max
actttccacttttcagatacaacatataaatattccctagatatgtaaacactgcaaagagagaaaagaaaaaaagaaaagaaacccacaccaattaaggaaaaagggtttacaaaaagagcatgactaaaataaaaagctagtaatataaagtagatcgactagtcaaattaactaacttccgggatgtagcaaagttaattaatgatcggaccacaacgcttgattccccagaaagaatgaagagagagacattacagtaccatacccttgttcggtgagaaactaggaacaatggtctcagagagaagaaagtgatatcgatgatgttggctagctttttttttttctttcttcaatcaacaacaacacatgagagtggaaggaatattgagatcttgttcatc

SEQ ID NO: 77950 - DNA, 420 bp, Glycine max
  unsure (1)..(420): unsure at all n locations
gctttgaatgaggctgaagaagctgctgctcatgttctacaagatccggtggacattaatttatctcagcctcatttgtcacaagatagtgacatggagttgatgggtaatatttgtcacaacaaaagtagtttatctcaacctaatttgttgcagcacttcatttttatatattacaattattcatgtttggcatttgcatgtaagtccctgcaactattgttccaccaatagcaaggaataagctaaccataacaagagccaaacaaaggaaggttgctgataaagataatgcagtataaagaaaactgaggacccattttttgttgcattttcaaagttgctgagtttgaaggttgctgatgaagaaaactgaagaagcantttttgttgcattntgatattaggatgtgtagttga

SEQ ID NO: 77951 - DNA, 296 bp, Glycine max
  unsure (1)..(296): unsure at all n locations
attttgtttcggactaagaaaagcagnnnacccttcttccccaacccttttaagtccagccttttcatcacaccatacattagccccacaacatattgtctcattgaacccccaccgaaggacccttaaccaagggaatcttcactgggtggcgttcggagaaacaaaacctagcaacctttattttttcaggaaccaggtcaacctggttctttagttctctggcttgatctttctgacttgaacccattgatgtttaggttccttgaaaccttaaaaagaacttggaacgttcc

SEQ ID NO: 77952 - DNA, 414 bp, Glycine max
  unsure (1)..(414): unsure at all n locations
agcttagnggattatggagtacccgtcatatgtggtactaggtggagatcgggcgatggcgcaaatcaactctcccacttccacaagtcaaacataaacacaccatccccacttgcccacctttcaactgagctcacgcactcctacgtagcccttatcctcgttcctctcaacatcgggtccccatcaacccctccaagcatccataatatccaaacaattcaatttcatttatcatgaagctaccctaaaccaagaaaacagagtagaggcagaaaactctgcccaaaactcattcaaattccacagttttccctactcaaatatcccagtaacattctcttcgttccgattcttcaaccgttggatcgccttgaaagttttactggacgttcctagtacataactctacat

SEQ ID NO: 77953 - DNA, 400 bp, Glycine max
  unsure (1)..(400): unsure at all n locations
ttgtctttgacagtgaagaanaggaagattatgttgaacaatctatntttagtaaaaccaaaagaaaataagtgttggaaaggcgtgcaatcagaaatgcattggctattgaaatctttgaagaaaaggtttatgaagttgagaaaatttgatggcaatttagcagtctatacctgctaaagaactgtagttatgtagggagggttgttatgttttgtttgtctattgttctttcataacaaagaaaatatcattatgcaatgaatatttggatagtggttgaaacaacaagttttagacaagatttgttgatggttgacactgatgtactctggataggttgcattggaaactcaacaagatgtacaatatcaacaattgaattctccccagtcctttt

SEQ ID NO: 77954 - DNA, 419 bp, Glycine max
  unsure (1)..(419): unsure at all n locations
agcttgaagaggatgctntaatggaggaaaagaatattatgaagggggagcacgaaattgaaggaatataatagggagagaagtggaactttgaagtgtgtctcataagactttcattcatcaaagttacaacaagtgttacacatgcttctatttgtagactaagtagcttccttgagaagctttcttgagaaaacttccttgagaagcttcttagagaaaacttccttgagaagctagagcttagttacacacacccctctaataactaagctcacttccttgagaagcttcattgagaagattcctaaagatgctagagcttagctacacacaccccctataatagctaagctcaccccatgccaaaatacatgaaaatacaaataagtccttactacaaagactactcataatgc

SEQ ID NO: 77955 - DNA, 424 bp, Glycine max
agcttgcaaaccattccattctgcacacatattactagctccatcatatccttgacctcatatattttgaatgttgagattatgatgagacaatattgaacatatcccatgcttaagaatggatgatgtagtatcttgcatatgtatcatatccaaaaaatgctccttaacatatccattcttatcaacaaatctaagaactagagttgtttgttctcttttagattcatcatgggcttcatcaacaatgaaacaaaattttgcattaccaatctcttcttgaatttcatcttgcacctttctagcaaagacatatagaatatctttttggatagtgagtgaaatgtatcttacattttgagggacgttttccgagataatttcatctatttccttattataagaagctaagagctttatcatt

SEQ ID NO: 77956 - DNA, 423 bp, Glycine max
  unsure (1)..(423): unsure at all n locations
ntgagttatagtcctactaacacttgctgatttctcgaatcttgagatatttcagcatgctgcaatggtgaagcttattttgctggttacaatgtttcaagttctgatatccttggtctctggctacctactttcttaaccttcaggttctgtgatgaagattgcaccaaactttgctaaaattagtgcacgatttttctggtagaagtgagacttgtgaatgtaatgccagttacatatatataaactagaatagtcagatatgagtgctgacaaatgccagcttctcctagccttctcccccttacttaattgcaccttcaaacacttatttgctaatgactggaactatatttttttttgtttagagactaaaaataattnttgtaaaaatttagggacataacataaaataaaaattct

SEQ ID NO: 77957 - DNA, 368 bp, Glycine max
  unsure (1)..(368): unsure at all n locations
aaatatgaacctttaagcttgtcatatatagctttgataaaaaaaaaagactaaagcttcatcaattatcaagccattgatgaggtaatccatttgataggaggcaaatttgaatttctgatgaactctgacatagngatattttccttttctgttcctaaatttaagcctgcttctgctttggtctatgtttcccatataaatgcataaataaagaaaatgctacagtgtttcctgatgttcttgagaaaattgataagctggccattccagctttntggtattgttagttgttaagctaacttgtattgtatctctgccttgtgttctagagtactttggaattaaaattcgtgttgagttccttg

SEQ ID NO: 77958 - DNA, 333 bp, Glycine max
cgaatgaactagttccgctcctgagtatgacagtcaccgttttatgagcgcggtacaccagcagcgctttgaggccatcaagggatggtcgtttcttcgggagcggcgcgtccagctcatggacgacgagtatactgatttccacgaggaaataaggcgccggcggaggacatcactggttactcccatggccaagttcgatccagaaatagtccttgagttttatgccaatgcttggccaacagaggagggcgtgcgtgacatgacgtcctgggtaaagggtcagtggatcccgtttgatgcaaatgctatcggacaacttctgtgatattc

SEQ ID NO: 77959 - DNA, 414 bp, Glycine max
  unsure (1)..(414): unsure at all n locations
agcttggntttaaattgtgagcgtctctatatattactggactcaatcggacttccgagtgaaaagttattgtcgttagaattagctgcgagcttcggttttaaatttcgagcgtctcgatatattacgggactcaatcggacttccgagtgaaatgttattgtcgctcgaatttgctacgagcttcggttttaaatttcgagcgtctcgatatattacgggactcaatcggacttccgagtgaaatgttattgtcgttagcatttgctgcgagcttcggttataaatattgagcgtctcgatatattacgggactcaatcggacttccgagtgaaatgttattgtcgttagcatttgctgcaagcttcggatatacaaatcgagcgtcacgatatattacgggactcaatcag

SEQ ID NO: 77960 - DNA, 402 bp, Glycine max
  unsure (1)..(402): unsure at all n locations
cagctggagcanattcgaacaacaataacttttcactcggaatgtctgatgagtcctggaatatatcgtgacgctcgaatnttaaaaccgaagctcgtagcaaattcgaacgacaataacatttcactcggaagtcctattgagtcccgtaatatatcgagacgctcgaattttaaaaccgaagctcgtagcaaattcgaacgacaataacatttcactcggaagtcctattgagtcccgtaatatatcgtgacgctcgaattttaaaaccgaagctcgtagcaaatttgaacgacaataacatttcactcggaagtcctattgagtcccgtaatatatcgtgacgctcgaaatttaaaaccgaagctcgtagcaaattcaaacgacaataacatttcactc

SEQ ID NO: 77961 - DNA, 382 bp, Glycine max
  unsure (1)..(382): unsure at all n locations
aaaatgatgaccaaaagctcaaaaggtcagatcacttcattgataccaagatgatgaccttcaagaatgagttcaagattgagtccagaacacttcaaggatcaagaggaaatttgatttcaagaatcaagaatcaagactcaaagattcaagaatcaagagaagacttaatcaagataagtattaaattttttttcaaaacattgagtagcacaagaagttttttacaaaatcataccaaagagttttactctctagtaatcgattaacagattatagtaatcgattaccaatggttntaaaatgttaagattttcaaaattcaaaaatgaagagtcacatctgttgatgtgtaatcgattacacctttatggtaatcgat

SEQ ID NO: 77962 - DNA, 388 bp, Glycine max
tttaatggattttcaggtttgagaagtgaaattgagaatggggtaaatttggagtaaaacctcacctcacacaagtctataacatcaatttaaacttgctcaactggatttacacctaaaatttcaccgaatcaaaatttgactcctcaacacccaattttatcctagaaatcgctctttgttcactttggtcatttgtttttctctcttgcacagcccaaactttctcataagtcctaaatgacatttcaaactaggattaactccctttaacctccaaataccactaaatccagatttgaccttccaactctcaaagtctcactctttctccactcacaacaccatattctcaccttctaaccctaggttaactctacccttcatc

SEQ ID NO: 77963 - DNA, 378 bp, Glycine max
aactggccatgaatcaaaaatctgcacctgtcgccagactcttgggtttatgctcctctaccgaccaccacacaaacctttgcccttctgtgcaacaatctgaagcaattgaacagcctacagcttatgctgcaaacatctacaacagacctcctcaacctcagcagcaaaatcagccacaacaaaacaattatgacctctccagcaacaggtacaatcccgggtggaggaatcatcccaaccttagatggttgaatccttcacaacagcagcaacaacaaccttattttcaaaatgctgctggcccatgcagaccatacgttcctccaccaatctagcagcaacaacaacaacagcctcaaaaacatcaaacagttg

SEQ ID NO: 77964 - DNA, 390 bp, Glycine max
  unsure (1)..(390): unsure at all n locations
atgaatctacgggagtattctacttttcccaaaaagcctctaaatctaaacaccgacttaaggactctccaactcatcacccgnctctaccttgggaaggatctactgttatcccttccttaaaatatatgtgccctaagaagctcaccttctctaacccaaaatcacacttggacaacttagcatacaatctattgtctttaaaggtttgcaacacaactctcaaatgctcctcatgttcctctctagtcttagaatacactaagatatcatctatgaagaccactaaaaactatctatgccagggtgaaaaggtctattcatataatccatgaacacaccnagggcgttggtcacaccaaaaggcataaccaagtactcataatgact

SEQ ID NO: 77965 - DNA, 394 bp, Glycine max
  unsure (1)..(394): unsure at all n locations
tgctttttatgcctaaactctatcattatggggcagtggtttagtttaataaatttatgctttacacttgagcctgcttttataatttcttcttaatntaggattcaaatcttataaactctttggatttcagggcatggatctttattttaagacatgatggccaagatgtgacatgtgaatatttttttgctgccatgcgaaatgccaatgatgaagatgttgcaaatttcttgctatggtttgtattttttgccttctaatttcctgcatttttctactcattgtgtattaacttatcaactactaggcaagtattcttaagctgggatcattgttgtcaaagtaaatatttcttatagtccagaagcacattctttttctttaaaattta

SEQ ID NO: 77966 - DNA, 401 bp, Glycine max
  unsure (1)..(401): unsure at all n locations
acatcaacgcgtgagttgttttattactttattacgtttgcgtngntagaaagatgtgtgcaaaggtgcaccatttttgtttgattggcctttattgtgataaattgatacttcttgtaaactaactttacaagtgtgtccttgcaggaaatggctccaaagaaactcccagccaagaggtccaggaaggatgccactagagaaggttccagtgcggccctgcaggcaaatatggactttgatggacacaggttctggagtgcagaacaccaacaacggtttgaggccattaaaggctggtcattcctcaaagagaggtgagtccagctgagggacgaggagtatgctgagttccaagaggagatagcccggaggaaatgggcccaacttgcatcacccat

SEQ ID NO: 77967 - DNA, 340 bp, Glycine max
acaagccaacaaagggagaaagaaggttgtcttccaacccggagattgggtttgggtgcacatgagaaaagaaaagtttccggaacaaaggaaatcaaagcttcaaccaaggggagatggaccatttcaagtgcttgaaagaatcaatgacaatgcttacaaagttgagctgcccggtgagtataatgttagttccaccttcaatgtctctgatttatctctttttgatacagatggagaatccgatttgaggacaaatccttctcaagagggagagaatgatgaggacatgaccaagagcaagggcaaggatccacttgaaggacttggaggacctatg

SEQ ID NO: 77968 - DNA, 411 bp, Glycine max
cagaagctctcgagaaattcaaatggtcatatcttgttacacggaagtccgagtcaggcgcataatatatcgagacgctcgaaattgaaccatggaagctctcgagaaattcaaatggtcataacttatcacacgaaagtccgattctggcggatagtataccgagacgctcgaaattgaacaacgaaagctctcgagaaatttaaatggtcataacttttcacacggaagtctgattcaggtggataatgtatcgagaagcttgaaattgaaccaaggaagctctcgagaaattcaaatggtcatatctttttaaacggaagtccgattcaggcgcataatatatcgagaagcttgaaattgaacaacagaagctctcgagaaattcaaatggtcataacttatcacacc

SEQ ID NO: 77969 - DNA, 424 bp, Glycine max
gctagagaagaagaactcaagagggaagagaagaagcttctaaatattatttctatatctctttgaaggtagttacaacttatttatatgtttgaggagccatatctaaccgcaacgggttagtagcaactaaccctaaccaactatgccactactaactacccttcccgcctaaggatcacatgatcagcttctacctaagcccattcaccctagctggtaaacgtcccagtgcttaagtaactgcctcactctcctcgaacgtcatcgttgcatggcttcgtcttccacgttcatatcatcccccctctcttcagacaaaaccttgtcctcaaggttgcggtgttctttcagctgttgccagtcttcccacgaagcgttgtcgggtgataacccttccccctgcaccagcaccatacgtcgt

SEQ ID NO: 77970 - DNA, 419 bp, Glycine max
  unsure (1)..(419): unsure at all n locations
tctctagaaggttcgntcctaatttctctacaattgcatcacctctcaatgagctggtgaagaagaatgtggcatttacctgnggtgaaaaacaagagcaagcctttgctttgctcaaagaaaagcttactaaggcacctgttctagctcttcctgacttttctaaaacttttgagctagaatgtgatgcctctggagtgggagttggagctgtattgttacaaggtgggcaccctattgcttattttagtgaaaaacttcatagtgccaccctcaactaccccacctatgataaagagctttatgccttaataagagccctccaaacttgggaacattaccttgtttccaaggaatttgtcattcatagtgatcatcaatcacttaagtacattagagggcaaagcaagttaaacaag

SEQ ID NO: 77971 - DNA, 368 bp, Glycine max
  unsure (1)..(368): unsure at all n locations
atcagtgttaaaggtccttattctgtccagtctcaccctgccacaatcttagaacttgcgaatgcaggattaatttttacccaaactttcacttaattttttttttctagggaagactatggttgacagccataaattaaaaaaaatcccaggccatcgtacagaaacgtgtgacacacagtacgtacaaacaaaaccctttctatggaaaatatcccaaaagctacccctcagaagaatagccactcaatcattcattcatggaatactattcaaaccaacaatcctaacatgctatttgctactgttattagtaaggtccattcataaaatagcttgttagttntcacacgtttcatcagtacatt

SEQ ID NO: 77972 - DNA, 261 bp, Glycine max
taagtccgacctacctcggacgagctatagcatcccctccaactagttaacgggactacaactacaactcaccgaacaaaaatagacttcgaaaccccacatacagtctaaacgccgctatgtgtgacacaggacatttgaatgtctctcttgacagctcaaactttatcatacgctctaaaagacactatgaacaccgactcacaactttttacgtccgggtgccacgtactactcatttgacccatgaacactcaaagg

SEQ ID NO: 77973 - DNA, 380 bp, Glycine max
attctattaactaagaagaaatgcacccatatacaatcaaggcagcttcgttatctaaattatctacatgtacttccaaggtgtatttgttacttacatcacacacatctccttggctaaatttacatacatgcatactcaaagcatttcggggtaccaaaaattgcacatgtgcacatcttggtatttctaatacctataaatacacaaacttcatgatgaatcttgactatctacacaataaggtgctacatttcatgctcttttcaagtttttgctacctaaagtcgcatgcaaattcaagtatatttttctttgctgactaaaattgtattcaaattaaaaggtatatttttttttgtaatgtatttcctttacat

SEQ ID NO: 77974 - DNA, 323 bp, Glycine max
gctcctaacctcaacactgacttaggaatctctcaactcatcaccgtctctaacgtggaaggatctactgttatccctcccttagatataatgtgccctaagaagctcaccttctctagcctaaaatcacacttggacaactgagcatacaacctattgtctttaagggtttgcaacacaactctcaaatgctgctcatgttcctctctagtcttacaatacactacgatatcatctatgaagaccactacaaaactatctatgcaggggtgaaaggtcctattcatataatccatgaacacaccagtggcgttggtcacacc

SEQ ID NO: 77975 - DNA, 416 bp, Glycine max
  unsure (1)..(416): unsure at all n locations
agctttntagtcctccctgtaggtccctattatagggcacaaagcaaacacgctgcgtgcgttntaaacactgccatgcatataacctaaatgtcatgtatgtaaaagcaaatgactttggtgtttttatgatgatcatgatgatttgatgcaaatgatgcaaatgggcttttcaagtttaaattcaagacaatgattcaagaatacaagccacaacatcaagatgatcactagtattttaggaagggaattcctaattgatatagcaaaaggtttggccaagtaatttaagttaaaaagtttttttccaggagatttactctctggtaatcgattactagtggccaaaaatgatttataacagctactaaatatttgaattcaaattttagactgtgtaatcgattacacaatat

SEQ ID NO: 77976 - DNA, 407 bp, Glycine max
  unsure (1)..(407): unsure at all n locations
gacaaactactcttttctcattttatcaaagaagtcangtactctacctatatagccaatgttgtcatggtcaaaaaagccattggcaaacggcgtatgtgcattgactacaccaacctcaacaaagtgtgcaccaaagacacatatcctttgcccagcatcgacaggctactcgactacgtgcctgggttccaagtactgagttgtcttgatgtctatttaagatacaaccaaatcagaatgcacaccccagacaagagaacacaacattcttaactgaagatgttaatttttgctgtagggtcatgccctttggcctgatcttcaaacaacagatagaccataattntgaggtttatgtgaatgatatnggtcgtaaatctcatagcgtggcccaacacgtagta

SEQ ID NO: 77977 - DNA, 427 bp, Glycine max
  unsure (1)..(427): unsure at all n locations
nngcttgggggcttctatggaggctggatctttgagcttcaatgaggncctgcaatggngattgtgcaccatggaggtgcagcggaagacaaaggagaagaggtgagaggaggcgccaaccactaaggaataagccttggaagaaggagcttcaccaccaagaatgtgtcttggataagaagcttggagaggatgcttcaatgaaggaaaagaaagagagaaagagatagggggagcacgaaattgaaggagtaaaagagggagagaagttgaactttgagttgtgtctcacaagactttcattcatcaaagttaccacaagtgttacacatacttctatttatagcctaggtagcttccttgagaaacttccttgagaagcttccttgagaagctagagcttagctacacacacccctctaataac

SEQ ID NO: 77978 - DNA, 398 bp, Glycine max
cacaccatgacctaatctttgatcctcataccccttgatttttcacatccttttatagttgagacaaatgcctctggcacgaccatgggtgtcgttctaatgcaacatggtagactagttacattcttcaacaagcaatttacacccaaacttcaacatgcttcgaagtatgtgcgagaattgcacgccatgactaccgccatccgcaaatggcggcaatacctcctcggacacaaattcaccattttaatggatcatcgtagcttgaaggagttgatgacacaaattattcaaacaccagagcagcaatattatttggcaaagcttttggggtacaattatacgatccagtttaaaagtggccactctaacgtcattgcagactcactttctcgcat

SEQ ID NO: 77979 - DNA, 373 bp, Glycine max
tgaagctggcttggtaaaaacgcttgccaaccttcattaaccggtggatcttctcgaaatttgggcttaaacttcacaggacacttttttcatcatgtgaccggtgggatctttgagaagatgcctggagtgtgctagaagcctcttaatgaagcttctggaggaagcctcttaatgaagcttctagagaaaactacatgtatctgcctcggtaaaaatgcttcccagcctttgttaaccgttggatcttctcgaaattgggttttctacttcacaagacacttgtccatgatcggaccagtgggatctttgagaagatgtctggagtgtgctataagctttccgttccgagagcatctcatatttaagcatt

SEQ ID NO: 77980 - DNA, 412 bp, Glycine max
gcttatgataagttagtcatgaaattatcttgtctttagtttgcatgatgagatcacggtcttgatgtatgatttaactttatgattcccaaaggtttgatgcaacggttacatgttccccctcgtttcttctaatattgtataatggttgcttgtggatttcatcattgcactgttggcattttgacctaaagtaggaagctacaactacaagaggccattatgctacttctttgcttctttggttccacagtttgtcagaatggtttgggagagaaagggtgacgaaccgaacgaacttcataaatgaaaagaagctatttgctttggaaactgacaagtgttgctagcttagaagtgtgctggatctagtgtttatagagttgccatgtttcgttggacatcccttgta

SEQ ID NO: 77981 - DNA, 382 bp, Glycine max
  unsure (1)..(382): unsure at all n locations
cagtttatgaatattgtgactcaatgtgctcatcttcaggaaatgagggttgttctggttgaccaaaagatgcaacanggagttgtaagggcagagattggactaaagaacttgagcatggtggagtggaaacagaagctattgttattgttgttaggtctgcacaagaattggagttagtataaggtagtcaagaatcaaatatactaactacatgttgtgtaggggagagaattgtattatgatggttagttttatagggaaagaatgactcataaaaaaaacatgttgtgagataaaaaatttcttactagaaggatgaaatcatttatatgctttatgtatatcactatatcccacaaagacaccagaaatagtttta

SEQ ID NO: 77982 - DNA, 316 bp, Glycine max
  unsure (1)..(316): unsure at all n locations
acatttgaaagaatttcacattgtctgctccaccatgaaacccccagatgtccaagaggatcacatatttctgaaggcttttcctcattcattaaagggagtggcaaaggactggctgtattaccttgctccaaggtccatcacgagctgggatgaccttaagagagtattcttagaaaaaaatttccctgcttccaggaccacagccatcaggaaggatatctcangtattagacaactcagtggagagagcctgtatgagtactgggagagatttaagaaactatgtgccagttgcccncaccatcagatttca

SEQ ID NO: 77983 - DNA, 410 bp, Glycine max
  unsure (1)..(410): unsure at all n locations
tcggccttgatctacgctctccccatttgtataatagggggagaagtgaaaagaaaaggttcaccctcttaggcacttctctctctctcgaaattactgaggaaaattatttccgtgaagaaaatccaagccgaggcgcttccgtaaccgttccgtgagaaattacgcgaagattctcgaccgttcttcaagattcatcgttcgttcttcgttttcttcagtcttcaacgggtaagtacctcaaaccaagcttttcaattcattctatgtacccgtggtggtccacattttgtttcatgtatttttattctcgttntcattttctttttatacccncttttgacgtgcttaagccatttatttaagtccgttctcgcttaatctaaaaataaaataaatttccaccgatc

SEQ ID NO: 77984 - DNA, 378 bp, Glycine max
  unsure (1)..(378): unsure at all n locations
tttccaccttcgtcacccgtggtggccaaattcctttgatctctaaggacatcaacccatacacggtcccttttcaaattccattgtaaataacttcttttttcctcattatttnttcctaaaacttttcttttgtccgtcattttttcattagatgactccattgaagttaatgtcacttattcaacctgcacataacaaatagtagatatgacctactttattcatttgactagtccactgcacaatcatagaaaatatttcaagcaaagtttttatgcaatagaaaagtacataaaagtctatcttcaatagaaaagtacaatagtaacaaagcacacaaagtttgtcagcaatagcanattacatttaaaaaag

SEQ ID NO: 77985 - DNA, 413 bp, Glycine max
  unsure (1)..(413): unsure at all n locations
tcacataacaaattttaagaaactcagcctcactagtagcaatatctgagataaggtaagacataaccacttgtcgattttggttcattagaatcaaaaatccaatttttattagttttaagagaactcacttcatcattaacaacttctttccaaaaggtgcatcaatagacctcatggcctcaccataagttttaggatcatctttaagtagaaaagagcaaaattcataatcaaaatccttaacttttttagatcttttactcatcctaggttcaaaaacaaagtccttattagcattactacaagatgataaattagaacaagaagtatcaaaaacagatttagacaatttatttttcaaagaaaaaatattntcaaagaaagtgacatctctagattccataatagta

SEQ ID NO: 77986 - DNA, 381 bp, Glycine max
aatgacaaatttctgagcacaaaaatatggctcgagtttctctcacttggaatgcttcaatatggcttcaggatggtccttgtttatatctcaaagcttcaaacaagattgttgaattggagcccagtcaactaatagacttctagaggaagcgaacgaagatgacaattgtcatgtcatgacaactagtagcgacattcagaggttctcattctgaggaaccttttcgatgagcattctgaaggtacaatagaatggtgattctgatgttagctgagaaaggatgctgacttaagtacatccttgtgataaagttcaactgatatgaatttatgaaggaacataacttcatcaatctaaatacttctttacaacataatg

SEQ ID NO: 77987 - DNA, 426 bp, Glycine max
tcctgactcaccataaaccttgacccattgtgagaatgtcaatccttaccctcggaagcaaaaaagaatagaagggaaatttccaatcaaaaaaaaaaaaaaagagaaggaaaattcccaatgaaagagaaaaaagaaaagaaaggaaattcccaatcaaagagtgggagaaagcaaaaagaaaagaaagaaaattcccaaccaaagaatgggaaaagtaaaaaagaaaagaagaaagctcccggtcaaagaaactagaagaaatgtgcagaaaggtcttttgaccagacaatatctgaacaatacagaattgtcaccaaatgaacaaaaaaggaaggaaaggaaaccacgacctaaaatggtcttctccctttaattaccaaccaaaattccgtgcgctagcgacccttttttctcgccccgcac

SEQ ID NO: 77988 - DNA, 433 bp, Glycine max
  unsure (1)..(433): unsure at all n locations
tcaccgtcaaaatatcaattaaacaatgcacatgtacacattgagaaacagctaanatcaggtagagcaaaaatatgatgccacaactcacatatcagtcaaacattttcaaaacactagtgttgacaaaatgagccatgaaggggtgttgcataattaagtccaacacaatttattcaatctctaaagagttgtgttatccttggttggggcagggatacgcatggccacttggtcctcaatgacacaattcataaaattcataatttcagtcatcacaaagtcataaacataattaataaaaacaccaagattttataaggctataactgaaaaaaaaaacaatttggacaaacctcacgacagcaaacgaataatacattctgaatttattaaagcacataattganaatctgaaattaataaaaaaaaa

SEQ ID NO: 77989 - DNA, 385 bp, Glycine max
  unsure (1)..(385): unsure at all n locations
cttaagaactgatcttcttttgtcaaaaacttctttcaatagcttttatactgaggaattcctaaatcaagccaaggttttattttcccattatagtgtagcaccgaagcagtggtaatgggttgagtatcaattgtataatcatggcccaatccagacacaacccatgactcattgagtggatatatttcattctcaaaggttagcaagcttgctcgccatgcaataccctcaatagatccttcctgcatggtaaactacacaaggaaatagaaaaatcagaanatgtaaaagggaccaaaacatacaaatttccaaatgatttatttaaataacttgtaaaaaaaattcaatagaattgtaacttataatagatatatgtttg

SEQ ID NO: 77990 - DNA, 453 bp, Glycine max
  unsure (1)..(453): unsure at all n locations
acactatagaatatctacgctntacaagtgtcagtcattnggttgttttctcctgaaatgtaggatcttatngntattgacgatgtgctctcaagcatgactggcattgaagggcgttacatcttaatcaaagcagttcgtggaaagaatgatgatattgctttcctggttgacccatctatggatttggccctgcaggtgagatatttcataatgtttatgactatattttgagctgcaattatgaaacagtatgactttagattatgaactatgtaatgacattgttttttttttttgataagcaatgaattttattaatagtgaacatgcttgctttgagtacaaggggttcccattacataatttcttatctgcataatgtataaccgcattatgaattctaattctcatatatgcattctagattcacgttgaatgatagaatttgtg

SEQ ID NO: 77991 - DNA, 418 bp, Glycine max
  unsure (1)..(418): unsure at all n locations
agcttgtaagcaactgtgctgagctgttgaatgatttggtaagggccgtantatcttttggcaagttttgtgtatggggcgcccacgacggtggattggcgtcttggatggagttttaccagaaccatgtctccttcggtgaagtggagttcgcgatggtgcttgtctgcaagttctttcatgtgttgttgggccttgaacagtttgtgtcgcaagcttttgaacattaagtcgcgatcagttaaccaagtgtcgacaacgtctatatttgaatttctcgccacgtattgaggaaggttgggtggtttctttccaaaggtaatctcgtaaggagacatgcctgtagcggagtggacagaggtgttgtaggaccactccatccacattaggaagcgaccccatgttgagggtttgtcgt

SEQ ID NO: 77992 - DNA, 434 bp, Glycine max
cgcttccacttacgttcatgaactgcacgccatcatctctattgttcacaaatgacaccattgtctactaggccacccactcgtgatcctcacagcactactaaaaaaatacagtttagcgactgaaactactcaatcgctgtcagtgaccgaaatagcgaccagagtaatgtcgttgctaattgcgatagaatttgcggccgaaattatagttagtagctaagttgcgccagcgaccgtattgacgaccgactagaaacgtcactgaatacgtcggtcgctacttcggttgttatgctgaaaaggcgttttagcgacgaaattagagaccaattatgacttgcaattagcaaccgaatatgtctcggtcactatgttatgctgatagcgactgagtattcctaggtcgctattatacaaaattattttgaagg

SEQ ID NO: 77993 - DNA, 359 bp, Glycine max
  unsure (1)..(359): unsure at all n locations
attctccaccatggagatgccgccgaagataaagagaagaggtgagaggagtcgccatctactaaggaataagccatgaaaggagaagcttcaccaccaagagagtgtcttggataaaaagcttaaagaggaagcttcaatggaggaagagaatgagagaaagtggcatggaaaattgaaggaggaaagggagagaagttgaactttgaagtgtgtctcacaagactctcattcatcaaagttgtgacaagtgttacacatgtttctatttatagcctaggtcactaactaaatgaaattcactttctgaatntcattttcatttcatgtgaatctaaaatgaatattccaaggatatg

SEQ ID NO: 77994 - DNA, 287 bp, Glycine max
cttgatgacaacctaggaggagggccaaggtgatgaacatatcgctcacccgatcaatgaacacctcaagcgaatcatagaacatctcaagagaatcaagaacaagtccagagttcatgaatgctgaagagtgcaagactccacaagaaggcctcctctcaagaatcaagattcatgatctcaagaatcgggatcacgattctagactgaagacctgactcgatcttgactagtattaaaaagtgcttcgaaactttgaatagcacatgagtttctgacacaccttt

SEQ ID NO: 77995 - DNA, 421 bp, Glycine max
  unsure (1)..(421): unsure at all n locations
gctgngcatccaataccctgatgaggatgttttatatgttcttaaaattggactgagcgcatttgctttcaaagtttcatggccttgcaggtgaagacccgcataaacatttgaaagaattccatattgtctgctccaccatgaaacccccagatgtccaagaggatcacatatttttgaaggcctttcctcattctttagagggagtggcgaaggactggctttattaccttgctccacggtccatcatgagctgggatgacctcaagagagtgttcttagaaaatttttttccctgcttccaggaccacgaccatcagaaaggatatttcaagcattagacaactcaatggagagagcttatatgaatactgtgagagatttaagaaactatgtgccagttatccttaccactagattt

SEQ ID NO: 77996 - DNA, 412 bp, Glycine max
accccatgttgaatttgcttacaatatagctgttcatagcacccctaattgttctccttttgaagttgtttatggttttaacccactaactcctcttgatcttttgcctatgcctaatgtttctgtttttaagcataaagaaggtcaagcaaaggcggactatgtgaagaagcttcatgagagagtcaaagatcaaattgagaggaaaaataaaagctatgctaaacaagccaacaaagggagaaagaaggttgtcttccaacccggagattgagtttgggtgcacatgagaaaagaaaggtttccgaaacaaaggaaatcaaagcttcaaccaaggggagatggaccatttcaagtgctcgaaagaatcaatgacaatgcttacaaagttgagctgcccagtgagtataat

SEQ ID NO: 77997 - DNA, 343 bp, Glycine max
  unsure (1)..(343): unsure at all n locations
ttatggctataacccactacctccctttgatattttgcctatgcctaatgcttctgtctttaagcctaaagaacgtccagcccaggccgactatgtgaagaagcttcatgacagagtcacagatctaatcgagaggaaaaataaaagctatgctaaacaagccacacagggagaaagaaggttgtcttctcacccggagattgagtttgggtgcacatgataaaagaaagggttccgaaacaaatgaaatcaaagcttcaaccaaggggagatggaccatttcaagcgcttgatagaatcactgacaatgcttacaaagntgagctgcgcagcgagtataatg

SEQ ID NO: 77998 - DNA, 424 bp, Glycine max
  unsure (1)..(424): unsure at all n locations
tgcaagcttgctaacgcaaggaagcggcgaatatctcccacattnnttggggcgggccattcttggatggtcttgaatttctcagggtccacttgaccccatttctaccaactacaaaccctaagaaaactatattatctacaccaaaagtacacctctctatatttgcatagagggtgtttttcctaaggactgaaagaacttggctgagatgtcctaagtgatcatctaagctcctactgtacactaaaatatcatcaaaataaacaactacaaatatacctatgaatcccttaagacatgatgcaaaagcctcataaaggtgcttggtgcattagtgagcccaaaaggcatcactagccattcatacaaaccaaacttggtcttgaaagaggtttccactcatcaccctttttcatcctga

SEQ ID NO: 77999 - DNA, 381 bp, Glycine max
acattaaccctccatacttccatgggaaggacattggagaggcttacttaaatgggaaaataatggtagagcaaccacttaaaaggaagtctacttcaaaatcttatggctttcactcttatccaaagaaagaccaaggtcaaggcgtcttaggggtggcacctttgaagcccaacgatgataaggggaaaacaacagaaaagcaaccccctaaggctagtatgtaagaaaagactaactctgtaaagtgctttaaatgtcttaaaagaagacactttacttctcaatgccccactatgaaaaccatgactatgaggggccaagacatttatagtagcccagatgaggctactacttcaccttcctctagtgaaagtgaag

SEQ ID NO: 78000 - DNA, 353 bp, Glycine max
actatattaatcttctcctcattgcagactcaaatgcatcgcacaagactaaggatattcccagcacatcctctgctcaacaaagaaagaggtccatcctctgcctttagtctcacaactaatgcacttttactgtgagattggtaccacaaatatttcttctgaaattccatgcatttaattttaatcagcaaacatgtctctgcataaacagaacaagcaatgaaatgtgagtctgtgacaaaaaattccatccatgtgaaaggcataattcttctctattccttttctaagttaagaatatgctggcagtgaatacctattccagaactatgtccattctcaatgtcatg

SEQ ID NO: 78001 - DNA, 412 bp, Glycine max
  unsure (1)..(412): unsure at all n locations
aacctatctagggatgtgtccacccatcaactttatagactcattcggcgttagccaccaccacaacctccaacactaggttgagggtctttttagtacccccaacttacgtgtctactcaaatgcaatgtcactcatcaatgcatgtatgttatgatcattcaaatcaatatcatacatcatcacaaattcattaaccaatctcaacgtcataagaagttataacatcatagattcaccattcatatgttcatcacactcatgaacccatatatagttcaataagcataacaagacattccaacaccttgaatttttgcaaacaactcattaaaaactcatacaaatgtgaatctcatgatctcaacatanaagtaattctaatgataaaataacattatctcaatcgcat

SEQ ID NO: 78002 - DNA, 377 bp, Glycine max
ccctcaatttaatggattgtcaaggtttgagaagtgaaaatgagaccgcggccattttggagcaaactctcatttcacacaagtctataacattaatctaaacttgctcaaactggttttacgactaaaactccaccaaatcaaaatttgacccctcaacactcaatttaccctagaaatggctcttgttttcactttggtcattcattgtcctcatttgctcagcccaagctttcccacatgtcctaaatgacattttaaactaggattaactcactttaacctccaattaccactaaatccagatttagcttttcaaaccctcaaagcctcacacttttccactcatatcactaccattctcactttttaaccct

SEQ ID NO: 78003 - DNA, 367 bp, Glycine max
ttaatatcccgatgagggtgttccatatgttctcaagattggactaatacatatgctgtccaagtttcatggtcttgcaggtgaagatcctcataagcatcttaaggagttccatattgtttgttccaccatgaagccccctgatgtccaagaagatcatatctttctaaaggcttttcctcattctctagggggagtggcaaaagattggctatactaccttgctcccagatccattttcagttgggatgaccttaagagggtgttcttggagaaattcttccctgcatctaggaccactaccatcagaaaagacatttcaggcatcaggcaacttagtggagagagcttgtatgagtactgggaa

SEQ ID NO: 78004 - DNA, 331 bp, Glycine max
  unsure (1)..(331): unsure at all n locations
aaagtcgacttagaatctatagaatttaatataatttttctaaatacaatcttaaaaattaaaaaaacctacagtaatatttttttatcaaaaaaaactcaccataattgactatagaatttacaaatcatatttgataaaaatcgtctcttcttccaacatgatgatattctattactcaataaaattaattctaaattcatgatttatttggtgaaaaaaatcttanaacttaaaagaaagtcactttttttccctaattataccatgcaataatattaaaaaattcaaatgaaattttaaattaaattatatatgatgaatggtttaa

SEQ ID NO: 78005 - DNA, 346 bp, Glycine max
tcctcatgtgttgtttatatttggaacatgcgatgatcttaaaccttgtgtttgtgaaagcaaatgactaggtgaattactttaagaaaccttgtgatggaagactccgagacacaatattttgatagaatgtaacattggaacaagagttcttattttaattgcatgacgcttcaaacatgtcattttactttatttgatgaacttgcacagacttgtttaagtcataaattattcttagaaattttatttggtaaccagtgaagcgaatgtgaacattacccacgtggactgagttacgattttattggataaaatgatctaattagattccggatttaattat

SEQ ID NO: 78006 - DNA, 369 bp, Glycine max
ttggctacagctcagactcatgagtggtaagttgacgcccaagtggattgtgttttttgtgggaactaacatttttccttatggtacagttgagatcaaaagtgaatccacagataagagcttcaagctcaatggacaccggctgaaaccattcctcacaaatcctttcttagtggatgtcgtagtggaagagacctccttactccacccgacttcttttctgccatgatttagggagttttctttttctatctccttctttacttttgacgcacttgtccaattttattgattgatctgattgcttgaatcttatgattgtgccacattgaggacaatgtgttgtttaagtgtgggggggggggggag

SEQ ID NO: 78007 - DNA, 428 bp, Glycine max
  unsure (1)..(428): unsure at all n locations
tgaattttttggctgagtgagtaaagagagagagaacatggcttttagtttaaaaagactttgtctctttctttntttttaaaaaagatgtgccacatgtcttcttttgagtggagcaaaaaggggcccactttttctcttgatgtgactcatactcagtcacaagaagagaaaaatctgaccttttgaaatgttaaaatcctgcctcggtttgcatgtcgtttctctggttccagtcccttgcgtttctctgcacccgtcggggccagttttcgaaagtaggcaatatatatatcaaaacactcagaatgaaatcccgagcgtggttcagaggttggtttcgttaaattttaagttgcacgcaaaacgataatttttagactaattaattgagaattagtctataactatccaggtatggatttctc

SEQ ID NO: 78008 - DNA, 349 bp, Glycine max
  unsure (1)..(349): unsure at all n locations
agagaagtggaactttgaagtgtgtctcacaagactctcattcatcaaagttacaacaagtgttacacatgcttctatttatagactaggtagcttccttgagaagctntcttgagaaaacttccttaagaagcttctttgagaaaacttccttgagaagctagagcttagctacgcacacccctctcataactaagctcaccaccttgagaaacttccttaagaagattcctaaagaagctagagcttagctacacatacctctctaatagctaagctcacctccttgagatgagaagctagagtttagctatacacaccctataatagctaagctcacccccatgac

SEQ ID NO: 78009 - DNA, 425 bp, Glycine max
cgatggccccaatgacatctattccccacatgtgtaaatgccaatgggcagacataacattcagaggatgtggtggaacattgacattgtccacgtatgcttgacatttatgacatttccttacatgggcgtagcaatcgcttttcatagtgagccagtaataaccggctctaaggatcttcctggccatagcatgcccattggcatgtgtcccaaatgaacccccgtggatttcctcaatcatgtagttcgcctctttggcatctacgcatcgtaggagggtcatgtcgtggttttgtttgtacaggatggtaccactcacaaagaaaccagtagccaatctccttaacgttcttttgtcgttgtcggaaatccctggtggatattctttgttctcaacatattgtttgatgtcgaagtaccac

SEQ ID NO: 78010 - DNA, 201 bp, Glycine max
tgaatatagggataattgaatagagaaaagtattgtgttaattgctaaattggattatttgagattgaatatacggataatagaatcgagtaagtatgagttaattgctaggttggatcatttgaggttgagatagggataataaatcagaaagtattggtgaatgtaagtttaataattagtttaaataggatataaatg

SEQ ID NO: 78011 - DNA, 414 bp, Glycine max
  unsure (1)..(414): unsure at all n locations
cgacaataactctttactcggatgtctgattgagtcctggaatatatcgagacgcgcgaaatggaataccgaagctctgagcaaatttaaacgacaataacctttttactcggatgtctgattgagtcccgtaatatatcgagatgctagaaattgaatgctgaagctctgatcaaattcaaacgacaataactttttactcggatgtccgattgagtctcgtaatatatcgagacgctcgaaatggaatatcgaagcctctgagcaaattcaaacaataataactttttactcggatgtccgattgagtcccgtaatatatcggaacgcttgaaattgaatgttgaagctctgagcaaattcaaacgacaataaattnttactcggatgtctgattgagtcccgaatatatcg

SEQ ID NO: 78012 - DNA, 428 bp, Glycine max
  unsure (1)..(428): unsure at all n locations
atgcaagcttagactatcatctattcagaggtatggattttttacaataaaaatgtatgaaagaaaactacttctgatgaatatgagtttaattaattttctttgtcgtatttctgagcaggaaacataacaccactttcttggaacacacggcttaaaatagctattggtgcagctcggggattagctttcttgcacgcctctgaaaacaatgtcatattcagtgatttcaaggcctcaaatatacttcttgacggngtcagntattttttgttacttgatttctaagttttttagtctaccttttcccttatttcaagagatgaaagctaaagcaaatgtagtatcaagttgggatgaatagacagtatatgaatttggatcccgtcattggttttactgactatactcattgaaaaggtatcaaa

SEQ ID NO: 78013 - DNA, 370 bp, Glycine max
ctcacgcttctaagtaaactgatgtcagggacactattcttatattttgaattatggagtctcagattgttatttggtccaatttaacagtgctttaatagtagggacccaattcgaaaattttgaaactccaccacattataaacattcaaaatataggaatggacaaaaaatgccccccaaaacatagggacctaggtattatttacctaaattttatactctgctcagcctctcactgactttgttgtcttgtcagagccgccagagcagctgtatgcctcccaactttcacagcttcaagagatgggattctttgacacacaagagaacattagagctcttatcgccacttcaggtaatgttcatg

SEQ ID NO: 78014 - DNA, 411 bp, Glycine max
  unsure (1)..(411): unsure at all n locations
tcacaattcactgtgacagtcattgttctttcacttagcaaaacacccaagtgtccatgagatgataaagcacatacatgtgattgaatctgagaaagtgaaggtggagaaggtttcaacaaaagaaaacttggctgatatgttcacaaagtccgtctctagtgtcaagttcaagcacttcctggactngataaattntgaagatgcctaaagcatattggtagaagtgcagccctgaatcgcaagatagacactcgctgatttggagtcaaggtggagatttgtggtgtgtgactcaaaatcacaaaaggcacaagtgggaaggctttaagaggtgtcataactgaattcagttattataactgaattggttctgcaccaaagcatagttagagtgtatatatactcttg

SEQ ID NO: 78015 - DNA, 388 bp, Glycine max
aaatcacatgcttttcattatcttaaagggggagaatgtgagtgtatgtatacatgattttgatgatgtcaaaagaagaatcaaacaaggctcattttgcttcaagattaatacaagattgtttcaacaaacaaagccttgattcaagatttcttcaagatcaagccttgcctcaaaatgtagagatttcaagtcatccaaggcacatgtaatcgattaccaatacatgtaatcgattaccaaggcacatgaaagtgtgtaatcgattacacatcatatgtaatcgataaccagagactctgaacgttgggaatgtcaaatttaaatgaagagtcacaactgttcaagaaaaacaactgtgtaatcgattacactaattctgtaatcg

SEQ ID NO: 78016 - DNA, 415 bp, Glycine max
  unsure (1)..(415): unsure at all n locations
ctgaantagtgaggatgagtagaaaaattttgtatagcaccctattcaagcagaggggagggtcattgagatatctctataatacaagaccagatatctcatttgtagtgggtctaattagtagatttttagacaatcctaaagcctctcattgggctgctaccaagaggattctaagatacctcagaggcacactcagctatggtattttgtttactaaggaagccgatcaagatgctttcatagaccaggtggaaatttcagaattaattggcttctcagattctgattggtgtggagacaacgtggaaaggaaaagcactacaggctatcttttcaagtttatgggtacatcaataagctggtgttccaagaaatagcaagtggtggctttatcctcatgtgaggcagagta

SEQ ID NO: 78017 - DNA, 421 bp, Glycine max
  unsure (1)..(421): unsure at all n locations
gcttgcttaatcaatgtgatgtggttactatatttttttaacgcgtatgaatattatgtgatcatatgacacctcttggtgcaccgcacatatgcaattagcattatatagattgtgcagcttgcttcaccgccaactatgatgacagtgaatcctgatggagactttcaatcagctgaactttaattctagttaaatttttacttcttttattataaagaacaagaaatttacttcccacgagtaaatttaattggtttataaaataaataagtatccgctctatttctctttctttgctgacattaaaanttaatgggatatatatagccacacactttaaattatataatcatatagatagataaaactttagccactcattntagacttcagtaatgactcaatttggagaaatttt

SEQ ID NO: 78018 - DNA, 362 bp, Glycine max
  unsure (1)..(362): unsure at all n locations
catgattcacctatatngtgtcatgccctaatttcgtccggggattattatttgatgatatacaacctttgattggccgcttcgagacacttggcgtccttttttgcacaatgaatgaagtcccgagacgtgtcagatatcaaaatgaagcaggcttgcgaaatccgtgaaattccgtaatgtggcagaaatagaaaagaggtgttttgtgcaatccgtgagtttccgtaacttcttcgaaagcgaaaaaagagtaaatacataatccgtaaggattcgtaaccttgcggaagggaaataagtatcgttacaaaattcgtaaagtttcgtaacgttacggaaaaagaattacccaataaata

SEQ ID NO: 78019 - DNA, 322 bp, Glycine max
  unsure (1)..(322): unsure at all n locations
aagagggtgagaaagagggagaaacccatgccgtgactgccattcctaaaccggccaagtttccaccgaacccaacaatgtcattactcaatcaataacaaacctcctccttacccaccacccaggtatccacaaaggccatccctaaattaaccacaaaggctgtctaccgcacttccaatgacgaagaccacctttagcacaaaccaaataaacaccaaccaaaaggaattttgcagcaaacagcctgtagggctcacccccaaatacgttgncatatgctaaacctgatcccatatctacttgataattcaatgggagc

SEQ ID NO: 78020 - DNA, 315 bp, Glycine max
  unsure (1)..(315): unsure at all n locations
tggttcctttatcatttcctttggaatcttgctcatcaatattcatatgttctaaagaatctgcactatcatctagcatattctttcttgacaagatagcattagattcatcaaaggtaacatgaacggattcctcgatattcatagttcttttattatatatcctatatgctctgctttcgaatgaatatccaagaaaaataccttcataagattttgcatcacattttcctagattatcttcttcattattgagcacacagcatttgcaaccaanaacatgtaaatgaaaaatattagggcttctaccattaa

SEQ ID NO: 78021 - DNA, 429 bp, Glycine max
cagctgtagctatcagaagacttgcttattcatttagtgctgttttctcttccttcacagtttagtcagtgtaagatcacttataactgttagaaggagaaatggtctcttaatgagctcatttcatactgtgtgcaagaagaggagaaaggaccgaaagtgctcatgttgtgagtacctctaaggacaagggcaaaagaaaaagaaccgaggagcccaagaatgaagctgctaagggtccaggacaaaagaaacaaaatcagggtgacaactgtttcttttgcaataagtctggacatgtaaagaagaaatgtaccaaatatcatgtttggcgtgaaaagaagggtatgtttcttactttggtctgttctgaggtcaatttagcttcaatacctagaaacacttggtggttagattctggtgtcacta

SEQ ID NO: 78022 - DNA, 259 bp, Glycine max
agtacgaacgactcgatataatatgcgctctaatcggacctccctgtgaaaagttatgaccatcatgaatctctcgagagcttctgttgttcaatactagcgtcctgatatattatgcgcctgaatcccacctcttgtgaaaagtatgaccatttgaatatctcgagagcttccaatgatcaatttcaagcgtcacgatatatgatgcgcctgaattggacatctcggttaatacttatgaccatattaatttcccgag

SEQ ID NO: 78023 - DNA, 404 bp, Glycine max
  unsure (1)..(404): unsure at all n locations
gatctcgatcagtcgtctctctggcctattacgactgtcattttnttcgatcaagagcggtgaataatattcttcttgccgaggggggctaatgttttcctggccgaataaatccgaacatgccagtttcgggcgaaacgaaacatcggttgagctcgcacgaaaaaacctagccgacctacattgtaagttttttatgcaacaccgaaacaagaaaacttcccctgccgtaagaaaaaacattatcggccagcgagcgtttctttttaaaaaaaattgcgcaatgtcgcctgaaaaatatcagtcggggccatttcacgaccgatgtcggctattgagttttctattcaatccctgaatgaaatttgcatgatgtccattangaaatgtttgatcggcgtgat

SEQ ID NO: 78024 - DNA, 379 bp, Glycine max
  unsure (1)..(379): unsure at all n locations
cgcacatcggtcgcgtgtatgatatccactccacaaggttcgaagcagaggaaaccttcaatcctattacgcaacgtggcggacaaaagtgggcagttaacttaaacggtcattattgtcaatgcagaaggtattctgcacttcactatccatgttcacatattattgcagtttgtggttacgtgagcctgaactactaccaatatatagatgttgtttatacaaatgagcacatcttaaatgcttactccgcacaatggtggcctcttgggaatgaagcgactattcctccttctaatgacgcatggacacttatccctgacccaactacaatncgtacgaaaggtcggccanaatcaacaaggataaggaatgagat

SEQ ID NO: 78025 - DNA, 404 bp, Glycine max
  unsure (1)..(404): unsure at all n locations
acctaatggttgagtaattggctgactgttggttctgtgttttttgnctttacctctttgagtgttattcctcttggacttcagatacttccttaaaattattaaggatataactcatgcttgataggtacttaccatggagcatattttgtcaattatttagatcttatactctctggattctagaattctgtgcatataaaagtaatattattttgcttttgctgcaacatgataaatttctccatggtttagtttgaaatgcctaaatagatggatggtttgaatttcttttctataagtggtggaagaatccggttcaactttttcaagctgctggtgttattcattnttgtaaaatgtaaggggaggatgagtcttggcacaactttaattattttttc

SEQ ID NO: 78026 - DNA, 403 bp, Glycine max
agcttgaatcggacatccgtgtgacaacttatgaccatttgaatttcacgagagcttccggtgttcaatttcgagtctcactatatgtgatgcgcccaattgacattcgaattaaatgttatgaccatctgaatttctcaagagcttccggtgttcaattctgagcgtctcgatatgtgatttccctgaatcggacatccgtgtgaaaagttatgaccatttgaatatctcaagagctatcgttgttcaatgtcgagcctctcgacatattatgcgcccgaatcggacatccgtgtgaaaagttatgaccatttgaatttctcgagagcttccgatgtttaatttcgagcgtatcaatatattataagcctgaattggacatctgtgtgaaaagttatgacca

SEQ ID NO: 78027 - DNA, 386 bp, Glycine max
  unsure (1)..(386): unsure at all n locations
atggggcctatgcaagttgaaagccttggaggaaagacgtatgcctatgttgttgtggatgatttctccagatttacctgggtcaactctatcagagaaanatcacacacctttgaagtattcaaagagtgagtctagacttcnagagaaaagactgtgtcatcaagagaattaggagtgaccatggcagagagtttgaaaacagcaaatatactgaattctgcacatctgaaggcatcactcatgagttctctgcagccatcacaccacaacaaaatggcatagttgaaaggaaaaacaggactttgcaagaagctgcttgagtcatgctttatgccacagaacttccctataatctctgggctgaagccatgaacacagcatgc

SEQ ID NO: 78028 - DNA, 457 bp, Glycine max
  unsure (1)..(457): unsure at all n locations
aaattaataatctaattatattgatnnaaaaatatgcgtaaatcaagtacaaacccttccaaacaagggtagaatcaaatagtaatttagctganaagagaaaaagaagaaaaagaaaagccttagcaactaaagttggaagcttaatgcaagaacaaaaccaaaacccatgaaatttaggtgtgtgagagaaagttgaccaaatgaattgtgacttttgaagaacanatcgaaatgaaaataaatagaagagggtgatttctttgaactaagaaatataaacttcgtggcattgtttntgcacaaccatttcacaatcgtcctctcagaccattgagaaatcaatatctatttgcaatttcataagatcaaagctaaaattctgggtaaaccacatatcgagtcgtcttgtggagtctgaatgcctcaagccaactcgcttctttcataacacatg

SEQ ID NO: 78029 - DNA, 443 bp, Glycine max
  unsure (1)..(443): unsure at all n locations
agcttgaatnntggttagacatgattgatacatgattttgngacttgtaggaattgatttgngcaagattggatgagaggaagtgtgattttcgaaatctgcacttatgcnagaattttgctgtgaaattgtgcagcagaatnttgcacaagtgcagaaaaatgcttgtgtgtggttggctgtggaaagtctattgcaaaatgagttctcaatgtttgctagtagatcccaacggtcaaaatgtaggcttatgcactatagacttccagtaaaattttggagtcgatccaacggttaacgaattggatcgaaggaatttttactgtggtctttaagtgagaaaacctgtgattntggttgatgtgttgagcacagttttctgcctttgctctgttttgcttggctgtgatagcttgtgctgtttgaatgttggtttgcttgga

SEQ ID NO: 78030 - DNA, 484 bp, Glycine max
  unsure (1)..(484): unsure at all n locations
ntagtgtggctcacttaaccactaagggcatttagttatgcttacaatgtngagaatttatctttcttttattgtctaccaagtatatgagaactaatttgtataagtcaattgtgaagtgaatggacagggacttttgctggttttatcattgaagcgtgaaaatattctctgctagggttcttccttgaaccgcttgatcatatcaagaattgctcaattcttatggcgatcctcanagactatcaaacatctnttttgtggcacctatcttgttcttcctttcacattttctgtttccttgtttaatttccacaatgctaattctatatgaatntcttgtttgcttatatctcantttgcttaacctctttcggtgttntttgtgcttaatttatgttttagaacgtcccctttcacctcatttntgaatcattctaatcaaagttctgtaggctaanaaaatgaataaaagtaaaatatg

SEQ ID NO: 78031 - DNA, 412 bp, Glycine max
agcttagcgaattacggtctgcttagcgcttctatggccgcaagatattgcgcttagctggcatgagtaaagcttagctcaatgaaccccagttctggccgcaaggacatgagcttagcggagacgtgtcgcccttagccattgaatacgacgcgcttagtgagcaggccatcacttagccgaattcatatcgaattgaaatgggcttagctcagccttggccagcttaggagaccaaatcagcctaagatgcaagggttaagggctaagcgctagagactctccgcttagtgcatgacaaaagatgcgcttagcgctaggcttgcgcttagcgaaaagactgtttttcagaaaaaaaaaaattctaagttattttcagtcccttcctcaaaaattgaaaccctaatatcta

SEQ ID NO: 78032 - DNA, 440 bp, Glycine max
  unsure (1)..(440): unsure at all n locations
atctgggggaactcttttcatgctattcctgggatgcccgctttactctctcttgctttgcgcttcaggggaaataccttaagacctattgaactcaagaccccctcatagaactcacaacagtttatcatagactatcaataaaatttaaagactaaaatatanttattctattatttttaatgcttaacttaataactattgggtcactttaaatcttcttggtacgtttcactcaagtttgttgtaagaatcagagtttgtgttgcatagcttgcttcttattattatatatagaataaattntatgattcaattaattaatcatgtgttattttatataaattatgttattaatttgttgggataagtcaattacacttagaggttaaatganataagatcctggttgacacgtcaacagataanaacaaatccta

SEQ ID NO: 78033 - DNA, 416 bp, Glycine max
  unsure (1)..(416): unsure at all n locations
gatcttcttcatttcttacaatctatatctcttgggcacgtcgtatcacatatgacctcttggnttccctccctctgttaaatcctccgttaagtaacgtattttattaaataactgaggtcacattttttattaaaagactagttancgtaaaatgaaagactcttgaatttaaattattaaataagactttaaacttaacgagcttatnccacagaaaaaacctaatgtgtctataattttttttttacaatacaataaaaatccacacttaagtctttatacattcacctctcttaatttatttatttatcagaagtatacatttacctcaactcctactactaagttaactctagctgttaattaatttatctatttaaggaaaaatcaatgatatttcttggtaatattgt

SEQ ID NO: 78034 - DNA, 356 bp, Glycine max
taacaatacactctcggtacttagcacgtaacattgaactctgattcacattctgcttccaattgtatgaaagacaagtgagctccttgcgaagagctgtataagtgaggatcccactgttcttaacttcccacttgctcggtttattgccaagtaaatagagactacaatgtctgcaatttatgaaatgtactatccaagtatgactgcatatcgatctgccaacagattctcatgtgttgccatggaaacataaatgtaatcattccacctcacatgaataaaataagtattctctgctccctaatctagctgtgccgtaaatataaatctttcccagtttgcctttcttaatt

SEQ ID NO: 78035 - DNA, 429 bp, Glycine max
  unsure (1)..(429): unsure at all n locations
agctntngacttgaattctatattatatacaatgacaacagaaaatttaataaatccgagctacttgcttagagaaaaggtggtgagatactttgccaaaaaaagagcccaacatcagcaaattagagaacaattacagaagtgttcaagattaagcacttgtagaactccacttcctgatcttcatcgccacagatcaaaatgctatgcactttgcctaaaagagttagacaaaagcaggaaaatacaacagctattacactattttcactaccttgacaaaaaaagttcatatagtaagcacttccgcagttccaagaaatttggtgaggttgaaaccttcagaaatcacggtttaagtcttgcaatgaatatcaaaaccaagttgtcaagaatatgatcctacttagaatggggaggggggtcaca

SEQ ID NO: 78036 - DNA, 438 bp, Glycine max
  unsure (1)..(438): unsure at all n locations
tcctagcgantactaattatatgggccattaagtctatcatatgctgacaataactgagaagtctgtggatctcctcgggggcggagtaggtgtccgccattgctttggccttggccagcaatcgaggaagttcttgactcccattcaaagtaagagcaaaccagtccatccacattgttgcctcttgatgcaacgagtcgatcacccttcctctagcctctttttccgcgtacactcgggcatactcgtccgccactttgtgctcgtgggccgnggctagttttaattcttcttggtacttgccgatgatggcttacatgttggtctccgtctcgcataaacgctgagacaagcttcttttggaccttatgcaaaccttcaactcatccttcaagncaaactgtctactcgtgaatggccatttcctctctttggag

SEQ ID NO: 78037 - DNA, 438 bp, Glycine max
  unsure (1)..(438): unsure at all n locations
agcttctccatcagatcaatgttntgtgttgcttctgagaaaggtgaactttgaactattgagacttgcttcttcatgatatctttagtcagatatttttttttaaattagaactatacactgagaagttaattacactaaatctaaccaaataaaaactaactttttacagcaatatagagcatattgagaatgtcttttttatttaacaaaagaaaaaaaaattgcctaatactactacctctataaataccagtaacataggcctaagagctactacaaaatttgtttggtttttcatatgtaatgaacggtcatgattttttaagagaacctttcctgttgaaagtacaaaaagagaggatccaaatccatacataattntgatagttgatttatcatcgtgagtgagttgctcactttataggatacaaaccc

SEQ ID NO: 78038 - DNA, 505 bp, Glycine max
  unsure (1)..(505): unsure at all n locations
tctatcaagtggtaatcagagcacaagagcttcaagtaggtgctccttataacctccattaatttntgctttaccttctattccattgttgtttcttcattttttctccatgtatctcctcacatgtcttgtgctaaatgttgttaacatgattctttagagtttccaccgattaaacttgctatagaagctagatttgattntctatggttcaaatatcttgttcttgttcttgaaccatgaattgtgttgagtntaggttcctttgagtnttgtcttgttaatttttttttgtggctgaaacctaaaccataaaattcttacaaaaatattaaagtagaagaaaacctcanaaatctagagtgacttgttcacctattgtagttntgtcatagaagtcatgtctagtcatgaaacttatcacataagatntcttatgtntgtgctgaatttattttcttgtttctttgtctaactcattngttcatgagtgtatgaaattctt

SEQ ID NO: 78039 - DNA, 436 bp, Glycine max
  unsure (1)..(436): unsure at all n locations
agctntgatgcgcaatatttaagagaaagtgtaggtttcctattcaggaaccagtgttaaattgtagcgcaatgtgttaaacgtgtttgaaatacgagggtgaggtcgtgggtattgtataattcatgaacagtgcttataaatgaaatatgtgaggaattgtagaataatatgttgccttgagattgtaatattgttattgagattgagtaaaagtgtaaagtagaacatgtgttgaattgtgagatacgtgaaaacatgtgatggtgaattgtgacattatgagatgtgaaattgtgaaagagttttggttgtgaataagtgtgtgattaactcttgatgtgacattatttgtgttgtaagctgtgaattgtacaataacccgaccagtgttatcttgagaaaagtgtaaatgcgcagtgttaaagagaaagtg

SEQ ID NO: 78040 - DNA, 502 bp, Glycine max
  unsure (1)..(502): unsure at all n locations
tctgggggacatcttgactggctntccaatctgacattcaccacanattctgccttcttctattttcagatggggaatgcctctaacagcacctttgtcaatgattttcttcatgcctcttaagtgcagatgtccaaatctttgatgccatattctgacttcatcttctttggaggatagacatgtggaggagtaactggtttcttgaggtgtccataggtagcagntgtcctttgatctgctgcccttcattagaacttcactcttctcatttgtcaccaagcattctgactntgtgaagtttacattgaatccttcatcacacagctgactgatgctgatcaagtttgcagtgagtcccttcaccagcagtactttgtccagactaggaagtccatcatggactagctntcccattccagtgatctttcctttagagccatctccanatgtcacatagctagtggagcaagggtcaatgttcaccaggaattctttgact

SEQ ID NO: 78041 - DNA, 433 bp, Glycine max
ctgcaagcttgatgttgtgggaccctattatgttggtggtcgacacacgactagagctgagacactgtaatattaaagcttagccttgttatgaccattatgtccatggtcgacactaggattgaagatgagacataataatattaaagcctaatgtcattaggactactatgccggtggttgacaccaggattggagttgaggcacagtaatattaaaactcgatgtcgatgggaccactatgtcaatggttgacattggaattgaagctgatgcataatcatattaaagcttaatgttgtaatggccattgtggcacatgtgttcgacaccaaaatatgagctgaaacggtgtcattatgactatgctcgtggtcgatgccattttggagttgaggcatgatggttttatgataaaccatgtaatttctct

SEQ ID NO: 78042 - DNA, 440 bp, Glycine max
ggcagcaagcttgcatcccaggaggggattcgagcttaatgctgatggtcaacctctgaagatcctcaggaagaatatgaccacactcgctcatacatggagtgttttttcttactccaacttgatccccacctcccacacttctaacatcacattggatctggccaagttgatttatggcattattatgaagatggacatgaatctaggctacctcgtctcttaccagatttctatcattgcccaacatgactcctccaggcttggatttccagccttaatcacagctttgtgtaaagctagagaggtcacatcagatttccagccatcagattctagatgatccaacagtgacattcaaagggccaaggaaggccaggggtaagagatctgaggctccccctacttcaacaactcaagctactcttactcccacacta

SEQ ID NO: 78043 - DNA, 419 bp, Glycine max
  unsure (1)..(419): unsure at all n locations
acattgatgtgtgtatntattggaggaggttgtatgccatatttgttttaagggtagcatttcttggtaaaactaactttccaaatgtttgccttcgcacgaaatggccccaaggaagcttgcctcaaagaggtccaggaaggataaggcggccgaagggactagttccgctcctgactatgacagtcaccgctttatgagcgctgtacaccagcagcgcttcgaggccatcaaaggatggtcgtttctccgggagtgacgcgtccagctcaaggacgacgagtatactgatttccaggaggaaatagggcgccggcggtggacatcactggttactcccatggccaagttcgatccagaaatagtccttgagttntttgccaatgcttggccaacagaggagggcgtgagtgacatga

SEQ ID NO: 78044 - DNA, 435 bp, Glycine max
agctagaagaactacaaagttcacttgaagcgcatgagcagagattaagagaaaggaatcctgagaagcacaatgatcaagccttacaagctcaaacaagcagaaagtttgacaagcaaggagacaaatccaaaaagaacaaaggaaagtggcgtgatgagaagtggagaaagactgaagattcaaaatgtggtgattctggatcatcttcacagaaagctgtgtcaaatccaagaagccaattctcagggaaaaagaaatgggtcgacaagaagaaggtgcagtgttacaactgcaggaactttggccattttgcagctgattatacattcagtaaaggctctcatgtgaaaggtgaagaagaaaggttggcacaagaggagaatacagaagatgatcactatctgctgatggttaccaccaaaaatgatcttc

SEQ ID NO: 78045 - DNA, 502 bp, Glycine max
  unsure (1)..(502): unsure at all n locations
tattatacacccatctcactagattctcactccatatttcttaccttcttctctcacttatttccaacgaccactccattgccttcagcagcggcgtcaccacccaccggcatcattctccttatgccatcaaaacacaaaaatcaaaacaaaaaaaaaatcaataactaacaaaatcaaaacacagctttctttagcttgttaggatccttaacaactatcttcgattggttccctttgatttcagtgccctngcgcttcaacctaaacaacaggatgtaatgggggaattaatgaaggcaagaatggaaggaatttagtagctgaggaaaacaaatgcaagagatagttaggaattatcctccattaaaataagaaaccacggtttacaaccaccataagaaaaaaaacagtaactgcaccacaagggaacataatgctaaatagaaggaagatccagagagagaatgggatcacacgataattccctcatacccactat

SEQ ID NO: 78046 - DNA, 422 bp, Glycine max
  unsure (1)..(422): unsure at all n locations
tctctagtaccttcattaactaatggattaacaatacaaacactactttntgagcaaaacaacttacaacaaaaataatacactntgtctaaatcctttgaatacactagtcatctttgatcatatttttctccatttggcattacttnttggtagtaaaatgaagaaaaatgtctattatttttatcttttggatactgcatatcattatatctaattggaccgttgtcaacaattaaatctctaaagttttcatcaatatttttccattgtcctagatcataaatatttttagaaacttcatttgatgtactattgagctccttatttgtttctaaactatcttnnttgtaaatttcattatcctcttgttcttgactaggattaggactattcacattgttaagattttctacctcttg

SEQ ID NO: 78047 - DNA, 245 bp, Glycine max
tgtgatgtacctaaacaggcgagctcctggcagtcaacagataaaaggaacaaagaccacaaagcaagggggcttgtggtggctggccagctgtgaattttgtgtgatatatgggttgtggcctctggtaatcgattaccaagggtgggtaatcgattacaaggcttaaaaatgaagacatgaggctaagatggtctcttggtatcgattaccacggggtgtaatccattaccacgctttgaaac

SEQ ID NO: 78048 - DNA, 445 bp, Glycine max
  unsure (1)..(445): unsure at all n locations
gcgtagtcttttaagaaaagggatttatcaagtcaaggtcaaagtatggaagtaaccagcttgcgaaagttggggcagaagatgggtcgaatntacatagcttctttgactactgccaacaaatgactgagcaataacttacaaaattaggaaccattgatgtgtccatgttttatttctagttgcactttgactttgacgagattaatgaanatgggagttgattcgaccctatgttctactgaatgtcttgggntaaaattgcaatacgtcagcaacgtatcattcacatgcgttcatgcttgtttatctttccactntggtttcattgctcattgcattatttcctctgaagtgaatcataatcattgtaatcaaagagaaagaacgcgctntacgacacccataccaaatacgtgccanagctagaacaatgagtgagata

SEQ ID NO: 78049 - DNA, 438 bp, Glycine max
agctgatcaaacaatatctaatcatcaaaccactcaatcatacaatggctcattcaaatcattctcaaacactcatttcatgaaaaacaatccactgcatatcattttcaatcaattcactgttcaaacacgcttttggtacaagcaaacaactcaaagtgctgaaatttaaataactaaaatttaaaataattgaaatataaaaactgaaattaaaatgactgaacataaatcataaaataactgaaaataaactaaaatgttcaagatgcacaaatttaaatgtcctactactgtggttgctcctgtgcatgctcattaaggtccaacacctgagcaactagtgaatcctgagagataggttgctctaactcagatgctggtatagatggctgggtctcctcaggaataggtgcaggagatggctcatgtatctga

SEQ ID NO: 78050 - DNA, 438 bp, Glycine max
  unsure (1)..(438): unsure at all n locations
acaagctacaatggtcgagtgagaatggagagctaattgtagatagacaaagtttgatatgcttctccattggaaaatatgttgatgagatactatttgatgtagtccctatggaggctagccatctcttacttggaaggctntggcagtatgatagggatgctgtccacaatggtgtcacaaacaaattttcatttgtacataaagggcannanggtacccttaaacctttgtctccaagtgaggtttgtgaggatcaaataaaaatgagagtgaaaagagaacangagagaaaagaagagaanaataaaattgatgaanagagagagaaacangaaaggagagaaaaganagannatagtggagggtaaaaaaggagtggaaactgaaaaataaaagaagattatcaagagagaacaatacagagcttgttcatga

SEQ ID NO: 78051 - DNA, 439 bp, Glycine max
agcttcaacctagaggagacggaccattccaagtgttggagaagatcaacgacaatgcctacaagattgacttgcctagtgagtataatgtaagtgccactttcaatgtgtctggtctatctctttttgatgcagatggaggagccttggatttgaggacaaatccttttcaagaaagagggagtgatgaggacatctgataaaatttggtgagagtttctctctgggttccttgttgaaccaattatcagacttatcaaggtaatccttgtggcgtctacccagacttatcttccttcattggaagtggcgtctacccggacttatcttccttcaccggaagtggcgtctacccagacttatcttccttcactggaagtggcgtctaccctgacttatcttccttcactggaagtggcgtcatccaaatcttcggaac

SEQ ID NO: 78052 - DNA, 233 bp, Glycine max
gcacactcagatactaagcttggagaaagtacatggtcatactgttactcgaggtgcgatctatctatatatatagagacgctcgttattgaacaaccgaagctctctataaatcccaatggtcattacttttcactcagaggtccgattcatgcgcataatatatagatacgctggcaattgaacaacggaagctctctagaaattccaatgagtatgacttctaactcaga

SEQ ID NO: 78053 - DNA, 431 bp, Glycine max
  unsure (1)..(431): unsure at all n locations
agcttgtaatcgattacacacatattgtaattgattaccagaggagaatttcaganaatattctcaacagtcacatcttttcatttggttcttgaatggccatcaaaggcctatatatatgtgacttgagacacgaatttgctaagagtttttcagaacaaaaagatcttatcctcttaaaaagcaaaatcgttttatcctcttacaaattccttggccaaaacacttgtgattcaataaggaattatttgagtgctcaaattgttcaatctatctctttcaagagagatttcttcttctcttctttattctgaaaatggattaagagaccgagggtctcttgttgtaaagaaatctgaacacaaaggaagggttgtccttgtgtggttcagatcttgtaataagcttttacaagatagtggaactctcaa

SEQ ID NO: 78054 - DNA, 473 bp, Glycine max
  unsure (1)..(473): unsure at all n locations
caccactgtcgttgtgaacaatggatccatttggaaatataaaacctaatgtggagttcacaactgtctgactgcttgtctctcccaagaatgccatagttntttgtaagacttgggttgatactgaaacttgtgctttctaacaaggttaggttgtgccatatatatagatgagttttaatatcagcgttgcattttttaaagaatgaagatacacttgcacatgctttctgtatgtgttgtcagctacatgaatgacatgacatgctttagcttgcatcagatctgcatgtgtagtcatgttgtgcanggtcctttcacgtgctttatgttattgaagacaacaatttatcatacacggttttccacaatgtgtagtcaagtcagacaacgatatatcatatatacctttttagaattaagcaataattgtgttgtggacgtaacacataaattacatgttcaaaacgatc

SEQ ID NO: 78055 - DNA, 421 bp, Glycine max
  unsure (1)..(421): unsure at all n locations
agcttctctaganatagagtgaactagtataaatcttgttctctatcttctttttaactctcatctctattgcattctttgtcaatttgctgagtttcaaagatatttcaaattgttgcactttaacgaaacggtgctatgttcgggtgattgattcaatattgttttaaaagaaagttgtgatatgatcctttgggcaacaaaagttttaaaactctatttttgagtatttgattttacaccagttcaccccccctcttggtttggttagtcctgttgtcttttttttttttttttttttcagagggtaggcagtggcttgatctcttatgtacatttgttcatgcagtttaccaatagatgaacggtctttctgagagagattgaaatcagatggatgcactagtaagagtttggtgat

SEQ ID NO: 78056 - DNA, 436 bp, Glycine max
  unsure (1)..(436): unsure at all n locations
tatggtaagatctgagacctaaccatgacagaggtctccacggatgccattgcctccctcgcccaatattatgaccagactntgaggtgcttcacctttggggacttccagttaacacccacagtggaagaatttgaagagatcctgtgcatgccctttggaagaaggaaaccatatttcttctcgggattctatccctccttagctagaatttctaagatagtcaaaatctcgacacaggaattggaccgcgggaagcaagtcgaaaatgcggtggttggggtaccaaggaaatgtntggaagcaaaggcgagagtcttggcaagtcaagactaatgggccccgttcatggacatgctagcactgttgatcttccgagtgggcctctctccaaatgtggatgggttggtggaccgggcaacgatngatacttttc

SEQ ID NO: 78057 - DNA, 430 bp, Glycine max
  unsure (1)..(430): unsure at all n locations
agcttccaatctacaccaccatcgcacgggactttatctatagatgattttgaacgatgcntaaaaagacatgcagtcaatgtttcttccatccagagaaatttgatgtcatcttatgacaataaaaaaaatataacaactgcttctacatccacataccaagccagtaatacttattccaatatgacacagttagacattcacagaggtaatttttattcttaagctattatcaaatatctacacgcacacattttatttattattacattcttttcagattttgttctacagtcaacttatatatagaatgccaaattggctgtttattatccagatgaacatcagacaccaactaacactacatagcatgatcaatttgtcggccatgacagctcagattccagtgatgatgatgtaaatatgacac

SEQ ID NO: 78058 - DNA, 404 bp, Glycine max
  unsure (1)..(404): unsure at all n locations
tatccgaacanagttcttgttctgcttcctttgcattgccttgtgagaatctgcagcattctaacattgctttcacttctatgcctgtctataggtggagtcggcatatcaaacatgatcttgaagattcaaaggaatgaatacatgggatttgataatttttgcaggaatgatacatagagcttttcaagtatctttttatttgcacacattntcttgttgtgtttgccaccaccaaaccacctgagaggggatgatatgttttgtttttatttcanatgtcaaaaagaaagtttgtgctaattgaagcattttttggatacatatgctaatagaagcattaaatcttgtatgtccagaggagatgtatcatgccattatgcacgaattattaaatggctatt

SEQ ID NO: 78059 - DNA, 429 bp, Glycine max
agcttctcaaggaggtgagcttagttatgagaggggtgtgtgtagctaagctctagcttctcaaggaagttttctcaaagaagcttctcaaggaagttttctcaagaaaacttctcaaggaagctacctagtctataaatagaagcatgtgtaacacttgtggtaactttgatgaatgagagtcttgtgagacacaactcaaagttcaacttctctccctttttttcttccttcaatttcgtgctcccccctctctctttctctccctctttcttttcctccattgaagcatccttccaagcttcttatccaaggctcatcttggtggtgaagctccttcttccatggcttattccctagtggatggcgcctcctctcccctcttctcctttgtcttccgctgcatctccatggtggaaaaccaccatt

SEQ ID NO: 78060 - DNA, 502 bp, Glycine max
  unsure (1)..(502): unsure at all n locations
cgacacttagatactcagcttctaagggaagtttctcaagaaagcttctcaaggaagctacctagtctataaatagaagcatgtgtaacacttgttgtaactttgatgaatgtgagtcttgtgagacacaactcanagttccacttctctccctttttcttccttcaatttcgtgctcccccctctctctttctctccctctttcttttcctccattgaagcatcctcactcaagcttcttatccaggcgagctcagctcgcccaggcgagccaggttgcttccttcagaagcaacagccttctggaggaatcttctggagggcccaagtgggcctggttgctatttgcacccccatttntactaagtacacccccttgccttnttttggtggaatctttttcataaaggtacagaaacttacgaatttcgtaacgatacttggtttctttccgtaatgtacggaacccngcggattacataatcatccccttnttgactta

SEQ ID NO: 78061 - DNA, 439 bp, Glycine max
  unsure (1)..(439): unsure at all n locations
agcttcttagtttcagatgatgcatatgagnttgtggctacctcatgcacccctctaatgactatagcatcatttctggcgctaaactgttgggagttggaagccatcttctcaattaaattcctggcttcagcaggggttatgtctccaagggctccatcactggtatggccgtttgaagtttgaagtttggcgaaacacaagttctcaaattgttttgaatctctcaaatctggccacaccaagtgttcctggtatttttcaaacaaaatatgagtcaaaagaacctaccacaccaaaattcagccaaaaataaaaaccctaactatcaaaacaaaaatcgccaattaaattgtcagcagcagtcactaattcagtcactaatgtaatgttgtgcgaacagtaacacagaatcagtctctaattccgtcactaagca

SEQ ID NO: 78062 - DNA, 486 bp, Glycine max
  unsure (1)..(486): unsure at all n locations
tatccatcacatgtggtactaggtggcggtcgggcgatggtgcacaacaagttttccacattcacaaatcgcgcataaacccaccatcccctgttgcccacctccaactgacctcacgtactcccacgtagcccatatcctcgtttctctcaacaccgggtccccatcaatcctcccaagcttccccaacatccaagtaactgaacattcncaacacacanactatcacagccaagaaaacagggcaaaggcagaaaactctgcccaaagcaccaacacagcttttctcacttaaagaccccagtaacaattccttcgttccagttcgttaaccgttggatcgactcgaanattntactggaagtctctagtacataagcctacattntgaccgttgtgatctactagcaaacatccagaactcattctgcactactttttccacaaccagcaaatgccatagcattttctgcacttatgcaaaat

SEQ ID NO: 78063 - DNA, 411 bp, Glycine max
  unsure (1)..(411): unsure at all n locations
agcttgtagtgaggcttggctacattaattcattggtttttctaggattcaaagatttagattccaagagagcacaaatcctagacttatccaaatgatcttttccatacaagtagctttctcactatcttttcctattactttgcttctgaccttattataacaacacaatttttttttctttcctttttttttaacatacaacttatttgttgtgtgtgttgatgctttacccttttctttacatccctattaacttcactcccccaaatttggggtaaatttgccttgaaccatatgctctcctagaatctaagcaaggtatctggagataattatttaagttcaaggttcaaanttttgacaatatcattcagctcataaagggtgcaaaggatacagttatcattc

SEQ ID NO: 78064 - DNA, 325 bp, Glycine max
  unsure (1)..(325): unsure at all n locations
acatgatttgggacttgtatganttgtattgggcaagattggatgagaggaagtgtgattntcgaaatctgcacttatgcagaattttgctgtcaaataggtgcagcagaattttggctttgtgcagaaaaatgcttgtgtgtggtgggctgtggaaagagtagtacagaatgagttctggatgtttgctagtagatcccaacggtcacaatgtaggcttaagtactagagacttccagtaaaattttggagtcgatccaacggttaacgaattggaacgaaggaattgttactggggcctttaagtgagaaaagctgtgatttt

SEQ ID NO: 78065 - DNA, 432 bp, Glycine max
  unsure (1)..(432): unsure at all n locations
agcttctaaggaagttttctcaatatagattctcaaggaagctacctagtctataaatagaagcatgtgtaacacttgttgtaactttgatgaatgaaagtcttatgagacacacttcaaagttccacttctctccctcttttattccttcaatttcgtgatccccccctctctctttattttcctccattaaagcatcttcttcaagcttcttatccaaggcacattcttggtggtgaagctccttcttccatggcttattccctagtggatggtgcctcccctcttctcttctcctttgccttccgatgcatctccatggtggaaaatcaccattaaaggacctcattgaagctcanagatccagccttcatagaagctccacaagcaagcttccatcaaaagggggaaaatctagtgaagaaatatacc

SEQ ID NO: 78066 - DNA, 437 bp, Glycine max
  unsure (1)..(437): unsure at all n locations
tggaactacttcacatggacttgatggggcctatgcaagttgaaagccttggaggaaagaggtatgcctatgttggtgtggatgatttcttcagatttacctgggtcaactttatcagagagaaatcagacacctttgaagtattcaaggagttgagtctaagacttcaaagagaaaaagactgtgtcatcaagagaatcacgagtgacccatggcagagagnttgaacacagccaagttactgaattctgcacatctgaaggcatcactcatgagttctctgcagccattacaccacaacaaaatggcatagttgaaaggaaaaacaggactttgcaagaagctgctatggtcatgcttcatgccaaagaacttccctantatctctgggctgaagccatgaacacagcatgctacatccacaacagagtcacact

SEQ ID NO: 78067 - DNA, 437 bp, Glycine max
  unsure (1)..(437): unsure at all n locations
agcttaactcatccaaacatggcaagttcaacatgctntcaacaaatttcttcacaaataactatcatgaagcagaaacctagcaaaactgcccatcatatctcccaaaacccaatacccacgaaaatcaagtgagaaataagtctacccaaacctgaaattttgaggtcccacacgtagagatgcgcttcacaactccgaaaatgccttcctttcgcgatttggagcagaaatgatgaccaaaggttggagctttgttggagcttcaatggaggatgagaggggagaagaaagctacgtgagagagagagggagagagcttctgaaatttttggggctgagtgaggagagagagagttgctttttggttnttaaaaaaaaattntctcttttcctattattntatttaagctatgccacatgtcntccattgagtg

SEQ ID NO: 78068 - DNA, 474 bp, Glycine max
  unsure (1)..(474): unsure at all n locations
ngtagggttaaagtctcacgatggtcacgtgctcatgcaacaattgttagccgtggctatactagacatcttgccaaacaaagtcaggttcacgataactcgccagtgctttttcttccatgctatatgtagcaaagtgattgatccaataatgtttgatgagttggaaaatgaggccgcaattatactgtgccagttggagatgtattttccccctgctttctttgacatcatgaatcactttgatgtgcatctggtcagagaaatcaaatgttgtggtcctggttatctatggtggatgtacccggttgagcaatacataaagatcttaanagggtatacaaagaatctatatcgtccagaagcatctactgttgagaggtacattgcagaagaaagccattgaatttgttcagaatacttagagaanggctaaagctgtgggcttcctgagtgtcggcatgatgacagagt

SEQ ID NO: 78069 - DNA, 287 bp, Glycine max
gtttgaaattgctcagagcttcaacattcaatttcgagcgtctcgatatattacgggactcaatcagacatccgagtaaaaaattatcgtcgtttgaatttggtcagagcttcaacattcatattagagcgtctcgatatattacaggactcaatcagacatccgagtaaaaagttattgtcgtttgaatatgctcagagcttcaacattcaatttcgagcgtctcgatatatgacgggactcaatcagacatccgagtaaaaagatattgtcgtttgaattagctc

SEQ ID NO: 78070 - DNA, 382 bp, Glycine max
taagtttgctatcaaaagagaagatggtgagaggactaccctctattaaccaccctgatcaactctgtgaaggatgtttacttggcaagcaatttagaatgagttttccaaaggagccaaactcaagagctgagaagccactcgagctaatacatgctgacgtctgtgggccaatcaagtcaagctcactaggtaaaaataactatttcctccttttcattgatgatttttcaagaaatcagaagttctttccaccttcaagaagttcaaagctgcagtggagaaagaaaatggtcgagagatcaaatctacgaggactggctaaggaggagaattcacttccaaagagtttcgagagttctgtgaagagaatgaaattagt

SEQ ID NO: 78071 - DNA, 345 bp, Glycine max
  unsure (1)..(345): unsure at all n locations
acttgttttcaccaaaattcaaggtccatttaccttaagaaaatatttttatttaaatattctggttttaatttaattttaaatacaaaaatgtcgccttatttttaacttgtatactattttccaagatttatatatcaaaccttggaaataacctcttttttggtttctctatttcttgtaccaaattttaaaaatagaaaattagtttacaattntttaattaaatatgaaaatagtatatgaaaaaacacttattcttctttgaaaaacaaaaaggtcgaagagtcctgaanagttcaatgctcatttgtttgaacagatgagtaaataatcactctttta

SEQ ID NO: 78072 - DNA, 439 bp, Glycine max
  unsure (1)..(439): unsure at all n locations
agcttgtcagttataataataccgtgttgagacatcaagactaacaatataccataataacaagggtttttttccatacatcagtcacttggaggatatttctagtgcaatcaaatagggtcaaaagtcacaacaacaataatctctcaaccaaaacatcaagataaaacaataggataatgcataataattttaagataaaagcttctcataaactagatacttaagtcaagagtggatcccgtcatgcagtatgtagtaaattccaattaacactaggtggatttattaaacatcatcatacattctgtttaaaagccacctaagtactttcttccagaagttgagtcttcaaagttggcaatcctactgggacaaaaaagacaaaacgatgcctcaaaaggacatatctattaatntccacctcctcctaacatat

SEQ ID NO: 78073 - DNA, 470 bp, Glycine max
  unsure (1)..(470): unsure at all n locations
gctccttcttacatggcttattccctagtggatggagcctactctcacctcttctactatggtttccgctgcatctccatggtggaaaatcaccattaaaggacctcattgaagctcacagatctaacctgcatagaagccccacaagcaagcttccatcactcatgttgatcaccatggggggaagttgcctgcgcacgacagggtgaccttgatacttgcttcctagntttcctaagtgagagtgtcatgtggacacgcttaagctatttcctgacgaatgataccatattgcatgttagagttgagtcaggtgcatgcatcattctgagcataatcgatttgaatatgaaaaagttgatgattagtttggtaagtgtatgtcgaactgatgaaatatttaaaatgatcgtggtatggctattgtttattgctatatagcatttggtgttggtgacttatataactac

SEQ ID NO: 78074 - DNA, 421 bp, Glycine max
agctatagctcattgcttcaagtagtgcacatatgcttctagaggaaaacacgttgcctaaaagttactattaggcgaagaagatactgtgtccgatgggtatggagtattagataattcatgcttgcccaaatgattgcattttgtacagacatgaatttgaagaattgtccaaatgccctatgtgtggggtatcacgatacaaagtcaaggatgatgaggattgtagtagtgatgaaaactcaaagaagagccccccagtgaaggtgttgcggtatctgcggatcgttccaaggtttaagcgtctttttgctaatggagacgacgctaaagaccttagatggcatgaaaatgcgagaaactgtgatggaatggtccatcatccagttgaatgcttgcagtggaagaagatagatcgttt

SEQ ID NO: 78075 - DNA, 421 bp, Glycine max
  unsure (1)..(421): unsure at all n locations
tggagggagtcataccttacanaacatatatatgtatgtntaggtagtgaatataccttagatatgcatgtatgtaaacaaaaaaacacttcacaaaatatatatatgtatgtttaggtagaaaaataccttagatatgcatgtatgtaaacaaaaaacacttcacaaaatatatatatgtatgtttaggtagaaagataccttagatatgcatgtatgtaaacaaaaaatacttcacanaatatatatgtatgtntaggtagaaagataccttggatatgcatgtatatagcaaaaataccttacaaaacatatatatgtatgtttaggtagcaagataccttggatatgcatgtatatagcaaaatacctcatgaaaaaaaaaaagaagaaaaaaaaacaaacaagaaaaagaaataaa

SEQ ID NO: 78076 - DNA, 425 bp, Glycine max
  unsure (1)..(425): unsure at all n locations
agcttgaaatngaacaagggaagctctcgagtaactcatacgatcataacttatcacacggaggttcgattcaggcgcataatatttcgagacgctcgaaattgaacaacgaatgttgttgagaattcaaatggtctgaacttgtctcacggatgtccgattcaagagcataatatatcaagattctcgaaattgaacaacggaagctctcgagaaattcaaatggtcataacttgtcacacggatgtctgattctggcgcattatatatcgagatgcttgaaattgaaaaacgaatgctctcgagaaattaaaatggtcataacttgtcacacggaggtccgattcatgtgcataatatatcgagacgctccagatttgactacgaatgttgttgagaaattcaaatggtcattacttgtcaca

SEQ ID NO: 78077 - DNA, 382 bp, Glycine max
  unsure (1)..(382): unsure at all n locations
tctcgatatattatgcacatgaatcagacttgccgttgaaatatatgagcatttgaatttctcgagagcattcgntgttcaatattgagcgtctcgatatattatgcaccacaatctgactttcgtgtgacaagatatgaccatttgaatttctcgagagcattcgttgtgtaatttcgagtgtatggatatattatgcgcctgaatcagacctccgtgtgacatgttattgaccatttgaatttttagagagcttccggtgttcaatagatagcgtctctatatgtgatgcgccagaattggactttcgtgtgacaagttattaccatttgaatttcttgcgagcattctgtgttcaatttcgagcgtctcgatatattat

SEQ ID NO: 78078 - DNA, 426 bp, Glycine max
gatcttaagcgactgagctgcagctttaagcaagcgaacaatctttttcttgttcatatcagaaacattagtgattattctgttcataattaaagcgattcagcttggaagttaatggctgaaacctatctataacaaaagctctatccaattgaagaatatttatattttttgccgaataagtgaaaagttattctggtttggcaaagagggcaacatggaagggtggctacaagatccacaagggtggattatgctttgaaagtggatggttctgcactagtaacactgctgacatgatggaatcttgctacagggaatggaaaaatgcttgagtgccgttataccggggcgttatgatggaaacaccgtggttgggtacctatttctagggtaatttacctataaattattatgtactcaaat

SEQ ID NO: 78079 - DNA, 158 bp, Glycine max
actaagcttgggctaattcagatgacaataaccttatgctcggatggaagattgtgtctctttatatattgagacgctcaaaattgaattctgaagctcatagctaattcaaacgacagtaactcttttctcggatgtctgagcgaagcccgcaatct

SEQ ID NO: 78080 - DNA, 413 bp, Glycine max
agcttcaacattcaattgtgagcgtctcgttatattactggactcaatcagacatccgagtaaatatttattgtcgcttggattggctcagagattcaacattcaatttcgagcgtctcaatatattacgggacttattcagacatccgagtaaaaagttattgtcgtttgaattagcttatagcttcatcattcaatttcgagcgtgtcgctatatcacgggactcactcagacatccgattaataagttattggcgcttgaattggctcatagcttcaacattcaatttcgagcgtttcgatatatgacaggactcaatcatacattccgagaaaaagttaatgtcgttcgaattggctcagaggttccacattcaatctccagcgtcgtcgtatattacaggactcaatc

SEQ ID NO: 78081 - DNA, 469 bp, Glycine max
  unsure (1)..(469): unsure at all n locations
actctcgaatacttaagctntgagccgattcacacgacaataactcnttacatggatgcctgattgagtcctgtcatatatcgagacgctcgcaatggaatgttgaatctctgagccaatccaaacgacaataactgtttactcggatgtctgattgagacccgtgatatatcgagactctcaaaaatgaatgttgaagctctgagctaattcaaacgacaataacctcttactcggatgtctgatagagtcctgtcatacatcgagacgctcgaaattgaatggtgaagctctgagccaattcaaacgacaataactatttactcggatgtctgattgactctcgtcacatatcgagacgctcgaaattgaatgttgaagctctgagcgaattcaaacgacaataactttntactcggatgtctgattgaggcccgtcatatatcgagacgctcgaaattgaatggtg

SEQ ID NO: 78082 - DNA, 355 bp, Glycine max
cggaacttaacgcacgcagcagcgcttgaggccaatcccgcttcttttgaaaactgaagcaagaaataatgcaaatcgactatcgcccaccagttctaaccgatagtttttgaatacagccaaacgcacagaaaggcaaaggcatagtaacaaaaaacagacacaaacggataaactgctcgaaatgtagcatacgtaaataagagaatttgtcaaaagatagacaagataaacatcatcctaaaatcataataaaagcatatgtatcagataagtcaaaaacatcataccatatacaaatcattcggctaagttactagcatacacagatcataaactaaacaatggtgtcgaa

SEQ ID NO: 78083 - DNA, 334 bp, Glycine max
aagttaggactaaatgattgagtgaataaatatcttgagccctatccttatagctattttgttaaatacgccctaacgtagaagatacattttattttgcataagtgttgtatctaaacctctactgtgtaaatataatattcaccctttgccatatattaatgagataatgtcctgtcgagtgaaacaaattaatgtgacagttttggatccaatataagagagcttattcctctacagctctccatttcctcaaatctggccgacatctccccttcttctcttcatttcccgccccatgcctactgatcctggccctctaacgttgctcacc

SEQ ID NO: 78084 - DNA, 438 bp, Glycine max
  unsure (1)..(438): unsure at all n locations
agcttatgttgcanatatttacaatataccttctcaacctcagcagcaaaatcaaccacagcagagcaattatgacctttccagcaacagatacaaccctggatggaggaatcaccctaacctcagatggtccagccctcagcaacaacaacagcagcctgctccttccttccaaaatgctgctggcccaaacagaccatacattcctccaccaatccaacaacagcaacaaccccagaaacagccaacagttgaggcccctccacaaccttccctcgaagaacttgtgaggcaaatgactatgccgaacatgcagtttcagcaagagaccagagcctccattcagagcttaaccaatcagatgggacaattagctacccaattgaatcaacaacagtcccagaattctgacaagctgccttctcaagctgtccaaaa

SEQ ID NO: 78085 - DNA, 439 bp, Glycine max
  unsure (1)..(439): unsure at all n locations
nttctttgagcaaagcanaggctngctcttngttttcaccccaggtaaatgccacattcttcttcaccagctcattgagaggtgatgcaattgtagagaaattaggaatgaaccttctatagaagcttgctaacccatggaagctcctaatatctctcacactttttggggtgggccattcttggatggctttgattntctctgggtccacttggaccccatttctaccaactacanaatctaagaaaactatattatctacacaaaaggtacacttctctatatttgcattgagggtgtttttcctaaggactgaaagaacttgcctgagatgtcctaagtgatcatctaggctcctactatacactaaaatatcatgaanataaacaactacaaatctacctatgaaatcccttaagacatgatgcataagcctcat

SEQ ID NO: 78086 - DNA, 428 bp, Glycine max
  unsure (1)..(428): unsure at all n locations
agcttgtanggttaaagtctcactattgtctcgtgctcatgcaacaattgttagccgtggctatacgagacatcttgccaaacaaagtcaggttcacgataactcgcctgtgctttttcttccatgctatatgtagcaaagtgattgatccagtaatgtttgatgagttggaaaatgaggccgcaattatactgtgcaagttggagatgtattttccccctgctttctttgacatcatgattcacttgattgtgcatctggtcagagaaatcaaatgttgtggtcctgtttatctacggtggatgtacccggttgagcgatacatgaagatcttaaaagggtatacaaagaatctatatcgtccagaagcatctattgttgagaggtacattgcagaagaagccattgatatttgttcagaatactta

SEQ ID NO: 78087 - DNA, 504 bp, Glycine max
  unsure (1)..(504): unsure at all n locations
tactcagcttaaacccctgttcattactaaacaagctgaatntaatcacaatcacaagcaagatatcctgactaaatgcaagagataagaatgaaaattagaaaagggaaagaanagctgggttgcctcccagtaagcactattttaacgtcactagcttgatgcatcatcttgttatccaagatcaaacatagttcctacttcaaggaccttcttctcatggtctctttccttcatcacatgcactntaagacagacantttggctaggtggatctttgtcctcatggaaaaaatcacatgcccatgtctaccacacaacttgcagtagacatgagtgggtggccaagaataaagggaatgttagcatcctcttctatatctatgacaacgaaatcagttggaaatataaggtgtttaaccttcaccaaaacatcttcaatgactccatatggccttgtgatggagcggtcaactaatnggagggtcatgcgtgtgggcatta

SEQ ID NO: 78088 - DNA, 387 bp, Glycine max
caagtacactccccattctgctagctatcatgtccacagaaatccatatatgtcaatagagattgtaaagtaataatcatatcacaatatcacatgttatttgctacggcctacgggaaagctcgagcgagcaaacttgcttggtgagtaatgctaactgtttgttgaaaacgcccaagtaattcattacatttttacatcacttgacaaggagtttcggatcaatgtcttttgttttgcgtgatagcacggatgcagatcaacttggacactacttcaaaaatcaaaacgtgaatgataataaccaaataaataagtggataaactttgcaaatgcatggtgttgcaaattgcatgaagcccaagtactggacttggaagtttatt

SEQ ID NO: 78089 - DNA, 501 bp, Glycine max
  unsure (1)..(501): unsure at all n locations
cgagccatgaaacggatntgtntacgttcataaacatgactgactgatatccactattataaaacaaaaaatcaagtgactgctaaattatgacggtttgtgaagttgataattactagtaaatggtgcaaaaaatcaagtgtagtactaacacttaacaagtaaccaatgataatataataaatgaccattgcttgtgtacccaacttcgtccttagatgatgatattgtaatcatagcagctcccgacaccagcgattgctctatgcgtttccttgacttctattccaaaacaattcttctcttttcatttttaatgttcatcactttgtgggtcccaacttctgcacggcaacaagtcgggtattttagtctctgctcctttntccctctgattcggttactctgccatgcatgaatcataatatatcacgatatgggaaggtgtcacaatcacaaggccattggcacggggaatataatcaattacccactacctat

SEQ ID NO: 78090 - DNA, 431 bp, Glycine max
  unsure (1)..(431): unsure at all n locations
agctngatgtaatcctccctatgaagggactagtccccagagccatgagcaggaggctccaagaggattgggctagagctgctgaagaaggccctacggttctcatgaatctgagggtagatttttgagcccatgggccaaggttgggtccacttgtctttgtaaatattaaaataggtttttcttcttttggggcattttgagtagtctttgtaatagggcctgttttgtattttcatgtattttggcataggggtgagcttagctattagaggggtgtgtgtagctaagctctagcttcttaaattaaggaggtgagcttagctataagaggggtgtgtgtagctaagctataacttctcaaggaagctttcatttatttagtgacctangctataaatagaagcatgtgtaacacttgtcaaaacttt

SEQ ID NO: 78091 - DNA, 482 bp, Glycine max
  unsure (1)..(482): unsure at all n locations
tataagaacanaatngcctcaatcatttccaaatatgcatgtgaattatgaagcatcaacaagaatcaagccaaggctattgtgcaagcaatcaatggggcaaaacacaccaaatgattatgatgatggatggctcaaattctcacaaaggtaaactcatcactttcaaattgagctttcaaaactatcatgacatgtagaggagaatcaaggatttcaagtcacaaaatgtcaagaacttttattntcaaaacaattacccatttcttgaacatatcttataattcaaagaanaacatgcaaagtcgtacatgcacacaaaattgacccaaaatattaaactaaaaattcgacgaaactaacaacattaacaaattaacacaactaacaaattaacaaaaccaacaaaactagcanaaccaaagaacactcccccnccccccccatacttaaacaacacattgtcctcaatgtagcacaat

SEQ ID NO: 78092 - DNA, 417 bp, Glycine max
tagggggaagaagtgaagaagaaaaggttcagccccttaggcacttctctctctttcgaatttgctgaggaaaattatttccgtgaagaaaatccaagccgaggcgcttccgtaacgtttctgtcagtaattacgcgaagattcttgaccgttcttcaagatccatcgttcgttcttcgttttcttcagtcttcaacgggtaagtacctcaaaccaagcttttcaattcattatatgtacccgtggtggtgcacattgtgtttcatgtattttcattctcgttttcatttactttttatacccccttttgacgtgcttaagccatttatttaagtcatttctcgcctaatctaaaaataaaataaatttccaccgatcgtttgaattgtatcattccgtactttcgtttgaaatgaa

SEQ ID NO: 78093 - DNA, 418 bp, Glycine max
tctcttatcttgatctgatctttatctctcattcatgtattaatcaattttcaaaaacgttgaagatatatctctgtgaaagaaagaactttaatgaatgatcttggtccaatggtggatttattaagtattgattgacgttgatttatgaaaagttttgtgatatgatccgtaccaaaaatgcctcggcacctttggtttgacagatcattttgttttgaaaaccaattcacccgcccccccttcccgctcttggtttgttgaggtcctcatatatttcattgcttcacagctcagtcttgaagatctcaaaacacactttttttatatggaataaacaatcacttcaaagggtgctttttaactacttattgttgggggacaattttttttgaaaaaaaggaactttttattttgt

SEQ ID NO: 78094 - DNA, 383 bp, Glycine max
  unsure (1)..(383): unsure at all n locations
cttttttactctatctacataacatcctaaatgcctccttcttggtactctccatattatgtacgctcaagtttttctaggtagaaatngccctcagcctaatttaagcaccttgacaattatgctacctaacattttaattttattttaatgtaatgtatttgatctcaactcacattntaatgttgttttctaatataaatcatacatgtcttatacaagaagtaaccttgtttagctagaaaacaattcaaacttagtaacactactaaaaaatagggtttcagcatcggttattaaggacttttcacatcggttattaaggactattgacatcaattattaatcgatgttgaaagtatcgacattgaaagtaataccat

SEQ ID NO: 78095 - DNA, 456 bp, Glycine max
  unsure (1)..(456): unsure at all n locations
catcacatgactgcgtagacctgaccttctgagaggttgccaagaatgtctacacaggacatactctatgtgtaccgtgtcagaacgggaattacactataccttatatgcacgctaatggtgcgtatacaccgcaggaccactgttaacttgacgtgctgcgtacctatatcgtctctagtaggaagagctctcggtacgtacgatgagtgctaatccacatgagacttgtgtattgatcattgcacttagatgcatcacccaactgaccaccctgagatcagactttgacatacatgagtaagaactattggacatgcgtgaagtgattgatacgatagttgangacataactcgatgataagtgaggagctnagatatctttagataatgtttgctgatgtcacgataggatctacgatcgcctgataaaatattggatcaattcttcatctt

SEQ ID NO: 78096 - DNA, 417 bp, Glycine max
  unsure (1)..(417): unsure at all n locations
agctngactntgcgagtngattntagccttagtttcactttagttattagtcaattcaattaagaaagagaaatcccaaagagaaacttccgattgattntttcgctttattttactaaaagatatttttttattattatattattattttacctctttttggtttccaacgtggttacggcatgaccgaacagtcggattttattttaacaaaaattaacggatattacaaatcaaatgatcggtggaaatttattttattttttgattaggcgagagaatgacttatgtaaatgactaaagcacgtcaaaaggggtacggaaagtaaatgatatgaaaataaaagcacatganaacaaatgaggaccactaagggtacatagaatgaattgaaaagttcgatttctggaacttac

SEQ ID NO: 78097 - DNA, 406 bp, Glycine max
  unsure (1)..(406): unsure at all n locations
gacagccaccagtttatgagcactgagcaccccagcgcttcaaggccatcaaaggatggtcatttctccaggagcgacgagtccagctcatggacgacgagtataccgacttgcacgatgagatagttcgtcggcagtgggcatcacttgttacccccatggccaagttcgacccgacataatcctcgagtttatgccaatgcttggcctacagtggagggtgtacgatatatgcgatcctgngtgaggggtcagcggatcccattcgatgcggatgctctcagccagttcctgggatatcctttaatgctggaggagggccaggagtgcgagtatggtcagaggaggaaccatgctgatgggtgtgatgacgatgccatctcccagctactgtgtataccgccgc

SEQ ID NO: 78098 - DNA, 425 bp, Glycine max
  unsure (1)..(425): unsure at all n locations
agcttgttcttgattntgtctaagttcttttcaatcttagaacaatatacttgtccttcatttaactgtcttagggcatggcggtcacgatcaaagaagtacttctgacacctactatatgttgatntgaccaacgctgttatggatatgttgcgacaatccttcaataccttacttatacattctgagagggtcggtgttatgtggccatatcgacgtccttctatatcataagccagggtccatttttcctttgaaatgcgatcaatccatgttgctatggctggactcagtngacataatttttctaaattttgacaacaaaaacatacggttgcaaggagtgtaacatgcatgaaattactttgcaacaataactttaagtatacatgaaacttaaattaacgtgaccatgataaatgaaa

SEQ ID NO: 78099 - DNA, 482 bp, Glycine max
  unsure (1)..(482): unsure at all n locations
tttttgtcgaaaccaagtgtcatgatttctattattaccaatttgctagctgttgatgttgcatcatagttttgctatgtcatctacctttggtctcatctctttaccttacaattcaggcaattctatcattaccctttntcaatatatagaattggcaacatgcaaacatatctaatccaggaaattccaccactaatagtcagcctataatccataaccaatgaagtcccccatctccaatttaattccatcttctaatttattgtagtttctgcagatttaaaataagcgtttggttcttcgttttaacataaatctattgtttagtttataattcacccaattctgcctttagtcattttcaacatgcagaactatcaacatgcaaagagatctgattatacaaaagccaggatcaacagaaaacgtattatgcaacagaagcgacatggtcatgctcagtcatcttcacaacctac

SEQ ID NO: 78100 - DNA, 440 bp, Glycine max
  unsure (1)..(440): unsure at all n locations
agcttctcaggaggtgagcttagttnttatatgggtgtgtgtagataagctctagcttctcaaggaagttttctcaaagaagcttctcaaggaagttntctcaagaaagcttctcaaggaagttntctcaagaaagcttctcaaggaagctacctagtctataaatagaagcatgtgtaacacttgttgtaactctgatgaatgagagtcttgtgagacacaactcaaagttcaacttctctccctttttcttccttcaatttcgtgctcccccctctctctttcttttcctccattgaagcatcctctccaagcttcttatccaaggctcatcttggtggtgaagctccttcttccaaggcttattccctagtggatggcgccgcttcttacctcttctcctttgtcttccgctgcatctccatggagaaaaatcacca

SEQ ID NO: 78101 - DNA, 447 bp, Glycine max
  unsure (1)..(447): unsure at all n locations
tttatctcagctgtatcagtcagaccttctaacatgcctaaagaagctcatttaagcaacatgtcaagtgaacctagaagaatttttaattgcttttaaaagttacaaaatccaaccatgaaagaaacatttttaataaagtaaagtaaataaatggagatgaaaaatattccactaataaataagtatgaaattaataaaacacatgactaaccaaatattntatttcatgtaaactatttgagtgcatggtgtcaattaaatataataattgagatacacacgaaaagatacatcaaatgggaggttggtatttgaagggatcttagcaccgagacaaataagattatgcatgtgcagagcatgagatgaggagaaatgagtagaaaaggggggaaaatgtggaaagtcggggaggatctgagagtaataaaaataatgattatg

SEQ ID NO: 78102 - DNA, 440 bp, Glycine max
agcttaagtcaacactagccataactttaattgattccatgccagctccggtgtttcatttaataaactccatggaaggtttaagactgagataacttcttttacagtaagagataagtagtcattaactacctccattaccagatttctccacaggtactccacaatacatgtccactctctaatcttctcaaatccactttttgtatatgcgtacatcataccaaatctgcttagctgaaactgcaacaaacaatttcctcttcaactcctcgaccaaatcaagaaacacccagttcgccagctgctgccaatcctcggttacttcatgccagtcccgagtaatcagcaactgatgaattcatacttgcatttcataaaccaaaccatggaagaacacactcctcttctccattccgtcacattgataaaatataaca

SEQ ID NO: 78103 - DNA, 350 bp, Glycine max
ctctatctgtgatatactgcgcactgctgtaacaccgctgcctgacgtatcttgatctgatccccatctactcatccatgtatgagaccaattctctagcccgtagctgacttctgttcgtgaatgaacgaactctactgttggcccttggacacacggtggatgaattaatgattgatgctcccagactctcgactagttttgggatgcgcatcgtacaccatatgcctctgccactttggctttgatcatgaacctcgccctctaagagccttctctgcattctccctagctgtgtctcgacctgttgtaggcctctgattaaagatttgctgtcaatagcgaatgga

SEQ ID NO: 78104 - DNA, 438 bp, Glycine max
  unsure (1)..(438): unsure at all n locations
agcttctacataattggagagttctagagagagaaaggtccaagttccagagagtgtgagagaatntattgtgtgaagatctgtagagaccagagctggaagaggaaactgtcctgagtgttagacaaatggcctcagttatcttaagaagggggggttgaattaagataacaagaactattccccaattaaaatttcactctctctttttagattaacgatgcacccttaacatgaattactcaaaagacaattcaaaataaacttcttttaagccaaagataaatagcaataaataaaagaagtttaagggaagagagaaatgcaaacttgattcatactggttcggccacttcctgtgcctacgtccagtcctcaagcaacccacttgagattttccactctcttgtaaaatccttntacaagttctaaacacac

SEQ ID NO: 78105 - DNA, 420 bp, Glycine max
  unsure (1)..(420): unsure at all n locations
nntctccaagtcctanatgacatttcaagctaggattaactcactntaacctccatttaccacagaattcagacttaaccttccaactctcaaagcctcactctttttccactcataacaccacattctcactttccaatcctaggttaactctacatttcatctctaacagttttccatgggcaaatctcagcatacaaacatcacaaacatcatcacaaaacccttaaacagaatgggtatgtctaactcatccaaacatggcaatttcaacaagctttcaacaagtttcttcacaaataactatcatgaagcagaaaactagcaagactacccatcatatctcccanaaccccatacccacgaaatttaagagagaaagaagtccacccacacctgaattttcgaagtcccactcgt

SEQ ID NO: 78106 - DNA, 428 bp, Glycine max
  unsure (1)..(428): unsure at all n locations
agcttctaaaagctagaatatnntgtttgatgagattgtgagacattcggattcatcaagaatgaagatgagccttttgtttacatgaaggttagtgagaattcaattgtttttctagtcttgtatgtagatgacatactactcatcgggaacgacatcccaacactacaacatgtaaagacatggttggaaagtttcttctcgataaacgacttaggcaaaagatcctacgtgttaggaatcaggatctatagatatagatcactaagattgattggccttagtcagagtacatatattgacaaagttcttaggtgctttagtatgcatgattctaggaagggtttcgtgcctgcatcacatggtatgcacttgtccaagggacaattccttactacatcttataagagggaacacatgagtaagat

SEQ ID NO: 78107 - DNA, 460 bp, Glycine max
  unsure (1)..(460): unsure at all n locations
tagcgacctatgatactcagctngatacatgttgaggtttctccttatcttcaaatccaagtggctgctttacgtacacctcttcatttatgaatccatttagaaaagcacttttaacatccatttggtacaacttgatgtctttgtgtgcaacataggctagaaggattctgatggcttctagtcttgctgctagtgcaaaggtttcttcatagtcaattccttcctgttgattatatccttgagccaccaatctttgcttgtttttactgccttccctttttattgagccttgtcttganaacccatttggttccaattagtgatggattctaaagagggactaanaggttctagacctaattctttgtgaactaactcagttcttcttccatagcagtaacccaagaatatgcacatagtgctacattaattttatttggctcaantttttaaagga

SEQ ID NO: 78108 - DNA, 430 bp, Glycine max
  unsure (1)..(430): unsure at all n locations
agcttgcggatntggacttcgccggcagattgatcaaagcgggtctaanaagaggcaaatttaatcatcccacttggacgaatgagaaaactggggcaaatgaagagggtgagaatgagggagaagcccatgctgtgactgccattcctatacagccaagtttcccaccaacccaacaatgtcattactcagccaataacaaaccttctccttacccaccgcccagttatccacaaaggccatccctaaatcaaccacaaagtctgtctaccacacttccaatgacgaacattacctttagcacaatccaaaaacaccaaccaagaaatgaattttgcagcgagaaagcctgtagaattcaccccaattccagtgtcttatgctgacttgctcccatgtctacttgataattcaatggtagcaataaccc

SEQ ID NO: 78109 - DNA, 497 bp, Glycine max
  unsure (1)..(497): unsure at all n locations
tcggaaggtatcgacatcctntagtttactgtttgattattagtaacatatataatattgtaattataaatattgattntattattatataataatatttatatattagtacaagcccaagcccccaaataaaggactaataacctaatatcttaacatataagagataaccttttaatttaaaagtttgtaacaagtaataatgctggtgggggagggtagcaatttgaactccangtcccctgatctctgcaaatctattttggtcctatatgatcttttttcacatgttatatgcatttgtcatgtttgttacttcccatcatgttctgtttggaactttattttttgcagcactctaaacctttctattcaagagactatggtcacaaatattntactatggaagaatgataacgtgaaaaatgttngtacattctttggaatgaaattctatgctccctgtgttattctcaccacagggactnttatgagtg

SEQ ID NO: 78110 - DNA, 471 bp, Glycine max
gggatactcagagtcagctgcggcatgcaagcttccttgagaagctagagcttagctacacacacccatctaaaaactaagctcacctccttgagaagcttccttgagaagctagagcttagctacacacccctataatagctaagctcacccccatgacaaaaaaacatgaaaatacaaaaaaaaaaaaaacctactacaaagactactcaaaatgccctgaaatacaaggctaaaaccctatactactagaatggccaaaatacaaggcccaaaagaagaaaacaacctattctactatttacaaagaagagtggacccaaccttggcccatgggctcaaaaatctaccctaaggttcatgagaaccctaaggccttctttatcaactctagcccaatcctcttggagcctcttgctcatggctctgggaactggtcctttcctagggaggattgcatcaattcgtttt

SEQ ID NO: 78111 - DNA, 477 bp, Glycine max
  unsure (1)..(477): unsure at all n locations
tgtagtaagacacaacatggcaagccctgctagccaagttatcatcaatggggagtttngtttggatgtacctgcaaagtgtgaaggatctaaagtgaggaatgtggctcttccaaaggacttttgcccaaggcatggcattattgctttgagataagtaattatgagcttccctgagtcttaaagtcccttaatcaatatgcttctgatgcaatcctccctaggaagggaccagtcaccagagccatgagcaagaggctccaagaagattgggcaagagctgttgaagaaggccctanggttctcattaaagcgaggaatatgactcttccaaaggactttttcccaaggcatggcattgttgctttgagataagtaattacgagcttccctgagtcttaaagtctcttaatcaatatgcttctgatgncaatcctcctangaagggaccagtcaccagagctatgagcaagagtc

SEQ ID NO: 78112 - DNA, 439 bp, Glycine max
agctgtgatgatatggtcttcaccgacgaatggatcaaagtgggtctaaaaagaggcaaatctgatcatcatgctttgataaatgccaaaaaaaactatggcaaatgaagagggtgagaatgagggagaagctcatgctgtgactgccattcctatacagccaagtttcccaccaacccaacaatgtcattactcagccaataaacaaaccttctccttacccaccgcccagttatcgacaaaggccatccctaaatcaaccacaaagtatgtctaccgcacttccaatgacgaacatcacctttagcacaatccaaaaacacccgccaagaaatgagttttgtagcgaaaaaaaaaacctgtagaattcacccaaattccggtgtcctatgttgacttgctcccatgtccactcgataatgcagtggtagccataaac

SEQ ID NO: 78113 - DNA, 458 bp, Glycine max
  unsure (1)..(458): unsure at all n locations
gggatgtccttttagtatgggatctatctntcctaagatgtagccaaacccagtcaccctcattaagaactagctattntcttcctctattgcctttagttgaatacacctttgtttggttctctatttggttcttaaccctctcatgtaacttctttacaaactctgacctagattccccttctttatgtataaaagaattgtccagtgggaggggaatgangtctaacagtgttagacgatngaacccataaacaacctcaaaaggtgactgcttggtggttctatgaacccccctgttgtaggaaaattctacataaggaagatactcatcccaagacttatggttgcctttcagaagagcccttanaagggtggataaggacctattcactacctctgtttgcccatcagtttgtggatgacaagtagtagagaaaagaagttagttcctagct

SEQ ID NO: 78114 - DNA, 427 bp, Glycine max
  unsure (1)..(427): unsure at all n locations
gctncagtaacattatatagataatgtttacttgacttcgtgagagagtttgattaagcacactccattaaccgtaaaaataaaataaacatacttgttatcaaccatcatttttggaaccatgaattttaagttcatctaccatttttttttgtctgcttttcttttcttataatattactctatatatctttctttttttcttttttgtaaggcaatgctggttaatattctactgcaaaactaaaaatgttaaacataaaatgaaagctaatttggtagaaaccctttataataagtaaaggttgaatgtccattctatttttagagtgcaatagttaaaagaaggagatggaatagacagagaaactaataaaataatagaaaggtatataatacctcttttgcaatgaaacttttgtctctg

SEQ ID NO: 78115 - DNA, 214 bp, Glycine max
tgagatattatccaagtattaacttaaccaaggtgttcaccctatagcatctagtcaggtcgagtcacaagaaagccgctatcatatagagaaatgctttaatttcatcacaaacagggcaacctcagagacaagcatcattctgcaatgctcaacaaaacattcatctgagacaatcctcaaagatcccatcaccatataacctgaatcaata

SEQ ID NO: 78116 - DNA, 397 bp, Glycine max
  unsure (1)..(397): unsure at all n locations
ggcgatgtgccaacaagttttcacattcacaatgcgcgcataaacccaccatccccttgttgccacctccaactgagctcatgtactcccacgtagcccatatcctcgtttctctcaacaccgggtccccatcaatcctctcaagcttccacaacatccaagcaaaacaacattcaaaccgcacaagctatcacagccaagcaaaacagagcataggcagaaaactctgccaaaacaccaaccaaatcacagcttttctcacttaaagatcacagtaacaattcctttgatccaattcgttaaccgttggatcgactccaaaattntactggaagtctatagtgcataagcctacattntgaccgttgggatctactagcaaacatccagaactcat

SEQ ID NO: 78117 - DNA, 455 bp, Glycine max
  unsure (1)..(455): unsure at all n locations
gtatgtacccgaataaaattgagtttagcaacatgtgtgaatgtctcttcataatttatttcatatgattgcgtaaatcctttcacaaccagagagccttgtacttatttatactgccatcaacattacatttaattgtgaatatccatttaaatcccactattgtcttcccttttggaatagtggtgacttcccatgtgccatttgtacaagtgcttgaacttcttctgttacaattgctgcccattcgggtctttatagtatctcttgaatatttcttgaaatttctacactgtcaacaactgctacaaaggacttgtatttttgtgacaagtttccacaagaaacatatctctcaatanggtgtngagcacaagttctcacccatgttctcttagcaataggaatatcaatatcttttgaattatatctcaagttcacgttaggaagaatgt

SEQ ID NO: 78118 - DNA, 226 bp, Glycine max
ttaatcgggtactctttttaaatacttaaattgtgtgttaaaaatatgatacttatatatcacattctcctactttgcttcaaatgcatagatgataaatccttatcaggtaccacatgagttgctcaggctcaactagtagtgcgtggccacctctttctcttaaataagaatagagtgatgaacactatcttaactagtactaactggagcattctgagttgga

SEQ ID NO: 78119 - DNA, 436 bp, Glycine max
cggatccttaagtcacctgcggctgcagctagatgcaatatataagaatcatactcttgattatatgcgcaaaatatggattaattttaaaaccaatcaataaggacttcaaaaaatttataccaagaataaaagaacataatgaaatataaatattcttgctctgattagaatggtccccttaagagtgtgtatagctgtaaatgacacaaactttaggaacaatttttggcttatacatggaagaatcacctattccaaaaatgcaactgaggcagccgcttgaagttcatcacctatttcccctaaagcggtgggacaaatacattggaccatacttataaatcatcactctgacgcttaaccaaccaatgttcctaatggggacaacgagaacagcatcccaccgatgtaagtaccaataatgttcactcct

SEQ ID NO: 78120 - DNA, 501 bp, Glycine max
  unsure (1)..(501): unsure at all n locations
gctcatctacttatcccttttttacataaatatctagcanataaaatggaatatgaatntatcaaagacctcaacacagatcatgatgattggtttctaaaagtgtgtattgttcgattgtggaatatttataacaagaaagatgagcaacacccaatgttattggaaatgatgttgctagatgaaaatgtaactaataacgaatgtcgaattgctcanaaaccaaataaaataggaanatttgtagcacatgattaacctcagtcgaactcaaaaatatgattcaatatggttcctacgttcattcacttataaacacaaagggggaattttatcgaatagtttgtgagcgattacaaaggaatgcganaacacaaaaacaaaattcaagaaacaaaacanaatacaattcaagattaaaagcatcaatccaattcaccaaaccaatacaaatagaattatcacagttactaagaagggtgttaagtgtgaaagttactc

SEQ ID NO: 78121 - DNA, 439 bp, Glycine max
  unsure (1)..(439): unsure at all n locations
agcttatactcctcaagttgtttccattggtccgttttacaaaccgcgtgactctaatggagagaacaacactttggtgcgaatggaagaactcaaactggaatatcttcggagatttctaaatcgaagcaagcagttaagtatgaagcatttatttcaaagacttattgagaagganaagcgaattctgagttgttatggggagcctattaattgcaacagcaatgatttcttaactatgattctagttgatgcttgttntattattgagcattttctaagattctatacaggcttggcttccattgatatagatcctttatcaaaatcatggttggtcaatgatgnttttcatgacttgacactacttgaaaaccaacttcctttctccgttcttgaagacatattcaactctgctaagccggtatgaaagttgaat

SEQ ID NO: 78122 - DNA, 499 bp, Glycine max
  unsure (1)..(499): unsure at all n locations
ntgacagcgcggggtggatgtgtgaaggatgggttgctatgatacacaaagaaacccctcaagagcaaccaagttggatgcagtcgtgtcctccagagttcgaattgtggaactggcgaatcgttaaacaacccaggattntcatggcaaactcaatgtaattctttagttctaatcctattgttgggccttgtatttatggtttgctccctatttaggcatgtctctcgttaccatcgagatataaatacataatccttcttcaattgatcttgcagttntgtctattntcattctcttgcatatttatttttgttgcgattgaatgatatagatttaacaatgagtcctgtgaaagtagtgataccaaggacccggatgttgtatttaagcaactgataaatcaagctgaggaaagggaagataaggattgtgggcttcctccagagttgagaagaatggtcganatggaagacagggaagtgaagccacaccaaga

SEQ ID NO: 78123 - DNA, 440 bp, Glycine max
  unsure (1)..(440): unsure at all n locations
agcttgttcgaagatcctcgagacgtcataagaggggccaatctttcggaaaagactttcaagaagtttttgaagatttctcttgatgaaaactataacctgcatccttttgagttcaaccattcccacttctgcaccatggggtttgttacctggtgggagaaatattattcgacccgttcagttggagacactactatcatgatctccagacttgagagtggttttacacaaccaacggtcgagaatatccgctcaaaccttcaagctcgaggtattaaattacttttgactttctaaattgatatgtatttttgccttttctaatattctcactttcaggcaaaacaatcatgacgaagaaaagtgctganacgtctcgagctgatgtgagacccaagaaacccactggggtgaagatccaagacgggaaacaagaa

SEQ ID NO: 78124 - DNA, 502 bp, Glycine max
  unsure (1)..(502): unsure at all n locations
ctagaatcgattctagctagtatacaagttccattntgcctatgcactcccgaattatgcagaanagattattaatctcatggtttaatgtcaccaagttgagaacaaaagtcttattaagtattagtcatatggtctataaggcaaccatatcattacctcactaagccttatataatgaaacttaaaaatatgccaaaaaatggtatttaacatctttgatcagtaccataccgtngatacagatagattcactgagcccctgtggcttttgcttacacttcctaatatctaaccttgccatactcatcctaaatgacaccatgtgaggcctatagttccatctggtttaaaactcaccattatgaggaaaacaagtgataacaccacaattcatgaatataaacccacaaagaagtgtttccaagacttgcaataccatagttctttgagtttcattaattgacttctcgtatgatcaatacgtttctacttactagct

SEQ ID NO: 78125 - DNA, 445 bp, Glycine max
  unsure (1)..(445): unsure at all n locations
nntgcaagctttaccgcaatcccatntatgtgatgaatttaattttatgatctatcagtctttatgattttgttcattttcttttctcaacaaactttctcattggatgaaaataatgttttataggcaaaagactcttggttatcggacaagttgtagccaatgcaacatggtccaggggcagttttgtggagattgcttgtatatgaggtatgccttctaagacgtgttcctctcctctaacatctatggtaagagatgatgcagtctcctcattgtgctgatatggtaggatacttatagacaaataaggatgaagttgaatggttgatgccccagtcttgtgttgttggtatctttttccgagtaaagaagtattgaatgatttatcattagttaatagtgtaaaaacttntacattgacagtgtatacctattaaactct

SEQ ID NO: 78126 - DNA, 445 bp, Glycine max
  unsure (1)..(445): unsure at all n locations
ntannattntttcttctaattattgtcaactcanatagaatataagtcatactcataatattatgtcgtgccatttatgtttactactattntacataatatcatatattttttttataatatatagcatcctatttgttactatccaaaggtttttaaacaattcttatttcataagctatcagctatcatctccatagattacttgctagtaaattattaaaaaaacttgtttattgaaggttaatcaaatttttatccagtaaaaaaataaaagttagtaaatatttatcaacataccatgataactatactaaaagttggatttaccaaaaattaacttattggtgaaaaataggagtgatatgaaacttaaatatgtaatcatatggataaagagttgaacttaagggtatttatatttacttaaaaatatgtgaaaatt

SEQ ID NO: 78127 - DNA, 434 bp, Glycine max
agcttgaagacaagactatacgatgtatctttcttgggtatagcaatatctccaagggctaccgtgtctacaacttgccaactaagaaactcgtcatcagtcgagatgttgaagtttatgagtatgcttcttggaattgggatgaagaaaaagtggagaagaatgttcttatacctgctcaactacctcaagaagaagctgaggaagaagacccaggtgaaccaccttcacctccaccacaacaacaagatcaagaactatcatcaccagagtctactccaagacgagtaagatctttggtggacatatatgaaacctgtaacttggccatacttgaacttggaagctttgaagaagcgtcaaagcaggaagtatgggtcaaggcaatggaagaagagatacagatgatcgagaaaccaacacatgggagttag

SEQ ID NO: 78128 - DNA, 439 bp, Glycine max
  unsure (1)..(439): unsure at all n locations
tctggggacctaatcaatgaactcctcaagttgtgctaaccaaaatgtgatccataaaagcttctaaatgactattttttgttctacaagtatactttattttaagaattatcaatgtaaaaaaaatcaataaaaacttaattactcatttaaagtttaagaaaatccaaaatataaacccaaattaaagaaaaaatgtaaatattttagaatgtcaaanatttattttactatgttagtcactcatctatataacatatattgcgtatcatgtatgatgctatagaangaatatattaactatgagangtgttaatgagatcaatctagagatggtgacgaatgtttcacttgtanatattaataaataaaattaagtataattacaagaaaaatattaaaactttacgtattgtcaatatatttaaagaaaaatatt

SEQ ID NO: 78129 - DNA, 432 bp, Glycine max
  unsure (1)..(432): unsure at all n locations
agcttatangactntnttagttgttcatattttagatgtgttgcanaattgacataactaaatatttctttgagtcttgtttttaatttttcaatctaatctagtgccattctaaaactaaccttgtgtcccaccttggcttgaggagctatccttttgctatatttgtgcatgaatctcattgaattaatgtcatgttaaatatcatnttgtttaggcttcatttcatcttttggtttcttacttgtcttcttcttcttttttgggtttaagggttgcttacattaaggattggaagaggaaattggtgcattgcttgaaggaagatttttgagtcttgaaggttaatgttcgcttccggcaagtgcaccggatcgcacaagtagtataaaatggtaagaaccgagtatcaaactctcggagaacttgtgt

SEQ ID NO: 78130 - DNA, 437 bp, Glycine max
agctagtgatgttaggtcttcaagggaatgttgtttaaaaattaaatagatagtggtgactcttcccatttttgtgggttcaatataatgatactgttattttcctggtttgctactgttctttagggagtagtataaaactgggcagggttgaacatgtgctgtaatatgttttgatgtaaaaaaggaaactgaaaaatcgatagcttctttcattcgaaatccagtatgtacttatatcccatcaatatcataattcgtaatgacaaattcataaatggctaatcctatttttgctggatgtgttggctgactgattcagataaagtttaataaaataatctactgtccatttttcttgtgtttttttccctttccttttccacctctacccatgtcacgtaaatactgaatagacgagttgaatggagaatcat

SEQ ID NO: 78131 - DNA, 435 bp, Glycine max
  unsure (1)..(435): unsure at all n locations
ccttgaaactcagctttagacaattgcgaagggccaattgtcttganaccaaattaggctggtatccaaccaggcctaaatagttcgattgaacacctgtacgacaagacaggatttgtggattcaagtaaaatgaccatatttcgttcacctcttcttcattgtccggatcgacggtagggaaatagtcagtgaaccaggccgggccaacttctcgactaatgaatggaacatngttgggaagaaacttgtcaaagctcaggaaaaccctcatatactntangaacagcttttgtgagcttggatccaaggtcttgggcgttagtcgaagtgctctctggccttcgatcgagcgatntgcaacttcttcagcataatcttgtgggattattaatcccatttcctgttcaaaagtggcatttagccacaactgga

SEQ ID NO: 78132 - DNA, 367 bp, Glycine max
  unsure (1)..(367): unsure at all n locations
agctttcaggcttcgagctctgatctttaatctgtgaataagggaaaccattcgaaaaaggttaatcaatcaggaatgcgtctagccactgtgatccgctacaactcacacaaagactaggttcggcttctaactaataagaaagggtggggggagaaaagaggacaggggcgctccccgctaaccgaagtcttggatttttctttcaaaggaaagacaagcagtggtttcccagttatcttcaattacttagtgagagcttatcgaattgatgtaaggcagggataccatgtaggaggcctgatcatacaccttaactcactagagcgtggacattaccttgaaggaacgtcngtgactaccctgt

SEQ ID NO: 78133 - DNA, 462 bp, Glycine max
  unsure (1)..(462): unsure at all n locations
gctgcaccgctccagctttgcttcttaggtcggtggtacattcttaattttgcttagaacaacctttattactaacaatcctgtccaaacattttgctctggaaattgttggggggtcctcatttgttaaaaatgagcattaatatatacgtgaatgagtgtgaaaaccgataaaatgggaggaacaaagaattaattatttattagtattttaaagtgtatgatgtacaaaataaatatctattttatattagtaaaatttaaaataaacaaatgtctatcatataaattatattataaataatatttataaaaaaaataaatatattaanaatctaatttaatacagattatgttattgttaatatcgaaattttattttaaaaaatattccatttgacagaaatgatgaatgaagagataagcgtntaaaaatcttttcataaattcttaaagtctatc

SEQ ID NO: 78134 - DNA, 399 bp, Glycine max
cttaattattccgaggccacttgatccaacaagtggtatcaaagcacgtatcttgtagaaagtttcacaactacaagattcatggcctccttaaattttctgtttctggaaggaaattccatccataggccacccatatttaatggtgagggttaccactattggaaaatccgaatacaaatctttattgaagccatagatttaaacatttgggaagcaatagaaataggaccttacatacccaccatagtagatgtaagcactagcaccacaacacaaaaacctagagataagttgactgatgaggatagaagaagaatccaatataatcttaaagacaaaaacattatcacttctaccctatgaatagatgaatattcacacatatagtcaatcatc

SEQ ID NO: 78135 - DNA, 512 bp, Glycine max
  unsure (1)..(512): unsure at all n locations
tactaagcttacagtttatttttntanaccttgagtttggaagaccaattactaagtctttcctaactagatgatataaatgatggatgttaatgtgttcaaccctacaatgccacaaccatgaatcatcatctatcttactcaccaagcaacttagctcatgaaaagatgcatgctcaacattcagcatataaatattacctattctcttaccaatgtggacaactttaccagatatggcttcacttataagatagcaatttctgtcaaactcaatcttgaaacctttatcgcanagttgactaatgtttagaaggtatgctttagtgcatccatatgtagcacattctntatctgagttntgtgttaattccctatatttccttccccagttattnttcctttgttattgtctccaaacatgacatatcatccatcttttgacacanagttagagagtttggacttgtcacccgtcatgtgcctagagcagccactatccaagtaccata

SEQ ID NO: 78136 - DNA, 436 bp, Glycine max
  unsure (1)..(436): unsure at all n locations
agctntcataggtganatcaggtgcagccatttcccttagagtcctctcacgaggtggaggttgtgccatgttctcagaatgtgcaaaatcagaatgctcagaatcagaatgctcaaaattataatgctcaagatcaggatgttcaaaatcaccaataacagaatgcacagattcaccagttatggaatgctcagaatgatcaaaaggtataaaatgatgcctaactaatctatgaaatgtcctatctatctcaggatcaaagggttgtaagtcagatggattgcctctagtcatacactacattcagcatgcacacaactagttgccttgtcatgtaaataaaggtgtaggtttgaactacagctaccctcaaatgatattcaaatgacttgaaattctgtgagcagccttataaaatgatgagaagatagcaca

SEQ ID NO: 78137 - DNA, 497 bp, Glycine max
  unsure (1)..(497): unsure at all n locations
tacccatcacatgtggtactaggtggcggtcgggtgatggtgcacaacaagtttttccacatccacaaagcgcgcataaacccaccatcccctgttgcccacctccaactgagctcacgtactcccacgtagcccatatcttcgtttctctcaacaccgggtccccatcaatcctcccaagctttcctcaacatccaggtaaaacaacattcaaaccgcacaaactatcacagccaagaaaacagggtaaaggcagaaaactctgcccaaaacaccaaccaaaatcacagcttttctcacttaaagaccccagtaacaattccttcgttcccgttcgttaactgttggattgactcgaaaattttactggaagtctctagtacataagcctacattntgaccgttgggatctgctagcaaacacccagaactcattctgccctactctntccacaaccagcanaacttagcattnttctgcacttatgcaaaattct

SEQ ID NO: 78138 - DNA, 331 bp, Glycine max
agcttcaacaatcaatttcgagcgcctcgatatgtttcatgactcaatcagacatccgagtaaaaagttattgtcgtttgaatttgctcagcgcttcaacaatcaatttcgagcgtctcgatatattactggtctcaatcatacatactaataaaaagttatgctcattggaatttgagcagatcttctaaattgtatttagaaccgtttgatatatcacaagactcaatcagacattcgaataaaaagtgattgtcgtttgaatatgctccgtgctctaacattctatttcgagcgtctttatgtatatcgggactcaatcacacattcg

SEQ ID NO: 78139 - DNA, 438 bp, Glycine max
  unsure (1)..(438): unsure at all n locations
agctntctctactaagttgcctgatgcctgaaatgtcttttctgatggcagtggtcctagatgcagggaagaatttctccaagaacaccctcttaaggtcatcccagctgaaaatagacctgtgagcaaggtagtatagccaatcttttgccactccctctagagaatgaggaaaagcctttaaaaagatatgatctttctggacatcagggggcttcatggtgaaacaaacaatatggaactccttaagatgcttatgaggatcttcacctacaagaccatgaaacttgggcagcaaatgtattagtacagtcttgagaacatatggaacaccctcatcaggatattgaatgcacaagctttcataagtgaaatcaggtgcagccatctccctaagagtcctctcacgaggtggatgttgagccatgttctcagtat

SEQ ID NO: 78140 - DNA, 508 bp, Glycine max
  unsure (1)..(508): unsure at all n locations
tatgctgtanacatntataatagacctcctcagcaacaaaactaacatcagcagaataattatgacctttcaagcaatagatgcaatctaggttggaggaatcatccaaatctgagatggacaagtcctccgcaacaacaacagcctgtccctccttttcagaatactgctggtccatgcaagccatatgttccccctccaatacagcaatagcaataacaacagtcacaacaaagacaacaagcaactgaggctcctcctcaaccttccttagaagagttagtgaggcaaatgaccatctagaatatgcaatttcagcaagagataagagcctacattcagagtctaaaaaatcaaatggggcagatggctactcagttgaaccaaactcagttccaaaattctgacaaattaccttcacaaactgtngcagaatccgaaaatatgagtgccatcaccttgaggtatggcaaccaaattgaaatgcctccaccagtagcagcacctg

SEQ ID NO: 78141 - DNA, 429 bp, Glycine max
agcttggagcatttaatttatatgctccaatttgatgcggagtgttaaatatatatattgtagagagttgtattgtgtacacagctgtgtatgtacaaggttgttttgagtgtgtgtgtgaggttgagtgtgtattaagttttatgtgttgtcatgttgagtgtgagggaagctgagtatctaatccttatccaaaggcagcttatctcccctctctctctttctgtgttatatataaatatacaagcagtggttgagaaataaaaaatataactcagcacttctttattgtattgtgtaactcaaatatctcagcaatgtatgcacttcattgtcaacaattatcaagtctagtaataatacatcactactagacaataacttgtataggttatatgtagggtagatcattatcatcgaaggtttgat

SEQ ID NO: 78142 - DNA, 467 bp, Glycine max
  unsure (1)..(467): unsure at all n locations
ntgagtatgaatcttgcaggtaagacaagaaataatcacttagagatcaagaacaccaaggtcaaggcaagaactcctcttcaagaactcaacattttcttttctattccttcaaaccccatggccataacaaagggaaatgaccatctctctctctcgctcagcatccatgacacacacacacacacacattcaatttcttttgttctctcataaactagatatttaggaaactttgcctangttgtgaactattangctntaaggggttttagaggtgcgttcacacaaatttgatggttgatggngcttcgtgtgggcagccaagttatgcctaaaaaagggtgttctagcttttgcaactttgattatatttggccaaagtagacattggccaaaaatggaaatctcactntaaccaacaatgataaatctctaggcaaaacataattaanatatctacacat

SEQ ID NO: 78143 - DNA, 438 bp, Glycine max
  unsure (1)..(438): unsure at all n locations
agcttccgttcccgagagcatctcttatttaagcatttcagcctttgctttcgtgtagcttaagaaaaacgtcatttcttcttctttctttcttccaaggccatttctaaagttccaagaactttctccatcacccacagccaccattagccaccacaaaccattgttgttctccacaccgagaggaacccttcaaccgaagcggaatcttccaacttggcttgcggtttcggtagagaatgaaaccctaatctgacctttcgttttctttcgaggtaaccatggttctacgcttgtttcttgttagtttcatcttatctttgcatcttttctgactttggaaccgccattgtatgtcttatgcttcttttgaaaaacttttgagaaacagactntgtaaacgttatcctttcatgaaatgcatgttattttcgtaac

SEQ ID NO: 78144 - DNA, 292 bp, Glycine max
cgaggtacttacccgttgaagatcgaagaacgatgaagaacgaatgaagaacgtcgaagaacggttgaaaccttcgcgagattactcacggaaaacgttacggaaacgtttcggaagcgcctcggcttatatattcttcactgaaacaattattccaagcaaattcgaaagagagagaagtgcctaaggggctggagccctttcttcttcacttccttccctatttattagcaaatacgggacgtggttgccgcccagctcgcccaggcgagctcagctcgcccaggcgagc

SEQ ID NO: 78145 - DNA, 459 bp, Glycine max
  unsure (1)..(459): unsure at all n locations
agcttgagagaaggccctgctccactattgtatatgatttcaggctctaataggtggccacgatggcgcacgtgcgctcatcacagatctgaaccgtttaacacgcattacagaatgactcgcttacacgtgggacttttctcacatctacaaaatggactggaatctgtgcagctccacccggatggtatctattcgtgatctgaacaatgcacacgctccatgcattatntccaagatctctgttctgcgcgctgcagcgcgacacgagtgttagcacctgagttgggagggctcagctaagctcgacaacgctggcttaatcgagagggcgaaaactaactctatactgactctgctaataacctgaaatgagagaaaatatttttaaacctacaaaccgggagtgctagctatatatgacctatcttcgcccaaaagtatttacaacactacata

SEQ ID NO: 78146 - DNA, 438 bp, Glycine max
agcttgagggtgcgcagcccaccatcttttcatagtaaagtatcgataatgtgtctaccatcacgattatcgtctccctttccatcattgggggtaccacttgggccgccagatccctccaccttttgggcgtgttctttgaaagatccgtccccctttttgcacatgttctgtagttgcatcctatccagaaccatatcaaaattgtactaatactgcctaacaaaggcaaaccattatgtccttccaagaatggactcaggaaggttccaagttagtgtaccaggtaacagctaccccagtaagactttcatggaaggaatgtatcaacaattcctcatcttttgcgtattcccccatcttctgacaatacatctttagatggttcttgggacaagtagtccccttgtacttgtcaaagtccagcaccttgaactt

SEQ ID NO: 78147 - DNA, 217 bp, Glycine max
agtcgtaagaacactattctggagctcgtgagaatataatggcgtgtgcactctcttgaacgtctcatgcgtgaagacaaacaatgaggctccacactcttgatgtgtgtaagaaatgatgacttaatggcccacaggtggtgattatcttatttggcaagcatgaatgacccctttgatggccgtgattgacgagcaagagggtgtcattacaggg

SEQ ID NO: 78148 - DNA, 370 bp, Glycine max
  unsure (1)..(370): unsure at all n locations
aatatactctggatatgctattgagtatctctattcatttatttattctattaaatggtcctttcttcctcttgtcctgaggtgtctttttcaangacacgtttcaaaattagctcaatgtgttttattgcattgacttataaaattcattggtatgcatttaattttcccaaattatatttttccccatggatcacccaagaccatcaaatctcttgcgtttcaatttggtattacatatgcttactttaattaagtgaaaatgatgatcttaaggtatgtgatatctatctattngatctatttaccagaacagtggtttaactagtgagaattatttgattaacatttngttaaaaatgttgacttt

SEQ ID NO: 78149 - DNA, 442 bp, Glycine max
  unsure (1)..(442): unsure at all n locations
agagtttatctcttttatcttagtgagagtgattctcctaaattcttgagtgattcaagaacaccttggctgtatcaaaggactttcacaacctttgtgtgttgccctcgctggaaagagtgattctttccttcctttcatcttcacccttggtttttcaaaccacgaattcagaaaatcaccacctctgcccagaattatctcgtggccataactcccattttacgcactcaaattaagtgattcttgagcctaaatngaatttcaaaacgagagcttccaccttggtttgaaatcacctcatttggagccctgtagcttccgttattgccatttctatatttctgtccagccaccacttaacctaccgtntaccatcccattcatccattttatgccaaaaaccaccttattaagacccacgaaattaaccaccttattt

SEQ ID NO: 78150 - DNA, 289 bp, Glycine max
taatgaacttatggcgtaacaaataatgcctgaatttggccatggcttaagcgatagtgtcacacccttattttgtccggggaccattgtttgatggcctgcaacctttgcttgaccgcttcgaggtacttaacacccattgttaggtaattcgtgaagttccgcggcatgccagaagtcgaaagggagcattttcgcgcaatccataaagttccgcaacattctagaggtcaaaaaagggattattgcgcaatccataaggtttcgcgacattctggaaaaaaataat

SEQ ID NO: 78151 - DNA, 481 bp, Glycine max
  unsure (1)..(481): unsure at all n locations
gctcattcttccatggcttattccttagtggatggcgcctcctctcacctcttctnctttgtcttccgctgcatctccatggtggaaaatcaccattaaaggacctcattgaagctcaaagatccatcctccatagaagccccacaagcaagcttccatcaagtggtatcagagcgcaagagcttcaagtaggtgcttcttanacctncattaantntttgctttaccttctcttccattgttgnttcttcattttttctccatgtatctcctcacatgtcttgtgataaatgtttntaacatgattctttagagtttccaccgattaaacttgctatagaagctagatttgattntctatggttcanatttcttgttcttgttcttgaaccatgaattgtgttgagtttaagttctttgagtnttgtcttggttatttttgtggctgaaacctaaaccataaaattcttacaanaatatt

SEQ ID NO: 78152 - DNA, 439 bp, Glycine max
  unsure (1)..(439): unsure at all n locations
agcttntaacttgaaaagtcttcttgcttgagcggcttggtgaagatgtcaactacttggtcttgagacttcacatatcctgcatgtacatcctttcttgttgtgctctcctttatgtagtggtaacgggtatcaatatgtttgcttcgatcatggaacattggattctttgctagagcaatgactgacttattaattatcgacaaagatcttggtcaactcttcttgtgacatgcccaactcttttaacaaattcttgagccatattgcatgacaaatgcatgaagcaactgctacgtattttggcttacaagtcaaaagaatgactatatatcgactactnttttgacatccaagtgaaggttgtatttcccatgaaaaacatatatccactagtacttttctgatcatcttcatctctagcccagtcaatgtcatt

SEQ ID NO: 78153 - DNA, 480 bp, Glycine max
  unsure (1)..(480): unsure at all n locations
ggaagctagctaagtggtagtggttggctctactgagctttaaaagattggctaagatnttntaaaacataagcacttatacaatgaaggaaagctggagttgctgcacatgatgtccaacgttatgtcaaggaataagatcgggctgcacaatgcacaagacaagataaaatgtcaaatgaagaattgaagttgcaggattcacgatgtcngatacaatgtcctgacatcctgcccgagaatactggagttgctgtacaatgcaagataaaagtcaagtgcagaagtgaagttgcaggatccacgatgtcggatacaatgtcctgacatcctgcccgagaatactggagttgctgtacaatgcaagataaaagtcaagtgcagaagtgaagctgcaggatccacgatgtctgacacgatgtcctgacatccggcccgataatactggacatataattctgttatatctttaacagatta

SEQ ID NO: 78154 - DNA, 443 bp, Glycine max
  unsure (1)..(443): unsure at all n locations
agctaaggagatattcgtaattgcctaaatctatgataattgagacagagtaagtaaactccagatttcattccccgtacatacacatccctcgttcttttattccattttaagaggactatataaattataagagtttataatatatcactaaaatatacttatgatttttcatttttttttcaaataaaattcatttttttaaaatttcgttttggtctttttagttttaaatgtggattaattttttccttctattagcttgaaactaacataacttacattttaaaataattaatttcaatgtaattaattnttttaattatcttaagacctacttatcaatgtgactccaagatattttaaaagattcaattgtggctccaaatttttaaaagatgtaactttgtcctcaagtttttttaaaaatatatcaatttagt

SEQ ID NO: 78155 - DNA, 500 bp, Glycine max
  unsure (1)..(500): unsure at all n locations
tctttcagttcactcacnctntattgtttntntcattctctgcaatttattcagtggagatggagctcctagactgaagattccttattcaggcttgtgcagaagtggacatgcttgccaaactaaaagcaagcagaatgaaagaacttgtttctaagaagaggtctaagttagaggaaatatgtaaattgactcatattgaaccagatacaagtactgcagccgagaaagctagtgcattaatagaattcggtttgttcctgtgcattaatagattatttacctataactacctcttagcatgttttttagaacaactttcttctaagaaatactnttgtttttcaaagctctcttaagaagccaacaaaaataaggggattatttctctgaaacaagttgagccaaacacatatttagtcattatcttgttcttctcttaaagacaagtcaatcacctcatgacagacttgtgctctcattaaagagaatgagtaaca

SEQ ID NO: 78156 - DNA, 434 bp, Glycine max
ctgcagctgaagtacgaagatgagggagtctttccttttttagaggcataaatagaataagaatgggttaattgctcttagcggtataaatggaataagaacgagttaatctcttttacttcgtcaaacttttttctacaaaggtttaagacaatttgttggaaagccactttaattgttgtgacccctaacttgcctattagagttggttgccaatgtctcggatagagctacctatgaagggtctgactataaagcctgagtgaaatgtcgcaatgtgtatccactaaaatgactcttcccgggttgaagtccctcgtagattaaagataaggcgtaagtagtacttataaagcttgggcaattcttaccatatgagataatattgtgggctctagatacgccctacaccctatatctaaaatggtacattg

SEQ ID NO: 78157 - DNA, 486 bp, Glycine max
  unsure (1)..(486): unsure at all n locations
ctcttgcatcagtntacttcgaaacaaactcactaattccttgatccgagttctttgagagtcttttcacagcaatttctagcccattggctaattgtccctgcataatcacattcatgagtagattctctttatactataattatatagatattttacttgtggagtatttgagtattattattagaatccaaatattgaatacccaatatacagatccaaagccaccttctccaatcttgtttccctctgagaatttgtttgtggcggcaatgattattgacaaatcaagcaatggcagatccagatcattcacataactttcattgttatattcggcccattgatttccctggaaaagaaacaagtattatgtgaatactttttatgcctttgcattattaagatataaaactatgaaattctgtcgagagacacagaacagaaccatgctataaggccaccaaaccaatttcaccgcatact

SEQ ID NO: 78158 - DNA, 449 bp, Glycine max
  unsure (1)..(449): unsure at all n locations
gatccttaagcacctgcgctgcagctaacaatagcagaagatactagattacaactaccatcataagaaaaaaagactcaattacattntntacctccaattttttaatttaacacattttatccataacttctaacaaacttacaaattttatccaaatcatttatccattagtatgcacaaaccaacacaccaaaattgggaataaaatttaccaaaaaattaaaaagttgaggacaaaatttgaaaaaaaaaattggataaaatttgccaagaaaataaaaaaaaaaaataggagtaaaaaatacagttacgttaggagtaaaataacacaataaaatctaagtttcttaaaaatttggaataaaatacgccaaggtaatttgttggagataagtaaaattcactataaattacagcattcgagggaaaaagtgcaattaaacctt

SEQ ID NO: 78159 - DNA, 487 bp, Glycine max
  unsure (1)..(487): unsure at all n locations
ntngtgctctgattaccactngatggaagctggcttgtgaaacttctatggagactggatctttgagcttcaatgaggtcctttaatggtgattttccaccatggagatgcagcggaagacaaaggagaagaggtgagaggagactccatccactatggaataagccatggaagaaggagcttcaccaccaagatgagccttggataaaaagcttggagaggatgcttcaatggaggaaaagatagatggagagaaagagagaggggggagcacgaaattgaaggaagaaaaagggagagaagttgaactttgagttgtgtctcacaagactctcattcatcanagttacaacaagtgttacacatgcttctatttatagactaggtaccttccttgaaaagctttcttgagaaaacttccttgagaagcttctctgagaaaacttccttgagaagctagagcttagctacacacacaccccctcta

SEQ ID NO: 78160 - DNA, 434 bp, Glycine max
agcttctttggaccttgaacaagcaatcatctcctctttcagaaccatgctatgtgctcgcgactggtccctttcttcccttcgcaacttgagttcattattgctaccccatagagctccgcgaaatttgttccggccatactcttccttgcgagccctcttggtctcttgttcaagggctcttgcggtaattgcattcttttcccgtaacccggcacactccttccgaacgtgtgtagcagccaacttgaacttctccttggcgagttttgcctttcctaactcgcttttgagagcttggacttcttcgtcctcttccggtgcttcaaaattctcttcgctgacgacttttaacttggcgagccaatctaaacctcgtatgcgaactttcagccattcgtggtacccaccaatgatgccattacgaatgcctc

SEQ ID NO: 78161 - DNA, 509 bp, Glycine max
  unsure (1)..(509): unsure at all n locations
ttagcgacctatgaaactcagcttagggatntgaaattctggcctgaaaataaaaaattagggtttattgtaagtaaactaatcaatttggctattaaaaaaatgtaagaagaanactaaaatacttgaatatcctcccatatcaattccttctgagcagcagggacttccttctaggtctcgtatgtcacgtcaaccttatcacgcgcgacaatccctaaatatgttcttaatttcctcttgtggggaccatcggccttgccagtagcaggatcgacattgaccactggtctctctaccctaggtggtctagtggccaaggatcgcagctatgtcgctttgcgtgtccgcttctgggtggacggagacacttatgttagtcatggtcttgtaaagagaanaacttgatttatgtggataatggacgaatgttggggtgatttgtgtggataatggactaacataagtgtccatgtatgaatcatcatcttatacattaacaccaatta

SEQ ID NO: 78162 - DNA, 326 bp, Glycine max
agcttgccactcagctcgctcaagttatcacatttgcttcctccagaagcaacaaccttctggagtgaagatctcgaacgcctaagtgggccttatagctattcgtacccccactttatactaaatgcgaccccattaattatcatggaaatactcttactgtaacgttactaaactttacaaaaaacgtaacgatacttattttcctttcgcaatgttacaaatccaaactgattaagtatgtactctcttttggcttgagaagaacatacggtaacttactgattgcgcaaaaacacctcatttcaatttccgccacattacag

SEQ ID NO: 78163 - DNA, 436 bp, Glycine max
  unsure (1)..(436): unsure at all n locations
agctagaaggtgtgtagcccacctgatgcaatcctaccccgcaagggcattgaatagaaaactccaagtagattgggctagagatgcaggagaaggccctanggttcttatgagccttagggtagatttcgggcccatgggctaagtacgagcccacttatctttgtaaatattagattatggtttcattatttntgggtcttgtatttagggctccataatgtaggtagggtaccttagaaatataggatttttcaacccttgtattttagggcacctagactagtttttgtattaggggtagttntgtaatttcacatgaactaagtggatatttgatgtgtgtggttggaaataaatntaattgaattggtagaagcccaatccaattaaattttagagggggaggtgagcatntgcttactacaccccattg

SEQ ID NO: 78164 - DNA, 472 bp, Glycine max
  unsure (1)..(472): unsure at all n locations
ttcactttagttattagtcaattcaatcaagaaagagaaattcccaagagaaacgtccaattgctttttttggtttattntactaaaagatatttttttattattatattattattttacctctttttggnttccacccgggttacgacatgaccgaacggtcgaatttcattttaacagaaattaacggatattacaaatcaaatgatcggtggaaattattntattttttattangcgagaaaatgactaaagtaaatgactgaagcacgtcaaaagggggtgcagaaagtaaatgaaatgaaaataaaagcacgtgaaacaagtggggaccaccaanggtacatagaatgaattgaaaagttcgatttcaggaacttattcggtgaagaccgaagaacgacgaagaacgaacgacgaacgatgaagaacggttgaanatcttcgcgaaatcacccacggaaatgttacg

SEQ ID NO: 78165 - DNA, 432 bp, Glycine max
agccttggagtttccaagtgccaattcgtcttcttctttagtccagtcttcttctggcttcaattcatcagtgggctttccttctgtgtccagcatcttgggatgttcccagcctttgataacagctttccaggttctgctatccagtgatttgaggaaggccaccatccttgctttccagtattcatagttggttccatccagaattggtggtctgttcactggtcctccttctttctccatgttcatcagaatttatctccctatatctcactcagtgacttcgagtgcccgctctgataccaattgaaattctgatactggggacagatgtcgtacaggatgtcacgacatcacgcttcagaacatgcagattgtatttgacagtgtgtacagtttaagcaagtaaataacacaagagaattgttaacc

SEQ ID NO: 78166 - DNA, 341 bp, Glycine max
  unsure (1)..(341): unsure at all n locations
acactatgatactcaagctggggctgctgttcttgtagttcccatgagcttgggagtnnttgaagtgagggggaagagtattgggtgaagaaaacgttccccctccacctctttatattttcgtacaagggttgctcgcccaggcgagctaacctgtaccctttttttttttttttgacgggaacattaaccatgtctcctccttccttatgggttaacgtttgcccacttgaacctacttaaattacaaatangcggtgattacttatttaaaacagacaatacttaaagaaactgcgaatgcacaggatactgggctgccttgcaacgacgatctcttc

SEQ ID NO: 78167 - DNA, 426 bp, Glycine max
  unsure (1)..(426): unsure at all n locations
gatgcatgcacgcttactagaacggatgtacacttaattttaagcgtaccatatgagaaggcaatgcgtgtgccaactgatttgccaaatatggagccatgcatggagaaacttttctcagctggcatgtgtgccctactcagttaggaccccttgtgttgacacatagaatgggtgtggttcacattaggctttaattgtctttgtctttgtctttgtctttgatcctttatattctaagatttctgttttggtaaaagataacatataaggctaaaacaactaaacaataaaatggaggaattatgactaacccattgaaggtgtgcggacaaatcatcttgtgtgtangcatggtaaattcgcaacagagagcgtgaagggaaatatgaatctcctaatctcgtacaaaataagatgggttca

SEQ ID NO: 78168 - DNA, 425 bp, Glycine max
tattcgcggggaacttgggaagaccggtcaagtttccaccggaagcgttttccttcgctgaaacggcattagcatcaaaagaaacgaccaaatcagaacaaaaaaaaaattctcagctccagctattagaaacaaaattaagctcgtaaagcaacacaaatcacaagattccaccaaatctacgaaacgcgaataaagaaaatcctcaattagaaaaaatcaagactgggatacctattactctcttcgcgtgattattaccgataacctatttatttctgtttcctcaatttacgtcgttatcagaacggaaattaaataaataaaaaaaaggaaaatagcttaatggatttgatgagataaaaagcaacgaataaacgaattgaataaagaaaaaaaaagtgagggggaaaggtgaagcaccg

SEQ ID NO: 78169 - DNA, 421 bp, Glycine max
  unsure (1)..(421): unsure at all n locations
aagaggttctggattgacttttgttccgaaggaactagttccgctccggagtatgacagtcaccgctttaggagcgctgtacaccagctgcgcttttaggccatcaagggatggtcgtttctccgggagcgacgcgttcagctcatggacgacgagtatactgatttccaagaggaaatagggtgccggcggtgggcatcactggttactcccatggccaagtttgatccagaaatagtccttgagttttatgccaatgcttggccaacagaggagggcgtgcgtgacatgagatcctgggtaaggggtcagtggatcccgtttgatgccgacgctatcngccaactcctaagatatcctgtggtgttggaagagggccaggaatgtgagtatggccagaggaggaaccggtctgatgggt

SEQ ID NO: 78170 - DNA, 446 bp, Glycine max
agcttattaaagccccaacctcttacacactcagctctcaggttgcagacctcattttctaccttttttgtacatgcgatcacagattgggttaattaacagcttcattgtcatcattaaatttccttatttgtcacgaaaacacatatatgcctagatattttgaccttcattcaatgacaatatagaaaagcttctctacatacagaaccagagtatataaacaaaccaaggtaaaaagtcatattaaaacttatccttaattcagacatatatacagacaccccctattctaattcattgacaagtaaagcattcaaggaaccattattttgacacagccaaacacactcaataaccattttttaccaaaaatattacagccacacatcaaaacagcatataattaggtgaaaaatggtgtacaattcacttaaaagattaac

SEQ ID NO: 78171 - DNA, 513 bp, Glycine max
  unsure (1)..(513): unsure at all n locations
tactcagctgtacagctacttcaaatgaagcagggtgtattacctataatcaacgaactaaccttcatacccgaaatggaagtaattgccttaagttgcatgatataccatagtcgtacaagactctgtaatcccctttgattctgagattgatttgtagcctcttcctctgctttgtaactggattcatcagagagagctgctgcaacttcattttggattgaccaatctatagtattcacaaagacacctgatgtaggggtttgcatgcaaatttcatcaatgtgattcttgtggccatgaaaaacttctagaccatctttctcaacagcattctcttgctttaatagtttgaattggcacggaaaaagagaggtggaaggaatactttnttccaaaataatatcgcatgccttcanataaacccctatgcaatcacaaaagcaatattcttgttaaaatcagatatcanaattgaaaggacgagatattnttcaactganatatatgttg

SEQ ID NO: 78172 - DNA, 398 bp, Glycine max
  unsure (1)..(398): unsure at all n locations
agagcgcgatattgaatgaataaaagagggagagaagtggaactttgaagtgtatctcataagactttcattcatcaaagttacaacaagtgttacacatgcttctatttatagactaggtagcttccttgagaagctntcttaagaaaacttccttgagaagcttctttaagaaaacttccttgagaagctagagcttagctacacacacccttctcataactaagctcacctccttgagaagcttccttaagaagattcctaaagaagctagagcttagctacccataccttagctaagctcacctccttcagatgagaagctagagcttagctacacacccttataatagctaagcagaanaacatatgcagaanaacatganaatacaaaaaaa

SEQ ID NO: 78173 - DNA, 442 bp, Glycine max
  unsure (1)..(442): unsure at all n locations
agctgggtggctgactnttcaagaggacggacccaacataataacatactcgctcgccaatcatggaggaggggcggntaatgccatcgangtgagtangtcacacaggcccaaacttttgaaggacgtaacgacctccagaaggtttatctacaaagccttacaaaaggcgggcatgattccctgcggcgggcacagagaggattcatgtntaatgcatctgggtgtactacatgacatggaaacatgttcggcggtaagaaatctattacaacaaatgatagaccaaggccggcttgaggtctacagtgagggggaggaggaacaacatgtatacatgcagtcggcagatgaagaaggtcctaanaagcctaaacctttggtaatacacttcaccagggacacgactccccanaggcctcaacgcccctcgacagtgttg

SEQ ID NO: 78174 - DNA, 445 bp, Glycine max
  unsure (1)..(445): unsure at all n locations
acctcaaatggttgagcaaggtagagacattactcctaaatttattntctcgaccaacagatgatgataggngcatgttattcaaaccctaaaataatctctactacagaacgtagccactactaataattccattgtacagaagctgaaactatattttttttaataatggatggacgaattttttcagacttttcaatgagatagcgaaagagtgcacatatgaacacagaagacaatgaattagtaattgaaatcagaaacacactataatataggttcttataccaaaagaagtgtacaaaaaatgagaaacaaatgataacacgaagaataaatacaaataagataaaatatatcttagcattaaaacttgcagaaatgaaaaggtctgataattcttctctttttctgcaagtgcaattagctactatgaacaagttca

SEQ ID NO: 78175 - DNA, 464 bp, Glycine max
  unsure (1)..(464): unsure at all n locations
tgagttcaaccacgagtgtgtgtnacatatgttccagtctcaactgttctgcataatgattcagatctatcatcaaaattcctcttataataaatggctaacagtttatctactgttcaacttcattctcatgtgcttttgttgaaatacggaaaaaaagtcataatctgagatctgatggatgaactttaccagtggcagaagcacgatgtgtgttactaattgtgaacgacatcattcgatcngactctcaaatgattcatcttcccagacagtatgatcatatagatagattngtttcacattcgtaaatcttgaaactattgtgcatgtacaagatatccatatcgttcttctgttcttgcagtaatgttggcactctttatcattatgtgaaactgtgagacctactaaatagagtggaacatgtacagtcacatcatttagtaacacttaaacataaa

SEQ ID NO: 78176 - DNA, 426 bp, Glycine max
  unsure (1)..(426): unsure at all n locations
agcttgcataaaaattgattgtgtatcttgtgattaagaattacanccgataaataattttattagataatacatattttaaatctatccattctttatacataaatcatatatataaaatttcatattaatctaaaattatttgttatctcattcttacaaattaaaatcaacataacataaaatttttaaaaatactaaaatatgaatcatttgattactttnttttattgtttgattttgacaaaatttgataaatacaattttaacaatatgtagatataattcaacgatcgataaaaattacattttatgttaagttataaaataatataataattgattaagntatatatatatatatatactatttgacattttgtttccttggcatcgtttggatatgcaatagtgagttaaataata

SEQ ID NO: 78177 - DNA, 433 bp, Glycine max
agctatgaggaaggcatcattgatgtttccatagtaaaagaattctatgctaatctctatgatctagaggacaaatcaccaaagtaggcgagggtcagaggtcatttgataaaatttgatgaagatgccttcaacatattcctgaagacctttgtgatcattgaggagggggagacattatcagcttattctaggtttgcactcttgaggccttatcctcaagagttagttgctaagctctgcatcccagggaggggatttgagctgaatgctgatggtcagcctctgaagatcttaaggaagaacatgaccacacttgctcagacttggagtgttctttcttactccaacttggtccctacctcccacacttctgacatcacactagatcgggccaagttgatctatggtattatcatgaagatggacatct

SEQ ID NO: 78178 - DNA, 497 bp, Glycine max
  unsure (1)..(497): unsure at all n locations
tcttgcgtagccgctctnggtgctcagaanattccanaaacaaatccctcttattactagctcatttgaattctttagttcctgaatgtacaaccttcaaattgttgctcgttcccttctttcttttctgcaaaaaagaaaatcaaatgctgtcaaaacatggatgaagtcctaagaaaatcaatataaaagaaaacatggatgaaatcacaattaaaaagaacaactacctatctttcagagtccctttggttaattgtcttgtctccttatgtggtggggttttgtttaataatcttatacttttgccttccaaaaaaaacttatcactaatcctcttttcattaatccaactttgtatcttattgtataaaagatcatgggttctccacctgcctccactactccttctcctcctncttctnctcctacttcggacgcatcggcttcgacgtctgctgtgaagcgaacacgcanagcctcacgcctacgatcat

SEQ ID NO: 78179 - DNA, 445 bp, Glycine max
  unsure (1)..(445): unsure at all n locations
agctngtaaaatntcacacacacacacacactcacacacatacaacacacaccttgtcagtcatgattccagagagcaaaacatttgaatcagtcaacaaaacagcatccacacgccgagcggccattctacggcacgcttcagaaaccgtcgtcacctcagatatagtgagggctttcgacaaccgaagcttcttaactgtcctttctcccccatcaaacctaaataattcaattaataaacacaattaaaccaaaacactgatacaacaacccacctacacatccattaaaaaaaaaactgtaattcaaataaccaacagaacttttccaattgaccgcatctttctaattagatgcaaggggggataacatatccgccaattaaaacagttaactaagctaacacaaactaaatcccttacactacatatagaaactaatgg

SEQ ID NO: 78180 - DNA, 500 bp, Glycine max
  unsure (1)..(500): unsure at all n locations
ngtacagacttaccttntcagattagactgtgattatgatactagtttgtgaaanaatatattgagatntaaattttaatttgattcccganaaagttaaacttgttattaacttaaggacaaaacttagatgcaattactgaggtgctttgatgttgtttttcaattagaactagagttcattaatctgcgtaataaaagtttgttttgaatatcggcacaagttattgaggtgaaagttcaattctaattggagaacaatagcaaaagcagcaaagcaactgcatctaaattttgtttttaacttaaacaaaagaagcagcatatgaaggtgttaacttctgatgtcatcantaaatttacagggtgacaagatggccatggttgcttgtggctggcggcacacaatatgtgtttcatcttctggtggattatacacaaatggatggngcanatacngccagctaggacatggngaatttgaggatcatcttgtgcct

SEQ ID NO: 78181 - DNA, 440 bp, Glycine max
  unsure (1)..(440): unsure at all n locations
agctntagagatagttgactatattgttcttcttatcaccaaggttcaatgaagaacatatagtcgattatattaccttatagttgactatttgtgaaagtgaaaaactcttcaaacccaatatagtcgattagatacttaagatagtcgactatttgggaacctatctcaattttgagatacaaaggtcacaatttagtctactatattagcatatattcaactattttgatgcataattgaaagtggttttaaaaactgttatgaaagtttcaattcacaagggccatttataatgaatcaacgtaatgctaatcaataagagcatgttgaaatacatatcctagtctaggatgcatgtatgcatgacttcacataaacagtcaagcatttaagcaataacaatcatcctaatcaagaatagtgttccatttaaaact

SEQ ID NO: 78182 - DNA, 497 bp, Glycine max
  unsure (1)..(497): unsure at all n locations
ngcttctacactcnctacactatggagccataaatacaagccccanatataatgaaaccctaatctaatatgtacaaagataagtgagctcatacttagcctatgagcccaaaatctatcctaaggctcatgagaaccctagggccttctcctgcatctctggcccaatcttcttggagtcttctatccaatgcccttggggggtaggattgcatcatctcctcccccttgaatangaattgaccttaaatccagaggttcttgaaactctgggcttcttccctcaacacctataaaaagaataaaaacatatatattagtggtgttgggtatgttagagtanggtaaggcctgaaaacccttttcctgcgcatcttcccaagagggaacatggttcctcaccaactcaatgagtggtgctacaagtatagaaaaatatgggacaaaccttnntgtaaaagttgtaagttatggaagccctatatgccccttatact

SEQ ID NO: 78183 - DNA, 433 bp, Glycine max
  unsure (1)..(433): unsure at all n locations
agcttatcacccacatcgccaattgtatatatgcttttatgggagtcagganaatgaaagtgcgccgataccattaactggaaaagaagtttatgctcgagtcaaggatatcctaactacttttggtaagaaccaaaagaaggcatcatctgagactaacatatagaagacaaggtcaatgttctttgatctttcatactggtccgatcttgatgctagacattgtatagacatgatgcatgcggagaaaaatgtctgtgatagtttaattggcacccttcttaacattaaaggcaagacaaaggatggttggaagtgtcgtcaatacttggttgaaatgggcatacgagatcagttgcatccgatatcacactatcgacgaacgtacctgccaccagcatgtcatacaatgtcaagaacagagaagcaaagt

SEQ ID NO: 78184 - DNA, 448 bp, Glycine max
  unsure (1)..(448): unsure at all n locations
ctcttattctcctaccacagaacttcgaataagctcattgtctattcacttgctactttaaagtgacatacattatacattaatcaccctggttgatcgaaggacccaaaagcatatgccaatcaacgattgaagctaaccccactttttctcaagcatcatagcaaaaatttataccaaaacatctgaaaagacattgaagaaagattaaccgacttagagacgacagtaggcgaaaaagagacaaatttcatgcatcatatccactccaagccttattggaatagtacaaataatcaaacatttgtgtagctagtcattcatattttaataactgtgaagaaatggctattataagtaatctcagttcttgataacacaattgatngatattctaacacattcataaattcttatgtgcatgtaactagccatgcgtgtccattat

SEQ ID NO: 78185 - DNA, 410 bp, Glycine max
agctataacctagaggagacggaccattccttgtgttggagaagatcaacgacaatgcctacaagattgacttgcctagtgagtataatgtaagtgccactttcaatgtgtctgatctatctctttttgatgcagatggaggagccttggatttgaggacaaatccttttcaagaaggagggagtgatgatgacataaccaaggaccatgaagcacttgaaggtcccatgaccagaggcagacttaaacaagcccaacacgtcttagggacaaagctggtcatttgtatagctgccattgatgatgattgaaggcccaagtggaaaaagatgaatgcccaaaggcagaggcactaccaagactactaattgttgctgaaggccctaactaacttgaatgcccaagtttaa

SEQ ID NO: 78186 - DNA, 434 bp, Glycine max
agcttatacaaagagtccacaaggcgtgggatagcccgttaaggaaagataaagaacttaggggcatccgtaatggcatcatcggtggttatcatgaatggctgaaagttcgtacacgagggttagattggctctccaaattgaatgttatcaacgaggagaacttcgaagctccggaagaggatgaagaagtatgagctctaaaaatagaactaggaaaaacaagacttgccaaagaaaaattcaagttagtcgctatggacgtccggaaagagtgtgtcgggttacgagaagaaaatgcagctatcgcaagagcccttgaacaagaaaccaagaatgctcgcaaggaagagcatggccgagacaaattccgtggagctttgtggggcagcaacaatgagctcaagtttcaaagggaagagagagaccaatca

SEQ ID NO: 78187 - DNA, 501 bp, Glycine max
  unsure (1)..(501): unsure at all n locations
tctggtgggacatctngactngctntccaatctgacattcaccacagattctgccttcttctattttcagattggggatgcctttaacagcacctttgtcaatgattntcttcatgcctcttaagtgcagatgtccaaatctttgatgccatattctgacttcatcttctttggaggatagacatgtggaggagtagctggtttcttggggtgtccatatagtaacaattggctttgatctgctgccttcattagaacttcactcttctcatttgtcaccaagcattctgactntgtgaagtttacattgaacccttcatcacacagctgactgatgctgatcaagtttgcagtcagtcccttcaccagcagtactttgttcagactangaagtccatcatgagctagctttcccattccaatgatctttcctttagagccatctccaaatgtcacataactagtggagcagggctcaatattcagcaggaattctttgac

SEQ ID NO: 78188 - DNA, 271 bp, Glycine max
  unsure (1)..(271): unsure at all n locations
gagtcgctgagtcacgatgatatcatgatttatgatgaaagtcctcatactagagtcatgattcaagatctcaagaattaagattaagattcaagactcgtgagattcaagatctcatgaatcaagattgagattcaagactcaagattcatgaatgaaggaaagactctatcgagataagtagngaaaagattttcaatactctgagtagacatgagtgttgacaaacctttacaaagagttttacttctggaatcgataacatattgtt

SEQ ID NO: 78189 - DNA, 492 bp, Glycine max
  unsure (1)..(492): unsure at all n locations
ccttgagtttaggttaaattacatatggaattaggggattggcttataactcaaggattaattatctaaggaattatgattaatcattctagtttaaatcttggttgcattgaactaagaaattgattagtaacacattacatatgtagaattctatggatttcatcttagcaacattttatacttttgaatttgatttggctccagaatttcttaaaaaaataaaaaatagtatatttttgccatagcaaattcttaattggctacaacgaaaacctttcttaaaaacataaaatcttgagacattcactacaatgaattgacaacttgctgcaacgaatgcttctaaaattcagatgttngatttccaattgttgcacatagtctctatggatacaataactcanatacttactgtgtcttattacatgtaaactaggttcacttgccaatngccatctcgagaatatgaacaaatctatttggagtcat

SEQ ID NO: 78190 - DNA, 446 bp, Glycine max
  unsure (1)..(446): unsure at all n locations
tgggcaatagcaccncacctgacgtccncaaggtcttctgatccctgcgacatatctccaggtaccactctgtggtcaacaaataaaagtaggaagactgactcttccatgctttctcacaccaagcttattggattatgggggcacccgtcatatgtggtactaggtggcgatcgggcgatggcacaaatcaactatcccaatttcacaagccangcataagcacaccatncccaggtgcccacctttaaatttagctcacgtgcacgcacgtagccttctcctcgttcctctcagcctgggtccccatcagccccgccaagctttcacaatatccaaacaattcaattccatttgtcatgaaactaccctaaaccaagaaaaacagagtggaggcagaaatctttgacaagattcattcgaattcacagnttttctactacata

SEQ ID NO: 78191 - DNA, 380 bp, Glycine max
  unsure (1)..(380): unsure at all n locations
cgtctaccaggtgtgcttgtattcccaatatcagcagacttgtgcttacaaaatcaaaattgaatntgtcttgctcttcatgcatggtagcaatatcaccattcctatcattaataatggatcttgggtcctcacagttggacaacctcagtgatggaacccaaagctttctctcttttgacgagcctggtgaaatgaaaatttaatgaatactgtgtataatgcaagaatctcacacactactcaaaatggctcaacatattaccatcataacgaattaatgattcacgtatccattttgtcgtaatgcctcctcattcatgccgtttgtgtacctgcgtcacccaacctgcattctgtggaataactgcgtaagcatt

SEQ ID NO: 78192 - DNA, 453 bp, Glycine max
  unsure (1)..(453): unsure at all n locations
tatagctccttaccaagagttcctaagaagctagagcgtagctgcttatttctttcttatagctaagctcacctcctctagatgataagctagagcttanctacacgccccctataatagctaaactgacggccatgacaaagaagatgatgataatgaaataaggcttattacacagacaactcaaaatgctccgaattacaaagcttaaaccctatactactagaatggccaatatatattgccttgacgaacgaaaaacctattctaatatttacaaagataagcgggctgatacttagcccatgggctcgaaatctaccctaaagctcatgagaaccctagggcctttacttggatctatatcccaatctacttggagtcttcagaccaatgccctcgccgggtaggattgcatccataggtcaagcatggccataatacgatatcaag

SEQ ID NO: 78193 - DNA, 434 bp, Glycine max
  unsure (1)..(434): unsure at all n locations
tgggtgtcaactaataaattgtttattcttttctcaggcatagaattcaccttggcatttgtatgaatttactattgtggtgcaaaataaaactgatttcatcatacatcctatagagaaacataacaaaaattaattatatattcacaaaaagagaacataaaaagtttcataatagagaagagaaagcaaatttcataatagagaagagaacaagtttgagaataaagaagagaacacaagagaagaggtttgacaacaaaggctagatggacgatgaacaccacgaaaaacgcgatggcgacgacgtcgttacggtcatcgtcaaaatcccaaaacaaccgtttgtcgacaacgaagacactagtcgacaacgatgccattacggccaaccaataaaagtcatatgcgtagaaaanaaataaaanaagcat

SEQ ID NO: 78194 - DNA, 461 bp, Glycine max
cggacacttgaaactaagcttccactctttatgacccgagtggccacatggtttgtgcattttattctcgatctggttactgtttataccccctcttgacgtgcttaagccattttacttaagtcatttctcgctaaacttaaaaataaaataaatttccaccgaacgtttgaattgtattatccgttaacttcgggtaaaataaattccgaccgctcggtcgtgccgtaaccacgttggaaatcaaaaaaggaggtaaaaaataatataataatcaaaaaaaatcttttagcaaaataaagcggaaaatcaatcggacgttttctctttgggatttctcattcttaatcgaattgattaataaactaaagtgaaactaaggctaaaatcaactcgcctagtcaagctcgtccataaaaataggcttttgaagttgtcattcaatttctactaagtaaatg

SEQ ID NO: 78195 - DNA, 285 bp, Glycine max
tactaagcttccatatccgtacttggaaggatctgattactgccttcctaatgcagtatcagtacaattctgatatggctcccgaccgcacttaactgcagaatatgttcaagaaagagggtgaaacctttaaagaatatgagcagcggtggagggatttggcggcacaagtagctcctcccatggttgagagagagatgatcaccatgatggtagacactctgccagtgttctactatgaaaagctagtaggttacatgccgtccagctttgcggatctagtat

SEQ ID NO: 78196 - DNA, 394 bp, Glycine max
  unsure (1)..(394): unsure at all n locations
ctgctcagttgctccaggttgctgcatagagtggttttttgttgtatttcggncagccgatgagcataaatcacagactcctgcgacggggtccgaattttgattcatggccacctgggttacctggataaccaaggcatgtattttaccttcaagcttcttaggttcagctgatgaagatgaattcgtggctacttcatgcacttcgctaatgacaatagcatcatttctagcactaaatatgatgggagttggaagtcatcttctcaattaaagtcttggcttcagtaggggtcatgtctcctagggctccaccaatggcagcatctatcatgcttctctccatgttaccaagtccttcataaacatattggagaacaagctgctcccaaat

SEQ ID NO: 78197 - DNA, 377 bp, Glycine max
  unsure (1)..(377): unsure at all n locations
ntaacctcatcggctctcacagactttagatttatgatctcttccaatccttgtgtccggactctcagccacttatgatagccgtcgatgatcccattactgcttcccctaagctctctgtcctttcttcacaccgcatcacatgccttgcgaactccttggagtacctttgcattgggggcactgaaaccccacggtgaggacaggattataatttatacaaccccttgttcccattaagggaacatttggaaatccttcgcatgaagatagaatcctgattcttacttccttctagcgagggaaccaattaacagacgcccctctatgctagccaagagttggtcccaattcgtctttctttttttcgacgcacg

SEQ ID NO: 78198 - DNA, 425 bp, Glycine max
  unsure (1)..(425): unsure at all n locations
ccttgatactaagctttagccaatggactacctaaataattccttgatatcccttttgagcctcgtntccctttccttgttttgaagctcactacaagccttaagtgaaaaaccatgatatcaccatatccttagggaattttggagctttggaattgttttgggaataagtgtggggggtttttgtttcataggataacatgttttgttggctatgcttcatgatggattttgggccatactcgatgtacattgngtattggttaaatgttggacatgctgaatgagatgctgtttttcatatgctttctaaaaaatatctaaaaagacataatcgcaacataaaataaaaagcaattaagctgagtgaattatatctttaatggcaaaagaatgatgagactcttgggcttactcttatgtta

SEQ ID NO: 78199 - DNA, 447 bp, Glycine max
  unsure (1)..(447): unsure at all n locations
tcttactttcagatgatgcagatgggtttgtagctacctatgctctcctctaatgactatggcatcatttctggcgctaaactgctgggagttggaggccatcttctcaattaaatttctggcttcagcaggagtcatgtctccaagggctccaccactggcagcatctatcatacttctctccatattactgagtccttcataaaaatattggagaagaagctgttctgaaatctgatggtgggggcaactggcacatagtttcttaaatctctcccagtactcatacaggctctctccactgagttgtctaatacctgagatatccttcctgatggctgtggtcctggaagcagggaaaatnttttctaagaatactctcttaaggtcatcccagctcgtgatggaccttggagcaaggtaatacagccagtcctttgccactcc

SEQ ID NO: 78200 - DNA, 411 bp, Glycine max
  unsure (1)..(411): unsure at all n locations
tgctccaaagctaaacattctttttttattntctgatatgctaaagtgaacccagatacctcattattgggtctgccgccccttgattttataaccctctcactcttcagttgcacaaaccacaaaaaaaaatcttgtggtaattataaaatgaaagaccttctctacaacatgaatatcttccatattctcccccataacggttcatttggttcacaaccgttatcaccctattgccaaaatctaaaattgactcaaactccttcatacaggattcaaacactccacaaagagtttgtatgcgcacctttttcaccttgccaacaccttcaagggatattttcaaatctcccaaacttctttggacctatagcattgacactatctaaacattgattcatctaaccttga

SEQ ID NO: 78201 - DNA, 430 bp, Glycine max
cggagagcccgcgcattaagagtttttttttttgacaacagcaatgaggcgacggagactccttactgagctgagccctatcagcggtcggagtgatcagtgttcagttgcagcgaagaaaaatgctggcacttgtatttggcccaaacgtggtatgagtggaaagttgaaagcatagtgactgatgcagtctaatgtttgcttatatgcaccaattatcaatccttatttttgtttttttacaaaattgatgtatagaatatcttagtttcaagcaggttaactgacctgaccaattttaagttctctttacgtattatgatatgattatgttctgtaggtaatgattagatcagactactccactctacatttctatttgacgattttgaaatgatagtgtttcctccaaaattgttttacattttac

SEQ ID NO: 78202 - DNA, 427 bp, Glycine max
  unsure (1)..(427): unsure at all n locations
tccgtatttctttagagacattntcatattattattccatttgtcattttaattagaatattgcttttacattccgcaattcaattaaaaactattgtaagtataactttaaaatatttattataaaatttaacaattttattatacaaatgagagtctttgattgaatgacaactatattcacattaaattcttttatttttattatttgaagcatttaattaaactttgaacattacagctcttagtatgtttaaaacttagtttatttatttaactttccaatagacaatgatttctttgatgatagaaaaaccacacaaaaaaagctatttaattgaagaaaaatcaaattaaaagaanaataatataaagattttctttataaaaactaantntatctcttttatatcttcttaattttaat

SEQ ID NO: 78203 - DNA, 444 bp, Glycine max
  unsure (1)..(444): unsure at all n locations
ctcgtgaggcttcctcaagaagctntctcgtgaggctttctcgagaagctttctcgtgaggcttctttgagaagctagagatttaactacccacacccctctaataactaaactaacctccttgaaaataaatcacagataaaataacacagtaaataaaatcaaacatcaatttataattactaataatatttcagggtgttataatatgattttataacttttcattatcaattcaagtaattntatcctacccacatctactcatttacttgcccctcattcctcaggatgataagcctattntatttatctatctcccaaatgcctttgaagagattaaacaaatagaatgcatgaagtttgaattctagatgttttcaaaaatgcataggcataaaattatcattctatttctagcaatgactttcttataaaatcttt

SEQ ID NO: 78204 - DNA, 251 bp, Glycine max
  unsure (1)..(251): unsure at all n locations
gagaagtgcttcatcggcgaggccttgttcatccaggagattgatgaggcacgttattgtggcggtggtcacgttaggggagtgtttgatgaagtgccacacgggtttgagggtggtggcgccggccaagaggtaagccaattcttggcacgtgggctcggagaagaggaaattgaagcgggattctacctagtggaagaactcaaggactttgagtgggcccacgtggttggctttgtangggtcaaagt

SEQ ID NO: 78205 - DNA, 453 bp, Glycine max
  unsure (1)..(453): unsure at all n locations
tatcatctaataatntcatgaaataattgacaaaaaccacactggataatggacttgatagtgtgttaatcagagatatataatttgtaagcatttatcacataagcatactgcatatgtatgttgagtagtccactgaaaagaaaaattagttttgataaagacaagtttcatcattcagtgattgaataagataaactttcaaaacagattttcaaacaggtacttaatgtgagaagaatgatagaaaatgctacgagaatacctaatatatctaataaacagattaacaaattaacaaatgttcattttactaccccaaattaattntttaacatcttcaacgggagggagatgaagatgatgacccaccatttccactcattctttcacccatcaaccgaacaacttttggtagggtttgaaattcccaaatccctccaaatagtctta

SEQ ID NO: 78206 - DNA, 466 bp, Glycine max
  unsure (1)..(466): unsure at all n locations
tacggacctatgatactaagcttctcgggccantcctgcaaagcaaaatttggaagttagtttaccagtgggacactactcttaaaacaaaaacggcatacaaacctctcccataaatacaaacatcaaatgtaatgtaaagcaagcttatgcgcatatttccttacgaacgttcacttgcacaagacattctatcaactaaaaaaaatgcacccatatacaatcaaggtagcttcattacctagattatttacatgtacttccaaggtgtatttgttatttacatcacacacgcctccttggctgaatttacatacatacatactcaaagcattttggggtaccaaaaactgcacatgcgctcatcttggtatttctaatacccatacatatacaaacttcacgatgaatcttgactacctacacaataaggggctacatttcatgctttctttnttttttcaag

SEQ ID NO: 78207 - DNA, 445 bp, Glycine max
aagcttccttcacaacacagagaagagacagatgagcgattgaagaaatatctttggtgaagatgtctcctccaactctaaaacctcacaatcactcacaaactcatctcaagctctcgggatggctccctcttcaagctctagtctctgcagatcttcacacaacaaaatctctcaaactctctagaacttagacctttctctctctagaactctctacacatgcaaaagcttcaagaatagccccactcccctccaaaatctgatttcaggcttaaatagatggttttgttcgtgcttgtgcgattagcgcacttctgaactgcttaacgcgcattagcgaatctcggcctatcatggacttttctcgctcagcgaatggactatagcggtgcgcttagtaagatggccctttgctcagcgaacatgcacaactcatccttct

SEQ ID NO: 78208 - DNA, 374 bp, Glycine max
agtcatcctgcttggacgaatgagaaaactggtgccaatgaagacggtgagaaagaaggagaaacccatgctgtgactgacattcctatacgggcaagtttcccaccaaacccaacaatgtcattactcaatcaataacaaacctccttcttacccaccacccagttattcacaaaggccatccctaaatcaaccacaaagcctgtgtaccgcacttccaatgacgaataccacctttagctcaaaccaaaaaaaacaccaaccaagaaatgaattttgcagcgaaaagcctgtaggattcaccccaaattccggtgtcatatgctaacttgctcccatatctacttgataacgcaatggtagccataacccct

SEQ ID NO: 78209 - DNA, 353 bp, Glycine max
aagatgtaccctcttctagtttctttcttttcttataggagttgcacactctgtggtatagattctttgttctcgccatcatcaaaattaaacacaataataattatacaccgcacatcttgctagagaataacgagcatagacagattgatcatagatgagtggaaaataacatttttttgcttaagggatcatttcaccttggcaagacgcatggctaaatagaaccatgaatctcattgaagcttttggaagtgctttcaccaaggtcaagcatacatttctcattgccactcacacacttggaactccaatactcctgctagacgcactacttggctaaacttaccttc

SEQ ID NO: 78210 - DNA, 290 bp, Glycine max
tttattaaaactgtacttttacttcgttgaaagagaagtctcgtactagacacaaatcggcttaatcctacaaggataatggcgatgccttccaccgctcttaatcttttttaagcaaacgatcctctcttgtcttttgaaagggaaggagttccttaatgggtcagataagacggacatggcggatattgttggttgggcacctatggtggacggcttcttgggagaatagagggcctaatggcatctcttctcatttctacaagatatctactaggaggagtgccctc

SEQ ID NO: 78211 - DNA, 441 bp, Glycine max
  unsure (1)..(441): unsure at all n locations
cactgtaattatttaagtgaaaatatgttaagtaattaaatcatatactctacaataaatataccacaagagattgtaaaatttaatgaaaggctctatcttttcatgaaataatgtggttattcatgtaaagatataaatatgaataagtgtaactcttcctcaaggatcatgaaatgaaatgtaactcttcattaatagatatatgtatctttgaaaggtttttaattcaacaaatgaataattaattaattaccacgcatagcatatatatatatatatatatatatatatatatatatatatatatatgttcatatatattttcatgcatccatcgntaaattgatcccttgagatcacacagaaatggatgatcccctaggcaaataattaaagaacggtgtggaaataatcagaataagaaaacaactttttgca

SEQ ID NO: 78212 - DNA, 447 bp, Glycine max
  unsure (1)..(447): unsure at all n locations
tatgcgcatatttccttacatacgttctcttgcacaagatatttaaccgaaaaagtgcacccatatacaatcaaggcagcttcgttacctagattatttacacgtactgccaaggtgtatttgttacttacatcacacacatctccttggctgaatttacatacatgcatactcaaagcattttggggtaccaaaaattgcacatgtgcacatcttggtatttctaatacctatatatacacaaacttcatgatgaatcttgactatcttcacaaaaaggtgctacacttcatcccttttttcaagtttttgctacctaaagccgcatgcaaattcaagcatattttcctttgcggactaaaattgtattcaaattaaaaggtatattntttgtaatatgttttcttcacataacatgcaacatanttatatatatattntntttgc

SEQ ID NO: 78213 - DNA, 423 bp, Glycine max
  unsure (1)..(423): unsure at all n locations
agaaaccataaaactaaggagntcctatacaattatcaattgagaaagcttcgccaagtatccccattgaaaaacctttattcaaacatttcaaagttagtgagaaggctaaacgaaaaattagggaacttagaaaaactaaatccttaattgaaggcgtaggtgacaatcatagtgaattactaaacaagattggtagtttacttaaggtcataccagatactccccaagcctcggaaaatacttccaaaatggtaacaagaagtacctccaaattaattaatgttattaatgaagatagtgaccaaaactctgataacacaactgagataggatcagtgtcagaaaagaatataaatccaattaattccaaacactggaaaacaccctctaaattatattatcaacgtccgactgcccctg

SEQ ID NO: 78214 - DNA, 415 bp, Glycine max
  unsure (1)..(415): unsure at all n locations
tcttganagaagtgcattaacaagttttcgtccgtggaatatgcccccatccttcggcaatacatccgaagatgactctttggacacgttgtccctttatatttatcgaagtctggtaccttgaacttgggaggaatgatgatgtcaggtactagacacagatcggctaaatccgagaaaggatagttgtcgaggccttccaccgctctcaatctcttttcaagcaaatcgatctttcctttgtcttttgaaatgggaaggagttccttaatgggtgcggattgagacggagcatggcggattatgtttggttggggcaactcatggtgggccggttccttgaggggaagtatagggcctaaatgggcatctccttcatcatcttcctacagaggatagtcgacatgaggaggga

SEQ ID NO: 78215 - DNA, 399 bp, Glycine max
  unsure (1)..(399): unsure at all n locations
actgcattngggcatctattntgactttcctatgctttctctacatacacaaaatagccccaccatcccaattttgcaaaatcatattcattcatcattgaggcatttcaccgagcacttggtgagcgcatgtttgaacataaattgcaagaggatggggacaatgtggcatgccccattgcttcaaaatacaacctaagcctaaggccttctcatccaaatcctcaacccaagaaaacaaggatcaaagcaaaccaaaactgcctcacaaatataagcatgttcccacaatttagagtacccaaagatgaagaaaacacatcaatgggaagcaaaaaacatcaaggatggaatacttactttgtggagtgaatgataacaccaaaaatgaaagcaaaa

SEQ ID NO: 78216 - DNA, 405 bp, Glycine max
  unsure (1)..(405): unsure at all n locations
actgatctatcaaacataacactacaacgaggattcgtcttattctcgttctcatcttnttgctgtttcaatagaaaatcaaccaatgaatctcttgcaagtcgaaaaactaactcttcctcttttttgaactcctctagggcttggttaacctcttctttagacagagaggtgctcacttttgatgtcccaatcgaggctccactcatcatgatttgcatgggttctacatagttagcttgaatgtgaaatacgttagtgtccactttcattgttttttcctcgaacttcaatctacctttatcaatagccttttggaccatgcctctgaaatgtaaataagtgttagtccaatgtcaaaaaatattatgaaatttgcaacatcttttttccttttcttagttc

SEQ ID NO: 78217 - DNA, 410 bp, Glycine max
ccgagagcgaccagttgagagtcgaaggtatgtatttattatgaaaagtgaaggcttgtcaaaggtcaaagaggagcttgtccgaatagttgagcaagacagaagagaacatgtgggctatcattgaccaatacaaagagaagctaaatctagctactacccatgaacaaagattagaggacgagtatgcgaaagtatcggtcctgcaagcggaaagggaagcaagggagagggtgatagattcattgcatagagaagctatgatgtggatggataggttcgctttcactctgaatggaagataagagctcccaagactgctagccaaagccaaggcgttggcggatgtgtactcggctcccaagggaagtcatgggctcctcgatattgtcagcatatgatcaatttga

SEQ ID NO: 78218 - DNA, 413 bp, Glycine max
  unsure (1)..(413): unsure at all n locations
aatgaaagggagtctgcttttttgattctttttatgtctagagagttctagagagagagaggtgcaagttccacagagcttgagagattttgttgtgtgaagatctgcagagaccacagcttgaagaggaagtcatcctaacagctcgagatgattttgtgagtgattgtgaggtgctatatgtggaggagacatccccactacttggatntctacaatctttcatttttctcttctctttgatggaaaggaagcgtcccagttatggaaagctaaatcctctgttggatcttccttgtaggtacttgatgtaaatattatttatctatctaatgatgttttgtgtgttctctgtgctatcagtatttcattctagtgtgctttaccttgacacatagatgcaagctttgttt

SEQ ID NO: 78219 - DNA, 364 bp, Glycine max
  unsure (1)..(364): unsure at all n locations
tttttgttttttgctttaaaagaggcccactggtaaataactctccaaagtttgccttacatgaatgccccagaacttgcctcaagagtccaaaagacaagcggcgaggaactattccgctcccgagtacgacagtcaccgctttatgagcgctgtacaccaacagcgcttctaaaccatcaaaggatggtcgtttctccgggagcgacgcgttcagctcatggacgacgagtatactgantttcaggaggaaataaggcgccggcagtgggcccactgtgtactcctatgaccaagtttgatccacaaatagtccttgagttttatgccaatgcttggccaacagaagaaggcgtgcgtgaca

SEQ ID NO: 78220 - DNA, 442 bp, Glycine max
  unsure (1)..(442): unsure at all n locations
acatgtagttcttgatgctccccctatctttatcttcatcttccaaccgcaatcctgggcagtgatatctcttatatgaaatactacacaacaacccaggaccaaaccactnttatctacactctcttggatgcctatgttttccatgattacatctttacatcgcaaataaaatccaacctcgatccaagccatgtttgttcattggctactcacctcccaatatggttactactgccttaatacaaatactcgttgcctttgtacatcacatcatgtctcattgtatgacaatcactttccatacaccacactcaccgaagatacaataccagtgacaacactcaaaccttcaccaccataccagtcaacaaactatgcgatgcattgtaacacgaccctcaagccaaccaaaaacaaaagccaccatgtcaagaggcac

SEQ ID NO: 78221 - DNA, 365 bp, Glycine max
ttatggaggagtcccaatcaatttctgacttattttctcgagtattggccgtcgtcaatcaacttaaaagatatggtgaagatgttgatgacgtgaatgtcatggaaaaaatactttgaactctaaatccaagttttgacttcattgttaccaacattgaagaaaacaaggatttaaagaccatgactattgagcaactcatgggttccttacaagcatacgaagaacaacaaaagataaaaattaaacaaaaggaggctatgcagaaactactacaacctcaacgaaaggaagccaactatgtatattacaagagccacagagaacgaggtcgcggtccagatcgtggacgtgactatgacatg

SEQ ID NO: 78222 - DNA, 424 bp, Glycine max
  unsure (1)..(424): unsure at all n locations
gcagatntggtcttcgccagtgaaaggatcaatgtggtttcttatagagagcaaattgatcatcctactatgacgactgagaaaactggggcaaataaagaatgtgatgatgaaggagaaacccatgctgtaactgccattcctgtgcggccaagtgtcccaccaacccaataatatctttactcagccaataacaaactttctccttacccaccacccagttatccacaaaggccatccctaaatcaaccataaagcctgtctaccgcacttccaatgacgaagaccacctttagcacaaaccacaaaaaaaaaaaaaaaaacaccaacaaaaaggaatttngcagcaaaaagcctgtagggttcaccccaaattcccgtgtcatatgctaaacttgaccccatatccactcaataattcaat

SEQ ID NO: 78223 - DNA, 408 bp, Glycine max
gattcattctatgtacccgtagtggtccacattgtatttcttgcattgttattctcggtctgtgtactttgtataccccctcttgacgtccttaagccattttacttaagtcatttctcccttaacttaaaaataaaataaatttccaccgaacgtttgaattgtattatccgttaacttcggttaaaatgaattccgaccgttcggtcatgccgtaaccacgttggaaatcaaaaaagaggtaataaaaatataataataaaaaaaaaacatcttttagtaaaataaagtggaagatcaatcggacgttttctctttgggatttctcattcttaatcgaattgattaataactaaagtgaaactaaggctaaaatccactcgcctagtcaagctcgtccataaaaat

SEQ ID NO: 78224 - DNA, 380 bp, Glycine max
ccacccagctcgcccaggcgagctagggtgctttctctaatatgcaccgccttctagaggaatttcttggaaggcccaagtgggcctggttgctatttacaccccctgtttactaaatacaccccctgcctttttttgctgattctttttccgtaacgttacggaactttacgaattccgtaacgatactagttttccttttgtaatgttacgaaaccttacggattacgtaatcatcccttttttggcttttggaatgtttcgaaacctcacggattgtgtaacaatgcttccttttgatttctggcatgttacggaacttcacggatcgtgcaacaatgctttcttttgacttctggcacgttatgaaacttcacgta

SEQ ID NO: 78225 - DNA, 361 bp, Glycine max
gggattaaacctgttttgggtgagggaataccgattatttttcctaccatttagtggatttaccaatgggaagaagaacaatatttaagaactagcagattttacacacatgacccactaccaaaccatattaatttatcgattgaaattcatttcaaaggacattattattattgaaaatgcacgaccaactaccagactaaccacgaactatcaccaacttgaattagcttggactaaattcacaaggccttgtgaaacataaattagaaaaacaaacagaatgtagaaactcaattaagtctcaagcaaactcgattgaaaaccttagacacgaaattccctaaatcttcaaactcaa

SEQ ID NO: 78226 - DNA, 464 bp, Glycine max
  unsure (1)..(464): unsure at all n locations
ggacactatgatactaagctctccccaatttctataatagggggagaagtgaagtgtattaggttcagccccttaagcacttctctctctttcngaattgcttggaaaaattgtttccgtgaagaaaatccaagccgaggcgcttccgaaacgtttccgtaacgtttccgtgaggaatttcgctaaggtttcgaccgttcttcgacgttcttcattcgttcttcatcgntcttcgatcttcaacgggtaagtacctcgaaccaagctttttgattcattctatgtacccatggtggtccacattgtgtttcgtgtatttctattctcgtttcatttactttttatacccccttttgacgtgcttaagccattttatttaagtcatttctcgcttaacctaaaaataaaataaatctccaccgatcgtttgaattgtattatccgttaacttcgattaacatgaa

SEQ ID NO: 78227 - DNA, 427 bp, Glycine max
ctgtatcaaagcctcggagtctggatttttattttttataatattaagcaaaagggaacttactatcttgtatagacagaataccacagccattgagagctgggttcaattgaaaccccatccccaagaagctgagcagctggtcgctcttcctctagaggagcaaaatggacctaaatgcttgttccttgtaggaacaatcaaccatgtagttatgagaaattagaaaaacattgaccaaccaatgaaaaacatagaaccattgatcatttcatcatcatgtgaaagtaaagagcacataaaagcaaagctagtaaattaatatgatcatgttacctaaagggtttgaagcgatggcgcccttctcccctgaacctgatgggaccctctgggtttttctcacactcttccatccgattaaagcact

SEQ ID NO: 78228 - DNA, 444 bp, Glycine max
  unsure (1)..(444): unsure at all n locations
tccttcaactgcaaaaggctcttaatatttgaagagtttcttgttgaaccttcacccgacgaagacactgacgaaaacttatcttctccttcttggacaaagtatggtatgctgggggcaagaaaattttcttcccatcagaccttggatgcaactgtgatcgtatacccatatcagctagatcttgacgggtattcaagccatccttcgccttgccttgaatggtaaaggagcgcccaatcacactgtcacaaacattattctccacatgcataacatcaatacaatgtctaacgtcnagatcacaccagtacggaagatcaaagaaaatgaacctcttcttccatatgcaactctgacttttatccttcttttgggtcttcccaaatacagtggtcaggtggtgaacccgtcgatatacctgctcaccagtcaatggtatcg

SEQ ID NO: 78229 - DNA, 394 bp, Glycine max
  unsure (1)..(394): unsure at all n locations
tatntcattcccactctattaaatatatatgctaactcctacacaaagataaaattaactttggccctgtagtgctaatcactaataatagaattatcataacagaatgaaaacattcctttattgcggaatgggatagtgggttcaaataaaatccttgaagcatgtaggctntctgatggtcctactggacctgttgtgggccactttgttgttatgttctccatgttcctcatagtccaggttgctatcagaaacgggaacatttccttggcatataagctattcaaattcccaggaaatatctaagatcagcttcatatccttatctgtagaagatagtatgatttactacatctctcatacattaatattaattgaacaaactaaatta

SEQ ID NO: 78230 - DNA, 293 bp, Glycine max
  unsure (1)..(293): unsure at all n locations
cggataacaatgttgtgtgcgattgtacacgctccactgacgtgcatgtggtgctgcgttttcttcatgtanggtacactaactcctatacttcatttgacctatcttattttatctgggtagtaataagtaatgttgcaagattcttagtaaggcgttattctgtttgcactataacagagaatcaaccatgatttctgtggatggatccacagggttattgaaaatgcctgcaattgctttaacattctactatccaacagatggggcttcactatagtngtggtaacata

SEQ ID NO: 78231 - DNA, 231 bp, Glycine max
  unsure (1)..(231): unsure at all n locations
gaatcgggagaggaagtacatcacgaattcaatatgtataatgcctctacatgaaccgaagatcttatgttgaatgcaaaaatcatcatatcgagggtgtggaaatgatgcatatcggtgctccttgtcacaatatgatccanaaacctcaccatctttggtagtgcatattgcgcgattcccattaaacgtatggataaagaaagctgatctcaagatgaccatacttta

SEQ ID NO: 78232 - DNA, 399 bp, Glycine max
gcccactgaagacagatgggctctcatgtttcagttgtgtgtcacgcgcatctacatcacagatggagcaggcatgatgacgcttaacactgctaccgcagagatttccatatgctgggaagtcattaatgggcaaaaaagcattgcgcgcatatcaaacaatcccttgcgaaacacattaaacactagaaccccctggtcccacaagtgtgtcagatctttaaccaactgccttatataaacatcaatggcatgtatcggcagacttgggccctgacttatcatagacaacatcatgtattcacgctgcatgcacaaaccacgaggctaactgttaattactagcagaactagccacgaactgggttgagtgcttaatgtgccatatggattcttcca

SEQ ID NO: 78233 - DNA, 343 bp, Glycine max
  unsure (1)..(343): unsure at all n locations
tgatgcagctggaggagacaatgattgttgttattattgtggaatggngtacgatgaagcatgtgaggatcagtattatgaaggcgatgatcagagagatgcggactatgagtatgaacaacgtgaacgtgatgagggatactatgagtaccatcaacgtgaagagggtgaaaatcactacgaagattacatggttgaagaagatggcgatgaattttgctacaagattggtggcgttcattcgtaattattatgggaactcttagaaaccaggtgacggggactactctactccttgtgatcaaatctcatataagtctgctctctgaatgagcaccaattt

SEQ ID NO: 78234 - DNA, 366 bp, Glycine max
  unsure (1)..(366): unsure at all n locations
aaatgctggaatcagtaaaggtccacttcacttgccctattgtccacttcaaaaataataatacaggaagatataggacacctgtcttaaagcacgagtcatggccaaaatggctcctttcccatcactaggaggttgagtaatatgatatgcatcacctagtcaaaatccacatgaaataagtcaacccaatataaactaaggctagaagaaaatcctacatatcctgcaattagacaaactacctgacatcccatagccacggacctctgcatagattttggctcctcggatttttgcatgctcaaattcctaaaagataggagaaacaaatanatgacagatctactgtctatcctccaacat

SEQ ID NO: 78235 - DNA, 427 bp, Glycine max
  unsure (1)..(427): unsure at all n locations
acattcaatttgagcgtctcgtaattntactggactcattcagacatccgagtaaaaatttattgtcgtttggattggctcagagattcaacattcaatttcgagcgtctcgatatattacgggcctcaatcagacatccgagtaaaaagttattgtcgtttgaattggttcagagcttcaacattcaatttcgagcgtctcgatatatgaccggactcaatcagacatccgagtaaaaagttattgtcgtttgaattggctcaaagcttcaacattcaattttgagcgtctcgatatattacgggactcaatcagacatccgagtaaaaagttattgtcgtttggattggctcagagattcaacattcaacttcgagcgtctcgatatattacgggactcaatcagacatccgagtaaaaagttat

SEQ ID NO: 78236 - DNA, 437 bp, Glycine max
  unsure (1)..(437): unsure at all n locations
cttgtcgctggagctgacccatcaactgctctatcttntcagactggngatacctaagatcttgaccttgacttgatagaacctctctttaagcgaaggcgtctgactcgatccaatgttttactaaagtgaaacataatccagtgcgaatcataactctgacatctatcatgggtggaatggatgaatacatgaagaaatgcatatgacacagatgcattttatgaatacgggagcccgggaaattgtccccttcttagatacaacattcgggcagcatcgcgcccgacgtatgcatttaagaaagcaacacggaccctctgtcgggttgacaaagtgaggggatcaagacgcaatccgtggatgatgcagatgcgaaaggcacaacacggtgatgcatatagtacgacaatatccacacatatagtacatgcatg

SEQ ID NO: 78237 - DNA, 276 bp, Glycine max
ttaataagagcaacatacaaaatccttctatctgaggcgcacccaaaatggtcctcatcaacatcaacattttcctcaaagaccatgagtgttaagcaagaagcccaattatatcaccaactggtgaattatggcgaggagaacgggaaagttctccaagatatagtattaaagcatacatgccaccacagataatggctaaagctcgagttgcatgctcctgcagaaactggccgccatcaccttgcatacactcattagaaggagcaactatat

SEQ ID NO: 78238 - DNA, 386 bp, Glycine max
cattgacaacaaatcattatgattttgtggaatgaaaacataaataacctcataaggataaccactagtggtactatgcctaaccctattataagccaatttaatgcgaggtgatccaactttccaatttttataaattttttttaaaaaagcccttatcaaggtacccaaagtcctattcacaacacttatttgtccatccgtttgagggcgacaagtattagaaaatagtaacttagtacctaactttccctataaggtccttcaaaaatggcttatgaacttggagtccctatcactaacaatgcttcttggaatccatggagattaccactttttgaagacaaatacccacatgatagcatcatcaattttctacaggaata

SEQ ID NO: 78239 - DNA, 400 bp, Glycine max
  unsure (1)..(400): unsure at all n locations
attttgaagatatatcttctcatttgtttttgaaggcacgagngcttagctaatttgtaaccctcctattgatctctcaattctcaaagatcttctaacaagatagatctttctgtacaaatatcctcattttcatggtggagctgtgtaggctctaactaaagatcttcaaaagcatcacatgtgtaagtggagacttctagatgattatctaccttttttgcatgtttccattgaagtggtttggaacattttgaaagatttttatatatttcctcaaggtttggttggctttgagaaacaccgctcaattataaagaagtttatgatatagcattttaagagattcaaggtcatttagaaatacctctttataagactagatttagaatcttctgac

SEQ ID NO: 78240 - DNA, 372 bp, Glycine max
  unsure (1)..(372): unsure at all n locations
catatcttatcagttatcccaaataacaactaaccttttttccggtaaggttctagcttgattcatttagggaacaaaaaatatcttaatggggaaaaatctggaaatatcttttttaaaaaaatatgggtctacctttctatctgggtgacttggattgatctcgccttttttaaagagtgaagtataatgcctttctaacgtgcttaggaaagatagtgtttatcattcctgaaccacgttttggaagaacttatgatctcgttcatttgaactcatgggtttagaggcccatggatntttaatgtagtctggtgattatgattggtcgaagatgggtcatctttgttaatccggtacattggtcaattt

SEQ ID NO: 78241 - DNA, 441 bp, Glycine max
  unsure (1)..(441): unsure at all n locations
ggattataagctntctttaacaatgttcgttgtttcttttggacatatatctattcacatgcgtatgatatttatagccattggacgcttaatatttgcattcaatgcagatacttcttcatgttagaaaaatactcttgttaactttcatgtagaacacttcaacagaaaatcacttcctttgcgtcagagcaggtttgtcataataaggcgtgtcttttgatacttttgatcttcaaagngatgaacattcctttgtngcttctacgattcaacaaaccctaggagaatactatactgtctaagaaagttcctgcacaacaaatttcatacacacaatattaaatgaagctcttacatgcactttntaatgctatatcagatcatggagtgtctctgctatccgttggaaatacaaatgcatgatgcatgacttgatat

SEQ ID NO: 78242 - DNA, 438 bp, Glycine max
  unsure (1)..(438): unsure at all n locations
tttctatatatagggggagaagtgtagtttttttgtgttaacccctntggcgcttgtgtctctttctaatatgcttacaacaattggttccgcgaagaaaatccaagccgaggcgcttccgtaacgtttccataacagttccgtgagttgatttcgcgaaggttttcgaccgttcttcgacgttcttcattcggtcttcatcgttcttcagtcttcaacgggtaagtacttcaaaccatagttatcaattcactctatatacccgtggtggcccacatttgggttcatgtatttttattctcgatttcatttactttgtatacaccctgttgacgtgcttaagccattttatgtaagtcatttctcgcttaacctaaacataacataaatttccaccgatcgtttgaattggattatccgttaactttggttgaaatg

SEQ ID NO: 78243 - DNA, 326 bp, Glycine max
ccatagctgcgagtattatattttgaaagaaaagcccagtgagccagatatattatcaaaacacaccttttaaccgatcatcatgatatacaggaacattcaaataaatcaatccccggctataaagaccctctacaacatcaggatcaaacaggataaaagaaattgcttcctcttacatactatatctatcatggccatttcctcttctgaaagttctatataggcagaagacaacacaaacaaaaagtgaatacctaaattttctttttattttcaaattaacacaatgaaccacattactggtaatgaaccttccttcatta

SEQ ID NO: 78244 - DNA, 430 bp, Glycine max
  unsure (1)..(430): unsure at all n locations
tgactgacttctactcatatattctttccagngctcatggggatcctcctcatcattaccttctgaagagaaagaagtgatcatctagtcttaaaagtggattgaaagagtatcaaagatatctttgaggatataacagtgacaaggcgtagtctagaagaacaaatcatatagaaaaatcttcagctaatcatgtaaagacatngtgagtgcattaatagaacaataaatggatgaccatttcacttgcagtgtatcatcaaatactatagtgtatctatattagtctaactcacaccaaggtttaaaatactttgtagtatctacaaactattttcatgccggaagaaaactttccatttgataaagcagattgtggtgcctcatcatatganaccttttgcaaaaacattccgaggaaacatataaa

SEQ ID NO: 78245 - DNA, 423 bp, Glycine max
  unsure (1)..(423): unsure at all n locations
agatcgaagaacgatgtttaacgaatgaagaacgtcgaagaacggtcgaaaccttcgcgaaattcttcacggaaaacgttacggaaacgtttcggaagcgccttggcttaaaatttcttcacggaaacacattttccaagcaaattcgaaagagagagaagtgcctaaagggctgaacccttttcttcttcacttcctcccctatttatagcaaaataggggaggtggttggccgccagctcgcccaagcgagccaggttgctttctccaaaagcaacagccttctggaggaatattctggagggcccaagtgggcctgggtgctatttgcaccctcatttttactaagtacacctccctttggctttttcttggtgattcttttttcgtanaggtaccgaaacttatgaatntcgtaacgat

SEQ ID NO: 78246 - DNA, 434 bp, Glycine max
  unsure (1)..(434): unsure at all n locations
ggctagacatgatacatgtagggttgggttgtttaatgataaagggatgccccacattatttccatgacacaaatgcaaaaatgatgatttggaaactttatgcanaactggtcatgcatgcacctatgtggacactcaagtgtcaaatttttatggtcatgtgatgctagggctcacgattcatttcctctattttagtcaacccaatgtttccaaaatatgttcttttatccatatgtgcattcatccgagtccattttgggcgtccggggaaattttcacagcattcacccttcaagtgtatacacatttttcaaaaactagttatgattagtgaattcttttcaaagaaaagttggaagtcatctcttttcaaaagcatgtnggtttttcagctagacaacatatttatctttattttctctcttttttc

SEQ ID NO: 78247 - DNA, 453 bp, Glycine max
tcacacaccaacatggttaagtaataataacaataatgatatattaatattataataataataataataataataataataataaatattattattattaaataaaagaattaatactcttcagattcttataaaataataaatagaaaataaaagacattctcagacaatttaaatattgttgtgtggctatattagtataaatcatctctaatccatacattttttaatattatgctctttttttattttcttttgatatactttgtggtttaacgacttgaatttaatatgatgttgtttatcaattatttttgaagttgtacattacttatacgtaattctataagtatcattttttttagttagtattccactaggttgtaaaataattaattgatcaaagacgtctttaaggtaagctttaaataggctccacaactacaacaagaa

SEQ ID NO: 78248 - DNA, 137 bp, Glycine max
agggagagtatttcattaatccttttagacgaagacttgtgctgtaagggcgataatctagaacacccactccatgactgcctagtctatagcccgacggcgtttgatgggatgaagctcgcatgatagcttgagac

SEQ ID NO: 78249 - DNA, 416 bp, Glycine max
  unsure (1)..(416): unsure at all n locations
cgagttgcatgttctcccgcccatatttaggtttttctttctaggagcgcagctcacaaatattgtgttctatctttttntgttggccataattaaattatttgttatagtcttaagtattatacaagcttggatgctatatttattttacgtattctaagctattattcaaatatatggtatgttagtttgtatgaatatggtatatataatgctaaaactattcttttgcattttaagatattttggggattctaataacaaaaaacctctttactgaaacttcaaattaaaactctattctaataaaaattaattacttcaaataaatatcatgcaagaaacttaaaaacttgtacgctttcaagtagaaattttaaggcacatccaccatcgacaagtgctatataatatta

SEQ ID NO: 78250 - DNA, 330 bp, Glycine max
cactcgttcgcacttccatgaaagagagtcttgcgtgacacatcttagagtgtaaattgtatccgttttgctcccttcaattttgtgctctcccctatgtttcactctccctctttctttcgcttcattgaagctaacctttccacgcttcatatccaatgctcatcttggaggcgaagctccttatttcatggcttattccctagtggatggcgccgactgttacctcttctctttggtcctatgctgcatctacatggtggaaatcaccttcatcgaagcttttatgagtcatagacccagctccatacgaacttaagatccagcttc

SEQ ID NO: 78251 - DNA, 73 bp, Glycine max
aacacctgttgggttctttggtctaaccttttgacgtgttcaattcgcctaatcctttttgttaaaaacgtcc

SEQ ID NO: 78252 - DNA, 476 bp, Glycine max
  unsure (1)..(476): unsure at all n locations
gctttacgtgacactataatactcagcttctcagggaagtttctcaaagaagcttctcaggaagttttctcaagatagcttctcaaggaagctacctagtctataaatagaagcatgtgtaacacttgttgtaactttgatgaatgagagtcttgtgagacacaactcanagttcaacttctctccctttttcttccttcaatttcgtgctcccccctctctctttctctccctctntcttttcctccattgaagcatcctttccaagcttcttatccaaggctcatcttggtggtgaagctccttcttccatggcttattccctagtggatggcgccgcctcttacctcttctcctttgtcttctgctgcatctccatggtggaaaatcaccattaaagaacctcattgaagctcaaagatccagcctncatagaagctcaaagatccagcctccatagaagccccacaagcaag

SEQ ID NO: 78253 - DNA, 434 bp, Glycine max
  unsure (1)..(434): unsure at all n locations
tgagtttggagaagaaatggggtgaatatggttttctccntccccttttaaattatcacgttagacacgcttgccaaggcgagctaataattttattttttttttgcaaaaaatcctttgcaaaattgtgttgtacattgtgatatatttttttctaaaaaatcctattattgcatataaacttaggtgagttaaggatattattcaagaaaacaaacaagtatgaaacatgaaattaaagagcaaagttagagaaacctggctgcctcctaggagcgcttttttaacgtctttagccagatgcggggtgatgatcaatcgatcatgggcctaacacctattcgtacctacccttaatcttggacaaagaaagtggcatcatgcaacaaacatggaacaatactacaagatgcttgcattacctttcacctacc

SEQ ID NO: 78254 - DNA, 435 bp, Glycine max
  unsure (1)..(435): unsure at all n locations
ctctcccaatatatgggtatnttgtagtgttataagtatttnttggtaagcataggtaataaatacttagtatttttcattttgtgtgtttaataatcattctctctcaatttcaagttaattaagcaagctttggaaagtgttgttttcaccttctcgctaagccaatcagttggcttagcgagcgtccactaagcgcaacactcctgggctaagcgcgaggaagaatccacaaaaagatgagctgtacaggttcgctaagcgcacctgtcgcaacctacccttttgcgggtgagcgaggcaaggctcacgggtgcgtcttccataggaggaaaatgcgcggagtcgccaccaacgtttattgaaaggaaaatgttagaaaaaccaaaggaaaccggtcatgaagaatattccagattcgggagttatctttac

SEQ ID NO: 78255 - DNA, 403 bp, Glycine max
  unsure (1)..(403): unsure at all n locations
ctgtgtatgtaattattattatgtttgcattttctttcatttgagntaaaaatagtagaacaggatacaccccaatcctactaggctgtgcgccaatgacatgttaaggttgctaatagagacttatagaattttgacacaagccttatatttaaacagttttatctaatcgcactactcaccttgtccctaggcaccatgatattctgtgaagaaggttgccttccaaagcagaattttggttgcatcgtgggggaattgaacctgcattcatgggaaagatgagagctaacttgggatccttgaccacttgtgaaacctacatggacgcattcacatttgctatcacctattaaagntcgctacacaaaatgtttggtcgtgtacagagtatatgcttaca

SEQ ID NO: 78256 - DNA, 371 bp, Glycine max
agactacctgttgagtgactggcatctttttattatacatagctaacatgaaaatctttatatttgcctgggctttgaattcgccttgttgatcttctaagagattgaggtatgtttgtgggtatataggctataagaacagaatcatgtggtaccaatggtaatatggaagaaggtgaggcaggaaatctaatgtcatcatgaaaagaagacattggctttcgcaaaacaataatgggatcataagaatcctgaacattgaaaggaaaacaatcttcataaaagataacattcctggatacactgatggctcttgttttaagatcaaaagtgacataaccttttgtatgtgacttgaagcccacaaaaat

SEQ ID NO: 78257 - DNA, 426 bp, Glycine max
  unsure (1)..(426): unsure at all n locations
attggtcttcaccagtgaaaggatcgaagtggttctgtttagaagcaaatntaatcatcctgcttagacgaatgagaaaactggggcaaataaagagggtgaggatgagggagaaacccatgctgtgactgccattcctatacagccaagtttcccaccaaacccaacaatgtcattactcagtcaataacaaaccacctccttacccaccacccagttatccacaaaggccatccctaaatcaaccacaaagcatgtctaccgcactttcaatgacgaagaccacctttatcacaaaccacaaaaaacacccaccaagaaatgaattttgcagcgaacagcctgtatgattcaccccanattccggtgtcatatgctaacttgctcccatatctactngataacgcaatggtagccataacccct

SEQ ID NO: 78258 - DNA, 319 bp, Glycine max
cattttgtgagggaaaaaggatatgcacctctagtcacaccacaaaactaaatattacttctaattgtctacagtgtatatactaatcaacattcttaatttattaatcgctatattactctctcttctatcggactttaatcctattcttgtctcctatattgttttccatctcattacatattacatctatcatgttttttcctattatttctgacagagtcagatcttatagtgtctgcccacggctggttcctatttacagatcttcactgtgcaaagtcaagaatttatcactttatttattatgagggatagt

SEQ ID NO: 78259 - DNA, 438 bp, Glycine max
  unsure (1)..(438): unsure at all n locations
tctttgagnaaacttccttgagaagctagaacttagctctcacacccctctcataactaagctcacctccttgagaagtttccttaagaagattcctaaagaagctagagattagctacacatacctctctaatagctaagctcacctccttgagatgaaaagctagagcttagctacacacctcctataatagctaagctcacccccatgacaaaaaaaacatgaaaatacaaaaaaaaagtccttactacaaagactactcaaaatgccccgaaatacaaggctaaaaccctatactactagaatggccaaaatacaaggcccaaacgaaggaaaaacctattctaatatttacaaagataagcgggctcatacttagcccatgggctcaaaatataccctaaggctcatgagaaccctagggtcttcccttggat

SEQ ID NO: 78260 - DNA, 408 bp, Glycine max
  unsure (1)..(408): unsure at all n locations
tggaagcagagctcttcctcttcctggatgctatctacaataaaaagaacccatcagtttattagaccagaagttatcgaaattgaaacagaaaataaaaactgaaattggcaacgtgcacttagcgagacactgctagcgtagcacgccttatgaaaaacaacacactggcttagcacaacagagttgcacttatccaggtatgacataaaatttttctctgcataattggcttagcgagataagcactcgcttagcgcagagcagttntatttcacacaatggcttatcgagtagcgccagcttagccttatgcatgtngcaacgaatagcgcttagcccacaagggcgacgcttagcccaagcaacacttcaaaaaattgactaagttaagtgggtttagcgact

SEQ ID NO: 78261 - DNA, 419 bp, Glycine max
  unsure (1)..(419): unsure at all n locations
tgttatttggtcttcgccgatgaaaggattaaattgtgtcntataaagaggcaaatttaatcatcctacttgtacgaatgaaaaaactgacgccaatgaagaggatgagaaggagggagaaacccatgctgtgactgccattcctatgcagccaagttccccaccagctcaacaccatcattactcaaccaatatcagccattctcattacccaccacccatttattcataaaggccatccccaaatcaacaacaaagcccacctaccacacaaccaatgctaaacaccaccttgagcacaaaccaaaacaccaaccagaaagggattttgcagcaaaaagcctataggattcaccccanattccggtgtaatatgctaacttgctcccatatctactcgacaattcaatggtagccat

SEQ ID NO: 78262 - DNA, 392 bp, Glycine max
tgttatgtcacatcagataatgtcaaaaactgtatcttattatggagatcatggtatggtattgtaagtgacatccttggccagagtgaatttgattgggatggcacttagcacatgatcacagttgagaatgaaaatgcttggaatgaatattgcactggtagtattctttaatatgtagctattttttattcaaagtagattggatttgaatttttctttgttttctaatcgcataaatcggctaaaccgtttcgattcaaggtgcttcaaaattgggatgatatagtggatttgtgtgctaaagatagagccaccggtcatggagctgaaactgctattgatgctgatgaagcgatgagtatagaaacaaatgaagtggaattcatggg

SEQ ID NO: 78263 - DNA, 458 bp, Glycine max
  unsure (1)..(458): unsure at all n locations
taacaccatgagagagagtaaaatagtgtttatcattaattataaaagattagacaaggttacaaccaacagtgttatctctttatatggagagactcaactgtaactaactctcaagtgtaaactaatcctgacagttactaactaactacagttagtaactgtaactaccttacagctggtgacagcacactaacagtaagcaaaagtcaatacaatggagtaagaatactctaataccctccacaagctcatggtgggtgagactgagaagaattggagggatcacacagtgtgagcttggccctgaacacttcaaaattactcggggacaaagctttggtaagaatatctgtatactgactagtagcaggaacataaattacctgaagtagtttatttataacctncaataatgatgtctatgtattctctcacagaaattggatcaccaatag

SEQ ID NO: 78264 - DNA, 395 bp, Glycine max
  unsure (1)..(395): unsure at all n locations
ccctaggggatggcacctcctttcatctcttttcctttatcttccactgcattttcatggtggaaaatgaccattgaaggacctcattgaagctcaaagatccagcctccatagaagcttcaaaagcaagcttacattaaggccttanggttctcatgaaccttanggtagatttctgagcccatgggccaaggttgggtccaattatctntgaacatattatattacgatgtcattatatttgggccttgtatttagggctccataatgtaggtagggtaccttataaatgtaggatttttcaccccttgtattttanggcacctagactggtttttgattaagggtagttttgaatttacatgcattagtgatatttgngtgtgtgtgggaaa

SEQ ID NO: 78265 - DNA, 444 bp, Glycine max
  unsure (1)..(444): unsure at all n locations
ttagccttagtttcactctggttattagtcaatttgtttaagaacgaanatcccatagaaaaatgtgcaattgatttttatgattatttttatataaagatattgttttattattatattattatttcgcctgtttatggttttaaacgtggttacggcgtgaaagatcggtcggattttattctaacagaaattagaagatgatacagctcanatgatcggtggaaatttattttattttataattagacgagaaaatgacttatataaatgactaaagcacgtcaaaagggggtacggaaagtaaatgaaataaaaataaaagcacgcgaaacaagtggggaccactaagggtacatagaatgaattaaaaggttcgatttcngcaacttaccggntgaagaccgaagaacgacgaagaacgatggaaaatcttcacgaaat

SEQ ID NO: 78266 - DNA, 410 bp, Glycine max
  unsure (1)..(410): unsure at all n locations
tcactatgaatgacaaattccttgggataaaggtagtgttgccatgttttcaaaacccgtactaaggcatacaactccttatcataagttgaataggtaagggtaggaccacttaacttttcactaaaataagcaattggatggccttcttgcatcaacacagncccaatcccaacatttgaagcatcacactcaatttccaaagatatttgaaagattggcaacgcaagtatgggggcattagttaacttttgcttaaaaacattgaaagcttcttcttgtttctctccccatttgaaaccaacatttttcttgagcacttcattgagaggtgctgccaatgtgctaaaatacttcacaaatcgtctataataacttgctaagccatgaaaacttctcacctcggtcac

SEQ ID NO: 78267 - DNA, 435 bp, Glycine max
  unsure (1)..(435): unsure at all n locations
tgtataactcttanagaaaaagagtccaagttgtgtcttgagattgagacaagtgctatggaaagagatactcttctcaagaactttcaggatttggcaaagaaactgaaagatctttaaaaggatttgaagaagctgaatgaacttcatgattataaaaaagaagaaagatatgatctatagagtgtagaagcaagcttcatgatgagtcaagattgattcaaagagttctgatgataacaaagatgatgacaaaaagctcaaaagtcaagaacacttcatgataacaaagatgatgatctcaagaatcaaagaatgagtttaagattgaatcaagtacacttcaaggatcaagaggaaagttgaattcaagaatcaagaatcaagtttcaagattcaagttccaagaatcaagatcaagattcaagactcaag

SEQ ID NO: 78268 - DNA, 482 bp, Glycine max
  unsure (1)..(482): unsure at all n locations
ttaagtcaccgccgctgcagcttgtacattcttgatgagcaattcagcttcttatccaacgaccaagtaacattattaanaatgaaatcattccttcaggacttaatttcctcagcagcccacgcacccttcaagaatcaggaccatcccatcgtccaatctctttaaacaaagcttctagatgtgtatttcacacgtgatccataaaacacctcagaaggattttcttttcaccatttcaaaattcaaaccatcgttctcctatctttatctctctgcctgaaatattttaggtgtctaacctctttaatttactctcttatgtctttatttttaaactgaatttcgatagtttctttatagaaaaaatcaataattaaaaatactcttatataaaaaattattggttcattatatattcaaaatctaatttatataattaacataaattatttagaataaattacattcaccctcttaat

SEQ ID NO: 78269 - DNA, 474 bp, Glycine max
  unsure (1)..(474): unsure at all n locations
actcagcttgagaaaggatcctccanaagcaccacactatctgttgtcacataaaactatgagagaggattctatgcttgcagaagtgtcactgcctccgcaaaccagtaccctccctcttcagttcacacaaccctgtaataaagatgagtattgtttctcttgcttacctgcaaattacatcaaaacagcattaaagaagaacaataataacaacactgaaaaacatgtgaagttcgctgaagttatcattcatgtcatgccattatttgagcaattaaaacaaataagctttaatcagctagacaagaaattatgtgcgtgtgtgtgtattatttagaccaattcctattatcctatagtattaactattaaatgacaacacaaattttggagccacataaatattttatattttanaataatgattgatcatttgtcttgacttagtgcacatgaatatctggtcaatgc

SEQ ID NO: 78270 - DNA, 326 bp, Glycine max
  unsure (1)..(326): unsure at all n locations
tgactaagagcctcccctttctgctagggaggagttaattaggtaatttgtatatgtgcgtgcgcatacttatttatttgattgcatacctacaaccatccattcccttattcatgttccctttgatggttgctgcataaaatcttgattctgcgtgttcctttgttncgggaatgcaagatagattcctccaccccctatgtctacttttatatttcgataaattgtacttaactgcacatatgaatggtatgactctcgtataaataaattaaaaatgcattttggtcctcacaattcaatgtgaccaacgttttttgggatct

SEQ ID NO: 78271 - DNA, 451 bp, Glycine max
  unsure (1)..(451): unsure at all n locations
agctngcccagagaaggagtctacggaggaattgcttaccacctcaaaagactggaaagcggtttctaatgactcctctacggcctccacataaggcatagaggatgggtagctcaccaagatgtcttcttcgcctgatacgatgaccagatgcccttccactacgaatttcaacttttggtggagtgtagagggaacaactcccactgagtggatccacgggcgccccaacagacagctgtagggggggttaatatccattatttggaaggtgacttgacaggtgtgagggcctatttgtactgggagatcgatctctcccctaacctctctgcgagtgccgtcgaaggcacgaaccaccattgaactcagctttaagtgggaagcattgaatggtaatgtctccacagtgctcttaagcatcacgtttaaactggaaccattatcgatg

SEQ ID NO: 78272 - DNA, 463 bp, Glycine max
ggcttgtggagcttctatggaggctggatctttgaacttctatgaggtcctttaatggtgattttccaccaaggagatgcagcggaagacaaaggagaagaggtaagaggcggcgccatccactatggaataagccatggaagaaggagcttcaccaccaagatgagccttggataagaagcttgaagaggatgcttcaatggaggaaaagaaagagggagagaaagagagaggggggagcacgaaattgaaggaagaaaaagggagagaagttgaactttgagttgtgtctcacaagactctcattcatcaaagttacaacaagtgttacacatgcttctatttatagactaagtagcttccttgagaagctttcttgagaaaacttccttgagaagattctttgagaaaacttccttgagaagctagagcttagctacacacacccctctcatactaagct

SEQ ID NO: 78273 - DNA, 457 bp, Glycine max
  unsure (1)..(457): unsure at all n locations
agctntccgtcttttgacttattatggcagtcttgtctttcatttcagaatcacccatgtgatttcgatatcaatactgttttaagttttgaaatcaccacttttttcgttattttaattatgtttgtttttggtatacaatttttaatttttaaataaaagaatcactcactcattaactaaaatgtaccatatctatatntatatttatattcatatacatttttttattcttataaatattaattntaaaaacaatataaattattatattaattaagttgatactttcacgttatttcatatgtgaaaaattaaatattataatttatttgaaaattgaaaaattgtttatgtagtcagtttttttttacaactttatgtagtcgcttaaatatttgtttgcattgcatcaattttgtttttgaaaacttatgatatattatatataaacaat

SEQ ID NO: 78274 - DNA, 457 bp, Glycine max
  unsure (1)..(457): unsure at all n locations
ctgtgtaatcgattaccagtgtttgtttctgaaaaatctatttatgtaactcttcaaaaaggttntaactctttcaaatgggttttaagcttttctaaaagttataactcttctgaatggtcatcttgaccagacatgaagagtctataaaagcaaggctttgttttgcatttttaattaagtctttctaacaatctcatacaatcctttacaagccttgaatctctttgaatctctttgaaacttcttcttcttctttgtaccaaaagctttatgaagttttctggttttctaaaccttgaaaacttgtgctattcatcttttcattctcttctccctttgccaaaaagaattcgccaaggactaaccgcctgaattcattttgtgtctctcttctctcttttccaaaagaagggatggataaccgcctgaattcttttgtgtctccccttctcct

SEQ ID NO: 78275 - DNA, 430 bp, Glycine max
agcttcatgatgaatcaagattgattcttttatttttgatgatgacaaaggtgatgacaaatagctcatagatcaagaacaattcatgattacaaagatgatgatctcaagaatcatagaatgagttctagattgaatcatgaacacttcaaggttcaaaaggaaatttgatttcaagaatcttgtttcaagattcaagttcaagactcaagagaaggttcaattaagataagtattaaaaaagttttttcaaaaactgagtagcacatgaatgtttctcaaaaccttttacagagcttttactctatgataatcgattaccaaattattgtgatcgataccactagcacaatggttttctaaaagctttctacctgaattacaacattccaattgaattcaaaatgtagttatcgattacaatgatttg

SEQ ID NO: 78276 - DNA, 459 bp, Glycine max
  unsure (1)..(459): unsure at all n locations
gatcttaagcaccgcggctgcagcttctactttattgggtatttttatctcctttggngctctaaattgtgggaatgtgatcaaatatgtggggcaactttggtttgttttcttgcttgattgggctaaattgggggtttgtatgagatggccctatgcctataatgcattntgaagcaatggggcatgccacattgtccccgttctcttgctattgatgtctaaacgcgcgcccaccaagtgttcggtgaaatgcctcaatggcattagcgcgtgatttttataaggaaacaacccgtggggcattttggtttgcacatattttctatttttgttgggacatgcattcgttcccaaaaaggctagagtaattgccccacatatatcctaggcctangaaccaaagttttatgcacaagaacacaagaggaggtgcatattgggtaaagtactcctttt

SEQ ID NO: 78277 - DNA, 402 bp, Glycine max
ttgatgatatggtcttcaccgacgaaaggatcaaagagggtttgaaaagaggcaaatctgatcatcttgctttgataaatgcaaaaaaaaaaaaacaagctggggcaaataaagagggtgaggatgaaggagaagcccgtgctgtgactgccattcctatacaaccaagttttccaccaacccaacaatgtgtttatctcaccaatagaccaatctttttcttaccgactgcccagtgtcataccctaatttcttccggagacctttgcttgatgacatgcgaccattctttggtccttgtgaagtgcctggtacccattattaagcaatctgagaaatttcatgacatgccgaaaaaccaaaaatattatgatgcacaatccgtaagtttccgtgacacac

SEQ ID NO: 78278 - DNA, 453 bp, Glycine max
  unsure (1)..(453): unsure at all n locations
agctntagccttaggttgttccatgttgctcatgtagttgctccccctatctctaacagaatcatgggctctagtttgacgtaacttgatttggaaacttcaaacatggaattctcaatatgttgagttgttttgcacacaagacagactggttaaattgttagactctttgtatgtcaaacctagcccaatagcatgtattgatgacaagtggatgaccatttcttacatgggttatgtcattgctagtcattataatgttgtcttggttttcttatctatgctccaaagttagactttctttccgcttaagagtacgacaccatctacgacacaacaacaccttattacaattggatttgttaatgggaatctctttgtgtaggtatacaacatttacttaagagaccttntagtgttgtaaagaataattgatttgttaaataactcaac

SEQ ID NO: 78279 - DNA, 438 bp, Glycine max
  unsure (1)..(438): unsure at all n locations
tgctaacccatggaagctcctaatatctcccacactcnttgtggtgggccattcttggatggccttgattttctcaaggtccacttggaccccatttctaccaactacaaaacctaagaaaactatattatctacacaaaaggtacacttctctatatttgcatagagggtgtttttcctaaagactgaaagaacttgtctgagatgtcctaagtgatcatctagcctcctactatacactaaaatatcatcaaaataaacaactacaaatctacctatgaaatcccttaagacatgatgcataagcctcataaaggtgcttggtgcattagtgagcccaaaaggcatcactagccattcatacaaaccaaacttggtcttgaaagcaagtttncactcatcaccctttttcatcctgatttggtgataccactttta

SEQ ID NO: 78280 - DNA, 87 bp, Glycine max
aaggcctattatgatgtgtacaccacatatgtacattctggcggaatacgcttataatcactatgtatagcgtgcaacggcttttaa

SEQ ID NO: 78281 - DNA, 450 bp, Glycine max
  unsure (1)..(450): unsure at all n locations
agcttgntgacacgcagagactaacgttgtcttcttgcacctttgtcatccagagacggcgagtctgatgacatgcgagggtaccttatggttatccgcacctttngtcatccaaagacggcgtgtccgatgacattcgggggtaccatatggttattcgcacctttcgtcaaccaaggcgaatgagtccgatgatatcgggatgatgttggtcgtccgattctgattcatttttaaaattttttcagcttttactttcatcatccagagacattcaatcccgacgacgcataagattcttctctgctaggcagggacgatcgagttcgatagcatgtggaaacgtcgtggttatcccgttatatcgctttcaaggcactgaagttttgctgacacccctgacgcctttntctttctgaatgacaggttccactggttgggatattcatc

SEQ ID NO: 78282 - DNA, 432 bp, Glycine max
  unsure (1)..(432): unsure at all n locations
tgtttgtatagagaaatagttatacctcctgttatcgacttaatagtcaatgtaatcgattgtttcaaagaagtaatgaattattttatcatttcaattgattaaagtgttcttcccaacatctagaaaactttcaagaacaaagtaatcaattagattcttgatgtaatcgattaaagtgttcttgatcacttttgggaacacttttaagaacaaagtaatcgattactatcacctggtaatcgattaaagcactaatcaatcatatgcaagaacctttctcgagtgaatgagtgtcttcttgaacttaagagaaattcacaacttatntttcaccatgagatctttaaaaacgaattaaattgttgtttttctgcacctatcctcttctctccttcattcatgctcaccattttgcttctaatcataata

SEQ ID NO: 78283 - DNA, 392 bp, Glycine max
  unsure (1)..(392): unsure at all n locations
taagaagggtgctcttttgatatcaccttttgttgcaaaatgattttccttcttaacaatcttcttggcagaatccttttcctctttttccttccccttggcctttgatgacaaggccttactatccttcttattcntttgtatttctagtctttcttccttatccctcttatctttcatagttagttgatctttgtccacctgtgaaggtgtttgaggattgcaacacaaactttgttcctttacttgaggaataacctcaagcttaagaggtatgacagtgctaagggatgtttcccttgatagaagaaggtagaacgattgtttaagaaggagtgctcttttgatatcaccttttgttgcaaaatgatttttcttcttaataatcttct

SEQ ID NO: 78284 - DNA, 425 bp, Glycine max
  unsure (1)..(425): unsure at all n locations
gcttagctgtgtgctaagcaccgccatacgaattgtagttttattagcaaaggctgaggtactttgggtgttacccaaaaatcatttgcctctgcctttgctaaccctgagcttttgtgctttcttctgtgtgttgaaacttacttgtctgcattgttcttgcttcattctacattgcaatcataatccaagtaagtgagtatattttcaatttcattntcatctttctaaccatagggtagatgaattcaagctttcttagttagtagtgtgttaagttaggttttttagtttgagggttagtcattttacgattttaggtagcttagaagcccattaggggcaatgtggctaaaatgggccaagatccctttgttttgctgagaatcgcgatgatgttgccattggagagaagaaaatgggat

SEQ ID NO: 78285 - DNA, 458 bp, Glycine max
  unsure (1)..(458): unsure at all n locations
ttaagtgaccgccgctgcaagctacccaaagtggtctaggctcccttgcttcattatggatngagcngtaataaatagggtcaagcttctaaagagccaaaggcctattccatcatcttttcagcaaatgatttcatattaatagaaagtaatcctgagttgaagattgcagtatctattctgattacaagtaaatataatatctgagtaacaaacatttagataaatagatcctaatgaagagatataagattacagaaacacataattagctgataaggttggtctataataattaaactagcttgaaccttttttcttttctttgggtgattaaacgtggaccattagttcctactatctcggatctcccagctcgttcttcttaactgcccctccgagatgaatgagggcctgatacaaggtaaaactactcttgagaaattctcttatcgaac

SEQ ID NO: 78286 - DNA, 437 bp, Glycine max
  unsure (1)..(437): unsure at all n locations
gcttctttaacaagacaacanagtggatatggatccgggatctctgnttacatttntcagtaaacatcatgtacattgtaaggtgcaacaggcatcttgttatatattaatttccccccttttcatcacagatgcaaacaacttaattccaatggaaagtgcattaaaaatagccaacaaaatcaagcaaaatgagagattctctatgtatattgtcattcctatgtggcctgaaggtgttcctactggacgaattactcatcaaattctcttttggcaggtaggcttcctttaactcttaaaatggtgccacgttagacaagtcataaaaacctttattggctggatgaccaacatgatggattangaagatttggtattcgaacattagtctcaagccagaagaaacagctgattattattttgtgcttaatcat

SEQ ID NO: 78287 - DNA, 345 bp, Glycine max
ggagcctctgcgtttttcacctgcttttttatgcactctggaacagagcattttccattggaagtggattaagaatcaattgcctgacgcactctcttcacaacgatgtctgttatgtgaggcatctatgaagcaaactctaatatgtcagttacttacaccactttgcaacaaaaatcgaacacacaacgaatgaatgcaactgaagtgtcatggtctttactggacgcggaaacacttcggttgagcgtccaaagattgtgttgcatatccccggccgcgggaattattatcgcgcgtcccggcaacataaattaatgtggcaccgcaacggatccgggagcc

SEQ ID NO: 78288 - DNA, 331 bp, Glycine max
ctgttagtaaccagaacttttattaatgttatgaaatgccacgaacaaaaagaagaagaagaagcatttcctctactctctctctatctctcgctctcgtctattctttatggaggttacttggacctcaaaagccaacctataacattggtgatttcattgcacaacaatggcggacgcgactccgtctaaagattccgcagatcctctggaagatgcaatcgcgaaacacataacctcttagcgcgccctgaatatgaaaattgatgatcttctttatcaaatgtcacaaccctatatgaaccagccaccgtcgcatacgccgctgtct

SEQ ID NO: 78289 - DNA, 465 bp, Glycine max
  unsure (1)..(465): unsure at all n locations
caagctttgagtgaaacaatgtgactcttcatttttttatntgaatttcaacgntcaaggacactggtaatcgattaccaaaacattgtaatcgattacaaccttttgaaaatatttggaacattgtaaatttagtttgaaaactttntcaaactcattttgctactggtaatcgattacaaaaatatggtaatcgattaccagagagtaaaaactctttggtaaaggttttgtcaaaaactcatgtgctattcaaagttttcaaaaaacgttttaatacttatcttgattgagtcttttcttcattcttgaatcttgagtcttgaatcttgatcttgattcttgagatcttgaatcttgaatcttgattgttgattgtagactntcttcttgagtcttgaattcttcttgattcttgaactcttgacttgttcttgattcactatgagttgtctttgatctttt

SEQ ID NO: 78290 - DNA, 486 bp, Glycine max
  unsure (1)..(486): unsure at all n locations
actatacaagactcaagcttacccttatggcttgcctccggacgaattgagccaagcccctaccttcgatgggcaactccctccttatgccgactatcccctgcaagaagacgataaagaagatgcccatctaggccctctgctgcccctcaaggatccggccccccatgaatttccccaaccaaacatagtccgccatgtcccgtctccacccgcacccattaaggaatccattcccttcgcaaaagataagggaaagattgatttacttgaaaagaggctgagagcggtagaaggcctcgtcaactacccattctcggatttggcagatctgtgtctggtacctgacatcgtcatccctcccaagttcaaagtaccagattttgataaatacaaagggacgacatgtccaaaaggacatcttcngatgtattgccggaagataggggcatattctatggatgaaaagctgttgatgcatttctt

SEQ ID NO: 78291 - DNA, 474 bp, Glycine max
  unsure (1)..(474): unsure at all n locations
gcaagcttctgtgtccgtgttctgtctctatcctgtatacagccatctctngttctccttcaaagcttctgacatntttttgggcttctgggtttgttcctgctttcctggcaatttgaaattgaatctattggtaataaagagtattgctacagacctacagctactcttgtacacttcctctcacacttaaaataagagtattattttttaagtatttttaatgaatgcacaaacttcaataaatactcttaatcttactaattgagtgtttgagatgtgtgagaaaaatgtagaaacaataactgaataatgttttccagatgcaaataactaatgatttggattactggatttatgagtttacctgtcggttgattattatgatgtcattggcctaacctagtgtgnttggagtagcttattttgagaaaataatttcattttgtaacttcctgagaccgagagctttta

SEQ ID NO: 78292 - DNA, 399 bp, Glycine max
acccggtgttgagagaaacgaggatatgggctttgtgggagtacgtgagctcagttggaggtgggcaaccggggatggtgggtttatgcgcgcattgtggatgtggaaaacttgttgtgcaccatcgcccgaccgccacctagtaccacatgtgatgggtaccccataatcctacaagcttgagatgaggaagtgttgaagggtgaaacttcctgcttttattgttgaccacagagtggtacctggagatatgtcgcgggggtcaggagaccttggggacgtcaggtggggtgctattgcccaaaaccaaacttgaccaatcccgacccaacccgggcatagtcggtcagtgagaacctgtgatgtacctaagcaagcgagctcctggcagtcaacaga

SEQ ID NO: 78293 - DNA, 427 bp, Glycine max
  unsure (1)..(427): unsure at all n locations
agcttctatataagctgaaccattntatttattacacaagtngaggtttattcagaagattagagtttatctcttttatcttagcgagagtgattctcctaaattcttgagtgattcaagaacaccctagctgtatcaaaggactttcacaacctttgtgtgttgccctcgctggaaagagtgattctttccttccaatcatctccacccttgttctttcataccacaattccagaaaatccacctctgtccaaaattatctcgtgaccataactcccattgtacacactcaaattaagtgattcttgagcctaaattgaatttcaaaacgagacctctcacctcgttttggaatcacctcatttggagccctgtagcttccgatattgccatttctatatttctgtccagccaccacttaacctac

SEQ ID NO: 78294 - DNA, 427 bp, Glycine max
  unsure (1)..(427): unsure at all n locations
ntacagcagnatttagtaatgacccactattctagaattattataacttaatgccattaacctagggaattaaaaaaacttaatggctgagtgtaactgaaattgtggcaaccaaaagtcacccccaacagccaacaagtcagccaccatttggtctcccaaaaggctgatgcctatgttgccaattgggcccttattacaacttgaactaaacctaactaaagtccttttagttgattaacccaaaacatatttttggtcagccaactttacaaggattgggccattatttagacaaactaaacactctaaaattgaaacaaagtggtgtcatttagtcctcctccatttgggccatgatacaactcacaaccttggacttttctccttgaaacttgngcttgtattcaaacagtatggacagcac

SEQ ID NO: 78295 - DNA, 455 bp, Glycine max
  unsure (1)..(455): unsure at all n locations
agctngatggctagagtaaacattntctaacatataagtcagtgaaggatattgaatgtgatgctagtagaggagcacttatattttgatggttgtttaaaaggcattacatttgctcctatggatgtctttacttctggactaggttatagcctggaatcataaagcttttcaccccccctcccccgattcaaaatgctgtttagagtatattctagtcttgagtttagtataattatatatacttgaataccacaaacatttctagttgtcctttggcgcctgcatgaatatatattaacaagttacaaatgatgtttaacagagtcccagatggcaactctttgtcttcttggtgtggatggcatactgaccacggttcactgacaggttgttattatatatatattggatatgggctgtgctnntcatatatttcactcggtgtaatataa

SEQ ID NO: 78296 - DNA, 461 bp, Glycine max
  unsure (1)..(461): unsure at all n locations
ggccatacatatacagcacttccgtccctcttaccagttgttggctgactcaagttggtccttaattcagcataaggtatcaatgaattggctgaaaacgaggactttctcattaactgcatcacatagtcttataaactcaatcaaaaatttggttttgacccctccataagggttcaatctaagcttttccaacttatccttgtgaacaacagattcttctttntttgacagagagcaattgaggaatagggatggatggacagagacccaggccaacttgtgttcaaagttcagtgcaatctgagaacattcaatgctctctagagtttcttgctgcaaaatgtctggctttaaaaccagcacacaatctctcaacccangaaggttcttctgaagaatgttacctttgtgaacatgaacaaagggattcatcagcaattntagctggtttatattct

SEQ ID NO: 78297 - DNA, 457 bp, Glycine max
  unsure (1)..(457): unsure at all n locations
agcttataaantataataggtgcctgcttatattatataaaagtaaccaaacctttgactgcactaaatacaatgaaattttatacttagcgaacgcttaatcatggttcattcaggtgcagtagtcctggaaacagcataacatgtaaataattgaacgttcttaggcctctacaaatcgagttggaacaggtttggtacacctggttacttaccaagattatttggaaaaaaaaaatttgtgcgtggcttgaatatgactcaagtaagactacgtgtgactngggcaagttgggctatagctagtatatgccttangtggcttgacatgtaaagntacgtatgccttggggtattgctaggatggccttattctctccctttctttcctcacaatcaaacagtgttaatgatggtaaattcaggtgcaatagtcctggaaacagcacaacatgta

SEQ ID NO: 78298 - DNA, 457 bp, Glycine max
  unsure (1)..(457): unsure at all n locations
ntagactgaccatctgaagatgaatntaaatatttaatagttataatntattaattaatacctttctaactttccttaaaaatacaagaataactgtcaacaaaaagaaagtatcatgaccttttataaattagtcgagtggctagatgaccaatacaaacaacaaatgtaaggagttaaagataccatctgtcaaattcaagagaagaaatatgaatacttaaagaaataaatcaccaacaaaatttatattggtggtgtagttntaaaaaagaattatatcatccatagttccatacaataattaacttctcttttattctctatctttctttatagnattattttttatatctcatattntctctttgtttgtttcatataatactaaatatgtaaaaatttatctaagatcatgttaatgtgaattaaaaaattcatcgtaacttctttgatt

SEQ ID NO: 78299 - DNA, 417 bp, Glycine max
  unsure (1)..(417): unsure at all n locations
cttcaatcttttgggtttaatttgaaattctatcaacggattcatacaatattaaactcaagaaagctcttctttttggtaaacaaaaatcttaatggtttcttcaattgtaaaagaggtgttcatcaaggcctatcctctttctcctctcttggtctatntaactgaggatgtgcgaagtcgggccactatgaagttggtggaagaaggtaatttacatctcatgattagtctgaagggatctcttgtcccctttcatctgatgtatgctggtgatattatgaattttgccaagcatatgaaacgcaatgtccaaaaacttataagattgctcaacctttatgaactctcctcggaccaagcaatcagtcctcagaaatgtaagttntaccaaggtgatatctcatcaagtcatgt

SEQ ID NO: 78300 - DNA, 451 bp, Glycine max
  unsure (1)..(451): unsure at all n locations
cgcagtgaaactntntaagtgtgtgacatatgagtaagctgatataaattaatttaggtcatcttgtaaaatatcaatgatttttcttttttcttaaaatatgtttcgaaagaaaatcaaagaaactttttttacaaagataaaatcaaaactcattcctcttataaggatggaaaacaaatttaaatctaaaatataatgtactatatcttatctttaacgtaaataatgtaacacagaaatcttgacatcgcctaattaaaaatcttaatgtaaatagaataatcttaacggaaataaaaaaaattataaaactaattaaaatcaatccaaaattaaataaaaagcatattctctctatatatagttataacaaaaattatttattaaatcaattaaaaacaaaattaaatcctaagatgtaaagaaaaagagtttaatattttgagaa

SEQ ID NO: 78301 - DNA, 266 bp, Glycine max
cattataggaaaattcttatattacatatgaaaggagatacacaaacaacgtttatctataaattaggtcactgctcaagatggataaataaacccacatagaactcttacatttctcatgcccatccagaccttgttttcgtagctttactatatacaggacaacatgacagagtacctgcacatgaatatcttgtataaattcagttcatataacgctgaaacattacaaaagaaatcatccttacacaataaaaatgggtatc

SEQ ID NO: 78302 - DNA, 423 bp, Glycine max
  unsure (1)..(423): unsure at all n locations
agctntactnntctaaatatatttttagaaatattgaatttaaanttgttgaattgtcacccatcatttatcaactacaataacattctaacatagaacccatcatggatatttaaagcgtataatttgaaagaaatttcctttctcaatttaatcaaaatatcatttgaagtatcacaacaaatttctgatgaagcctagacggtcaaaccatcaatttgaaatatgattcatcttaataaatatgttcggtaatttccaaacaaatgagaactatgaaaaatctaagctcataagaaaatataaacaagtgtgatcaaaatttatgattttcaataaatttcaatcaatattaaagtgtgttccaaaaaatatattaaagaatgtgttattaacatttttctataacagaaatatgatcac

SEQ ID NO: 78303 - DNA, 457 bp, Glycine max
  unsure (1)..(457): unsure at all n locations
agcttgaagaattaaggccgtatcctactattcgtttcccgagggaaatgctataaatagacctgccatatttgatggagtgggacacacactactggacaacccagctgcaaatctatatagaagcaactgaggtagatatttgggaagccatacaacaaggaccgtatgttccctctataatagctggaagtgcagcaatctagaaacctacagccgattgtactgaggacgacacaagattagtacaatataatttaaaggccaaaaatattattacatctgccttatgaatacatgaatactttagggtttcaaattgtaaaagtgctaaggatatgtgggatacactacaagtaacacatgaaggcgcaacagatgttaaatgatctaggataaacactttaactcgtgaatatgaactttctangatgaatgtcaatgaatgtatactcga

SEQ ID NO: 78304 - DNA, 449 bp, Glycine max
  unsure (1)..(449): unsure at all n locations
tgtatgaacagaagtgcctatatcatgttcaaatattcatgttgcttaagaagcctctacaangaatcaagccaacgctattgtgcacgcaattaatggggcaaaacacacgcaaagatcttgatgatggatggctcaaattctcacaaaggttaacctattactctccaagtgaactttcaaaactatcatgacatgtagaggaataacacagatttccaatcacaaaatgtcaagagactttgatgctcaaaacaattacccatcttctgaacatattctataattcatagaaaaatattctcagttgtacatgctaagagaactgaccttaaatattaaactagaaaccccacacaactgacgaaattaacaaaactgacaaaactagttgatgtgccatcattttcttctatttcttaaaccctttttgcaccattttaattact

SEQ ID NO: 78305 - DNA, 428 bp, Glycine max
  unsure (1)..(428): unsure at all n locations
tcattggggttggtgttgaataatatctctaactcatttatgacttcgaagtacgaaaagggcaccaaacttaagttttggttcaagtcaaattntgaaggcacaaatgggttcgttgccattgtttcgctcgaaaaagataaagatggtgtttggatcgaatcaacgaatgaaggtggttttggttccaaatctaagtctaaacctcaatggaggaagatagtattgagtccagatcttgatcttatccacactaattgcacattttcttctcaaaactccatctttttgccccctgccgcaaaccatttcctctttgcgatacccaaactttcttgtagtacccaatttcaagctatgactcaccctgtagagactcttaatgcgttcttgcaacactcacttttacaacatctaattatagcttt

SEQ ID NO: 78306 - DNA, 467 bp, Glycine max
cgttaagtacactacatattattaaatcaaatgcattatgaacaggacataagctgatttaggagcatgcttatacataatacatgaggaagtcaaggatatccaacctcttgccaagaaatgttttcagtatgattgactccctctaatttccaaaagatgctcgcaacaagtcgcatctttaaaaactgaaattctttgatacattaatgaagaattctgaaattattatcaatccgtctaaatctttcacatgaacaaactgcatgaaaccttttgaaaaaataatagatgggtgcatccttaggcacaaagccgttctacctttgaagatactattgaacccgctttttcttcaccatcttcctgttttagccattgctaccctttccatccaaaagctataatatcagtcagttctggtaacatgacagtgctacttggtaactgaacaactccacaactag

SEQ ID NO: 78307 - DNA, 434 bp, Glycine max
  unsure (1)..(434): unsure at all n locations
cagcttgtnaagatactcgtgctcataaaatgtatttgctattcctacctcttctattagagatgagaaaactatgattagaagccaccgagctgcaaccattttatctttactccaattggcttgaacattccgcgtaacaattcatttgaatccaaattcgatccgttcacaaccccataatgggataagattggtccaaacgatctattaatgtagtatatcttactaatgcaaaaaaacaacataacgttacaacttaacatatattttacaatacataacgaacatatcttaaaacagcaattatgtataaaaaagcaaactattaatataatgctattataaaacaatctacgagacgtaacatatatctaactattcataatgctcatgggcctaataagaacacctaaatataactctcaatatat

SEQ ID NO: 78308 - DNA, 469 bp, Glycine max
  unsure (1)..(469): unsure at all n locations
actcaagcttatctatggcgctgcaagtttgatcagcagcaagcaccaatatttgaagtttctctactgaacaactaacttactattacaaggattgtgtaaacacttgggatgcaaaagaactattccaattagcatttttttaccatgaaccgtataaagttcacataattatgacagctaatatatatagtaagtggaaaaacctaactaaagcatgtgaagtgagcttaagcgatacaccacactcctatatgatcaactagtgggccagtaattnttcttatgctttctatttcaattatatttgtgtagacatgtggaaaatgaaggaattaaaatataatattataatagcactgtattagataagccacaaacacaacttccacacaaactaacataaagttgttcagaatttcaagtcagtctttaattgcaacttgtatacctataacagataacatca

SEQ ID NO: 78309 - DNA, 438 bp, Glycine max
  unsure (1)..(438): unsure at all n locations
agcttgctaacccatggaagctcctaatatctcctacactatttggggtgggccattcttggatggccttgattttctcagggtccacttggaccccatttctaccaactacaaaacctaagaaaactatattatctacacaaaagatacacttctctatatttgcatagagggtgtttttcctaaggactgaaagaacttgcctgagatgtcctaagtgatcatctaggctcctattgtacactaaaatatcatcaaaataaacaactacaaatctacctatgaaatcccttaagacatgatgcataaccctcataaaggtgcttggtgcattagtgaacccaaaagacatcactagccattcatacaaaccaaacttggtcttgaaagcggntttccactcatcaccctntttcatcctganttggtgataaccac

SEQ ID NO: 78310 - DNA, 468 bp, Glycine max
  unsure (1)..(468): unsure at all n locations
ctcagcctttggcaaggaagaagaagaaagatgagtacgaaagatttcttaaagaattgtaatgttgtaaaggtttctcanaagttgtttaagaagttgtgtgaatgcaagtcaaggtcttgcttttataaactcttcatgtctggtctagaaaaccattggaagagttataaccttgacaaaatcatgtcaagagttacatctcttgaccttttattcaaaacttgtcactggtaatcgattaccataatcatgtaatcgattacacaatgcattntatgaaaagatgtgactcttcacaattgaatttgaatttcaacgttcagatacactggtaatcgattaccaatatattgtaatcaattacaccatttaaaaatcatttggaacgttgtaaattcagttaaaaactttttgaaatcaaattttatcattggtaatcgattacaggaaactagtaatcgatta

SEQ ID NO: 78311 - DNA, 409 bp, Glycine max
  unsure (1)..(409): unsure at all n locations
gcttcttgaacgggatcaatatattcattggcatatattaaaggatgaagaggtggtacgtgatctattttggtgtcaccctgatgcaatgaagttatgcaatgcatgtcatttggtggttttgatagacaatacctacaaaacaaacaggtatagctcccactacttgacttttgtggggtgacaccaacggggatgatattctctgctgggtttgcataactggaaggtgaatgtgttaataatgttgtatgggctttagaacgaattcaaggtctaattttaagacgtgatagcctccctgtagttattgtgaatgacagagacctaacattgatgaatatagtgaatacttggctccccgagtgtacaaacttgttgtgtaagtntcacatcgacaagaatgtca

SEQ ID NO: 78312 - DNA, 472 bp, Glycine max
  unsure (1)..(472): unsure at all n locations
actcaagctgaggatcatggngtacccatcacatgtggtactaggtggcggtcgggctatggtgcacaacaagttttccacatccacaatgcgcgcataaacccaccatcccctgttgcccacctccaactgagctcacgtactcccacgtagcccatatcctcgtttctcttaacatcgggtccccatcaatcctcccaagcttccacaacatccaagcaaaacaacattcaaacagcacaagctatcacagccaagcaaaacagagcaaaggcagaaaactctgctcaacacatcaaccaaaatcacagcttttctcacttaaagaccacaagaacaattccttcgatcccaattgttaaccgttggatcgactccaaaattttactggaagtctatggtgcataagtctacatttgtgaccgtgggatctactaacaaacatctagaactcattctgtactactctttc

SEQ ID NO: 78313 - DNA, 431 bp, Glycine max
  unsure (1)..(431): unsure at all n locations
gcttcttatccaaggcactctcttggtggtgaatcttctcctttcatggcttattctctagnggatggagcctcctctcacctcttctactttatcttctgctgtaactccatgactgaaaatcaccattgaaggactttattgaagctcaaagatccagcctccatagaagcttctcaagcaaggttccatcaagtggtattagagcacaagatcttcaagtaggtgctcttttaacctcaattaattttcagctntaccttctcttccattgttggttcttcatttttctccatgtatctcctcacatgtcttgtgctgaatgttnttaacatgattttttagaatttccaccgattaaacatgctatagaagctagatttngatttctatggttcaaataccttggtctagttcttgaaccatgaatt

SEQ ID NO: 78314 - DNA, 327 bp, Glycine max
gccctgataccgttaactagtcaataggttcttgagtgggttcagggcatcaatattgtatttggaaagacctaaaagaaggaaaaacgtaaaacttccatatagaagaagagatcgatattgtttgatcttccatactggtttgatctagatgttacacattgtattgattttatgcatgttgagaaaaatgtatgtgatagtgtcatcgacacgcttcttaactttcaaggcaagagaaaagatggtttgaatacttgccaagatctagttgagatgggtatacgagacccattacatccaaagtttgatggtaacaaaatatac

SEQ ID NO: 78315 - DNA, 436 bp, Glycine max
  unsure (1)..(436): unsure at all n locations
ggatccttgagtcaccgcggctgcagctgccgccagctcgccaggcgatcttgttgcttcctccagaagcaacagcctcctggaggaatcttctggagggcccaagtgggcctgtgttctatttgcacccccatttttactaaatacaccccctgcgctttttttggtgattctttttccgtaatgttacgaaactttacgaatntcgtaacgatacttattttccttccgcaaggttacgaatccttacggattatgtatttactcttttttagctttcgaagaagttacggaaactcacggattgcgcaaaaacacctcttttcgacttccgccacattacggaatttcacggatcgcacaagcctgcttccttttgatttctgagacgtctcaggacttcatttattgtgcaacaaaggacgccaagtatctc

SEQ ID NO: 78316 - DNA, 421 bp, Glycine max
gagagagaccagtcacgagctcatagcatggtcttgaaagaggagttagctgcttgctcaaggtccaaaagaaacttgtctcaacgtttatgcgagacagagaccaacatgttagctatcatcagcaagtaccaagaagaattaaacctagccacggcccacgagcacaaagtggcggacgagtatgcccgggtgtacgcggaaaaggaggctagaggaagggtgatcaactcgttacatcaagaggctgcaatgtggatggaccgatttgctcttaccttgaacgggagtcaagaacttcctcgattgctagccaaggccaaagcaatggtggacacctacttcacccccgaggagatccacagacttctcagctattgtcagcatatgatagacttaatggcccatataattagaaacc

SEQ ID NO: 78317 - DNA, 449 bp, Glycine max
  unsure (1)..(449): unsure at all n locations
aacgttgatgtcaaatgcatactattnttcntnctagtttcatttgtacgtagcttgtgtcttcttaacaaataaggcatgcgcgatggcccttaacacaatatccacccaaatttttgtatgctggaaagtcattaatggtacaaaataacattacacacaacttgaatgtctcatttcaatacccatcaaacacaataacccccttgttctacaactttgtcaagtcttcaatcaatggactgacataaacatcaatgtcatttcttggttgtcctcgcgttgatatcatcatagacaacatcatgcattttcnctccatgcacaatcaaagaggcaagttgtaaattactagcaaaacagaccacgcactatgttgangtgctaaattgccataaggatgcatntcatccttagaaagtccaatcctaagatttttgtctcttttc

SEQ ID NO: 78318 - DNA, 438 bp, Glycine max
  unsure (1)..(438): unsure at all n locations
ccttcgtattggatatatgtgagatgaatagaacttactaccatttgtttttagaaacacaagtgaaattactatcaaacatccgaattaggtcattccaaattatattagtataatcactaattagtcttgaatgctgattattcaacggtcaaatatttaaaatggagaatatcatctcttataataatcttaatcaaatttatacctaaaaagaaagtaagaatatttttaataaaaataaacatgttagagtgtatttcttcttatttcatttataatgtcaaaacaataatatgttttaaattaaactaaagacatatccacttacttatataatcttaaaataacttcacttctcaaaactaaaatacatttatcctatgtcatgtctcttaatcngtccatcaacacttaatatcatgcaactcataaatc

SEQ ID NO: 78319 - DNA, 481 bp, Glycine max
  unsure (1)..(481): unsure at all n locations
agtcacctgaggcatgcaagcttctcatggccttnttatgactccgaatgaatatttagttatgatatgtagtggcacacattaatttgaagcctataacattaaataatgaagcaaatactctcaagcaggcccaaaacaacaacagtacatgtaaatgcaaaagatagcagtgtttgactgtttatatatactatcaaaacttggatttaagttatgggtccaactatatgacaccctcctttatattcttcataccacttgtattttttaaactcctatactacccatgtccctttgtacctgcaatcccttctatttctctcctaccctctagtctctcccaaattcacacccctaaaccttgtgatgctcttcttcttcttcataccgtgcattaaggtgttatcttatctctcttctctctagnagagctcctgaacttcaccccttgtcttcctcttcatatcggtgtactttg

SEQ ID NO: 78320 - DNA, 372 bp, Glycine max
  unsure (1)..(372): unsure at all n locations
nggactggactcaaatctagtgtttctcattttaagatctttggatctatttgctttaagcatgtaccagatcaattgagaaagaagcttgatgataaaggagaacatatgaaacttattggttatcaccctacaggtggttacaagctatatgatccaaggaataagcaagtaatagtgagtagagatgtggtgattgatgagacaagacgatgtgattggaaacttgaaactgggagtggatcaaccaggatgatagttgatactagtaatcctattgaatctgaaatgaacacaagtgcccctacagaactcagaagatcaacaagggtaaggtagctttctcctaacctgaaatgttatgatattgta

SEQ ID NO: 78321 - DNA, 391 bp, Glycine max
  unsure (1)..(391): unsure at all n locations
gctttcaataaatgtatatattcattattttctctctaattaaatacaattaattcattcaatttcacttttccgcaacatgaatgatctgatccagcatcattctcaagacaaacaacaaatcatcgatacaaattttgaggcctgacttggaaatagcctggatatataacatgataaataaatacgatncaacatgaacatgccaatatggaaaattttaaagaaaaccctatatgtggtatgttgaattcagtacatgatatgtgaggttgttgagaaaattctgtatctataccaagtataaaggctatagattcaataccttcatagtgcaacaaacgcacagtngcaatgggctcttcaagcacttatggctgataaaaataat

SEQ ID NO: 78322 - DNA, 434 bp, Glycine max
  unsure (1)..(434): unsure at all n locations
tcttggaggttngatggatcctcctctaatgtataggccttataattgggcccataatctttagcaattcttgctctcttacctcttcgaggctctatatctagttctggttgtgcaagattttcactactaatagcaggaagataactggatgaagtacccccactatcccttaatttaaaaggaaatttattttcataaaaatcagcatcatttgactgtatgatcacttttgcgtttaggtcataaaacctatacgcttttctattaatagcttaaccaatgaacacacattcataggctctacttgcaagtttaaccctcttagggtctgggatccttacataggccagacatccccaagttctcaaataagacaaatttggttgtcttttctttaatatctcataaggagatgtctngctttttgattt

SEQ ID NO: 78323 - DNA, 416 bp, Glycine max
agcttgtaccctgagggtgatgcatccagtatattggttgaagaggttggtttctaaatctatggtcctgtaaaaccttgcacactgccttataaaaggaaataccgtgtacttgatggcaatgcattaatttttgttttcagctagatgctagagttttgataattctttctatatgagtcacaggatagggggccagctacttccttggtgagttttggtcgaacaattgattaccatcaatggttgatctttttcaccgtctttgcagatttctgacatgagcttattatttattagttctttattatgcactttgtcgagcatgtcctttcttctttgtttctctcatagatggccatatacacgggtctaaatgaataccaatattttctgctttgcccaaatcttatttt

SEQ ID NO: 78324 - DNA, 450 bp, Glycine max
  unsure (1)..(450): unsure at all n locations
tagctntatggtttaaaagggaagactggtcgaatttttatctgatctatctgcatgggccaaacatgtatgtattaatgtttaatacatcgtaagctacacagataagatgtagccactgatacgtgcacttttaaatgctctatagtgcttttaaacatactcaattcaactgaattaatatatatagtgtttcttaatttagttaggagactttaaggcagttgggaaacactttgtgatatacaaaactctctctgtccttgagataaaggattactctcattaaattggtaatggagatcatttctttctggactctcgtaataggctctttattcttgtacaggtaatactgaatccttatcttggagaaggagggaatctctggttcaattaatctcatctcaatttatgggttattcttcatttgagtgaattttatgctat

SEQ ID NO: 78325 - DNA, 354 bp, Glycine max
  unsure (1)..(354): unsure at all n locations
atagatactaacgctgaaatactagacgancataatttgctatntcttttaattttatatttatgcgcagacggtcgatgacnattgtatctatatacctttccacccagatacttctcgtctgtattttcttctggaaaaccaaatgtttactatactcataaaaaaaaataaaaaatcgttggaatacaccaactggtatgctgcattcataaaattgcatattcagtcaattttcttactcaagtgggaaacaaaccctacttttagaagggcctataaactgataataacttggatatacatatatctatgtgggagggtgccattaagacatcggaaacctttgcctat

SEQ ID NO: 78326 - DNA, 416 bp, Glycine max
  unsure (1)..(416): unsure at all n locations
agcttcttctntcttctctagagttcttctcttcttccctaagctcttccctgaactcgcattctccctctctgtgagtttctcaagcttccttagggtctcatatatcgcgggaggttccctagccctcgaaagctaggtatcaccgggtcatttaatgaataacaaagctcacctaaagaaacaaaggtttgtcattggtgcacacttcatattggtgagacaaaagtttgctattgttttacaatttacacttcatattatatttcactgaatgtatgtgcttatatcgaaacctccgctactaattttatttgcttacattaaattcagatggcaagtgcttgctacagggtaccacttttacttgaaccggtttgtgggtntctcaagagaaagcgtgtcaaagtatggag

SEQ ID NO: 78327 - DNA, 462 bp, Glycine max
  unsure (1)..(462): unsure at all n locations
actggatgcgtnggtcaacttggtaacccagctggccttgaatcagaaatctgtacctgtcgcaagggtttgtggtttgtgctcctctgctgaccaccatacagacctttgcccttccatgcagcaacctggagcaattgagcagcctgaagcttatgctgcaaatatttacaatagaccttctcaacctcagcagcaaaatcaaccacagcagagcaattatgacctttcaagaaacagatacaaccctggatggaggaatcaccctaacctcagatggtccagccctcagcaacaacaacagcagcctgctccttccttccaaaatgctgctggcccaagcagaccatacattcctccaccattccaacaacagcaacaaccccagaaacagccaacagttgaggcccctncacaaccttccctcgaagaacttgtgaggcaaatgactatgcagaacat

SEQ ID NO: 78328 - DNA, 405 bp, Glycine max
  unsure (1)..(405): unsure at all n locations
agcttactccgcacaatggtggcctcttggatatgaagcggctattcctcattctaatgacgcatggacacttatccctgacccaaatacaattcgtgccaaaggtcggccaaaatcaacaaggataaggaatgagatggattgngtcgaaccatttgagcaccgacaaaaatacagtatatgtggagccgataggcataacangcgtcgctgtccaatgcaatttgagcgtggaagttgttcaaatcattgatttatgtatgttagtccaatgtattgaattcgtggggttcaataaattcgttagttaaaaacattacttattttggtgtgtgtacatcagctatttgtggtgttcaatgaattcgttacataaaaacataactcaatcctacaccagataca

SEQ ID NO: 78329 - DNA, 471 bp, Glycine max
  unsure (1)..(471): unsure at all n locations
cacttcaaactcagcttatagaacacaatggcctanatcatntccaaatatgcatgtgaattangatgcatcaacaagaatcaagccaaggctattgtgcaagcaatcaatggggcaaaacacaccaaaagattatgatgatgaatggctcanattctcacaaaggtaaacttatcactttcaaattgagctntcaaaactatcatgacatgtagaggaaaaacaagggattcaaatcacaaaatgtcaagagacttttttttttcagaacaattacccatttcttgaacatatcctataattcaaagaaaaatatgcaaagttgtacatgcaaacagaattaacctaaaatattaaactagaaacccaacaaaactaacaaaactagcaaaaccaaaaccaaagaactcccccccccccatacataaacaacacattgtcctcaatgtagcacaattaaaagattaaaag

SEQ ID NO: 78330 - DNA, 440 bp, Glycine max
  unsure (1)..(440): unsure at all n locations
tctgagtcacctgcggcatgcaagcttaccttaattataattctatcattggcacttcttttgatttgaatgagtttgtcaataaattgaaccctatacctgaatgattctctctagataccttgtttagattctatgagagcctatagttcaaggaaaatttaccccacatttgggggagtggaactaattgggatgcaaagaaagagagaaagcatcatcacacacaacacataagctgtatgttaaaaaaaaagagaaaataaaagaattatgtgtgctgatgtaacaaggtcaaaagtaaatgaaagtaaaactatatatttatcatgcaatcaataacttttgttgcatacacctttgtacatagtcactacatgtcattgtcacttgagaacaagtgagctattctctttttgcttgatgacangcaaaactat

SEQ ID NO: 78331 - DNA, 439 bp, Glycine max
  unsure (1)..(439): unsure at all n locations
agcaattcagaaggacattnntagtcttaatataatgtcattccanattacctaaggtgaatttttaatataatactacagtatggtctatagaaaaatatgggcacttaatagatntttatcaccctcgtcaacagtagaagatttggatatatttcttgtacaataatagtagcaaaagtgcaaaactctcatcaaaagaaaaggtagcagaactgatgtgtcagatatgtctttcaactagtaaatggtcattttctcatgttgggtagagattatgtgcatctgcagcacttaagtttctaaccatggaaatccagctttttgattggtgtttgtttgtgacctctcagtttcctgatcttatttccccatgtggatgatatttttcttaagtatatctctatcaacctatctcttgtaaaaattattttattca

SEQ ID NO: 78332 - DNA, 468 bp, Glycine max
  unsure (1)..(468): unsure at all n locations
cgcgatccttgagtcacctgcngcatgcangcttgtcacccgattaaataaatagtattgtatgtatagtctattattatcactatgcactaatcaacattngaaaatcgctgcagttatcagacggtccatattgaatcccacaacacactaatagtgactggttatcaattgaaatgagtcttttgctataaatacaacatatatcttttccagcgagctgatgtctttgtttacacgtgacaaagttggtgttagagtactaatgacaagtacttttataagagactttacagttgtcttcataattataagcacccatagcctagcgtacgagcatagtgtaggttgcatgcatacacgaaattgaggcgcttgaaatgtaaattntattgtgtactcanattaaaatacgcatgccgttgaaatggctatctgttggggattanntttttttgcaattgtgta

SEQ ID NO: 78333 - DNA, 442 bp, Glycine max
  unsure (1)..(442): unsure at all n locations
tggacacatgaagaaaaagtgtccaaagtacgccgcatgacgtgtaaagaattgtaaatatctcgctcttgtttgctctgaagataatttagcttttgtacctaaaatatttggtgagtggactctggtgctactactcacacaagtgtatccatgcaaggttgcctgtcgagccgactgtcaaatgatgatgaaaagttcatatttgtgggtgacaacaaaagattgcgatggaggttataggaacttttaaattacacttgaaaactggattnntattggatttatttgagacttttgttgtatcgtcctttatacggaattcgatttcaatttctaatttggacaaatttgatttttcttggtcatcgtgaaataataaagagtatcaacccaaaatcaaatttgatttgtccggctcttaattgatatctatatatgt

SEQ ID NO: 78334 - DNA, 301 bp, Glycine max
  unsure (1)..(301): unsure at all n locations
tgcagctgatgacaatcactctggngctctttataaagtggagaatggaggataggcgaacagcgctaggcaatcaattcgcgggtctcccgactcgttggtggaggatgcatgaatgacaatcaactcatggggctcctaataaaagtggagaatggaggataggcgaacagcgctaggcaatcaattcgcggggctgcatactcgatggtggaggatgcatgaatgacaatcaattcatggggctccgaataaaagtggagaatggaggataggcgaatagcgctatgcaatcatttcg

SEQ ID NO: 78335 - DNA, 420 bp, Glycine max
  unsure (1)..(420): unsure at all n locations
ctgaagatatggtcttcaccgacgaaaggatcaaagtgggtctaataagaggcaaatctgatcatcatgctctgataaatgccaaanaaaaaactatggcaaatgaagagggtgagaatgagggagaagcccatgctgtgacttccattcctatatatccaagtttcccaccaacccaacaatgtcattactcagccaataacaaaccttctccttacccaccgcccagttatccacaaaggcaatccctaaatcaaccacaaagtttgtctaccgcacttccaatgacgaacaccacctttagcacaaaccataaacaccaaccaagatatgaattttgcaacgagaaaaccttataattcaccccaattccagtgtcctatgctgacttgctcccatatctacttgantaattcaatg

SEQ ID NO: 78336 - DNA, 432 bp, Glycine max
catgcatcctgctgattacatgacatatgttgattattctgtgggaacgactaaagagtaacatgcgataacgacatgtgtgatttaaagacgcaccctatctcgcttgactagcctcttacatagaccacaatgaaatcaaattcctactcttgagtgagcttccctaagctcaaacaaagaacaatgagtagccatattccacctactgtcaaatttacagtcagaaataacacttttttcttaaataattccactcaggtgcatcacgcctcaatttctggcactatacctagactctctgcttacctctcctatcacaaaagaaggtgagctcggcctcacgtttgcatcacattattttcaaaacattatcgaaacatgttatcaattacattatacaccagaacatgaaactattcttatactgat

SEQ ID NO: 78337 - DNA, 448 bp, Glycine max
  unsure (1)..(448): unsure at all n locations
cgtatcnttatttaatggctgggttattctattgttcctcttaatgttagatgaattcaatttaaaaagaaattctattgtgtagactgaaattctatatttgcggaagtggaagtctctgtcaatttaattgtattcctatcataatcctatatcttactttaatttcttttttttttctcacactgtatatgagcctcttctatatatgtatattgggtttttccaagtgacactctttctgatatagggctttacttgctataaggtcagaacctgtcgtttcactttcatggttgaatactcactcttttcatttcttttcctcatattagtagtcaaatctatgtatacatgctatgaattacaattcattcattttttggtgcttctgtttgattgagtaattaatttcatccaaaggatagagacactaacaatgcccatt

SEQ ID NO: 78338 - DNA, 457 bp, Glycine max
  unsure (1)..(457): unsure at all n locations
tgatgaattctagttaaagactgaaatcaggactttgcttctcagatagaccacaatctcctacccaagaccctctagtttctattccttgttcattgtaattattgtgttntaaatcatccaagtttcacataggttacaaaattgatgcaaggcatgggaggaacaataaaatataagattaagaagaaaacaacattgtcttattttttctatcttctttgttttccttgttgaacttatgttctggaaaatttcctagagatgttagacaggaactgcaatttatattgttatttcaaatcatccatggtgtgattgttaagttggttcacgaatccttggtattactagcaagatctaaacccttgtcaattntatatgaaccctcatagaataagaagctttagtgtcttgaattcagtaattattacctatctgaaccagtcaagtcatg

SEQ ID NO: 78339 - DNA, 351 bp, Glycine max
ttatattttaccatgagacaactctttttcttttatatttcacactcaacagctcactgggaaagatataataatactaagctcttgcgatatcgcaccatagactcgattcatgatgccttcatccttttatgcaccaaggaacacacatatggtttaccaatcactgatgtcggcggaggaggattagtgagccatttgaaccacaagaaggagaagcaaccatggaatatttccctgaagatctgctctctctttctttctttgtataacgaacgtatgcggggttgagttgcatatttagatatagacatttgacgttgattattatcttctggaagcaccataatg

SEQ ID NO: 78340 - DNA, 434 bp, Glycine max
agcttcatgatgatgaaccaaataattttgatgatgcctaaagcccaagtaattcattcaagacttcaagatcaaacatcaagaatccaatccaagattcaagagaagaaatcaagaagcaacaagtcaagacttcatataggataagtattaaaagattgtttcaaaaaccaaatagcacagctttgttttacaaaagaattttctcaaattttctaagttaccaaagtgattactctctggtaatcgattaccagttattagtaatcaattaccaatgaccagtttggttttcaaaatgttctcagatggtttataacgttccaaaatgactttcaaatagtgtaatcgattacactatattagtaatcgattacaagagaatctgaacgttggaattcaaatccaattgtgaagagtcacaactttccata

SEQ ID NO: 78341 - DNA, 416 bp, Glycine max
ccttccacagggttccaatgatgtgttgctcatatattagtacttgtgttgtgagccgtatatgaggaatctcatgaacaagcccgagagccctcccaatagtcgtgcttacactcctggctctgaaagtcatgccttgctgatttttttttattttgccaattatataatttgagtgttgaaaaaattatttcgcttttgtagtttagagactggaaacttataatttatgaaaggtgaacctggccttcgtcttcgtaaatcatgaactaacctttgaaatgtgaaccttgttaggaggatgcatgcttgtgatttccgagactattccgttaagtgaaagagtttaattgaaatgagcactgcatactttgagaattccaacgaattgctgcgtattacgaagcgcgatttat

SEQ ID NO: 78342 - DNA, 461 bp, Glycine max
  unsure (1)..(461): unsure at all n locations
agcttggagaggatgcttcaatggaggaaaatatatatggagagaaagagaggggggagcatgaaattgaaggaataaaaagggaaagaagttgaactctgagttgtgtctcacaagactctcattcatcaaagttacaacaagtgttacacatgcttctatttatagactaggtagcttccttgagaagctttcttgagaaaacttccttgagaagcttctttgagaaaacttccttgagaagctagagcttatctacacacacccctctaataactaagctcaccttcttgagaagattcctaaagaagctacaacatagctacacacacccgctataataactaagctcaccccatgccaaaatacatgaagatataaaanaagtccctactacaaagactactcaaaatgccctgaaatacaatgctaaaaccctatactactagaatggccaaata

SEQ ID NO: 78343 - DNA, 472 bp, Glycine max
  unsure (1)..(472): unsure at all n locations
ttacggacacttgaaactcagctttcgatattcttgacccgagtggtcccattggtttctgcattttattctcgcnttggttactttttataccccctgttgacgtgcttaaaccattttacttaagacattcctcgcttaacttaaaaataaaataaatttccaccgaacgtttgaattgtattatccgctaacttcggttaaaatgaattccgaccgttcggtcgtgccgtaaccacattggaaatcaaaaaagaggtgaaaaataatataataatcaaaaaaacatcttttagtaaaataaagcggaaaatcaatcggacgttttctctttgggatttctcattcttaaatcgaatgagtaataactaaagtgaaactaaggctaaaatcaactcgcctagtcaagctcgtccatataaataggcttttgaaagttgcatttaatttctcactaagaaaatggatcatt

SEQ ID NO: 78344 - DNA, 443 bp, Glycine max
agcttgtacctcaattggtgccaggcaccatttccactatctgaggacctactcggttcaaaaacaaaatatagttttggttttcaattataattacaaaatatttcactttattttcagtttttcattccaattcctatttccaaacattcatgaaaaaaattgcaccagccacctccgataaactttaaacaaaaaaaaaaactaaattcgcgtataataataaaataaattcaatagaagtttacacgatcattcactgagtctccgacaacaagcattaccgaaattcaacaattaccttccataggttgaggaccttctggcaagtcagagcgaggaaccagcatctcatcgtgctcctgctgctgctgttgctgctgcacacaacacaacaaaatcgaacatcaaaaactctataaatcgcgcaatataaaaatcac

SEQ ID NO: 78345 - DNA, 461 bp, Glycine max
  unsure (1)..(461): unsure at all n locations
ccatcttcacatncagatacttactataagggccattttcttgagcttggtcatagcagaaaattgctgtaagcgacttaatacagcagaatcaagtggtttgtcaggagctacaccatcaacttgaatccaaggatgacctacagagagtcaaacatatataagaaagaanaaacagtgtttcttggagtgccatattatttcaaaattggtaatgacgattgtaaaatttatgtcagcttgggctttcctatgaaccatagaaatggttaatccatgatagcaccgaagaactattatatttcccctattaaggagaagccccatcaatcttgtgatacaaaaagggcataaccaatacacaagcatcgcatgttgcagagacattatcttagcgctaataatactagtaaatgtttctatgggtatatacatacacatattagaatgttctaatgtac

SEQ ID NO: 78346 - DNA, 452 bp, Glycine max
  unsure (1)..(452): unsure at all n locations
agcttcacgatgaatcaagattgattctaagtagttttgatgataacaaagatgatgacaaaaagctcataagttaagaatacttcatgataacaaagatgatgatctcaagaatcaaagaatgagttcaagattgaatcaagtacacttcaaggatcaagaggaaagttgaattcaagtatcaagaatcaagtttcaagattcatgttccaagaatcaaggtcaagattcaagactcaagattcaagaatcaagagaagactcaatcaagataagtattaaaaaggtttttcaaaaactgagtagcatatgatattttctcaaaaccttntaccaaagagtttttactctctggtaatcgattaccagtagcaaaatgggtttcaaaaaactttcaaactgaatttacgacacttcaattaattntcaaatggttgaatcgagtacaagta

SEQ ID NO: 78347 - DNA, 387 bp, Glycine max
  unsure (1)..(387): unsure at all n locations
tgcctaattaacctgaaattaagaggaaatgattatttatctcacaaaatgggagtactaagtatttattacctatctttaacaaaaagtgattacaacattacaaaataaccatcaattggaggagtttgatacaatttacacaggttntatacacaacagttagtcgtattcatcaactaacaactcccccaaatttatagttttgcttgtcctcaagcaaataaagaacagctcactggtccccaagtgacaaatacatgcaatgactatgtacaaaggtgtatgcaacaaaagttattgattgcatgataaaagaatgaagcaaaatgccctcatcacttgtctnttacaaagcatgcagttattcaaagagaagaataaaat

SEQ ID NO: 78348 - DNA, 456 bp, Glycine max
agctagaagacaagaaagtctgcttggcctattcagttttcttgatggaaagccctccacccatcatcaaaatataatttctctccaacatatcgtgttttgacatgccacactctcccactagcatttctcaggatcacatcctcagggatccttccttgtaactgtggcaacctcacaaaagcatttggtataatctgcaattcagataatagaacaacctcctcttattatcatttatcatacactcagcacaagatcaataccttggtaatcaaccactaccattacttttctatgccacacttctaaatcattatagagatcagctaaatggcatatctcattactttcagtaattatttgtccatacaatttatattcaaagtagtaatatgaggatgtcaatattatcgctgcagaacatataatcaagaaaataataccattctctca

SEQ ID NO: 78349 - DNA, 464 bp, Glycine max
  unsure (1)..(464): unsure at all n locations
gcttaactttagttaacaaacaataattntcataatatntattgttatttaattaacatgtgaataaataatataatttgttcttccattttcattcaataaaaaagtagttatacctgataagtttcttgaaatttaaaaatattaatagtaatttcttatttttatatgaaagtatatacagattacatttttaaaatatattacaaattcagtttaatggttacatattgattatgtaaaaaaaattatatcatcatttaatcacaaaatatcgttcacataattttaaaattaattatcataaaaatcaataaatttatcatacatgataaattctaataaattgtaatttgataacaaagtaaaaaatattttacaatgttaacaaataacatgttttctctaataaatatgtattcacacaatcataaatataaaatacatttatattgttatttaat

SEQ ID NO: 78350 - DNA, 440 bp, Glycine max
  unsure (1)..(440): unsure at all n locations
agctagaagaagagcttgatgaagttttttcttttacatgctcaactctcttaagnggcatttgtattgattgttgtattgtgtgttgcatcttantctctatcttttcatatgtgcatcatgcatcatcatgtcggagtaaggagaaagtttgtaagttagaaaatttcttcataaggcaaaactctctattttaattgattacaaccttacagtaatcaattacacaagttgttttaagcttgtagagaaatgtctcggatcaatttaattcgatacaagtttatcgtaatcgattacataattgtttttgagacgacgattganttatcacgagtcttaattaattgataccatgtgaataacgattcttctcttttataaggttcagaaggatcagaatctattgcccgtgacatctattcagttggattgctgaa

SEQ ID NO: 78351 - DNA, 480 bp, Glycine max
  unsure (1)..(480): unsure at all n locations
cgtgacctatgatactcagctnttaattaatgcaggaatcatgacttatgcctaggaatcgaaattntggttttgaatatcaaaaggtataatattaggacatgtttgagaggttttattagaatttaaatttggctgccccatgaggaatatcttgcacctaggtagcatggaaaatacctttcaacggtatgtatatatgtgaatatatatggcataaaaataccttgcaaagtgtgaatgaatagcaaaaaatgcctttcaagatatgtatatttgtggataggtagcgtaaaaatacctttcaaaatatgtatatttgtggataggtagcataaggagcctttttttaaaaaaatgtacccatgtcaaaaatggcacgagtatgcttcccacatgaatatatgatgtggaatngcccctcaagtgtatatagatggcatgaaagttccttctcanatgcaagtgtgtgcatgacat

SEQ ID NO: 78352 - DNA, 432 bp, Glycine max
agctttggagaaccatgccaatcagaatgctatactatatatatatgggaatagaggttacaatggcgtgaatgacggaccgaggcataaccgggttgagggagtaaagctcaatgctcctcccttcaaaggtagaagtgatccagatgcctacctggactgggaaatgaagactgagcatcttattgcctgcaatgactacactgatgcgcagaatgtcaagctagcagcagctgaattctccgactatgcccttgtttggtggcataaataccaaagagaaatgttgagagaggaacgacgagaggtagatacatggactgagatgaaaagggtgatgagaaaaatgtatgtgcccactatctataacagaaccatgcgtacaaaactccaagggctgtcccaagggaatttaaccgtggaataatatta

SEQ ID NO: 78353 - DNA, 464 bp, Glycine max
  unsure (1)..(464): unsure at all n locations
gacacttaaaactcagcttagaacattttttatagctganaacttaaacccaacgttcataattttaacattcacatgcactagccctagccttttcagaactgcaaccctaaacactgcgcctactcacgtttagactgccatctgcagaacagcaaggtcacatgcttcaaggtgtaacgcaagtgccaatggcgggactgtccacgttggcacgtcccgccaacaccaatggcggtactctctcttatcttgccagctctaatggcgacatgctcctctctcctactcagccctatcccgccagtacgaatggcagtatgggcagtgactgggcgcctgtcccgctgcttccaatggcggcatccccttccgccatttgcagtggcgtttccaagcttcacgccagtaacaatgacagcacccacgtaaataagagacccncctctgccattgtttaaaac

SEQ ID NO: 78354 - DNA, 438 bp, Glycine max
  unsure (1)..(438): unsure at all n locations
agctntaaaggcacaaagaatgtaactacctattgcagttaagccttanttttggcagtttcaactgcctcgcttagcgtgttgactcgctaagcgagcacaccatgacattttgagtttcacactcatgcgcttagcgggaaaactcgctcagcccaatgccaaaaaaattgaaattccagaaaaggaattgggcttagcgcgacaagtcgcgcttagcaagttctgtagctatgattggcctgtaactctcgcttagcgggccatgggccggcttagagaattatcatgctccctgatgttgtagtgggttgcacttagcacattcttctcgcttagtgcaattccaaacccaaaagttatttgggcttagcgggctgacccgctgggcctaattctcataaatgatccaacagagaggaaatagtgcttatcgcg

SEQ ID NO: 78355 - DNA, 446 bp, Glycine max
  unsure (1)..(446): unsure at all n locations
ctactatgcaaagaataaccaaggaaaattccttcatctgacttagcatctaatnttcctatgttttcttttccattgtttaatacaaaacactngcaaccaaagacatgaagatgtgagatgtatggtttcctaccattgaacaattcatatggagttttctttaagatgggccttattaaagccctattcatgatgtaacatgcagtattaacggcttcagcccaaaaatattttggaagaggaatatcattcattaaggttctagcaatttcttccgaagacctatttttcctttcaacaactctattttgttgaggggttctaggtgcagaaaaattatgttcaatgccatgcttttcacaaaataaatcaaattctttattttcaaactcacccncctgatcactcctaatagatataattttaggaattttcttattttg

SEQ ID NO: 78356 - DNA, 302 bp, Glycine max
ctattccttcattaatatatacgtgaggcgtacagggcgtcacaatgggggttatcacatttgagtcatatataatcatgttacagttcacagaaatcagcaatagatatgagattttaagtctacttgatcatgtttaatgatttcgggcatctctactgttgaattcacccatgctcattagaatggtggaagcttggaactaatgaagatactatagtttcatagttgtcatggaagtgaacttaatgaaacatatatcacaccattgtgaatgcatgactacatgaccttgatgatgt

SEQ ID NO: 78357 - DNA, 435 bp, Glycine max
ctcaagctagctgctcgagccatcaaatatgttttccttggatattccacgttacagatatgttaccgatgttactctcctattcacaatcattattatatctgtgcacatgtaactttcttttgttgaagaacaaccatactttgctccctccatggatgagtcccctactctctaagaagatgtttctgttccttatcttggtccatcaccttctttgtacgaatcacagtccactgtccattctgccataaatattcctaacaatcttccacttgagttgactcaaagatcacccatcgtatatcgacatcgtccttacattcctgatgtataacttgaatgtaatgaaagactaactgaatcatgtcctactccagtagacaagctgaccatggatctacctgaagagaatcttcgacttgccattgctct

SEQ ID NO: 78358 - DNA, 295 bp, Glycine max
cagcagaaacccagaccagactcaccttattcctgaccacccgaagcggaaagaacacaaaggagattgccacacagagagacggaaagaacgaagaatcccttcccaagagcacccaacaaagaaaagaaggaaaattccccaacgccagagtgggagaaagcgacagcaaaaagagaacttctcaatctaagagcgggcgaaaatacaaaaggaacaagaacacggaaagatagctcctgatcagggatcgaacgaaagcagaagaactgtgcataaaggactctggaccgat

SEQ ID NO: 78359 - DNA, 444 bp, Glycine max
  unsure (1)..(444): unsure at all n locations
tacccattctgttntanggtttntatgatgatgcttgtgatgtttgtgtgctgaaattgcttatggaaaactgctatagatgaagggtagagttaacctacggttagaaagtgagaatgtggtgttatgagtggaaaaaagagtaaggctttgagagttggaaggctaaatctggattcaatggttattgggggttaaagtgagttaatcctagtttgaaatgtcttttatgacttaagagaaagcttatactgtgcaaatgaggaatatgagtgaccaaagtgaaaacaagagccatttctatggtaaaattgggtgttgatgagtcaaattttgattcagtggaattttacgcgtaaaaccacgctgagcaagtttagattaatgttatacactcgtgtgaggtgagagtttgctcaaatttccccattctattttcacttc

SEQ ID NO: 78360 - DNA, 424 bp, Glycine max
tgcgatttttatcatctggaaagttatcatacaagaaaaataccaatcattacgaacaagagccaaacaacacttatatggcgcgagtgtcgacatgcactttacaaaattatcacataggggcatgtgctataatatgacacatattcatatacatgcatacacactctctcacatgaaatcctccttggagaaaggcattatacgacacacatccatgtatgttataaacaagcctgtccatgctacatcccacatatatgcacattatttgaaacgctctttattctacctactcacaaatatacacattgtgaaaggcattttatgcactacctatccaacatatacatattctgaaagacattttttgctatataatcacacactttgcattgcatcttcatgctatatattcacacac

SEQ ID NO: 78361 - DNA, 456 bp, Glycine max
  unsure (1)..(456): unsure at all n locations
ngatcaaaggcatagaaagtccgacatttatgaccataagctctgctttgtaagagttcatcttcatccattcaaagaaggatgctttgaagagggtgcagttatttgtatggacttcaaggtaattaacattaaaattatgaaatccttttcttgttattaataataatttcctctcttggttggatatggtccactattctcgtaaattttgttgttcattaggattttggccaacccttatgttttgtcggggtacatggtaataaaatatgatgtgcaactgctttttttcagaaaagttattattttgtaaatttctcaattaaatgtacgctagaacctcgggatggatagcagctagcanaactgcattgattttcttctatccatttttatggctcatgccaatgagatggaatcttacaaatgatatngtatataacgcatgactat

SEQ ID NO: 78362 - DNA, 471 bp, Glycine max
atcctataagtcacctgcagctgctgctttgaccattaaacacaatttttgttactcggatgtttgatataggcccgtgatgtatcgagacgctcgaaattgaatgttgaagctctgagctaattctaacgacaataactttctactcggatgtctgatagaggcctgcatatatcgagacgcttgaaattgaatgttgaagctctgagccaattcaaacgacaataacttttcactcggatgtctgatagaggcccgtgatatatcgatacgctcgacattgaatgtctaagctatgagccatttcaaacgacaataactttgtactcggatgtctgattgtagcccgttatataacgagacgctccaaattgaatgttgaatctgtgagctgattcgaacgacataacttttacacggatgtctgatgagacccgtacttatcgagacgctcacattgaatgtgaagct

SEQ ID NO: 78363 - DNA, 434 bp, Glycine max
  unsure (1)..(434): unsure at all n locations
ctattacggacctataaaactcagcttaacattcaatntcgagcgtctcgatatatgacaggaatcaatcagacatccgagtaaaaagttattgtcgtttgaatttcctcagagcttcaacattcaattttgagcgtctcgttatattacgggactcaatcagacatccgagtaaaaagttattgtcgtttggattggctcagagattcaacattcaatttcgagcgtctcgatatatgacaggactcaatcagacatccgtgtaaaaagttattgtcgtttgaattggctcanagcttcaacattcaatttcgagcgtctcgatatattaccagactcaatcagacatcctgagtaaaagttattgtccttngaatttgctcacagcttcaacattcaatttcgagcgtctcgatatatgaccggactcaatc

SEQ ID NO: 78364 - DNA, 454 bp, Glycine max
  unsure (1)..(454): unsure at all n locations
agcttataggatctttctntcctcacaagatataacttggaagcttagttatattatatgctttgaccccttcttatcattnttttaaaataatcgaatgaagtggacaatttgaacaacaaatttcatgtggtaggtcatcaacatatgtacatgtgtagatttctcaatgtgctgaggatgtaatgtagcctcggttattttgtttataacaatgttagtcctgcaatccaaattcacaggggtgccttatggtgacatactcaaggtcaaagagactagctgggtaagaaggttctggggattaattagattatgtattgtttggtgaccataactaaaagcaattttacattgagaatttagaagcgatgcctatctcataagttcatcgtgtagtactataccgtccatctgaatccaacaaacttatgacttttttttttttgggaat

SEQ ID NO: 78365 - DNA, 445 bp, Glycine max
  unsure (1)..(445): unsure at all n locations
tcggaccataaaactaagctgctctggtatacgggaaagagagcattctccagcgacctaatntggagcacttgcgaacaagctcttcgccagctcgcatttgagactccaacctctctatctcctctatggggcgatccagcatcttgttgtaacgcttcatctcctccacttgaggagccagagagtttaaggtttctatgttgctctcgagggtgggtctgaagtctcgacctttgtttatggtcgcaatagcccctttcagtaactcccccatcactgctcccacagcacctccactgaacagatcttccatcactaaccacgcccagatgacaaaaatccgaacttttctcgaatcgaagccgaacacaacagcaatggatgcaacttttgtgttgtgtggaatcaaaacgagtaacgatgaaatcgaagttgtaatgaa

SEQ ID NO: 78366 - DNA, 357 bp, Glycine max
  unsure (1)..(357): unsure at all n locations
caagcttttggagtagatacatgggaccaacttattnttatttcaaaaggaagtcgtatctagtcaaggtctgagagaccatacaagtttcctaacgatttctaattatgtgggccattaagtctatcatatgctgacaatagccgagaagcccatgaatctcttctggggtggagtaggtgtctgccatcgccttggccttggctaacaatcggggaagttcttgactcccgttcaaggtaagagcaaaccggtccatccacatggttgcctcttggtgtaaagagtcgatcacccttcctctangcctcttttccgcatatacttgagcatactcatccgcgattctatgctcgt

SEQ ID NO: 78367 - DNA, 449 bp, Glycine max
  unsure (1)..(449): unsure at all n locations
tcatgatgaatcaaaggtgattccaggtgtnttgatgattacaatgatgataacaaaagatgatgacaaaaagctcacagatcaatcaaagaataactcaagtgaatcaaagatcaatctaagaacaactcaagtgaatcatgaacaattcaagagttcaagataagaatcaagaagaattccagactcaagaagaaagtttagagtcaagagtcaagattcaaggttcaagatctcaagaatcaagatcaagattcaagaatcaaaagaaggcttaatcaagataggtatgaaaaggttttctcaaaaattgaatagcacatgattnttctcaaaacatgtttaccaaagagttcttactctctggtaatcgattaccagattggtggaatcgattaccagtagcaacattgttttgaaaagtttcaaattgaatttacacgtcccat

SEQ ID NO: 78368 - DNA, 435 bp, Glycine max
  unsure (1)..(435): unsure at all n locations
agcttgtaagcctaggatcttcttcatcaatggattcctttgcttnctggaagatgaatggaagtggaatggagaaggaagagagaaaggagaccccactttaaggagaagatgagtctagaagaagctcaccaccatatgaggccattgataagagcttggaggaagaagaagatgaatgaagggagggggagagaagagcacgaaattttgtgctctaaaagagctctaaaatatgaagtttaatattcaaatgatcaaagttccaaaaaatgcacacacatgacctctatttatagcctaatggtcacacaaaattagatggaaatttgaatgtcaattaaaatatcacttgaatttgaaattgaatctgtggagccaaactgtggagccaaaatttcactaattatgattagtggaatttatgtatgggtc

SEQ ID NO: 78369 - DNA, 407 bp, Glycine max
ctggctctttgtctcactttggctctaactacaataattacaatggtggaaatcagtacgttagcgctggcattggccgcggtggcggtggcggttggaatcttaatcgtggtggttgcaatggtggctgtggcagaagtcgatttgctcattttcagtggtcaatctgtcataaatatggtcatgaggcttcttattgtcatcatatgcacaatgatgactatgttcctactcagcctatggattatcccagccaggatcctgatcaaaatcagtctcagatctctactaaccccaatcagaaccagtaccaaagtcagagtcagaaccctaattcctatcaaacacagcagtctaatcagtctcagttcatcaatactcagcattctcctcaagcctatctgata

SEQ ID NO: 78370 - DNA, 433 bp, Glycine max
  unsure (1)..(433): unsure at all n locations
agcttaataatgctttctccctcaaagatcttggtggccctgtctatntcctnggaaaggacaaacatcaacctggtgggtctcttatcctcacacaagccaaagtatattcaggatctgctatccaaaactatattgtctgaggcaaagcctatctcctcccctatggtaacttgctgcaagctaacaaagcatggtactgaaattcttactgacccttccatgtacagatcagntgtgggtgctctgcaatatgctactattaccagacctgagataagcttttctgtcaaccaagtctgccaatttatgagtcctcctcttgaagcccactgggtggcagttaaaaggatactgaagtatctcaagggaaccatttcatggagggtgcatctgagctngcgagggagtaatagagtatacttactccact

SEQ ID NO: 78371 - DNA, 453 bp, Glycine max
  unsure (1)..(453): unsure at all n locations
ctcgcattggaattgcgacagccccactccatcattaggattattacctgacatctcatacaaacaaatcaaacgtaacacgacaattatagttgttgtttgaatacctcacccactcaagtgtatcacacaattatggcttttctctaatgaaacactcttgccttttaccactctaattccccttgagttcttaagcaattcaagagattatggccacaacaaagaacaattcaccaatatgtgtaaggtaaggctagagagacaaggaaaaggttaaccaagaaaaaggctaacaatgtttttaggcacaaatgaaggaaataaaattcagaatttatgaattcgagtaacaatccttcatgcaaccaatatattaccttatagagatatttttaaagttcttcaagcatgaaccattcagcccacnntttttttttaattgtgcttata

SEQ ID NO: 78372 - DNA, 470 bp, Glycine max
  unsure (1)..(470): unsure at all n locations
atccttagagtcacctgctgcatgcaagcttcttttggaccttgaacaggcaactaactcctctttcaaaaccaagccatgtgctcgcgactggtccctttcttcccttcgcaacttgagttcactattgctaccccatagagctccgcgaatattgttccggccatactcttccttgcgagccctcttggtctcttgttcaagggctcttgcggtaattgcattctcttttcgtaacccggcacactccttccgaacgtgtgtagcggccaacttgaacttcttttgcctttcctaactcgcttttgagagctcggacattcttgtcttcttccggtgcttcanaattctctttgctgacgacttttaacttggcgagccaatctaaacctcgtatgcgaactttctaccattcgtggtacccaccaatgatgccattacgaatgcctctaagctcttgatctttcctt

SEQ ID NO: 78373 - DNA, 481 bp, Glycine max
tatcaaactcagcttatatatatcgataggctcgaaattaaacatcagaaactctcgcgatattcatatgggcataacttctcacacggatgtccgattcaggcgcataatatgtcgagaggctcgaacttgaacaacggaagctcttgagaaattcaaatggttataacatttcacacggatgaccgattcacgctaatcacatatcgagacgatcagaatttaacaacggaagctcttgagaaattcaaatggtcataacatttatctcgaatgtccgattcaggcgcatcacatatagtgatattcgaaattgaacaacggaagctctcgtgaaattcaaatggtcataacttttcacactgaagtccgattcacggctataatatatcgatacgctcgagataaacatcggaaactctcgagacattcaatgagcatgactttcacacggatgtccgattcgggcgcatatatgtcg

SEQ ID NO: 78374 - DNA, 363 bp, Glycine max
tcgtatatggcacttgcagaagctgctaaagagagatggtcaactgcatcatgctttatatgctagacagctatcctgttctgtatatggatcaatgcgctcacatctagaaaacacagaattcattctttctatgggcagcggctcattcttatagaggacactcatcgctcttaacgagaaaacgtggcaggatgatgtctaagatgagactgataatggctacttagagagaaagacttctactgaccttctctgggccggggcatgggcactagtatgacaggatatattgaattcctatgattaattgctagaaatttcttgttgatctgaaaaacctgcactctgagcataaaaatg

SEQ ID NO: 78375 - DNA, 459 bp, Glycine max
agcttctagaaggagatcaacttgatgttctatgcttcttgaaggtggcagtccatgaggaatctccttggaaaagacatctttaaattcctgcaataagggttgaacactatgagaaacataaatagttaactgattagaattatcactctctctcttttgtgtatcactcttattctcgggtgtatcactcttctttttcatattcctttgtggagcctcactattttctttctcttgttctctctattctctcattctgatttggtcatcacatgcttctctaggggatagaggtttaagagtaaacgaggaagatttgactattcgtctgtagggctcttctttgttacggctcaacaaacgttgcatttgtatagtccacgcgtccagaaataagcgctgagattcgttcagttgatgatatacaccaccattgtcacccagtcttgccatgat

SEQ ID NO: 78376 - DNA, 419 bp, Glycine max
  unsure (1)..(419): unsure at all n locations
cacttcaaactcagcttantaacttgtgccttcanattagtttgggccttcaacaacaattaatagtcttgataatgtttctgcctctgggccttcatccttctccactcgggggctttgtgcttctccacttgggcctttagcctgtatttggcaagtttcatgattgtcatcacgtttttaaaaaaaaattgcgcaatgtcggctggaaaatatcattcggggatacttcacgaccgatgttgcctattgagtgttctattcaatcccttaatgaaatatgcatgatgtctgtaaggaaatattcgatcggcgtcatgcggtgatgctttttttttagacctcgatcagtcatcttttctggccgacgtcgactgccatttttttcgatcaatgtcggagaaaaatatttttttgcc

SEQ ID NO: 78377 - DNA, 457 bp, Glycine max
  unsure (1)..(457): unsure at all n locations
cttcttataaaaatcaatctcaattgttcttttacttttttaaaattcttatctaatatcttatattttataaaaaatttatcaaatttaattttacttaatttttgtctctaaaatttttaaattatttattttatattctaagttcatcataaacccctaaatgtttagatagaaattaatattttgagagttttagatgaaataaaattgatgacaaaataaaatttgacgagtttttaaaatgtaggaacataattgactaaaaaaaacttgggaaattaaaattgtatactgtctaaatttaaaaatattataaaatatgtgttttgcagatgataaataaagataattgtaaatatattaatgcaaaaataatttcaatgtctcaactcacataagttttttaaagaaaatncataataattagtgataaacgtgtatcttgatcaatatc

SEQ ID NO: 78378 - DNA, 438 bp, Glycine max
tgtgtgaatgttatatcgatctatacccaaatgatgatcgtgtttactgatagacccaacatcatcagcaacacaccagctatagcaaaagctagacccaatagacaacacaatacccctacatacctaaaggattttgtgtaacgacatagtgctgagttggcattcctgtctgccactaccttaacgaaccttgtctaccaatttccattttgttaggatccttgtcatcttgtaataatataattatcaattttgttagtatagaagcattataaatacccaccttttgtaagaaggaaatggcaatgaaaaatctcttcatcttctaattctcttctctcattcttctcaggaggtactgacccttgaagtccagtatagatagtagggagcctaacatctttgtactctcgttgtctctgcaccttggctgaa

SEQ ID NO: 78379 - DNA, 460 bp, Glycine max
  unsure (1)..(460): unsure at all n locations
tataagttacgaactattttaacttatcctatatagtntatttaaacgtaattaaattgaaaataaattataaacaaatgttaaactaactattttaataagttctttcaaacacctgtcaaatatacttatatatctcataagataactctaaaaaaattattacaaacgagcagaatacataataattgtccgaaattcgcttaataagccatctttgtaaacactatatcatgatatagctattgaaagttgtgattgcattaaaaaactattttttctttaagaaaatattttttctttaagaaaatattttatcatacgaatgtagtgtgtgactggtaattaaagatatccaagttttatttctttttatcatcaaatattacattggtaatttggttaaaaatgtcggttaacaaatttaaatccgtgatatctatcctctctcttctctctc

SEQ ID NO: 78380 - DNA, 347 bp, Glycine max
tagtatttaccatgtattaccgtcacctctattatagctatagctcttatcacaacatgctcgaggatgtacattgatacatgaatagccatgggccagggagagcttttctgaataaaattttgagccaacactattcaagagaataatcaattaaatcaaaaagatatataatctaatttgacataatttaaaccaacttatgtatattaactttagaaaatcattcctttatgaaaacttccatagtctgacattcttacctaaaaaaaactctaatcttaattactattgatccttctgattatattggcgcaatttgatcttaatgtctctaaccaaataaa

SEQ ID NO: 78381 - DNA, 439 bp, Glycine max
  unsure (1)..(439): unsure at all n locations
tgcttacaganaacagagaagagtccatgtttcatcctatttaatattacccaacatggactatggaagcagctggacattctctcaaagaggtcctcctgttatgtacaggctggcaatccatttgtaggccactagataatatggtccttcaataaagttcattggattgcaagactacaccttctgggttatgtgggaaccattgacattacatcaagcacatttaagaatgaaggctcactttgtccgttattttaattcgagtagtactagcatatttattgtattcttgaaacatagtcaattctgtggatctgacactcttccattttggtatttatatctgtccgcaatcataatattcattgtcagaatatacaagctcgaaatatttagctaatttttgaggactggccagcctctttaataatttatt

SEQ ID NO: 78382 - DNA, 426 bp, Glycine max
tgggtgatataatgctattaagtgtaactgagtttgtataattctaagtgtctgtaaaaaacaaaaaagaaaagaagttcctattaatcataatatttggagggccactggattatgtggattggaaagcaatgctttatttggcggtgcaagtgggtaggcagctattgtcatagttttaggaaatttgggatgtttacagtatcatataaaataatatgcattaccctattaagtatttaaggataaaaatactacccctgctccctaacacaaaacccatgcctattttcatttgtgtaagttatcaatttatatttgtgaacttattatacacatgatttgttctggtctctaactttgatctgacaatatttgttctcaacctcatctaactaactaatatttatgtgtaaaatcaaaact

SEQ ID NO: 78383 - DNA, 404 bp, Glycine max
  unsure (1)..(404): unsure at all n locations
tcctcacattgattttgtttaagaactaccttagttntaatggtttctcctaaagcttgtaagtatttgttggtataatttgcctgttccattaagcttttaatgtctctagaggttacttcctcgttgacatcttttgtcttgaatggaattgccatgacaggtttgttgttactgtctttgatatttggtagttgatattgtgttgtgggaggtaattccgactggattaactcaccatccttcacttgccaatttgttatgacatttgttgttggattacctatgatgtcttgtttccaagggtagtctatatcctttctgatggcataagcatgaaaccaatcaaagaaaaggacattatatttgactctttcgacaaattcgtagaacttgtcttggat

SEQ ID NO: 78384 - DNA, 459 bp, Glycine max
  unsure (1)..(459): unsure at all n locations
tcctagaagcttactatggatataaccagatcaagatatactcttcatacgaggagaanaaggaattcatcactaaatatgccaacttctactacaaggtcatgccctttggccttaaaaatgcaggcactacatactatagatggatcgaccgaattatcaagcagcaggttagatgaaacattgaggtctattttgatgacatggtcatcaagtctcatagcatagcccaacacgtggcaaacttgggagaagactttggagagctctgtaaatacaacatgtgccttaactcggaaaaatgcactntcaaggtcgacggaggcaagttcctgggcttcatgatcacacatcggggaatagaaaccaacctcaacaaatgcattgctatcttggagatgcanagtcctactaatgtccaggaagtccanaagctgaatggaacactagcatcctcat

SEQ ID NO: 78385 - DNA, 399 bp, Glycine max
  unsure (1)..(399): unsure at all n locations
agctgtgagatgaatagaaactagaatatgtaacatagcagcattaaggtattacaacatgacttcatctaattattctataaagaccagaatggtgctataaagcctctcactataattagaacaccagtagaatntgtatcccaggctaatttcatgacatgatagtatgattgaaaataattagaacaccagtatgaattgtatcccacgctgantttatgacatgatagtatgattgaaaataattagaacaccagtaaaatttgtagacaaaggatcaagctgatgttttgatgatgccaaagggtaacatgcgtttcaaagctttattcaagacaaagaaattaaagatattcaagatggatgatcaagacagtctctagagtcttagaaagg

SEQ ID NO: 78386 - DNA, 412 bp, Glycine max
ggggaggattgatggggacccgacgttgagaggaacgatgtttatggctacgtgggagtacgtgagctcagttgaggtgggcaacaggggatggtgggttatacttgattgtggatgtggagaattgttttgcaccatcgcccgaacgccacctattaccgcatgtgatggataccccataatcctacaagcttgaaatgaggaagtgtggaagggtgagacttcctacttttattcgttgaccacagagtggtacctggagatatgtcgcgggggtcaggagaccttggggacgtcacgtggggtgcttattgccaaaaccaagcttgaccaatcccgacccaacccgggcatagtcagtcagtgagaacctgtgatgtaccttaacacgcgagcttctgcaatcaaccga

SEQ ID NO: 78387 - DNA, 459 bp, Glycine max
  unsure (1)..(459): unsure at all n locations
agcttgtacctcaattggtgccatgcacctttctcactatctgaggacctactcggttcaaaaacaaaatatagttntggttttcaattataattacaaaatatctcactttattttcagtttttcattccaattcctatttccaaacattcatgaaaaaaattgcaccagccacctccgataaactttaaacaaaaaaaaaaactaaattcgcgtataataataaaataaattcaatagaagtttacacgatcattcactgagtctccgacaacaagcattaccgaaattcaacaattaccttccataggttgaggaccttctggcaagtcagagcgaggaaccagcatctcatcgtgctcctgctgctgctgttgctgctgcacacaacacaactaaatcggacatcacaaaccctagaaatcgcgcaatataataatcacaaaaaaagacaaatga

SEQ ID NO: 78388 - DNA, 452 bp, Glycine max
  unsure (1)..(452): unsure at all n locations
tccacatccagatacttactataagggccatnttcttgagcttgttcatagcagaaaattgctttaagcgacttaatacagcagaatcaagtggtttgtcaggagctacaccatcaacttgaatccaaggatgacctacagagagtcaaacatatataagaaagaaaaaacagtgtttcttggagtgccatattatttcaaatttggtaatgacgattgtaaaatttatgtcagcttgggctttcctatgaaccatagaaatggttaatccatgatagcaccgaagaactattatatttcccctattaaggagaagccccatcaatcttgtgatacaaaaagggcataaccaatacacaagcatcgcatgttgcagagacattattntagcgctaataatactagtaaatggttctattggtatatacatacacatattagaatgttctaat

SEQ ID NO: 78389 - DNA, 461 bp, Glycine max
  unsure (1)..(461): unsure at all n locations
agcttaagggaagaagaggaaatttgattctattgagttattgaggtcggccccaccctcttctttcctttctgttgcaatggatgttggagttgaaatcttgactttctgtctcgtacctttgatctgtcatttttattgttatttattattattattattattattaagcttagtcaagtttgttaatttttaatgtctcagggagatgcttacaagcgcaagatgcagaattcagtatatagtttcagagagcaaggcactgttgggaataaaaaggtgaaacttgatgacattgatgcttcttatgttcatgaaaagaaattgggtttaaagacactatcagaagataataatgaagaagtgaataactgggactcagttggaaagcaacataatgcagcgtctcccattcgcggcattcttaagaatcacanacacatttctgagagtacttcaag

SEQ ID NO: 78390 - DNA, 440 bp, Glycine max
cgctgcattatgtagaagagatagagcgtggaaatatgggtgtgagtgaaaatgttagcctgcatggcatggagacatgctcgcctgagcgcgccttcttaagctgagaagcccaaaagcctttaaaaacactgagaataaatggagatgaagagacacactacgtgaggcataaagaagagggcacaaatgctgaagagaagacattttcttcatacttttaccattttctttcattcaaatatcatttacttcttgtattaagcccttcttgctaatgaagggctaaaaacttcattattggggagtgtttctattgagcactcttaatgaaaaactctaactatctattaaaattattctagtgtctctgttctattgcgtgtattacatacttgtggctgatcatcattgaatgcttggtaagtttgacgttggaa

SEQ ID NO: 78391 - DNA, 334 bp, Glycine max
  unsure (1)..(334): unsure at all n locations
agcttggttgaaatcgccatgttggatgagttaaacatacttattctgtnttagggttgttgtgatgatgtttgtgatgtttatatgctgaaactgctgatggaaaactgctagagatgagaggtagaactaacctaaggttataaagtgaaaatgtgatgttatgattggaaaaagagtgagcttttagagttggaaagctaagtctgaattctgtggtaaatggaggttaaagtgagtaatactagcttgaaatgtcatttacgacttatgagaaagctttgactgtgctaaatagaaaatcaaatgaccgaagtgaacatagatccatttc

SEQ ID NO: 78392 - DNA, 427 bp, Glycine max
  unsure (1)..(427): unsure at all n locations
cttgatatgatcatgggccatgagacatttttcgatactgagtatggaacttgggtgttatccacgttcgacataatgatgtagacgtaagggagcaactgaaagaggattatagctcagcatcgtgatttgaggaaaaattagttccatataattgttgttgacatctaatgggtacacaatcaagcattgaaaccttttggaagtacaagtcatataggagacaaagactttggattaaaaatgaactataaaggacccaatggacctatttggaaacaaagaattggtgattttataggtgcctgctgatcttccgaaaagaaaaananaggttaagaatcatttcagtggactccctaaatttagagggaaagtggatgatgttaaaagccaattgttcgctaaacttcttggtatgtgatga

SEQ ID NO: 78393 - DNA, 448 bp, Glycine max
  unsure (1)..(448): unsure at all n locations
tgctgcagctagatttaatgacgccctaattttttgcgaatcgcggcatagctagctctgtgtgagttcgtaacgacacttttcgcaacacatacacaccggaagcttccctgtgaaggcctgtggtgcctactgagaaagctaacgtaaatggcttgccatagccatactgccgattctccattcatgaaaccggtcgtgccgcctgcgtgtatgatgcatcctacccgaaggcnggctgcacctcattttgaagcttgctcacgttgcatgctccaaatatcttgtgcatactggcgaacttctgaggctcttttggagggaaataaggggagaaaatctatccagtctgcattatctgaagaacttgccggcatcacaaggagagctatagttgctagatgatgccatgatctntactgtgttataccaatatgaacaagcacgt

SEQ ID NO: 78394 - DNA, 75 bp, Glycine max
gatatggctgatgcttataccaggcgcgtctaacggccgcacactctgacgcgatactttggtgattgtgctgac

SEQ ID NO: 78395 - DNA, 356 bp, Glycine max
ttgaatagtgctatccctcaccttctcgctaagccaatcctctggcttaattagcgttcgctaagagcaacactctatggcttagcgcaatgtacaatctggaacaagatgagctatacaggatcgctaagcgcaccgtttcatctcactaagtgcaccgttttagtccatccgctctgcaagaaaagcactcgctgcaccgaaattcactaatgtgtgcttagtggtctataatagcgctcagtacacgaacacgaacaatgctccctatttaagcctgaaatcatatgtagcgaagggagtttgggctgcgagtcagagctttgcatgtctacacattctgacagagaaaggtc

SEQ ID NO: 78396 - DNA, 419 bp, Glycine max
  unsure (1)..(419): unsure at all n locations
ccgcgattaggtgggtgtgtgcatctacttccactccatgatcgatgatcaaattgagtcgtgttgttggccattcgaagcattgcatagagagagaagggttggattcatggtctaagagaggaatatgtgtaagagagagagggagaaagctttgcgaaataaaattatagtgaataagccgaacggaagtgaagaattagtgtcacgttggatagtccacgtggcactaaaattgccaacaatgcacctcactaatggtgttactttaaaatgtaacggaatgactattttgtgaaacttatgcaaatataaggactatttcttacatttcaaaaggatagggattaatgtgcataatggctacaaagacagggacgtaaatgcctatntactcgtctaatatatgcactgtcgtc

SEQ ID NO: 78397 - DNA, 462 bp, Glycine max
tatcttggtgtaatcgattacgatgaggctgctatctattaaaacatagagtttttactactgaagaaaattttctaacttagaaacttttcttcacacaaaccatgatgatgaatgatgcaatacatatatcaaatgtactaagatgcaacaaccaagataacaaccattacaaatgtcattcaagggagttgggcatgtcaaagccaaaacttcttcaagcttttccttgagcttcaagctttagcttttgagttgttcaccatgtcgatcatgttgctccccctatctctaacaatctccctctttttggatttgatgatgccaaacttagaaaatgacattgagtgcatttaaagagtcttgagatcgaagacatggtcttagttttatcctgaaaggttcttaacacttaagaagagctcattatcatcataatatatatcaatacatcatcatata

SEQ ID NO: 78398 - DNA, 400 bp, Glycine max
ccggatgtgatgatgttgcccacatgattggtatccatggtatgtttggcgtaggaacatcaacacttgtccgacaagtttataatctgattactggaaagtttgaaagttcatgttttcttacaaatgtaagagaagaatcatgcaaacatgggttaaaacacctacaaagcatacttctttcacaaatactctgaaagaaggaaatcaacttatgcagtgagaaacaagggacttcaatgatacaaaatatgctcaagccaaagaatgttctctttattctaaatgatgttgacgagcacgagcaattacaagcaattgttggaagacctgattggtttggtcccggcagctgattcatcattaccactctagacaaacaactactagcatctcatga

SEQ ID NO: 78399 - DNA, 394 bp, Glycine max
ctttataatagtctcgtatatcatattctttatattgattatccaataataataaagctatcatagactatatcgtttttaattattgcattgattaaactgaaactaaatggtaggattgggagtaatttttttgattgatgaattagtttcttgcttttcatattcaccacttccacatcataatggacattatacaatgcactttattaatctttgacacaaaataaaaatagcattttatttgtgttctaaatcaaactagttaatgttacggatagactattagagtatgttgatttgtctcttgcacccgatgggacaacatacattgtacataggcgcattcatgctttatatctaaaatgtttgttatgatctagaaagcattatg

SEQ ID NO: 78400 - DNA, 463 bp, Glycine max
  unsure (1)..(463): unsure at all n locations
attcggacctatcaatctcagcttatagctggttgtggatacatntgttacattataagctagttgtatctttgtaagaatagtcttgaaagggttacataagactgtccttactgtgtattctaaaaagcctaactatgagcaggttccctattctgaacgagtcgtttcttctttcttattggactctttctggtttatataaatatatacaatgtgtggctgagtaaagtaactcaacacttctctaatgtaatgtgtatctcaaactcaacaccaatgtatttcattatatttaacattaactactacaacttctcataatagtcaaaagaaatttatctttcgtccattacactatgtagaatttagaactattccatctgctttgcatgtttccaccacaagcctcttatttcctgtgaataaagagagaatgtgttcatgataggagagaaaaaga

SEQ ID NO: 78401 - DNA, 383 bp, Glycine max
  unsure (1)..(383): unsure at all n locations
gatcatttgtantagggttaagtttaaattttggagaatcattacaattgatctggtggttgtgaagaatttgagtaataactaataataaacatataatcacataggttttaatttcaatacgatcactaaaaaaatgatgtcaaaaaatgtgcttatttaattgtaattgtatgagaacaaaaaagataaaatgacttgagttattttataaatttaaaggcacgttatatacttattttgtataaaaaaattaatgtgtataaacttaatttaacttataaaanacgactaatntattttagttttgtattttatattctcacctataaaataggtggagataaattcttccaagtctaataaaatattatttctgtcaa

SEQ ID NO: 78402 - DNA, 462 bp, Glycine max
  unsure (1)..(462): unsure at all n locations
ntcatcagtgaacgccatatgtaagaagaacttggcgtaacatggccattcataatcatcaacccattcatatatttatccgtaagcattttgacctataacttctctggatggtgcatcaaagactaaacatgtttcccaagtaaagagatattggcctctcaagatttgcatatgccaagtccttattagatttcgggtcaagtgatttgtcccaccctaactaatgcgtagaaggtttatcacaaataaagttcctaacagctgcatcaatgcgattacatatgccctcaagactccacaagttctgcatggtataggtaggaatagtagataagacaaatttggctaaagtcaccttgctcgccctatttagtaatttactcttncacccagctagctggttattcactctgtctataatatgagaaaaattcttatttcgaactcttcctttcatgg

SEQ ID NO: 78403 - DNA, 388 bp, Glycine max
agcttcttagtttcagatgatgcagatgggtttgtatctacctcatgcactcctctaatgactatggcatcatttctggcgctaaattgctgggagttggaagccatcttctcaattaaatttctggcttcagcaagagtcatgtcttcaagggctccaccactggcagcatctatcatacttctctccatattactgagtccttcataaaaatattggagaagaagctgctctgaaatctgatggtgggggcaactggcacatactttcttaaatctctcccagtactcatacaggctctctccacttgagtgtctaatacctgagatatccttcctgatggctgtggtcctggaagcaggcgaaattttttctaagaatactctct

SEQ ID NO: 78404 - DNA, 404 bp, Glycine max
  unsure (1)..(404): unsure at all n locations
taatactgtaganaccactgaaattgctattaccctcaaagccattagtgataacttcagcctctntgcccacaaaaatgttctgaattttcatctgacttaaattaccaccgccctttgcccatcataaatatggttcagaatccaatggaaccagagggcaaagtctataaatcagcttaaaacacgaccatctgtgtgttactgttttaccatgtcaggtctccagataaaataggataccctaaaagagaaagtatgaacaagtgatcagttaaaatgccaccaaaaacaagtcaaaaaagattacacaatagaaaaccctgagcccagtgaaggcaatcccacaactcatttcccagcaagggacttaacacaaccaanaggaanagggtatttttttt

SEQ ID NO: 78405 - DNA, 230 bp, Glycine max
gagtagacctttagagagtaaatctagcttcttggagtgataacaaactgagctgattagaaagccagaatggcatcacccatcccataatggtatgaacttgtgtgcagtgaggtggttcatcaactgattgtgtatcatacagcactggccctctctcatactctaaagatgcatctggcggtcgattaatggttacttataaatagactaatgtcttgttcttatag

SEQ ID NO: 78406 - DNA, 455 bp, Glycine max
  unsure (1)..(455): unsure at all n locations
tgtctgtgacgacgtcaatgtgaaaggagtgataaaaattgtattgccattgtcaaaaatcacctctggcggagacacatggagtanatgatgagagtggttgaaatgcatacaaatctaccagatctacaaaagcatatttgcaacggtattatatgtacaacaacagatctagattgaatcttgctcgattggtgttgcttcgatagtatggatgggaaaaagggtgacgcataccttcgaataagttgtgatacttgtcgaagcagttcgacaatgacaaaaatgtggtggctcaattatgagaaaggagggaaaagaagaatcaatgagaatacaaggagaagagaaaatgtctcaatgtggaatgatctatgataatacaatacacatttatgtatctaatagctgcaaagagtgatgtataacgaacttcatgacttagtgacctatgc

SEQ ID NO: 78407 - DNA, 405 bp, Glycine max
  unsure (1)..(405): unsure at all n locations
caatgcctttgacagaatggtctcgtcaggttcaacctccacctcagtggactctccatcgtgctcaatcaccactttataggacctcacactcactctgaggggacgtggccgaagatggttcaactgagaaacactggacttcttctttgtggggtgctgctcttgttgtctcaaaagagtgaacggtgttggngttaactgaatgcttgccatctccaggcagagactacaaaggaagtgcgcgtgctggatggatgaaatgaatggataacactcgtgtgggaaagatgaggagaccctttgtcaacaaatataattcacgcttaatggagagatcatatttaatatttcttccataactaaaactttgataaaatttaaatgtaatgtatcatgtaacat

SEQ ID NO: 78408 - DNA, 430 bp, Glycine max
  unsure (1)..(430): unsure at all n locations
cgcttgatgcgtctatnttataagtcagcgtggtttaattgtttctattaaattaaagggaaagtatagcggcaattggatatatgatataccaaaatgtcataccctccaatcattctattttgtcaacggctggcctaattccatttcacaatcgattatctgcaagaaatatgggttatcgcatgacttcatgagtctcatgcttgatgcctgttaaatcattcttctttttacttttttgggaataaaactatctatcttctggagggaataagttaaaggtacaaattacaaattattatagaggtgattataaaaatgcaaacaacattacaacaaatcaagaattaatcatgcattacgattgaagttcagatacaaaattcacaatttataattgagttagagtaatttcatgagcaacaat

SEQ ID NO: 78409 - DNA, 447 bp, Glycine max
tgctgcatgcaagcttgcttcaacagccctatcacttccttgttgtatcaaattcaccacagaatatattgcttcatcagaaataatagcttctgtggaatctaccactccttcagatattattctggtaagtacaacaacagcagtttcctgtgcttctggggagaacgaatttctgatctgctccagaagtcttggaattgtctcgtacagtgttattcccacattgattggatagacgctcgcattggaaccagagagagaacttagtttaactaggcaagcagctacccactctttattgtgaaggggaatgctggacctgatgattccgcgaagcacatcaatgaactgcaaggagtttatcttgtggcagaattgctcacaatcgagtagccttgtcaataatccggatgctgcagaatttgcacaaccaacttcttcaaa

SEQ ID NO: 78410 - DNA, 403 bp, Glycine max
cgctgatagaggccgggtggttgacttttcaagagggcgggccttatataaaaacaaacccgcttgccaatcatggaggaggagcggttaatgccgtcgaggtgagtaggtcgcacgggcccaagcttttggaggacgtaaagacccctataaggtctatctacaaggccttgcaaaaggtgggcatgattccctgcggcgggtgcagagaagactcttgcttaatgcatccgggtgtaccccatgacatggaaacatgttcggcagtaagggatctattacaacggatgatagaccaacgccggcagtgagaatgaggcagaacaacatgtatacatgcagttggcagatgaagaatgacctaataagcctaaacccttggtaatgcacttcaccaggaaca

SEQ ID NO: 78411 - DNA, 456 bp, Glycine max
  unsure (1)..(456): unsure at all n locations
agctataattacgggtctctgtcatttctactgagtgcctgtcacctccagcaggggcatcangccccttactaatcgagctttcatcaagaagtactacgtccccaggcaggcgcagggcgaaacaccacagcagcctgtggatggccagcagcgggcaacagacgcatcgccatcacctctagagttcagctcagctcatccacaaataggttagagcattgcttacgacccatgtccgaccaataggcgaccaagtccaaagccaaaggtaagcaaagtactaggtccgtgaccgacaagccatcaagcgtccagctcaagacgttaaagaagcgctactaagaggcaacctagtaccttttaaatctctgcttgtaattgatcactttttgttctcaagtcatagcaggacacacctagctgctcatgatcctaggaactataataaacaag

SEQ ID NO: 78412 - DNA, 325 bp, Glycine max
ataatttgttaatatggcaacaaattgcattcttggatataggttgaacaactcatgcttttaccaaaagtacatcactcagttgaatatgaagtaccgtctgcaaatggtgaaaaaagaatcagtacatcactgcttgttactgccaacatattaggatggtatgcctcgtactccagttaccttgcaaaaggatatgttaaaactaatgatcgacccttatctggtaaaatacaaactcaccgacatatcgatgattctgcttcatgtggatgctatgaccttcttgaaaaaataaagactaatcatgtttaaaaaaagaccc

SEQ ID NO: 78413 - DNA, 436 bp, Glycine max
  unsure (1)..(436): unsure at all n locations
acaaaagcaccattgtagttggtccctttatgtgtntgaaattagcacgcttcaattacttaacgtgtggtgtagattaatattttggttttgatagaaattgaaattcgaagcacactcatttatgcatataatatgtagttatgactttgagctttgcttttggttaataaaatggtttgatatcctttgttgcattttatacatcacaatatttatgatgtttgctatttgctcatgtggtctttgaaaccgtttttttgacacaagttgctgcccattgggtggacccacatatacatgtactctctgcttcctcaggtctcagagtggcaaactgtaaagtgttgatgcagaatggctgcaaccagcgctcgagttattagcttctctcgcaatgtatcaactgtgacttctataatcatggacttaagca

SEQ ID NO: 78414 - DNA, 459 bp, Glycine max
  unsure (1)..(459): unsure at all n locations
ntcctcgggccattcctgcgaagggcaaacattggaaagttatgtttagtgggacattactcttaaagcaaaaatggcatataacctcctcccataaatacaaacatcaatgtaaatttagagcaagcttatgcgcctatttccttacaaacgttctcttgcacaagacatttaaccgaaaaaatgcacccatatacaatcaaggcagcttcgttacctagattatttacacgtacctccatggtgtatttgttacttacatcacacacatctccttggctaaattcacatacatgcatactcaaggcattttggggcaccaaaaattgcacatgtgcacatcttggcatttctaatacctatacatacgcaaacttcatgatgaatcttgactatctacacaataaggtgctacatgtcatgctcttttttcaagttttggctacctaaagccgcatg

SEQ ID NO: 78415 - DNA, 443 bp, Glycine max
  unsure (1)..(443): unsure at all n locations
tgccgctgcagcttagcactcttttttttgttaatctagatttctaatgctcttaatctctcctcgtctaaatcaactaactcatgtgacatcattctccaataatggtcgatcggaatgtccactttgttttgtactctagctgattgcaaatgtattacgaccggaagtataacatcgtgcccataagtcagtcgaaatggggtagtattagttgattccttaggagaatttctacatgcccatagaacttgatctaacgttttattccaatttcttggcttttgggcaatgtgtttgttaatcaagttaattacaatcttattggctgcttcgacctgaccatttgcttgcgcgtaatatggtgttgaggataataatcgaaagccagttttttgggcaaattctttcattttttctncagaaggaactgaaccttgatc

SEQ ID NO: 78416 - DNA, 468 bp, Glycine max
  unsure (1)..(468): unsure at all n locations
tccnctgcaccanatggccttttcctataaatagccatgctagggaagggtttaagggttctgagaactgaagaaagagaggaaaaacgtagaaaggagaaagagaagaagaataaatagaaaagccgaggcgctgccgaatcgaaccgaggatcgcttcttacatcattactcttgcaagcccttaccctgtgcaacagacagctagttgttcttaagattatgatgtaatctttgtacccttatgtatccctctcgatattatatatgtaatcttttctactcaaatatcacttgagatcgtttcaaggtccaacgccttaacgactccctccgcttttcaaaatctaaaacatcgtttcaagattcaatgccttaacgactctttgtttgcaattaanataaatctttccaaatattacataaaattaattcaacacacaaacattcagacttaaagaactacgt

SEQ ID NO: 78417 - DNA, 421 bp, Glycine max
tgcttgcagcatcaaacaatccaatgaatattatatgccaagcatgaaacatgagaggcacaccttagacatatgaaattggcatggattaaagagtttataggatgagagttattgccaatgtttgctggaaaaagacatagtacataaagagaagaatccaacaaagaatcaccctcgccccatggtagacatacattaataatcaatgttattctgcaaataacaatgggaaaacaaatgccatgttagaagagtctgatacagtaccttgataactgaaaacctgtcagttttcacttcatatgtcacaatcttttcaactatattttcaagtagaattcttaacttgtgattgtaaccacggagagtcatctggaaagataaaatatgacattctaatgatgagaatgaagtacca

SEQ ID NO: 78418 - DNA, 448 bp, Glycine max
  unsure (1)..(448): unsure at all n locations
cctcgtagcacgacttcaccctaccttacctctcgagaacggcttcaacatccaccttgtgcccctcggctcctctcttgcttccctctcacgaccaccgtattcatcatcgtcacctccacaaccgccaccagagccaccgncttcaccacgaccactgtcggcgcgggtttgcgcttcacggacagtgatgttcagccatcaaggtcttggccatgcaaaccgctattcacaactctcactcccccttgtagcttcttcttttgaccatgcaacaacaatatctctataatttggtgagttcctttcttggcttgcacccattggagtagcagctagagctgctggtgtttctgcgagccacaaccaagcagagaaaagacacaatgataggattgatgctctgcggcgcaggtcaccacccaacgcactcacctttacgatggtg

SEQ ID NO: 78419 - DNA, 346 bp, Glycine max
ccttcagaccagctgaaccaccacctactattatttctctaacatttctcactgtattatttctctccatacattaattaagcatattccattacataaaaaaaatatttattatactaatactcataattgatagatttaatgtatttcactacactaataattatttttcttagacgatgttatttatttaaaagattcttatgatgtaacatggagggattactttctaacctaatagaccataatgtacttttgcaaattgactcgggcaaaagttaatgatgcccactacacattgtgaggccttctatgcgattaatacaaaaccccttatcaagtcatt

SEQ ID NO: 78420 - DNA, 442 bp, Glycine max
  unsure (1)..(442): unsure at all n locations
agcttgtaagattatggggttcctatcacatgtgtgactangtggcggtcgggcgatggtgcacaaaaaatattccacatccacaatgcgcgcataaacccaccatcctctgttgcccacctccaactgagctcacgtactcccacgtagcccatatcctcgtttctcatcaacaccgggtccccatcaattctcccaagctttcacaacatccaagcaaaacaacattccaacagcacaagctatcacagccaagcaaaacagagcaaaggcagaaaactctgctcaacacatcaaccaaaattacgagctttctcacttaaagaccacagtaacaatcccttcgatccaattcgttaaccgttggatcgactccaaaattttactggaagtctatagtgcatatacctacattgtgaccgttgtgatctactagcaaaca

SEQ ID NO: 78421 - DNA, 442 bp, Glycine max
tcttgcttcttgtctaacaaccttgcactcttctttggaattcttctcggtatttgctccaaagctgctggatgactattagtgcgcttatatgactaacttttgtatagaaaacattttccaaaacttgtatagttcccccaattttatggttaatttggaaataaatctcgttttattgctaaagttgtctctagaatatgtccattgaatttaatgatgaaatatgtgcaatttcacgtgaaaaagaggccaagtcatgaagtgctaaaagtgacagttgagcttatctcattagtgggctaagcgtgcatccaccactaagcgcagcttccgtgtgcttatcgcgatagaagaatctggaaagcatcatatcaaggcacgtgctagcgcacagttgtttattcagcacagaccatctacgctagctcaaatcccttac

SEQ ID NO: 78422 - DNA, 336 bp, Glycine max
  unsure (1)..(336): unsure at all n locations
tcatgtgttctctactttggagttccatcgcattgagtgaagcaatcctactccttcagcttggcattgtgcacccttcaccctctcaccataggatcactcgcttaccaggtcaaccccatgttcagtttcatacagtgttcaggttatgtaactgttgatgacnaaaactagcatgcactcttctacnttgctaaagctgaaaaagatgcactttccaaaccccttgttctttggctcaatggaggtgctcctcagtcacttcttgtttcttttcacacctgtaaataaaaagttctcaatcaaataagaattatgaaagttggtaacttatgc

SEQ ID NO: 78423 - DNA, 457 bp, Glycine max
  unsure (1)..(457): unsure at all n locations
ntaattgcttatggtgtagaanaatgaggaatctggttaaccgtggatcaggcatacaaagcaaaggttagagcaatggaaaaaattaaaggtgcaaccaaagatcagtataagcacatgagaagttatgctgttgagatactagacaaaaacaagaacaacacagtcaaattaaaatgtgacttaactccttatggtcctgtgtttgagcgtatttatgtatgccctgaggcttgtaaggctgcatttgcaaccacttgtaggcttttaataggattggatggctactttttgaaaggagagtttggtggcaaattgttgtctgtagtatgtaaagatggaaacaatcaaatgcttcatattacttatgttgttggtgaaatatgaaaataatcttcttggaagtggtttactgatcttttactagctaatntagatggtattcaagaaagatgtt

SEQ ID NO: 78424 - DNA, 459 bp, Glycine max
agctttgaatcctagaaaaaccatgatttgtttgaagcctaaccccattacaagcctagaaagtccttcagattcaaatttgtgtgttcatcattgtatgtcatgaaatgaaatgcaaaggttgagacttgtgttagttgtttatgatggaatgagcctaaacacttgagcttgagtgaaacaatgactgtgaggtttggttgatgatccttccttgatttcttccatccttactagcttatttcaattgtgactttaatgtgcatgattctatctttgaaaagttgcatgtttgtgaaaattaattgattgaagcagtccatgatattcagttcatatggttgaacttcttgtctgtgaaaagtaattatttttctatgaagcaacaatctggtagggcatctatatcaatgttgtgcgctaagtgcgagatcagtgcgctatgcgtagcagtttgtc

SEQ ID NO: 78425 - DNA, 451 bp, Glycine max
agttcctcagccattcctcaacctcacgcacactctgaactcagtgaaccacaccacacaacagagacaatatctcaatctcaatctcaggtacgtatttttcttatctttcttttctctccaacaccttaattacattcattctcactttgtctacacttattcctcgaaattagcctctgcttcgttgaaacccctttgtctttgtttgcgaaaatcatattcactatttctttcgcacacgctcaaccaagtaaaccctaattacttactcgcataaagtataggttatagtcagttatgaacttctacaagttgttgttgcttcttttagatttccttgtcttttattttgcatgcactgctgttaggttttgtaggcatcaatacgttgcacgtttggaattggatggtaatgtatgcaatattttctcagctatgatagtctttc

SEQ ID NO: 78426 - DNA, 442 bp, Glycine max
ctgcttaattgcataatctcagcgtgttcacagtcaaaacagcaagcaacttcagaagcaactcactcagatctcatccatagagaaacaaaggaacccaaaattcaatcacacaatgtcgcacatcccatcacatggccaatcacacaaggttgcagcaaagctttgagcaacacaatggcagcaaggtgttgaagaacccacaccaccccactcagcaaggattcagaaattgagctggactgaattttttccaagtcccaaccacacacacggcaagcttctctgagaagtgagaacacacttctgaacacacaaactcagcgtgtgtacagtcaaaacatgtgatttacagcatactcgccatattgtgttctgagctgggattgagacgagcttcccgcaaagacagaaacatacaactctgtaggtcagaatacaa

SEQ ID NO: 78427 - DNA, 459 bp, Glycine max
  unsure (1)..(459): unsure at all n locations
taacagcttctccaacaagtttcaccagcccttcaaaaatttgaaaataaaanaaaggaaaactctcagtttaagtatagataatggcaccagacagtcatggcttgcatgtttgaatttattcatttataaaattttgcaatcaagagcatttttagggggaaaaaccattctttttattcagaaacctctcaggaggtttgattatagacacaaaattagctaatctaaacacacaccaaatgatctgccaactattatacaacaacagttagaagaactagtgacatgttagaatagaagcctatcttatcttccaattattatacaataatctaacaagaaaattgaaatccaaattcaaaaataattntcaacagaaacttgtngattcctgacataacaaacacatattgtaaggcttaattatgtttgatgtacctaataagcgaccgattt

SEQ ID NO: 78428 - DNA, 441 bp, Glycine max
ctcggacttagcacgagctcagctgaacatctttcgcttttcttgagtgagtgaattagacccgaacctcaacagaaaaattttggttacaaatccacagggtagtggattaatttatgacaagaacactgagttattccatacttaaaaattggttttgcgtaggcagaacactccccacactattctcttggactttaacaactggtgtagtgagtttaattgtcttataaaatcagttaggaaccatttctagacttttgtttcgctctctttcacgggagactctcttcaaattcaatatttcccttagtgagatagctaaggactctctcattgctacaatcactattgaaggatgttatgactactcttatgagcatggaatcccacaaatccttatggccatatggttttcaaccattcttttccagaaatact

SEQ ID NO: 78429 - DNA, 432 bp, Glycine max
  unsure (1)..(432): unsure at all n locations
ngagaaacatttccctaacctaattattataaatagactgagctntatatataatngttttacatcaccactaccacaagaatttcatatagaattcaagttaaacaatttttccgagggtttttatttctactctttntctatgtacctgggaacattaggttgtgtttaataaaaataaatttgttttttttttagtttagtgatgaaaaaccaataatgcatgaaaaatgtatcaaagaatgaacatcctaggcaaatttaaggaataaacaaagtcaagaaaaattttaaagctcttcaataacctangtaaggtataagcaccaatagttatgaatcaatagaaaaaacactttcattgttcataagataccagttatgcaaagagtaataaatcattgcttatggcatgcaaggagttgggctgtg

SEQ ID NO: 78430 - DNA, 438 bp, Glycine max
  unsure (1)..(438): unsure at all n locations
agcttcgacaacatccaagcaattcatcatcctatacatcatgaactatcaaaaccaaggaaaacagggcagaggcagaaaactctgcccaacacaaaccaatatcacagcttttctcacttaaaaaccctagtaacattctcctcgttccaattcgttaaccgttggatcgacttgaaaatttttctgaaagtctctagcacataagtctacattgtgaccgttgggatctgcaagaaaacgtccagaacccaatctgtactactctntccagaaccaacaaatacacaacattttctgcacaaagccaaaattctgctgcacatatttgacagcaaaattctgcataaagtgcagaatttcgaaatcacacttgccctcatccaattnttcccaaattgaatcctacaagtcctaaatcatgtatcaatcatgtct

SEQ ID NO: 78431 - DNA, 353 bp, Glycine max
  unsure (1)..(353): unsure at all n locations
tgaacgaatataagagacatcttcttcgaccttggcaattcttgactccatctcattgaagcgcatgtccacttgtaactccaaagtagcaaacctttctccaacaaaggtttgaagaccatcgaacctatccaaaatcttttgaagaagagatgaatcttcttcaccatgtccttcttcatcaacatgttgagcaccctttttcacccaagagccatcatgctctttttgataaccaaaggatgcaatgactgaagcgcctattanaaaggatctcttgattgatacataaggttcacaatccagagggatgttaaagtgttgaatgaagacggtgactatgtgtggatatg

SEQ ID NO: 78432 - DNA, 452 bp, Glycine max
  unsure (1)..(452): unsure at all n locations
gacctataaaactcagcttctcgatatattatgcgcctgaatcggacctccgagtttttagttatgaccatttaaatttcttgagagcttccgctgntcaattatgagcctctcgatatattatgcgcccgaatactgacctccgagttaaaaagttatgagcactttgaattgcgtcaagagcattcattgtgcaatttcgtgcggctcgatatattatgcgcctgaatcggaccctcgagtataaattatgaccatttgaatctctcgagagcgttccgtgttcaatttttagccgcgcagtatattatgcgcctgaatcggacctccgagttataagtttgaccctttgtattctcgagagcttcctgcggccaatttaggctcttgatataatatgggctgaacggacctcgagctaaagtatgacctttaattttcgagagttcctt

SEQ ID NO: 78433 - DNA, 443 bp, Glycine max
  unsure (1)..(443): unsure at all n locations
atcctctgagtcacctgccgcatgcaagctttgcggatatggtcttctctggtgaattgatctaagtgggtctaaaaagaggccaatctgatcatcatgctttgataaatgcaagaaaaactggggcgagtgaatagggtgagaatgatgganaaacccctgctgtgactgccatttctatacaggcaaggtttccaccaacccaacatgtcatttttatccaataacaaaccttcttcttacccacctccccattatccatcaaggccattcctatatcaaccgtaaagcctgtctaccgtagttccaatgacaaacaccaccctttgcacataccacatcacccaccaagtaatgaattttgcagcgataaacctgtttaattcacccctaatctggcgtcctatactgacttgctcccatatctacttgataattcagtg

SEQ ID NO: 78434 - DNA, 435 bp, Glycine max
  unsure (1)..(435): unsure at all n locations
tgtgcaaatcaaatcactcctacattntatctctagcatgcattgtatgttggtctcgtcctttgtcacgggaagccggaaggtccatatcaccttcttaattgtacacatggggcactgcgcccccaaatgcgcgagtaagaagagataattttccgggttctcgtgtccgtaaaatgcattcatatcatgcatcgcataagcatctcttcataacatcataatggacatatcctgcatttgtccgttatcatattccagcctcacattttgcatgagtcatggcatcatcatgcgtatgcgttcaacaaactttttgatctgcaaaattgcataccatttgttntcatgtttgctcatccttgcgttttcctctacaaaacaaaaacaaaaaagggggaagcgtgaaacttcacactacattcttagtttcat

SEQ ID NO: 78435 - DNA, 407 bp, Glycine max
  unsure (1)..(407): unsure at all n locations
aatatttattaaccataagatatagaacattagactcccattccactaaggtactatcaggaattacacccatatgagcattgtcctcatgaaaactttaaatgtcatatctctaagtagtggatcagctagcatgaaatgagtccttatatgatctatacaaatatatattttatggattctttatttaacaaccaaatattntatgtcaacaaacttttacttagttgaatgcttaataagaccgctaagatattatcctaataaacacccgatggctacttaatggtggcgacaacaagcaagccagctataatattntagcaatcataaattctagtatgatgtatcatagcaaaatattaactccaccaacatgngtaaatgtggatccttatgtgaagtga

SEQ ID NO: 78436 - DNA, 376 bp, Glycine max
  unsure (1)..(376): unsure at all n locations
tattatagccgatgctctttctcggcgtcatgcattactttctatgcttgaaacaaaattgattggtcttgaatgtttgaaaagcatgtatgaaaatgatgaaacttttggagaaatttttaaaaattgtgaaaaattttcagaaaatggtttctttagacatgaaggttttcttttcaaagaaaacaaattgtgtgtgcctaaatgttctactagaaatttgcttgtttgtgaagcacatgaaggaggtttaatggggaattttggggtccaaaagactctataaacattacaagaacatttttattggtctcatatganaaaggatgtgcagaaattttgtgaacattgcattgtatgtaaaaaggcaaagtct

SEQ ID NO: 78437 - DNA, 384 bp, Glycine max
  unsure (1)..(384): unsure at all n locations
gcttgtgcctcttcacgtctggaatatgtatgtagcatatagatccaaagacccttagggtgcttgctgatggcttgttctccgtgcaagcttcaattggagtcttgtcttgtacagacttagtcggacatctgntgagtatgtaaacagcaatgtagactgcttcagcctacaatgtgttaagtagtctcttctccttgagcatcgatctagccatctccataactatgcgattctttctctcggacactcccatttgttgaggaagatatgcgactgtgagttgtcgctcaatgccttcatcctcacaaaatctatcaaactcgcgagatgtgtactctttgtgcaatcacttcttaggattttgtccattttccactttga

SEQ ID NO: 78438 - DNA, 185 bp, Glycine max
gaatacatggcacttatgaaagggcacatactgaacactccgtgtcgtgctattgcatacatggcacgtatgaagcggcccgtactggagacatggtgctctcgcatacatagcacttatgaagaggcattacacagaacgcggagtagtgctcttgcatacatgacacttatgaagtggcacat

SEQ ID NO: 78439 - DNA, 442 bp, Glycine max
  unsure (1)..(442): unsure at all n locations
agctntgagccanaatcctgactcaccatataccttgacctcaggtgagaatgtcaatccttaccctcggaagcaaaaaaagaatagaggggaaatttccaatcaaagaaaaagagaaggaaaatttccaatgaaagcaaaaaaagaaaagaaggaaaattccccaatcaaagagtgggagaaagcaaaaagaaaagaaaggaaaattcccaatcaaagaatgggagaaagtaaaaaaaggaagaagaagaaggaaagaaagctcctgatcaaggatcgaaagaaaacagaagaaatgtgcagagaggtctttggaccggacaatatctgaacaatacagaattgccaccaaatgaacgaaaaaagaaggaaagggaaccacgacctanaatagtcttcttcctttgattaccaaccaaaatcccgtgcgctagcgaccctt

SEQ ID NO: 78440 - DNA, 329 bp, Glycine max
  unsure (1)..(329): unsure at all n locations
tatgcgcatatttccttacaaacgttctcttgcacaagacattctattaaccgaaaaaaatgcacccatatacaatcaaggcagcttcgttacctagattatttacacgtacttccaaggtgtatttgttacttacatcacacacctncttggctaaattcacatacatgcatactcaaagcattntggggtaccaaaaattgcacatgtgcacatcttggtatttctaatacctatacatacacaaacttcatgatgaatcttgactatctacacaataaggtgctacattctatgctcttttcaagattttgctacctaaagccgca

SEQ ID NO: 78441 - DNA, 424 bp, Glycine max
  unsure (1)..(424): unsure at all n locations
agctctgcttctacaatgtngatagganttattgttcttgttatcattctttncgngagcgtgtgtgcgtcttatcttctaagatttgaatgtggattaacttgtttttactttatacataaaagaaaaataaattgtccaaaggaataaattagattgaatgcatgtatatgctaaccttatgctccacccgttccgtagatggtacagaaaattcttgctacaattttgaatatatttcttggcatattttattttgcgatgaactatatatgttgcggaaatcacgtgtataattctatctcttttaatcaagagcaacaaatgtaattcatggtaaaataaaaattacggattataactttgagtgttttaatctactcacttatgatggatgcgattctaataatctcttttacttcat

SEQ ID NO: 78442 - DNA, 388 bp, Glycine max
  unsure (1)..(388): unsure at all n locations
ataaacacacacacactggtgtctagtcgatcacttttaataatgcctcccctttgtttttgaatttatgcttattttaaaaataaattatttactcatgtgaagttcttggattcattcgctattttctctccccccttggcatcaacaaaaaagcccaaagggcgtatcancacttaaaagtatgcaccatattatcttaaaacattcgtacaacattcataaaatatagtaaccacaacatgaagaaaaataaaccatgaagtaacaatcataaatagattaacttataaaatccacatagtcaaataacatacttgttcaaccaaaccatgaaaataaggaaatactatattgttcaaataccatagtaatatagcccaaatac

SEQ ID NO: 78443 - DNA, 174 bp, Glycine max
agactgcatttaaagtacaattccatatttatctcagtacttaatatttagcaataaactataaaaagggcattatcttcatgggcatctcggaatctaaaaaaatggatggtgaacataacaccactttcattcgacaatgaaatgaaaatccaaaaccgtatattaattgtc

SEQ ID NO: 78444 - DNA, 341 bp, Glycine max
agagacattcaaaagccttaattctttgtgttgttttatgctacttgtttcatgcgagccattttgaccctacaatatttcgttataattaaagattcacaggaattaaagtcatcctcttggatatcaagtctgacaaaaatctttctcatagtctccccctttctctgtctatcttttattttctttaatgattcaaatcctaaaatatttccattatattttggtccaacgttgtatcaatccacatcattatctatttgaatgatgctggatattggtattacttctgaaatataatcctggaatgagaatgagataattaaaataaattaatttta

SEQ ID NO: 78445 - DNA, 378 bp, Glycine max
  unsure (1)..(378): unsure at all n locations
agctntacagcagattntagttatgacccactatcctataattaaaataacttaatgccattaacctagggaattaaaacaaacttaatggctgagtgtaactgaaattgtggcaaccaaaagttacccccaacagccaacaagtcagccaccatttggtctcccaaaaggctgatgcctaggttgccaattgggcccttattacaacttgaactaaagcccttttagttgattaacccaaaacatatttttggtcagccaactttacaaggattgngccattatttagacaaactaaacactctaaaattgaaataaagtggtgtcatttagtcctcctccatttgggccatgatacaactcacaaccttggacttt

SEQ ID NO: 78446 - DNA, 385 bp, Glycine max
tgagattttgagtttgaaatgctggaatgcattcgaaactcttatcacaaaataaatccatatctatgaacttagggtcaatgatagaacgagaggagaagaggtttgtgtaccgtatacatttttcttccgatgagaacaatgaggaggaggaaatggaggaaggaattggaatatcctgagcctcggagtgcccttggcttctactcgaagaacctttgtgcttctttgatggttcctccatttgagatattttttcaaaatttcaattggtttaaatgaaagagaatgaaaaaagatgaattttgggctttgtggggagtgatttggataagaaatgagtgagttatggcaaaaagaagaattgggaacgagggttttcacg

SEQ ID NO: 78447 - DNA, 406 bp, Glycine max
  unsure (1)..(406): unsure at all n locations
agcttctcccccatnttcctatatatagtgttgcaatcctatcccgcaagggcattgtgtagaagactccaagtagattacgctagagatccaagggaaggccctanggttctcatgagccttanggtagatttcgagcccatgggctaagtatgggcccgcttgtctttgtaaatattagaatanngttttccttcgtttgggccttgtattttggccattctagtagtatagggttttagccttgtatttcggggcattttgagtagtctctgtagtaaggactctttttttatattttcatgtattttgtcatgggggtgagcttaactattatagggggtgtgtgttgctaagctctagcttctntatgaatcttctcaatgaagcttctcaacggggtgag

SEQ ID NO: 78448 - DNA, 459 bp, Glycine max
  unsure (1)..(459): unsure at all n locations
tggctctggccatcagaaccatctcattattaagttcctctaccttngaatagacattatggtctagtaagtgcttctcttcatcaaataggtcaaagctgatcttctgatcatctatgcccatttccaacttaccctttcccatatccaccatgcaactggctgttaacatgaagggacggcccaaaatcaagggaatttcagtgtcctcttcaatatccataaccactaaatctgcagggaaagtaaaatgcttcacccttactagaacatcttcaatcaccccatatggtcttgttataaaacgatctacaagctgtagtgccattctagttggcataatctccaactctccaattctcctacacatggagatagacatcaagtttatactggcccccaaatcaatgagagctttaccaacaaacactgaaccaatagagcaagggattgtgacac

SEQ ID NO: 78449 - DNA, 459 bp, Glycine max
  unsure (1)..(459): unsure at all n locations
agcttgtaggattatggngtacccatcacatgtggtactangtggcggncgggcgatggtgcaaaacaagttntccacatccacaaatcgcgcataaacccaccatcccctattgcccacctccaactgagctcacgtactcccacgtagcccatatcctcgtttctctcaacaccgggtccccatcaatcctcccaagctttccccaacatccaggtaaaacaacattcaaacagcacaaactatcacagccaagaaaacggtgcaaaggcagaaaactctgcccaaaacaccaaccaaaatcacagcttttctcacttaaagaccccagtaacaattccttcgttccagtttcttaaccgttggatcgaactcgaaaatttactggaagtctctagtacataaatctacatttggaccgtntggatctactagcanacatccagaactcattctgca

SEQ ID NO: 78450 - DNA, 451 bp, Glycine max
  unsure (1)..(451): unsure at all n locations
gtgagccataatcctgactcaccatagaccttgacccattgtgtaaatgccaatccttaccctcggaagtgaaataagaagagaaggaatattaagaggaagcaaaaaaaggagagaaggagaatttccaatcaaagaggaagcaaaaaaaggagagaaggaaaatttcctatccaagagaaagcacaaagaaaagaaaaaaaaattcccaatcaaagaatgggagaaagaaaaaaagagaagttaaaagaagaaagctcctggtcaaagaaaccagaagaaatgtgccgagaggtccttggaccagacgatatctgaacaatacagaattgtcaccaaatgaacaaaaagaaggaaaggaaaccatgacctanaagtggtcttctttctttgattacgaaccaaaatcctatgcgctagcgactttttcaccccgcacttaaacaaaaca

SEQ ID NO: 78451 - DNA, 465 bp, Glycine max
  unsure (1)..(465): unsure at all n locations
tgcagcttcattctacacctganaaagaagatgtatcttctgcacaaaggagaaagcttctngatcatgagggagctaacaaaaattttcatgcaggtggnaccttttctagtagttctgacttgcggcaacctcctatccctcttccatttccacctagagcaattccaaacaaaaagatggaagaagtggataggagattttggagacctttangaaagtagaggtgaacatacctctgctagatgccatcaagcaaattccaagatatgccaagtatctaaaggagttgtgcacccacaaaaggaggctcaaaggcaatgaaaggattagcatgggcagaaatgtgtcaacattaataggtaaatctgttcctcacattcctgagaaatgtaaggacccaggtactttctgtataccttgcattgtnggaacaacaanattgagaaagccatgctagatcta

SEQ ID NO: 78452 - DNA, 427 bp, Glycine max
tgtgatcgattacacatatactgtaatcgattaccagatcatattttcagaaaatattctcaacagtcacatctttttatgtggttcttgaatggctatcaaaggcctatatatatgtgacttgagacacgaatttgctaagagtttttcagaacaaaaaggtcttatcctcttataaagaaaaatcgttttatcctcttacaaattccttggccaaattacttgtgattcaataaggaattatttgagtgctcaaattgttcaatctatctctttcaagagagatttcttcttctcttcttcttcattctgaaaagggattaagagaccgagggtctcttgttgtgaaataattctaaacacaaaggaagggttgtccttgtgtgtttagaacttgtaaaaggaatttacaagatagtggaactct

SEQ ID NO: 78453 - DNA, 376 bp, Glycine max
  unsure (1)..(376): unsure at all n locations
agctnggttcgaggtacttaccttttgaatatcgaagaacgatgaagaatgaatgaagacgtcaagaactgtcataccttccgaaattcctagcgaaccgtttcggggcccctcggctataattttcttcacggaaccaatttttccaagcaaattctaaaaagagagaagtgcctaatgcgctgaacacctttccttcacactccctctcctattatagcaaaataggggagatgctcgccgcccatctcgcccacgcgagcagggttgcttcctccagaaacaacacccttctggaggaatattctggagggcccaagtgggcctggttgctatttgcacccccattttttctaagtacacccccccgcctttt

SEQ ID NO: 78454 - DNA, 455 bp, Glycine max
gtgccagtacatgcgctaagcgcacttcttatgatgtacaaatagaatgatgttggcgcttagcgcattctttgccactaaccccagcttggaagctcaacttatataatgaatctggggcttatggcaggatggcgcacttagtgcagctatgaaaaaatttcacagagaggaagtggcgcttagtgcatcatccacactaagcccactgcttaacgtgcaacttacagtgaacatgttgggcttagcacagtgatgtgcgcttagctgaaccattcagccaatgaatcaagggtctttgcgcttagcgcgagcaagcttggcttagcgcgtgaagagatggcacttaccgcaaggtttgcgcttagcggactaagcatctgaaaatttttctaagtcattatgtgcttatctcttcacacataatattaaaacccctcttgttattactaaac

SEQ ID NO: 78455 - DNA, 457 bp, Glycine max
agcttcatacaattaatatagaacctatattctaatatcacatcccatcagagcactgtgtcacgacgtccttcagcacaaggttccttaaatcacttcacctagccatctgctcccccgaacacaaggttcaagatcatcacaggatccaaacacaaacaatacacagggagtgagttatcacattcctaactaatagagaaaaataaaacaacatatatgtataaatatcgtataacaaaataccatttacttgagcataactcacgttatttcaccacacgtctcattcgttttcacaacattcgcatactcaatattcaaaacacaatatcatcaaatcaatcaatatagaacaatacacaagcgttatgcagcagatacactaagactcaatcctatatgcaatgtggtaccatgtcaatgaaaaacctcgtcgggcgcctagaagtacatg

SEQ ID NO: 78456 - DNA, 341 bp, Glycine max
  unsure (1)..(341): unsure at all n locations
tgaggttgctggagtatggtatggaacctattgatgagtttctttgattgcnggatgatgtttctgaatgctgttggaagccatgtcatcacgcaccgctgtgatgtggcaatagaggccagttccctgtgttcgagacaatcggagaaactgggacgaggtctacatgcccagggttgattcattgccctgatgagttcgaccaaatggtcatcatggaagaacttcctacatagtgtattataatacgtgagttttggcccaaggatttgagccactaaacgccgaatgccacttcggcacctgagatgggtaacacatagagatcaacctggtactat

SEQ ID NO: 78457 - DNA, 457 bp, Glycine max
agcttagaggatactccagacatcttctcatagatcccatcggtcagatcatggaaaagtgtcttttgaagctgcagaccaaattttgagaagatccaacggttaacaaaggccgggaagcatttttaccgagaaaacttcatatagcttcctcaaaaagcttcattaagaggctccttcaagaagcttccccgtggcttctttgagaagctagatccttatctacccatacccttttattaactaaattaacctccttgaaaataattacgggataaaataacacaacaaataatcaaacatcaaacataattactaataatatatatatatatatatatatatatatatatcagggtgttacactcaacattctctgtctttatgtttccataggactcaatatatatatatatatatatatcgggggttacactcacattctctgctttttttt

SEQ ID NO: 78458 - DNA, 410 bp, Glycine max
  unsure (1)..(410): unsure at all n locations
cttatcaagaatttgatgaggatgatgaactggccttcatcttaagaaagatttgaaagatgtggaagaacaagagtgggttaagaccgaactcctccaaaaaggtgttcaaagagaataaaaacaaggaagagagcttcataatatgatatgagtgtaagaagcttgtacacttcaaatcaaaatgcctaaaactagagaagtccaaggacaagtacaagcattacaagtccaaaagtctcatgagcagttgggaggacatggacaacaccccctttaatgaaaaagtagaaggggaagccaacctatgtctgatggatgatacaacttctgaagagtcagaatcagaacaagagaaggtagatcttgatgaccctaaatcattaagacanacctatcataaactactt

SEQ ID NO: 78459 - DNA, 361 bp, Glycine max
  unsure (1)..(361): unsure at all n locations
tgggctgcttagttcattatttcgggtcgaatgatgcattgaattgacaaggtagctatgggttgtggcctcagataggctatgtagaaaatggattataatttatcatctatttgaacaattttggggtacatatattgcaaactttatagccgattaataaggccaatgatgctcagatttttttttaatcagaaaaagacaattcttttttggtattcaacggggctaaaaagcccggaaaaagaaagctacacagaaattaaaggaggagtcacagctcccatcgaataaaanaaaacaattggcttaaaaaagcacgcaattgttcaaacatcanaaaatctccctcaggtctaca

SEQ ID NO: 78460 - DNA, 234 bp, Glycine max
  unsure (1)..(234): unsure at all n locations
tattcttaaacttcaaaagtgtctcacgctcacttgggatgcacacactctctctgcatggtaagctcaacaaccaaagctggacaaagacaagaatataaatggaggatgaattcatgatcacacaaggatatatcaaacagcttaattgtataagtgcttcttgcttctgcttattaaacttacttctttctattatttatactgatgcaagacgctntcttttcttttttc

SEQ ID NO: 78461 - DNA, 468 bp, Glycine max
  unsure (1)..(468): unsure at all n locations
agcttgtcaattgttgcacantttgaccatttttattgtattatgattcatatganggntgtcttttaccaaaactgtaagttatttgtcaaaaaaagccaacaaaagtgtgattatgttatataatataaaacaaaatcatgtttttataagaatcataaattgttattcccactcatacattatacaatggaatcatactttttgtaagaagggttatttgagaattcagntaaaatcttaatccacatacatgggtgatgagaataacaactttgttaatcataaaaacaaaagaccaattctattttatcggatgccaatttgcagcaatttcctgtgtttgtgattcagagaaaaccaaaagaaaaagaaacacaccccatcacaaanacacctttaaatgaacacaactagttaactacataacagatggcatcgttggtgacccatttttgctattctctt

SEQ ID NO: 78462 - DNA, 339 bp, Glycine max
ttataacccttcaaatttctctctttacacccaagcctttttcgagtatgcctaaccccctaacatacctcaaggtctatctgcttatgcccaaacttactaaaaccactatacacacgcaaacataagcacaacatcaccacgtaaataattaatttacttcaagcgtttaatttaaatttaattacactagataattaattaaaatcacttaatcaaacattatgaaaaacacaatgttataatgattaccgtttctcgattcaaagccttttcctcctcattcaacctttgcaagtttttctaattctaatttcattcctcttttctcccttacct

SEQ ID NO: 78463 - DNA, 448 bp, Glycine max
  unsure (1)..(448): unsure at all n locations
agctntttcactcnttcttgggctctccttattttggctattcttggaagatgaattgcagcgganaggagaatgaagagagagaggagatgccacttcaaggagaagatgagtctataagaagctcaccaccataggaggccatggataagagcttggaggaagaaacagatgaatgaagggaaaggaagagaagagcacgaaattttatgctctaaaagagctctgaaatctgaagtttaattttcaaatgttcaaagttctaaaaaaatgcacaaacatggcctctatttatatcctaagtgtcaaacaaaattggaggaaaatttgaatttctattaaaatttcatttgaatttgaaattgaatttgtggagccaaattttggagccaaaatttcaccaatcatgatttgtgaattntagctatgtttcagcccactaatccat

SEQ ID NO: 78464 - DNA, 413 bp, Glycine max
  unsure (1)..(413): unsure at all n locations
gagacagatacacttgtctataacccacacataaacattcattgtctttgtgtaaaaactctttataaatgtctatataactccgcaaaataacttgttatctaaaaaaaatgactnaacggctaaagattgtatatttgtttgtaagacaattaagagccggtcattgtgcacacaaacaacaaatgtgtttgatttatataagggctaataagattgtatattcgtgtgtaagaagattaaaagctagccattgtacaaacaaacaacaaattcatttgatttatatagagtcaacagtggctttgtatgacaaaaatatcgagttttaacaaagttggggtagagtttgtcttgtgtagtaaagtgtggtcgtgacaaaatactcataactttgaaaaagttattgaaac

SEQ ID NO: 78465 - DNA, 444 bp, Glycine max
  unsure (1)..(444): unsure at all n locations
gcttgtctttggttanggatgaattatactttatntatgactngnaggatccaatttgggtaaatttggatgatggcgagggggatttcgaaatctgccccaatttgtgcagcaaaaagcttgtcaaatttgtgcagcagaaaattgtgtttgtgcacaaaatgtttgtgttgctggctatggaaagagtaatacatattgggttctccacattttctagcagatcccaacggtcaaaatgtagaattatgtactanggacctccagtaaaattttcgagtcgatccaacggtgaacgaattggaactaagagaatgttactggggtatgtgagtaaagaaagctgtggtattggtttgtgttttgggcaaagttttctgcctctgccctgttttcttgtttntgatagtgcatgatgtttggatgttgaattgcttggatccc

SEQ ID NO: 78466 - DNA, 362 bp, Glycine max
ctaacattagatggcccgacaaataagacatataagttgagtgagttagctagcaatctattactttggtagctaattaattatatgttagttagtttagtagtatataaagtgtagactatttaatttgcatctttttcttcaataagcgaccgagtatagttatttaacatcaaatgaacattctcagcagaaaaatattctacactttattgaagaaacgtgaataaaccttaactgaactgcaccaaactattaataatccaactaacaaaactacactaaactgtttttttaaaagcagttcactacctctatacagcaatgtaaaaatctacttaattcagtgaatcactgaacct

SEQ ID NO: 78467 - DNA, 249 bp, Glycine max
gaaatgatgtgatgacatctgtcttctcttacatatatctgattctaaaacgtatgatgggaactttttgatgcgtttgcatgaacaacaattcggggtcatatgccacaattgattggtggctaactttgaactctcccctaaagagagaccttttcacatagttcagcacttaccaagttttggtaggccacaaaatgtatacacgtatgggacgtcatatccatcccttgctgttctgaactggtc

SEQ ID NO: 78468 - DNA, 422 bp, Glycine max
  unsure (1)..(422): unsure at all n locations
agcttaactcataagtgaaatcaacatcattgtcgtttggcagaagctcaaatcattaatccatgaaactatcaaagcttaaccactaagtagaaattatatctcaaagtttaactacttggtagaagcaacaaggcttaaccattaagagtagaagcaaaacaacaattcaatgcttaaccatccatgacaaaagcttaatcaatgcttaatcaccatggacaaaagcttacatcaacaaaatagaaaaatcacaaaatttgtcttctatgaggacttttgacaaacactttgtgaaccaacaataaccaagacttaacaactcatgccaaaagctaaaatcatcaaaacatgctaaaaggctgaaaacaataagccaaaacagaccanatttcaatgaaacaatgaanaggttattcacc

SEQ ID NO: 78469 - DNA, 453 bp, Glycine max
  unsure (1)..(453): unsure at all n locations
tgtagaattcaccccaattccagtgtcctatgctgactctctctcatatctacttgataattcaatggtagccataaccctagccaaggttcatcaacctccatttctccgagaatacgactcgaacgcaacgtgtgcttgtcatggagaagccccggngcgttccattgagcatggtagggctctgaagcataaggtgcaaggtctaattgatgcgggctggctgaaatttgaggagaattgcgtgtaaatcccgacattgacaagagatgccacacatggggcaattttgaaagctgttgttaggtgtccctaatgactcatcanggtttccaagtttatgccattattgtaaaccacagctacaatgttaaatgaaatggataaagttgatatctntgtccctcatcctctcacaaacgcatgtttgcttattcaactttcatcggaatg

SEQ ID NO: 78470 - DNA, 458 bp, Glycine max
  unsure (1)..(458): unsure at all n locations
agcttataagaacanaatngcttcattcatttccaaatatgcatgtgaattaggaagcatcaacaagaatcaagccaaggctattgtgcaagcaatcaatggggcaaaacacaccaattgattatgatgatggatggctcanattctcacaaaggtaaactcatcactttcaaattgagctntcaaaactatcatgacatgtagaggagaatcaaggatttcaagtcacaaaatgtcaagaacttttattttcaaaacaattacccatttcttgaacatatcctataattcaaagaanaacatgcaaagtcgtacatgcacacaaaatngacccanaatattaaactaaaaatccgacaaaactaacaacattaacaaattaacacaactaacaaattaacaaaaccaacanaactagcaaaaccaaagaaacactccccccatacttaaacaacaca

SEQ ID NO: 78471 - DNA, 452 bp, Glycine max
acaagccaacaactctcgcacctgtagagtttatcattctcgacaccggacaatacttattcaagttgaggggcttgacaaactcgcaaccctcttacttgtcaaggctactacctttgacaccataaatctcttttgccaacaagctaactcaaagcttgggggattatgtactgcccggggtccacaaaatggacgtggcaagtgacgtggcactccagtgagcacgtcagccctctatgtcaaccttggcataagagcacagacaccttgcccttatcagccaagctactgggccgataggttatctctgatacctcattatttgaatattaatgataatgttagaactcccttatcaggtgacaggtacctaattatctataagccacaacttatctactagctattaactataagctataattatcttcaagctagtaattatctac

SEQ ID NO: 78472 - DNA, 396 bp, Glycine max
  unsure (1)..(396): unsure at all n locations
agctngaaatgaggaagtgtagaagggtgattacttctgcttttattcgttgaccacagagtggtacctggagatatgtcgcgggggtcaggagaccttggggacgtcatgtggggtgctattgcccaaaaccaagcttgaccaatcccgacccaacccgggcatagtcaatcagtgagaacctgtgatgtacctaagcaggcgagcttctggcagtcaacagataaaaggaacaaagaccacaaancaaggaggcttgtgtggtggctggccacctgtgaactttgattgatatatgggatatggcctctggtaatcgattaccaagggtgggtaatcgattacaaggcttataaatgaagacaggagactaagatggtctctggtaatcgatta

SEQ ID NO: 78473 - DNA, 447 bp, Glycine max
  unsure (1)..(447): unsure at all n locations
tcacannaagttgtatggctagaaacaagcaccgatgcttgtttctagaagtttaatgagtttatgagcaactcaggattcanaagatgtgacatggaccattgctgctatgttaaaaaatatactaatagttatgttatccttgttgtgtatgttgatgacatgttgattgcaggatctagtatggcagaaattaacaggttgaagcagcagttggcagaatactttgaaatgaaggatcttggtccagctaaacaaatccttggtatgagaattcttagaaacagatcagaaggaattttgaagctgtctcaggagaaatatatacacaagttgcttgacaggttttaccttggagattctaagaccaggaatacccctttgggatctcatttgaagtcttcaaagaagcaatctttgcagaacaatgaagaaaaatgttacatg

SEQ ID NO: 78474 - DNA, 427 bp, Glycine max
  unsure (1)..(427): unsure at all n locations
gtttattatctcaggtttccttaccaagtaaatggttcatttttaagggccaacgccttaaaatgatcacctttcaagtaaaaagaatcgcttgattcacccttaaggaagaactacgtaggtctgatttcctctttgatggagggtacgtaggagcaagagccccgcttttgtcgacctcaaaaaataaaaagaattaaaagttaagataacacaatttcacaactctaaaaaataggttgttgttgtcctttgagacaaaggtgagaggtgctaataccttcctcaaacgtaaatacaactcccgaacttatgaattttattttgaccggtgatatgccatcattntcttctattntctaaacccttnttgcacnncatttaatactgatnggtcttaattgcaattaatcaggcagtttattat

SEQ ID NO: 78475 - DNA, 373 bp, Glycine max
  unsure (1)..(373): unsure at all n locations
tgaaggtgcgntacgccaccatttttcatagtaaaacactggtaatatgtctactattattgtgatcatctctttctccgtcattggagatgccacttgagctgccaggtctcttcacctttgggtgtattctttgaaagatttgtgcccctttttgcacatgttctgtagttgcatcctatccggagccatatcaggattgcactgatactgcctaacgaaggcaaccattangtccttccaataatggactcgggaaggttccaagttagtgtaccaggtagcagctaccctagtaagactttcttggaataaatgtatcaatagttcctcatcttttgtgtatgcccccatcttccgacaatacatcttt

SEQ ID NO: 78476 - DNA, 435 bp, Glycine max
  unsure (1)..(435): unsure at all n locations
agcttncatcaagtggtaatcagatcacattagcttcaagtaggtgctccttaaatctccattaatttttttgctttaccttctcttccattgntgnttcttcatttttctccatgtatctccttgcatgtcttgtgctaaatgttgttaacatgattctttagagtttccaccaattaaacttgctatagaagcaaaatttgattttctatggttcaaatttcttgttcttgttcttgaaccatgaattgtgttgagtttaggttcctttgagttntgtcttgttattttttgtggctgaaacctaaaccataaaattcttacaaaaatattaaagtagaagaaaaccccaaaaatctagagtgacttgttcacctattgtagttntgtcatagaagtcatgtctagtcatgaaacttgtcacataagatttct

SEQ ID NO: 78477 - DNA, 457 bp, Glycine max
ggaacttagatactcagcttgagcccaatcctgactcaccataatccttattcttcttttgcaaaaataatagaagggaaatttccaatcaagaataagagaaggaaaatttccaattgatgcaaaaaaagaaaagaaggaaaattccccaatcaaagagtgggagaaagcaaaaagaaaagagaggaaattcccaatcaaagaatgggagaaagtaaaaaaggaagaagaagaaggaaagaaagctcctgatcagggatcgaaggaaaaacagaagaaatgtgcagaaaggtctttggaccggacaatatctgaacaatacagaattgtcaccaaatgaacaaaaaagaaggaaaggaaaccacgacctaaaatggtcttctccctttgattaccaaccaaaattccgtgcgctatccacttttttcccccgcacttaacaaaaaaaacagaaaaa

SEQ ID NO: 78478 - DNA, 446 bp, Glycine max
  unsure (1)..(446): unsure at all n locations
agcttccaaattagtgtaccacactaccgcttctccggccaagctatcctgaaagaagtgtatcaacagctnttcatctttagaatgagcgcccatcttacggcagtacattttgagatggtttttgggacaagtcgtccctttatacttgtcgaagtccggcactttgaacttcgggggaataacaacatcgggtactaagcaaagatccgtcatgtctgcaaacggatagtccccaaatccttccacagccctcaatctttccttaaggagatcgagcttcctcctttcttcagttgccgggggcggcccttccatggacaaaactattggcgatgctgcgatgttgggttgaggcaacgtgcctggtgccggccctttggggatcgggggataaaactcgacatccctccgagcataatcttgagggtctntatggacttcgt

SEQ ID NO: 78479 - DNA, 448 bp, Glycine max
tgtttaccccatgttgaaattgcttacaatagagctgtttatatcaccactaattgttctccttttgaagttgtttatgggtttaacccactaactcctcttgatcttttgcctatgcctaatgtttctgtttttaagcataaagaaggtcaagcaaaggcggactatgtgaagaagcttcatgagagagtcaaagatcaaattgagaggaaaaataaaagctatgctaaacaagccaacaaagggagaaagaaggttgtcttcgaacccggagattggtttgggtgcacatgagaaaagaaaggtttccggaacaaaggaaatcaaagcttcaaccaaggggagatggaccatttcaagtgcttgaaagaatcattgacatgcttacaaagtgagctgccggtgagtattatggtagtccaccctcaatggctctgattatctcttt

SEQ ID NO: 78480 - DNA, 462 bp, Glycine max
  unsure (1)..(462): unsure at all n locations
cgcaagcttctnttatatataacattcttcgccaagtatctaataagacattttagaacggtctccataagagccattccaaaaatgtcatgactttctattacgtgacttttacaatatccatacattataaaacaatttaaaatgagatgtagtctctggtgcttcaaatcgacattacaaattgagatggtgtcaacctaattcggatttcttcaaccacatggcctcaattttccctactntttgacttaaaaaaagttcatgatcaattgagatgtagcctttgttgcttcaaatcgacattataaaagctataggggtcgagatcctcacatctctacatatttttaaactctggtttcttataagtatatttttttaactaaacatatcaaataaaaagagaaagagagaaggagaaaattgttaaaaatatcaaaggtcaattaatctaaattt

SEQ ID NO: 78481 - DNA, 450 bp, Glycine max
  unsure (1)..(450): unsure at all n locations
ctctgtgctgattatggcaatcagttgtgtctttatttttgagatccctaggtcattcaaaacgtgtcattcgttttggaaaaaggcccaagagatctttgcaaatgacattcaaagcctctttgatgcaaccatgaaggttacagctctcaaacaaactggacatgacatgattgcacatgtagggaacgctanggttgcatttgaagagctgaaaaagtttctggtagctgactcattggaagaaatgaatagaaaactggataagttttacatggtcctcattctaaggagtctacactctgactttgatcatgtgcgtgatcaaattcttgctggagatcaagttccatcaatggattctctcatcactaggatacttcgtgtgcctaatgcgtttgaagaagaaaatccagctgatgtggtggaaacttcaacaatggttgcatc

SEQ ID NO: 78482 - DNA, 453 bp, Glycine max
agcttccttatctagcattgcttcacgcatcttcacttctctcataagttttgcattagtttcctacaaaataaagccaacatgaaatgaaaaaaaaaagtggattacggtaataacaacatttaaaaattacaatttgtttgtaaaaaaaggtgaaggaaagaaagttagacaaaagcatagacattgagtcacaaggtcctagaatggttaatgattatgagtaaataaaataaattgactctggtgttttcactaattaaaaatttgtccatcaaaaccctagaaattgaaattcttccaaaaagaaacgcataaaattactgataactgatcatgtatgaaagcattactccgaagtcaggctttactagataagcaagaatgtgcaagaacatatttcacaggaagctataaattaaaaatagacttggatattgtatgtaacaactc

SEQ ID NO: 78483 - DNA, 445 bp, Glycine max
  unsure (1)..(445): unsure at all n locations
agcttatgcgcatatttccttacaaacgttctcttgcacaagacattctattaaccgaanaaaatgcacccatatacaatcaaggcagcttcgttacctagattatttacacgtacttccaaggtgtatttgttacttacatcacacacctccttggctaaattcacatacatgcatactcaaagcattttggggtaccaaaaattgcacatgtgcacatcttggtatttctaatacctatacatacacaaacttcatgatgaatcttgactatctacacaataaggtgctacattttatgctcttttcaagtttttgctacctaaagccgcatccaaattcaagtatattttcctttgctgactaanattgtattcaaattaaaaggtatacatnttttggtaatgtatcttctttacataacatgcaacatatttatgtatat

SEQ ID NO: 78484 - DNA, 458 bp, Glycine max
  unsure (1)..(458): unsure at all n locations
agctntatgtgatctaggtggtagcattaatctaattccttattntttttatatgaagttggggttacaagaacccaaacccaataacatttctcgttcgcttctagacacgaatcctacttatttgtgaggtatagtggaaaacttgttggttaaagtgggaaaatttatttatattttttatccattaggtttgggaagttaaacaagcacttcttgggaggcaacttgatttatgttacaatttgngttttatttctgtcttttatatttttgtatttgtttcagtatatttttcatcgctttaggaattgggttttagctgaacgatgtaaagaatttagggatgatcaatagaaaaacaatctgtcaaacaaaaattattctgaattcttctcctaagatagaatgaaatcatggtccaagaccactatgatttttcttcctttagggatcat

SEQ ID NO: 78485 - DNA, 353 bp, Glycine max
gaatcagaaatctgcatctgcacctattacaagagtctgtggtctatgttcttctacagatcaccatacagatctatgtccttctttgcaacaatctggagtcaatgagcaacttgaagcttatgttgcaaacatttataatagaccccctcagcagcaaaaccaacaacagcagagtaattatgatctttcaagcaacagatacaatccaggttggaggaatcatccaaatctgagatgggcaagtcctccacaacaacaatagcctgtccctcctttctagaatgttgctggtccaagcaagccatatgttcctcctccaatgcagcagcagcaatagcaacaacaaagat

SEQ ID NO: 78486 - DNA, 364 bp, Glycine max
ccattgaaaaacctttatcaaacctttcaagagtgtgagaaggctaaaccaagaattacggaacttaaaaaacctaaatccctaattgaaagcatatgggataaccatagtgaataacttaacaagaatgggaggttacttaaggtcattccagaaactcccaagcctccgaagatacttccaaaatggtaaccagaagtacctccaaattaattaatgttattaatgaaaaaagtgacctaaactcagaccacacaactgagataggatcagtgtcagaagacaatatatgtgcaattaattcccaacactgtgaaacacccttcaaattatattattcaacgtcgactggccctgacctact

SEQ ID NO: 78487 - DNA, 380 bp, Glycine max
  unsure (1)..(380): unsure at all n locations
agctnttgtcactccacccatatctggccttgacattaaccagacttaacaccaccgacaacaacgtcaaggaattgttgcaccccggatacaaaggcttctttgagtcactctgtaatccttcatacacaggggcatttgcttgctggaaagactcttgtccaaggtcacgaatcatatcctccaagcgatctcccatttctacatcaaatagttcagattggtgcccactctgcatgtctgtcatttcaccatgccatatccacgtcgtataattcctcttaattccatcacacaaaagatgctctcgtatgtcatccagtatttgtcgtcttccattcaaacaattgatgcaaggacagtaatatttttcatcttca

SEQ ID NO: 78488 - DNA, 458 bp, Glycine max
  unsure (1)..(458): unsure at all n locations
ntgtaccttgtgcttgagggctacacactgctcgatagtttgccccangacaccaccatgataggtgcaagtggcattgggattgcaccatcggggaaaggggggttgatatacctttcccgggctcaccataaccattcggttgatgagcaaagatggtagcagatcggcatatggcattggtattagggtgaactccatgggttttctttctaggaagttccttcttgggttggtgtttatattgggattgggatttccacttggtcggggctgtgcggggaatggattttgtgggtgatgttagggaggtatttgtggttaggtgggcattcttggttggataggggtcagatagggaggagacccaatattggctgagtaattgtattggtgcaagggatattggtacgtggggttgtgaggggtttgttggaaactcggccatgtgggagctg

SEQ ID NO: 78489 - DNA, 399 bp, Glycine max
  unsure (1)..(399): unsure at all n locations
agcttcagcacttctgtagggttttanggtttttcatcatctctgataaatctgccatatactcagccggtattaggcctaatgagctttctcatattcagcagcttactggatttagcttgngtgacttccctttcagatacttaggtgttccccntttatcatctagattaaatgtatgtcattatgctcccttgctttccaagattactggcctgattcagggatggagtaaaaagtctttatcttatgcaggtaagttagagttgatcacaacggntattcaaggaatcgtgaatatctggatggggattcttcctttgccgcaatctgttatagaccggatcaacgcttcgtgccgtaattttctgtggggcagagtggatattgtcaaacaca

SEQ ID NO: 78490 - DNA, 466 bp, Glycine max
  unsure (1)..(466): unsure at all n locations
ggacacatagatactcagctttgggtttaaaagtgggtcatgcttncactttttttgagaangatgangagagggaaatgctgcatcttttctcacagattttggccatcatggaacctcgagatcttatggatatgttctctttgtgtatgcctgagctttntgagtgcatgatctccaacactcaacttgtccatatattctctacccttctagcagcacagaaagtgtaccggccattcgcagatgtgcttgttaactttcttgtgagcagcagacttgatgtcttgaagcaaccagattcacctgcagcaaaactggttttgcatctctttcggtttatatttggtgctgttgctaaagcaccatctgatttcgaacggattttgcagcctcatgcgcctgtaataatggaatcttgcatgaaaaatgctactgaagttgaaagacctcttggctacatgca

SEQ ID NO: 78491 - DNA, 481 bp, Glycine max
  unsure (1)..(481): unsure at all n locations
atcctccgagtcacctgcngcatgcaagcttgtgtattgctgcattctactaatatatggaattacccattgctttgcctgagaataacaattggttgaccacaacagcgctggaggcggcaacggacaatggtctttcaaataaacctgttgtacatgaacaaacattatatcatgcgctgaccgtgccaaacgaaccagcgaagtcattgcataattgttacactaactatattcaatgtacctgaacaaaatgatttccaaacacgtgaccgacacatatgatgcggtggccagaagagtcatgtggtggttgacttctaagagggaaaaatgtcatgctttgttgttgggacaacgatacaaggattacgttataccgtgaagcaatcacatatcccatgtctgttatatccatccacttgtccacactaacctgaatgaaccanacatacacatgtaagtaattatacattgttat

SEQ ID NO: 78492 - DNA, 386 bp, Glycine max
tacttggtagaagaggacagttatgccggcgcctgattatgtttgagaacaatggagttggactctgcgcgcttgaagaaacgaactgtgatgggagcaaaaagaggagagagagagagcgaccgaaatgtgattatacgaataaataaatgttgaaaagaaaagggaagcgatgactaacttgagagaaggataacggtggtgaagataaggacggcggcgacggcgtatagctgaattggggggacggtgtggactgcgacgcgccaccaccgaagaaattgttgtttccattgctccaaatgttccatgtggtgtgcttatggaagggaacacactcagcgcatgaaaccttccctttccttctggtctactactatagtcta

SEQ ID NO: 78493 - DNA, 456 bp, Glycine max
  unsure (1)..(456): unsure at all n locations
agcttgcaaaatatgagacttatgtttgatttttgtcggcatcgtaaaaaatcaaaaacttagatatggttaaagtcaaagcgataaagttcatcaatttttgtttaccattaaaatgtgttggagattcctgtatacttacatgagttaaataacttaacgtcattataacatctagatattgagttgcatttaagtgggttaagaaatacgttatattttgaagaataagacataaagctggaccaattgaaagtgctgataattaaaagatagtgacattttttagttttcttaactaaatatcttctacccaatagtgaaaaattgattttnttgttaggaacaaaaacatcaagtcgaacaagcaattagagctagctntcgcatatgagaaattaaattactaaagtgattcaattttatggtgatttcaatcaaccctcatataatata

SEQ ID NO: 78494 - DNA, 443 bp, Glycine max
  unsure (1)..(443): unsure at all n locations
ntggcttatcagggaaggcaaaaggtggagaactggttcttatactatgcttccaaatcatggagaaagaaggaggggttcaaatatacaaccaacatgagaatatgaagtccaaaaggttcagaaatctcacatctgcatttgctcgcaaacaatccaagtcatcattcagcttgcctagtccaagaataacaagcagaagtgatgcttggactccttcacagagaaggttagcagaagatcttcaaggtatagatgatttgaatcttgaggatccacacctagttcatgatgcccctccctctatccagaaacttgatggtggcaaagagaacgtggaggattttgatctcccagacttcgaggttgttgataaaggggttgaggttcaagagacgaaagaattatatgaccgagaagaatctgagaaatccatagaagtg

SEQ ID NO: 78495 - DNA, 444 bp, Glycine max
  unsure (1)..(444): unsure at all n locations
agcttanggacccattcttgtttcttcaattcaaggaaacatgcttatggctaggaatccaaaatctggttttagaattagaaaaacatgaaaattaggtcttgcttgtgagagtttttgctcgagtttgggctgcccatgtttgatactttacatagaggtagcgtggaagaagccttgcaatagtatgtatacatangtaaatataaggagcatgaaattcctagcaaagtgtgaatgattgtcttcctaaatgaatgtatggtagcacggaattcccttttaaatgcaagtgtgtgcataatgtaaatagcttgcccatatgaataaatgtgaatgaaacaataaaaaaattttatgtagcttgtgatagcaaaattgttacgatataaattatgtgtgaagttgtgcgcaacacttttagcatgaaaatgttgttttctt

SEQ ID NO: 78496 - DNA, 372 bp, Glycine max
aatctctcaggaagtttctcttgtgctccttaagacggagcttattattatgtgtgtgtacctaagcctacctctcaggaagcttctcaagaacttctaagaagtatttaagaagctctcaagaagtctctcaagtttcaaaattctaagatctcctagctataaataaagctgtgcacacttgttcaactttgatgaatgagagtcttgtgatacacacttcagagttcaacttctctccctcttgtacacctctcatttcatgctcgcccctctctctttctctctctctttcttgtaccgcattgaagcatcctctctaagcttctttatacaggcactctctaggtgggaagctctttcttacatggc

SEQ ID NO: 78497 - DNA, 348 bp, Glycine max
  unsure (1)..(348): unsure at all n locations
gcaccccatgtttactaaatacaccccttgcctttntttgctgaatctttttctgtaacgttacggaaacttacgaattacgtaacgatacttgttttcttttcgtaatgttacggaaccttacggattacgtaatcatcccttttttggcttccgggatattacggaactntacggattgcacactaacacttccttttgacttccggcatgtcacggaacttcccgggttgtgcaacaatgctntcttttgacttccggcatatcacgaaacttcacaaatggcttaacgatgggtgccaagtacctcgaagtggtcaaatgaaggtcgcatcccaacaacggatg

SEQ ID NO: 78498 - DNA, 381 bp, Glycine max
  unsure (1)..(381): unsure at all n locations
gcttcttatccaaggctcatctnnggggttaagctccttcttccatggcttatttcctagtggatggcgccgcctcttacctcttctcctttgtcttccactgcatctccatggtggaaaatcaccattaaaggacctcattgaagctcaaagatccagcctccatagaagctccacaagcaagcttccatcataagtgacagctgatccttggctaagcgtgacctattgtcgccaagctaaattccttatagccataactaaggtccatgaagctaagcgccagtcatggcagctaagctgaattccttgcggcaatatgatcgctaagcgaggtcttatcagctaagcgcatgctcctctgtacttatgatgcatcat

SEQ ID NO: 78499 - DNA, 369 bp, Glycine max
  unsure (1)..(369): unsure at all n locations
caatctctttgaatgtgtcccttttgtccacaattaaaatagatcatatctttatctggacaatttgaggaggtgtgccttggcttcctacatttgtaacaaatgatatgagtggggaaagtattgggtttgctaccactaccacctgcaaatcccctagcaacagtcctctgattgtcatggcggttaccatattgcttatgaggagtcaaatacggttttccccgatgttgagggtccattcttttgttcctcattggacctgtactcctataataggtcgccctgtctcgagagtcttcatcccaaatttgacacatgttaaccaaaagtgggaactgacanataccttggtaattcacaacttgg

SEQ ID NO: 78500 - DNA, 438 bp, Glycine max
  unsure (1)..(438): unsure at all n locations
gcttataatatatcgaggcgctcgaaattgaacaactgttgctcttgagaaattcaaatggtcataacttttaactcggagttcaattcatgcgcatcacatatagagacgctaaaaaatgaacaaccgaagctcttcagaagttaaaatggtcataagttttcacactgatgtgcgattcaggcttatattatatcgagacgctcanattgaacaacgaaagctcttgagaaattcaaatggtcataactttttacactgaggtccgattcacgcttataatatatcaagtcgctcgaaattaaacatcggaagctctcgagagattcaaatgggcataacttttcacacggatgtccgattccggcgcatattatgttgagaggctcgaaattgaacacggaagctttcagaaattcaatggtcataactttacac

SEQ ID NO: 78501 - DNA, 467 bp, Glycine max
agcttggctgcgcacgagctccgatttcgtgagtatgtttataagatgacgcattgtaatcgattacaggtattggtaatcgattacaggcccaataagccttctggtaatcgattacaggatgttgtaatcgattacaggctgcctgttcaagtgtaatcgattacattgagtggtaatcgattaccagagcctatcctaggctagtttctaagagaatatctatatttatgctcaaatacatcttatatgactaagtttcactactaatacactaaattcaatcattcaattactatatacacaagaaatcatatattctatcataaaaacaagaattcaaacaagatcaaacaaaataatctacaatcgaaaggtaaaaagtaaatcaatcaatcaatcaactaatcaatcaaccaatcaatttctatttttctaaatctcttacatctaagagacctaattct

SEQ ID NO: 78502 - DNA, 439 bp, Glycine max
tactacgctctcaatcggctggaagacttggaactgccttcattatgtagtaccaatacaacatggatatggctcctgatcggaaccaacttcagagcatgaccaagcgggaacatgagtccattaaagaatatgctcaaaggtggagagacctagcagcccaagtcgtcccacctatgactgagagggaaatgatcacgataatggtagatacgttgcctacgttctactacgagaagctgataggatatatgacgactaactttgcagacctcgtcttcaccggagaaagaatcaagtctggactgaggaaaggcaagtttgaatatgcctccaacactgcccccaacaacaatagaagagccccagtggtgggcacacggaaaaaggaaggagatacccacgcagtcaccaccgccccaacatggatgaaaacgcc

SEQ ID NO: 78503 - DNA, 469 bp, Glycine max
  unsure (1)..(469): unsure at all n locations
agcttgtagctgcatttgtccattcattgtgtctcacatttattatctgtggcctctgtntacctgtgcacatctcaattccttattgtgagattttttcatctgttagctatcataatggtaactcgtacgtgaatatttaaacaaggatacctggataccccttttatcatattttactatcaattatatcacatgttatagttacagaattaacatgaattgggtctaagaaaaataactaattttccaccaaacacgatatctataggaaaccaaacaagaaaataaaatagcataaagatgtttacctatatgaatgtaagagaagataaaaagaaacaagaagcaggctgcacaaagtgaaaagcaacatctccagatatggtaagttagtcaaaagctagaaaagctcatttgagaagaataaaataaaatgataatgagaaaatagttcaatatcccaact

SEQ ID NO: 78504 - DNA, 360 bp, Glycine max
tgagaatgagaattcttgtcttggctgatttttttcctttgcagcaacagcgcaccatggatagttccaacgccaacaaaaccccgagaaaggggttgtgtgtaattgatcacgcgttagtgtaattatttttaaatctgaaccgttagtaaaattgaatagacgatgaagatgtaaaaatatttttagagtaatttgaatccctccatatatatttattctttaaatgtgatggaaaaatgtttgagacgtaaaaaagttaagcaaaatatattctaagttaaacaatttttaaaagagttgaatggaatgtcagtacacatatacggtgaaacagttacaaattattttttatataat

SEQ ID NO: 78505 - DNA, 411 bp, Glycine max
tatgcatgtgaattaggaagcatcaacaagaattaagccaaggctattgtgcaagcaatcaatggggcaaaacacaccaaaagattatgatgatggatggctcaaattctcacaaaggtaaacttatcactttcaaattgagctttcaaaactatcatgacatgtagaggaaaaaacaaggatttcaaatcacacaatgtcaagagacttttattttaagaacaattacccatttcttgaacatatcctataattcaaagaaaaaacatgcaaagttgtacatgcaaacaaaattgaccaaaattaaactagaacccaacaaaactaacaaaattaaactaatttaacacaactaacaaaacccaaaccaaagaacacactcccccccccccccatacttaaacaacacat

SEQ ID NO: 78506 - DNA, 422 bp, Glycine max
  unsure (1)..(422): unsure at all n locations
tcatttttcactttttaattttttatgaaaaaacaccatattggtctactggaatttaaaaaaaaatgaattgataaatgggtttcccacaaatattaaacaactattaattaatcttaaatatttaaaataccctcatttaaacctatgnnntaatattaaagggggggaagtaactntttttttatagtttgaaatatttttctaatttattgagtgaacaaaaatgacaatagaaacaactaaaaatctcctttttttaataatccatataaagggttaaagtgcaagtaaagagttttttacacaaaaataaaaaataaatattatccatataatacattaaaaaatacaaaaatagttttaaatgaaatagaaaacaataaaaaaataataaaaatatatttcttttaaaaaaatta

SEQ ID NO: 78507 - DNA, 438 bp, Glycine max
  unsure (1)..(438): unsure at all n locations
agctagtagaatggctagacattatacatgttatggttnggtttggttcaaggataaaagggatgccccacattatttccatgacacaaatgcaaagatgatgatttggaaattttatgcaaaactggtcatgcatgcacctatgtggacgctcaagtgtcaaatttttatggtcatgtgaagctagggctcaggattcatttcctctattttaaatcaacccaatgtttccaaaatatgctcttttatcaatatatgcatttatcctagtccatttcgtgcgtccggggaaattttcacagcattcacccttcaggtgtagacancgtttttcttcaaaaatcggttatgatcaatgaattttttttntcaaagaatagttggaaatcatcttttttcagaagcatgtcggtntttagctagacaacttattttttc

SEQ ID NO: 78508 - DNA, 459 bp, Glycine max
  unsure (1)..(459): unsure at all n locations
atggcgcccttaccgaacctgtgataaaactagtgttatgggtaaagtataggaggtgcaagagcaaatgaatgccgacatggaggccatgaaagagcaaatggccacaatgatggaggtcatgatgagcatgaagatgataatggaagccaatgcggttgcagttgttgctaccagcactgtggctaaagtgaacccgacgcccccatctggcctcaaccaaatgaatcatccaacctcagatatggtaggcaaaaattcgggaagtacaggcgaccgcatgatgtgcaaatttaaaacgagcacgccttcccgccatatggcttgcctcctaactatacaccacccaatgtggtgtacactcccggtgaggatgtcaaatctgataatcctgctttgataaatgcaaaaaactanggcaaatgaagaacgtgagaatgagagagaaacccatgatgt

SEQ ID NO: 78509 - DNA, 441 bp, Glycine max
  unsure (1)..(441): unsure at all n locations
tgcgtacccaccatcttttatagtataacaccggncacgtgtctactatcattgtgataatctctttctctgttattgggggtgctacttgagttgccaagtctctccatctttaggtgtattctttgaaaagatttgtgcccctttttgcacatgttctgttgttgcatcctatccgaaaccatatcaaaattgtactgatactgcctaacgaaggcaaccactatgtccttccaagaatggactcgggaaggttccaagttagtgtaccaggtaacagctaccccagtaagattttcttggaaggaatgcatcagcaattcctcgtcttttgcgtatgcccccatcttccgacaatacatctttagatggttcttggatcaagtagtccccttgtacttgtcaaagtctagcacctttaacttgngaggggtgatgata

SEQ ID NO: 78510 - DNA, 461 bp, Glycine max
  unsure (1)..(461): unsure at all n locations
tatcagctactnggttactctccctaagagaatggagctcttctaagcttccttgttgttcctcaaaagccttgaaatttcaaaacatgctttaagacaggtgaaatgaagggcagccatgattcagaagtgaaatagccacaaaggaatcagattccaacatgaattgcttgaatcttctactccgtgcaatttcaattccaagcatgatagcctcgagttctgcagttacaactaaacaatagcatacatcaataacaaaagagaagttcgctttgccattataatccttgagaactccaccaacaatggccttcttcgtgtctctattgattgaaccattaatattgagtttgaactagccatttgaaggcttgctccaactaatgcttttatgacccanaactttaccttcattgtgggcaataaatttcatatagttcatactttctgctattgca

SEQ ID NO: 78511 - DNA, 448 bp, Glycine max
  unsure (1)..(448): unsure at all n locations
agcttgaagtgaggaagtggggaatggngtgtcttcctacttttattcgttgaccacaaagtggtacctggagatatgtcgcgggggtcaggagaccttggggacgtcaggtggggtgctattgcccaaaaccaagcttgaccaatcccgacccaacccgggcatagtcagtcagtgagaacctgtgacgtacctaaacaggcgagctcctggcagtcaaccgataaaagaacaaagaccacaaagcaaggaggcttgtgtggtggctggccagctatggatcttgagtaatatttggagtatggcctctggtaatcgattaccaagggtgggtaatcgattacaaggcttaaaaatgaaggcaggaagttaagatggcctctggtaatcgattaccaaggatgtgtaatngantaccacgcctagaaatgggatcaggaacgtgaga

SEQ ID NO: 78512 - DNA, 411 bp, Glycine max
  unsure (1)..(411): unsure at all n locations
tcatgggacaatttcttcatttgactgtgatgaatattttatggatcaatgcatataccacaagggcagtgggagtaaaatatgtntccttattttatatgtagatgatattttacttgcaaccaatggtcatggtttgctatatgacgtgaaataatttttgtctcacaattttgacatgaaggatatgggtgatgcatcttatgtcattggcattaagatacatagaggtataccttgaggtattttaggtctatcacaacaaacctatattaacaaaattttagagagatttcaaatgaaagattgttcaccaagtgtctctcccattgtgaaggctgatagctattatttgaaccaatgcccaaagaatgacttttatagggaacatatgaagaacatttcttatgc

SEQ ID NO: 78513 - DNA, 458 bp, Glycine max
  unsure (1)..(458): unsure at all n locations
agcttcaagctgctcaattgctccaggttgctgcatggaagggaaaagatctgtgtggtggtcggcagaggagcataaaccatagactnttgcgacaggtatagatttctgattcaacgctagctgggttaccaggttaactaagcatctagtttaccttcaagcttcttggtttcagctgctgaagatgaattcgtggctacttcatgcactcctctaatgactatagcatcatttctagcactaaactgttgggagttggaagccatcttcacaattaaatttctggcttcagcaggggtcatgtctccaagggctccaccactggcagcatctatcatacttctgtccatgttattgagtccttcataaaaatattggagaagaagctgctccgaaatttgatagtgagggaaactagcacatagttntntaaatctctccagtattcatacaag

SEQ ID NO: 78514 - DNA, 438 bp, Glycine max
  unsure (1)..(438): unsure at all n locations
tgtagaatggctagacatgatacatgtcagggtttggttttgttcaaggataaaagggatgccccacattatttccatgacacaaatccaaaaatgatgatttggaaactttatgcaaaactggtcatgcatgcacctatgtggacactcaagtgtcaaatttttatggtcatgtgatgctaaggctcaggattcatttcctctattntaaatcaacccaatgtttccaaaatatgttcttttatcaatttgtgcattcacccgagtccatttcgggcgtccgggaaaattttcacagcgttcacccttcaggtgtacacattttttcaaaaactagttatgatcacatgaatttttttcaaagaaaagttggaagtcatctcttttaaaagcatgttggcttttcagctagacaacataattttcctttttctcttt

SEQ ID NO: 78515 - DNA, 460 bp, Glycine max
  unsure (1)..(460): unsure at all n locations
agcttgaagacaagactatacgaggtatcttccttngtatagcaatatctctaagggctaccgtgtctacaacttgcaaactaagaaactcgtcatcagtcgagatgttgaagttgatgaatatgcttcatggaattgggatgaagaaaaagtggagaagaacgttcttatacctgctaaactacctcaagaagaagatgaggaagaagacccaggtgaaccaccttcacttccatcacaacaacaagatcaagaactatcatcaccagagtctactcaaagacgagtaagatctttggtggacatatatgaaacctgtaacttggccatacttgaacctggaagcattgaagaagcgtcaaagcaggaagtatgggtcaaggcaatggaagaagagatacagatgatcgagaaaaacaacacatgggagttagtacatcgtccccatggaaaagatatc

SEQ ID NO: 78516 - DNA, 469 bp, Glycine max
  unsure (1)..(469): unsure at all n locations
ctcatcttcacctcgntcttcagccccccttattatattatatcatctcttcggtctcaacgaacataaaaattcgaaaagacctcacactcacacacagatctatctgtccatcgttcgttcattgtcgttttgatctcaaacgccatggcgttttggagatccctcgcgttctctgccctccttctctcgctcttcgtccatggcgctctctgcttctacctccccggcgtcgctccacaggacttccagaaggttcgctccatcttcatttccatttccatttccatttcacgcgaatgtgttttcttaggttttccgttcctttgaaatttctcgtttatttgctccgtaatcactcgatctgtgtgttcgagtctaagatctgagatgaatatgactgatactatatttgttttgaattggtacgttatggaagtagcgatttccgggtactgtttgcatttta

SEQ ID NO: 78517 - DNA, 412 bp, Glycine max
  unsure (1)..(412): unsure at all n locations
agcttctntgagaaaacttccttgagaagcttaagcttagctacacacacctatctaanaactaagctcacctccttgagaagcttccttgagaagctagagcttagctacacacacccatctaaaaactaagctcacctccttgacaaaatacatgaaaatacaaaaaaaaagtccctactacaaagactactcaaaatgccctgaaatacaaggctaaaaccctatactactagaatggtcaaaatacaaggcccaaaagaaggaaaaacctattctaatatttacaaagaagagtggatccaaccttgatccatgggctcaaaaatttgccctaaggttcatgagaaccctagggccttctttagtagctctagcccaagcctcttggagtcttctatccaatccccat

SEQ ID NO: 78518 - DNA, 450 bp, Glycine max
  unsure (1)..(450): unsure at all n locations
tgcggactataccttcgaccaaacacgggcgtgtttctgtctcgcccngatttaatgcgggttgcagcaccagctccgctttcttaaccgtactggagacagatgctgnggctttgtcctctatggttttctggagttttaacatgacttacgagatggaagccatttgatcttttaagaccgatagatcggccttcatgtgttcctgcacaccctcttcattatccacttttctggattgagtgttataggggtgccttggtgttttcttagttatgatgaaattcctaaagaaataaacaacggtgagtatgccaccaaaacatgagtatgcatatggatgatcggagcacttggatccaccccaaggtttttagataacgtaatgagtccagaacttctcattntataataagaacaaagctttcatctagccaagattatacaaaa

SEQ ID NO: 78519 - DNA, 343 bp, Glycine max
  unsure (1)..(343): unsure at all n locations
agcttctatagaaggttcgtccctaatntctctacaatcgcatcacctctcaatgagctagtgaagaacaatgcggcatctacctgcggcgaanagcaagagcaagcctttgctttgcttanagacaagcttactaaggcacctgttctagctcttcctgactcttccacaccttttcaactacacacggacccctcctccaccggcatcctcctccatctcccgcctgtctcccaccatccacctcccatccactccccctccctgctatcactccatcctccctcccctctcccatcatatcctccctccccccctcacctaccatcaccctcctcctcct

SEQ ID NO: 78520 - DNA, 458 bp, Glycine max
  unsure (1)..(458): unsure at all n locations
ntnntgaaatggaggtaagaagctnnttccgaaaataatggcatttttaaggaagaaaggtgataggggcaattttgacattttaaaggtttgctgggtgcaccagcaaaaacgctgggtgcacctagtaacactccctgatttggactcgaaatagtaatgatgtcttcggtttcaataatgttggcttcggaccagtaaaataactaaataaaattacagggatagcattgcttacttacctaactggatcatataggatcatcattcaaaatgttggattaaggtaattaagattcaagattccatatatgtttaaatgctcaataaaaaaaatgtactaccagctactttatgtcacccccaatgaagacattatatagctcattgcggatgtggcaaacattattagactcgtgtgacagcatatggttttgcatttcagaaattatatatta

SEQ ID NO: 78521 - DNA, 459 bp, Glycine max
agtcacctgcggcatgcaagcttcaatggctcaataagcaaggggaaatgatagtttatcaacatttaaaaatacccttttctataagagactactgtgataaagttttatatgatataatccctatgaaagtagggcacattttgttgggtagaccagggaaatttgacaagaaagaaatccataatgatctcaccaatgaaataaccctcacccatggaagcaaaaagttcaaacttgttcccttgacaccttcagaagtggttgggggtcaagtacaaataaaactcaattgggatgaggaaaagaatagaaaaagaaaataagaacaacctttaatggttaaggaagagtgtaaggaagtaagtgtcttctccaagaggttaactgagaaggaaagtcattctgcaataaagacaaacattaaagaaacttcccttcatagacaacctccacatc

SEQ ID NO: 78522 - DNA, 456 bp, Glycine max
  unsure (1)..(456): unsure at all n locations
tactacgcttgctagagctcagagttgtgctagaggacataagtcatcatcatctctttgctatgagctntgcaattgttggaggagggcttaacaattgggtgcaactcaaacataaagacctatgaagaggcctgacaaggatggtggcaaaaaaagtggtacaggcggctgattattgtattattatcacatcgcttgctgtaatatgtacaacttttattgttctgacatattttttttacttcatgttgtggttgaattacttttattttgcattcatcatctgtttaaacaacacacacctagtagcgataacgatctctttaattgattcataaagcaaacatcaacactgatagaacaaacttttcttacaaaagaggaacgtataatttttataaagcaaanacatgactacactgatttatcacacatcagagcaatgattagata

SEQ ID NO: 78523 - DNA, 442 bp, Glycine max
  unsure (1)..(442): unsure at all n locations
agcttgtcatacttgttccagaaaggagaatataagtttttggtaatgtttgcgccatgtcaaagtgccacaaggatactcttcaaatgttaagagccttgtgcagttcgaatttctaaaatggcgatacaagacattttacctaacaaagtcaagcatgccataactcgcttgtgctttttcttcaatgccatatgtagcaaagtcattgatcctctcaaatcgtatgagctggaaaacaagactgctattatcttgtgtcagttggagatgtattttcctctttcattnttttgtcatcatggctcacttaattgttcatccaatgagggaattaaatgttatggtcccgtttatttgtggtggatgtacctggtggagcgatacatgcagatcttaaaagggtatacatagaatcttaccctcctgagcatctattgtg

SEQ ID NO: 78524 - DNA, 460 bp, Glycine max
  unsure (1)..(460): unsure at all n locations
ttaactgatcgtntaagtcgttttctcgcctaatatttaaaataaaataaaattccaccgatcatttgaattgtaatatccattaatttctggttaaatgaaatccgaccgttcggtcatgccgtaaccacgttggaaaccaaaaaagaggtaaaataataatataataaaagaatttattttagtaaaataaaccaaaaaaagcaatcggacgtttctctttgggatttctctttcttaattgaattgactaataactaaagtgaaactaaggctaaaatcaacccgcanagtcaagctcgtccacaaaaatcactaaaaaaggattntaagattcaatacctcagtttttcttacaaagtaaaaaggatgattntaagggccaacgccttaaaatgatcaccttccaagtaaaaagaatcgtttgattcacccataagaaataactacataggtctta

SEQ ID NO: 78525 - DNA, 217 bp, Glycine max
gcttttctgaagttgacttcttccaaaagacttaatagaaattattttattggcgtggtaatgcactatccaaggtcgaaatgagtatttctcttcaatctttcacatctacacataagtgtttctcatggacgacttcatcattcaacaatcttgcatcttcttatgtagctggctcttactatctgatatgcctacagaggttgtggccacatat

SEQ ID NO: 78526 - DNA, 436 bp, Glycine max
agcttgagatgaggaagtgttgaagggcgattcttcctgtttttattgatgaccacagagtggttcctgaagatatgtctcgggggtcacgacaccttgtggacgtcaggtggggtgctatagcccaaaaccaagcttgaccaatcccgacccaacccgggcatagtcggtcattgagaacctgtgatgtacctaagcatgcgagctcctggcagtcaacatatgaaacgaacatagaccacaaagcaaggaggcttgtggtggctggccacctgagaaacttgattgatatgtgagatatggtctctggtaatccattaccaaaggtgggtgatcgattacaaggcttaaaaattaagacaggaggctcatatggtctctggtaatcgattactcacgcgttgaatcgattaccagagcttgaaacaatgtcacg

SEQ ID NO: 78527 - DNA, 293 bp, Glycine max
  unsure (1)..(293): unsure at all n locations
tggaaatatgtcctggggtcagaaacctttggacctcacgggggtgctattggccaaaacccagcttgaccaatcccgaaccaaccccggcataatcggtcagtgagaacctgtgatgtacctaagcaagcgagctcctggcagtcaacatataataggaagacaagaccacctagcaaggaggcttgtggtggctggccagctgtgaattntgtgtaatatgtggatgggtggcctctgtgtaatcgattacaagggcttaaaattgaggacaggaggctaagatggtctct

SEQ ID NO: 78528 - DNA, 400 bp, Glycine max
cactggttatcaattaccaaaacattgtaatcgattacaactttttgaaaataattggaacgctgtaaattcaatttgaaaactttttcaaaacaattttgctactggtaatcgattaccagagtagaaactctttggtaaagggttttgtcaaaaactcatgtgatattcaaagttctgaaaaactttttaatacttatcttgattgagtcttctcttcattcttgaatcttgagtcttgaatcttgatcttgattcttgagatcttgaaccttgaatcttgattcttgtctctagactttcttcttgagtcttgaattcttcttgattcttatcttgaactcttgaattgttctcgattgatctctgatttacttgagttttattcaattgatctttg

SEQ ID NO: 78529 - DNA, 412 bp, Glycine max
  unsure (1)..(412): unsure at all n locations
tattaaagcccttgctggataactcacattatagctaaacaataaatctcaattgtactggtaaccacaaaggaattggcttcctctaaccagggaggggaggatgcactattgaaagaaaagtgccattaccactggtgaatgaatggctgagataagtataaaacatatgcacatcttgtataacttctcacactctttaaagtacaactcccactttaaagaagcccaactcaaccagaaaatatatattgtgtttaatgaaagatcctacaggcccaaagagtgaaatttaaatatcatgtttaaaaattgccacagaaacagtaggattctattttgaacacaaacacagggattntctccgntagattatcacaattccaacatcacacacaacagcacttctgta

SEQ ID NO: 78530 - DNA, 394 bp, Glycine max
agctcgtaacagtctcgatatataccaattatgtgtgtagtgtgaatgtgaatgggtgattggagcttttaactctcatagttgtgtgtggtgtacaagaaaaaaaaaatacacatagaagagatttttttgaattaaaatagaatataaaagtcatcagttcgaaaaaaagtacgatatttttctccaatcttatatctctccttccttttctaataacatatttggtttaacttgtgcaccttagaatcagttccctaactgtcctcgtagctcacatattcacgaagaaaacttcatatatagaacaagtatggctagagaagaatgagcagatccctccataccttagttggtgcactagagaaatgaagagcatgagtgaatttcaaca

SEQ ID NO: 78531 - DNA, 441 bp, Glycine max
accatacattcaaaccatattgctgtcttcactccttcagctagggccatgtattctgcttcagtactcgcaagagtaacaactgattgttgtaccacacacagtaaacacatattctattaacaatttgcttgcgtctacatattctgccaaatctgcatctacataacctgcgatagctgcctcatgtgctgtcttcttggaccttaatccagctttcaaagatccatttagataccttagcgtccacttcacagcttcccaatgtgcactaccaggatctcccatgaatctgcttataatacttacagcatgagccaaagtaagtctactgcataccattccatacattatgcttccaacaccactggcatagggcggtggatccatattagacatttcttcagctgcttctggtgcttgaataacagatagctttgg

SEQ ID NO: 78532 - DNA, 454 bp, Glycine max
  unsure (1)..(454): unsure at all n locations
agcttctcccctatttggctatatataggggaagaagtgaagaagaaagggttcagccccttaggcacttctctctctttcgaatatgcttaggaaaatggtttccgtgaagaaaatccaagccgaggcgcttccgtaacgtttccgtgagtaattacgcgaagattctcgaccgttcttcaagattcatcgttcgttcttcgttttcttcagtcttcaacgggtaagtacctcaaaccaagcttttcaattcattatatgtacccgtggtggtccacattttgtttcatgtattttcattctcgttttcattcgctttctatacccccttttgacgtgcttaagccatttatntaagtcatttctcgcttaatctaaaaataaaataaatctccaccgatcgtttgaattgatcatccgtaatttccgtagaatgaattccgaccgtcggccg

SEQ ID NO: 78533 - DNA, 406 bp, Glycine max
ctaaaatgtttaaaaggagagggtgaattaattattaatgtgccctgactaattaaaaaattatctttcttaatggtaataagattcaactaggcttttactactaagttaagaaaggtaaaaacagaaacagaaacttaaccaaaagtaaaagcggcaattaaaagtacacagcggaaattaaagagtgtagggaagaagaagacaaacacaagatttatactggttcgacaacaacccgtgcctacatccagtccccaagcaaccaacggttcttgagatttctttcaaccttgtaaaatcctttacaagccaaagatccacaagggatgtgtcctcccttggtctctttgaaaaaccaagtgaatgtaccctccatttgaactgaaccacaagaaatgtacca

SEQ ID NO: 78534 - DNA, 223 bp, Glycine max
tttgtctgagcatttgagcaagaccaacgaaaacatgtgggccatcattgactaatacaaagagaagcttaagttagcttcaacccgtgaacaaaggctaaaggatgagtatgcaaaggtataagtcctacaacaaaaagggaggaagggagaagtgatcgattattgcacagagaacaatgattggatggatggttcctttcccttgatgggatcaaacttc

SEQ ID NO: 78535 - DNA, 394 bp, Glycine max
cactctcttggtggtgaagctccttctttcttggcgtattccttaggggatgacgcctcctctcacttcttctcctttatcttccgccgcatctccatggttgaaaatcaccattgaaggacctaattgaagctcaaagattcagcctccatagaagcttctcaaacaagcttccatcaagtggtaatcagagcacaagagcttcatgtaggtgctccttaaacctccattagcctccatttttgtgttttcatttttcttcatgcatttcctcacatttcttgttttgaatgttgttaacattattctttagaatttccaccaattaaacttgttatagaagctagatttgatttcctatgggtcaaatttcctcttcttggtcttgcaccct

SEQ ID NO: 78536 - DNA, 434 bp, Glycine max
  unsure (1)..(434): unsure at all n locations
agcttcgaacccgtcctctaatctctgccttcaatccttgaagaaaatatcccaaaaattgcttgtcaggcaattttggaatctgagctgttaggtactcaacttcagtgatgtattcttccaccgtccccttctgtttcaaaccggtcaactgttcatatacgtcgccgttgccgtgaccaccgtatcggctcaacaaggattctttcaacttctcccacgacagatcttcatcttctccgattagagaattgaagaaatgaatcgtagctccctccatacatagctgagcgagattcaccttcaactccggtaacgttccctgaacacgaaagtatacttcancgcacaaaatncattcngccggatctttcccattgaaggatgatanctccactttnttgatggatngacggaactctgtcaacgcatca

SEQ ID NO: 78537 - DNA, 451 bp, Glycine max
  unsure (1)..(451): unsure at all n locations
tcttgattagactggtctatgttgggatcatgcaaccattcatattaaagnttatgttagtactcttgtcatttagtttgtgttagcaataacaatcagaattttatgattgagagaaatcacactcacgcgcaaacccaaggattaatggtagggtcacggcagaactaggggagacgagagggaaggtcgagatgaagaagaaagtgaanaggttcacttattcgaggtagggtcctcctaaagataactactcaagtgcttgttcttattatttcatgaggatactcagtaacttatatattactgagagatacaagcgcataactgccataacggaaatcggaaatctaacaaaccctaacagctttaacagattattgactacacgtgctaatgattggcacttaacgtgcacaatgcgtgagtgggtatctaactgacgtaatct

SEQ ID NO: 78538 - DNA, 451 bp, Glycine max
  unsure (1)..(451): unsure at all n locations
agcttgtgggctataccttcgaccaaacactgtcgtgtttctgtctcggcccaaatttaaggcgggctgcagcaccggctttgcttccctaactgtactggaggcggntgtcgtggctttatcctttatagttntctggagttttaacatgacctccgagatggaagccatttgatcttttaaggccgatagatcgggcttcatctgttcctgcacgccctcttcattatccatttttctggatcgagtgttataggggtgcttttgtgctttcttagttatgatgaaattcctaaagaaataaacaacggtgagtatgtcaccaaaacatgaatatgtaaatgaatgatcggagcacttggatccaccccaaggttttttagataacgtgatgagtttagaacttctcattntataaaaagaacaaagctttcatctagccaagattata

SEQ ID NO: 78539 - DNA, 456 bp, Glycine max
  unsure (1)..(456): unsure at all n locations
cttaactgaatttgcaacgctccaattgatttcaaaatggtgtaattgattacaatatattggtaatcgattaccagtgtatctgaacgttgaaattcaaaatcaattgtgaagagtcacatcctttcataaaatgctttgtgtaatcgattacatggttttggtaattgattaccagtgacaagttntgaataaaaatcaagagatgtaactcttccaatggttttcaggtttttctaaaggttataactcttctgatggttttacaaggttgaaaagaaatctcaaggactgcaggtcgcttggggactggatgtangcacgggttgttgccgaaccagcataaactcttgtgtttgtcttcttcttccctacactctntaatttccactgtgcattntaattatcgattntacttttggttaagtttctatttntgttctttactttcttaac

SEQ ID NO: 78540 - DNA, 454 bp, Glycine max
  unsure (1)..(454): unsure at all n locations
agcttgattcaggactntcagaatctgccaaaagtaaattaagtttaaatgttggtgagcaggaagttctcaatttgaattcaaggcttcaggattttgatctcaataatcatgattccagttgcataattctggagaaagatagtaagttgatgcactataaagttaataatgtcaaacagtggtgctcatcatcaggtgaaggaatttctttaccagaacatatgcagtttaagacatgcacaaatgatgattatgaaaaaggaagaatttctgctatgcacctaatgaaagataagttttgctctatctatgaccaatctgatacacgttctgtatttgatgatttgaacctccccactccacaagccagggtaaatcaggaacatcagaaaaattacattgaacaatccaggttcanaagcaggtgcatacantttgagggagtacccta

SEQ ID NO: 78541 - DNA, 433 bp, Glycine max
tacacaaggctctgaatattagaagagtattcttgaggaaccttgccccgacgataaaaccgaccacaacttatcttctccttgttggacaaagtatggcaagatgggggcacgataataatctttccatcagaccatggatgctactgtgagagtatgcccatatcagctagatcttgaccggtattcaagccatccttcgacttgccttgagagttaaagagcgttctattcacactgtcacaaacatttttgtacacatgcataacatcactacgatgtctaacgtcaacgataaaccctgtctgaagatcaaagataatggacctcttgttacatatgcaactattacttctatactttgtttggagctttccaaatacattatacaggtgtcgaaaccgctgatatacctgcgtaacactctatggta

SEQ ID NO: 78542 - DNA, 445 bp, Glycine max
  unsure (1)..(445): unsure at all n locations
agcttcttgcatagccgctcttggtgctcataatatcccataaacaaatccctcttattactagctattntgcattctttagttcctgaatgtacaaccttcaaattgttgttcgttcccctctttgtgttctgcaaaaaagaaaatcaatatcaaagaaaacatggagagaattgtcatggttattattactcgaaccagaaggaataacatctaaacaagtcattttattcttacgtttattgttgttaaacccatatttatgctttcttcccttcatgtcttgttttatcacaactttagccaaatctcctatcttcagcacagttgaatctcctgtcttattctccaatgacacactntggtggcctgtatctcttttcttcatatgttctagtgcttcagcttcagaatgcataaagcaatctgaattttccagtgatca

SEQ ID NO: 78543 - DNA, 450 bp, Glycine max
  unsure (1)..(450): unsure at all n locations
agctctgatgtatntaatctacgagaaggcatggaactttatagtcgctggtaatctagaagtaaagactgtaagacaaaaaaaaaaaagtagcatataaagattaaaactgatttttttttcaaaataataaaacataaaagcaattggaaaactaaaatgtcctttaatttctatatatgaagtcataaaataaaataaataaaaaaaagagaagttgttgaccttgggaatggaaccaatgttgcataactcatttattttgcccaacctcagtccaaagaatacctcatagattaggcaacctataaaattatgattcttaaatatgttagagaggtatacatagaaaggaaaagacaaaaagtattcagtgaacctacaatgtttgtccaagtttacataaaaactaaaacgactcactatcccaaagaaaaggtagtcaaggtc

SEQ ID NO: 78544 - DNA, 409 bp, Glycine max
  unsure (1)..(409): unsure at all n locations
acactgtcgtgtttctgtctcggcccggatttaaagcgggttgcagtaccggctccgcttccctaaccgtactggaggcggttgccgnggctntatcctctatggttttctggagttntaacatgacctccgagatggaagccatttgatcttttaaggccgatagatcggccttcatctgttcctgcacgccctcttcattatccatttttctggatcgagtgttataggggtgccttggtgttttcttagttatgatgaaatccctaaagaaataaacaatggtgagtatgccaccaaaacatgagtatgcaaatggatgatcggagcacttggatccaccccaaggtttttagataacgtgatgagtccagaacttctcatttataagtagaacaaagctttatct

SEQ ID NO: 78545 - DNA, 238 bp, Glycine max
atggatatgcgcattgtcctgttcactggtatgatgctagacatccccccaccaagtggacggtgaaatgactcaatggcatcagcgcgtgacttttgtaaggagacaagccatggggtattctggtgtgtgcatattatatcatttcctggaatatgatttcatatcctggaaatgctgtatgatatgccccacatatattctacgtctatagactcatattttatgcagaatgaac

SEQ ID NO: 78546 - DNA, 450 bp, Glycine max
  unsure (1)..(450): unsure at all n locations
agcttattatgtagcataatttgttattggatgaaggcatcttcaacatgagcagagggaaggagcgataagggtaccctgtattcgtcaccgaattgaatttgaaaggcgtcacgaatggcttcagcggaagctctgtgaccgccaccagtatcactcatgagaatcaacacgttttttgtcctctccgcgccaatctccatgagttccatgcctccatcgctgtcatcatcgngggcctcactgccacgttttttgtggctgttgttcccattatagtaacctccgaataccttctccgctatggaccttctcggcgacggcgacggcgacgaaacggaaacctccatgtctaataaaaaaacagggtttcacctaacggtaaaacctcgttcccgccactgaaacggtatttcaccggcggagagagagaatagagaaagggaatga

SEQ ID NO: 78547 - DNA, 389 bp, Glycine max
  unsure (1)..(389): unsure at all n locations
atcaagaaacacatacaaactctatcttctaatcgatcactcacttaagtcccccccttttgtttttgagttaaacttcattgaagtaagtattaatatatgagtttgatcagccaatttttctcccctttggcatcaacaaaaagccaaagtgcgtatagagacattaaatcatacacaaactcataatcatccaagcattntaatccatacaacaagcaaggaggacaataattcatacataaactaagcaaggaagataataattcatccattaactattataaaatgtcagataattagaaagtcatccaagataaccaaattaaaacaactaatttagaaagaatatactaatagtgtatcaataagtctaagacatctacata

SEQ ID NO: 78548 - DNA, 348 bp, Glycine max
  unsure (1)..(348): unsure at all n locations
gctcactggatgaagagaaaaaattccagacattatattgtatccaccaataaagggttaagaagaatgttgcccacatgaacatttgctccgtgtacatgacattaagaacaacattgtttcaacacttataaaggattttcatcaacaagatgagttcattttgggcattgtatctcgagtttcanaaatgcaattgatctattcttgatggctatggaaatattgcataaagagctttaaatttcatgaacaagttgtggtctaaatcaacttggatcatggtcaaaattgagcatgaagttgtagacgttgatttgtccggacaacttgatatgtgtgcagtga

SEQ ID NO: 78549 - DNA, 459 bp, Glycine max
  unsure (1)..(459): unsure at all n locations
agcttctaaactntatacaagaatgaagctctgataccacttgttagacaagtggcctcagatatcttaagaagggagggttgaattaagatatcactaactattttcctaattaaaattntatccttctttaaagacaatgtcaatattcccttattatgaattactataattcaatttagactaattttccttaatgcaaaatataaataacaataaataaaggagtttaagggaagagaaaatgcaaactcagttttatactaattcggccacacccttgtgcctaattttccttaatgcaaaagataaataacaataaataaaggagtttaagggaagagaaaatgcaaactcagttntatactaattcggccacacccttgtgcctacgtccagtccccaagcaacccacttgagaagtttcactatcttgtaaaaaccctttacaagttctga

SEQ ID NO: 78550 - DNA, 463 bp, Glycine max
  unsure (1)..(463): unsure at all n locations
ctcacggattgtgctacaacgctnttcttttggcttccggcttgtctcanaacttcacaaattgcctaacgatgggtgccaaatacttcgaagtggtcaaacgagggtcgcatcccaacaacggatggtccctggacgaaattatggtatgacagttttcccactttacttatcttttatcggagataaaagggaagtaaagataaaacactaattttgttcgagcgaaacaccattctgccaacgaacctccctgccagcggaacctgctaaaatttgaaaatgatcaataccgacacatcatcctgatactgttgaatttgttcctcttggttgatacaagacgcagaatgaccatattttgtctctgcgtgttgttggacacaatcgagcctgtgcggcaagccacagaatgaccataatttgtctctgggtgccaccggacacgatcgtctctggatgg

SEQ ID NO: 78551 - DNA, 411 bp, Glycine max
ctgcaagctttgctgtagttagttcttgtcaagttttattatttacaccatgaacctcaactaaagttcaaatagaagttagagagcctttgatgcgaatataagatggatcaacagatgaacacagcagaaagaaattaccattcaaagagaacaaagaacagaaagccaacaataacatagttgtgggttgctgcagaataagcccctccggttcagggcggtggattctttcaataatccatacaacaaaaccattgtagacaatgatgaacaatattagaatccacatgcgctgtgtgaaaggtttcatgaatagccacgttctatcacctgtctttgatttaataggaacaatcatcatcagtccggtttcagtatagggctgagtgaatgaagcatattcataac

SEQ ID NO: 78552 - DNA, 426 bp, Glycine max
  unsure (1)..(426): unsure at all n locations
agcttctaaactntgtacaagaatgaagctctgataccacttgttagacaactggcctcagatatcttaagaaggggggttgaattaagatattgcaaactactttcccaattaaaattttgctttaatttcaatgcaagttccaagtttccttaaaaatgaatacttaaataatgattcaaattaaacaatctgaatataagtgtaaagcaataataaataaaagaatttaagggaagagaaagtgcaaactcagatttatactggttcggccacacccttgtgcctacgtccagtccccaagcaacctgtttgagagtttcactatcttgtaaaatccctntacaagntctaaaccacacaaggacaatccttcctttgtgttcatatttctttacaacaagagaaccctcgtctctcaatccc

SEQ ID NO: 78553 - DNA, 458 bp, Glycine max
  unsure (1)..(458): unsure at all n locations
agcttaacatcagacacttccaggtgcttgtactacttcacatggacttgatggggcctatgcaagctgaaagccttggaggaaagaggtatgcctatgttgttgtggatgatttctccagatttacctgcgtcaactttatcagagagaaatcagacacctttgaagtattcaaagagttgagtctaagacttcaaagagaaaaagactgtgtcatcaaaagaattangagtgaccatggcagagagtttgaaaacagcaagtttactgaattctgcacatctgaaggcatcactcatgagttctctgcagccatcacaccacaacaaaatggcatagttgaaaggaaaaacaggactttgcaagaagctgctagggtcatgcttcatgccaaagaacttccctataatctctgggctgaagccatgaacacagcatgctatatccacaacagagtc

SEQ ID NO: 78554 - DNA, 392 bp, Glycine max
tggcggagatgttgatgatatagaaagtactaccggacttgtatattttatgggtgatggcgtctctacatgcgagtctaagaaacaaggcattgtgacactttctacttgtgaagcccagaatgtaggtcgcaacttctttgccatgtcatgccatctggctaaaaagatcgttggaagaacttcaactggtgcgaaatgaaaacacaaagatctatgttgataatagatctgcacaagagcttgccaagaatacggtgttgcatgaacgaagtatgcatatatagacgagggatcatatcattagagagcgcatcaccaagaaagaagacaactgactcatgtgaaaactcaagatcaagatgcggatattttcaccaagcctctcatat

SEQ ID NO: 78555 - DNA, 400 bp, Glycine max
  unsure (1)..(400): unsure at all n locations
ggatctctgagcacctgagctgcaactaccttgagagcagtgttggcacttatctctgaaaagggaaacaccgtagcttgcagtggcgtgacaagacgtgatgcatagaccaaggacgcgcgacaatgtactatgctaccttccttcgaccgaggtcacggtggtgcgacagagatgcaggcaaatgacagaggtcacgacgaggtcacaacagatatttcagacaaacggggagggagttcgagcgcgaggtangagtgttcatcaattatcatgcaaaaacgacatataaacctcaatgttaacgacaatgggtttacaaaaaagttgttgatattcaaaatttctaagacggtgtttacaaatacaccgtcttagattacctgctccgtaacctact

SEQ ID NO: 78556 - DNA, 423 bp, Glycine max
  unsure (1)..(423): unsure at all n locations
gatcaacatttctaggctaatttctttttgttggtctcttgggcaggcatctccaatcttaactgcattcattgcaggacaagctgctacctttaagatgtttgaaacgattaagaggcagccagatattgatgcttatgacactggtggttgactgctaaatgatatttctggagatataaagcttaagaaggtctgctttagttatacttctagacctgatgagcaaatattcaatggattttcaatttcaataccaagtgacactactgcagctttggtagggcaaagtggaagtgagaaatcaacaattattagtttaattgagagattttatgatccacaagctggtgaagttctcattgacggtatcaatctaagagaatttcaactgaaatggatctgatagaanatagaacttgt

SEQ ID NO: 78557 - DNA, 439 bp, Glycine max
  unsure (1)..(439): unsure at all n locations
agcnttgacttgagtaatcaagagattatatatatgtgaccatggcatgagttttaatcgatttttataatcatatatcatctatcatctatctttcaatctatctttcaatatcttctttcatctctttctacagaactttctaattcatttatcttcatctttctaaaagtttttgttcaacactttctcttccaagaaaagttctttgataaaaaaacttgtgttattcatctttttcattctcttcttcctttgccaaaagaacgaaggactaaccgcctgaattcttttgtgtttctcttctcccttacaaaagattcaaaggacttagcgcctgagaattcttttgattcttcccttccccttaagcaaaagatttcataggactaactaccagagatatcttntggttcccctttacaaagattcagttgac

SEQ ID NO: 78558 - DNA, 434 bp, Glycine max
  unsure (1)..(434): unsure at all n locations
tagatactaccagcatcaaggaattanggcggttgatggttcctcttcaaatgcaagctttccgcaagacttactgaacagatcttatagatgaccttttcagaagtatgcatagaagccattgcattactctcccaatactacgaccaagctttgagatgcttcacattcggagacttccaattagtaccaaccattgaagaatttgaggaaattctaggatgtcctctcgggggaagaagaccatatctttcatccgggtgtctcccctctttgagcagaattgcaacagtggtcaaggattcagcaagaggtttggaccgcataacacagactcggaacggcatagcgggcctaccacggaggtacctacaagacaaggcgaggggtatggccaatcaatgagattgtgtcccgtttatggatgtgttagc

SEQ ID NO: 78559 - DNA, 434 bp, Glycine max
  unsure (1)..(434): unsure at all n locations
agctntacagcagattntagtaatgacccactaacctagaattaaaataacttaatgccattaacctagggaattaaaaaaaacttaatggctgagtgtaactgaaattgtggcaaccaaaagtcacccccaacagccaataagtcagacaccatttggtctcccaaaaggctgatgcctangttgccaattgggcccttattacaatttgaactaaacctactaaagcccttttagttgattaacccaaaacatatttttggtcagccaactttacaaggattgggccattatttagacaaactaaacactctaaaattgagacaaagnggtgccatttagtcctcctccatttgggccatgatacaactcacaaccttggacttttctccttgaaacttgngcttgtattcaaatagtatggacagaacttg

SEQ ID NO: 78560 - DNA, 475 bp, Glycine max
  unsure (1)..(475): unsure at all n locations
ggaactataaaactccgctatgctgcnacattacaatagacctcctcaacctcatcttcaaaatcaaccacagcaaaacaattatgacctctccaacaacagatacaaccctagatggaggaatcaccctaatctcagatggtctagccctcaacatcaacaacagcagcctgctccttccttccaaatgctgctggcctaagcagaccatacattcctccaccaatccaacaacaacaacagccccagaaacagcaaacagttgaggctcctccgcaaccttccctcgaagaacttgtgaggcaaatgactatgcaaaacatgcagtttcaacaagagactagagccttcattcagagcttaattaatcagatgggacaattggctacacaatcaaatcaacaacagtcccagaattctgacaagctgccttctcaatctgtccaaaatcccaaaaatgtcaatgtcatttcat

SEQ ID NO: 78561 - DNA, 462 bp, Glycine max
agcttacacgaggattccacttctacgctctttcttttcttgcaagtgattactccactcctacaccattaacttgaaaaattctctgccattcagattctgcaaatttcccacttactccccacctcttcaaacaaacacagctgtaaactcgctgtccaaacacttcccaaagatttcgcggacaggattctctgtctgttgcttctcgtggacgcgacttctcgaggtgaggtcacttctcaattgctcattcaaacttgttcatctaatttcatttcctctgtcctcttcatttttcaacacatatataagttctattattacataaaactaagtttctcatatgcttaatgttattcttgagagagataacatgtattttttattagaaataattttattcgaatgtacagctaaaatttgattcgatacttttaattcaattaaaataatctctca

SEQ ID NO: 78562 - DNA, 449 bp, Glycine max
  unsure (1)..(449): unsure at all n locations
cgcaagcttgcgcaaccaanatggtccaaccttgatataagtatttagtattggaagaaaaacagggagactatgtcaactgtagtagttggaatgtgttttttttctttagttaagattgtattaacaaattcaaccttaaacttgttatccatatttgttgacttataactagtcattaaagaagcattactcttggatgaattttctttttgtttattgcgtaaggtctaaatacattttaggaacaaataacaagcatcctttattttagaagattcttcaattatgtgttatatcatacatttgtggttaattgaatgttattttgaggataactgctatcaaaataaatctcatcaaaataaacctttgccatgtaatttgagggaataattctagttgtatcaagggaatcacacaagttacatttactagctagttatgtg

SEQ ID NO: 78563 - DNA, 94 bp, Glycine max
cccgacaccggccgaaactaaggggccggtacgaaagccatagaaacccccctggaggggtaccgctctggagaaaagcaagaacaggaaacgc

SEQ ID NO: 78564 - DNA, 425 bp, Glycine max
  unsure (1)..(425): unsure at all n locations
gatccttgagtcacctgcggcatgcaagctngtacatanataataggtcactgttctatcttctcagcatgcgtcatataatttaaacagacagtatttcattgctaaactcatgaaaaatgaattaaaaggtcacttacagagctaatactgggttgtctttttgcagcagagatntctggagaattcaaaagcagaggatttgtagcagagtatggttcagtcatagcaaacattagattatacaggtgagaatctcaattctcaatcttgaactaaacaagtaaaatagcacattgtgcacacattaacatagaaaggccctgtgttatgaaccataaaaggcagcatcggtctttaggaataagctttccaacattaaggataacacaactgccacttcttcaatgtatgtgcgtcggcga

SEQ ID NO: 78565 - DNA, 442 bp, Glycine max
  unsure (1)..(442): unsure at all n locations
agctttctcaggtggtctntggcatcacatttaaacttgaaccattgtcgatgagtaccttcgcgacaacatggtccatacatctgacagacacatgtagagccttgttgtgccctctcccctcagcgggaatctcttcttccgcaaacgcgatatagttattggtggttatatgattaacaatgccttcaaaacccttaactgagatgtcgtgtgctacatgggcttcgttgaggacttttatcaacagtgcacgatgaggctcggagtttatgagcaattcgagcaaagatattcttgccggagttttattcagttgctcaactactctaaactcgctttgttggatgagacgaangaactcatgagcctcttccaaagtcaccatctttccttgaagaccttctttctttntagctccttttaccaccggaagatccac

SEQ ID NO: 78566 - DNA, 412 bp, Glycine max
ttactggatgtctgttgagtcccgtgatataacgagacgcctcgaaattgaatgtggagctctgagccaaatctaacgacaataactttttactccgatgtctggatgaggcccgtaatatatctagacgctcgaaattgaatgttgaaactctgagccaattcaaacgacaataactttttactcggatgtctgattgactctcgtcacatatcgagacgctcgaaattgaatgttgaagctctgagcgaattcaaacgacaataactttttactcggatgtctgattgaggcccgtaatatatcgagacgctcgaaattgaatgttgaagctctgatgcaattcaaacgacaataactttttactcagatgtctgactgactctcgtcatatatcgagacgctctgaaat

SEQ ID NO: 78567 - DNA, 435 bp, Glycine max
  unsure (1)..(435): unsure at all n locations
agcttactaattataacacgctacattaatatatatttgagtgatagattaaaatttatttcaataacagaatatttcctttttgattctttgcaccacaattgtttatccttttcttgttagctacctggcgttctagctggcaagaaaggaatcangaaaccaacttcggttgccatatttaaaaacaaaaaattgtttattattcaatgattaattaatcaaacttccatatgaaattatcataaaccagccgcacgtgtattacacaccctaaagatccctccaccttttaaattcaaaatatcttgtgaaaactacaaaaaaattgatacttntataagtgcagaatgcaacttggtgacattgttatgttctaattgtaacggtgcccttctcttcaccgtctattgagcagcgataacaggataagta

SEQ ID NO: 78568 - DNA, 362 bp, Glycine max
aagtgatcgtggatagctctatctcttcgagtcagatgacacattgttctgtggagagaattacctaccgctcatggagctaactgatagataattatgaataaggctatgcgaaatctcactctctctgtgtgtctctcacacgtagcaacgcatcattcatcaccttgattcgctggattgaggatccacagaaactgggggatgttatgtgcatttcactggtatgatgtatgtatatgatccttgctcacatccttgcatgaagactaaaaggtgctttggtagtgagaaagactaaggcagatcgccttcttggaagggagaaacatacttcctggagacttggtggcaaatgaact

SEQ ID NO: 78569 - DNA, 442 bp, Glycine max
  unsure (1)..(442): unsure at all n locations
agctnnttattntcagtagatgaagatgaatctgtggccacctcatggactcctctaaggacaataacatcatttcttgcactgaattgttgggagttggaagccatcttctcaatcaaattcctagcctcaataggggtcatatcacaaagagctccaccactggcagcatcaatcatactcctctccatgttgctaagtccctcaaagaaatattgaagaaggagttgctcagaaatctggtggtgaggacagcttccacacaatttcttgaatctttcccagtactcatacaagctctctccactaagttgcctgatgcctgaaatgtcttttctgatggcagtgttcctagatgtanggaagaaattcttcaaaaacaccctcttaatgtcatcccagctaaaaatggacctgngaagcaggtagtatagccaatctc

SEQ ID NO: 78570 - DNA, 390 bp, Glycine max
  unsure (1)..(390): unsure at all n locations
tcttatccaaggcacattcttggtggtgaagctccttcttccatggcttattccctagnggatggcgcctcctctaaccttttcttctttatcttctattgcatctccatggcggaaaatcacaattgaaggacctcattaaagcttaaagatccaaccttcgtagaagatccacaaggaagcttacatcaaagaggatgactccaaacactaatagcgctaagacatcaatgaatgaagcccattcgccttgatccgccaaagccttcgctttctcttccaagtgcttccccggtattccgactaccccattcctatttttttttactcattccaattcttgtgttgagattatgaccactttgactattctcgtcatggaggggtata

SEQ ID NO: 78571 - DNA, 446 bp, Glycine max
  unsure (1)..(446): unsure at all n locations
agcttntgctgaatcaaacatcttgacaagattcaacaaagcttagagatcaaccacattgatagagaccttatgtttttactaatgaaatcatactgttagtaatttagtatacaataagtgatcaacctacaagtttagttgaactcatgagaaatgaaatcaaaatacattactgaaaaatatccacacttataagtcagaacttgtcaacaaatacagatgagttttgctttagagtctagaattttttttatcataattttatattttttaataatctaactattagttaggttgaataaagctcgatagaaaattttcaagagaataacagcacggtatgtcagacttttcttacatcagccataaattggttgctagaattatcctaaaattgaatgagagaagcactgccatncaaccattagtaccactaaagccca

SEQ ID NO: 78572 - DNA, 440 bp, Glycine max
agcttgaaggcacccaagtcatgagtgtggatgaagggtctccagtccgaaccctgactgtctaccaagtgtttgtgctcttctgcaaaactaatcagaaagtgtaccgagtcgtgcaagtaatataaaacggtaagaattgagtatcatatccacaggaaacttgtttcacttagaaaatatatgttcaatgagcaaacatttgtgtagagcaagtaaatattaacttgggttttgtatgaaaatctaattaaacacaaattaaatatctagaggttgagaagtaaaaacagtcaagtaaaaagcacgttgggtcgtcctactgactttcctttgatggtgtaaatattcttctctattaatgttatcctagtgttcttatgctgagaaattacccaaaccaagatccctcgagtgaataggcctaactctatttaaac

SEQ ID NO: 78573 - DNA, 461 bp, Glycine max
  unsure (1)..(461): unsure at all n locations
tgtaatattggagagtatcttaaggatagattatatgactattatgcagattgatctgtnttctgcaattagcaaatcctgcgtatntntgtttaatatgattagaactttccatatatgtaattcatatctcaatatggcaggtatacttataaatggaaatataagattgattcacatatatatttcttttaaacaaaaccatgtaaactagtataaatgaataattcaaataaaattctcaattcaatcagtgtttggatagactagatgagcactttctgcttctagtagatgaggtatccactaatggataagtttcaccttgtgttgcttctagtcatcaaatttggtgacttacatgcaacaaaatggttaacacaaatntatatctttgttctcaataaaaccttaagagatatataggttggtcaattatagatcatccagtgtctaacaaa

SEQ ID NO: 78574 - DNA, 461 bp, Glycine max
  unsure (1)..(461): unsure at all n locations
tcagccaatgaagaggggtgtccaatattgtagcttattttaaccgaccttaagccttcaaatagccttccaattactagggatatagtactgggccacatttgtcaagtgctccataatattgaagtaggcggacttaacaaaagaacactttatccctactcaacttccaaatcatcctatcatcttctatatctttgcaaataggaattttcataacttactatatatctctatcttgcatgtaagtattaacaagatcaaagttccatcctcctctatcgtggtggatcaaaccagtaacacataagtcatgcataccataaaggtggaagactatagacaagaattatcgacatctttcaacccaggatctttgcaaatattgatgctcctttaaccactacctgnggtggattgcatggatgctacgccaagaataacctggattattgcccggg

SEQ ID NO: 78575 - DNA, 308 bp, Glycine max
agcttgaaagtatcatctcaccctatcgagctggttgcttaatgctgaagctgtcccatggcccatgcgagccacatgctggcctgggtgagtttaggtctatataatgaccatttcgcccctctccttgtggcttgtgttcctggatctaacaatcaaacatcaaccctgagcgacccttccgcattgctctgcaactggtgccaaacaccgcaatgcaattatcaatgatcaaaagatcatgtacaaatgataaaaacattattcctggatgaaattagggtctgacacgtgctcctctatactta

SEQ ID NO: 78576 - DNA, 302 bp, Glycine max
ctctcttacccaatactaccaccaggctttgagatgcttcacgttcggagacttccaattagtgccaaccattgaagaatttgaggagattctaggatgtcctctcggtggaagaaaaccatatctgtcctccgggtgtctcccctctttgagcaaaattgcaactgtggtcaaggattcagcaagacgtttggaccgcataaaacagactcggaacggcatagcgggcctaccacgaaggtacctataagacaatgcaaggggtatggccaatcaaggagattgtggcccgtctatggatg

SEQ ID NO: 78577 - DNA, 434 bp, Glycine max
agcttaacattcaatattgagcgtctcgttatattacgggactcaatcagacattcgagttaaaatatattgtcgtttggattggctcatagattcaacattcaatctcgagcgtctccatatattactggactcattcagacatccgagtgaaaagtgattgttgtttgaatttgcttatagcttcaacaatcaatttcgagtgtctcgttatattacgagactcaatcagacatccgagtaaaaagttattgtcgtttgaattggctcagagcttccacattcaattttcagcgtgtccgatatatcacgggcctcaatcagacattcgagtgaaaagttattgtcgtttgaataggctcagagcatcaacatttaatttcgagcgtctcgatatattacgagactcattcagacatctgactcaaaagtta

SEQ ID NO: 78578 - DNA, 460 bp, Glycine max
  unsure (1)..(460): unsure at all n locations
cgcttgagccaattcanacgacatattctttntactcggatgtctgatngagtcctgtaatataacgagacgctcgaaattgaatattgaacctctgaggaaattccaacgacaataacttttttctcggatgtttgattgagactcgtattatatcgagacgctcgaaattgaatgttgaagctctgagccaattcaaacgacaataactttttactcggatgtctgattgactctcgtcacatatcgagacactcgaaattgaatgttgaagctctgagccaattcaaacgacaataactttttactcggacgtctgattcagtcctgtcatatatcgggacgctcgaaattgaatgttgatgctctgagcaaattcaaacgacaataacttnttactcggatgtctgattcagccccgtcacatatcgagacgctcgaaattgaatgttgaagctct

SEQ ID NO: 78579 - DNA, 467 bp, Glycine max
  unsure (1)..(467): unsure at all n locations
agcttatccttatggctggcctccggacttcatcccccgtgccaccccggaagatttaagccaagcccctactttcgaggggcaactcccaccttatgacgactatcccgggcaagacgatgaggaaggagatacccatcttggccccctgctccacctcaaagatccgtccccccatgaactaccccaactgaacataatccgccatatcccggcctcacccacacccgtaaaagaatctgttcccttcgcggaagataagggaaagattgaggcgcttgaagagaggttacgagcagtcgagggccttggcaattacccattctcggatttagcggatttatgtctcgtgcccaacatcgtcatccctcccaagttcaaagtaccagacttttgacaatacaaagggacaacatgttcaaagggcatctncggatgtattgccgaaagatgggggcgtattccgc

SEQ ID NO: 78580 - DNA, 451 bp, Glycine max
  unsure (1)..(451): unsure at all n locations
ggatctctgagcaccgcngctgcagctataattatatattggtgcataccattatattctatccttatatgtagcagaatatgcaattcatagacttgtccatcgatcctgagaaaaagaaagattaaattagtccctaaatttatatgtcaatgttattttagtcctgtaaaactaaaagatttcaaataagtctgaaattnttaatgttctatttaacatcatgagaaaaaaaaattctcattctgattcctaaacttatattattattatccaagttctcgtattaaaaaccaaaataagaaataattatttttagggatttaaatgagattctaacaaattttaaggacttattttaagtttttttttagagactcaaatgacaacgagaaagagactaaattggatatttatccaaaaaaaaatctctaaccacttatgtaacata

SEQ ID NO: 78581 - DNA, 401 bp, Glycine max
  unsure (1)..(401): unsure at all n locations
ttctctacctacaagtcctcgcaatgttngaacaattcatcaccatccaacctggtgtgcagcaactatgtcaacacacaaccaactttggaagacacccttactgtctcagcaaacggcaatggtgcattatccatcttaaagcgctgcactctctaaacggngcaagtaatagccctccatttggagacctctgccgccaaggactctaccttgtgcaaagcctcttagtaccatngtccattctcctccagaatcgccaaacttctctggagaaaggctttggcagaatccgtagcgttctacaccctatccgattaaaaccaatttttgtcaaaggctgacataaatccagtcaaggtcttctgctccatcctataacttgcaccccacaatgaaat

SEQ ID NO: 78582 - DNA, 422 bp, Glycine max
  unsure (1)..(422): unsure at all n locations
agctcatgcacagttgcttccaatggcatttgactcattactcaaaacctattggaagccatttgttgaacttagccaatttttcagagaactaacttcgacaactttaaatgttgagcaactaaaaattatggaaaataacatacttgtgttgttgtgtaagttagaacaaatattcccaccaagcttctttgattcaatggagcatcttccagttcatttaccttatgaggcaagacttnggggtccagtccaatatcgntggatgtatccttttgagatgtataaaatgagtaataatttatacaccattgtattatatacgtatagtcatttttaaaaaaatacttattcatattaattttaggtttttgcactccttcaaaaataaagtcaagaatatagctagagttgatggatcg

SEQ ID NO: 78583 - DNA, 456 bp, Glycine max
  unsure (1)..(456): unsure at all n locations
agcttcaaaataaatgcaaatgttgagcactggctntaatataaacagaaaacatgggcttttagttttaattattattcattaacattttctgttaaatccttattcatgggaagtgctaagtgacagcatatgctaaaaagaggatgaacataatatggaacccagttgtctacaaaaaatttcttctgttaatattgtaaaccattcaataatgggtttttcgaaatcaaactatgacactgttgaaatgcaatgaagaatgcagacatgtggtattaacataaaagtccagattattgcctgaacttcaaaaggatcactagacaacatgagtcgctcataaattaacatactagcaccatatgcaatcaagcaatcacgttccatttctccaacacgaagacctgaanataataagaaaaagattgatgccaagctctacatacaataact

SEQ ID NO: 78584 - DNA, 207 bp, Glycine max
cgtggttatatgtactcactgacgacgcacctcagactatatgccgttgggttgggacccatgagcgtgcttacatatgagtctgtttggcagaacaccctcgagaaggaaccgttggggccttatcaggaatgccagttggtgtaacaagcatacatcctttccttgcgaatatgataggaactcttgggatggagctctatctaa

SEQ ID NO: 78585 - DNA, 486 bp, Glycine max
  unsure (1)..(486): unsure at all n locations
tcgtactcngatccttaagtcacctgcggcatgcaagctnggttntgggcaatagcaccccacctgacgtccccaaggtctcctgacccccgcgacatatctccaggtaccactctgtggtcaacgaataaaagcaggaagtttcacccttctacacttcctcatctcaagattgtaggattatggggtacccatcacatgtggtactaagtgacggtcgggcgatggtgcacaacaagttttccacattcacaaatcgcgcataaacccaccatcccctgttgcccacctccaactgagctcacgtactcccacgtagcccatatcctcgtttctctcaacaccgagtccncatcaatcctcccaagcttccccaacatccaagtaattcaacattcaaacaacacanactatcacagccaagaaaacagggcagaggcagaaaactctgcccaaacaccaaccaaatcacagctttctcactta

SEQ ID NO: 78586 - DNA, 462 bp, Glycine max
ctaagctttatggttatttctttagccttgtatgttggctgttattgcttagtacttttgatatgggtggcttggatgtttaccattatgttttggtttgtgttttgttattttagactttgatttggatgattaagacttgcttgactttgatttggatgattaagacttgcttggtttattctatggattgaatcaagttatggttaaatggtgttatgattatgatgttgccttagttcctttctccaaacgtttttggctttttgatgttgccaaaaggggagagaacttaagggtagaatttattatgaacttatgcataaattccaatcttaagggggagtaaaggttgtgagcacacattatcaatgctatatcgtttatcttgatttcatattattgtcatcataaaaaagggggagattgtagaagcatatatgatatgaagttttaatgatg

SEQ ID NO: 78587 - DNA, 432 bp, Glycine max
  unsure (1)..(432): unsure at all n locations
agctngtagctnttgcatatnnttttggtttataatataaattactgcctgcctctaattatatcatgttttgaataaaattaagctacaacatgaccaataagacaagaacaacattgattagaaattactttntgttgtttattttttacttagaaattgtttacattgatttttaattttttccaaattgttgtagagatgagtgcttctagtcctagtcaagctaaataacaagatgatgataccaaacctttatggacctatgttataaagataaaaagtgtaggtggtggtggaaattatgcggtaaaatgcaatatttgtgatttacctttaatgggtcttacactagagtgatggcacacttgttaaagatgacgggaaaagggagttagagtttgtcaaaaggtaacaatggccaaacttata

SEQ ID NO: 78588 - DNA, 282 bp, Glycine max
tccttggtgtgatgtgtcccttacaaatgatgggcgcatatgatgcagcaccatagtcccctttgttaatctctaaggtaccatgcttgtggatttacgatttatatccctcagataatagctttacttaacgatttcgttctcaatacatccccgtccttgcagaaccaattctgatgcacccagctaaattaaacgtagatacgatcatcccgtgtgtggcgaagtgattataaggaaattatatgccactactgagattaattatttcttattaactga

SEQ ID NO: 78589 - DNA, 463 bp, Glycine max
  unsure (1)..(463): unsure at all n locations
agcttgtaggattatggngtacccatcacatgtggtactangtggcggtcgggtgatgggtgcacaacaagtttccacatccacaatgcgcgcataaacccaccatccnctgttgcccacctccatctgagctcacgtactcccacgtagcccatatcctcgtttctctcaacaccgggtccccatcaatccttccaagcttccacaacatccaagaaaaacaacattcaaacagcacaagctatcacagccaagcaaaacagggcaaaggcagaaaactctgctcaacacaccaaccaaaatcacagcttttctcacttatagaccccagtaacaattccttcgatccaattcgttaaccgttggatcaactcanacattntactagaagtctatagtacataagcctacattntgaccgttgggatctactagcaaacatccagaactcattctacattac

SEQ ID NO: 78590 - DNA, 402 bp, Glycine max
cctcgacaacattattggtgatatcttttaaagggtaacaactagacactctcgtgaagatatatgcaataatatggcttttgtatccatgattgaaccttaaaatataatagaagccattatagatgattattggatcattgccatgccagaagaactaaaccaatttgtaagatacaatgtgtggaaattagtagaaaaacctgaaaattatcctgtcatatgaacaaaatgggtttttagaaataaattagatgaacatggtataattattataaataaagccaggtgtgttgcaaaagggtataatcaagaagagggaattgactatcaagaaacatatgcttctgttcaagattataagccattacaatgcttttggcatatgcatccataatggac

SEQ ID NO: 78591 - DNA, 441 bp, Glycine max
  unsure (1)..(441): unsure at all n locations
agctatccanacaagcccttacatggaatctgagtttgatgacaattgaacaagtctaaaatagaattttgtgttttttttttctccaacaaatgcaaatgcagcagttgaataaaagtaacagataaaaaagactttttctaggctaatagcagccattcataccatgaagaatgaggaaaacataatggactttcagatatcaatagcacaagtggtgattagtgacgtatgatgtcaaatatacctgtaagtgtctttgcagcttgtcctgatactagaaccagaactgagcatagctccttgaggtgctgtggttgtataatgtctgctaaaagagaccttcaacaataatcaagttagcaattaagcggagtaaatttatcttcatttcatatttataacacaaattacctgtacataaactttgaaggacctaat

SEQ ID NO: 78592 - DNA, 343 bp, Glycine max
  unsure (1)..(343): unsure at all n locations
tgaatctctattcaagttgaaaatgtgtaatatcatgcaccaacttgagtggggtgttaagatatgtcaaatattctattagttaatattacgcaatccaatattatattagctcgtactcatactttattacaagctgaagtaattccgagcatatatcatttctttaatagatgaggaattataggatccttgtgtgtgtgtntatatatatatatatatatatatatatacacaacactattctataaataaaatatgtcacacttattctttanacctttctatgaatgtcgatgtctgagatacataggaatacgtcaagtaccccgggtggcaaaaa

SEQ ID NO: 78593 - DNA, 373 bp, Glycine max
  unsure (1)..(373): unsure at all n locations
agctntctagcctttcattgntgtatttcgatctccttctggggctctgaattgtgggaatgtgctcaaatatgtggggcaattttggtttgttttcttgcttgattagattgaattgggggtttgtatgggatggccctaagcctataatgcattttgaaacaatgggacatgccacattgtccccgttcttttgctattgacgcctaaacgcacgcccaccaagtgttcggtgaaatgcctcaatggcattagcgcatgacttttgtaaggaaacaacccgtggggcattttggtttgtacatattttctattctttggaacatgtattcattcccgaagaaggctagagtaattgccccacatatattct

SEQ ID NO: 78594 - DNA, 198 bp, Glycine max
agcttaaatagaagcctgcgttgcacttgttgtatcatcgacgacagagagtattgtgagagacacattaaagattcatttacctccctctcctgttccttaatgtatgccgccggcctacctctatctataagtcttcttgagcagtgaagcaacctatgtaagcttcttatccaaggcactctcttggtggagaaa

SEQ ID NO: 78595 - DNA, 359 bp, Glycine max
  unsure (1)..(359): unsure at all n locations
aaatgtgggagtgtgctcaaatatatggggcaattntgggtttgtttcttgcttgattaaggtgaattaagggttggcatgggatggccctangcctataatgcatnttgaaacaatgggacatgccacattgtccccgttcccttgctattgacgcctaaacgcgcgcccaccaagtgttcggtgaaatgcctcaatggcattagcgcgtgactnttgtaaggaaacaacccatggnggcatttggtttgtacatagtttctatttttggaacatgtattcattcccgaaaaaggctagagtaattgctccacatatatcctagtcctagaaactgaaattntatgcaaaaagagcac

SEQ ID NO: 78596 - DNA, 439 bp, Glycine max
tgtcaagtgttaataaacaacctcttaattttaatcagtataaataaaagactaataaattcatttgatgtgtaatgaaatcatttattatctttaaaataataatgatgaattataaaagaaaatattattgaaaaattaatgatatttcaatattttgtttaaaaataaaataaaaacacgattatcttttcaataaatactattaaaaaaggaaatgaaatatttatctaaaaaaatagttcattttattcacaatgataactataaaaggataaaaaaatattttatcaaaattatgaaaaagatatataatacttaagtattattatcaactctaaaatcaaaccctatcaaataaaagtaattactgtaattaaattatcacttatactaggagaaaaaaatcaaaaccaggaaaatcagtcgggggtggatg

SEQ ID NO: 78597 - DNA, 403 bp, Glycine max
  unsure (1)..(403): unsure at all n locations
agctntgaagatttggtctttgccaatgaaaggatctatgtgtttctaaaanaaggcaaatttagtcatcctgcttggacgaatgagaaaactggggcaaatgaatagggtgagaaagatggagaaacccatgctgtgactgccattcctatacggccaagtttcccaccaacccaacaatgtcattactcagccaataacaaacctgctccttacccaccggccaggtatccacaaaggccatccctaaatcaaccacatagcctgtctaccgcacttcctatgacgaagaccacctntagcacaataccaaaaacacccacaataaggatatttgcagcaaatagcctgtaaggtcaccccatatccgttgcatatgctatactgatccctatccactcaa

SEQ ID NO: 78598 - DNA, 469 bp, Glycine max
  unsure (1)..(469): unsure at all n locations
ctttggcttcttattgtgtgtgtaacccaatccagccttttctattcacatntttgttgtacaagtaatgcttcccaattgtctctccccatacagaagttggataaagttttcaacaagtattctaccttgagtccttgacttctaaaactttacatccttcacaaggggaagtgacattagtggtgttagcgcaattgcaagaagagttgttcttttctatttctaaaatatcattttttgctatttcttccaacgactctttttaaatttcgactagcttatctacatgccaccttagttttccttttagaagattatttgcaatggataacttttgtgcttcttgatgcatttcattgaaagcatctagtaactgatcatagttatcatcaactntngaatcanaaatgcactcttagcttcattgtttgccatcaagcanaaatttgcttcttcctcttcacta

SEQ ID NO: 78599 - DNA, 457 bp, Glycine max
  unsure (1)..(457): unsure at all n locations
cttggtcctgtacatccaatcaaggtagttgatctatatgctctattttgaatagaattgctatntcctacattgtaattttgaatgtttcctttttgtgccggcgaacataatgtatactgtgttggcattttctactgatattatattcctaaactcttagatgacttgcttccattttttataattgtgtggaattattaccaaagcagttggtcttgaagaaataaaatgaagaaagaggttgncatttatcacttaaataaagagaaaatgaagaaaaataaatattttcttcttcttgtttattagacacaaaatgttatattaaatattctatagtgtgcatattgttccattatcctcgaaatcttaaattgaaattattaccttgatggaattcaggactcctttgatggctgtcatgcatgatgatgantctcctgacttaagagaa

SEQ ID NO: 78600 - DNA, 404 bp, Glycine max
tagtgatataagtgtaagtgtatatggatctacaaatgcttgttttttacctcaccatgattagacaactatatatggatggtgcaagtgtgacaccctttatcctgacatacatataaatcagaaaaacatataagaatttagaatttaattaaatcaattttattcaaatcacttaagcaaattcatatggataaaagggtcacattcactatactgttacaaaataaaacttatcaaaaacatcttcggctcaaaacaaggtcgtccaaaactccaaagaatgaactaaagactcagcatatgaaatagaatgatacaaactacaagttcataacttcttgcaattaacacagaaacctgtgtctcaatgtcacgttctatcagagcattgtacttcagca

SEQ ID NO: 78601 - DNA, 376 bp, Glycine max
aacacacagccaaaccataaaatgactatcggcatcaacaagagcagcaacctatacttgcataagagaataacataatcaatccatactagagagctggggttcatcatcctcatagagatcataggtccacttggcatctttcctctgcctgcaaaaacatgatttggaatacatcaccgtgcctttagttaaataagcattcaatttacaggatgaacttgcacataggagttcacaactacgaagcgagactctgacgagaatggaccagggaaccgataccacacaaataagagattctattaatgaatatgagaaatacacaactattaattgtggatatcatcttttaaccaaatctatgtctttcaag

SEQ ID NO: 78602 - DNA, 468 bp, Glycine max
  unsure (1)..(468): unsure at all n locations
tctcanacccgaaatcgaaaacttcttaaatcataacccttctcttgctntgatcatagacatcatgtatacatggagatccacacttaacaatagcatccncacgtttgtttacagccccatgcccgtcttcgctctttgcgttgttgaagccatcaatcgccatcctcaaactttggcttctgattcttcacttccttatgttgtccctggtggtctcccccacaatgtcacgcttaattttaacccctcatcaactagctntgataatatggctcgtactttgctacacgccaaggaaaataacaaacatggtgttattgtgaacacatttccagagctcgaagatgggtacactcagtactacgagaaactcacccgtgttaaagtctggcaccttggcatgctctcacttatggtggattatttcgacacaagaggcaagccacaagaggatcaggtatcggg

SEQ ID NO: 78603 - DNA, 436 bp, Glycine max
  unsure (1)..(436): unsure at all n locations
cgcgtgggcttaacgcgaggataaaaccacttagcgaggtttgctttatcatanaagctacaactctcgctaagccaggctctggtcggcttagctaaaatgatgcatcttaagtacaaaggagcatgcgcttaactgataaagactcgcttagtgcttacattgccacatggaatttagcttagctgccatgagtggcgcttagcattatgaacctctgttctgaccgtaaggaatatatcttggcgacaataggtcgcgcttattcaaagataagttgttgcttagcattttagctgtcgcttatccaaattggaataagctcaccttcgccttggctagcttagcgtgatgaatcaacctaagatgaatgggttagacgctaagtgcttgagactcatggcttagcgcatgaataattatgctcttagcgtga

SEQ ID NO: 78604 - DNA, 461 bp, Glycine max
  unsure (1)..(461): unsure at all n locations
agcccaaagtattcttataaataaaaagattgaatattangtcatacaaaaaggcgtgccataagtgctaatgtaaaaaaaaattgaaataagggcagaaaaagagaggtgtcataagtgccaagaagaaaagtgttattagaggaataaatgctaaaaaataaataagcctatgcaggatataagtgaaagtttttctaaggatgcatgctcttttataatcctaaatttttgaaatcctagaaaaaccatgatttcttgtttagccaagccccattacaagccaataaaagtccttagtaatccaccaagtgtaagtaaggatagctntaactgagatgaagtgtaaatttgggaatcttaattgcaggtctgtaaagttcaaacactcaccctaaacacttgtgcgcaaagaataacactaccttcgtgaggaaagtgaggcaagcttatgtgttatc

SEQ ID NO: 78605 - DNA, 461 bp, Glycine max
  unsure (1)..(461): unsure at all n locations
ggaagagacgatctgaatganaaataaanataaaattagatttatataaactcacctcgttgtttacatacgacaaaataactnggtggtgtgtagagatgaagcatttcatatatttaagacagtgttctttgaagatttatctttacaaaatttaataattctttggttaaaagcataaacaaccctttcctcgaggaagataaagaaatggtattcttgttcttcaaggaaagaagcatagaacattatgaaccaatctttagtttcattcattccctttttgggaccaccttattgatcagtagagcccactagctgagttgttttcacacccacatacatattcatttcttttgagaaacttgttcattntcttgtggcagatattgttgtaccggaccaaaaagtttcaagttctangtgttccacttcaatnnttaaatgtaatatatattatc

SEQ ID NO: 78606 - DNA, 460 bp, Glycine max
  unsure (1)..(460): unsure at all n locations
ggaaganagtgacagttgagagattntattntaactacatttttttgaatcgagagagggagggataaagacaacagtgtgaggactgagagcaaatcacgctaggatagatcctcagaaaccagaatgtctgttccattctgtctttatttttttacttggagtagtagaagtgattgacagctacagaactcatttgcaaccacttacgcatgactaattgagttaaacttcttcctttgtctattcgactttgtttcgtaattaataagattaattgcattttttttgtctttttttcatttctccaaagtttctatttgtcaatttgctcttcaactttttaattatttaattntcatttatttattaacttaatatttaatttataacaaanaaaaatattgacattacactgtcttatactattatgttaaatanatagtatgtacgatgacta

SEQ ID NO: 78607 - DNA, 421 bp, Glycine max
gtcctctcgtggtgaactatctctaatgatgatagtgaagtagggatggccttgccaacaactgcaagaatgtgtctggtgtccttgttgatgctcatagacaagcttaatgaagaaatgtttgatagtggaacatagagccacaagccatggaaaagagttatcaaagaaactatagttctttcacacagtgacatccttttcttttgctctatgataataacgggacaaacataacaagaggacaaagaaagggtcttatctagttctcttattacccctctctttcttttttgttttgttttttggactttttattgcagaaatagagtcaaaacacacatgagagagacaaaaaagaggtttcaatgctggctttctctggtttactcctcttatgagatctcgctgacaacaacta

SEQ ID NO: 78608 - DNA, 455 bp, Glycine max
cgctatcacctttaccagcgattgaaaaaaaactttatctgaatgtatgaacatgaaagtgcaccgatactattaattggtcagcagattcttaagcgggttgaggacattaatacgatatttcgaaagacccataagaaaaaagtaaaacttgcatatggaataagaggtcgatattctttgatcttccatattggtctaatctagatgtcacacattgtattgatgttatgcatgtggagaaaaatgtgtgtgatagtgtcatcgacacatttcttaacattcaaggcaagacaaaggatgatttgaatactcatcaagatctagctgagatgggtatatgagaccagttacactctaggtttgatggtaagaaaatatactagccttcaacttgtcatactttgtccaaaaaagaaaagatatgttattgttagtgtctacaccgtgtcaaa

SEQ ID NO: 78609 - DNA, 422 bp, Glycine max
  unsure (1)..(422): unsure at all n locations
ggaaggtaaactagatgccttggttaacctggtaactccatctggccatgaataaaaaatctgcacttgtcgccagactctgtggtttatgctcctctgccgaccaccacacagacctttgcccttctatgcaacaatctgaagcaattgaacagcctgaagcttatgctgcaaacatctacaatagacctcctcaacctcagcagtaaaatcagccacaacagaacaattatgacctctccagcaataggtacaatctcgggtggaggaatcatcccaaccttagatggtcgaatccttcacaacaacaacaacaacaacaacaacaacaacaacaacaacaacaacaacaaccttaattttagaatgttgttgtccaagcagaaccatacattcctcaccaatccagcangaacaacaac

SEQ ID NO: 78610 - DNA, 422 bp, Glycine max
  unsure (1)..(422): unsure at all n locations
atatgtgtgtgtgtgtgcgccgttgatgtattctntcgtnnatcacnactnagtgagaaatgtgataactcactccatgtgtgttatntgtgttaagatcctgtgatgatatcgaattttatgttcgcgtgagcagatgattatgcggatgactttaaataacctcgtgctagaagacgctgggatacaacactctgatggatgtgacattgaagtatgaatttctatattattcgtataatattctgaacctgtttatttatgttgttcccctgcttaactacgtttttttttttaaaacaaaattgactgactttgtctggggctagagatgtgttatactcttataagtattaatttgataataacgtgaatgtgaacttttacctatgtgaatccttttattctatataacaaatctc

SEQ ID NO: 78611 - DNA, 312 bp, Glycine max
gtctcacgattgtcacatgttgatgcaataatttgtttgcagcggtatacgagacatcttgccaaacaaagtcaggttagccatatctcgcctatgctttttcttccatgccatatgtagcaaagtcgttgatgctgtctagcttgatgagctggaaaatgacgctgcaattatatagtgccagttggagacgtaatttgcccctactttcattagacaacacgaatcactggagggggcatctggtccaaaaaatcaaatattgttggcctgtttaattgcggcggatgctcctggttgagcaacaactga

SEQ ID NO: 78612 - DNA, 466 bp, Glycine max
  unsure (1)..(466): unsure at all n locations
cttgaaactaacctcgtctaagccataatgcntattgngaagtgatctcaagtatatttttctttgcaggagtgtaagctctatcccgaagaattgcatggtcattacctgccatgttttcaataacctccataacttcatcaggtgtttttaactttatctttcctccaatggaagcatctaaaagttgcttcaagtgaggttgtaagccatcaataaagatattcatttgtattggctcactgaatccatgcattggagtccggcggagtaaaccgtggaagcgatctagagctttgctgagtgattcatctagaaattgatgaaatacagagatctctgcttttccttatgatgtctctgatttcttcaagaatttctccaaaacctctttccaagntctcaagctatttcccttaagcgaatgaaaccatcttctagcttatttgtaaaggaataaaataat

SEQ ID NO: 78613 - DNA, 414 bp, Glycine max
  unsure (1)..(414): unsure at all n locations
ttcttgatcatattcctataagatgtgataacacgggttctataaatctatctaagaaccctgttcggcactcaagaaccaaacacatagaaataagacatcatttcttgagagattatgttcaaaagggagattgtgttctagaattcgttgatacaaagaatcagttagctgatatctttacaaaacctctccataaagaaacgttctttgctattagaagagaattaggtcttttagatatcaatgatctagacaagtaggtaactcattgagctntgtcctccttatgttcaatatattgtctttgagtgtaagtgttagtggtattaatagtcataataatcgttgtttgtcgtttaataattggccttgattacctttggttgaattattaatagtaatataagttat

SEQ ID NO: 78614 - DNA, 444 bp, Glycine max
  unsure (1)..(444): unsure at all n locations
ggaccaatcncgacccaacccgggcatagtcggtcagagatttcttgttatgtacctaagcaggcgagctcctggcagtcaacagataaaaggaaaacaagaccacaaatcattgatgcttgtggtggctggccagctgtgaattttgtgtaatatgtggattgtggcctctggtaatcgattaccaaaggtgagtaatcgattacaaggcttaaaattgaggacaggaggctaagatggtctctggtaatcgattaccaaggggtgtaatcgattaccaggcttgaaaacgaagtcaggagacttagggagcctctggtaatcgattaccagcctgcgtaatcgattacacagaggaatgggtcactggtaattgattaccaggcatgtgtatacgattacacagtgtattattgcataattcatgtcctgaggctgcgtaat

SEQ ID NO: 78615 - DNA, 429 bp, Glycine max
  unsure (1)..(429): unsure at all n locations
tgacaacgattgggctagagataaattattatctgatnagnaccaatggatntgtgtgtttcatatggaacacaacgttcactcggatgtcaaaaaagttttcaatagtcactctntcgacttgtgaggcagaatacatagcagctgcttcatgtgttttccatgtagtttggctcacgaatttgtaaaagagttgggcatgtcacaagaagagacaaccaagatttttgtggataataagtcaaccattgctctagcaaagaatccagtgttccatgatcgaagcaaacatattgatacatgttaccactacataaggaagtgcatagcaagaaaggatgtacatatagaatatgtgaagtctcaagaccaagtagctaacatcttcaccaagctgctcaaacaagaagactttatcaagttatgaaa

SEQ ID NO: 78616 - DNA, 301 bp, Glycine max
ctgtcacgagaaaagaccgtggacccactgattaattcagctaacccattgctagcaaagactagacacatacagagctctgatgcttccaatgaatatatacttattatcggaacgcgttctctctgatgatgagatggctcccgatctgatgatgaatcttctccaccccacaaaagatgctgccaagcatgattgggctctggtcaccaagaaaagtcatctgtgcacatcttattacaaaggagtacactccctccatcggatactaccttctatgcaactgcttccccctatcaat

SEQ ID NO: 78617 - DNA, 464 bp, Glycine max
  unsure (1)..(464): unsure at all n locations
tatttgagaaaacttccttgagaagctagagcnnagcaatcncactcccctctcataactaagctcacctgcttgagaagcttcattaacaccattcctaaagaagctagagcttacctacacatacctctcttatagctaagctcacctccttgagatgagaaactagagcttagctacacaccccctataatagctaagctcaccccgatgaaaaagcacatgataatacaaaaaaatccctactacaaagactactcataatgcctcgaaatacaaggctaataccctatactactagaatggccaaaatacaaggcccaaacaaaggataaacctattctaatatttacaaagataaggcggctcatacttagcccatggactcgaaatctaccctaatgttcataagaaccctacgggcttccctcggatctctggcccaatctacttggagtcttcta

SEQ ID NO: 78618 - DNA, 330 bp, Glycine max
  unsure (1)..(330): unsure at all n locations
tctacgaatggaattctatgaagctacgaanatcatattttatgttatataaaacctatagattatttatttgtaaattttatatcactcaagaactatcaatccataagtattacgcgaaaaaaaaattaaatcaacaacttacctccgtcgttaatggctaaaccaaccaccgtcacaaccaccacttgccgacgaaccaccgtaaacaatgcacctcgaccaaagaggacactagaacgaacgataaactctcacagaacacctctcacgagatcgacggtgaaggaaaaataaaaacatggtcatgtgaacaaaatcgaagaagga

SEQ ID NO: 78619 - DNA, 454 bp, Glycine max
  unsure (1)..(454): unsure at all n locations
cacggacactatgaaactaagctttaaccgttatttaagtcgtttctcacctaataaatgatttaatgaatttcaagtgatcatttgtgttgtaatgtcgtttaatcactgtgaaagcaaaatctaatcgatcgttcacgatgtaacctcggttaaaccaataaaagcaaaataataataaaataatcaaaaatatctttgaataaaataatcaatcgaacattttttctttggaagtttccttgaatgaattgactaataaccaaagtgaaactaggctaaaatctactcacaaatcaagctttgtctgcaaaaatcactaataaaccgttttaaggtccaacgccttaaacagtcctctntgcttntattgggtagcatggatcgttcaaaagcataaaatcaacatgtaactntaccgtttctgtaagaactacgtaagtctgatttcctc

SEQ ID NO: 78620 - DNA, 460 bp, Glycine max
  unsure (1)..(460): unsure at all n locations
tgtgtgaatcaaatcactcctggcatttatctctagtatgctttcattnttctttacctactcctcacgtttggttntttaggaaaaacaccataactaaacgcgctacaaggcatccctatcgcaccagatccaaatctagaacgatgggtgatcaagaggagacacaggaacagatgaaagccgacatgtcggctctgaaagaacaaatggcttccatgatggaggccatgttaggaatgaggcagctcatggagaaaaacgtggccgccgctgtcagttcgactgccgaagcagacccaactctcttggctaccgcgcgccatcctccctcaaacacagtaggacggngaaggtacacgctggggcacgacggcaaccctcatctgggatacaaccgaacggcttacccttatggattgccacctaattactcaccacccgtcatgcaagacgatgc

SEQ ID NO: 78621 - DNA, 317 bp, Glycine max
tgagatgaggaagtgtagaagggtgaaacttcctgcttttattcgttgaccacagagtggtaccgggagatatgtcgcaggggtcaggagaccttggggacgtcaggtggggtgctattgcccaaaaccaagcttgaccaatcccgacccaacccgggcatggtcggtcagtgagaacctgtgatgtacctaaacaggcgagctcctggcagtcaacagataaaaggaacatagaccacaaagcaaggaggcttgtggtggctggccagctgtgaactttgattgatatgtgagaattggcctctggtaatcgatta

SEQ ID NO: 78622 - DNA, 249 bp, Glycine max
  unsure (1)..(249): unsure at all n locations
agagaatgagtccacggaggaaatgcctattattctcatattactggagagcagtttctaatgactcctctgctgcctccacataaagcatagaggatgggcaactcaccaagatatcttgcttgcctgatacgatgaccaaatgtcctggcactacgaatttcaacttttggtggagtgtagagggaacaacntccactgagtggatccacgggcagcccaacatacagntttagggggggttattgc

SEQ ID NO: 78623 - DNA, 450 bp, Glycine max
  unsure (1)..(450): unsure at all n locations
ccgacgaaaggatcaaagtaggtatgatattatgcgaatntaataaccttgcttggacgaatgagaaaaactggggcaaataaagaggatgagaaggagggagaaacccgtgctgtgactgccattcctatacggccaagtttcccaccagcccaacaatgtcattactcagccaataacaacccttctccttacccaccaccccactatccctaaatcaaccacaaagcctatctaccacagttctaatcacaaacaccacctttagcacgaaccaaaacaccaacgaaggaaggaatttcgcagcgaaaaagcctatagtgttagaccttgtggcctcaataatcttaagagggataggcttagaatgcagaagaagcagcaacaataaatttaataatgttctttatacatgcaaggcacaattgatcgcacaataataaatgagat

SEQ ID NO: 78624 - DNA, 248 bp, Glycine max
  unsure (1)..(248): unsure at all n locations
cacctctcaataagctggtgaagaagaatgtggtatttacctggggtgaaaacaaaagcatgcctttgctgtccttaaagaaaagcttactagagcacctgtcctagctcttccagactgtttaaaacttttgagctagaatgtgatgcctcttaagtaggagtagcagtttattggtacatggcgggaaccctatagctattttacttaaanacttcatagtgccacccttaactaccccacctatg

SEQ ID NO: 78625 - DNA, 472 bp, Glycine max
  unsure (1)..(472): unsure at all n locations
ctaacctcgcttctacacagagagtacaagagatccctggagaagtnggtcgatgctactaggaatgctactattcaaaagggtaggtgcaaggtgctcccacaacggtttggacctaccaatgtgaagcagatgaagattggtcttgatatgaagataagacgtattgcaccattgactaaagaggaattgagagtagaaagggagaagcgtctaatgcctccactttttcaaggcattgaacccaacattatttgctactgtacccagcaatttaagtgaagtgacaaaacaatcaacttaattctaattcatcaaattnttactacacaaaacaatcaatattagaccacataaactcaaataaattatccatataatacaaatataaattatcttacaagtcttaccattttaaaaatatataaaanaagtaattagaaattaattatcaatctacatacggattata

SEQ ID NO: 78626 - DNA, 402 bp, Glycine max
gcactgagatgcacttgacaaccgacactacttaccaggaatgcaccatctgacaaagagaaaaacatccatccaagaaaaggaatgaaatttcaatcaaaacacgaaaagaaatttcaatcaaggaaaataggaagcaagaaattccaatctaagagcgcgagaaagacaaaaagataagataggaaattcccaaccaaagaatgggagaaacgaacaaagaacaaagcctctgatcgatagaaacagaagatatgtgcatagaggctttggaccggacatatctgaacatacaggaatgcaccaatgaacgaaaaggacgaaagaaacccgactaaatggctctcctctataccaacacaatccggcgctacgacctttttctcgcccgactaaacaaaa

SEQ ID NO: 78627 - DNA, 433 bp, Glycine max
  unsure (1)..(433): unsure at all n locations
tgcgggttcgggagacataggtcaagcgttcgctttattcttatatgatattccgagtactttggatgtggtacgaccatgctctcctgatttccagctgggaaattggcgagtggaggaacgcctcggcatttacgcatcaagcataatgttaacctttactgttgtaaaagctctatagttgggcctaggctttagagttttcattttgttaaagctttgtgtcttttgtttttgaatatataatacaaggatctttcttcatctgttcctggtctctacccattctcattcatttgcattgttacttcttttcctaaaacgggagattcaatgacaagtcccccgaaggtactaatacttgngacctcgttatatacttctagcacgatatgaatcaaacggaatattgaggagatgaggatgtgggact

SEQ ID NO: 78628 - DNA, 412 bp, Glycine max
ctaagctcgagctctaagcttgagcttgcgtgcataggaagaatattcgtgatccaaagagcgatgatcatcggttagtttacgaatctggtccaaccgaggcttgagaggatctgttttcagagctaggacggatctcctaatcgactcaaatccatgtgcaacaccaccgtcagaaccctagttcaccaccacaacaacagattagtaacctaacatcatcaaatctttttttcttctcagaaaatgaaaacagcttgaagaaaataacaaacttttccactttctagcagtaacatttcctttgaaaaatttccacaccacaagcacaaatcatattaaaacaaaacaaaccctggttgttcctaagaaaatagctcgcatcagcctatttcaaaacacaacagcaata

SEQ ID NO: 78629 - DNA, 443 bp, Glycine max
  unsure (1)..(443): unsure at all n locations
gataaacaacatctatatattgttagtagttcangctcacgtaaccacaagctgcaataatatgtgaacatggatagtgaagcgcagaataccttccgcattgacaataatgaccgttcaagttaactgcccacttttgtccgccacgctgcgtaataggattgaaggtctcctctacttcaaaccttgtggagtggatgtcatacacgcgaacgatgtgcgaacaagcttgttcttgattttttctaagttctttaacaagctgtgaacaatatacttggccttcatttaactgtctctgggcttggcggccacgctcaacaaagtactttcgcacctactgtacgttgatttgaccaaggctggtatgggaatgttgcgacaatccttcaaaaccttattgatacattctgagaggctggttgtcatgtggccatatcgac

SEQ ID NO: 78630 - DNA, 457 bp, Glycine max
  unsure (1)..(457): unsure at all n locations
ctccggagggaggaaagggaccaatcgcggngagtcagtttgatcttgaaggatgagttgaaggcttgctcgaggtccaagagaagctcgtctcagcgtttatgcgagacagagaccaacatgttagccatcatcatcaagtaccaagaggaactaagtctagccacggcccatgagcatatggtggcggacgagtatgcccaagtgtacgcggaaaaggaggctagaggaagggtgatcgactcattacaccaagaggcaaccatgtggatggaccaattttctcttaccttgaacaggagtcaagaacttccccgattgctagccaaggccaaagcaatggcggacacctacttcgcccccgaggagatccacagacttctcaactattgtcagcatatgatagacttaatggcccatataattagaaactgctaggaagtttgtattgtcgctc

SEQ ID NO: 78631 - DNA, 463 bp, Glycine max
  unsure (1)..(463): unsure at all n locations
tgtaagagtataactctattagtttaaagctacctattgtatgttgttatggttaggttaactgtgttagttagttagttagaatctctgtatgcataaatacagttgtaaacagagattcagtaactaattgtaaaatctcttgtcataataatggatctattttctctctcttatatgttcctctcccaaagctntataaactcaaattaagtcatatctctagttcatgttggattaaacctccacacttgaggtgcaattaaggacggccccaaagaagctgcagctaaggcaggctaggggtgacagcaattaaggcagattccaacaatttctaaagcattagtcttagaatttggctttggacctaactcgacccaacaaaaccaacttgtaaggtgagagttgtcttctacttatatacactactntggccatatcatgagttaatgtgggacta

SEQ ID NO: 78632 - DNA, 419 bp, Glycine max
  unsure (1)..(419): unsure at all n locations
ntactcactaagctgccaacacttagtgaactntntgtagtgttggtgccgctcagcggctccacatgtcgctaagcgatagtgcttttttttttacaaaggcccgctaaacggaccatgtctcactaagcggccagtgtctttttcaattttatttttcagtctttaaaattttgaataactatgtcctgattaattgtttggttcctctatctacagatggcttctagaaagagaaagagcattggtacaaggcccaaatctcaatatgacacaaggagattcgcttcattagatgcttggaccagatacactgataatgttctgggaagaaacattntacctgaaaggaaagaagagctatatcacactgagctagatgactttaaggccgagctggagaggtgtaattttcataa

SEQ ID NO: 78633 - DNA, 400 bp, Glycine max
  unsure (1)..(400): unsure at all n locations
cctgtactgactgttagttagttttatacagnatcttatggaaggggaagaaagtgttacgatcatgttccctcggtgcagagagtacaatatcattggaaaagttttcatgaagatccataagaccataattaattgaagaggcaaagatatttagatcttttatatgcaaaactgatgggggcacgtcattcaaacctgatccttctaaatacaaatggtggagagattgtgaccaagtattgcttgcaaggctcttaagcgacgtgcatccactcacattaaaatttctacttcgggagggacaaattgacggatcaacgtatgaaagctttacagngcttattgatacttgtttaagtttgggcaagaacagatttggacactcattaggttatgc

SEQ ID NO: 78634 - DNA, 388 bp, Glycine max
acccggtgttgagagaaattatttatgtgctacgtgggagtacgtgagctcagttggaggtgggctacaggggatggcgggtgtatgcgctcattgtggatgtggaaaaacttgttgtgcaccatcgcccgaccggcacctagtaccacatgtgatgggtaccccataatcctacatgcttgagatgaggaagtgttgaagggtgaaacttcctgcttttattgttgaccacagagtggtacctggagatatgtcgcggtggtcaggagacctcttggacgtcaggtggggtgctattgcccaaaaccaatcttgaccaataccgacctaacccggtcatagtcggtcagtgagaacctgtgatgtacctaatcatgcgagcttcttg

SEQ ID NO: 78635 - DNA, 462 bp, Glycine max
ggacctatgaaactaagcctgtattcctgaccctcaggtaacataggtggttattgttttgactggaacgagtcaccaatggctttcttgaggagagaaacatgaaagaccagatgaattttaccgtgagatggaagatccaacttgtaagcaacaatacccaccttgtttaacacccggaaaggaccataaaaccaaggggaaagtttttcattaatccttttagccaaggatctttttctgtaaggttgcatcttcaagaacacccaatcaccgactacatatcctatgtcccggtggtgtttgttggcattttctcgcatgatatcttgagacttcaacaaattttctcttagagtggccaataattcattccgagcaactgctagtttattgacttcttcaaggcgggaaggaatggtggatcccttgagaatgtgagggggatcatatccatacaaa

SEQ ID NO: 78636 - DNA, 445 bp, Glycine max
  unsure (1)..(445): unsure at all n locations
ttgagcaaattcaaacgacaataactntttacttggttgtttgatngagtcccgtaatatatcgagacgctcgaaatggaataccgacgctctgagcaaattcaaacgacaataaccttttactcggatgtctgattgagtcccgtaatatatcgagacgctcgaaatggaataccgaagctctgagcaaattcaaacgacaataaatttttactcggatgtctgattgagtctcgtaatatatcgagacgctcgaaattgaataccgaagccctgagcaaattcaaacgacaataactttctactcggatgtctgaatgaggcctcgagtatatcgagacgctcganattgaataccgaagcgctgagcaaattctaacgacaatatcctnttactcggatgtatgattgagtcgcgtaatatatttcgacgctctgaattgaa

SEQ ID NO: 78637 - DNA, 476 bp, Glycine max
catagaatactaagctctctgatgcggtccaagcacagaacaacaatctcttctccttacttatattgtgccaaacagacataacacgttatgtatgacgaagttatattaataaccccacattagacattcacgtatgataaatgtagtgacttactggtataacggccacgggcaaagttgttggagggatcttctctgtcgctgatgagctgctttgtgtggaaaagctggccgtaacgttcggatctcacctcatcaataacagtgggctcaagatctacaaacactgtacgtggtacgtgctttccagcaccagtctctctgaagaaagtattgaaagcatcatcaccaccgccaactgtcttgacacttggcttttgcccatctggctgcacagatataacaattctcaacatcaagcatccattaatacatttttcataatcacatgaaatattcaccaaacagtatac

SEQ ID NO: 78638 - DNA, 155 bp, Glycine max
agcatgcacttgacgaaccatgcatagggtttgtttggatgaggacaccactaagtcgtggacgcgtgcatgcacgagaaggaagttgacacactgaggaagaattttggaagcgccacttatactattgtagaccatattgcgacaatatcact

SEQ ID NO: 78639 - DNA, 456 bp, Glycine max
  unsure (1)..(456): unsure at all n locations
taactagatgccttggtaacctggaacccaactgccatgaatcanaaatctgaacatgtcgccagaatctatggtttatgctcctctgccgaccaccacacaaaccttttcccttctgggcaacaatctgaagcaattgaacagcctgaagcttatgctacaaacatctacaacatacctcctcaatctcaacagcaaaatcaaccacaacagaataactatgatctcttcagcaacaggtacaatcccggatggaggaatcatcccaaccttagatggttgaatccttcacaacagcagcaacaacaacagccttattttcaaaatgttgttcgcccaagcagaccatacgttcctncaccaatccagcaacaacaacaacagcctcagaaacagcaaacagttgaggcccctccgcaacctctccttgaagaacttgtgaggcaaatgactatg

SEQ ID NO: 78640 - DNA, 322 bp, Glycine max
  unsure (1)..(322): unsure at all n locations
agctacacgtcatccttacaactagttaatcanaataagctttattcttatagaaaactagctccaaagtacgtcactagatcatgaaaaacaccgtaagtgccatatgagacgaaataacctcatgaagccctgttcttccttatatatagattagactgccaagtattaggagcaccaaagaatagagtaggcatagcgttaagcgtgaagcccctcacagataatattggtatctttcccttagactctccaaacttggggcatatacgcggctcgaggtaatggtttaaataacatctaagttttagccatagtaaga

SEQ ID NO: 78641 - DNA, 441 bp, Glycine max
  unsure (1)..(441): unsure at all n locations
atatatagcctagtaatggttttactttatangctattacatgccataataataattacattttatattctaacactcatggtcaatttgcatcttcacaacttcaggtaacatctaactcgagctttcttctttcatagtagggagtcttccttctataagaccgaaacctcaatttgcttcttcacctaacaaataatagtgttgttagtacaatggtcatattgcataagacactgatttctatttttaattaaatgaaatcttctaaatttataccttgcccttaaaagagctaaacatcttgagcattggcatcttggttggagtgattaagaatagcatgcagaaattcataacataatttcaagtggttaactaaattagaagtaccatgacggttagtaccacataaatatttttcaccacaataattatatg

SEQ ID NO: 78642 - DNA, 278 bp, Glycine max
ttgccttctctctcctcctcctcaccttgtttcttcctctagctcctgccattactaattcatccaccaaacctctcaactttatgctgctccttcgattcctcacactctaagaatctcatccagcacttgcttcttcttccgacatttccactatattcaggagatatcggtgacctaagcacaggttttgcttcagttaggataatctcccttgcaccttctttaattacaatgcgttaaaaaataaaaagcggacaaatgaacccgtatttgat

SEQ ID NO: 78643 - DNA, 468 bp, Glycine max
actaagctcactgattcgtaaagaagatatctggtattgaaccttttaaattttatatactaaagcactcatatcaatggatcaagactaccatatattacatggtagtgtcaagtatgaataaaaaaactattgttagcatcctgctaaagctccaggttaatgaattctctatcctataaactggtgtacacagtaccttgtggcaatatctgggtaacctctagccgtgataagaatgcttggaatttgatgaaaaaaacgatcctcagtaagccgttgaaatattgcatgcttaagagaaccaattgtgagtatcataactatttttcttccttgggaaaaagtatggaacgtttcaaagtagcatgatgtaggtgatcagtgaaaatactaattaggaatttgaataaaccaaacgacctctaacaagctcacctttttcacaattataacgtaccgagcatc

SEQ ID NO: 78644 - DNA, 433 bp, Glycine max
  unsure (1)..(433): unsure at all n locations
tagacatttttttttntttnttaatacaatagtacacaataaacgagtaaagaaaacgacatctgtaacgcaacataatgtattatattacccctgaaagtaaagntctccgacttgggtatgtatgtcactccgaatcanttaagaaattgactccgactccgaaaaattgcatgctccttctaggctagtccatatttaaatatgcacatttttttttagaagagtgttgcttgctactgcgtgttagttactatataaatttaaagcacgatctatacataattggcagccatcgcaatgtagggaattttttggctgtaatgtaagggactgcctctacttaatgagtgtgatccctnnttgttattttcggcttatacttccttatatccttcgtaaatgtaaantatgcacacaccgaatagagaac

SEQ ID NO: 78645 - DNA, 437 bp, Glycine max
  unsure (1)..(437): unsure at all n locations
cttctctaccgtaaaaacattgtcggtcagcgctattattataattgtgcaatgtcggctgaaaaatatcagttggggctatttaactaccgatgctggctactgttctttctattccacccctgaataatacttggacgatgtcgatttggaaatgttcgatcggagtcatccggtcatgcttctttttgagacctcgatctgtcatcttttcctggccgacgtcggctggcatttttttcgatcaatatcggtgaatcatgctttttgccaaggtgggctaacgtcttcgtggctgatgaaatgagagcatgccagtgtcggccgaaacacaatctcgcacgagaaaccctagccgacctacatttgtaattntgtaggcaataccgaacaacaaagaaatattatcgaccagcgtttgtaaaaaaattccgcaa

SEQ ID NO: 78646 - DNA, 296 bp, Glycine max
tttagttcctgaatgtaccaccttcaaaccgtagcacgatctcctccttgttttctgcaaactagagaatcaatatcaacgaaaacctggagagacattgtcttggtcattatcaccccaaccagaacgaataacatctaaatacggcattttattcttacaatgtgaaaacactgcatattcgtggagaacatggggtatggacgcacctcagcatatgacataccacacagtcattttctccaatgcaagggcttgattaattgctctaggaaaacagcatacatctagtacat

SEQ ID NO: 78647 - DNA, 455 bp, Glycine max
  unsure (1)..(455): unsure at all n locations
ntacatcttcttctaattgaaacaactcctagaatattatttgttatggacaggtaaataactagtatcacacaactatgaatatgtcagcaactgcatactttctaccacaaactataacagcatgcatcaaattattataaggaaagcccgagctaacacctgtntctgaaaatntatatgataaatcaccaatatttgtttaccttctcaacttccttcacatttttacgaaactntctaccctttgaaccacttctttcttcctgatggagtgcctcagctgctttctttagttctctagctnntttacccagttcagtggcttcctacagtaaccagccagccacaccatanatatagtatggcatatcatataaccaaatacacgcataatcaaccatttaatatatctccttcagtaacaatatagcaccttgatatactgtgagcga

SEQ ID NO: 78648 - DNA, 323 bp, Glycine max
  unsure (1)..(323): unsure at all n locations
ccatcggtacctcggagcataaaaaaatgagagagcgaaattccaatcaaaggaaaaagagaaggaatatctctatcanaggaaaaaggagagagaaaatttcaatccaaggacaaaagagaggaaaggaaattcccaatcaaggaatgggagaatgcatatagaaaagaaaggacatttccaatcaaagattgggagaaagataaaaaatgatgaataagatagggaagacagttcccgatcaaagaaaacagaagatatatgcagaaaggtctttggaccggacaatatctgaacaatacaggaattgcaccatatgaaca

SEQ ID NO: 78649 - DNA, 479 bp, Glycine max
  unsure (1)..(479): unsure at all n locations
ggacctatgaaactcagcttctaaggaagctacctagtctataaatagaagtatgtgtttcacttgttgtaactntgatgaatgagagtcttgtgagacacaactcaaagttcaacttctctccctttttcttccttcaatttcgtgctcccccctctttcttttcctccattgaagcatcctctccaagcttcttatccaaggctcatgttggtggtgaagctccttcttccatgtcttattccctagtggatggcgctgcctcttacctcttctcctttgtcttccgctgcatctccatggtggaaaatcaccattaaaggacctcattgaagctcaaagatccagcctncatagaagctccacaagcaagcttccatcaaaaggggtgaacccaaacaagggtctccaaatgatgaacatagtgcattctatgagaaatgtaaagacctgtcattattgcatgaaaagaggacata

SEQ ID NO: 78650 - DNA, 474 bp, Glycine max
  unsure (1)..(474): unsure at all n locations
ctataaaactaaccttacaatacaaaataaatctgaaagactgagctcattattgtttctganttatttngngtgaccattatttagtcaaactcataatataatagtgtagcttcaagtttaatccaaactatttttctgaatcaagagtaaataactatgattgagttaaatgtatatgcattgaacaacaaacccatcggccatcaccacttaaacaagaattattctttgttttgataacagaccaacctctcccaatgtcttttgtactcattattccaaccatgtatttaagacaaaaaccaacaggcaaaaatatgttaaattgaataaaaattaaaaagagaagaccaaaagctttttaccctgtccaacattgcagccttctcagcgagcataagttctctagcagctacatctttcaacttcttttcatatatttcttaacatgaacaaagtttcaagtaaaat

SEQ ID NO: 78651 - DNA, 460 bp, Glycine max
  unsure (1)..(460): unsure at all n locations
tgaaccacatgtctaagtgaaagaataatgattgttcttctttctcttaccaccaaacacctcattaatgtctattatttttctctgtctctctcttgtcattatagatcatatcacttatcatacttacacgtttctttatttctctcactagttgtcaattgtcaaataggttattagtgtccaccaaaattttttgctgagtgaaattacttgaatggctaacctccatttcagcatcatcaagatatccaacagtcaactttgtaatgtcaaccaggaatggatcatccagagagctatgttttgatgagggatcatcaagatcttntccccgaacaatatcaagaataatagcacaatcagttgcagatctacagaaaggaccaagcttatcctagtagaaagaatacatgtaagtttaacattcacagcattctacaaataacaagggatgata

SEQ ID NO: 78652 - DNA, 456 bp, Glycine max
  unsure (1)..(456): unsure at all n locations
cctnggtacgcacttcaactggggcaacaccgttttctttggtgtacgaaatggaagtcgttctaccattcgaggtggaggttccatctttgaggatcttggcagagtccagtttgaaagaatcggagtgggcccaagcgcgtttcgaccaactcaaccttatagagggcaaacggctgatggttatgagccatgggtgtctgtaccaaagacgggtaaagaatgctttcgacaagaaagtacgcccacgcaagtttaatgagggagacttggtgttgaagaagatatcccaagccccgaaggataatagggggaaatgggctctgaattacgaaggaccttttgtcgtgaagaaagcattctcaggaggagcactggtgcttgccaacatggatgacatcgaattaccccttgcccgtgaacgccgatgttgtcaagcgatactacgcttgacac

SEQ ID NO: 78653 - DNA, 444 bp, Glycine max
  unsure (1)..(444): unsure at all n locations
ntctatatatatatccagtcaacacatntgcctaattgtttgtttctctgcctaatatnnctnctntgactactacgtttgcctaaattagaacattggcgtacgaaaatgaacccgctttcttcctcgataagatttacagaaatgtttattttctatttgtgaaaattgttcttacttttaaaataaaaaatatttaataagactaagttataaaattaattttaaagataatatctctttttcagtttctaatatttaaaaactgaaatatctcttaattgtttggacaaattagatttttttttttacttttaattctccattgggattattcttcttcacatattcgattcccactcttactctaatttttnttttatattactagtattctttaaaatattttaaaaacctaacataaatacaacttaacacaccctg

SEQ ID NO: 78654 - DNA, 443 bp, Glycine max
  unsure (1)..(443): unsure at all n locations
atcttaagtcacctgaggcatgcagcttgcttgtaattgagtatgtgtgacagttattntgttcattgaaattcatttctttcatcatattgggtgctaatatattgtttactcttggggtaagccttggccagattagcatatgatataactcaatgtggtatctcagaaggttcaaggaagatcaatggaaagtacattcattctcaccttgttgctagattagaaagtataatggtatttgctctgactactactcatgattagagcaaactctataagattaacaagtgtacttcctagttctatataattatgtgttaatgtttgtgtggcatatgctaatagagcntctcaacaatgtnctttgtagccaactttgcccatttgtgccttatcagtgcaaatacgttgtttttcctacattgctgaaatgaacaatt

SEQ ID NO: 78655 - DNA, 454 bp, Glycine max
  unsure (1)..(454): unsure at all n locations
cttcaccggcaagtagtcagattctgaagtgaacttttctgtcattatatgtgtctccattngaggagttcttcccttaacactcagtttctgagactgaaaantaaattgttataaacttcctatcctacaaatatggacacggttaccttatatgccgttaattagtggaggcttcttttcactgaaatattaattgtctttcttattttattatagacctaaaaatcattataagacaaagcgggggcataaaaacgagtattccatgggcacactggaataaattataaatcatttatatttaaataaagaatcatcgcttaaaattttagagcgtagtgaagaatatagtttgctagtcaacaaaagttggattggcagaagctttgtaacagtatacgcattttcaataatatctgcacacgatttatagtgccagaagctttgtact

SEQ ID NO: 78656 - DNA, 451 bp, Glycine max
  unsure (1)..(451): unsure at all n locations
tgagtgattcaggcttagcgccactacatgtgctttcgcacttccaatgacttcaaaatagaatgatgttggcgcttagcgcatcctttcccgctaaacccagcttgatagctcatcttatagaatgaatctggggcttagcgcagctataataaattttcacagagaggaagtggcgtttagcgcatcatccacgctaagcccactgcttaaggtgcaacttacagtgaagatgttgggcttagcgcagcgatgtgtgctaagctgaaccattcagccaatcaatcagggttctttgcacttagcgcaaggtttgcacttagcggatatgcaatctaaaaattttctgagtcattttctacttatctcttcacacantaatttaacaaccctttttttcattactaaacaagctgaaatcaatcacaatcacaagcaagatgtcctaact

SEQ ID NO: 78657 - DNA, 315 bp, Glycine max
  unsure (1)..(315): unsure at all n locations
gagctgacttctactcacgtgcagaacagttggagagcgtgcactgactatacgacgctgaaccaagttaccaaaaaggacatcttccctgccatcattgaccagatgctttgagcgcctggcatgtaaatctcactactcgtacacttgatggcttcttctggttatatgcaaatttctattgctcctcaggatcaagataagaccacattcacntgcccattcggcacttttgactataagaggatgcctttcgggctgtgcaatttccctgctaccttccagcggtgcatgattagtattctaagtgtattc

SEQ ID NO: 78658 - DNA, 440 bp, Glycine max
  unsure (1)..(440): unsure at all n locations
gtgctatgcccgtcatcttggtgccaacgatgtgatgtaattntggagaatgngcacatattgtagagccatcaacaacatcattgtaaggtatagacatcctatccttagacttgatgacttgttagatgagttgcattgttctagttatttctccaaaattgatttgaaaagtggttaccatcaaattagaatgagagaaggtgataagtggaaaattgctcttaaaattaagtttggattatatgagtggatggcgatgccttttgggccaaccaatgcacctagcactttcatgagacttatgaatcatgttttaagaagctntattggaaactttgtggttgctactttgatgacattntgatatatagcatgacacttgatgaccatctagaacatcttannaagtgtttggaagtgcttangaaggcaagttt

SEQ ID NO: 78659 - DNA, 447 bp, Glycine max
  unsure (1)..(447): unsure at all n locations
agatgctgctacttatcatgaacagatgtttttttgctctcattgaaagncgtctccctcatataaccatcgaagaggcggaaggtctcattcttgcacaggaactaagactcaggaaatacaataaacttgattcttcaagtaacacctttgcgccttctgtgaatcttactcaagcaagtttctcacaatttattgaagaagatagttcatatcaatcctcagatactaatgcagggtatgtattcctcagattctagaggatctggtggtcataatggccgcgaagaaagaagattcaactgtggtggtggtcgtggtgttcgaagctcagttcaatgccaggtctgtttcaagtataaccacaggctcttactagttacaatatgttcaatccataatatcaagctttcaatagtggacataatggattcaatggaaatagtg

SEQ ID NO: 78660 - DNA, 454 bp, Glycine max
  unsure (1)..(454): unsure at all n locations
ggatgtcattcanaacacactatgtagacctaaatgttgttttaacattcattgnttaattatttgtattcattatgcgatataattcgttgtaacccgtcactaaccaattaatattatcaactactcgtttggttaagcaaggaaattgttggtccaacaaaaatcatttacgcgtacagcatacatcattgtcataattgacaacacataatgacatgcatgcgtgttacagtttgagcgtgacaacacattggttgacttcagtacacattttgaaactagcagtcgctcaacaacacattggttgacttgactacacattagcgacaacacattggctgacttgactacacatttacgcgtgtctatttttttgtanacaaagttaaacaaaggctcggtcacaaccatctatatatatggcagactaggctactaaattacacattat

SEQ ID NO: 78661 - DNA, 428 bp, Glycine max
  unsure (1)..(428): unsure at all n locations
cttcaacattcaatttgagcgtctcgaatatacggtacttatttgacatccgagtaaaaatatattgtcgtttggattggctcagagattcaacattcaatttcgagcgtctcaatatattacgggactcattcagacatccgagtaaaaagttattgtcgtttgaattagcttagagcttcaacaatcaatttcgagcgtcttgntatatcacgggactcaatcagacatccgagtaaaaagttattgtcgtttgaattggctcagagcttcaacattcaatttcgagcgtctcgatatatgacaggactcaatcaaacatccgagaaaaaagttaatgtcgtttgaatttgctcagaggttcaacatttcaattcgagcgtcttcgtatattacaggactctatcagacattcgagtacaaagata

SEQ ID NO: 78662 - DNA, 452 bp, Glycine max
  unsure (1)..(452): unsure at all n locations
gttgtatggcttgaaacaagcaccgatgtagtgtacaagaagtttaatgagtttatgagcaactcaggattcaaaagatgtgacatggaccattgctgctatgttaaaaaatatactaatagttatgttatccttgttgtgtatgttgatgacatgttgattgcaggatctagtatggcagaaattaacaggttgaagcagcagttggcagaaaactttgaaatgaaggatcttggtccagctaaacaaatccttggtatgagaattcttagaaacagatcagaaggaattttgaagctgtctcaggagaaatatatacacaagttgcttgacaggttntaccttggagattctaagaccaggaatacccctttgggatctcattngaagttntcanagaagcaatctttgcagacagatgaagaanaatggtacatgtcaagagtaccata

SEQ ID NO: 78663 - DNA, 300 bp, Glycine max
ccgagcagcaactcaccacgacgtccaactgggttgagtctatgtaagcttccgccaagtgaagatgcgcgctgcccagccatgagacaccaaaacttattaatatcaacaccactatgaatgcgaagccagttacaatgattaccatctttgcataagacacccacgacatactccaaaaacacgatctacgattcattgagcctagaatgcgataagccagaagtagctaacctcaataaaatcttattggacgacaacccaaattctttccatatttattatggggcctgccaccac

SEQ ID NO: 78664 - DNA, 472 bp, Glycine max
tataaaactcagctgaagaggatgcttaatggggaaagaagagagatttttgttcacgaaattgaaggaataaaagaaggaaagaagtggaactttgaagtgcatctcataagactttcattcatcaaagttacaacaagtgttacacatgcttctatttatagactaggtagcttccttgagaagctttcttaagaaaacttccttgagaagtttctttgagaaaacttccttgagaagctagagtttagctacacacacccatctaaaaactaagctcacctccttgagaagcttccttgagaagctagagcttagctacacacacccatctaaaaactaagctcacctccttgagaagctttcttgagaagctagagcttagctacacacccctataatagctaagctcaccctcatgacatataacacatgaaaatacataaaaaatcctactacagagactactgaa

SEQ ID NO: 78665 - DNA, 463 bp, Glycine max
  unsure (1)..(463): unsure at all n locations
cctctaaagantntctatcaaagatatagtcatttaaaaatcaatcttctcacgaaaaggatccagaaatgtacagatcacaagcaataagaaagataaagcatacaatggaattatcctggttggcccctgtcataccctaatttcgtccggngacttttgcttgatgacatgcgacctttctttggtccttgtgaggtgcttggtacccatcattaggcaatttgtgaaattccaggacatgccgaaaaaccaaaaaaaatattgatgcacaattcgtaagtttccgtgacacaccggaaatcaaatggaagcatcgttgcataattaagtgaggttccgtaacattccgtangtcaaaagggggatgattatgtaatccgcaaggttccgtaacattacggaaagaaaacaagtatcgttacataattcgtaagtttccgaactttacgaaaaaagatca

SEQ ID NO: 78666 - DNA, 315 bp, Glycine max
  unsure (1)..(315): unsure at all n locations
gcacaacaagtgttccacatccacaaagcgcgcataaacccaccatcccctggtgcccacctccaactgagctcacgtactcccacgtagcccatatgctcgtttctctcaacaccgggtccccatcaatcctcccaagcgtttccaacatccaagtaatacaacattcaaacagcacaaattatcacagccaagcaaaatagggcaaaggcagaaaaactctgcccataacaccaaccaaaatcacagctnttctcacttaaagaccgcagtaacaattccttcgttccaattcggtaaccggtggatcgactc

SEQ ID NO: 78667 - DNA, 444 bp, Glycine max
  unsure (1)..(444): unsure at all n locations
ggcttctacacatctttcttccttctccattccactgtctttgaacttcaagaagcaaaggacttcattgatgaagaagatccaaggcctacaaggtccacatggagctacgtcatgtggtatcagagcatcttcatctaggtgatattcttttgcttcctctatcttttttttcagtcaattcactttaattccttgttcttcatcttattctccatgtatatcctccattgccttgtggtttggtgttgtttagagtatattcaaaaaaataaaccgattaaatcttagatctacacttgttcttgcatttctatnggtcanantntatagatatactcttgaatcatggttttgtgttgattttaagttctatcatntttcagtcataatcttcttgtgctgaacctttagatctaaattttcttttcaaatattgattag

SEQ ID NO: 78668 - DNA, 415 bp, Glycine max
ggaacttaaatctaagctagcataatctcgggctgaatggcttactaaatattgtcatagggtggcccttctacgaaagcactgatgacatgcccacccatgacgcgtgcgtctccagtgtaaataggagggagaaatctaactacataataacacgagctgacgttacagcctactttagggtcttaaatgcttggtcagactacaaagtgcattcgaaaggatccctaccgtggagcttgaccaagggggcaacaatatatagaggcataccctagaataaaccgacggttaaatatcggcgagacccataaaactctatatagatctcgtggttgtcagaatgggccattggtggatagcgaggactttagaagagactggagtaaccacttgactcataaccacatgcccc

SEQ ID NO: 78669 - DNA, 125 bp, Glycine max
agctagaggaatcttatgggaactgctagagacgctgctatcattgcctaactacacatgcaagcccgcttagatggaaatgatgagtctattatgtctgggttacagtgaacatgtatatggat

SEQ ID NO: 78670 - DNA, 406 bp, Glycine max
aaactaagctatatagctttgcctgaaacccatgaagggatttgtggttctctttttttggtgataagatgaaatggatgtatttctataaggttattattggtcaactagtttcgaaagattgcattaattatgcaaaatcatgtgaatggtgccaaaagcatggtcctatacaacatgtttcatcaagtgagctacatttgaaaacaaaaccttggccatttcgaggatggacattacatttgatacgtcatatccatccaccttctttggatagacacaaatatattttagctgttgttgattgttttaccaagtgggtagagacaattgccttacaaatgttgatccacgggatattataatttataaagaaaatagtattttatttgtataccagaactct

SEQ ID NO: 78671 - DNA, 366 bp, Glycine max
agcttcaagagatcatgcccctcgacaacattattgttgatatctcaaatgagtaacaactacacactctcttaaagacttatgcaataatatggctttcggatccatgattgaacctaataatataaatgaagccataatagatgataattggaccattgccatgcaagaagaactaaaccaatttgaaagaaacaatgtgtggaaattagtagaaaaacctgaaaattattctgtcataggaacaaaatgggtttctagataaaattagatgaacatgtgataattattagaaatatagcaaggttagtagcaaaagggtataatcaagaagagggaatagactataaagaaacatatgctcct

SEQ ID NO: 78672 - DNA, 448 bp, Glycine max
ctccatcaagtgtgtatcagagcacaagagcttcaagtacgtgcttcttataccttcattgattatcagttttaccttctcttacattgttggttcttcatttttctccatgtatatcctcacatgtcttgagctaaatgttgttaacatgattcgttagagtctccaccgattaaacttgctatagaagctagatttgattttctatgggtcaaatttcttgttcttgttcttgaaccatgaattgtgttgagtataggttcctttgagtatttgtcttgttattttttgtggcttaaacctaaaccataaaattcttacaaaaatattaaagtagaatatcacctcaaaaatctagagtgacttgttcacctattgtagttttgtcatagaagtcatgtctagttatgagacctttcacataagatatcttatgttgtgctgaatt

SEQ ID NO: 78673 - DNA, 391 bp, Glycine max
  unsure (1)..(391): unsure at all n locations
agcttggtagctagatgacttgtaaatacaatttgttgctagcgtttatcagagaataaacctggacatcttttagaaatgcttgctgaattaagacaggcagaaatccagtgtctccatttgggacaanaacccattctttgtagcatataattccagaaaagcccatgagactgagtcataggccttttcaaatccaccttgataaccatagctggccttgtgcttctacaagctttctcaatcacctcattaagaactagtatgccatgcaagatgtgtgttttttatgaaagctgtctgcctctcatcaataagaccagatatcacgtggctcaatctatctgctaataacctagctatcaccttggacatacatccaatcaaggag

SEQ ID NO: 78674 - DNA, 444 bp, Glycine max
  unsure (1)..(444): unsure at all n locations
actaagcttatgtctttagtttcttaggtaaacaaagcaactacgaacatgngtgtttcttagctaatatttctggttattcaagatgtttggttagagcaggaccacattatagtggatggggaatcacctccacacgttcatgtgtggggctgtgtggtttgttctgttttccaatgaaatgaaagctgaattttcatgtatagggttcatcctctagcttcataccataaatactcacctactttattgataagaaaatgagtttctatattacgtggaggcgatctgtgtaaggtctcgtggatcttggacatcctttctttttctatatactttctacttttataccgtttacaagtttacttttatgcttgatttctaactactaatttatcaatcgttacctctataaattttatgttttcaatccatctactttat

SEQ ID NO: 78675 - DNA, 407 bp, Glycine max
  unsure (1)..(407): unsure at all n locations
gcggnanctaacgaaacttctgcgtgttccacataaggcatcgacgatgggcagctcaccaagatgacttcctcgcctgacacgatgaccaaatgcncttccactacgaatttcaacttttgtgggagtgtagagggcacaacttccactgagtggatccacgggcgctccaacagacagctgtagggggggttaatatccattatttggaaggtgacttgacaggtgtgagggcctacttgtactgtgagatcgatctcttccctaacctctcagcgagtgccgtcgaaggcgcgaaccaccattgaactcggctttaagtgggaagcattgaaaggtaatttctccaaagtgctcttaggcatcacgtctatactggaaccattatcgatgagcactttggctac

SEQ ID NO: 78676 - DNA, 425 bp, Glycine max
  unsure (1)..(425): unsure at all n locations
agtgcaaatatgtataatgtacactaggtctcccactcctccaaaattattgcggtctttagaaacgtgtttaaagtatacttatcatacttgactaagtgacctctcaccctcacctgcttagatgatttatcctccgggtcatagaggttggcataaaactccttcacaatagcaatgtctatggtattgttagaaaaatcagtcagcttctcatcccaatggcgtctctcgangtcctccttgaactcgtcaaactatgtgttatagactaccacattcctctctggtaatagctttcgaggcaccacaatgtcagtgtacctctaccaagcctcttangatgtgaacctggatctatcaaatatggcttgtgtaggtgcagatgaagctttcctcttcttagatgcaatatgcaaaatata

SEQ ID NO: 78677 - DNA, 439 bp, Glycine max
  unsure (1)..(439): unsure at all n locations
tttgggctgagaacctatataacagaaccagggttttattttatggagttntttcgaagaggagaataattctatgattttagaattccaatttttactattcatacgcactgttcacgtagaataaaatatgttttctacaattccgtttctgcttcaatctacaattatgttttctgcttattaatggaaggctaagtctcccacgttgttttctcttgaggatcaagcacatctctctttgaggttttgttattactattgaattctgatcaggttttcctctttaccaattactttgtatttgttgctattaatccatgcatgcttagtgctagattaattgtctctacgacttaattacattcatgcttaatgatcaatttctgtcatgattaattggtgtatgtgttgcttaatcacataatgacaaccttat

SEQ ID NO: 78678 - DNA, 439 bp, Glycine max
tgaaagaaatagaaactgtctgagctagatttccatctattcttgaattgtagtgagcattaagtcctagtgtaatttgactctgtgagtggactttgtgcaaaattcactttgattacacatatcccaagggaggttagcacactaatctagaagaatacgataagatttactagttttagcaaaagcaatttttaccatatttggcaaaactctactttatccttgtatagtctgtattggaaaagtgcaagaagccatataaggcatggctgagcttgtggagagcaccttaagcactgtccaagctgccaattagtcatattaagggtcattcaaagtgattagattaataagattatgattatgtcttgcgaattcaatggtccaagcatgttacctacaataagtgttgtttttaaaagccacagcctaggct

SEQ ID NO: 78679 - DNA, 439 bp, Glycine max
  unsure (1)..(439): unsure at all n locations
atatcgagatgcacgaaattgaacaacggaagttgatgatatattcanatggtcataacttttcactcggatgcacgattcaggtgtatcacatatcgagatgcttgaaattgaacaacggaagctctcgagaaattcaaatggtcagaatgtttcacacggaggtcctattcaggcgctgaatatatccagacgcttgaaattgaacaacggaagctctcgggaaattagaatggtcataagttttaactcggatgtccgattcaggcgcttcacatatcgacatgcacgaaattgaacaacggaagctatgaaaaaattcatatggtcataatcttttactcggatgtccgattctggtgtatcacataatcgagatgctctgatattgaacaacggaagctctcgagaaattataatggtcataacttttacatgg

SEQ ID NO: 78680 - DNA, 451 bp, Glycine max
  unsure (1)..(451): unsure at all n locations
ctaagnatgtatggcaaagctacattactgctgaataatactatacaagaagcttgtaacacatgttctacacttggagtgatcacacgcctcctctagaacccttaccacccactctgtcatcatgctgagactcaggaaggccaacaggtttagccttctcaatgtactctgaacaaaattcaatggcttcttctgcaatgaacctctcaacaatagatgcttctggccgataaagattctctgtataccctattaagatcttcatgtatcgctcaaccgggtacatccaccgtagataaacaagaccacaacatttgatttctctgactagatgcacaatcaagtgaatcatgatgtcaaagaaagaagggggataatacatctccaactggcacaggataattgcggcctcattttccaactcatcaaacttgacaggatcaatgac

SEQ ID NO: 78681 - DNA, 415 bp, Glycine max
  unsure (1)..(415): unsure at all n locations
tactaagtactaaccagaatatttttcttctntgtcatcggtgacaatgtactgcgatgaccctgtgattccacgcactcacgtattctttaatgtaccttctacacatncaacaaaatttggatgtaatttagcatattcattccctttgtagaacaccccctcaatcttctacttttcacctgaggcttgttctcaatcatagtggaaaaaataaaaattaatcacggttatcatgcataaacaaagttctgaagaattaaatattaatcatagtcacgtgtacaaataattaaataattcagggcgtatagttatgggtgcgtgtggaacaactgtttcgtgtgttgttgtgtggacttctactaagtgcggatgtgctagtgtgggatcactcattntgagggtaaagttt

SEQ ID NO: 78682 - DNA, 374 bp, Glycine max
cttgtgtacaagcaaacaaataactacactaaaactgtaatttaaagaactgaaacataaaagctgaaatttaaatgacataaatcataaaataactgaaaataaactaaaatgttctgaatgcaaaaatttaaatgtcctgctcctcctgtggctgatcttcattaagatccagtgtggagctgctgatgaatcctatataagctgctcaggctccatgactggtgtggcatcatcaggaataggtgcaggggctagagatggctttggtataatctctggagaagtttcctcctcccgagccataggtacacctgcatcaaaatcaaagggctcatgaggagtcagctcatcctcaccctctactggtgctg

SEQ ID NO: 78683 - DNA, 458 bp, Glycine max
  unsure (1)..(458): unsure at all n locations
tgcttgtggngcttctatggaggctggatctttgagcttctatgaggtcctttaatggtgaatttccaccatggagatgcagcagacgacccaggagaagaggtgagaggaggcgccatccactatggaataagccatggaagaaggagcttcaccaccaagatgagccttggataagaagcttggagaggatgcttcaatggaggaaaataaaaagggagagaaagagagaggggggagcacgaaattgaaggacaaaaaagggagagaagttgaactttgagttatgtctcacaagactctcattcatcacagttacaacaagtgttacacatgcttctatntataaacaaggtagcttncttgagaagctntcttgagaaaacttccttgagaagcttctttgagaaaacttccttgagaagttagagcttagctacacacacccctctcataac

SEQ ID NO: 78684 - DNA, 331 bp, Glycine max
gagttttattcagaaaatgagagattatctcttctatcttagggagagtgattctccgcaatccgagagggattcatgaacacactgtgtggatccaaggaccttgacaatctctgtgtgttggccgaccttgatacagcgattccttccttccttccatctatacccttgttgtttcaaacaccgaaggcagagtatccacctctgcccacatatatcgttgggccataacctccgtggtacgcactcagattaagtgaatcttgagcctaatatgaatttcaaaacgagacctttcacctcagtttggaatcacctctattggagccct

SEQ ID NO: 78685 - DNA, 421 bp, Glycine max
  unsure (1)..(421): unsure at all n locations
ngtactctgaggcccgattcaggcgcgtaatgtatcgagatgctttacattgaacagcggctgctatggagagattcgacaggtcgacacattcaaccctgaggacctataaacgtgcataatgtatctagactctcaagatactacaatgtaagctcttaggatatactaatggtcgtaactagtcactgccaagcacgattaatgcgcataatatatgaccgacgctcacaatggaacaaaggaagctcttgagcaatacaaaaggacttaccatgtcactcggaggttcggatgagcagcctattatacaatgacgctatggaatgaagaatggaagcacatgagccaatatatggacataacttgtctatatgttgtcgcatacatgcacataatatatattgtctcttgagattca

SEQ ID NO: 78686 - DNA, 240 bp, Glycine max
actaagctgcctcacgtaccggagcagaacgcacccacctttcttctctgtctccgcaccactattttagtccttctgagccggagctgtcactcctccgacacagaactatggtgcaggatctcaaggagcacgtgtagaatttgccaccctgctatcagctgacgccactcttttctatgagatacttcacgagattatgctatgctagagcttgcgagtcatcatcatgactctatg

SEQ ID NO: 78687 - DNA, 457 bp, Glycine max
ctaagctccggagatcattccgctgccgctgcttttgcaaccaaagttttttgtctatctatgagtatttcattcatttgtgcaatctggtgcaagagtctggcaactctctgtaaataaaagtagctagcacgtagaaatgaaggtcatagcaaaggaggacagagaggaaagcggtaaaaaacatgcttagcttcaagagaatgaatcaatagaaatgagacatgattgcatttgcatagagaatcagtgtgagcttgaattagtggttagttcaactcaccatgatttatagaagcaacatatattttgctttgtggtgaactcaccatgattttatctgtttggtgcttccaaaaatcatggtgagttcaatcggaacacactcaatagttcatgccaacatacacatccaatgtctatattatggtaggaaatgccttcttcacaaaccata

SEQ ID NO: 78688 - DNA, 327 bp, Glycine max
  unsure (1)..(327): unsure at all n locations
agctagnagaanggctagacacgacacatgncatgtcttgtattggttcaaggataacagggatgccccacattatttccatgacacanatgccaaaacgatgatctggaaattctatgcaaaactgctcatgcatgcacctatgcggacgctcaagagtcaacttttatggtcatgtgatgctagggctcaggattcatttcctctatttaaacaacccaatgttccaaaacatgttctttatcaatttgtgcattcctcaagtccctttcggcgtctgggaaatctcaccagattacccttaggtggaacacgttctctctcaaa

SEQ ID NO: 78689 - DNA, 416 bp, Glycine max
  unsure (1)..(416): unsure at all n locations
tgaatgaggaagtgtggaagggtgagaacttctacttttttttcgttgaccatagagtggtacctagagatatgtcgcaggggtcaagagaccttggggacatcangtggggtgctattgcccagaaccaagcttgacgaatcccgacccaacccgggcatagtcagtgagtgagaacctgtgatgtgcctaaacaggcgagctcctggcagtcaacagataataggaacaaagaccacaaagcaaggaggcttgtgtggtggctggccagctgtgaactttgagtgttatatgggatatggcctctggtaatcgattaccaagggtgggtaatcgattacaggcttaaaagtgaaacatgaagcaagatggcctctggtaattgataaccaagggtgtaatcgattaccaggctt

SEQ ID NO: 78690 - DNA, 449 bp, Glycine max
  unsure (1)..(449): unsure at all n locations
atgcagacnagacccacatgtagctatctatttcaagtaccaagaagaagtaaatctagccatggcccatgagcacaaagtggcggacgagtatgttctagtgtacgcgnaaaaggaggctagggggagggtgatcaactcgttacattaagaggcgacaatatggatgtgaccgattgctcttactttgaacgggagtcaagaacttccccgatcgctagccaaggccaaagcaatggtggacacctactccgccctcgaggagatccacagactcctcagctattgtcagcatatgatagacttaatggcccatataattaggaaccgctaggaagtttgtattgcactcaaatcttgactagttataacgttctgaacaaaatgaagttatcccacgtctttactccagaaatcagtgcgaatcanatcactcccgcattttatct

SEQ ID NO: 78691 - DNA, 414 bp, Glycine max
  unsure (1)..(414): unsure at all n locations
tgcagactataccttcggccaacactgtcgngtttctgtttctgtccggatttaatgcgggctgcagcaccggctccgcttccctaactgtactggaggcggttgccgtggctttatcctctatagttttctggagttttaacatgacctccgagatggaagccatttgatcttttaaggccaatagatcggccttcatctgttcctgcacgccctcttcattatccattattctggatcgagtgttataagggtgccttggtgtttcttattgatgatgaaatttctaaagaaattaacaaaggtgagtatgccatccaaaacatgaatatgctaatgaatgatcggagcacttggatccaccccaacggttttttagataacgtgatgaggttataatctcttattttataa

SEQ ID NO: 78692 - DNA, 460 bp, Glycine max
  unsure (1)..(460): unsure at all n locations
cttggctatcagggaaggcataaggtggagaactggttcttatatctatgcttccaaatcatggagaaagaaggaggggttcagatatacaaccaggatgagaatatgaagtccaaaaggttcagaaatctcacatctgcatttgctcgcaaacaatccaagtcatcattcagcttgcctagtccaagaataacaagcagaagtgatgcttggactccttcacagagaaggttagcagaagatcttcaaggtatagatgatttgaatcttgaggatccacacctagttcatgatgcccctccctctatccagaaacttgatggtggcaaagagaacgtggaggattttgatctcccagacttcgaggttgttgataaaggggttgagggtcaagagacgaaagaattatatgacggagaagaatctgaganatccatagaagtgaagtcagctacaagtg

SEQ ID NO: 78693 - DNA, 503 bp, Glycine max
  unsure (1)..(503): unsure at all n locations
agcttctatactctatacaagaatgaagctttgactctctnttgttagacaagcggcctcagatatcttatgaaggtgggttgaattaagataatgcaaactatctccccaattataattctatttcaatttcaatgcaagtcgcacgttcccttaagaatgaactcttaaataatgattcaaatagaacaatctgaatataaatgtaaagcactaataaataacagaggttaagggaagagaaagtgcaaactcagaattatattggttcggccacacccttgtgcctacgtctatgtccccaagccaacccgcttgagagttccactatcttgtaatccttctacaagntctgaacacatcaggacaatccttcctttgtgttagatttgttacaacaagagaccctcggtctctcatatccctttgagacttagaaagaagagacgcttaatctctcttgaagagataattgacatctgacacctattattcctattgat

SEQ ID NO: 78694 - DNA, 473 bp, Glycine max
  unsure (1)..(473): unsure at all n locations
tataaaactcagcttgtacaaacatactaagatatactagtattcatactattgttgagcttattacacattacanaataactcatcatcaaaatattaaacacaatacaatggggtcttcacgtgtcctcgtgttctatacctcccngggtgatctcatgtttttggtgactatacatttttttggttcttttggaaggctttggatacttacgcaggttttgtattgccttcctccttaagtttcacttattctacagatcgtataggtctagtgtaactatttttttatcaatagatntgtgcttttgcctttataataataaacagaaaagtcgtatctcttattacttctacatttattttttatagaagtcgtgaataaaaaagcacgaatttttgtattttttgtcttcaagaagtcgtgaattaatatgccgctttaataaattattatctttcaaccataaata

SEQ ID NO: 78695 - DNA, 437 bp, Glycine max
  unsure (1)..(437): unsure at all n locations
ctgagatgaggaagtgtagaagggagaacttcctgcttttattctttgaccacagagtggtacctggagatatgtcgcggtggtcaagagaccttggggacgtcaggtggngtgctattgcccaaaaccaagcttgaccaatcccgacccaacccgggcatagtcagtcagtgagaacctgtgatgtacctaaacaggcgagctcctggcagtcaacagataaaaagaacaaagaccacaaagcaaggaggcttgtggtggctggccagctgtgaactttgattgatatgtgagatttgggctctggtaatcgattaccacaggggtgtaatcgattaccaggcttaaaaacgaggtcgggaagctaggagagcttctggtaatcgattaccaacggggtgtaatcgattaccaggcttagatatgggactggaaca

SEQ ID NO: 78696 - DNA, 447 bp, Glycine max
  unsure (1)..(447): unsure at all n locations
tcttatccaaggctcatcttggtggtgaagctccttcttgtatggcttattccttagtggatggtgcctcatctcacctcttctcctttgtcttccgctgcatctccatggtggaaaatcaccattaatggacctcattgaagctcaaagatccagcctccatagaagccccacaagcaagcttccatcaagtggtaatcagagcacaagagcttcaagtagttgctccttaaacctccattaattttttgctttaccttctcttccattggtttttcttcattttttctccatgtatctcctcaaatgtcttgtgctaaatgttgttaacatgattctntagagttttcaccgattaaacttgctatagaagctagattttattttctatggttcaaatttcttggtcttgaaccatgaatngtgttgagtttaaggttcttgagt

SEQ ID NO: 78697 - DNA, 393 bp, Glycine max
  unsure (1)..(393): unsure at all n locations
tctatggagtttgggtctttgagcttcaataatgtcctttatggtgattntcggccatggagttgcagcgaaagataaaggataagaggtgagatgaggcgccatctactagaggataagccatggaaggagaagcttcaccaccaaaagagtgccttggataagaagcttacagaggaagcttcaatgaaggaagagaatgagagagatagagtgatgcaatcctaccccctaagggcnttggatngaaaactcctagaagatgggccagacatgcagagaaggcctaccgtcttatgagccttaatgcgatttaggcccatgacatggctagttgaactacttatttgatttaaattaggttcatattttggcatgtattacggtcatata

SEQ ID NO: 78698 - DNA, 447 bp, Glycine max
  unsure (1)..(447): unsure at all n locations
tttggataaacaatagttcttatggatgttaatttataattgtaaaaaaataatgtaatcatntttttaattaattctttttttttcacttgagaaactnggattcctgtccccctccccttagaatgattttacaagaaaatgaagtaaaattgattccaaaaatcataattttctgaatgtttttattaattacatatataattcataattttccaaaataagattctcagttacctaacgcccctgaaagtaaagaaacataacgtacgagctgctatcataatatcatttagcagatacagctattgttttatgctcaaaagttnctatcatgccattaatagaaaatatttttgtaaaaaagattagctaataaaattcagaanaaaattagctaaatatataataccataaagcatgctgaagcaacacaaatttatttta

SEQ ID NO: 78699 - DNA, 418 bp, Glycine max
  unsure (1)..(418): unsure at all n locations
gacataccagcattntattgaaccagtccaaggactcatcattattgtgcccagacacaatatacacaccctgttccaccacataaaagggtccaaagaggaaggcttaagaaaaatagaaggagatctgtagatgatgacaatgtcaaaggacataagctaaagaagaaattggttgagtatacatgtgtaaagcgcggtcgaaataatctttatcttttcatttgttagctttcaatggtgaattcttcagtccttttttttgtccttgtttcatatattaagcttaaattttttttgactagactattttttatattagaatgatggtatgtatattattgtttgtagtttaagttttattatattattatttatttaatatcctcttattatatcttttctaattttttatatc

SEQ ID NO: 78700 - DNA, 405 bp, Glycine max
  unsure (1)..(405): unsure at all n locations
ttagagcacctgcggctgcagctaacagctttntatagtagactggattttttancntaaaaagcttntaaaaagcttgagctngacctttatagtaaacaaaccaagccgagccgagccttatatatgccgagccataggcccttgacaagcggctcggctcatttccatccctacttgcactcctcaacctcttgagggctagaatgcatccattgtctcaactcaccatcacttaaactagcatgcttagcgcaggtgaatcaactgatctcgcatgttttataagtaggcaagtaaataattacatatccaatttattaaggtcatgggctttttttctctactgaaaggagcctatctaatttcattaataatcaactactcaatacatgacanaggatg

SEQ ID NO: 78701 - DNA, 441 bp, Glycine max
  unsure (1)..(441): unsure at all n locations
actaagcttataatggatgatgggttacttaattaaacaagagtgtattatgatagntaaacaaacaagaaaacatcatgggttggatatgatccagtgcatatataattgaggaggatgagaggaaaacaaaaaaaaaataaaaaaatagaagaatggtgggggtgctatggaagaagatcaaggcaaaggtgaggaaggaatagttatatatggcatgtgtgaaacaaaggtaaagtgtgagaatgaaggtaagaagtgagagaagtcacaaactatagagggtttttaatttcactccaaagaactatgcatgcttcatgacacaacctttctttaagtatgagtagggttagattgagcccaagattaaagcattgtcttaaaaaatgtattgcttggtttaatgggaaactagcctgatgataatctaaatactct

SEQ ID NO: 78702 - DNA, 469 bp, Glycine max
  unsure (1)..(469): unsure at all n locations
ctaagctctaatgtaccaattcttaaataattatctgaagtactttcttgtatatataagtatacatgaatncatatatattatctaagaatacaacacatagtctactagaaatctttggtcgatttcaaatataatattaattttaaactataaaaaaacctaaaaaaaacatgaaaaggagaaaatacaaaatcaatatctcactccctcttatgctaaatttctagttacttaatttcatcaattcaagctaattagacaaaggttcaatttataggattcacactcaacacaaggacacatcaatttcatagtaatttctcattgggacatcaactggttcatcaaatgtatataattcacacttataattataaggatagaataaaaatcgtagaaacaacccacaacccattccaattgatactctaaggatccctacacatctcctcactaatctccaatt

SEQ ID NO: 78703 - DNA, 299 bp, Glycine max
gcaagcttatgcgcatatatccttacaacgtcacttgttcattatccttctatcaactaagaataatgcgcccataacaataaggtagcttcactacctacattatttacatgtaccttcaaagtgtatctgttatttacatcacacacgcctccttggctgaatttacatacatgcatactcaaagcattttgtggtaccaaatactgcacatgcgctcatcttgtaatttctaatacccctacatatacaaactttacgatgaatcttgactacctacacaataaggtgccacattt

SEQ ID NO: 78704 - DNA, 403 bp, Glycine max
  unsure (1)..(403): unsure at all n locations
tctggacttcacccnccgtgccattctttaaganttaagccaagcccctactgtcgaggggcaactcccaccttatgacgactatcccgggcaagacgatgaggaaggagatacccatcttggccccctgctccacctcaaagatccgtccccccatgaactaccccaaccgaacatagtttgccatatcccgacttcacccacacctgtaaaagaatctgttcccttcgcggaagataaggggaagatggaggcgcttgaagagaggttaagagcagtcgagggccttggcaattacccattctcgganttggcggatntatgtctcgtgcccaacattgacatccctcccaagttcatagtaccagactttgataagtacacagggacgacatgttcaaaa

SEQ ID NO: 78705 - DNA, 419 bp, Glycine max
  unsure (1)..(419): unsure at all n locations
aactntatgaaagatgaagactagatgaaataggacagctctgaacgaaatgagagaatatattgtaagatcgattgagagagagaacggctgaaagagatgatagatctgcatgagaatgctcaaatgtttcatgccaaggtcacatacatatagtttcttgatgactcaagtcccaactctgaactcttgggaattcctttaaaactaattgcttaaaaagatatgactctagaaagaatcttcagaaacaagtcacttgaagaaatgtgacatttggaaatgaatgtttcgaatactgtcactgcgaatcgattaccataaccgtgtaatcgagtacacatcaacagatgtgactctgcactatgaattttgaaaagcntaatgtgttaaaccactggagatcgatactataatcc

SEQ ID NO: 78706 - DNA, 463 bp, Glycine max
  unsure (1)..(463): unsure at all n locations
agcttataccaaagtccataacattcacatttcgtttttctntttcagaatatgaaactacgtattaaattattataattattctttggccttttatcgtaagaattaaagattatattaagatatttataacacttatgcaccatgttgaaccaactaaattatacctcatttctaattatttttgtttgatatcaattttttaatcttaaactatattctaattcttaaattgattattaaatatatcatatttataaaacaaatcttcatacattgagtcaaattcttaaataataaatttttatctttcaatatattagtttctcaacctcaactaagataacatggtcacctatnttttcttatataatataaaattaataatacttatcaactatttaacttgacattgtgagttggattctttttaaataatacacatttttttataaatcacatt

SEQ ID NO: 78707 - DNA, 474 bp, Glycine max
  unsure (1)..(474): unsure at all n locations
acatctatagaatactctcgctngagtgagccaccgtagagtgagtcaatttagtaatttctttcttgtaaccctactattcttttgtataatggaaaaatcttcatattggagaaccgtgtgttcccattataatctttaattactaagtgtttatcttaacttcgcgaagtgaaaaaattcgagttttttcaacattttattaataaggaattaaacccatatgatttcttttttcttttcttctttaattgggtatctaatggtgaatcttatatgtcctaatttattgtgtatgtatacgttatgttaagcgttgatctttttaatgtgccgctttcttttgctctctaggagagctggaaattcagatccaatgttatgattggtaaatggtttttatattgttacgtagtgaaattatggaatatgcctgcttaatctgcctcatgtgccctcgtaacacatgtatgt

SEQ ID NO: 78708 - DNA, 58 bp, Glycine max
gaccaagacgagagcacctcggtggaggaaaaatcttgcttggagcccggggaaccaa

SEQ ID NO: 78709 - DNA, 354 bp, Glycine max
tcaccggatgacgccgatcgaacatttcctaaccgacgcatatcttatgtgttcagggattgaaccgaaaactcgttaggcgacatctgtcgtgaagtagcgaccgatatttgttagccgacattgcacaattgtttttagaaaagctcgctggtcgatgatggactttatacggcagagtaagcatctcttgttataggcgcgcatagaatagttacaatgctcttccgctatgtgcttcgtgcgaatgacaccgacattatgtttcagccaggatggcacttgcccacctctagcaaaaaagtattggctcccgccttctgcatatttattcacgatagatctacactcgta

SEQ ID NO: 78710 - DNA, 462 bp, Glycine max
  unsure (1)..(462): unsure at all n locations
tcgcccatgtgcctcagcagcacaagatgagaatgctattgtttctcagagntgctgngctcangngaagaatatagggcagaacccaagctgcctctgtgcagttctgctctccaacacagccaaaatggctggtgtcaaccctcaagttgctgtcaccatccccaagcgttgcaacctggctaatcgccctgttggttacaagtgtggacgtaagtttgattacgtaccccttctttatatataagggagttacttaagtaacactactactttgctaaaacaagactattaaatgaacataattaaaagtgtatattctaatcaataattacacatactctataactnctatagtgtatcttctctcactttagaagtgttatatctatcaatgaggtgtcgttatgaccccgctttagcgggaacaatatatacaaaggtaataagaaatgaagtatg

SEQ ID NO: 78711 - DNA, 452 bp, Glycine max
tgtggtaaacccgaacagcgacaatgaatatttatgtgacgctcaccggagatgcgtcacccgtcgtgtgcatgaacttcacgcactatggccctgtgtggtgtcgcttgcggctgtgttttgagttggttgcgcacatggacgtcgtggtggtcttcggcaatgatgataggcacgattcacccatgaaaaagcagaaaggtccattggggacaccttgaggcagaggaagagaagactagtgtgacggtcttcgggatgggcgacagtggtcaaagttaagggtcaacgaaaaggcgttgggagtctgccaaacaaggacagagcagctgtgcggtactattcaccccgaagatgggctgcacggaaaaggaaaacaaaggagaaccgccaaaaaacatgaaatgacccctaacttttgtggtaagtgtcggtcggacgtgctgttaaac

SEQ ID NO: 78712 - DNA, 460 bp, Glycine max
  unsure (1)..(460): unsure at all n locations
ggatgttgtacaaaagagactatgttgacttatatgatgattganaatgtaccttgggttatttgttatgttaacataaaaatgtgttgtttatttgaaaaaaatatataattgctgcaactaaaataaagtatgcatgtatgctaaatcgttgtctgagttgacaatacattgtgaaatgcaagcgtgttaacataaagcatgacatgacactgtaagacttgactacacattggaaaatgcaagtgtgttaacataaagcatgttaccatgtcacgtcattggtgtggttgacaacacagacagaaaccatgtgcacgcgtatgtatttattctaaataattgaatcaatagtactgaaactcatctatatatatcacacagccgaacacggtaaaaaatcaaacattcattcctaactcaactctttgaacaaagtatgacatntttgggagaaaca

SEQ ID NO: 78713 - DNA, 347 bp, Glycine max
cgccttacctttgactaaacctactcataagggttttgtatttgtgtgggatacccaatgtgagagtagttgtcgtacccttaatgtaaggttgaccactgcaccacttttaatgttacctgacccgagtgaaccttttgtggtgtactgtgattgcgtcaagatgggtttgggtggagagtttatgcgatgtgggccagcaatggctcatgcttctcgacaacttaagatacatgagaggaatttttccacacacgattttgagcatcaactatagttttgctccttagctattgatgcattacccaatagatctaattagatgagttaaggttgataagacctta

SEQ ID NO: 78714 - DNA, 466 bp, Glycine max
gacactataacactcagctagaggaagcttaatggaggaagagaatgagattattgatttataatggcgtgtgtcataccctaatttcgtccggggacctttgcttgatgacatgtgacctttgtttggtccttgtaaggtgcttggcacccatcattaggcaatttgtgaaatttcgagacatgccgaagaacaaaagaaaatattgatgcacaatccgtaaggttccgtgacacaccggaaatcaaatggaagcatcgctgcataattagtgaggttccgaaacattccgtaagtcaaaaaggcgatgattatgtaatccgcaaggttccgtaacattacggaaagaaaacaagtatcgtttcgaaattcgtaagtttgcctaactttacgaattaagaattacctacaaaagcagagggggtgtacttagttaaaatggtgtgcaaatagcaaccatgcccac

SEQ ID NO: 78715 - DNA, 399 bp, Glycine max
agctataacctcatcgtctctcacagtctttatatttgggagccaatccagtccttgtgttcggactctcagccacttatgatagccgccgatgatcccattactgcttcccctaagctctctgtcctttcttcacgccgcatcccatgccttgcgaactccttggagtaccctcgcgttgtggtcactgaaacctcgtgcgatgaaaggcgtgatgctttcgtctgatggcactcctctcatgggacatccttcgcatgaagatagaatcctgattcttccttccttctagcgagggaaccatttaacagacgcccctccatgctagccaaaagttggtgcacaacaaacaattcttgcgccgctcttttcacatccccggtcgaacgtgtcatacat

SEQ ID NO: 78716 - DNA, 341 bp, Glycine max
  unsure (1)..(341): unsure at all n locations
acgtacccttttgcttatattttgtgaataattgcatactgacattcccgttgtgcgccattcgcatatgcatcacacacggattctgttttggcccctctctnttgtcaaaccaacggagggtccgtgccaccttcttaaatacatacgtcgggcactttgctaccgcaagatgttgtatctaagaaggagacaatttcccgggctcccgtattcataaattgcatctatgtcatatgcatttctttatgcattcatccatttccacccatgatagatgttggaagtttgattcgcgccgattnttgttcactttagtaaaacatgggatcaagtcgaat

SEQ ID NO: 78717 - DNA, 421 bp, Glycine max
agctttatgagaaaccattaaaactaatgttgtttctatacaaaaatcaattgaggaagcttcgccgagtgtccccattgaaaaacctttattcaaacctttcaaagttagtgataaggctaaacgaaaaattagggaacttataaaaactaaatccttaattgaaggcgtaggtgacaatcatagcgaattactaaacaagattagtagtttgcttaaggtcattccagatactccccaagcttcggaaaatacttccaaaatggtaacaagaggtacctccaaattaattaatgttattaatgaagatagtgaccaaaacttatataacacaactgagataggatcagtgtcagaaaagaatataaatccattaaactccaaacactggaaaaccccctccaaattatattatcaacgt

SEQ ID NO: 78718 - DNA, 385 bp, Glycine max
  unsure (1)..(385): unsure at all n locations
cttataaatataactaggatactccagaaactaagagtgctcacacccctggaaaacacaaattctgtattcaacattttgggtttcactttttctaatacaaagtagatgttacttcaacttaagaagttattctgtaagaactcttagataanatatcaatgctaagatttttgatcagcaaattntttgcaaacataagataagtacgtaataaactgaaattaaataagaagtagtaaaaaaggatagaagacatgaagtaattatattgattcaccccaacctggactatgtctagtacctacacttgtaggctntctctactaagaccaagaacacaaccattgatgcaatccttcctaggaagggaccagtcacctga

SEQ ID NO: 78719 - DNA, 172 bp, Glycine max
ccggactgtgactgccaatccaaacaaccagatcccacaaccaacaagcatagtaccatacaaacgttcctaccaccgccaagatccacaagggcatccctaacaatcaaccacgaagcctacctaccggacttaccaagacaaacaccacctttagcggaaaccaaaacac

SEQ ID NO: 78720 - DNA, 449 bp, Glycine max
  unsure (1)..(449): unsure at all n locations
tagctgattgcgtcaatctgacagtatacttttgatanattgagttatccgcgttttactcaaagatcagtgcgaatcaaatcactcctgcattttatctctagcatgcattcatatcatgcatcgcataagcatctcttcatggcatcataatgaacatatcgttcctgcatttgtccgttatcatattccaacatcacattntgcatgagtcattgcatcatcatgcatatgagttcaacatactttttgttgtacaaactgcataccttntgttttcatgttcgctcatgcgtgatccttgcattttcctctacaaaacanaaacaaaaagggaagcatgaaaattcatgatacattcttggtagcatatattcggtaccatgagccaaccatgttgggatcataaacccattttcaaaanaaatacgangacaaaacataatgat

SEQ ID NO: 78721 - DNA, 418 bp, Glycine max
  unsure (1)..(418): unsure at all n locations
gtcacctgccgcatgcaagcttgactntgntaggtaaaatgtctcgtatggtttctatataacaatggtgcatcaagacgtggcaatcgtgagactctaagtctactaactttagatctttcaattgaacaaggctcttaatatttgaagagtattcttgtgggactttgacacgacgtaaacactaacaaaaactcatattctcctttctagacaaagaatgacacgctggaggctaatatattttcttaccatcagaccttggatgtaactaggcttgaacacccatcttatctagatcttgacgagtattcaaaccatcttttgtcttgccttgaatgttaacgagcgttccaatgacactatcacatacatttttttctacatgcataacatcaatacaatgtctaacatctag

SEQ ID NO: 78722 - DNA, 430 bp, Glycine max
  unsure (1)..(430): unsure at all n locations
tactctgcatttatctctagcatgcattntttctttctttacccactcctcacgtttgggtttttatggaaaaacaccataacttaacgccccacaaggcattcctatcgaccagatccaatctaaacgatggtgatcaagaggagacacaggaacagatgaaagccgacatgtcgactctgaaagaacaaatggcttccatgatggaagccattgttaggaatgaggcagctcatggagaaaaacgtggccaccgctgccgctgtcagttcggctgccgaagcagacccaactctcttggcaaccgcgcaccatcctccctcanacatagtaggacgaggaagggacacactgatgcacgatggcaaccctcatctgggatacaaccgagcggcttacccttatggattngccgccaactactcaccac

SEQ ID NO: 78723 - DNA, 429 bp, Glycine max
  unsure (1)..(429): unsure at all n locations
cgacaataacgttntactcggatgtctgattgagtcccgtcatatatcgagacngctcgaaatgaatgttgaagctccgagccaattcaaacgacaataactttntactcggatgtctgattgagtcccataatataacgagacgctcgaaattgaatgttgaacctctgagctaattcaaacgacaatagctttttactcggatgtctgattgagtcccgtaatatatcgagacgctcgaaattgaatgttgaagctctgagccaattcaaacgacaataacgttttactcggatgtctgattgagtcccgtaatatatcgagacgctcgaaattgaatgttgaacctctgagccaattcaaacgacaataactttttactcggatgtctgatngagtccncgtatatatcgagacgctcgaaattga

SEQ ID NO: 78724 - DNA, 356 bp, Glycine max
  unsure (1)..(356): unsure at all n locations
attaaaaatattaaaaatctgttacatattngctaaatttttgttacattgttagtttggtttttttgcttatgtagcaagtatcagaaaaactacataatatgaaattatcanagactaaaaaagttcaagaagaaaataagaaagtcaaatgataaccttccttatctgctattctgagtgtcaaaaagatgccatcatcttctcttctacctttgattgtggtgtcaacttcggccaaattgtcatcctcttcacaaccaaatagaccaatttcacttgcttcgaaatcatctcgatgataatccaattcagatacaggtccataaccaccaacattatcagtgtccncactt

SEQ ID NO: 78725 - DNA, 225 bp, Glycine max
attgaaaaaccttcattcgaacctttcaaagttagtgataaggctaaacgacatgagcaggaactttgatacactaaattcttatttgaaagcgcaggtgacaatcatatcgcattactgaacaacattagtagtttgcttaaggtcattccacaaaattcccaccgtctggtccatgaatatcatatggatatgcagcaatgctcattataaaagaatgttata

SEQ ID NO: 78726 - DNA, 406 bp, Glycine max
  unsure (1)..(406): unsure at all n locations
ctactttccttagcacacttatgttcaatatgttggatttgccctggagatttgccctgaattttctcctttgaaaactatnttatttggaaatccttcccaagacaccattgaaccactgatggaggctttggaggaagattataaagatggaaataagataaacgaatcaaggcagtttattgaaggagtattggatcttgaaaagagaatcaatagacttgatacattgacttagaaattaaatataacaaattntgtcattgttgaacaaattattagcttataaaccaaatctttaccatttgttaatatgttttacttatttctgatacgagcataataaaatgacatgaatgttcaaaaaatcaaactacaacatgatcttgtaggatttagcaatatg

SEQ ID NO: 78727 - DNA, 421 bp, Glycine max
  unsure (1)..(421): unsure at all n locations
agctatgacaattcttggggtgtccatacattatccaaatctgnttcaacttcttcctagacgcagaattcaccaccgacatactccaatgccccatttgcattttgtatgaatttatcattgtggtgcaaaataagactgatttcttcagacatcctagagagaaacataacaaacattaattgtatattcacaaaaagagaacacaaaaagtttctgaatagagaaaagaagacaagtttgataatagagaagagaagaagtttgagaataaagaagagaacacaagagaagaggtttgacgacagatgccagatggacgatgatcaccacgaaaaatgcgatggtgacaacaccgttacggtcatcgtcaaaaccccaaaacaatcgtctctcaacgatgaatacactagccgatggg

SEQ ID NO: 78728 - DNA, 450 bp, Glycine max
  unsure (1)..(450): unsure at all n locations
ttgctatgatgcaggtgttaccgttaaggcgtgtggcgacttgtttngatagcaatatagttgatacacttccatttagcatactgtcatctcattgaaagttgcatccccgacaacaaagatttccttactatcatcgttcgaggtatgtatgtgattctcacacttatgtgcttaagtattataggcaatggttgacatgttactattctttagtagtacattgtaattcattgagtgagccatagttccccgtttgagattgaatacaacgattaatacggatagtttggattaattgttgtattcaaacttgaattgtccgtttggacagtttgngaagacaaatngtttttacttcattttgactttataagtaagtatgttgtgttatntttgactaaatttcgagcaatgcatctttgcttgttctctgggtgcatacatgat

SEQ ID NO: 78729 - DNA, 418 bp, Glycine max
  unsure (1)..(418): unsure at all n locations
agctatccatcaatggtattacaagttccatcttgtcattacctcatatggntttgaggcaaatgcagttgatgattgcgtataccacaagtttagtgggagtaaatactcattcttggtgttatatgtcaatgatataccattgactataagtctttacccaanaggaaggcattgactataaagaaacctgttttccaatatcttcaaaggattctttttgaacaataatggcattggtagctcattatgatttacagctacatcagatgaatgttaagactgtgtttctaaatggtgacattgaagaaacaatttatatgatgcaactagaaaactttgtatcaggtgactcaaagtctatggtttgcaaactaaataaatccatctatggtttgaaacaagctttccatcaatg

SEQ ID NO: 78730 - DNA, 280 bp, Glycine max
ccacaaaaaaaaagcatcctcacttaattcgacaatcgagttattgtattgtatcattttgccgaggagaaaatcagataggacgggcctttttaagtccaaataggatatatttaaggatagataattttgatattatctttttaacattagttttatattatatattttttaaatattatattatgtcacttgaatgttgatattatttgcaatttcctatttaatagagcatgctgtacaagaaattatcaaaatgaagaaatcataattttatctt

SEQ ID NO: 78731 - DNA, 418 bp, Glycine max
agcttctagaggaagcctcttaatgaagcttctatagaaagctacatgaagctgcctcggtaaaaacgctgcccagccttcattaaccgttggatcttctcgaaatttggtctgcaacttcacaaaacacttttccatgatttaaccgttgggatctttgagaaaatatctggagtgtgctagaagcttccgttcccgagagcatctcttatttaagcatttcagcctttgctttcttgtagcttaagaaaaatgccatttcttcttctttctttcttccaaatccatttctaaagttccaaatactttctccatcacccacatccaccattagccaccacaaaccatcattgttctccattgaaaacccacaccgagaggaacccttcaatcgaagcagaatttccaacttggcttg

SEQ ID NO: 78732 - DNA, 430 bp, Glycine max
  unsure (1)..(430): unsure at all n locations
ctcgcttaattacattgatgtttgtattctttggaggatgttgtatgccatttttgttataagagtagcatcccttggtaaaactaactttccaaatgtttgccttcgcaggaaatggccccgaggaagcttgcctcaaagaggtccaggaaggataaggcggccgaagggactagttccgctcctgagtatgacagtcaccgctttaggagcgctatacaccagcagcgcttcgaggccatcaagggatggtcgtttctccgggagcgacgcgtccagctcagggacgacgagtatactgatttccaggaggaaatagggcgccggcggtggacatcactggttactcccatggccaagttcgatcaagaaatagtccttgagttntatgccaatgctnggccaacagaggaaggcgtgcgtgacatga

SEQ ID NO: 78733 - DNA, 383 bp, Glycine max
atcccctatactgtctagtgctattttcaacctcaaagatttgcacaatataagtttgattcttcgtcaactggtttttccatttttcaatgtcttgactcttaacatgagcaagaattttgtcaccctaatttcacatgcagcaatgcaaattataagagaatctcataactgtgaaccgttgtattaatcttagcgcctaaacaacgaaattcgcaccgtctggtccatgaagatcatttcaatatgcagcaatgcaaattataagagaatctcataactgtgaaccgttgtattaatcttagcgcctaaacaaagaaattcgcaccgtctggtccatgaagatcatttcaatattggatcttggagttctaaaaacattc

SEQ ID NO: 78734 - DNA, 427 bp, Glycine max
  unsure (1)..(427): unsure at all n locations
gaagaatctattcatgtttcctttgatgagtctaatgctatttctccaagaaaggatattctagataatattgcagaatcttcagaacaaatgcatattcatggagaagattctaaaggaaaaggagaaggaagcaatgaagatcctccagtggaagtcaaagcaaataatgatattccaagagagtggaaaccttcaagagatcatccccttgacaacattattggtgatatctcaaaaggggtaacaactagacactctctcaaagatttatgtaataacatggcttttgtatctatgattgaacctaanaatttaaatgaagccataatagatgaaaattggataatagctatgcaggaagaactaaaccaattngaaagaaataatgtttgggagttagttgagaaacctgannactacccaa

SEQ ID NO: 78735 - DNA, 413 bp, Glycine max
agcttgaatcggacatccgtgtgaaaagttatgaccatttgaatttctcaagagcttccgttgttcaatttcgagcctctcgacatattatgcgcctgaatcggacatccgtgtgaaaagtcatgatcatttgaatttctcgagagtttccgacgtttaatttcgatcgtatcgatagattataagcctgaatcggacatccgtgtgaaaagttatgaccattcgaatttctcaagaccttctgttgttcaaattcgagcctctcgacatcttatgcgatcgaatcggacatccgtgtgaaaagttatgaccatttgaatttctcaagagcttccgatgtttaatttcgagcgtatcgatatattataagcctgaatcggacctccgtgtgaaaagttatgaccatttgaatt

SEQ ID NO: 78736 - DNA, 440 bp, Glycine max
tataatatatcgatacgctcgaaattaaacatcggattctgtcgagaaattcaaatggccataacttttcacacggatgtccgattcgggcgcataatatgttgagaagctcgaaattgaacaacggaagctcttgagaaattcaaatggtcataacttttcacacggatgtccgattcaggcgcataatatgtccagacgctcgaaattgaacaacggaagctcttgagaaattcaaatgatcataacttttcacacggatgttcgattaagacgcatcacatatagagacgctcgaaaatgaacaacggaagctctcgagaaattaaaatggtcataacttttcacactgatgtccgattcaggcttataatatatcgatacgctcgaagataacatcggagctctcagaaatacaatgtcatacttttacacgatgt

SEQ ID NO: 78737 - DNA, 284 bp, Glycine max
  unsure (1)..(284): unsure at all n locations
aatgctcagaatgatcaaaaggtatataatgatgcctaactaatctatgaaatgtcctatctatctcangatcaaagggttgtaagtaagatggattgcctctagtcatacactacattcagcatgcacacaactagttgccttgtcatgtaaataaaggtgtaggtttgaactacagctaccctcaaatgatatccaaatgacttgaaattttgtgagcatgctgaatgtataataatngcgattctgataaccggagcanaagttatggccatttgaagttt

SEQ ID NO: 78738 - DNA, 403 bp, Glycine max
  unsure (1)..(403): unsure at all n locations
agctatggagaaccaagccnatcagaatgctttctttttatatatgggaatagaggtaacaatggcggtaatgacggaccgaggcagaaccgggttgagggagtaaagctacatgttcctaccgtcgtaggtagtactgatccggatgcctacctggactgcgaaatgaagactgagcacgtatttgcctgcaatgactacactggtgcgcataaagtcaagctaacatcaactgaattctccgactatgcccttgtttggtggcataaataccaaagagaaatgttgagagaggaacggcgagaggtatatacatggactgagatgaaaagggtgatgagaaaaaggtatgtgcccactatctataacacaaccatgcgacagatacttcaagggctgtccc

SEQ ID NO: 78739 - DNA, 197 bp, Glycine max
  unsure (1)..(197): unsure at all n locations
ggacattatatatcaagacgctcgaagttcaaaagcgaagctctcgagaaaatccaatggtcatgtgttttcacaggatgtccgatttggggacataactcaaatagacgcttgaattgaacaccgganaatcacgagaaatttgattgctcataagatttcactcggatgttcgattcggggacataatatattaa

SEQ ID NO: 78740 - DNA, 429 bp, Glycine max
  unsure (1)..(429): unsure at all n locations
ctgcgagggcaacatttggaaagtaatttaccagtgggacactactccttaagcaaaaatggcatataacctnnctccataaatacaaacatcaatgtaaatttagagcaagctcatgcgcatacttccttacgaacgttctcttgcacaatacattctattaactaagaaaaaatgcacccatatacaatcaaggcagcttcgttacctagattatttacacgtacttccaaggtgtatttgttacttacatcacacacatctccttggctaaattcacatacatgcatactcaaagcattntggggtaccaaaaattgcacatgtgcacatcttggtatttctaatacctatacatacacaaacttcatgatgaatcttgactatcttcacanaaaggtgctacacttcatccctttttcaaagttt

SEQ ID NO: 78741 - DNA, 404 bp, Glycine max
ttaatcaccgccgctgcagcttagacaactttctctacgtttttttttcttcctttccttctagcttccttttctgcaaaatctgtggcttccctgtttatatatgaagctaacactcatcaattccaggaccactccgagccaagtagaaattcagtcatgggttaacaattatattatgcgtgaatgtccatcctctcttaaaatatattttccattgtcatgattataaatatgctcaagattgaaaatgaattaggctatggattcatttcggaattgtgaaaattaatcacagattgcttggatgatattcccacctaatttgcgatctcaatgaatttacggattaattcgattaaactaactctaatgacattgattgaactttcacaacaagaaca

SEQ ID NO: 78742 - DNA, 283 bp, Glycine max
gcaactaattagaaagaagaatattaaggaaaacatgattaattaaggaaagtaaaggcggacttagtgcaagaagcccactaatctgcacctattaaagaagaatagagaagaaggaaaagacacacacaaattccaacagaatacaattctttatagaaggaaaaggctagaagaaggagaagcaagcaatgggagtcattccttcccttcattccctttcttatctttttcccctttactaaatattctcctcttgcagccgactaatctttgatgtatt

SEQ ID NO: 78743 - DNA, 156 bp, Glycine max
tatcaagctgtgtcgtcttacagacaggaaaaaagtttatacgggtaaccactcgtggttttacgcccgtcagggtgactcaaatgtcagtatgacatatcttgtgagcgcggaagatgacgttaatccccgcatgtcaacgggcttcgtcgggct

SEQ ID NO: 78744 - DNA, 448 bp, Glycine max
  unsure (1)..(448): unsure at all n locations
tgatagcacgcagagactaacgtcgtcttctgcgaccttcatcaatcgctgtcgacaagcccgttgacacgtggagatttacgtcatcttccgcgctcacaagatctgtcatattgacttttgagtcacgctgactggcggaaatacccgagtggttatccgtataaactttttgctctctgtaagacgaaaaacttgatagcacgcagagactaacgtcgtcttctgcgcccttcgtcaatcgcgaccgacaagcccgttgacacgcggtgatttacgtaatcttccgcgctcacaagatctgtcatactgacttttgagtcacgctgacgggcggaaatacccgagtggttatccgtataaactttttgctgtctgtaagacgaanagcctgataacacgcagagactaacgtcatcttctgcgaccttcgtcaatcgcggccgac

SEQ ID NO: 78745 - DNA, 408 bp, Glycine max
  unsure (1)..(408): unsure at all n locations
agctnggattgaggtttagtaatntaggctattatatanaataaaaaagcatgattaattatagaaacatctttatacacatcagttggtttgttaaaaagacccaacacttctacttactgttgtcaattttacttacttgtatttttactatttttagcctagatttagtttaattctattctaaataatcaattatcaatgtttctttcaacaatgccttatttctaaatttaaccccgtctaagactagttccttgagttcgatacttggattcatccgttttaattttaaatacttgacgatccggtgcgcttttcggcaaaccagatttcccttgagcatatttgtataaagaaaaagtggactaaaaagtaactgcaggggaaatcccaacaagtatttat

SEQ ID NO: 78746 - DNA, 409 bp, Glycine max
  unsure (1)..(409): unsure at all n locations
ttcataagcaacagccttctggaggaatcttctggagagcccaagtgggcctggttgctatntacacccccatntttactaagtacacccccctggcctttttttggtgattcttttttcgtaaagttacggaaacttacgaatttcgtaacgatacttgttttctttccgtaatgttacggaaccttgcggattacataatcatcccctttttgacttacgaaatgttacggaaccttactaattgcgcaacgatgcttccatttgatttccggtgtgtcacggaaccttacggatttgtgcatcaatattttcttttgttttccggcatgtcccggaatttcacaaattgcctaatgatgggtgccaagcacctcacaaggaccaaagaaaagtcgcatgtcatcaa

SEQ ID NO: 78747 - DNA, 414 bp, Glycine max
  unsure (1)..(414): unsure at all n locations
acgctgcaagctttngactgaagaagctgaagcagattcttttatgacaatgctctanaagaagctattagaggtgtccaggatgctgtcatggccattaatgaacatctagaagatgtcagatatgaaattgctgcccttgaagcagagtgattcttttccagcatatttactaaaacattattgacttcaattcatattcagatcatataatcatttgcctgtgaatggataggttcaaacacccagtgctaacaaatatttttatgggtctgcaacccgtggaatgtatatagacaccctaaaatgaagttcatgaattttgtccagtcgtcaacaattttaattaaaatggtaaaagaaattcaacattttttattaaaaagcagttttggtagttgaagtcttgattga

SEQ ID NO: 78748 - DNA, 350 bp, Glycine max
  unsure (1)..(350): unsure at all n locations
aaacctccctcatcacaaaaattaactgaataatcaagaaagatggacagacagtaaatatcacgggctctatctcttntattagtgaaaactaataaattaataattaatatcttggatatataaaaaaacgcgtgcacaagacactgctaattaaagaacatgcctgccgaataagaaaaaaacccgggaagcaagggaaacacaaatttatataacatcttcaaaaaaaaaagaaaaacctccttcacctgctgggatgatggcaaagaaaccctaacctgccaagcacgatactctgcaaaaattacgaaacaaaatgctgtttcatactgcgaaccctaatgaga

SEQ ID NO: 78749 - DNA, 420 bp, Glycine max
agcttagcaaacgaaccaagtaacaacagcatctacaaatatttattgacctcttaacaagtgttcaacaatattacataaaatgaaattgaaaaaaaaaaagataattaactacatatcataacaaacattttcttgcatcctaatttttttctctttcttttttttcatttaatccccggaaattactgtatatataagtcatttcttttgtagcagagagcaaatattttcaacactagacaaatctattcaaatcagataaattagggctcaaacaccagaccgatcaagtgaaagtaaaataaaataaaataaacacccgaggtttttgggttgtggctaggtcattgttatttttttttcaaagacattcggtaaataaaatcttaacaaagttatttcaggcattaaagtaaa

SEQ ID NO: 78750 - DNA, 454 bp, Glycine max
  unsure (1)..(454): unsure at all n locations
ggttcttgattnttctaagttctttaacaaccttagaacattatacttgtccttcatttaattgtcggtgggcgtggtgaccacgatcaacaaagtactttcgacacctactatatgttgatttcaccaacgctgttatcggtatgttgcgacaatccttcaataccttatttatacattcagagaggttggttgtcatgtggctatatcgaactccttcggtatcataagccatggtccatttttcctttgaaatgtgatcaatccatgttgctatggctggactcagttgacgaaatctttctaaattttgataaaaaaataagcttgcaaggagtgtagccagcattaaattaagtagaaacaacnaatttatgtatatatgaaactttaaaaataacgtgaccatgatgaataaatcttacccaatttcttcaacatatctttttggttg

SEQ ID NO: 78751 - DNA, 414 bp, Glycine max
  unsure (1)..(414): unsure at all n locations
agcttattgtacctagaaccaagtacaatgattttgtattatttgaaaatccatatcggtgagagtcttctcttgggctctacttccaaccttttagacttttttaatctngaccatgtttggtcaccgtttccaacacttagaatactctgttcttgtactcaagggtttgagtggatcacccaacctgataggcagctttcttatggtgggagtaatttaagtgttgcgtgttcaagagttctaaagcatcctgagtttacatcaataatttcttaagagttaacacattttttcaataatagattaggacaacataactaatagattgtggcaaattgtattttccacactcatgaatttttagagatatcgcccagaactcatacaagcgattccacttgacactcatat

SEQ ID NO: 78752 - DNA, 415 bp, Glycine max
agcttgagaaagtccttctgattctgtttattcttttctgacttgatggcatgagatgaaatgcaaagattggacctcctgttagttgttatcaatgaatagcttacacacttgtgcttgagtgaaatagtagccgtgagattgtggtttgagctactttccttgatatctatcttatgattaacttcatccaactgtatagttcacattttgttctcctctttgtctggctgcatattctgtgaaaacaagtgataggtacacattgcttcatctttctcatcatgcaatcaataaattttgatgcatacacctttatacataaatactacatgttttaccacttgaggacaagtgagctgttctcttttgcttgaggacaagcaaaactgtaaatttgggggagttgttagtc

SEQ ID NO: 78753 - DNA, 449 bp, Glycine max
  unsure (1)..(449): unsure at all n locations
taagctagcctcactcacatacactttacgatgtaacgattttcattctatttattttagtctatctcacactcactcttaatatgacttatatagcgactacgctgcaattatcatttttaaaatgaagatattaataactttataaaataacaagtgcttgtgggaccaatattgtttaagaaatattaggtacttgccttacctaagtaattgccctattttaagttttagttcaaaaaaatacagtnttacttattttgcggtaagacatatatgtgagtaagttgaaaatgagtaatatttatatcttatagtttgaacctatctttagattaatattacgagattgtaagtatgtgatatcgaatgaatataatatttgtacatatttcatttataacaacacatctttataattgatttaactgcttattgaaaacacgaaa

SEQ ID NO: 78754 - DNA, 366 bp, Glycine max
tcctctcacggggggaggttgagtctgttctcagtatgaaaattagtaattgaatgctcaaaatcagaatattcagaatcactagcaacagaatacctcaaatggctcaaatgcacatgtcataccctaatttcgtccggggaccatctgtttgatagcatgtgaccctcgcttgacccgcttgaggaacttgacacccatcggtaggcaatccgtgaaagttccgcgacatgccgaagtcgaaaggaaacattgttgcgcaatccgtaaagttctgcaacattctataagtctaagaaaggattattgcacaatccgtaaggtttcgcgacattatcggaagaaaacaagtatcatttatgtaat

SEQ ID NO: 78755 - DNA, 415 bp, Glycine max
  unsure (1)..(415): unsure at all n locations
agcttagagaaacagaagataggctctttctttagttgcgcacgctatatggcttaactaaaagctataatggacgagggtcggggtatagacaatatttgatctatatctggactaataaaacactcatggagactcttttatttttgggccattagtataaacccattgttttgtgagtagaattaacccattttaactctgcgtaattatatgccacaataccatntatttaattaattaattaaaatattgtcactagatatatatattataaatcacattaaaataaaatatttactataacagaccacatacacatatattaagaattgtgaaatttatgataaaagagatgaactaaaaaaatttcttcaaatgggagtgtctattaacaaatagtgtaagtaaaaat

SEQ ID NO: 78756 - DNA, 238 bp, Glycine max
  unsure (1)..(238): unsure at all n locations
acagacaaaactaccatttgattccacggaacttgtgatgatggatccctgcgtttgcgactacgggggaatgaccatgttaactcgctttgcgctatgtatttgctgcgttgctaactatgcattgtttacgatacctctctctactccntttttaaaaaaaatactctatctacttattttgttcataggtctattcttatgggtattcgccataccaaaaaatattattattatt

SEQ ID NO: 78757 - DNA, 422 bp, Glycine max
cgccaatataattcaaataaacctcgccctgactcatctgtagacgcataatgagataagaatcaaaagtggttattaaaaaagaagaagacgaagaatcagaagttgaagagtaaaaccacaaccaaaattcacttgattattgagtatgtgagcaacctcatacataatagtacatccacccaaacccttacttacttttcatatatgggtgtacaaaagctgttgtcagtaattctaaagtgtttacatcattctacatcaacttgctcattctcttttacagcagcaccattgataccaggaactagttcggattcaccagccctagaagacaacctctggtatctgaaagttgggagaagcttatactgcccaaatgtcagaaactgactcagcttctcatagccccatcttttgtg

SEQ ID NO: 78758 - DNA, 383 bp, Glycine max
  unsure (1)..(383): unsure at all n locations
agtacgccattcttgcgcgtttacgaagatatgagagtntttgagtgattgagaggttcctacaggcggaggagacctccgcactcctttgaaaacagacaacatctcttaatccctcttcgtcattaggaaaacaccttccttgctatggaaggcttaaccctcatttggagattcttgatgagtaatagacgttaactctctccctacctaatcaaggaagactgtacgtgttgattgtatatatctgaactccatgattgcatgctagaggcttgatcacccatatgaatgttctgctaggtgcattaacattgaaagatgtttgtctgcttagaacttgacatagcgagatatggtctctatatgtatagacttggagc

SEQ ID NO: 78759 - DNA, 273 bp, Glycine max
  unsure (1)..(273): unsure at all n locations
tcttaagaacttgataggacagggctagtttatcatattatcacgagggatcgggatatggtaacctagntttttgtatgtttgtcttaatgcgggtctggtcaagtttagtccaacaagagcaatgtgaggttgaagcttgatcaggattangctagactatcacaagggattggggtttaacatttcaggagacaccatagaacacatgagcattgttaagtagagaatatccttataacatcaggcacctaataggaagaccaacacatt

SEQ ID NO: 78760 - DNA, 418 bp, Glycine max
  unsure (1)..(418): unsure at all n locations
tctagctgacctggctaaaagttatcggattttttttataattactttaactattctggtaattctttttttggtttcttgcagggcctactctaaggacattgaccaatactaaattctctaacatggcttctaacccttgatgaaatggaaaactccatgtgcataaaatcacatgcggttcaagtgctaaaaaataatcatcaacaaggatgacacatgtagtgatagcgtaaactaagctaaaggacactaacaattataagaataagaatttatcttcctttattcattatcaaagctacatttatagatgattgtattcgatagtaactacccatcaatggtcagttagtgctgaaatgcaatatctaatttttggaataatctctaggtggtgtacaaacttcncaaacta

SEQ ID NO: 78761 - DNA, 366 bp, Glycine max
acaaaaccgcaagtgtgttcatggcatgaaaacaccaggctcaaccttcggacaggagcctaatgtactaaagataccccctcgcgccaggcacatgaaacaaataagacaaccgccattataggcccaagttccacctaagccaattgtcgccccacgtattaaactaaacctttaaccaggtcgaacctatactcactccgtataaatatcagaagagaactttaggatgtcaagatgacccaccaacgaattgcatgacaagacacataattaggtgcaaattacacttaactcttacaaccaatgaaggacgaactctgcaggtcaagcgacctatccactgattggttaggaaagaccttc

SEQ ID NO: 78762 - DNA, 439 bp, Glycine max
  unsure (1)..(439): unsure at all n locations
tctccttcttttccctataaataggggaaggagggaagaacatattgttcaaccctcctggtatcagagaatacttaaattatgagaaaattgttccggagaaaatcagccgagcgcttcataacgcttncgagacattntcgtgggtgatttcgcgaggattttccgccgntcttcatcgttcttcgttcgttcttcgacgttcttctgtcttcaaccggtaagttcccgaaatcgaacttttcaattcattctatgtacccttagtagtcctcatttgtttcacgtgtttttatttttatttcatttactttccgtacccncttttgacgtgctttaatcatttatttaagtcattntctcgcctaatcaaaaataaaaataaattccaccgatcatttgtagtgtaacatcttttaatttctgttaaaatgaaatc

SEQ ID NO: 78763 - DNA, 406 bp, Glycine max
aaacactgcgctgcagctaaacgctaaacagtattggagattattatgaatttctcatagagaagggcttggagcctgactccccacaacattgctcatgtaagtaacatggagatgatggagagagcgtacacagacctggaatgctgacgcaattaggaacttaggagtgaattatgctaacaaagaacatggaaagtgccctatttgcctcaataaatgaggtgaaaaactcggaaaaacttcatattcctacaattggagttgaagtcaatgcttgcatcttattatatccctgcctatgtctacaaagctctacctatgaaggaagtgcagtaagctaccacaatggatttgacaactcaaagatctgctacattcaaatatacataaccttggcaggaaa

SEQ ID NO: 78764 - DNA, 446 bp, Glycine max
  unsure (1)..(446): unsure at all n locations
actagatgccttggttaacctggtaacccaactggttatgtttaaaaaatctgcacctatcgccagattctatggtttatctgaagcttatgctgcaaacatctacaatagacctcctcaacctcaacaacaaaatcagccacaagagaataattatgacctctctagcaacaggtacaatcccaggtggaggaatcatcccaaccttagatggtcgaatccttcacaacagcaacaacaataacaaccttattttcagaatgctgctggcccaagcagaccatacgctcctccaccaatccagcagcaacaacagcaacagccccagaaacaacaaacagttgaggctcattcgcaaccttcccttgaagaacttgtgagccaaatgactatgcaaaacatgcagtttcaacaagagaccagagcctncattcagagctttaact

SEQ ID NO: 78765 - DNA, 372 bp, Glycine max
aataacacggggaaagcgatgcctgatgcgggaaattactatcaaaaagaaatatatgcagaaagagtgatggaattcaaagactcatccactaaattcagatgaattggcggaataaacaaaaaaatattacctgcaagaatcggcgttcttcaagccattgtttgacaggcatcactttatcattggcatctttccattcatttgcaaccacaacagctactctgtttgctttaccttggcacgggccaactccctgtctagagtatttctttcttcctaaagaatgtcaaataaaccatgcaaaaataaatatgatcttaactagagtcactataatgaagaataaagcacatgggaggttgacatgct

SEQ ID NO: 78766 - DNA, 388 bp, Glycine max
acaaaatcacagctgcaacttggccctttaaatttatcaacaatcaactgagggacgacttccagaattgttgaaatctactgactcattactgtttcttgatttcagcaacaataagttgtcagggaagatccctacatccctaagaattcttgttaagttggaagccttggttttacgaaacaatagtttgatgggtgaattgccttccactttgaagaattgcagcaatttaattatgttggatgtgggtgaaaatagattgtctggtccaataccatcatggattggagaaaatatgcaaccactgataatcttgagcatgcgagtgaatcacttcactggaaatctttcttttcaactctgttatttgaagcatattcaattg

SEQ ID NO: 78767 - DNA, 461 bp, Glycine max
  unsure (1)..(461): unsure at all n locations
tctgaactntnggctaagtgaggagagagaacgtggctttttagtttataagaccttcctttttttttttaaaagggtatgccacatgtctccttttgagtggagcaaaaagggcccactttttctcttgatgtgacatatactcagtcacaagaagagaaaaatctgaccttttgtaatgctaaaattctgcctcggtttgcgtgtcatttctctagttccagtccctcgcatttctctgcactcgtcggggcccattttcgaaagtaagcaatatatatatcaaaacgctcagaatgaaaccccgagcgtggtttagaggttggttttgttaaattttaagttgcacacaaaacgataatttttagactaattaattgagaattaacctataaatatccagttatggatttctcttcgttaattagcctaacccgcgtatctttcccccaatataccta

SEQ ID NO: 78768 - DNA, 418 bp, Glycine max
  unsure (1)..(418): unsure at all n locations
agctngaaggcatgtaacccaccatcttctcatattagaacattggtaacgtgtctactatcattgttatcatctccctctccatcatcgggggcgctacttgatctaccagatccctccaccattgggtgtattctttgaaagattcatgctccctcttaaacatgttatgtagctacactctatctggagtcatatgagaattgaactcatactacctaatgaaggaaaccattaggtctttccaggaacggacctgggaaggctctagattggtgtaccaggtgatggatgccccaataagactttattggaagaaatgcatcaaaattttttcatcttaggcatatgcccccattttcttgcagtacatcttcaagtgattcttggggcaagtagtccccttgtacttatcaaa

SEQ ID NO: 78769 - DNA, 443 bp, Glycine max
ccttctggtcctcctcatagttgttgcatgagaaatcatgctctattttcatctcccactccaagtaggcctccggttcattctttcctttaaatggaggaatgttgagtttaataccatcaattcgggtttgtctaggaacaccatcattccctcttctcctcctttcttcttcattatgatctctattctccatttgatccaacctctcatggagcgcatcatctcgttgtttcattaacctctccaaatgttgcatcaaagcttgcatttggaattgcgaaagccccactccatcattaggattagtacctgacatctcaaacaaacaaatcaaacgtaacaagacaattatagttgctggttgaatacctcacccactcaagtgtatcacacaattatggcttttctctaatgaaacactcttgccttttaccactcta

SEQ ID NO: 78770 - DNA, 415 bp, Glycine max
agcttctttggaccttgaacaggcaactaactcctctttcaaaaccatgctatgtgctcgcgactggtccctttcttcctttcgcaacttgagttcactattgctaccccatagagctccgcgaaatttgttccggccatactcttccttgcgagccctcttggtctcttgttcaagggctcttgcggtaattgcattctcttcccgtaacccggcacactccttccgaacgtgtgtagcggccaacttgaacttctccttggcaagttttgcctttcctaactcgcttttgagagcttggacttcttcgtcctcttccggtgcttcaaaactctctttgctgacgacttttaacttggcgagccaatctaaacctcgtatatgaactttcagccattcgtggtacccaccaatg

SEQ ID NO: 78771 - DNA, 376 bp, Glycine max
  unsure (1)..(376): unsure at all n locations
atngcccgaccgccacctagtacgacatgttattgtatcccataatcctacaagcttgagatgaggaagtgttgaagggtgaaacttcctgcttttattgatgaccacagagtggtacctggagatatgtcgcgggggtcaggagaccttgtggacgacaggtggggtgctattgcccaaaaccaagcttgaccaatcccgacccaacccgggcatagtcggtcagtgagaacatgtgacgtacctaagcaggcgagctcctggcagtcaacagataaaaggaaaacaagaccacagagcaaggaggcttgtggtggctggccagctgtgaatattgtgtaatatgtggattgtggcctctggtaatcgattacca

SEQ ID NO: 78772 - DNA, 409 bp, Glycine max
agcttcaattgaaggcattgccttaacatttgttttatatctttcttgagaatgatggcaacaaacccgtgattattagtggctctatctttcctatggaggaagaaaaattaattgatgttttgaaggccaacaaagaagtaattggatggtctatctctggtcttaaggagattagcccatcctactgcatgcataagattcacatggagtaagactttaagtcgatcactcaacctcaaaggcagctcaatcctatcatgaagaaggaggtgagaaaagaagtgctcaagattttggaagtcaatatgatttatccaatcttggataacttatgggttagctcagtccaagtggttcccaagaaaggaggcatgatgattgtctgcaataccaagaatgagttaat

SEQ ID NO: 78773 - DNA, 410 bp, Glycine max
acccatcacatgtggcactctggtgtggtttggcgatggcgcacaacaagctttccacatccacaaattgcgcataaacccaccatcctctgttgcccacctccaattgagctcacatactcccacgtagcccatatcctcgtttctctcaacaccgggtccccatcaatcctcccaagcttccccaacatccaggtaaaacaacattcaaacagcacaaactatcacagccaagataacagggcaaaggcaaaaaactctgcccaacaccaaccaaaatcacaacttttctcacttaaagaccccagtaacaattccttcgttccagttcgttaaccggtggatcgactcgaaacttttactggaagtctctagtgcataagcctacatttttgaccgtgggatctact

SEQ ID NO: 78774 - DNA, 421 bp, Glycine max
  unsure (1)..(421): unsure at all n locations
agcttgtttccctttgaaaatcatcatagttcttttcccactgtaantaattgtctaaaaagaaattttaaaaataaaatgactacttttctatttgtttctgataaaagatattatgtcttgggtaattggggttatttttatattgtgcatgcatatctgatcttgtcctccaccactactaaaaaaaaagcccttctacatcggttctgatggcctttctacatcggctatgacgcgtggtggtagtcaatgtcgttgaaagcccttggcccttcaacatcagttgatgaccgtctttgaagggcatgcgtatgaagacgagcatggtgccagactcgtcttaaaaaggggactgttctacatctattgtgaaggtacaaccgatgtagaatgtgagtgttctacatcggctctgagg

SEQ ID NO: 78775 - DNA, 339 bp, Glycine max
  unsure (1)..(339): unsure at all n locations
gccctctcacatacgccacaccatacttggcattcatcagagggtcttcccctgcagtctcttgccctctcccccaccgtggatccctganaacgtttatgttcggagcccagaacgtcatccccgtcgcttgccccgcattgtacaccgccctcgcttccttcccaatagtcttcagcaacaatgcagtaacataacaccaacatgtcaataatgtaattcgataaagtcccacacccgagtaataaagagaagttgaagtgtatataaagctttgaggtgttggatgttagtgattatgcaactgaccttgctgatttggtaccagagggttgggtc

SEQ ID NO: 78776 - DNA, 407 bp, Glycine max
agctagaatctgaagctgaacacagccatctcattttccaagaaaatatgaaaaggaagaagctgcaacaagatccattatgcagaaaatgaactttaatgccaaaaaagtaattcaatacagtagaagatgtagtgctgtaggtgaaaagaaagggaccacacttgctgccagtaaacccaaattgaagaatattggatattaaccaaaccaagctctgggagcttgtttaaagccatacagggctctttttaacttgcagaccagagatctgtctgaggattcaaatcctggtggctgaaccatgtacacttcttcttctaggaaaccatttagaaaagcattatgaaatctgcttatttagtactgggggaggaattatcggaacagcagcaggatggagcatt

SEQ ID NO: 78777 - DNA, 443 bp, Glycine max
  unsure (1)..(443): unsure at all n locations
tcctgattcaccataaaccttgactatgtgttgtaatgtcaatccttaccctcggaagcaaaaaaagaatagaggggaaatttccaatcaaagaaaaagagaaggaaaatttccaatgaaagcaaaaaaagaaaagaaggaaaattccccaatcaaagagtgggagaaagcaaaaaaagaaaagaaggaaaattccccaatcaaagagtgggagaaagcaaaaagaaaagaaaggaaaattcccaatcaaagaatgggagaaagtaaaaaaggaagaagaagaaggaaagatagctcctgatcagggatcgaaggaaaaacagaagatatgtgcagagaggtctttggaccggacaatatctgaacaatacagaattgtcaccanatgaacaaaaaagaaggaaaggaaaccacgacctaaaatggtcttctccctttgatta

SEQ ID NO: 78778 - DNA, 254 bp, Glycine max
  unsure (1)..(254): unsure at all n locations
actggctatattaccttgctccaaggtccatcacgagctgngatgacctcaagagagtattcttagaaaaanaattcccttcttccaggaccacgaccatcataaaggatatttcaggtattagacaactcagtggagagagcctatatgaatactggtagagatttaaaaaattatgtgccagttgccctcaccactagatttcagagcaacttcttctccaatanttttatgaaggactcagcaacatggag

SEQ ID NO: 78779 - DNA, 387 bp, Glycine max
  unsure (1)..(387): unsure at all n locations
tttataactgcgctgcagcttgaccnaatctgactaccaaacctgtttatggagaagcatcttatctcggagcaacaagagaaagaaatttccatcaaggaaatggaaaaaaatttcatcaaaacagagaaaatatttctatcatagaaaaaagaacaagaatttcaatcaagagggtgaagaaaaaaaagaaggaattccacccagaatggaaaagtaaaaagaagaaagcttctgatctaaagataacagaagaaatgtgcagagaagtctttggaccggacaatatctgaacaatacagaattgtcaccaaatgaacgaaaaatgaatgaaaggaaaccacgacctataatggtcttcttcctttaattaccaaccaaaatccc

SEQ ID NO: 78780 - DNA, 305 bp, Glycine max
  unsure (1)..(305): unsure at all n locations
tgtaacccttaccggtttaaaaagctctatagttgggccctaggtttagaagtttcaatttgtaaagctttgtggtctttggttttgaatttataatacaaggatctttcttcatctgttcctggtctctacccattctcattcatttgcatgtttacttcttttcctaaaacggcagattcaatgacaagtcccccgaaggtactaatacctgtgacccgtctatcaacttcgagcaagaaatgaatcanacggaagatgaaggagatgaggatgtgggacttccttctgaactagaaagaatg

SEQ ID NO: 78781 - DNA, 310 bp, Glycine max
  unsure (1)..(310): unsure at all n locations
gacatctttntcttgagagattatgttcaaaagggagattgtgttctagaattcgttgatacaaagaatcagttagctgatatctttacaaaacctctccataaagaaacgttctttgctattagaagagaataggtcttttagatatcaatgatctagacaagtaggtaactcattgagctntgtcctccttatgttcaatatattggctttgagtgtagttgttagtgttattaatagtcatattaattggtggttggctcttaataattggccttgattacctttgcttgaaattataatagtaata

SEQ ID NO: 78782 - DNA, 368 bp, Glycine max
taatctctagcttctcaaggaaattttctcaaagaagctcctctaggaagttatctcataatatcttctcaaggaagctacctagtctataaataaaaacacgtcgaacactggtggtaactctgatgaatgagagtcttgtgagacatacttcaaagttacactaatctacctctttaattccctcaatttcgggctcccccctctctctttctctcgctctttcttttcctccattgaaacatcctctccaagcttcttatccaaacctcatcttggtggcgaagctccttcttccatggcgtattccctagtggatggcgcctcctctcacctctgctcctttgccttccgctgcatctacatgg

SEQ ID NO: 78783 - DNA, 453 bp, Glycine max
  unsure (1)..(453): unsure at all n locations
tgttcttgattntttctaagttcttaacaagctntgacaatattctttgtgctcatttaactatctctgggctnggtggccacgctcaacaaagtacttttgacacctactgtacgttgatttgaccaaggctgttatgggaatgttgcgacaatccttcaaaaccttattgatacattctaataggttggttgtcatgtggtcatatcaacgtccttctctatcataagccatcgtccatttttcctttgaaatgcgatcaatccatgttgctatggctggacttagttcacgaaatttttctaaattttgataaaaaaatgtgcttacaaggagtgtaggctgcataaaattagttatgaataacaattntaagtatatatggaagttaaataaacgtgaccatcanatatgaaatcttacccaacttcttcaacatttcttttttgttga

SEQ ID NO: 78784 - DNA, 422 bp, Glycine max
  unsure (1)..(422): unsure at all n locations
atgaggaagtgtagaagggtgaaacttcctgcttttattcgttgaccacagagtggtacctggagatatgtcgcgggggtcaggagaccttgnggacgtcaggtggggtgctattgcccaaaaccaagcttgaccaatcccgacccaacccgggcatagtcaatcagtgagaacctatgatgtacctaaacaggcgagctcttggcagtcaacagataaaagaaactaagaccgcaaagcaaggaggcttgtgtggtggctggccagctgtgaactttgattgatatgtgggttatggcctctggtaatcgataacaagggtgggtaatcgattacaaggcttaaaaatgaagacaggagattaagatggtctctggtaatcgattaccacggngtgtaatcgattaccaggcttagaaatg

SEQ ID NO: 78785 - DNA, 421 bp, Glycine max
  unsure (1)..(421): unsure at all n locations
agctaggagaggctagagtgaagtaatactaggttcttntngaagaggagaaggaaatacttgnattgtctctcccatgaccaagtgggtgtcatggatgagtgggttttgcttcccaagcactaggagaatcattctgtgggttaatcccacctgaagaggtgaaaaatacttagattgtttctctcatggtattgtggggagggagatgttgaagtccaacaattggttgtgagttgaaaaaattcaacatgttgttggttgtattagtggaaaatatcatcttgtaaggtgaggattggacatagtccacggttggggtgaaccagtatcaaaatccatgtgtggaatcctctcttcccttcttcctctttacattatgctatttgctttcatatcattgcctttgcatcagaacgtt

SEQ ID NO: 78786 - DNA, 436 bp, Glycine max
  unsure (1)..(436): unsure at all n locations
tgttatagtataaagcaacatagaaaaagcgattcgatgttatattcatataatcaccatacatctggtgtgccggagttatggaagtctgaaacacccagttggttgaattgtaacttgatgtccattccttttgtctacctaggaatacctattgggacaaatccgaggcggagtcagatgtgggatcccattataaaaaagtgtgagagggcattaactaagtggaagcaaagacacctgtcctttggggggagagtgactcatatccactcaatcctaaattctattcctatatactttntgtcttttttcacgatacctaagaaggtggaggacaagttagtcagctcgcaacgcagatttctatggtgaggaggtccagataacaacaagattgcatggatcaaatgggagacagcttgcctaccaaaag

SEQ ID NO: 78787 - DNA, 423 bp, Glycine max
  unsure (1)..(423): unsure at all n locations
agcntangacactntgcaagaagaagttccatatttgtagctcaactaaattatcaaatactggaagattaagaatagaagggtccatctcttccctaaaatcacccaatgacagaaattcaacaccacacagtccatggagaatgtctgaaacaaaatggttaacttaaaaatcgtattatacactgtcatataaaccttcgctttcacaatatttggccaatgattctccatgaagtctgagataaaatcataatcacaaccactctgtataacaaggccatagggccatttgcataggaagacttaacaagagagttacgcacaatcttcaactcacgatcacttcatttctgcttcaggtgaagcagttcaagggccaaagatcgattcgttcctaccatatgagaagcaggaatgcat

SEQ ID NO: 78788 - DNA, 440 bp, Glycine max
  unsure (1)..(440): unsure at all n locations
gtgtgaagaacggtctctgtttaagtggcaatttggtgatgttcgcaaacatgagttaaggttgttgataattatgtgcacgtttagagatccattcgatttgctacagcacattntatgaggcaaatctaatggccgttcggagaagcaaggggagatccattgacgaacgtttattcacagcctttccaacgggtttcaaaatgtgccctatatgattgttgagtaatgtgttagtgagtaatttattatcatgaaatttctatgagtttgttttagtggtaattgtatgggtccccaaagagactcaattgggacacgattttataaaactacaagacattgttgtcattcaattttctactaagttaagcatagagtctctataagcatcatcatcaacttagactatcatgctcagttggtggcaaacaattcac

SEQ ID NO: 78789 - DNA, 420 bp, Glycine max
  unsure (1)..(420): unsure at all n locations
agctatgaatntctagtcaaaaaaactcctcttacatattctaatactcatgcaccttttacattcaaaaccggaaacttagattcctaggcatgagtcatccttttggcactttagtctagcttttacaaactacccacacactcacaatgcgcacaatttatttcgcaagctaagttccacaaaatcatgcgcaaatgccattgaggcatttcaccgaacacttggtgggcgcatgtttaagcatgaaaatcaagggaatgggggcaatgtggcatgccccattatatcagaacacaccctaggcctaaggccattccctacaacccctcaattcaacaaaaacaagcaataattcaaggataaatccctcacgttttgagcaaatacatgcaacttaaagcacgaaaatatatcaat

SEQ ID NO: 78790 - DNA, 447 bp, Glycine max
  unsure (1)..(447): unsure at all n locations
actaagctattcttttaccagaattgctcggtcgtgggattattttttgtatcaaaatagtcgtcggtcagaaacatcaagagaatttatagatgcgaagtttgcttgttctcgatatggaacaaaacgagagtatgacaaatcatttaatcgaccacgtgcacgacagaacaagcaagattctgaaaattcaactggtcgaagatcttgttcaaagactgattgtaaagcaagcatgcatgtaaaaagaaggtcagatggaaaatgggttatacatagctntgtgaaggagcataatcatgagcttttaccagcccaagcagttagtgaacaaacaagacgaatgtatgctgcgatggctaggcagtttgccgaatacaaaaccgtgggtgggctcaagaatgagaagaatccatttgatanaggtcggaatntgggcctggagtc

SEQ ID NO: 78791 - DNA, 409 bp, Glycine max
agcttgctagcttgagagatagattaaggttgtattatttaaatgagaaaccaagttgggtgaaagtgaggcgcaaccattatattggacttgaaggggtttatatatgcacataagtgagaaaaactaattgatataagaaactagctagaagggaaattagaaaagtgatcgatatagctgtgattttgtgtttgtatgtggccacatgagagagagagcaatgatgacattggagtcatcatgattacaaagggcagcaatagatgagaggaaggaagaaaagaaaagagggggtgggaatggtgaagaagaaaaacgcttcttctctttgtttaatatcttggcctctttgattgcctagttagtctatcatgctcaaacttgggtagtgggtaacgtagagatg

SEQ ID NO: 78792 - DNA, 412 bp, Glycine max
agctatgtctttaatggaaaacctaatgttcttggtgtgatagtgatggataatgaaataccgttaaaaatctaatgaataacagtaagaatactttattttatactggttcactcaacctgagctacatccagatctcctttaccaactcgtatagggttctactaatcaaccttgattacaactagtattctttcatgtcacttctagcttataagtattctcaatgctactcctagcacacccaatagactccccctaaatctaagaacactcaagtattattttatcactaagccactttgggctttcacaaacaaaagtttgaggtagagtcaagattcttttacggcactcaaagagtggaattgcaataatgatcttatctatcactaatactttgtatacacaa

SEQ ID NO: 78793 - DNA, 399 bp, Glycine max
  unsure (1)..(399): unsure at all n locations
tcttcgccagtgaaaggatcaatgtgggttcgttatgaggcaaatttgatcatcctactaggacgactgagaaaattggggcaaatgaagagggtgagaaagagggagaaacccatgctgtgactgccattcttatacggccaagtttcccaccaacccaacaatgtcattactcagccaataacaaacctccttacccaccacccagttatccacaaaggtcatccctaaatcaaccacaaagcctgtctaccgcacttccaatgacgaagaccacctttagcacaaaccaaaaaacaccaacaaaaagggaatttgcagcaaaaagcctgtagggttcaccccaaattccgttgtcatatgctaaactngatcccatatccactcgataattcaatg

SEQ ID NO: 78794 - DNA, 418 bp, Glycine max
agctagtgaaatcaatggaatccaagaatccttttgacacaagtcgttcaattctattcttagaaatgtgacctaagcgtctgtgctataatactcctgagtttgtatcatcaattctaagcttagtaccatgcaatcttgcattaaaggattcaccataggaggctacagtatcaagtaaatgtagattatcattaagcaagagtgaaccagatccaacaatatctgaattaaaagacaacctgaacacattgtttccaaatgaacacaaataacctaatttgtccaaataagaaacagaaaccaaatttcgtctaaatgacggtacaacaaaagtgtctttcaaatccaaataaaaaacagtacataataaaaatctaaagtgccctatagctttcacttccaccgatttaccatc

SEQ ID NO: 78795 - DNA, 395 bp, Glycine max
gatcaacttgaaacttatgtgcttcaagtgagaagaaatgcttctttctccactcgtgaagatgttcaaagtttggctatgaagatggttcagactgagaaacatttggtatttccattggtttataaacttattgagctagctttgatattgccggtgtcgacagcatccgttgaaagagctttttcatcaatgaagattatcaagtctaaattgcgcaataagatcaacgatgtgtggttcaatgacttgatggtatgttacaccgagcgggagatattcaagtcgcttgatgatattgatattattcgaacattgaccgcaaagaagtctcgggaaggacactcgcctcgtaattttatttaacccgctattgtaagaatatgtttatctct

SEQ ID NO: 78796 - DNA, 402 bp, Glycine max
agctttgtgaccaccccaacatatacgctatctcattgcacattactcttgactggttccaacaataattcaaccaatttttcatcctccagtactgcaattctttgcatggtacatattgatgagttaattagaataatggtggaaaaggagtcttttgacattatattactactttcttcaagtaacaactgttctctatctgccagcttcaccttctcttttgcagtgtcaccattttcagatacatttgattccattttattgttagagacaatggaaaggaatgaatgtagccagggttcctcaacaggctggtaattctcagaaagaacattattagactggaaatccttgtcgttcgcaatcgccatgtcatcatttgtgtaaagtaattgatct

SEQ ID NO: 78797 - DNA, 454 bp, Glycine max
  unsure (1)..(454): unsure at all n locations
tagaaaaactaagcttatatgttgacgatcttctgttacaagaaagactttncattgnttattgagnnnaagaactcgacgatgttcgagtttgacatgactgatcttggcaaaatgaagtattttttgggtctcgaagtcttgcataaatcacgtggaatctttatctgtcaaaaaaagtaagctgaggagatgttacaacggtttgggatgaatcagagcaactcagttcaaactccaattgttcctggtcttaagatttgtaaggatgagggaagaaaacatgttgataaaatgtgcttcatgcaaatggtgggatcgcttacgtatctcacttcgactcgtccaaatgtgatagttgttgtaagcctcttaaacatgtatctggagcattccacccagctccatctacacctagcaaagaaggtactggggtatatacaacgaactactg

SEQ ID NO: 78798 - DNA, 331 bp, Glycine max
  unsure (1)..(331): unsure at all n locations
tcacccatggtggtatgggaatggtgcgacatccctttaaacctatgatccttcttggaggttggtgtcatggtggcctatcgacgtccttctctatcataagtcatcgtccattttttctttgaaatgcgatcaatccatgttgctatggctggactcagttgacgaaatttttctaaattttgatcaaaaatgtgcttgcaatgagtgtaggctgcataaaactagttatgaataacaattttaagtatatatganagttaaataaacgtgaccatcaatttattatatcttacccaatttcttcaacatttctttttgtttgacatta

SEQ ID NO: 78799 - DNA, 366 bp, Glycine max
  unsure (1)..(366): unsure at all n locations
aaaaaagggggagagggaaattttccattcaaagaggaggaaaaaagggagaaaaggaaaattcccattcaagggaaaaaaagagaggaaaggaatttcccatcaaaagtggaaaagcaaaagaatagaaaaatnattccaatcatagaatgggagaaagaaaaaagagaagaagatagggaagaaagttcccgatcaacaaaaaataatatgcagaaaggtctttggaccggacaatatctgaacaatacagaattgtcaccaaatgaataaaaagaagganagggaaccatgacctanaatggtcttccccctttagttgccaggcaaaatcttgtgcgctagncaacctttttcgccccgcac

SEQ ID NO: 78800 - DNA, 380 bp, Glycine max
  unsure (1)..(380): unsure at all n locations
aaaagagggagagaagtggacctttgaagtgattctcattagaactttcattcatcaaaggtacaacaagtgttactcatgcttctatttatagactangtagcttccttgagaagctntctaaagaaaacttccttgagaagcttctttgagaaaacttccttgagaagctagagcttagctacacacactcatctagaaactaagctcacctccttgagaagcttccttgagaagctggagcttagctacacacacccatctaaaaactaagctcacctccttgacaaaccttanggtccgtgggaaccccttgatcactatttaaaaaaaatacgacanacctaaggtgtcccatattcctacggcgtacctttctc

SEQ ID NO: 78801 - DNA, 443 bp, Glycine max
  unsure (1)..(443): unsure at all n locations
gtgcaatacctttctttntcttatcattctcttcatattgattcaatctcattaattacatttcatgtacctgtgactntccaaacatagtagcatgagacatattagaaagatccctaaatataattacatctcagaactntattaataagatcctcatttggaaatgtctttcctaaagatgcaagatgatttactatgtgtgtaaatctcttttgcatgtcctgtatagtttcattaggattcattttaaataattcatattcatgagttaaggtgtttatcctagaccttttcacatctattgttgcttcatgagttacttgtaaggtatcccacatatcttttgcacttttgcaatttgacaccctaaagtattcatccattcctaatgcagatgtaattatattttttgcttttagaatatattgtactaacttcat

SEQ ID NO: 78802 - DNA, 425 bp, Glycine max
  unsure (1)..(425): unsure at all n locations
cacgtattattagctaagtgctaatcaagagcgtttattcttcaaatcaacagcgtctagggtcagtttcttttagaataacaaatctaaaaaaatacgtgatttacatctagcatgtagatcaattactggcagaattattctaatgtaattattaactttagatctaagtcttctatatatatagacgtattcaataattaaaagattaatttttatcatctcacacgtgatcatatgcaatttaaataggactgtgtctagtcgcatgtaatatatacattttgttagcgtctgatcattttgaaatattgcaacagacacatacaaatctttttttaacatataacaacctctattatttatcacaatagatgattctttgattaaaaaacctcnacgaccttttgttatgcattaatacg

SEQ ID NO: 78803 - DNA, 406 bp, Glycine max
agcttaagctgggcttagtgacgcacgattcttctatcgccaatctcttacggtttttgaattcttggaaatgcgcttagcgcacctattgcgctaagcctgaactactcactgttagttgaagtttgatggtatgctaagcctcacatctcaagctaagcgcatattgtagaaaatttttgtgttgcagaaagtgctaagcgcagcctgctacgctaagccccagatgctcactagaccttacaacttcaagttcgacttaacgagaggctatgctaagcgcttgggttttaaactcaaacatcatgtgggcatgctaagtgcagttgtgcactatatgcgacatacgaatttcattttttaaaaaaaccaaaggctgaggcacttgggtgttaccccaaatacc

SEQ ID NO: 78804 - DNA, 445 bp, Glycine max
  unsure (1)..(445): unsure at all n locations
actcagcttccagnttggagagctnatccttattggtcttcttgttgtacttgatgtaaatacctgtagatctatctaattatgttttgtgtgttcactgtgctatcagaacttcattctgccatgcttttgccttgatcacatagatgcatgtgttgttaggatcattcaacagtggaaactggtctgattcttagaacttgataggacggggctagtttatcgtattatcacgagggatcggggtacggtaacctagttgttgtatgtttgtcttaatgcggttatggtcaagtttagtccaacaagaggaatctgaggacgatgcttgatcaggattaggctagactatcacgagaaatcggggtttagcatttcaggagacaccatattacacatgagcattgttaagtagagaatatccttttaacatcagacacctata

SEQ ID NO: 78805 - DNA, 420 bp, Glycine max
  unsure (1)..(420): unsure at all n locations
agctatcctaccaagctntcttctcacttgtatattaataccattgttgttattcaataaagctgagtcgttgattttgatcatttatcattttcattgctcgtttatttcctctcatggtcgcgcataccttcaacatggtatcagagctcttcctgtgaagatctctgttgtgcactcgctttccttttcngttttcttgcaacttcattcattcgtcataagtgaaacaacacttagcaacacagaaagctttttgtatctgcatccgagcgagaatctagccattgctctcgtctctccaattttggattcaaccaactatcattcatggagcagatccatgatcacggcgttaagtgccaagaacaaggtagaatttgaagatggaagcacatcgaagccatttgaaactgatag

SEQ ID NO: 78806 - DNA, 395 bp, Glycine max
tttctaaaggctgttacaaaacatttaattcttctggtaatcgattacaagccttgtgtaatcgattacaggcttaacatttaaattcatattttttaagagcatttcagaaattattttggccactggtaattgattacagcctctggtaatcgattaccagagagtaagtttcatatttatgaaatctcaatacttttggaaaatatcctttggccaaacctgtgcatcatcaattaagaaacttttccttagattctaggaactaagttcatcaattatcttgaatttttggattcttgacttggatcaaacgtgcgaagcgcttatctttggcatcatcaaaacttcataaaacttcatatcatatttgcttctacagatcgaacttcaat

SEQ ID NO: 78807 - DNA, 441 bp, Glycine max
  unsure (1)..(441): unsure at all n locations
ttgaacaacggaagctctcgagaaaatcgagtgtgttatttattntcacacagatgtccgattcggggaaataatatatcgagacgcacgaaattgaacaacggaagctctcgagaaaattgaatggtcataacatttcactcggatgttcgatccggggacataatttatcgagacgctcgaaattgaacaaccgaagctctcgacaaattagaatggtcgtaacttttcacgcgaatgttcgattcggggacataactcatctagacgctcgaaattgaacaacggaagctctcgagaaatttgaatggtcataagttttcacacggatgtcccgattctggaacataatatatcaagacaatcgaaattgaacaacggaagctctcgagaaatcgaatggtataacgttcacacagatgtcgattcgggacataacta

SEQ ID NO: 78808 - DNA, 411 bp, Glycine max
  unsure (1)..(411): unsure at all n locations
agctagtangattatggggtacccatcacacgtgtttctatgtggaggncggaccatggtgcacaacatgttttccacatccacaatgcgcgcataaacccaacattctctgttgcccacctccaactgagctcacataatcccacgtaacccatatcctcgtatatctcaacaccgggtccccaacaatcctcccgagcttcgccaacatccaagcgaaacaacattcaaacagcacaagctatcacagccaagcaaaacagggcaaaggcagaaaactctgctcaaacaccaaccaaaatcacagctcttttcacttaaagaccccaataacaattccttcgatctaattcgttaaccggtggatcgactccaaaaatttactggaagtctataaggcataagcctaca

SEQ ID NO: 78809 - DNA, 368 bp, Glycine max
ttaccagaggccagaatcgatcaccacaagcaaaaaagaatttagtagctatcagaaaaagttcgaattcgaaatctaaaagaagtaatcgctaccactattgataatcaacaccaagaacggaaaatttcgaaattcaaactgaataggcataactccttaaaattaactgcgtaaccgattaccacatatccgtaatcgattactagtaaagaaattttgaaaataactatgaaaagtcacaatacctcacaagcgtttgacaggtcaccaaaggcctataaatatgtgacccgtattcaaaatctctaaagttttaaaacattcattgcccaccctctacaagaaaaacttcagccaacacttgc

SEQ ID NO: 78810 - DNA, 413 bp, Glycine max
  unsure (1)..(413): unsure at all n locations
agctatgaatcttcaaaactctacaaagaattattcaagacctatcatgataaaaagttgttgaagaaagacttcaaaccgggacaacaggtgctactttttaattcaagatttaaattatttcctagtaagctgaaatccaaaatggtctggaccctttgtcatcaacaaagttcgatcttatggtgcaatagagctatatgacccacaatctcaggaccctgatagagcatgggtagtaaatggccagtggttgaaactgtaacatggtgaagagtttaacaggcacacaacaccttacattttatcaaccattgaggtaaaagcatcaagctaatgacgttaaagaagcgcttcttgggaggcaacacagntctaatttcttttattctgtttttaatacattccataat

SEQ ID NO: 78811 - DNA, 421 bp, Glycine max
  unsure (1)..(421): unsure at all n locations
tatctaatttctaatacgaagcatgtgacttgctttctgttnctcngggggttagttcttgtcccttgtgatgaactatacggtttttagcctactttatttagaaaactagttcaacttggtttaatgctttgactgaaaattatgtaagatgcatatgtttctaccgaaagtaaagcttgatttgatttggtctgaacctctgatttaaccacagagcaatgctgtctgacatttctgttgatctgaacctggttttaagcaaatgccctatgtaattcgtgtattagacatatatcaataggttcttctactattttgtgtaattcctataatggatgatattttagtttgttagttagtgcattaatggttataactctatgcaacgcttctttaactntcttttatgcttgattgt

SEQ ID NO: 78812 - DNA, 375 bp, Glycine max
ttatgctggagatgttgaagcactacttactgtttatttattttgcaagcgagctcgtgacacagcttatacactaggagcgataacatgcagtccttatgaacccttaccgcccactctgtcgtcttggcgagactcacgagagtcaatacgctagcctcttcaacgtactctgaataaaaatcaatggcttcttctgcaacgtacctttcaacaatagatgctcccacacgatgtagattcttggtatacccttttcagatcttcatgtatcgctcaaccacgtacatctagcgcaaatggatacgaccacagcatctaatttctctgacctgatgaacaatcaactgaatcatggtgtcaaacatagtatga

SEQ ID NO: 78813 - DNA, 419 bp, Glycine max
  unsure (1)..(419): unsure at all n locations
agcttanagctactttgctgaacagcacgttcttgtttgggataagagaagccagtacccgcaggcagatccccaaatataatgctacttacctgatcatcatcataactttaagcaattaggcttaaaatttgaataaaaagaattagctgcaacaaataaaatcaatctattatatcaacctttgtccatgattggggcttcaaggtcaaattaagtaggctcccattgttagtcttaggtaggctccccatgcatatgcttaatctgttttgacaatatttataatataatattatttttcctgaaaaaaaatgtattcaacaggatttattagatataacaaagtattttaataaatgtgttcaaagactaacaaactctctaggatattactttaaacattttttattattagg

SEQ ID NO: 78814 - DNA, 387 bp, Glycine max
acacaacaccaacaccctttttgcacacacggtgagttgaaaaggggccctatactcatgccatgggaacataaggagtggaggtgaatctatggtcatgctgggtctccgacttgcttgataacagtgaaccctcatctagagtttttctctttgataacatattgttgctggtagtccctactgtcgtaatatgtttgtcgaaggggatgatacctctagaaaccatcaagagagatatgaccaccttgggaattatcactaaaagccttttagttcctcctggttaagtccctaaaataggggcacaaagcgaacacgctgcgtgattttacatactggcatgcatataaatgtcatgtacacgtctgttgtatggttatttgg

SEQ ID NO: 78815 - DNA, 392 bp, Glycine max
  unsure (1)..(392): unsure at all n locations
tccaaattaaaccctacagtacagaaaacaatcttttattaagatccttaagacaagaaaattcttcctttaaagcacaaccattgcacaatgcataacactangttcccatttggagctatggtctctttttatcatgtcttcataatatctacagctgaacaccctttactcggtatctcacaaaattatacacatgtatatatgctagtgcaagtgtgttcatactccatacttacattagtctgcagcaggttcctttgttcattgtttgtagataggaatacgatatccgatatcatccattatcattgaacagattttgcgtaagttttaaatttttaattgaaagtaaaggggactntatcagaggctaaatntttaattgaaag

SEQ ID NO: 78816 - DNA, 335 bp, Glycine max
catgaaacccactcacttgctcatagccttagcctcccctcatgaatgcataaatcttcaaaacttacatattgaaatctgttgatggctccaagagggaaattgcttccaccctcctgaaggctctagaagagcagaagtaaacttcactttctttgcagtaatgaacttataaagaataggtacatggatctattttggtgcataatttgttttggcattatcatcaaatttggcaccaacatctggtggcttggaagccctttgcactcttcaagtaataaccccacatcatcaatttgggaccaacatctgttggctttggaagctctcta

SEQ ID NO: 78817 - DNA, 243 bp, Glycine max
caacagcaacaaccctagaaacagccaacagttgaggcccctacacaaccttacctcgaagaacttgtgaggcacatgactatgcagaacatgcagtttcagcaagagaccagagcctccattcagagcttaaccaattagatgggacaattggctacccaattgaatcaacaacagtcccagaattctgacaagctgccttctcaagctgtccaaaatcccaaaaatgtcagtgccatttca

SEQ ID NO: 78818 - DNA, 436 bp, Glycine max
  unsure (1)..(436): unsure at all n locations
tactagcttgggaaatcaacgacataactntgactcgatgtccgatgtgtccgtagtatctcgagacgctcaaatntcaaaacagaagctatatgaaaaatctatggacgaataacttntacacggatgttccattgagtcccatcatatgtcgagttgttcgaaattgaaaactgaagctctgagagaaatcaaacgacaataactntntactcggatgtccgattgagtcccgtaatatatggagacgctcgtaattgaaaacaaaagctctgaagaaattcaaatgacaattacttttgactcagatgtctaactgtgtcccgtagtatatcgagacgctcgaattgaaaacagaaactgtgagcagtttccaacgacaataactttttactcggatgtccgattgagtcgcgtaatatatcgagacgctcgt

SEQ ID NO: 78819 - DNA, 414 bp, Glycine max
tgcttgcgtcaccctttcaatagccgaagcttgaatactatatctgctatgaaaggtgactgagctccacagtactctcggatgacagccacaactgatgtaacgctccatttgtatctatgtagtgcctacggatcttcttcatcaatggattcctttgcttcttggaagatgaatggctgccgaatggagaaaagaaaagagaaaagagacgccacctccacgagaagatgattctagaagaagctcaccaccataggaagccatggattagagcttggaggaataatgagatgattgaatggagaaggagagaagagcaccaaattttgtgctctaaatgagctttgagatctgaggttaatatttcaatgatctaaggtgaaaaaaatgcacacacatgagctttattat

SEQ ID NO: 78820 - DNA, 322 bp, Glycine max
ttttttgtggaaactgctctttggaggaatggaaaaaggggaatgtgctgcttctgcaaatcagaattacctgtggaagaagattcacctgcacagaaattgtaggtaaatttttgtcatcacctttttctggaatagagtgaagtttggcaggttcatttgcagatgaggaaggtgctacgggttgaggtccttgacactgctttcccgacctcaatgaaatggcactgacatttttgggattttggacagcttgagaaggcagcttgtcagaattctgggactgggtgtgattcaattgggtagctaattgtcccatctg

SEQ ID NO: 78821 - DNA, 259 bp, Glycine max
cggacggataaatgactcaaacggacaacacggtatgatttttttcctcgtgctgttatattccaaaccacgtagatatataatgtcagggaccattgccttaaaaaggtgtacaggaccttatccaactataaatatcatattgtggaaactgaatgatacggaaactatcctaattaactctatttatacatgaagggacatattataatgggacacccttgcattatatttgatgctaccacattcctacctaaat

SEQ ID NO: 78822 - DNA, 428 bp, Glycine max
  unsure (1)..(428): unsure at all n locations
tctttcaaaacctcttcccttacatcttccgccaagtcaacatgatgtggctcaacaggcgcaggcacaacattaatactctgcaactacctacaaaagtaatttaattcccattattattattcatattcttaatttcttatagtactttttaatatggcacggtgtgaaatgaaatattcaaatgttgtttagtacaacgagacagcgaaggactagaaatatatttcctatatttgattattgcgcgtgctacacgtccaccgtgttccctagccacgttgaattctaactccattttcatcacatatgtaaccaaaccagaggagaaaaaaaattaaaaataattgtctttaactcttgaaaacttatatatataggtagataacanagttgtttaggacacataccanactcgcattctgttt

SEQ ID NO: 78823 - DNA, 423 bp, Glycine max
  unsure (1)..(423): unsure at all n locations
agctngcagacaaaaacactaagctacttcaagtcataaaattcaatgtttatatatatttttcaatcttgcaaaggtttccgtttctgaatttgtcgaagagacattttctccggtacacttcattgacaaaatattaaaaagtttctttatgcactatctttaaacaaggtcatttgaactcaaaagtttatgtagactcatagagtttcataaatttgactcataaacttaactagtaaattcgtaagagttcatttcatataaaaataataacaaaatatctataaataacagtaattaaatatttcaactatataattaagtaaaatagtaaatcataaatttcataataattaaataaccaagtctagtaatgtatcactactagataataacttgcagatgttacagtagtgatat

SEQ ID NO: 78824 - DNA, 448 bp, Glycine max
  unsure (1)..(448): unsure at all n locations
acccccttatggtggacttttgcatgagatntttaaaatacaattctcaatgttctcgaccatgtggccacctttggagaccacctttgtcctttgcactccatactaagatgtacaattaaagaaatcagattttctgtacacacatttgcattgaacatcaacacaaggtttcctcttcccaacatcatcaaagatgccctgaaaaaacaatataaaacagaaattcacgtaagagaaatagtcaaatgcagtggttaggtccagtgaagaaggcacataatatgcacacaggtatgtatatattatatcaatcactagcataattttttatggttggatggaatgaagatcatcacattctctaccacgtgacctcagtacagaattccaaccatttggcagtattatagagatgaaaatgaacaatacagaanatatgctctat

SEQ ID NO: 78825 - DNA, 408 bp, Glycine max
  unsure (1)..(408): unsure at all n locations
agcttgtagcatattcgaacaacaataactnttctctcggaagtctgattgagtcgcgtaatatatcgtgacgctcgaattntaaaaccgaagctcgtagcatattcgaacgacaataacatttcactcggaagtcctattgagtcccgtaatatatcgagacgctcgaattttaaaaccgaagctcgtagcaaattcgaacgacaataacatttcactcggaagtctgattgagtcccgtaatatatcgagacgctcgaattttaaaaccgaagctcgtagcaaagtcgaacgacaataacatttcactcggaagtccgattgagtcccgtaatatatcgagacgctcgaattttaaaaccgaagctcgtagcacattcgaacgacaataacatttcactcggaagt

SEQ ID NO: 78826 - DNA, 414 bp, Glycine max
  unsure (1)..(414): unsure at all n locations
ttagcgttagaatatacgggactttattgtcttncgagtganaagttattgtcgttagaattagctgcgagcttcggttttaaatttcgagcgtctcgatatattacgggactcaatcggacttccgagtgaaatgttattgtcgttcgaatatgctacgagcttcggttttaaatttcgagcgtctcgatatgttacgggactcaatcggacttccgagtgaaatgttattgtcgttagcatttgctgcgagcttcggttttaaaattcgagcgtcccgatatattacgggactcaatcagacttccgagtgaaatgttattgtcgttagcatttgctgcgagcttcngttttaaatattgagcgtcttgatatattacgggactcaatcggacttccgagtgaaatgttatt

SEQ ID NO: 78827 - DNA, 409 bp, Glycine max
agcttcgacattcaatttcgagcgtctcgatatatgacgggactcaatcagacatccgagtaaaaagatattgtcgtttgaattggctcagagcttctacattctatttcgagcgtctcgatatgttacgggactcaatcagacatccgagtaaaaagttattgttgtttgagttggctcagagcttcgacattcaatttcaagcgtctcgatatatgacgggactcaatcagacatccgagtaaaaagatattgtcgtcttaattggctcaaagcttcgacattcaatttcaagcgtctcgatatatgacgggactcaatcaaacatccgagtaaaaagatattgtcctcttaattggctcagagcttctacattcaatttcgagcgtctcgatatatgacgggactc

SEQ ID NO: 78828 - DNA, 326 bp, Glycine max
aaatgaacggagaagcgtcgagcgaatacacacgacaataatgtgttactcggatgtctgattgagtaccgtaatatatcgagacgctcgaaatcgaatgtagaacctctgagccaattcaaacgagcataactgtatactcggatgtctgatggagtcacgcaatatatcgagatgctcggaatagaatgtggaaggctttgagacaattcacacgacaataagctatgactcggatgtctgattgagagccagaatatatcgagacgctcaaaattgaatgttgaacgtctgagccaatacaaacgacaataactcgttactcg

SEQ ID NO: 78829 - DNA, 409 bp, Glycine max
agcttgcatcaatcatcagcaaacttagaatatcttatgatataaatagtataaatagcagaatacttttggaggctccaataattgtgtcatcagatttgttatcttttacttgaatggcctgagatgatactctgcaagtacccatattcaaatgtaaatgcattaaattatcaaagacatagaagataaaccccaaaccataattagaccataatgcaaagtgagagaaaacaaacatgggaaaaaatcactttttgagagcagagaaattaggtttggaaaaaattattgaccagagaagcatacaactcctgtcatcacaatataaaataggacattcatgttgagccaacataataagtgatttaatgattataataatacatataatcattataataataat

SEQ ID NO: 78830 - DNA, 218 bp, Glycine max
  unsure (1)..(218): unsure at all n locations
tcacagaggttcaggaaggacaaggcagccgttgatctattttcgctcccgagtatgacagacacctgtntatgagtgctgtacaccaccagcgcttatatgccatcatgggatggtcagatctccgggagcagacgcttccagctcatggacaaccagtgtgctgacttccaggatgaaatagggcgccggcggcggtgatccttggttactcccat

SEQ ID NO: 78831 - DNA, 418 bp, Glycine max
caagcttggagtttccaagtgccaattcgtcttcttctttagtccagtcttcttctggcttcaattcttcagtgggctttccttctgtgtccagcatcttgggatgttcccagcctttgatgacagctttccaggttctgctatccagtgatttgaggaaggccaccattcttgctttccagtattcatagttggttccatctaggattggtggtctgttcactggtcctccttctttctccatgttcatcagaatttatctccctagatctcactctgtgatttcgagtgttggctctgataccaattgaaattctgataccaggggacagatgtcgtaccggatgtcacgacatcacgcttcagaacatgcagattatatgtgtccgtatgaacagattaaacaagtaaataacac

SEQ ID NO: 78832 - DNA, 338 bp, Glycine max
ctaattatgtgggccgttaagtttattatatgctgacgacatccgagtagcccgtgaatctcttttgaggtggagtatgagtctgccattccattgtcctagtctaacaatagtagaagttcttgactcccgttcaatgtaagagcataccgatccatccatatgggtgcatcttggtgctaagagtctatcatccttgctttatactctatctcagcgatacttgggcatattcgtgcgcaatcctatgctttggggccgcggttagacctaactcttcttggtacctggcgatgatagctaacatgttggcttctgtctcgcatatacgctgagac

SEQ ID NO: 78833 - DNA, 414 bp, Glycine max
  unsure (1)..(414): unsure at all n locations
agcttaaagtatgcccgagtcattcatccctatgagatgttgntgaagtattggcgatcagaattgccattccttggattatagggttgaaccaagctcatgcttttacaagaaggttcaccaagtcaagttgaaatatggaagtaactatcttgcaaaaattggggcaaaagatgaatcgagtcacatcactgcttcgtctactgccaaacatatttaggattgttgatgtccttgttacttccagtttcaccttgacaaagatgtcatggaccatgttgaaaatctaaattgattcaaccccatatcctacgtaaaaattcacaatacttcaactgtacatcatttgcgtacatccatggttttcattggttgcattgctcattgcattctttccttgaaaaataaaataaa

SEQ ID NO: 78834 - DNA, 348 bp, Glycine max
ctgcggcctgcagctatttatatcaatgcattatgactttaacttgttaccatgcaagttcatactgaatctaacatctctttgttatagagaaccggctacctcactccagtgattaactaactttatgaaaacaccaatcatagttgtaaaatgaacacaggaggaccgcccaccaccaatgatgtgccttatcataaagcaccgcctagcgtatacgatacaagaactgcggaattctgttagcctgaagccatgttcaagatcacggggccagaataacaagattaaagctgattcaaactgctaattcacgcccacatgcgaaatgaagcgaaataagttcta

SEQ ID NO: 78835 - DNA, 368 bp, Glycine max
  unsure (1)..(368): unsure at all n locations
tgattctagaccaagtcaaaaacccgcaagcagatagcttggaaatttcagatggaattgctccagacaagcttattacttgaaaagatcaatcattctcaccaatatcagattgtctctgtacctctaactcttctccttgggaactaagacaagagtttccttgtagtggttataactgaagtcagagccatatgaataacttatagggttggcaaagaagtcatcttcaccagccattgtcttcatgtcatccaaactatttggaatggatcctgacaggctgttattgccaagatccagcactataagggaagaaaagtgacanatctcttgagtaatggctgccattgaaatgttggatctta

SEQ ID NO: 78836 - DNA, 370 bp, Glycine max
aatgattaaaaatattgaagatgagttcatgaatgctccaacgggtcatggcccttcatataggagcacctgcgcgcatcaaatatatttcacttactaaccaagataattaatacaatctgggcaaatattacaatatgaaatattttagacctcaaattgtatttcccattctatattacgttggctgatgaattgctttatagaaaaccatagtataaaaaatttgccattggctaatcactcacactgatatggctgaactaagaaatcaaataataaaatttgaaggttttgacaaacaaggaaactcaataaaatgaatgaattccgatgagcatgggggtcatgtctttcatcattagagaaa

SEQ ID NO: 78837 - DNA, 347 bp, Glycine max
  unsure (1)..(347): unsure at all n locations
gtctgacatactgcaactatctatgtgggggtcagtggaccaaacctgngtataagatctcaaatctgcttggatccataaaggatcaaaattggttttttcaagaaaaaggtcccatccttcattttattttgcgattttgacagcaccgcattttcttctgaacggtaacttccagctcccgtaccgtgttgttgcagatgatatttccgttactgaacgatttttaaaaccttgctacagaattagagagagctgaccggctttggaaaacagattgtacatacggatgcaactgttgtgctgtgtgcgttgaaaatggaaagattatatttatatagttggtg

SEQ ID NO: 78838 - DNA, 401 bp, Glycine max
  unsure (1)..(401): unsure at all n locations
tcttcttgatgttggatgttcccatatgcagatagggttgtagtggaaacctactacaattgtgcttctagatangatctaccccgctgganaacgtccgctcgtgaactcatacttggtgggtctccttcagcagataagcagggtgtttgatgcagtaagtttaaactcataccgttgcttctgtaaataatttcagcaaatatattatgttgtatataattgccattacttgataacatcatgttgatattgcattgtagaattgggccaaataagaatcttttcttttatcgaaaataataaataataatccttcttgcaggcctacaaggcactaatgaagacattcacagaacacaataaagtaagtacttctcattatgatttttcgcattact

SEQ ID NO: 78839 - DNA, 385 bp, Glycine max
  unsure (1)..(385): unsure at all n locations
tccacagctggtaatctaaaatacacatagtgatcatatngacttcttttgaactaaatgtgagacatgaattcgtcaaaccttttgttccactgcataggagaatggtttaggtcatagagtgaattcttaagtttgcagacataatcctctntgcctttcactataaatccttcaggctacttcatcaaaatagtttcctcaagctcactatacaaganagcagttttgacatccatctactctaattctagatcaagttctgctacctaggctaataacaatcttattgatttatgttttacgacaggtgagaaaaacctcattgtagtcaattcgttccttctgagtgaaacctcgagcaactaacctagcctcgaatctt

SEQ ID NO: 78840 - DNA, 454 bp, Glycine max
  unsure (1)..(454): unsure at all n locations
tatacatagaggaagttagttacaagtttaactaactatcaacatccataaccaactaccaactaccaactactttctaaccatagttgactctttaatgattgtcttctaacatggctaatactttattttcatcggtcaaacattacaaaaactagtttatgtaatataattatgttttaatgcattctaaaaactattttttgtaatgtattcaaacataactttattatgaaaaatatttttagtagtgttgaagcattgcccatgctttttataaatacaatatgaaatttttttttcaaaaaggctaaaatgtttttctttctcataaatataaaaatgtttagaattcgtttctgtaaaattnttaatatgtttttcgtcctcaataaattaaaatgtgtcacaattttgctaagacgtagattcggataaatttaaaattataatg

SEQ ID NO: 78841 - DNA, 416 bp, Glycine max
  unsure (1)..(416): unsure at all n locations
agcttgtgggaatttgagatagggattntgccttagatgttgatgatagaaaaagtactaccggatttgtatattttatgggtgattgtgcttttacatggagttctaagaagcaaggcattgtgacactttctacttgtgaagccgagtatgtagctgcaacttcttgcacatgtcatgccatttggctaagaagattgttggaggaacttcagttgttgcaaaaggaaagcacatagatctatgttgataatagatctgcacaagagcttgccaagaatctggtgttccatgaatgaagtaagcatatagatacaaggtatcatttcattagagagtgcattacaaagaaagaagttgaattgactcatgtgaaaactcaagatcaagttgcggatattttcaccaagcctctc

SEQ ID NO: 78842 - DNA, 458 bp, Glycine max
  unsure (1)..(458): unsure at all n locations
ntgtcattagcaaattgttcanacacatgtcttgtatgttttcttactaattggtcaaattaagtgttcaaacctctatttgcatgtacggttgaaaactatgtanggccttttgttaagaaggataaatcttcatatctaattctaatgccactatgtccaaatgtatcctttcacgactaatacaatttagtttatgttgtttcactcaattggatgggtaaggtgcgtgtaatcaattggatgggcatgtttgtgattcaccgatttctacttatctcatatggtatcagctntgaattcccatgcttataacagtgcttagattgtgtaggtatcagattagacaaatttgttttcaatatcaaaagaattcccatgaagtatctaagacatcttattttagaaatctatntatctntgtttcacctcgctaatccactctaagataaattata

SEQ ID NO: 78843 - DNA, 419 bp, Glycine max
  unsure (1)..(419): unsure at all n locations
agcttatgctntaaatatttacaattgacctcctcaatctcagcagcaaaatcaaccacaacagaacaattatgacctctccagcaacagatacaaccctggatggaggaatcaccctaatctcagatggtccagccctcagcaacaacaatagtagcctgctccttccttccaaaatgctgctggcccaagcagacaatacattcctccaccaatccaacaacagcaacaaccccagaaacaaccaatagttgaggcccctacacaaccttccctcgaagaacttgtgaggcaaatgactatgcaaaacatgcagtttcaacaagagaccagagcttccattcagagcttgactaatcagatgggacaattagctacacaattgaatcaacaacagtcccagaataacaagctacctt

SEQ ID NO: 78844 - DNA, 379 bp, Glycine max
caggaatacaatcaatgacaatgaagtattgtgtgtgggatgtgtttcgactgctaatatacttggcacttgatctatgaatgcacattttttctctagagtttggtttgatcactttaggtggtgggatattcattttgcacagtatcatgactctcctctaaacttctcacaattcatgggtttgccaagttgcaatgattagaatgacttactgtgataacaatttggtttgtagtgttttgggcaaaatggaagagtcgtagttttcttgtttttaaaaccataagaatgaagtttgatctaattatttaacggttaagatacatcattatcaattaattagtactatgttgttttttaccgtccctactcattt

SEQ ID NO: 78845 - DNA, 415 bp, Glycine max
agcttttcttatgccagaaggaatacattctgtttctgttgaatcccacaaaactaattcgtacccgtttgacaatgtccatgtgtctcacctaactcaataccactcaatcagaataaaaaaaaaaaaaggaatacatgtatcgcgttccttatgtgagtattgtaggtagtctcatgtatgcaatggtatgcacaagaccaaacctatcacaagtagtcagcatggtgagtaggtatatgggtaaacatgggaaagaacattgacaaattgtgaatcaatattcacgtaccttaagggtacaactgatattgaactgatctatcaagctgacacatcttgtgtttatgttggatattcaaattttgactacgctgtaaatttagatgcaagttgatcagtgatagggtatgta

SEQ ID NO: 78846 - DNA, 395 bp, Glycine max
  unsure (1)..(395): unsure at all n locations
ccctgagtaggaatcaccactaaaccgacgggaagggcaatgcaaacaacacatgcatgaagttgggcaacaatgaaaagaaaaagaaaataaaatccaccaaaggcgagtgaagaaaagagagacaaaagatctccagatttcacatggaagacacaaaaagtacaataaggattaatgcataagacaaaaggagtagagcccaacccaaaaggtacaagcaacgctcttgaggttcttactcaatgtaaaacttaaacactctttgagcctctctaatcctttctttcatagccctcttatccctgaccacgttacaagcccaataaagtccatgtggatcaaggaatgacntaatttgcttttaaagttggattctgggatggaacccacac

SEQ ID NO: 78847 - DNA, 419 bp, Glycine max
  unsure (1)..(419): unsure at all n locations
ctgcaagctttatttaanaccatgattcaactacattcataacgttgtgtcattttaagttctgtaaacttgaaaatatatgcatttcgagctaatcagactttccaaacaaccgagtaacataccacttactacaacttcccttgtgctaaagaacatggaagtattaattcaatatctattgaaaccttaaataaaaattatctcatattatacaatgtatttataaaaaatttaattttgccaatatgattaataaataaaatcaaacacattcctataatgaaatgtataaaaaattaaattaaatcaaagaatttccaaatattcttttattagagtttgtaaggatatatcaattaattaaaaaaataatgttgaatataactgcttatgtttatttatgtctacttaaaata

SEQ ID NO: 78848 - DNA, 353 bp, Glycine max
  unsure (1)..(353): unsure at all n locations
agctngcatgatttacatctccccctttctattcaaattcttcttgatatcatcaaaatcttcatgatcccgactcgttggtggaggatgcatgaatgacaatcaattcatggggctcccaataaaagttgagaatggaggatatgcgaacagcgctatgcaatcaattcgcggttctccccactcgttggtggaggatgaatgaatgacaatcaactcatggggctccgaattacagtggagaatggaggataggataataacgctatgcaatcaattcgcggggctgcagactccatggtggaggatgcatgaatgacaatcaactcataaggctcccaataaaaatggag

SEQ ID NO: 78849 - DNA, 410 bp, Glycine max
  unsure (1)..(410): unsure at all n locations
agctngccttgccccttgatatatttgagggactcatggtcactatgaatgacaaattccttgggataaaggtagtgttgtcatgttttcaaagcccgtactaaggcatacaactgcttatcataagttgaatagttaagggtaggaccacttaacttttcactaaaataagcaattggatggccttcttgcatgaacacaaccccaatcccaacatttaaagcatcacactcaatttcaaaagatttttgaaagtttggcaacgcaagtatgggggcattagttagcttttgcttaagaacattgaaagcttcttcttgtttctctccccatttgaaaccaacatttttcttgagcacttcattgagaggtgctgccagtgtgctaaaatccttcataaatcgtctata

SEQ ID NO: 78850 - DNA, 328 bp, Glycine max
  unsure (1)..(328): unsure at all n locations
ttacatgtactttccaagtgtattttgtacttacatcacacacatctncttggcttaatttacatacatgcatactcaaagcattttggggtaccaaaaattgcacatgtgcacatcttggtatttctaatacctatacatacacaaacttcatgatgaatcttgactatctacacaataaggtgctacatttcatgctcttttcaagtttttgctacctaaagtcgcatgcaaattcaagtatattntcctttgctgactaanattgtattcaaattaaaaggtatatattnttttgtaatgtatttcatgcaacatatttatatat

SEQ ID NO: 78851 - DNA, 408 bp, Glycine max
  unsure (1)..(408): unsure at all n locations
ccttcatatatcgagacgcttgaaattgaatggtggagctctgagcccatttcaacgaccataactttttactcggatggttgaatgagtcccggtatatatcgagaaccctcaaattgaatggtgaagctctgagccaattcaaacgacaataacgttntactcggatgtctgattgagttccgcaatatatcgagaccctcgaaattgaatgttgaatctccgagccaattcaaacgacaataactttttactcggatgtctgattgagtcccgtaatataacgagacgctcgaaattgaatgttgaacctctgagccaattcaaacgacaataactatttactcggatgtctgatngagtcccgtaatatatcgagaccctcgaaattgaatgttgaatctctga

SEQ ID NO: 78852 - DNA, 321 bp, Glycine max
  unsure (1)..(321): unsure at all n locations
tgtgcgacaatcctttaaaccttattgatacattctgagaggttcgttgtcatgtggccatatcgacgtccttctctatcgtcagccatcgtccattnttcctttgagatgcgatcaatccatgttgctatggctggactcagttcacgaaatttttctaaattttgatcaaaaatgtgcttgcatggagtgtaggctgcataaaattagttatgaataccaattttaagtataaatgaaagtaaaataaacgtgaccatcaaatatgaaatcttacccaatttcttcaacatttctttttgtttgcatttattgaatttc

SEQ ID NO: 78853 - DNA, 329 bp, Glycine max
cataaaccacagactctggcgacaggagaatattatttattcatggccaattgtggtaccaagttgaccaaggcatctagtttaccttcatacttctttatcttggctgatgaagatgaattcggggctacttcatgcactcctttaatgacaatagcataacttctggcactataatgctgggagattgaaaccatcttttcaattaaatttctggctttaacaggggtcatgtcttcaaaggctccaccactggcgagatctataatacttttctccatgttattgagttcttccttaaaaattggaggagaagctgttcaaaatct

SEQ ID NO: 78854 - DNA, 439 bp, Glycine max
  unsure (1)..(439): unsure at all n locations
atcatggaatcacactctcaaccataattcttccattcttntcctcagncattncaatgactacactaactcccatgagtttaccccctccatatcccaacataagcaataaagtagcctagaaaaattgcatgttgatttctaaaaattcctccacaaccaggagaaccaggactttgtctttagcataaccatttttgttacattaatttgatccacccatgtataggagggtacgagttcacctatttaatgtttatactttttcttggatgtccttcaatccccatagcctacaacatgatgaattcatattattttatgaatcanattaatcaaattaatcaatttgattggtttttctaaaactatcaatatatataggagaaattaaattatatcagtataactttgattaacagttacatcatttaataac

SEQ ID NO: 78855 - DNA, 430 bp, Glycine max
  unsure (1)..(430): unsure at all n locations
tccncaacattcaagtaattcaacaatcaaacaacatatactatcacagccaagaaaacagggcaaaggcagaaaactctgcccaaaacaccaaccaaaatcacagcttttctcacttaaagaccccagtaacaattccttcgttccaattcgttaaccgttggatcgactccaaaattttactggaagtctctagtacataagcctacattttgaccgttgggatctactagaaaacatctagaactcattctacattactctttccacaaccagcaaatacatgacattnttctgcacttatgcaaaattctgctgcacaatttcacagcanaattctgcataaagtgcagatttcgaaaaaccacactttctctcatccaatctttgccaaatcaaatcctacaagtcccaaatcatgtatcaatca

SEQ ID NO: 78856 - DNA, 421 bp, Glycine max
agctagtaggattatggggtacccatcacatgtggtactaggtggcggtcgggcgatggtgcacaacaagctttccacatccacaatgcgcgcataaacccaccatcccctgttgcccaccttcaactgagctcacgtactcccacgtagcccatatcctcgtttctctcaacaccgggtccccatcaatcctctcaagcctccacaacatccaagcaaaacaacattcaaacagcacaagctatcacagccaagcaaaacagagcaaaggcagaaaactctgcttaacacatcaaccaaaatcacagcttttctcacgtaaagaccacagtaacaattccttcgatccaattcgttaaccgttggatcgactccaaaatattactggaagtctatagtgcataagcctacatttggaccg

SEQ ID NO: 78857 - DNA, 445 bp, Glycine max
  unsure (1)..(445): unsure at all n locations
ctctgaattcgcgacattgcgcttagtgtcattctcgcgctcagcgcgagtaagtggatgtgagcttagcactagtcatgcactgagctttgctgaagacaactgctatgcataatgcactgatctaacgcttagcgtgcggccttggtattgatgctctgccaggttcttctgtcgcgctaaagctacgcttagtccactgatgagctaagctcaactgtcacttttagcacttcatgacttgtctcatttttacctgaaatttcatatatatcatcgtcaaatccaatggacatattctagagacagctgtaaccataaaacaaaatttattttagaaaaatcactacaaaataaccataaattanggaactatacaagttttggaaaatgttttctatacaaaagttagtcgtataagacgactaacaagctccattggagc

SEQ ID NO: 78858 - DNA, 417 bp, Glycine max
agcttctactgagtaaatataaaaactaaacaagatatatttacaatcctaccaaaaagaaccatagattgggagaaatatatacatttttgaaaacttttctatacaaaagttagtcataaaagacgactaacaatgccttactttggagtaactgaacaaatctaggagcttgattacagtgaatttagagtgcctgttgttagtcgtcttatacgtctaacttttgtatagaaaacttttacaaaatgtatatattttctccaatttatggttcttttcctaggattgtaaattaatttttctttgtttttatttgtactcagtagaagccttgtgtatggaattaatgtcaatttctcttcaatttcaggcaaaaatgagtttttttgaagaagtgctaaagttgatgtctcg

SEQ ID NO: 78859 - DNA, 402 bp, Glycine max
  unsure (1)..(402): unsure at all n locations
gtggtggtcggcagaggagcataaaccacagggtctggcgataggtgcagattttttattcaaggctagctgggttaccaggttaaccaaggcatctagtttaccttcaagcttcttagtctcagctgatgaagatgaattcgtggctacttcatgcactcctctaatgaaaatagcatcatttctggcactaaattgctgggagttggaagccatcttctcaattaaatttctggctttagcaggggtcatgtctccaagggctccaccactggcagcatctatcatacttctctccatgttactgagtccttcataaaaatattggaggagaagctgctcagaaatctggtggtgaaggcaactggcacatnagttttanatctcttccagtattcatat

SEQ ID NO: 78860 - DNA, 409 bp, Glycine max
  unsure (1)..(409): unsure at all n locations
agcttcttatccaaggctcatcttnggggtgtttctccttcttccatggcttattccctagtggatggcgcctcctctcacctcttctcctttgtcttccgcttcatctccatggtggaaaatcaccattaaaggacctcattgaagctcaaagatccagccttcatagaagccccacaagcaagcttccatcaaggggtaattagagcacaagagcttcaagtaggtgctccttaaacctccattattatttttttctttaccttctcttccattgttggttcttcattttttctccatgtatatcctcacatgtcttgtgctaaatgtggntaacatgattctttaaagtttccactgattaaacttgctatagaaggtagaattgattttctatggttcaaatttc

SEQ ID NO: 78861 - DNA, 254 bp, Glycine max
cggcacctatcgccagattctatggctggactgaagcgaaggctgcacacatctacaatagacctattcaacctcatcaacaatgtcagccacaagagaattattatgaccttttgagcaccagggacaacaccatgtggaggaatcatgcccaccttagatggccgaagccttcagaggagctacagcaataacaagcgtacattcagaatgctgctggcccaggcagaccatacgctgctccaccattccag

SEQ ID NO: 78862 - DNA, 414 bp, Glycine max
  unsure (1)..(414): unsure at all n locations
agcttcattcctttntcactcatgtgtccaagtctttgatgccacatggttgaattattgatagcctcagtaactgctaccatatcctcatctgcaatcatgtaaagagatcctcgcttctttccacgagccacagcgagattgccttttgttaccttccaagctccatctccaaaagtggtgtgatgtccctcatcatccaactgccctatagatattaaatttctctttaaggcaggaatatgtctgacattgtgcaatgtccataaggatccactggaggtcttgatgttgatatcacctcttccgacaatgtcaagagattttccatctgcaaggtaaacttttccaaatcttccagaaacatagttagacaataaatctttagagggagtagtgtgaaacgacacaccc

SEQ ID NO: 78863 - DNA, 310 bp, Glycine max
  unsure (1)..(310): unsure at all n locations
tatctctcttctaatttctccctactttatttcatcaattcatattaattagaagaagtactcaatttatagggttcacgctcaacacaatggcatatcaatttcacaacaagttggtctgtcacacatatataattcactggaataattatacagaataaatgaaatggcaaaaacaccccnaaacccagtccaattgatatctctaaggatccctacacatgttctcactagttcccaattgtgaataactcattccttacctctaagccggctcacgtgtcttcagcagcgatagcagatctctagc

SEQ ID NO: 78864 - DNA, 345 bp, Glycine max
  unsure (1)..(345): unsure at all n locations
ataaaagttgagatgttttactttgttccctttcatcaacaacagcactatgaaagggatttgaatttcctaaaggagcagcaagggtcatactcaaatttgtctgtgccaatgattcatatatatctcgcatttctgtttctgccttacagttctctgctttggaagccttagatgatccattagactcacaatgaaattgtgatatcaaagtgtttccaagttctccaactgaaggtaaaatttctggtttcatttctgcagaaggcccatcntgttcaacattatgaggtttgaaccagcaccgaagcccatcattctctgcataatgccctacttgcatac

SEQ ID NO: 78865 - DNA, 312 bp, Glycine max
  unsure (1)..(312): unsure at all n locations
agctaaaaatcaattgatcaagtgctattatattccacaacatanggggagtatgaaatgagtgaacataacattatatctcgcatatactctgcttgtatcttgaattcaggaattgagctgtcatcatcaaaaagggggagattgtaaaacacagactctgaccttgatgttntgatgatgccatatgattatgatgttttgatgccacatgaacatgcgcttcttaagttaagatcaagaccaaaattcaagagctcaagaagatctctattgatttagggaggaaattccaaattgaaatagcaaaag

SEQ ID NO: 78866 - DNA, 371 bp, Glycine max
  unsure (1)..(371): unsure at all n locations
atttgtatgtactttccaaggtgtactacctacaccacatgcatttccttngctaaaattacatacatgcatgctcaaagcctcttggctaccaaaagttgcacacatgcaaactttatgatgaatcttggctatctacacaataaggtgctacatttcatgctttattcaagtgtttttactacctanagccgcatgcaaattcaagtatattntcttttgcccgactaaaatgtattcaaaataaaagggtgttttggtaggtattttctttacataacatgcaacatatttatatatttttgtgagacattntgactaccaaaaattatatgtacatacatncaagtatttagctaccatatccaaag

SEQ ID NO: 78867 - DNA, 391 bp, Glycine max
  unsure (1)..(391): unsure at all n locations
gcgaccgagcagcagcngaaaaccgcaagggttattggaggccngaccncacaagcgaagcaagacagagaggggacgagcccaggccgaagacaccacaacaaacaggcccgccgccaaaaaagcagcaatcatagaaaaaaggccgaaccgaagacagatcatgacaagctcacaagaaccaaaggacaacaaacggaaggcaggcgaaacacggaaacccagacaaaacaataaacaggtggcacacacaacggaagagccaagaccacggagagcaaggactgagccgcccccacaacgcgccgaagaaacagcttcagaatctcatcgccaagcagaagacaagaaactgcgaccagagcaaagcagggcgcgcccaccacaaaga

SEQ ID NO: 78868 - DNA, 364 bp, Glycine max
  unsure (1)..(364): unsure at all n locations
ctacacacacccctcttataactaagctcaccttcttgagaaactttcttaagaagattcctaaagaagctagagcttagctacacatacctctctaatagctaagctcacctccttgagatgagaagctagagcttagctacacacctcctataatagctaagctcacccccatgacaaaaaacatgaagataaaaaaaaaagtccttattacaaagacaactcanaatgccccgaaatacaaggctaaaaccctatactactggaatggcaaaatacaaggcccagacgaaggaaatacctattctaatatttacaaagataagcgggctcatacttagcccatgggctcgaaatctaccct

SEQ ID NO: 78869 - DNA, 286 bp, Glycine max
acacaatgaattagcgcctcaaccaagaacattgatgccgcttcggaaaaggatgagaatggagggattccttgaggggcccttacttatgcaactcatggaacacagcttcaaactcataagtggaggacacatgaacagccctaagccataacattcatgtggctccggacaaggatgataatggaggattgccttgagggtcatctcttatgcattcatgaaacacaggctcaatctcataagtcgaggacacatgaatagcccatatctataacattcatgt

SEQ ID NO: 78870 - DNA, 335 bp, Glycine max
cgttgaccccacagttcatgttgagcacaactcttcttgcaccgtgggaaacaattcacgctgagcgcatttcttctgggtggaattgcacttagtgcacttttcgcgctaagatagatgtcaaacattggtatttttacaatcttaacggcaaatataggaataagtgcggtatgaaccaacactccaaatttgatgcgatccagtggttaacaaatcagggatcatagtttcaccgagacatgtgtaggtgaaaccttgaatctcatatttcaacctatgtcaataaaactctcatgactcaacatccacatcaagaagattacacatagctc

SEQ ID NO: 78871 - DNA, 407 bp, Glycine max
gagaatcatctagatatattttcttttggaagttctcttacgaggctatgcttttcagctttaagattacctcaagctagcatgaccaagcttctcatgccatgcccaatgatgctctttgactgagagtaagcatgacacttttttactggatagatcaccaagtttaatcttatagagatttccttgtctcttagcagagaagagtgaagacctatccttgttttggactatacacatatccttaataaaggtgacattatatccactatcacataattaacttatgcttagtagattatgcttcaatcctttaacaagcaacacattttcaataggaggatagagagggatacacatcttactgacactagttatcaaatctttttgttccctcaaaagtgatc

SEQ ID NO: 78872 - DNA, 297 bp, Glycine max
gatttcttaggtttgcctatgctaactaattactattggttctataatggccaaaatgagctaatcgaccctctcctaaccattatgtcagtaggtgtcgactagccattgccggctaaccatttgttttgtgggaatggctcatgacctgtcctagccaattgaaaaatttgacggcaattgtaagggtggtgcgcgctaccatgagtattttctaagcggctagcgctctgcgcgctcaccccagctgatttagttcattttcacttgcaattcaataaacctgtttaacttgtt

SEQ ID NO: 78873 - DNA, 453 bp, Glycine max
  unsure (1)..(453): unsure at all n locations
agcttcgtcctagaggtgatggacctttttatgtcttggagaggatcaataacaatgcctataagttggacctcccaaatgagtatggagtcaacaccacttttaacatttctgatttaattccttttgaagatggaactgatactgaggaggaggaaccaacaaatttaaggtcaaatccttttcaagggggaggggatgatgcaatcctccctaggaaggaaccaatcaccagagccacgagcaagagactccaagaggattgggctagagctgctgaagaaggccttaaggttctcataaacataagggtagatttctgagcccatggacgaaggttgggtccacttttctttgtgaatattagaataggttntcctttctttgggccttatattttggcaatttaggttatagggaccctacaaataagggtacagtaagagactctat

SEQ ID NO: 78874 - DNA, 431 bp, Glycine max
  unsure (1)..(431): unsure at all n locations
agctngctttacaatccnccctctttttattatgacaactctgaaatcaagaaacacacacactcacactttgtctagtcgatcactcacataaatttccattctcctcctttgattttgagttatgcttatttgaaattagtaatacttatggagtctgattattccctatttctctccccctttggcatcaacaaaaagccaaagtgtgtaacaagtataagacacacatatactattaatcattcacaaggcatacattgaagaatataaaccaatcatgaagcaagaaacatgaatagatcaaatatataaaaaccacatagtcatataatataattcataatgtgtcattcaaaccatgcatataaagacatactaaattatccatatgtcataataatataggtctattggatatgtcactagca

SEQ ID NO: 78875 - DNA, 323 bp, Glycine max
aaatattttcctctaccaatattttaaaaaaatacgtttaaaaattgaaaacacacatcaatgtttttgctttttttaagaaagtaaaatacctaaacaccttaaagtattttcttctctatatattttctacatcttaatggtaccttaaaactcctaagcgatgaagctaaagagactgctaataattatgaatcacgggttatattagtttctaattcagtgtattaaaaaacagctgactcagaagaaagggatcggtatactgtgcaataaaaatttacaatagtgtctaagaacacaatcagcggtgccatgcacct

SEQ ID NO: 78876 - DNA, 355 bp, Glycine max
  unsure (1)..(355): unsure at all n locations
taataaagccgagtatatattataataacaaagtgaaagctattgatgcatgtgaatgcagaccttgacatggaactaaatccacaagcacaaccatggccatatcaaccgaagagccttaatagaatgtttagaaatggtaatcctcacaacattngcaaattgcaaggacacatatcactagcagtttcctcttcccatgctatatttaattaagagcatgtcgatccagttatgcttattttcatcctctggtgtgctcggcataggagattatgtgactacggaatgaagggtagatgtcgagatcatgtatctatcatatcaaaggtatgtaattgtttcctgatcttac

SEQ ID NO: 78877 - DNA, 393 bp, Glycine max
  unsure (1)..(393): unsure at all n locations
agcntgtggatcatacctgcatccatttcttgtncgngntcctgactcgacccggatttaatgctgtctgcaacacctgttcttgtttcctaactgtactggaaggagatgccatggattatactctataagntactggagttttacaagatctccgagaaggaagcctattgatctttaaagcctgaaaattggccttatttgttaatgcgcgccctctttattatccacttttttggaacagagttatagggtggcttggtgtttctttgatatgaagaaatttctaaaaaatatccatgggagaatgcaccaaaaatacattcaaagatgatctggcactagtaccccccatgttctataaacatgtagataaatttcattttaaaaata

SEQ ID NO: 78878 - DNA, 275 bp, Glycine max
  unsure (1)..(275): unsure at all n locations
gaacccggtgatgatcctggacatttgaggacaaatgttttccaagaaggagggaatgatgagaatcatgaaacaggccaaatacagtctaaaggcccaagtggagaaggacgaatgcccaagtggagaaggacaaagcctccgagtggagaaggatgaacgcccaagtggagaatgatgaaggcccacatgcagagacactatcaagactattatattgtgctgaanggcccaagtaaatatatnnntttagtataattnttatttattggaat

SEQ ID NO: 78879 - DNA, 264 bp, Glycine max
  unsure (1)..(264): unsure at all n locations
acaacacttttggcaacgatgtctttatgcctcataagngcagatgaccaaacctttgatgccatattctgacttcatctgctctggaggatagacatgtggaggagtatctggtttcttggggtgtccataggtaacacattgtcctttgatctgctgcccttcattagaacttcactcttcttatttgtcacccggcattctgactttgtgaagnttacattgaatccttcatcacacagctgactgatggctaatcaagtt

SEQ ID NO: 78880 - DNA, 374 bp, Glycine max
tattaaaaataattgaagtaaatgacatacatctaacccaatagttacacttaccactgcatgtctgggctcgttcgcatcaagatccgcatgtgtcgatgccggtgttgcctcatgagggatatgactgggttgcgtcgcatatgcatctcgaggaggattcgtcagtggcgcagtcatgaatggatgcgatatgacaaagaaccagtctatgtagttaggtgcacactgacctggcacaacacatagatcacctgctatcgccagatggtctgagtagtgcgtccaagtatcgcccatgtcatcatatgacacccatgaatggacagggtgtgcaggaatgcactggacgtagccgaactggcgcataaccc

SEQ ID NO: 78881 - DNA, 351 bp, Glycine max
  unsure (1)..(351): unsure at all n locations
gtgagaatatggtgttatgagtggaaaaagagtgagtcttcgagagttggaaggccaaatctggaattattggtatttggaggttaaagtgagttaatcctagcttgaaatgtcatttatgacttatgaganagcttgggctgtgctagagagaanaacaaatgaccaaagtgaaggcaagagccatttttagggtaaaattggatgttgagaagtcaaatttggattcngtggaattttangtgcacaaccagtctgagcatgtttagattggatgtatagacttgtgggaggtgagaagttgtccaaatttacccattctcatttcacttctcaaccttgaaaatcatg

SEQ ID NO: 78882 - DNA, 403 bp, Glycine max
actggtgaatcaccagtgctgagatcccggacactatgagcattttgacaatagagtcaattgccatctagacggccaggacacacgcttcatactcagccatattgttggtgcagacaaaccccagcctggttgtgaaaggtatacattgattgtctggagagaccaatactgctgcaatgccatggactataacgtttgacgctccatcaaaccatacagtccatatgtcccggtcctcgtctagttattcctcaaacaaggtcatgatgtcctcatccgagaattcgggatgcatgggctgataatcgtagagaggctgctgagccaaataatctgctgaggcgcttccttttatcgactctagggtgacatagactatatcacactcggatagaaaaac

SEQ ID NO: 78883 - DNA, 376 bp, Glycine max
gcctgaagcctatgtgattgatgcaacatttgttcaagacttcaagatcaggcctcaagaatccagtccgagattcaagagtcaagagataaaatcatgacgcctcaagtcaagacttcatataggataagtattaaaagagtttttcaaaaaccacatagcgacagctctgttttacaccaagaattatgtcaaatcttctaaggtaccacagtgactactctctggtaatcgattatcagttatcactaatcgattacccatgaccagtctggttgtcaaaatgttctcaacgtgtcgtcacgtttcataatgattctcaaccagtatagacaagtgcgctatattaggactcgactaccagtgaatctgaacg

SEQ ID NO: 78884 - DNA, 57 bp, Glycine max
acgcaactgaagctaaacgccgaaatgttaatgatactggaaatagaaatgacaatg

SEQ ID NO: 78885 - DNA, 230 bp, Glycine max
ttaaagaaaaatctttttaccagaagttttactctctggtaatcgattaccatgaggcagtaatcgattaccagaagcccaaacagttttataactattttacaaagtagtaatcgattaccatgtgcatgtaatcgattaccaatgtttttgaacgttggatttcaaatttcaagagtcacaacttatgataaaacatttttcaacttgtgtaatcgattacacaacat

SEQ ID NO: 78886 - DNA, 266 bp, Glycine max
ttcactcttttctatctataacacaacgcattggtctgtttgccaagttttgtaagttttagtattattatatctcagagtgactgtaaaatgctgtggaagtgagcttcttgatttcacttctttctttgatatcctaacaccttcaatcatctgtttgttggataattcataaataataaatatgttatgttaatgagaaaatggaggaaaagctgatgttttaacttcgtaggataggctgaatacctgattatttttgcact

SEQ ID NO: 78887 - DNA, 390 bp, Glycine max
  unsure (1)..(390): unsure at all n locations
agcttcaatccacgaatacaagcttatgattgtcttccacgtctagcctaagaaatctgtagttcacataatcattatggccttctccaaacacactccaaacagctttcaaacttgggtcttgaagatgcaaagctccaccagctgttagaaatgcagtcagatntgaagcagaagaagggctttcacttgtccaataaataatatgactatcccactgaagctgcaattgactggaaggattcatgtaaagagtgtacgtactagacatggggttcttggtcatagcccgaagtgtctcattaacagataaactttgtccgggaaggagtgtatcagatggagtatcaaaaccttgccaaatgatgttctgtctgtgctatcagaaca

SEQ ID NO: 78888 - DNA, 444 bp, Glycine max
  unsure (1)..(444): unsure at all n locations
agtcaccagatactatataaccgggtggctgatccatgcacacctcttcttgcaactgaccatgcaagaaggcatttttgatgtctaactggtgaagaggccaatgtcagattgcagtcatagcatgaaaaagatgaatagaggtcattntggtcacaggtgataaagtgtcacaataatcaagaccaaaaatctgaatatatcctttagccactaagcgagctttgtagcgatcaatagtgccatatggtgcgatcttcatcgtatagatccaatgacacccaacagtgaatttgttgggaggcaagggaacaagctcccatgtgttgttggcatcttgcgcagccatttctgccaacatcggntgttgccaattatggttagccatggcttcacgtgtagactttggaatagacacannatccaaagagataagagagtaat

SEQ ID NO: 78889 - DNA, 349 bp, Glycine max
gatttctgagttttaaacaccattagccgaacttacaatgaagaaggtatcaaccagaatcaaataagttaaatgtcacaaccacaaaacatccaagaatgaaatttaaaaaaccacacgataaataagcaaagtacttagcaaaatagtggtaattctaagaaactataagccgaaatacacggcttataaaagacatataatcagaaacttaaatctaataagacggaggtggtggtggaagatcgaaactctgacgaatgtattcgacatcctcttcaagctgtgaaggcgaatgtcataccggcaagcgtgatctatgagtcgagcggcaccacatagaacaaga

SEQ ID NO: 78890 - DNA, 417 bp, Glycine max
gttggtaattatcattttttttgctgaagatcaaatgggcattttgataatggcaaggtgactttcaacatctgcacttatatgcaaaatttgctgttaaaggggcaccataattatgtgttgcgcagaaatgcttatgcatggctggttgaggaaaggagtgtacatattgtgttctggacgtattctatcagatccccacggtccaaatgtagacttatgtactagggacctccagtataattttcgagtcgatctcacgatgaacgaattggaacgacaagaatgtttctggggtattcgagtaagaaaagctgtggtattggattgtggtttggcaggggtatctgctctgcctatgttggttggatagatagtcatgatgtgtgatgagaaatagctggagatgcgagcctg

SEQ ID NO: 78891 - DNA, 276 bp, Glycine max
tgagccctcgtatatacggactcaatagacatcgagaaaaggtttgtcgtttgaatggctacagttaacattaattacagcgctcgaatattctgacccatagacatcgataaagtattgcgttgatggctcaactcacaatcactccgacgcccgttattacggccagcataaccagccaaagtttgcgatcaatcgctaaacttaaactcacctcacggctgggatatacgcacaacgaatctgaaaaaatattgagctgatcgcctaaagcca

SEQ ID NO: 78892 - DNA, 468 bp, Glycine max
  unsure (1)..(468): unsure at all n locations
gcttcaggaaatacatatttcactgcatttatcaaggctaaattttctactgcattcatcaattctaaaaaaaagccctttgagcttctaaagtgcccaaacaaagttatccttttgttcaacctccatatacacaaaaagttgtagaaaatttcatttcaatatgagtcacaccaacaacctcaagtaatgatagtatatatctattagttttctaggtattgtccatcaagaacactatgttaaatggattaatcattttcatagcatcaagatgtgtccaaaaaatatctcacacaacttttgatgtatcattcattatatgtcaatgaatatacatatctcgttcaagtaagttcatcaaatgctgcattttcgttctaaagcctcttttagacgaacgatacacaatccttgcattatatacttgttttatggtaggcacatntctttcattgtgctctttga

SEQ ID NO: 78893 - DNA, 432 bp, Glycine max
  unsure (1)..(432): unsure at all n locations
nnagctggtcgaggtacttacccgttttatatctaagaacgatgaagaacgaatgatgaacgttgaagaacggttgaaacctttgtgagattcctcacggacaacgttacgggaacgtttcggaagcgcctcggtttagattttcttcacggaaacatatttttcgagcaaattctaaagagagaatagtgcctaaggggctggaccccttccttcttgcattcctcccctattatagcaaaataggggaggtggttgccgcccagctcgcccaggcgagcagggttgcttcctccagaagcaaccgccttctggaggaatcttctggagggcccaagtgggcctgggtgctatttgcactcccatttttactatgtacacccccctctgctgttgttgtgattctttttcgtaagtacggaaactacaatt

SEQ ID NO: 78894 - DNA, 415 bp, Glycine max
  unsure (1)..(415): unsure at all n locations
cgaaaaactttttcganaaaattgggaattcccggagtactcacaaacttcgtccggaagatcgtcatnccggaacttccgggagaaccttcttnncggaacttccggaagaaccctcttccgaactgatnacttttttaaaaaaaaatattggataatataatttacttttaatggataaactaaattataaaataattaatattattatacataaataattaaataattagtgaacgtatgtaacgaaataagaatttttcttttataataataagtaaaaataaaataatatttaatgcgtatgtaatgacgactttgcccttgtgtaatttctntataataatgcgtgaacgcctctttctactggcgcttcgctttcttcgcttctttttactggctttcgctttcttct

SEQ ID NO: 78895 - DNA, 339 bp, Glycine max
  unsure (1)..(339): unsure at all n locations
agctntagtgactgtgagctttctcttattttacattgagtatcctcatcgatatgttctacagttgattttgcataaatttctaatagtcataacatatgattcatggatattgatttacgcattctttctttctttacattataagccactatccaaaaagctatcccgatatatattgtatttatcattcgcacgttctttgagcctaacacttcatattttgttggaacactaaacctaggatataaatttcctaccttaacttagcttaggagagcaaacgtgttttcgcaacgatgtctatcaattggtggctaatgtgatgcacatactttg

SEQ ID NO: 78896 - DNA, 370 bp, Glycine max
  unsure (1)..(370): unsure at all n locations
ctctgagtcacctgaggctgcagcttgaactnttcccctttacttgtcnnactataaaaaaaaangttagatatcattatgaacatgccacacttcagttagaaagttgtgtgccttgaggttgaagctctacgtcatgctacgattcttattccaattatttcgtaccacgtggtcttggggtaacgtatatagnttacaacatgcagagtgctggcagccaatacgggtaatgggtgtattttttctttcaagggctaattaagcagaattcagaaatggcgggcataagatgaggtacgttctgcataaaagcatgtgctttgaatttaaagaatgatcattcgtctatgacgtgaaatatgaaaaa

SEQ ID NO: 78897 - DNA, 380 bp, Glycine max
  unsure (1)..(380): unsure at all n locations
cgaactcctggcagtcaacagaataaaggaacaaagaccacaaagcaaggaggtttgtggtggctggccaactctgaaacttgattgatatgtgagatatggtctctggtaatcgattaccaagggtgggtaatcgattacaaggcttaaaaatgaagataggaggctaagatggtctctggtaatcgaataccacggngtgtaatccattaccaggcttgaaaacgaggtcaggaagccatgatggcttctggtaaatcgataccaangggtgtaatcgattaccangcttaanaagggaactgggagatggtggaggcctcttgtaattgataccagcctgtgaatcgatacacaaggaatggtcactggtatcgata

SEQ ID NO: 78898 - DNA, 274 bp, Glycine max
atcatttcaaaaaatcctctcttaccggaaaattataaaactacaaataaagagaaactattaataaaaagggtcccacaaattttaatatttcaaaaaattcccataattacaaaaaatatatattccaatgtgctaaaaatcgagagttacattaaaagaaatttccatcaatgaatcatcaataatcacgtaagtaaattaacatcatatttaactcaaaatcggtatgctcgcatctaagaatcacgattgggatcaaaagctcacatca

SEQ ID NO: 78899 - DNA, 416 bp, Glycine max
  unsure (1)..(416): unsure at all n locations
gcttctatccaagacactctcttggtgttgaatcttcctcttccaaggtgttcgcatcctgatactacttgnttttgggatgtgaaatctaactggcaagtgcactgggtcgtcaagtaaataattaaaacagtgtgaatcgagtatcgaactcaaggaacttgttttacatggaanagcatcattcagtaaatatgaatttacgtaaagaattgattatcatgaagtaaaaatagaagtaattctattctaagtagaagcagtaattgtgagcaagtgagtgtgaaaacagatatgtaaaagcattgggtcattctactgagatacttgatgcaattagggtttttctctacttgaaaatatttatgtgttctatgatgaagggacgaataccacacaccgatgtctcgcgagtt

SEQ ID NO: 78900 - DNA, 416 bp, Glycine max
  unsure (1)..(416): unsure at all n locations
cacaagttgagttntatttagaaaattagagtttttctcttttatcttagtgagagtgattctcctaaattcttgagtgattcaagaacaccctggctgtatcaaaggactttcacaacctttgtgtgttgccctcgctggaaagagtgagtctttccttcctttcatcttcacccttgttctttcaaaccacaattccagaaaatccacctctacccagaattatctcgtggccgtaactcccattttacgcactcaaattaagtgattcttgagcctaaattgactttcaaaacgagaacctttcacctcgtttggaatcacctcatttggagccctgtagcttcagntattgccatttctataattctgccagcaccactaacctacatttaccatcccattcatccatttat

SEQ ID NO: 78901 - DNA, 315 bp, Glycine max
ctcccttgtacctgaaaaggaggcgaaaaacacaaatgcaaaggaagcgtcaatgagcacaataaaaaccaaactagaaatattgacaaacctaccacaaataaccacaaagggggagagtatatacatataaaaaaggggccatacaaaatatagcctatgagaggagaacagtaccaagccacagcatgtaaataagcatagataaagcaacgacacagaaaaagcataaatagaaggaagagcatacaccagaggtcacgagtactcccaacaagagaagagcctccatacaagcaaacttcaaatacagaa

SEQ ID NO: 78902 - DNA, 432 bp, Glycine max
  unsure (1)..(432): unsure at all n locations
agctagagaattntntttcctgcatattgttgtgtaacttacaattaatctcaattgtgtttctacaggaaggagactttggaaaaatctttggtcttttgtttcaatggtcaagtaatcaattaattttccaaatctgaaaatattacttgaaatacacaaatggcatccaaaaaatcatgaatggaacaacctcttatgctaagaaataagagcataaacactactactttaccacaattgcaataatgattgttnttcttctactatattcttgcttgcatttcttttactctattgtcattttggtggctagctttgtcattgcatatattgattattcctcttcaatttcaaaatgcaagcttgagaaagctttttttttcctgcatattgctggccaacttacaattaatcttagntgtgttctac

SEQ ID NO: 78903 - DNA, 400 bp, Glycine max
  unsure (1)..(400): unsure at all n locations
gcaagctttaacanatgtcttcacaaataattatcacacagcagaaaactaacanaactacccctcatatcttccaaaaccccatacccacganatttaagagagaaagaagtccacccaaacctggattttcgaagtcccactcgtagccacgcacttcacgaccccgaaaatgccctcctttcgcgatttggagcagaaatgagcaccaaaggttggagcattgctggggcttcaatggagaatggaggagaaggaaaaagcaacgtgaggaagagggagagcttcttgaatttctggtttggctgagtgaggagagaganaagctttttggacttaaataaaaggttgtcctcattttctattattgtattcaagctctaccacatggtcctatttg

SEQ ID NO: 78904 - DNA, 440 bp, Glycine max
caaagcaaccgcagcatgcagcttgcaatacactgagctgaacatttttgttacctttctcacctccggcaccatgtcgccacattcctctgatctctaagtacatcagtcaatacacgctccattactcaattccacggaaaataacttattgtgtctcattattttacctacagctttactatggacgtactttttaataacacgaccccattgaagttaagggcactaactcaaacccgccataactagaagagatgacctactatagtcatttgactagtctactacacaacacaagataacatttcaagcatagctttatgcaatagcaaagcacgtaatagtttatctcaattaacacagaccataggaacatagcacacacagtgtgtcggcactaacaacatacagttaaaaaagaactatacctaaaccaa

SEQ ID NO: 78905 - DNA, 395 bp, Glycine max
  unsure (1)..(395): unsure at all n locations
gcttccactcagctcgcccaggcgagcattgttgcttccttcagaagacaaccgcttctggaggaatcttctggagggcccaagtgggtctggttgctatttgcaccctcatatttactaagtacaccccctgcctttttatggtgatcctttnttcggaaagttacggaaacttacgaatttcgtaacgatacttgcttctttctgaatgtacggaacctgcggattacataatcatcccttttttgattacggaatgtatggaacctactaattgtgcaccatgcttcatttgatttccgggtgcacggaacttacggattgtgcataatattttctttgttttccggcatgtccacaattcacaaattgctaatgatgggggcagcacctac

SEQ ID NO: 78906 - DNA, 427 bp, Glycine max
actaagaaaatatttgttttccagacacctgtgcctacaagaactgttagcatggacctctccaaggcaccactggaatcagcttcatctgctgatctcgttcaattaccagcagcaccatcttaagctccaacattggatttgtgtcaatcatctgttgtatcggcagagccatctttcaacgagaatcaacttagtcaaacatcccatcctgcatctatagatttttatttcgagaattttccgcagccttccactgtaacctcagatgggaaggcactggaataatctgtccctaaatatgaaggatgggcaacttttgatatgctcagagaaccttctctactcacaatgggaaatacaaccactgaccctcagatgcaaactttaatgaaaattagtacatttccacctaaatgcaacatgc

SEQ ID NO: 78907 - DNA, 467 bp, Glycine max
  unsure (1)..(467): unsure at all n locations
agcttgcttgtgagcgcacatgcaccttattaaccaccaaatgcttgacatgtgttcctccaaattgggcttcccgcgttgagcatgcacgagtgcactaagcaaactgctacaattcttcacacatcttccattccattggtgntgtacctaaactctacaaaataaagctaaaccaatataaaatccttaactntaactntcttaagctaaaaatccaaaagaacctaaattcctatctttttggatcaaaccaagcattaaaacagaggaaatgagataattgatatgtaatttaagtgcanaaaccaagtatgtatagtaattatcactcaacaattagttntactgaacacttatgatttaataaactagcttaaaagcttttcagctagcatttaattntcagctagttttgtcgaacatagccctccaaataaatgcannattacattccaggaaaaata

SEQ ID NO: 78908 - DNA, 370 bp, Glycine max
  unsure (1)..(370): unsure at all n locations
ggatccttaagtcacctgcggcatgcaagctcgataacatcattgtctacgttanttatatgtnnctccggacatagtcaaacaattaattaaaactttaaagcaatctgctacaaggtatggcanggaatgggaactaatcaatgaataccatattaatttggtgccttaaacaagaaaacacactaggtgggtgtgatctatggtgtgtaaaaataacaactatgtctatgatcactgatgggtatcaacatgcattgatatagggaggacaatagactatttgaaatgaatctttattgtggtaataaaatggtatttgctcttgtattatgaaatgctagaaccatttctacatcaattttacttt

SEQ ID NO: 78909 - DNA, 446 bp, Glycine max
  unsure (1)..(446): unsure at all n locations
agcttacacaaacattcattatttctacatacactcaacaaatagtcatcatccgtccatagatccaattaatcatgctcgatatgatgcatgcacctgacttcaactctcaaatgcaatgtggtatcatccccaaggaaatagcctaagcgtgtccacacgacactcttacttagaaaaactaggtagtaagtgtcgaggtcactctgtcgtgcacagacaacttccctcctcccccctacagtgatcagcctgagtctcaagggatttccaaaccgagtgatatgcttcctagtacacgtaattttcctcatgaaaaactacgagtacttactgacaaanattgtactattttcatgcaatatgaagtatgaaacatgagcaccatcaatgcactgaccgtggataataaatattctagacatcccctccgagagcttaaactc

SEQ ID NO: 78910 - DNA, 384 bp, Glycine max
  unsure (1)..(384): unsure at all n locations
ctcatgaagtggataaaggagatcagatctttgaaaaaaaaggagaaagagggatgaggtgttctagacaaacccgattgatggattaaactcaacaatcctcctttataggaaagaatgatccggaggcctactcggagtgggagatgaaaatagagcatgttttctcatgcaacaactatgaggaggaccagaatgtgaagcttgccgccacggagttttccgactatgctcttgtgtggtggaacaagctacaaaaggagagagcacgatatgaagagccaatgtgatgtgaatcatacggggcgcggcacgctngatacacgctgtagagtttagtatgacaccacttcgtgtaagatataatcacggtgacgcactttc

SEQ ID NO: 78911 - DNA, 409 bp, Glycine max
  unsure (1)..(409): unsure at all n locations
tctcatttcttgacgtcatccatcttttcttccatttcacttctaagatctggtttccatagtttatacctgaaacctcaatggtagaaaaagacaaaagtgcaacaaagttcatgttaggttcacagtgtcactagttagaatgcagacggggaacacaacatgctgagtagagccaaaggaagaagcattaaatgtgaaaatcacattttggattgaatcacaaacaaggaattccaagtcagctcatttcacctatatgattggaaatntagggatgaatacaaaacagaaattcattgagatatgatttccaatttagcaacaattaacaaccaacataattaattgaatcaattgctggataccacattttgagagcatcattgagatatgctatcagtccact

SEQ ID NO: 78912 - DNA, 365 bp, Glycine max
ggagcaagagcccatgaatgcttctgaaaaaaaaagcttctaccctcgcgtggaaatggagtataagcaaacagaaaggaaggaagtgactgatgagacaatatcacatatctactgtttgtcagagaaaaggacgttattgtcacgggatccacctggaaacactttccttctaaaattgcgatgaaattggacaaaatgatatatttttttgtttaattttaaaaattatcttttaatagagagaaaaatatatttaaagaaaaaaaattctatgataaataatagagttaagaagttttaattagataaattattattattgtgtttcttccaatatcatcaaattctactttctctttcat

SEQ ID NO: 78913 - DNA, 453 bp, Glycine max
  unsure (1)..(453): unsure at all n locations
agcttatgcacggaaaatgtaattatgattattatatgcccgaagaaacaccatttcctagttaaccatgcattaggtaccatgttcaattattttgttnttaagtgaaacgggtttatgatcccaacatggttggctcgtggtgcctaacacatganactaagaatgtagtgtgaagtttcacgcttcctcctttttgtttttgttttgtagaggaaaacgcaaggatgagcaaacatgataacaaatggtatgccaatttgcagatcanaaagtttgttgaacgcatatgcatgatgatgccatgactcatgcaaaatgtgaggctggaatatgataacggacaaatgcaggatatgtccattatgatgttatgaagagatgcttatgcgatgcatgatatgaatgcattntacggacacgagagcccngaannatatctcttcttacatg

SEQ ID NO: 78914 - DNA, 447 bp, Glycine max
  unsure (1)..(447): unsure at all n locations
agcttgtgctattccaagttcatttatcttctcttatatcagantgcttccttcactccttcagctaaggccatgtattctgctttagtagttgaaagagcaacaactgattgttgatttgtttccactaatgtatccaacaaagaaatactatccggttaggactttcttgtacctacattttctacaaaatctgcatctacataacctgtgattgctgtctcatgtgttgtcttcttgttccttaatccagcattcaaagatccatttagataccttagtgttcacttcacagctatctcatgtgcactgccaagatctaccatgaatctgcttattatacttacagcatgagccaagtcatgtctgctgaaaccacttcattcattatgcttcaaaccacttgcataaggtgtttgatacatttataccattcttcagctggtt

SEQ ID NO: 78915 - DNA, 338 bp, Glycine max
  unsure (1)..(338): unsure at all n locations
agctntggaggatgagcaggccgttattttgattcaagaggagtgtgatgatgagattcagcttcaggggtcagtgttcaagttgacatttgcttgcaactctccaatttcatggcctgcgatgtcaggtgcattggatgcttactccatttgctgcaagaagattcagatctttgagaagaaatgtttcacccttgggattgtgcttcttcttgttctgtctggtggggggcaagataagttggtcagaacccgggttgaaagcgctctcaagattgccatgaagaggcccacagccggtggcgtgaaacttgcctttgggctttgtggatgtcaag

SEQ ID NO: 78916 - DNA, 376 bp, Glycine max
  unsure (1)..(376): unsure at all n locations
ggctgcagcttgcagatcttactgattttttactgacacgtacggaagcgcctcggcttagattttcttcacggcaacactctttccaagcttattctaaagagagagaagtgcctaacgggctggaccccttccttcttgccttcctccnctatatatagcaaaataggggaggtggatgccgtccagctcgcccaggcgagcagggttgcttcctccagaagcaaccgccttctggaagaatcttgtggagggcccacaagggcctgggtgctatttgcacccccatctttactaagtacacccccctctgctgnttgtttggtgattcttttttcgtacagttcctgaaacttacgaatttcgtgacatactt

SEQ ID NO: 78917 - DNA, 324 bp, Glycine max
  unsure (1)..(324): unsure at all n locations
agcttggcgagagtacatctgtctcttatttctaattgacatgtatgcaaagggtggagcagtggaagaagcgtaccatgtgtttagcggtatgaaagggaagaatgtgatttcgcggaatgtcatgattcttgggcttgcatcgaacggtaatggagaagaggcgtttacacttttcgcgaagatgttacaacagaatgtggagagaccgaatgatgctacgttcttgngggtgttaagtgcttgtatccatggaggattgtgtgatgaaagtagacgatgtattgatattatgggcagggactataacatccaacccacaat

SEQ ID NO: 78918 - DNA, 372 bp, Glycine max
ccgcttttgaggggccactccaccttattgaaactatcccgggcaagacgatgggggaaggagatacccatcttggccccctgctccacctgaaagatccatcctcgcatgaactaccccagccaaacatagtccgtcatattccggcctcacccacgcccgtaaaagaatttttcccttctcggaagataggggaaagaatgaggcgcttgaagagaggttgagggcagtcgagggcctccgcaattacccattctcggatttggcagatttatgtcttgtacccaacatcgtcatccctcccaagttcaaagtaccagactttgataagtacaaagggacgacatgtccataggggcatcttctgatgta

SEQ ID NO: 78919 - DNA, 269 bp, Glycine max
  unsure (1)..(269): unsure at all n locations
ctgcagcttgtctancaaagatgttaggtgtatttctctcttctgaggctggctttgctaattactttcttccatccccatgcactttttaaggaagatgtccctccatatatgaagcctcctttaccatttttctcacaattggcactcctttcttcattaatgcatattccttccttggctataagaatgatccacaacatattgacctctactatgccctcttcctaaaaaattcctgtatttatgatgcacagactaatctgcat

SEQ ID NO: 78920 - DNA, 430 bp, Glycine max
  unsure (1)..(430): unsure at all n locations
aagctagtggatatggggtcttttctttgtggactangnggcgagcggccgatggcgcatatcaactctcccaccattctcagatgcccacctgtaactcagctcacgtactcccacatagcccttatactcgtttcttctcaacaccgggtgcacatcaaccccttgagcttcacatattcaaacattcaatttcaaacattatgaactaccctataccaagaaaacagggtagaggcagaaaactctgcccaaaacacattcacatattacaacttttctttactcaataccccagtacattctctttattccgatttgttaaccgctggaacgacttgaaacttatactggatgttcctagaccataatatacatttgaccgttggatctgtataaatgtcagaaccatatgactaccttccatacc

SEQ ID NO: 78921 - DNA, 436 bp, Glycine max
  unsure (1)..(436): unsure at all n locations
ctgcagcttaataactgaccattcttttacttaataanggtggaattgctaaaatagaaataagaaacagatgaagccaaccaattatcatttactctcaaaaataatgtcatgaaaaatagtataccacagatacaggataattcaaacttagaatttgggcttatggtccaacttcaccccacaaatccatcttgtaaggtgaggattgcccaggttttataacctctatttaaggcatgtctctagtcgacgtgggacanaacgccaccattgaggcagtaattaatgcagcctccanagagggtgcaattaaggtagactaagggtgactgcaattaaggtagttttccaacagtccctctcaagtccaaggctatcaacttggnggtgattgcaataanggtgcttttccaaaagaagtctatcccagagt

SEQ ID NO: 78922 - DNA, 409 bp, Glycine max
  unsure (1)..(409): unsure at all n locations
agctntgaaggacattcattangtgttgtatcattgatgcaaatagagtatttgaatgttggacaagatacccgagtctcaacaacatatacatccctgggaattcctttctaagagccaaaatctatggattgaagagcctatgaaaaacacaaacaaggtttaagtaaacaaattatccattgaaaaaagaagaaggaaatagaagaaacactttaaagacagtgaactagtaacgtgaacctaaaattcttctttacttgctagttntttttccattcttccttacttgctagttnttttttccattcttccttacttctttacaataggagttcacagcgagtgagaagcaactttagaatctcaaagagactctcaaacatgtaaaattaatctaanattgaca

SEQ ID NO: 78923 - DNA, 279 bp, Glycine max
  unsure (1)..(279): unsure at all n locations
gcaaatgtcatttcttctctgttcatctacagacataaggatcatactggtctgatcttntaagtnctattgtaggactgataattcaatcatctctatcaccaaaccagttgttgtcgtttcttaattcatgcaacttaactttccacaactaaaacacctacccttcttctctttaagcaacttgggtcaatttggattattttttgggactagagaaacaataccttcccaataattctttctaatgacctcaagcaatatattctgatttacttt

SEQ ID NO: 78924 - DNA, 318 bp, Glycine max
  unsure (1)..(318): unsure at all n locations
agcttctccatctctacagaatcagatgttacttcatcattcaactctgccattgtgagttcatatagagacctttttgcgtatacagtgaaggcgatagtggtaactattgcaataatgaaagaaataatggtgtatacgactttcacaagagtcaagtggcgctttccatactgtgcgtctgccaatgtctttatataccgaccactgagaagagaagatgttagtttatttaaaagaattataaagaaaacnagttccaagctgagtcacatctatattcatcaaaagtcatatttggttctcacctctcaattc

SEQ ID NO: 78925 - DNA, 411 bp, Glycine max
  unsure (1)..(411): unsure at all n locations
agctttgagggtgcgtaggccatcatctttttatagnanaagatccgatgatgtgtctaccattacaaccaacgcctctctactcatcattgggggtgctacctgggccgtcagacccctccaccttttgtgcgagttctttgaataatccaatcccctttatgcacatgttttgttagtgcatccttgacggagccataatcaaattgttctgatactgcctaacaaaggcaaccatcaagatcttccaagtatggactcgggaaggtttctagttattgtaccaagtaacaactaccccacgttgactctcttggaagaaatgtttagcaactactcatggttgagcatgctttaacttccgacaaacatctttggatggtattgagaaagaagtcccttgtcttgtca

SEQ ID NO: 78926 - DNA, 335 bp, Glycine max
tcaacacgacaaggaaacttcctccgagaccgttgccggaatttaccccgctcccaatgacgtacgaagatcttctaccatccctcatcgccaatcatttggccgtggtaactcccggaagggtcttcgaaccccctttcccgaagtggtatgaccctaatgcaacttgcaagtaccatgggggtgccccggggcattccatcgaaaaatgcatggcccttaaatacaaggtccaacatctaatggatgccggatggctgactttccaaaaggatcggcccaatgtgaggaccaacccgctcgcaatcatggagggggagctgttaatgcagatg

SEQ ID NO: 78927 - DNA, 401 bp, Glycine max
  unsure (1)..(401): unsure at all n locations
actctcacgtttgttttttatggaaaacaccatacttaacgcccatagggcatcctatcgcaccagatccaaatctagaacgatgggtgatcaagaagagacacaggaacagatgaaagccgacatgtcggctctgaaaaacaaatggccttcatgatggaggccatgttaagtatgaagcagctcatagagaagaacgcggccaccgctgccgctgtcagttcggctggcgaagcagacccgactctcttggcaactgcgcaccatcctccctcaaacatagtangacggngaagggacacactgnggcacgatggcagccctcacctgngatacaaccgagtggcttacccttatggattgccgcccaactactcaccacccgtcttgcaagaagatgc

SEQ ID NO: 78928 - DNA, 390 bp, Glycine max
  unsure (1)..(390): unsure at all n locations
agcttgcttgagaagcttctatggagggtgtatctttgangttcaatgaggtgcttcgatggtgatttttagtcatggagttgcaatggtagataaaagagaagaggtgagaggatttgccatccactaaggaataagccatggaagaagaagtttcaccaccaagagagtgtcttggataataagcttagagaggaagcttcaatggaggaagagaatgagaaagagagagagagagagagagagagaaaatgacgtgggaatgaatgaaagataaggagagaagctaaactttaaaaagtgtgtctcacatgactctaattcatcaaagttatgacaagtgtttaatatgtgtctatttatagtctagcacatgagatacttccttga

SEQ ID NO: 78929 - DNA, 380 bp, Glycine max
  unsure (1)..(380): unsure at all n locations
tctagtttatgatgcccctctctccctcgcgggagactctctctctctcctctctctcttctatttttcggttgtagttatagtctctcttctctttctcttttatgttcgctcttttttcaattccagttcagacttttagttttatcaataaaacttcattctctatttgattaatggaaggctaagtccgcagcgttgtnttcccttgaggatcaagcacagttctctntgaggttctattattactgtgaaattctgtttagnttttcctcttcactaattactttgaatctgttgcttctaattcatgcatgcttagtgcttgattaattgtctctgcgcttaatttacgttcatgcttaatgatcgtttatgag

SEQ ID NO: 78930 - DNA, 411 bp, Glycine max
  unsure (1)..(411): unsure at all n locations
gctcaaatcattaatccatgaaactatcanaccttaaccaccaagcagaaactatacctcaaagtttaaccccttggcagaagcaacgaggcttaaccatcaagagcagaagcaaaacaacaatttaatgcttaaccatccatggcaaaagcttaaacaatgtttaatcaccatggacagaagcttacatcaacaaaataaaagaatcacaaaatttgtcttctatgaggactttgtaactaactaaactaatctatatctctaaaatagtatttaaatcttagagccagatttctaaaatagacagttcagttgtggcagggcatttggcttgactgctaaatcatttttgaatgagactttccttaacatggaaatcataggcataattggtcatattagtatccacaa

SEQ ID NO: 78931 - DNA, 353 bp, Glycine max
  unsure (1)..(353): unsure at all n locations
tcagagatcctgtttatggctgtgtntcccacatctntgcccttcagcaacaggtaatcatagattaattattggntttgattataacttctgataaatatttgattaagcatgtctntttataacatagagatgaagagtgttcttagcatatccattatatactagttgtttaattgttntcttttaatttggctatcttaattatcagnttttcttctccctacactaagctaaccaggtgaatcatataactggtctgcgttttcaagacttatttttactncatttttcttattgactacaatatgatcagtatcataattagactattatttttagactatttaatt

SEQ ID NO: 78932 - DNA, 396 bp, Glycine max
  unsure (1)..(396): unsure at all n locations
taccagngactgtttctgaataaatcaaaagatgtaactcttcaaaaggtttttgactntttcaaactggttttaagtttttctaaaagttataactgttctaaatggtcttcttgaccagacatgaagagtctataaaagcaaggctttgatttgcattttcaattaattctttcaatcttgaatacttttccaatcaatctcttacaatcctttacaagccttgaatctctttgaacttcttcttcttctttgtaccaaaagctttatgaagttttcttgttttctaaaccttgaaaaacttgtgctattcatcttttcattctcttatccctttgccaaaaagaattcgccaaggactaacccctgaattcttttgtgtctctcttctccttt

SEQ ID NO: 78933 - DNA, 421 bp, Glycine max
  unsure (1)..(421): unsure at all n locations
tcctgcgaaggcaaacattnggaaagttatttgtatcagtgggacgttactctntaaagcaaaaatggcatataacctcctcccatagatacaaacatcaatgtaaatttagagtaagcttatgcgcatactttcttacaaatgttctcttgcacaagacattctattaaccgaaaaaatgcacccatatacaatcaatgcagctccgttacctagattatttacacgtacttccagggtgtatttgttacttacatcacacacatctccttggctaaattcacatacatgcatacccaaagcattntggggtaccaaaaatagcacatgtacacctcttggtatttctaatacctatacatacacaaactntatgatgaatcttgactatctacacaataaggggctacatttcatgctc

SEQ ID NO: 78934 - DNA, 364 bp, Glycine max
  unsure (1)..(364): unsure at all n locations
ttggtaatggctcactttgcattatttctcttanctttatatggagttgaggatacgtgccaatcattctatcttgcgaggtagatcagctagaaagcaacaccacgttaattaatggaagcacaaagtctaanagattctaaactagccagaggctcccattaattaaaatattcagtacgagggagggggggtgtatttaaagcatgatatctccttgatctgattctctgtgtctcataaagaaaacaatttgtctgttgaataataataaaaaggtaaatgctcaccacttgttatttttctcaagaaagtggctaagaaactataaataattttttaaattagaatcaccacattatta

SEQ ID NO: 78935 - DNA, 373 bp, Glycine max
  unsure (1)..(373): unsure at all n locations
acacgcaagttaaatttaggtcaactgtatgccaataaaacatgatacatgattgtcacatgtcattctacattgaagaaataaatttagcgaagctagttattttgctgcgctgatatacatgctaatattttataacaaatctgagttgaattgaaaagaattttccttgacgactgaaaatatgaaaatctacgtccggttatatattacacttgttaagttctgatggtcacaatcttgactaaactcaattattagcgngatgatttcgtaaacaagccattataagtgagtcttgtatattactgatggctgaatatattatagcacaattagaactttatctttaagccatattccacacctataa

SEQ ID NO: 78936 - DNA, 252 bp, Glycine max
acttggatggacagatgagcacgggctagctgatgcagaaccacctactatgaccatgcgctcaacaagagggttgctttcctgcatataagaaatctttttgtaaataattcagagtcaacatatacagtaacaagtctccaaatgactaacatctgtataccaagagattttaccctctatatggattcactggctataaacaacaatgtatgctttttcattcacaatgcatgattctgacttaatctt

SEQ ID NO: 78937 - DNA, 439 bp, Glycine max
  unsure (1)..(439): unsure at all n locations
tcagcttaggctttcaatgcttcagatgtgcacaattggttttgtctgtgtggtggtgcagaggagcatactacagagtctggaacaggtgcaaatttttattatggccagttgggttaccaggttaaccaaggcatctagtttaccttcaagcttcttagtctcacctgatgaatttgtggctacttcatgcactcctctaatgacaatagcatcacttctagcactaaattgctgggagtttgaagccatcttctcaattaaatttctggcttcagcaggggtcatgtctccaagggctccaccattggcagcatctatcatacttctctctatgtngctgagtccttcataaaaatattggaggagaagctgctttganatctggtggtgagggcaactagcatantaatttttaaatctctccccagattcatat

SEQ ID NO: 78938 - DNA, 410 bp, Glycine max
gggatcctccgaggcacctgaggcatgcaagcttgccatcctagccatcctatatgtactacacattaagaaggaaaataattagcatgcatgagcaacaattatcaattatacatgctatctccctcacctactctcatccatgacttgtgaacactcatatacttggaagttatctaacaataactaacaggtgcactatccaacaaccaaaagaaactcattagaaatttcacacatagtttaatatataatgttggacttgcaccaatatttcatcatgtatataagtagtgtgaaaaaaaacatgatgaagacaatgctaacagcctgtacacattatgcaccagcttcttccaagaaagatgaataacatcatcaatgacagcacaaagaacatcttattattg

SEQ ID NO: 78939 - DNA, 338 bp, Glycine max
gtgagggagacggagagagagcttctgacaatgtggcgctgagcgaacagagagagacttgctttttggttataaataaaagggctctctgtttttccattattctattcaagctctgccacatgtccctatatgattggagcaaacagggcccactttctctctttgactgtgacccatacttagtcacaaaagtgagaaaaatctgacctttgaaacgctaaaatcctgcctcggtttgcgcgccgtttctctgattccagattctcgcgttcctctgcgtccgccggggccagttttctaaagcaagcaatatatatatcacaacgctcagaata

SEQ ID NO: 78940 - DNA, 146 bp, Glycine max
atgataagttgacaataccttcattgatataacacatgcgatgggcttctgtgctcaacgattttgggcaatatatccatgtgcatctgtgggaaaaaaacatatataaaggcggttctgcaaggagatatcttaagtgtctcgcg

SEQ ID NO: 78941 - DNA, 339 bp, Glycine max
  unsure (1)..(339): unsure at all n locations
ccctatatagtacattattctctatcatgaagtcgtgatggctttattttctatttaacaacttcaatgatatacaatatccgataaagacaggtgaataatactcaactgtaaaatgaaagttaatagggaataagtgacttctaatattttattaggttaaatcaatgttacaatgatctttgtttagtttctatactatgacagtgatatttttaatgntgacaatttatattttaagtacctgctaattattactccacaaaatatatcaaaataattaagtataaattattaattatttgtttattagcaatcatcttacaataaactaattac

SEQ ID NO: 78942 - DNA, 343 bp, Glycine max
  unsure (1)..(343): unsure at all n locations
ttataggaagtttctataaaaaaatcaaatcgaaatggctctttcaaagaagtcataacatgaccctttttcatcacatggttaagcaaaagcaagctaccaatcatatttccattttgaaaaatggagatgatattcttcaatcccaatatcagattcaacaacacattacttgttctattatgagttgtttgcttctaataaccagtgctcccctaatgttnttaaatcaacaaccttgttcctcaattggttacccaaaaggacaactctttcttatctaatttcccctttattgaagaaatagatataccaattttaatatgagtagctctagttccct

SEQ ID NO: 78943 - DNA, 382 bp, Glycine max
  unsure (1)..(382): unsure at all n locations
atctacaacctcaaggcttataattcatatactcctaatgtgctttcgcctttcatatcaattaacagaccactctctctttacctncttccctgtgtgtgtgtgtgaacgtgtgttccctcgtgctctttntaattgtgtaaaaattaatgtatggtgtattatcctagttgtgttctcttatatcaaacttcttaacaaaacatctattaatttttggaaagatagtaataggaaagtgggaaggttctctntggagataataccatacctttttttagtgctctttgtcaatcataaggctaagttattatttcttttatgaaatattctggctgaataattngattttctttgtaccaaaagtatactngtgtcatgg

SEQ ID NO: 78944 - DNA, 338 bp, Glycine max
  unsure (1)..(338): unsure at all n locations
tttccaaatctgcaccttatggcgaatttgctgtgaaatggcacataatttgtataagtgcacaaaaatgctcgtgtatggctggttgaaaaagggtagtacatatggggttctggactttttctagcagatcccaacggtcaaaatgtagacttatgtactagagactcccagtaaaattttcgagtcgatccaacggttaacgaattggaacaaaggaaatgttactgcggtgtttgtatgtgaaaagctgtgatcttgagttgtggtttgggcagagttctctacctttgccctggtttgcttggnnttgttagtccatgatgattggatgtgga

SEQ ID NO: 78945 - DNA, 316 bp, Glycine max
acttgatatgggaaattggagcaactctaccttacaccagtctataacatcatttaacttgtcaaactgattacacctaaattcaccgaccagattgactctaacaccaatttacctagatggctttgacacttggcattgtttctcttacacagccaacttctatagcttaatgacatcactagataactattaactcaatccactaatcaattggcttcacttaaactactttttcctatcacaatttactttactagtacttcctatttaagttctagcttacctaactcagcttataaactaactgatgtac

SEQ ID NO: 78946 - DNA, 482 bp, Glycine max
gcgatcctcagagtcacctgccgcatgcaatgctttaactgaatatgcaatgatccaatttgttttttaatggtgtaatcgattgcgatatattggtaatcgattaccactgtatctaaacgttgaaattcaaattcaattgggaagagtcacatcttttcatacaatgctttgtgtaatcgattacatggttttggttatcgattactagtgacaagttttgaatataaatcaagagatgttactcttccaatggttttctcaagattttctcaaggttataaatctttcaatggttttcttgaccagacatgaagagtctataaaagcaagaccttgacttgcattttaagtacttgatataactcttacaacttttgaacttcttcttcttcttctttctttgccaaaagctttctaagttttctggatatcatacattgttctttcacagaatacaaaagtgtgctatatcttttcat

SEQ ID NO: 78947 - DNA, 270 bp, Glycine max
  unsure (1)..(270): unsure at all n locations
attgcttgtctctttgtttccttgtttgtgagttgccatatatggaattggaaaggaggataggtgccatcaattgaagaatttgaatcaagaagcaaggggtcaatcaccttaagagatattggactaagaagccctccaaattgagtgaatcaccaaagagagcacaaccaccaaaattgaggactgttttgtaattntgtaattggcaatttacttacctccattcctttcaaattttgtaacgaanaggcctttcattgaaagtgt

SEQ ID NO: 78948 - DNA, 431 bp, Glycine max
  unsure (1)..(431): unsure at all n locations
tccacggaggatatgcttaccacctcanaagactggaaagcgggttctaatgactcctctgcggcttccacataaggcataaaggatgggcagctcaccaagatgtcttcctcgcctgatacgatgaccagatgcccttccactacgaatttcaactttnggtggagtgttgagggaacaactcctactgagtggatccacgggcaccccaacagacagctgtagggggggttaatatccattatttggaaggtaacttgacaggtgtgagggcctatctgtactgggagatcgatctctcccctaacctctcggcgggtgccgtcgaaggcacgaaccaccattgaactcggctttaagtgggaagcattgaatggtaatttctccaaagtgctcttaggcatcacgtntatactggaaaccatatcgat

SEQ ID NO: 78949 - DNA, 400 bp, Glycine max
  unsure (1)..(400): unsure at all n locations
gcgacacacacgacgtatagaagacggacgcgtgacaatgtatgctacctttcttcgacagaggacacggtggtgcgacggagatgcaggcaagcactcgatggggggttgatagcataattttcagacaaacttggagatagcttgagcgaggtagccattagcacgcaaaaggggcatatattgaagcttaatgttaacgttggtgggcgtgcacaaatgtctttgataatcacgatttctactacggtgattacaaatacaccgatgtagataacctacattgtatcctactaagacggtccaccaaataaacgttgttgtattagtcacatgccgtgcacatgactcttaanagtgtaaaatatttacgacaatgccaccggtcacnctactatga

SEQ ID NO: 78950 - DNA, 444 bp, Glycine max
aataagttaggtcttatgatgcacatttatgtgacactagaagaactatggtaattgaaaactagacttgtaatgatgcaaatctaattatgtatgcatgtacctataatatcatagatgtagcttcggaatggaaaaacattttggaggttgatatgatgttcattttcttggtgtaagttgcccctattataggaaaaagcggtacaaccactaaacagagaagcgtcacttcaaaatagcatatggcagaaatcacaactccaacaatgcaagttgcacagcttgaggtgaagtgacccaaccgtgagtaagaaattcacttgggctctagccatagaacgttgtgaatgaagaaaggttaaacttgtagccaaaaaagaagatgcattactggacaatgacttctgtagaaatcatagttttatttgtagacttttaaat

SEQ ID NO: 78951 - DNA, 486 bp, Glycine max
  unsure (1)..(486): unsure at all n locations
cttatgctaaattatcttgaatagcacaattcaagagagcttaagacttattttgattcacaaatccagccacaactcagcaccacaactcaacttcatcaaaggcatcatgtaggaaacttagaaaaaaaaaagttcaacaacaagactacttctaggaattgatttagaacatgttatgaactaaataacatgcatgaattagactcaaaattaaaaagataggctaagaatgacaagaatacatgaacaaatgtatttagaattcaatcaacaaaataaaaattcaacacaaacttagaacataatgtgacagttactatgactaaacatgactctaagacaacatggataaagtgatttacacttatatttttgtgttttttttctaatcaatattttggaagaaaaaattagatctaagggtcagcacaagaatattatgaatgananatgatagaacctanaatcaacacanaaacatga

SEQ ID NO: 78952 - DNA, 411 bp, Glycine max
  unsure (1)..(411): unsure at all n locations
tattaaatntntattcctttattaatatatatgtgaggggtagagggtgtcacaagtgaggctcgctatatctggaacgttgacaaattgggctttattgcttgtattggtggttttcttgggttattgtttgcaatagtacatagagattgcccttcttgttcgagtaagtcattggccacttaaattttttcctctattgcaccaattgaaaaagaacatattttatctcttgattgttagtttttatttccttttttgctgcgatgttattttttaattagagacaacactagatgaaaatggcgcaaatggtttgtgtggtagctgcacattaactagtatcttgtcagctacaagcaacaaanaattgattaagaacttacacttgagatgttactttttaaataa

SEQ ID NO: 78953 - DNA, 425 bp, Glycine max
  unsure (1)..(425): unsure at all n locations
cattagcatctgaagttaccattgattatattttttgttccacttatacatttattgactgcctacaaaaatcaatattcattctaaaatgacaatagaccctactactcttaagtattcaatattcattctaaaattgaaaattcaatattcagtattcatacctttctgctctaacaaatttggtgttcaattgatagcaatcaccggagaaagacactatatctgcttggtgaatcttaatcatgaatagaaacaagaattatcctcttagaactctcatggtctgtcacatgaataagtaacacttttaatagccaacaagcagtttcacatactntggttgagcataagctgaattagtctgttgtagttgaacttggttngactntgagttcttctaatgccattactcattagttctc

SEQ ID NO: 78954 - DNA, 443 bp, Glycine max
  unsure (1)..(443): unsure at all n locations
gctttagcaataactagaaaaaaatattctatcttcaatagtcccatgtagaggacctactacggngatntggggttcaaaatgctaaaatttatgtctgagtgtggtttctttttttttttttttcagtttgatggtttttaaaaatcagaaaaaaaatcagaaatatgtttatagacatttttgtgatgttcttccaatttttacatattcttttcatttattttagattttttgatacttatatcaaatatgattaacaattcaacacaaatttactatgcattgtgaattaatccattatgaacatgaaattaaatacaaacagtattaaattcaaaataaaaaaccatttcacccattacaagttaaacatagtcttaaattcaaaatgaanaaacacttcattcattacaaattaaacatagcttaagcatgataaa

SEQ ID NO: 78955 - DNA, 503 bp, Glycine max
  unsure (1)..(503): unsure at all n locations
actaagctntactngtagtttgaccaaagtaagtacttagtatctaatgatacattcgatgaattttgtttacattcanactttcactagaaactacaaaaaatgatcatcctaaatgattcaataagtgtataatataacttatattctcttataattggtttacatttaggacacagaatataataaaaatttgtatttgtgttatggataaggtgaataagtctantaataaacaatggttaaccctttctcattagtggttaattctaattattctaatataatcactcaaaagtcacgtgaacaggaatttgtttgtctgatgtatgaaggactgactgaacttatatgaagaaagcgtgtgtcatgtattttgagaataattaaacctctatcatatgaggatcatganagttacaattaccagttagttatgcccaanattatgattactttaataacttaatnggttatatacgaattgggttcattttacatcc

SEQ ID NO: 78956 - DNA, 454 bp, Glycine max
  unsure (1)..(454): unsure at all n locations
agctctcataagtgaaatcaggtgcatccatcttcctaagagtcctctcacgaggtggaggttgagccatgttctcagtataaaaattagtagtggaatgctcaaaatcagaatattcagaatcactagcaacagaatactcagaatgctcaaaatgcacagaatgatcaggatgcacactatgcctaactaatctatgaaatgtcctatctatctcaggatcaaagggttgtaagtcagatggattgcctctagtcatatactacattcagcatgcacaactagttgccttcctatgcaagtaacagtgtaggtttgaactacagctaccttcaaatgatatccaaatgacttgaaattttgtgagcaacaccctagaatcatgantagattgcacagaaattntcaggcgaaaattcacagtctaactatggaaactacctaatgaaagttt

SEQ ID NO: 78957 - DNA, 330 bp, Glycine max
  unsure (1)..(330): unsure at all n locations
tgaatggttcgttcagtctgaccatctgtttgaggatgataagctgaactaagcttcagctttgtccccaaggcttcatgtagactcgtccaaaatcgtgaagtaaacctcggatccctgtcggatacaatactggaaggaattccatgcaaccttactacttccttgatgtacaactccacgagtttctccattctatacttcatattcactgngataaaatgagcagatttggtgagtcgatttactatgacccacacagcatcatgtccacgactagtcttgggtaaactagatacaaaatccatagatatgctctcccattttcat

SEQ ID NO: 78958 - DNA, 451 bp, Glycine max
  unsure (1)..(451): unsure at all n locations
agctntaagtgtgattcctttctttttcttatcattctcctcatgttgattcagtctcattagttccatttcgtgttcctataactttccaaataaagttgcaagagacatgttagaaagatcccttgattctgtaatagttgttacctttggttgtcattccctacttaaacatcttagaactttattaataagatcctcattgggaaatatctttcctaatgatgcaagatgatttactatgtgtgtgaatctcttttgcatatcatgtatagtttcatttggattcattctaaacaattcatattcatgggttaaggtatttattctagacctttntacatctattgttccttcatgggttacttgtaaggtatcccacatatcttttgcactcttgcaatttgatactctaaagtattcatccattcctaaggtagatgtaattata

SEQ ID NO: 78959 - DNA, 397 bp, Glycine max
  unsure (1)..(397): unsure at all n locations
tcctgactcaccataaaccttgactcagggtgagaatgccaatccttaccctcggaagcaaaaaaagaatagaggggaaatttccgatcaaagaanaagagaaggaaaatttccaatgaaagcaaaaaagaaatgaaggaaaattccccaatcaaagagtgggagaaagcaaataaaggaaaagaaggaaaattccccaatcaaagagtgggagaaagcaaaaagaaaagaaaggaaaattcccaatcaaagaatgggagaaagtaaaaaaggaagaagaagaaggaaagaaagctcctgatcaaggatcgaaagaaaccagaagaaatgtgcagagaggtctttggaccagacaatatctgaacagtacagaattgtcaccaaatgaacgaaaaaa

SEQ ID NO: 78960 - DNA, 250 bp, Glycine max
agcttaataccatcacacaatagtcttttttccctttccaaaacgcattccacctgtggtgataatagtagcacctgctgtgcaatctgctctaaatacaggaactatattcagtttatgctcatctaacgggaaactccaccccagttattcatcttgtccctcggttaggcaccatctttcgaagcttggagttcatcaaacatgcgacttagccagagccattgttaaatccatcgtccttacaaag

SEQ ID NO: 78961 - DNA, 420 bp, Glycine max
  unsure (1)..(420): unsure at all n locations
agcttccatcatgcgngctcacttgctttatcaactcgtaagaatttatcaatgggttcataattatcataatgtctacctagagagcataactcgttcagaatggtttagaaggtgtttcttacgtgtgagttgagaagaaatctggatttattatcatctatccattggtccttggggatctcgttcttctaagcatctagaggaatgtgattgcctttttctacaacatctcacatatcaatgtgattggactcaaagaaggctatcatctgttccttccaatagtcatagttggctcccttgaacatgggattatttgtagtaaatccttcttccatcatttcaggaatttcttttcccttgctctatcaagagctcaacccagaggccaagctctgataccaactgaaacacact

SEQ ID NO: 78962 - DNA, 395 bp, Glycine max
ttggacaacctttctttttcttctattgtgtaagtcatagggtgaaccatatgtggtgaagctcatgagacaagccaatgcattcccactgacaataacactcaagacattcttttcatggggaatcagtagaggcaacggtacactcaaggagggtatttaagcttctagcaaggtccttataatcagctaggacagtggaggacacaccctagcaaccaggtcaataaagaccaaggtggatcttcaaacaggccaattcaacatgggcctaacatctttcacaggacaactaagttggaagagaccttgacttagtttatgcaggtaacgatgtcaaatcataagagtactgagtcagcactaaagaaccttgaagtacagatgggacaact

SEQ ID NO: 78963 - DNA, 454 bp, Glycine max
  unsure (1)..(454): unsure at all n locations
agcttgngttgcgtcgagaaactctgaggtttctagttttgtagggncgctgntngccatggccacattaattgttttccttttcttgtctgctagaattatttttcgtttccatatcgtccccattattactgaaatcctcagcattaatggctttattatttcctgcaggaatattcaaaggaaataatagttgtggattcttaaaaactaacagcagcaattcattccactttggatcctcagcattaattgtcccattatttgcaggatcatcattgtttttgtttcctgttgcatcagttttgcccttgcattgattgccatcatcatgtccctgattatatgaagcaccatcacgccacagatacctaaagctgccagatgaactctgtcatcatcactcatggagaagagtttgtcgcatgaatcatcagagtgacctaatacacca

SEQ ID NO: 78964 - DNA, 320 bp, Glycine max
tcaaaatggaccaccggagctcttgagaaatctatgtcataactttaactcggatgtccgattcacgcgcatcacatattgaggcgctcgaaaaggaacaacggaagctctcgagaaattcaaatggtcataacttttcagactgaggtccgattcaggattataatatatcaagacgctcgaaattaaacatcggaagctctcgagaaattcaaatggtcatcacttttcacacggatgtccgattcgggtgcataatatgtcgacccgctcgaaattgaacaacggaagctctcgagaaatcaaatggcataactttt

SEQ ID NO: 78965 - DNA, 224 bp, Glycine max
  unsure (1)..(224): unsure at all n locations
gatgaanatagagcatgttttctcatgcctcaactatgaggaggaccagaacgtgaagcttgccgccacggagttttccgactatgctcttgtgtggtggaacaagctacaaaaggagagagcaagaaatgaagagccaatggttgatacatggacggagatgaaatagatcatgaggaagcggtatgtgccggctagttactcaacggacttgaaattcaagc

SEQ ID NO: 78966 - DNA, 366 bp, Glycine max
  unsure (1)..(366): unsure at all n locations
cacacatgggcattaattcattgatagaccatttatctttatgtggggtggaagaaatcttaaatggcccatattcatgcggaagggtgttcaaaatgaaatgcactangaaggactcagacatatcaacctctagtttcttaagttgagctgaaatatctcgcattttcatgatgtactcacgcacacctttcacactggtgagccgaagagaagaaaacttcatgatcaaggtgcttgctaaagtcttatctgaagtgatgaactggtcatcaatggccttaagcaagtctcggaccttttcatgctggtcaacagaaccacgtatcccagccgagattntagtcttaatgaacatcacgctga

SEQ ID NO: 78967 - DNA, 402 bp, Glycine max
  unsure (1)..(402): unsure at all n locations
ctatgggaactgtacagactaagatactacttangtaatntcctaggagctttttgcttgcaaactgagatactactaattatccaatctaaattatggggcatgcttcatggaatcaacttggctaaagagaaatggtatangaacctggaaattcattcacatgcaaatgatgctatccaaatggttaaaggattagccaacccaaatcagcatgagaagctgatattggatgcgattcangcctctatcatgcctgctatgacagttcaattttcacatgtttatagagagtgcaacaaggttgcagacctgttagctaagaaaggtctctccctagatgagggaatagtttatnttttagatatacttggctttgtggtatctgcctttcatgctgat

SEQ ID NO: 78968 - DNA, 447 bp, Glycine max
  unsure (1)..(447): unsure at all n locations
agcttgggttgcgtcggaaactctgggtttgctggttgtcaaggtcgctgtttgccatggccacattaattgttttccttttcttgtctgctagaattatttttcgtttccatatcgcccccattattactgaaatcctcagcattaatggctttattatttcctgcaggaatattcaaaggaaataatagttgcggattcttaaaaactaacagcagcaattcattccactttggatcctcagcattaattgtcccattatttgcaggatcatcattgtttttgtttcctgttgcatcagttttgccctcgcattgattgccatcatcatgtccctgattntatgaagcaccatcacgccacagatacctaaagctgccagatgaactctgtcatcatcactcatggagaagaagttgtcgcaagaatcatcagagtgacctaata

SEQ ID NO: 78969 - DNA, 452 bp, Glycine max
  unsure (1)..(452): unsure at all n locations
cactagctgaacgaaccanaatatttgaaatcctgacttgatttgattgtaaatacctgttggatttgtggtttggaattcgggttttgtaatccacaagtccacacaatgtttactcaacgtaattaagccattttgaatatatttctccttcaatcctacccccaaaaggactagtccataggttttatatagaacacaaatatatttttacttcctaatctaattcctagtcctgaattgtgtcccaatacaaatagaatataaataattntatggattaaaaattattatcaaatagaatgaataaagataaaaaaactcttaatttaaaacattttagtagtattataaaacaacccatagaaaaactggtttggaagaagtagcagcaatagtattgaagtaaaaggtcttctgacagctggaaaagatatcatcacatgtcatat

SEQ ID NO: 78970 - DNA, 403 bp, Glycine max
  unsure (1)..(403): unsure at all n locations
agaatattgagtgaaatctacataggtttagaataatgatgcaacctgcagaggcttaagaagaatactaagaaagtctaaagaggcttaaggagaaaaaatatattgtattttatgcttgtgttagtggaaatcctacagttgtagggactggatgtaacattgttgcccaagatttatgggtgaaccaatatagttttgtgtgtgttgtcttccttttgtttatgcttcttatacatgtgtacgctntatattcattatatttacattgaaatttagttaacagttttacacttcaacaaagttttttaaaaacatttttaacttcaaaagaaacacatctattttaagagaaaaaatagattatgataagttgaaaaatagattatgagtcattttcttg

SEQ ID NO: 78971 - DNA, 429 bp, Glycine max
  unsure (1)..(429): unsure at all n locations
gttctcagtataaaaattagtagtggaatgttcaaaatcagaatattcataatcaccctcaacagaatgctcagaatgctcaaaatgcacagaatgaccaggatgcacactatgcctaacaaatctatgaaaggttctatctatttcaggatcaaagggttgtaaatcacttgtattgcccctagtcatgcactatatgcagcaaataatgtgtttctcaacaagtgcctaagaagggggtaaaactacaactatactcaaacgatatcaaaatgagttgaaattttgtgaagaacaccctataatcatgaaaagatagcanacaaaatttcaaacaaaaattcaaagtctaactatggaaacttcctaagggatagttagaanaatagaacattaaaacttttgaaaataaaaaaaaacttactaaac

SEQ ID NO: 78972 - DNA, 444 bp, Glycine max
  unsure (1)..(444): unsure at all n locations
cttctcgggccattcctgcgacagcttatattntgataagtagtttacacgaatattaactatcattacaaacaagggccaaacaacacttctcatggcacgagtgtcaacatgcactttataaaataattatattggggtcgtgctattttatgacacatacgtatttgcacacataaaaattttgtatgaagcattttacgacacctatccatgtacatatttttttgacaaaccttttcatgctacatgctatatatatacacacacatttttttggaaggcttcttttgttatctactcacaaattcacatattttgaaaaacacttttacgctacccattcaacactttgtaaggcacttcatgctatatatattcatattatgcaacgcattctcctgctatacatatctatattttgcaaggcatattattcaactc

SEQ ID NO: 78973 - DNA, 490 bp, Glycine max
gcattcagacagtaaatacaagcaagcatcttatcataatatcaagagactgtttgaagcaaataaccaaaatgttttgagctgcaaaaaaaaaaatttatttctgagtaatataataatattggaagccagggagctaaatataaataaataaatcatacaattcatgttgggtctggcaaatttgccttgtacattttattcttcatccagtacacctagtactgattaatatataatactatctatttttgctgtgcaaaaaaaaacaattcatgttacacaaaaaggtgaaaaatagtcagtttcatactttctaacagtactacattctaaaatttcaagtctcaggtatgagttgtgattgagaagtgtctacaaaatccaagaaatttctacctaaccactagatgaacagcaataaactacggcaataaatgttggcaatgggctgtgaagtgagctagacaaaactagagtgtccaaatat

SEQ ID NO: 78974 - DNA, 407 bp, Glycine max
tccccctatctctaacaataatcatgtgggtgatgcctatactactcggacttgacgagccttcatactcaatggtcccccgagtaggctactcaaatctaaagaatctagtagatataattaaggtaagagggaaactctaacttctaccaaaaagataaagatatcccttaaaatcggatgttatatgttattagaggaaaaataagataaaatcatattttcccctatttacattatcttagaaggaaaccaattgtaatctgacctactttctgatacctgtatacctctacacctttaacttgagcatcgaagtgtcttcccaggtacaccccaccaccgttcgtggaagattatatgaaggaacacaactatgagaagattctgctaatctggcaagaaca

SEQ ID NO: 78975 - DNA, 301 bp, Glycine max
  unsure (1)..(301): unsure at all n locations
ccacgaatgaatatgaatctggtgggaataacaatggtttatgtgttgaagtgagtgacgtctgaaagacacgtacaacacgggaactgtcttattactctgtccgggttgccgaaagaatgaatacctggcgcacgccaagaaagagtatangggtgtgtgatggatgtgaccaacgcgaactcaagtccaccagatgatgctccacaatctctctgtttttggctgctgttgagttagaaatggtggctgtgttgtgatggtgagaacagtgaaggtgacatgtataattaaaacaatg

SEQ ID NO: 78976 - DNA, 456 bp, Glycine max
  unsure (1)..(456): unsure at all n locations
gcttgtcggattatggggtacccatcacatgtattactangtggcggtcgggcgatggtgcaaaacgattctccacatccacaaatcacgtataacccaccatcccctgttgcccacctccaactgagctcacgtactcccacgtagcccttatcctcgttcctctcaacgccgggtccccatcaatcctcccaagcttccacaacatccaagtaattccacatccaatcatcatggactaacaaaatcaagcaaaacagggcaaaggcagaaaactctgcccaaaacacaactcaaaatcacagcttttcacattcaaatacccaagtaacatttccttcgttccaattcattaaccgttggatcgactttgaaaatntactggaagtctctagtacataagtctacattttgaccgttggngatctgtagaaaatatccagaaccccatatgta

SEQ ID NO: 78977 - DNA, 389 bp, Glycine max
  unsure (1)..(389): unsure at all n locations
tcctgactcaccatanaccttgactcaaggtgagaatgtcaatccttaccctcggaagcgaactagaatagaatggatatttccaatcaaagaaaaagagaaggaatatttccaatgacagcaaaacagaaaagaatgaaaattccccaatcaaagagtgggagaaagcaaaaagaatagaaaggaaattcccaatcaaagaatgggagatagtaaaacagggaaggaaagatagttcttgaaggaaaaacagaaggaatatgcagagaggtctttggaccggacaatatctgaacaatacagaattgtcaccaaatgaacgaaaaaagaatgaaagggaaccacgacctataatagtcttgtccctttgattaccaaccaaaatcccg

SEQ ID NO: 78978 - DNA, 417 bp, Glycine max
  unsure (1)..(417): unsure at all n locations
ctgcatgcaagcttgtcttcaacaaataaatcagattctattntctaatcttcaaagctcagctacagcttctttctccgtatatcaactatgcaactcacagataacatgaatggcctatccaatattatatgaatgggattatctttacagatatgcatcaccacaaatgctgttgggaagataaaatgttttactctgagcagcacatcttcaattacttcatatggtctggtaatggagcaatcatcaagtggtaaagtcatcttggtgggcatgatctccaactctcccaaccttgtgcacatggagagtggcattaattgaatactgtcttccagatcaataatagactatgccacattgacttctccaattgtacaaggaatagatacacttctcaggtcattatgcttg

SEQ ID NO: 78979 - DNA, 417 bp, Glycine max
  unsure (1)..(417): unsure at all n locations
tactctatggaagtgaagactaacagtttcaccagagtgtttaaagaaaatggacatcatatggtttatgacattatccctactatgtaaagaaactntgctacttgttcttaattgttgctcgtcgtgtatgtcgaactccacttcaatctcttaatatggtgcatagatntgagaattgttgaggacccatatgaattacatcacaacatcgatcattgtcgcaaatgtatttcattatttcatctctaactctctccccgtgttctcttattctagaaggtatttgtgttcttctttgattgtttgtcaatgcacaaattaaccatatcatgaacattacttgcatgatcaccatntgaactaganaaaatatnntgaattaatatcttcactggccatctatgattaagaaaa

SEQ ID NO: 78980 - DNA, 447 bp, Glycine max
  unsure (1)..(447): unsure at all n locations
agcttccatcaagtggtaatcagagcacattatgcttaagtaggtgctccttagacctccattaatttttgttttctttacattctcttccattgntgtttcttcatttttctccatgtatctcctcacatgtcttgttctaaatgttgttaacaggattctttagagtttccatcgattaaacttgctatagaaactagagttgattttctatggatcaaatttcttgttcttgttcttgaacgatgaattgtgttgagtttatgttcctttgagttttgtcttgttattttttgtggctgaaacctaaaccataaaattattacaaaaatattaaagtagaaaaaaaccttaaaaatctagagtgacttgttcacctatcgtagntttgtcatagaagtcatgtctagtcatgaaacttgtcacataagatntcttatgttgtgc

SEQ ID NO: 78981 - DNA, 370 bp, Glycine max
  unsure (1)..(370): unsure at all n locations
tacttgtgacatataccttgtatgggggctcatgggccattatgggatagacaagacccttgtcttactgaaagaaaagatttattggccccacaagacagatgcccataagaattacattaggtgtgtggcttgtctacaagccaagtctagggtgatgcctcatgggctatacacacccttccccatcccctctgcaccttgggtcgacattagtatggactttttccttgngctttctagaacccaaagaggtgtagactctatctttgtggtggtggataggtttatcaagatggaacactttataccatgccacaaggaggatgatgcttcccacatctttaaactctttttatggaacgtatga

SEQ ID NO: 78982 - DNA, 306 bp, Glycine max
  unsure (1)..(306): unsure at all n locations
ttagcgcgaatctcacgttaagtgcacaaacgctgcctactcgcttagtcagatgatgtcacgctcaacgcgtgatcacaccggcataccccctcagcccaaataggcacgcttactgcgaggtcgcgcgaattttaagctaccttaggcatatataaagagtccgatgcaaaggagaaagacacaccgagacttagagatgtctaatgaatacattctaagcttgagtatctcanataggggaaatcctgtttctatatacattataccattcttctgctatatccatccctcttcttctttcat

SEQ ID NO: 78983 - DNA, 478 bp, Glycine max
  unsure (1)..(478): unsure at all n locations
gagctcattacttctgccctacaaggccctcatatcttgttcctgctctattcttcctttcgggcccttgttgtttcccactctaatgcttcaactgtggtcatgttgatgtctttcagctcatcacactctttcttgaccctaatgactgtcattttcaacttctctttttccattcttgtctttttgagctcttctttcaaagcttgcacttcttcacttttctcaagaatntcagcctttctcccacttagactttttttctttgggagccaagttatcccttgcgttctagacttcaaccacttgtgatagccgctgatgacatcttctacttcccctaagctccttatcttttcttaccactctatatcacgctntatagagtagcctaactgtcttatagagtagcctaactgtcttatggctagcacggngttataattaatacaacccctcgtccctatcacagggacat

SEQ ID NO: 78984 - DNA, 439 bp, Glycine max
  unsure (1)..(439): unsure at all n locations
agctngtagttgtaccaagcaagtctttcttgcttanggatgttgaggtagacccttaggatngagaggattatgccaattggcatccataggaaggtcaagagggccactagaggagttggcctttgaactaaacggccctcgtggaaaattattgggcttagaagcttgtttcttggtagtggctcacacttgatccttggcaccatgtatccttcctgtaggggaaaacagtggtagtgaatagatttgatacatgtgaaaaatgagcatgagtggcattttcattcaacttttgcttggatntagaccatatcatgttattactatataatcttgtttggtaaactctncatatttactataggaaaagaagataaaaaatacacatttctcatgttaaaataactcacgcgctcagcttgatagtgatataact

SEQ ID NO: 78985 - DNA, 351 bp, Glycine max
acacatacacattcttgttcctagttgatcactcacttctctccatattctccccctttgattatgagtttgagcttcacttgaaactaagttatctaattatatgagttcttgatttaatcgctattttctctccccctctggcatcatcaaaaagccaaagtacgtaagatatataagaccatacataaatgactaatcatacaagagaatagaaaacaatcaaacaagataacttaaccattcatcacacttagaaagataatacttcataaaatgtcatataatccagagagtcattcataataaccaaataaaactactaatgcacgaagaaaaatactagttagt

SEQ ID NO: 78986 - DNA, 424 bp, Glycine max
  unsure (1)..(424): unsure at all n locations
agcatgccacccagctcgcccatgcgagcatggttgcttcttccacaagcaacatccttctggaggaatcttctgaaaggcccaagtgggcttgggtgctatttgcacccacatttntactaagtacacccccctgcttttgttttgtgattcttttttcgtaaagttaccgaaacttatgaattacgtaacgatacttgttttctttacgcaatgtcaccgaaccttgtggattacataatcatcctctttttgacttacggaatgtcacagaacctcactaattgtgcaacgacgcttccatttgatttccggtgtgtcccggaaccttaccgattgtgcattaatattttcttttgtatccggcacgtcccggaatttcacaaatagtctaatgatgggtgccgagcaccttacaaagacc

SEQ ID NO: 78987 - DNA, 420 bp, Glycine max
  unsure (1)..(420): unsure at all n locations
tggatngatttagtctaactagggatcgaggattagtaatttatgctacaatatagaacacaaaatcatgattgattagagaaacatctttatatacatcagttggtttggtagaaagacccaacatttttacctactgctgtcaatcttacttacttgcagttttactgtttttagcttagacttagtttaattctgttctaaatcatcaattaatcaattttctttgaacaatgccttatttttgaatntaaccccgtctaatactagttctatgagttcgatacttggattcatccgttttaattttaaatacttgacgatccggtgcgctntccggcaaatcgaatttcccttgaacatatntgtataaagaanaaattngaccaanaagtaactgcaggggaaatccaacaaagt

SEQ ID NO: 78988 - DNA, 412 bp, Glycine max
  unsure (1)..(412): unsure at all n locations
tggcttattccctagtggatggcgcctcctcttacctcttctcctttatctttcgctacatctccatggtggaaaatcaccatcgaaggacctcattgaagctcaaagatccaacctccatagaagcttctcaagcaagcttccatcacttttctttactctaaccatgatgatgaatgatgtaatacaaatatcatatgtattagaagacacaacacaagataacaaccaatacaaattccacttaagggagttaggcatgtaaaagtctaaaaatcttcaaaacttctttaacatttgccttgagaggttgttcaccatattgctgatctcatgttactccccctatctctaacaatctccctntttttggctntgatgatgccaaacttanatatgacattgagtgcat

SEQ ID NO: 78989 - DNA, 496 bp, Glycine max
  unsure (1)..(496): unsure at all n locations
gtctcatatatctccctatctctacagtatatgatccaggtctgcgaacccgcgggntaagtntgcggattaagtggataatgagtctctctttttaaaatccatataattatatcaatgtttttagtatgaccaattangtccaggaacctagcaggctttacctatggcttaccggnttaattcaccagtccattctacaaagatgggtaatttgttatgttaagatcaaggttatcaaactcgagagtttatgtaggttcgtgagagttccatacactcgactcatgggctcaccttgtagactcgtaagagtccacttcatataataataataatagaatatctataaataacatatcaattaaacatttcatcaatataataaaaaaaatagtaaatcatacatttcacaatacttaaatagtcaagtctagtaatgcatcactactagaatataactngcagatgtatagtagtgatagatcattcccat

SEQ ID NO: 78990 - DNA, 415 bp, Glycine max
  unsure (1)..(415): unsure at all n locations
agaaattcattataacaaagagaatgtgattgcaaagagttaggggataacaaattctccttacagaaataaaggaacaaatatattaatcatcaaactatcagtacgagataccacttcaaaaagaccgtaccacctgtccaattctgtgattttcaggagactgtaatactatcatccattatgaaatgccctattatctttgggggatattcagataacaaaatcatttcatttacttgcaacaaaggtgaccagggtntgagtagtaaggtacagagaaatagaaccaatgtaaacaggctacanattgaagcatacattctgtcaggcctgcacatgcatntatactacacaaaacagtatataaagtgtgtagatatcaatcgatcacccgcttcaatctagctccaat

SEQ ID NO: 78991 - DNA, 382 bp, Glycine max
gcaccctctgcatcagtacacttcttatataccactctagcccggctgctacctctatcaacttctgtttcagattcattaaaggtccacatcgcctaaaaatcttatataggtgcatttctgagggaacagaatccagctcagcaaagttcaacacaagctcagccggagaattctatctgcactacaaaaagcttttcggaaccacacaagatgctgctgaacattgttctgaataagaccacagtataacatataggtttttggtcacagggctgcgaatctctttgtgctttcgcgagcttttcaaacccttgatgcctgcagtcatggttactaaacacaatcatgttcaggaccccccagcgtttctttacacttt

SEQ ID NO: 78992 - DNA, 409 bp, Glycine max
  unsure (1)..(409): unsure at all n locations
tgctngctctaaaattacattgatgtatgtttttattgttatgaggctatatgccacctctgctttaagagtagtgtcccactgactaaattaactctccatatgtttgccttaccacgaatggccccgatgaagcttgcctcaaagaggaccatgaaagacaaggctgccgaaggaactatttccgctctggagtacgacagtcaccgcttcaagagcgttgtacaccagctgcgcttcaaatccatccagggatggtcgtttctcccggagcgacgcgttcagctcagggacgacgagaatactgatttccacgaggaaatacggcgccagcagtgggcaccactggatactccatggtcaagttgatccagaaatagtccttgattttacgccatgcttggcaaca

SEQ ID NO: 78993 - DNA, 335 bp, Glycine max
  unsure (1)..(335): unsure at all n locations
tctcaaacactcnattcatgcagaacaatccactacatatcatnttcaatcaattcattgatcaaacacgctcttggtacaaacaaacaactcacagtgctgaaatttatataactgaaatttacaaacactgaaatataacatctgaaattaaaatgactgaacataaatcataaaataattgaaaataaactaaaatgttcgagatgcacacatttaaatgtcctgctcctgtgggagctcctatgcatgctcattaaggtccaacacctgagcagctggtgcagatggtgtggcataatcaagtatgggtgctaaggatggctatgggatct

SEQ ID NO: 78994 - DNA, 429 bp, Glycine max
  unsure (1)..(429): unsure at all n locations
tgatacatgtatgggttggttggttcaaggataaaagggatgccccacattatttccatgacacaaatccaaaaatgatgatntggaaactttatgcaaaactggtcatgcatgcacctatgtggacactcaagtgtcaaatttttatggtcatgtgatgctaaggctcangattcatttcctctattttaaatcaacccaatgtttccaaaatatgttcttttatcaatttgtgcattcacccgagtccatttcgggcgtccgggaaaattttcacagcgttcacccttcaggtgtacacattttttcaaaaactagttatgatcaatgaatnttttttcaaagaaaagttggaagtcatctcttttcaaaagcatgttggctnttcagctagacaacttaattttctttnttctcttttttttcctt

SEQ ID NO: 78995 - DNA, 389 bp, Glycine max
  unsure (1)..(389): unsure at all n locations
gccccttaggcacttctctctctttcgaatttgctgaggaaanatatttccgtgaagaacatccaagccgagacgcttccgtaacgtttccgtaacgttttcgtgagtaattacgcgaagattctcgacagttcttcaaagattcatcgntcgttcttcgtntcttcagtcttcaacgggtaagtacctcaaaccaagcttttcaattcattatatgtacccgtggtgggccacattntgtttcatgtatttttattctcgttttcatttactttntataaccccttttgacgtgcttaagccatntatttaagtcatttctcgcctaatctaaaaataaaataaatttccaccgatcgtttggaatgtatcatcnncgtatatttggt

SEQ ID NO: 78996 - DNA, 421 bp, Glycine max
  unsure (1)..(421): unsure at all n locations
atgtatatgcaaagacttaaacgtgtactttctaaatatataaatcaaaacttaaaaataatacaaatgcaggaatcaaatgaatagttaaacgttcatgatatacatgttccattggacatcaaaaaataaattttcgaaattcagtccatttctccttgtaaaatttaccaaggtgagaccttagatttgaaaccgatgacatcttgtgtctggatggaaaaaaaaaatgcatagttgctgcattatcttctttaatgccttgattcatttcctgcataagggtggtcctttgaacattgctctcattattgtatnttgggttctattccagcaattgctacttactggttcactttttggccttgctaccttcntctacttgacttgtgaagctcttggagacacagcagtggtaaca

SEQ ID NO: 78997 - DNA, 444 bp, Glycine max
  unsure (1)..(444): unsure at all n locations
attcttaaacatggattcatctaatgatttaattctatcttgtgcatcttcaccagagcagaattaatgccttaaaaaagaaccaaaaaacatatcagataccaaaccaacacacttagttttattgcatctgaattcataagaacaagagcaggggaactaanaaatttataagggtagtgctacacattaaaaccttagaagagagatcatttttaagctttatttatgggagctagtacttaaaagaggaagtaatttcgagaaaggggaacaaaggtggttgcaaaactggtgagaacctcgccatctgctgtaacagtgtagttatctgggtcgacagtgatttgtggaagagagatcattaagttcatgtctagtttagtgagccttctcacatttgctacttgcttcaccctcttgtcagtccgatagagcatgtac

SEQ ID NO: 78998 - DNA, 453 bp, Glycine max
  unsure (1)..(453): unsure at all n locations
ctgctgcatgcaagcttcttatccaacgcaattcgtggtggtgaagctccttcttccttggcttattccctagtggatggtgcctcccctatcctcttctcctttgccttccgctgcatctccatggtgaaacatcaccattgaaggacctcatcgaagctcaaagatccagcctccatagaagctccacaagcaagcttccatcaagtggtaatcagagcacaagagcttcaagtaggtgctccttaaacctccattaattatttttctttaccttctcttccattgttgtttcttcattnttctccatgtatctcctcacatgtcttggactaaatgttgttaacatgaatctttatagtttccaccgattaaacttgctatagaaactagatttgcatttctatggatcaaaattcttgttcttgctcttgaaccacgaatcgtgttgag

SEQ ID NO: 78999 - DNA, 414 bp, Glycine max
gattcattctatgcacgcgtagtggtccacattgtgtttcgtgcatgcatactcgcagtgcgatgagctgtgatacccgctgttgacgtgcttaagccgttttacttaagtcatttctcgctgaacttaaaaataaaataaatttccaccgaacgttggaagtatattatccgcgaacttcggttaaaataaattccgaccgttcgtcgtgccgatccacgttggaaatcaaaaagagggtaaacacaatataataatcaagaagacatcatttagttaaataaagcggaaagactatcggacgagatctctttgagatttctcattcttaatcgaattgattgaataactaaagtgagactaaggctaaaatcaactcgcctagtctagctcgtacacaaaaatatgcttttg

SEQ ID NO: 79000 - DNA, 452 bp, Glycine max
  unsure (1)..(452): unsure at all n locations
agcttgaagatgttcatgatgaagttgtcttatcactagagaatctaggtcaacacgaacaaagtgctataacgctgtcagatttgttggacaaaaaaaacttgagtgaatcaagtgaaccttatagcaagtttccattgtatttgaacctactgtgtaaacattctttgagtgattagaatacatattctatcaaacatttattgttgtgaaagccaggagtggcttcgtgacaaaaaatacttgggtcttaatctcagagggatattaagggtagtgccagaagtggcctagagagtacttgttgtatcaaggagtggcatagaggatacttgtntgtaatcaaaattttgattagtggaaccctgcatgntttgaaggagaactgaacgtcacccaagagttgggtgaaccagtataaaacctctgtggtttctttactgcttctatat

SEQ ID NO: 79001 - DNA, 358 bp, Glycine max
gccaagcccctacttttgaggggcaactcccgccttatgacgactattccgggcaagacgatgaggaaggagatacccatcttggccccctgctccacctcatagatccgttcccacatgaactaccccaaccgaacatagtccgccatatcccgacttcgcccacacccgtaaaagaatctgttcccttcgtggaagataagggaaagattgaggcgcttgaagagaggttgagagcagtcaagggcctcggcaattacccattctcggaattagcggatttatgtctcgtgcccaacatcgtcatcccttccaagttcaaagtactgaactttgataagtacaaagggacgacatg

SEQ ID NO: 79002 - DNA, 464 bp, Glycine max
  unsure (1)..(464): unsure at all n locations
atccttaagtcacctgcggcatgcaagcttcatctgtggtattcagagctcattatcttcaagtangcgctgcttaatactccattaatgtttttttactttacattctcttccatagtcgggtatgtaatattctccatgtatcttctcacatggctcgttctaaatgacggtaacaggatactttagaggtcccatcgattaaacgtgctatagaaactacatttgatattctatgggtcatatttctggatcttgttcttgaaccatgaatggtgttgagtctaagatccttagagtcttgactagatatttgacagcggctgacacctaaaccataaaattattgcaataatattgtagtagaagaacacctccaaaatctagagagacttgttcacctattgtagatatgcatagaactcatgtccagacatcaaacttgtcacataagatttcttatg

SEQ ID NO: 79003 - DNA, 200 bp, Glycine max
aaaagtttatggctacagaaaatgccataaatacattagggtggttgttacaccattctagggaccctcagggcttactcaccttccataccttgccctgggtcaatatatggactttcctgactcctaaacccaaaggtaatcatctgggggggaagtaacaaggacatttcctgccaggggagagctacctctaactt

SEQ ID NO: 79004 - DNA, 395 bp, Glycine max
  unsure (1)..(395): unsure at all n locations
agctngcaataataaaatagcacagcaacatggaagctacaatagagaaatggtccaattcaagtccagctcaatctaaaattgcatacaggcatatctaagcaacaaccaataggtatcaccaaaatttcgatagaccttgcaaaaattacaataagaaattattaaaattaactatatctgccttatcttaataacaaaatgcctaaagatgtgaagctacaatggccctccatatgcatatccaaatgatataaggctataaaagaattactaagacatgcaacattgaattcttagcatttgataaggatttatgagattaatgtttctaaatttttcatctatttttttagagaaattaaccttttgtctattagagcatttactctata

SEQ ID NO: 79005 - DNA, 450 bp, Glycine max
  unsure (1)..(450): unsure at all n locations
tccactcaccagggatttcgacaatgacaaaagaacgttaatgtagatggctactggtttctttgtgagtggtaccgtcttgtacaaacgaaaccatgacatgaccctcctgcgatgcgtagatgccaaaaaggcgaactacatgattgaggaagtccatgagggttcgtttggggcacatgccaatgggcatgctatgaccaggaagatccttagagcaggttattactggctcactatggaaagcgaatgctacacccatgtaaggaaatgccataaatgtcaagcgttcgcagacaatgtcaatgttctgccacatcctctgaatgtcatgtccgccccttggcctttttccatgtgggggatagatgtcatangggccatcgaacccaaggcttcgaacgggtatcgcttcattctcgtggcgatagaatatttcaccaaatgggt

SEQ ID NO: 79006 - DNA, 421 bp, Glycine max
caccctaataaatttatttattttatgtcagaagatcaacgcccagaaatctagattctcagcttctaaaaatgttctatatacgatgattcaaagttctcgcccatcattctctttggatacactacaaacttaggtaagtacctgatgtttcccttcttcacaggacgacgttacgacagtgattattcatttataatggacaaaattagtgggagactgcaaggtccgaagaacaaaatgcttatctgcgttggtcaagaatcctaagtcaagttaattatcttgctataccctcttacacaacgcagaatcttaggattcctaaaggtgtgtgtaacgatatagataaaggcttccatagatttatttggggtactcctcataatcgatgggtgaattggaacactgctgcataccc

SEQ ID NO: 79007 - DNA, 393 bp, Glycine max
gagaaagtaaaattctttgaaagaatcgaaatgctggaagtaaattgacaagggaaaggtaaattgcagaatttaaaggctcaacgagttcattcgatcgaatgaaccatttaaaagacaggaattatataaaatgaaacgtatattgcattgcattcgaaatataaagtttacagaattttaaaatggttcacaatcatacattctgcttgtgtactcgtttctctctgcgctgggtactttgagtgtataaggatttgtagaaatgatttgcgacctcgaaatctgactaaaaactgctatatatagacattcgaaaataaactgccctaacggtcgaacactatcctaatgccaagtgtcctgctacgtacaccttgcatgcacataact

SEQ ID NO: 79008 - DNA, 308 bp, Glycine max
  unsure (1)..(308): unsure at all n locations
atagttcagttatcttcctaagaataatatttaattgctttctttaacagtgcaagtcccattttctcattttctaccaatttatttgtacagagaaagcattttatgctttgaagagaatgcaaccaaagaaaagacaaattgttgatcgtcgcgcctcacaaagtcggaagataaggtattgaaagattgctatattttttttctctttaccggtgnatatatatcttgccgtaatttatgaaatgaataactttttgaatgatttgatgaaggtataatgttcacgacaagatatgtaaatttat

SEQ ID NO: 79009 - DNA, 317 bp, Glycine max
attcttctttctcaaacccttttttttttcgcaacccaccaaacctatcttagaaaaacgacgatctcgaacctgttcaccgttggatcgtcgagaaatttgagtatcatgtttgcaacccaattttgaatattctcaccgttgggaatttcaaaatcatatctgagcttagaggaaaacccttcgcattgtagcattttaatttcccgcagaaacccaaaactgtctcggtaaaactaggatcccagattctgtagccgttggattttcatgagatatggatatgttgttcaaattcaattcctcacacttcaccg

SEQ ID NO: 79010 - DNA, 471 bp, Glycine max
  unsure (1)..(471): unsure at all n locations
ctaaaatgatgtgaaactactttttcttttgtttgtntncaatgaagtaaaaagtattntacaacattggtcttcattggaactggtgtaaaaagtactttacaacatcgattnttaatagaaccgatgctgtaaaggttatttttacatcggttggtgccacaaccgatgtagtttctacatattatttttaaaaaaatattttgttccacaagcaccaattgtttcaacttatcttcgtgtcaacaataattctattgtcccagaaaataccaaaagaatctgcacatatcacttacaatttaagataatcacatattaaatattggaacactaatcatgtagccaaacccacctaatgggcatgacatgggtttgttatgtcaatcacattaacatattggtggggtcacataaaagagtnttgactaaaatattctgatcatatcatctcaacaaccaaggaaacat

SEQ ID NO: 79011 - DNA, 330 bp, Glycine max
  unsure (1)..(330): unsure at all n locations
cgaggcgcttccgtaacgtttccgtaacgtttccgtgagtgaattcgcgaagggtttcgaccgttcttcgatgttctttattcgttcttcatcgttcttcagtcttcaacgggtaagtacctcaaaccaagcttttcaattcattctatgtacccgtggtggtccacatttggtttcatgtatttttattctcgtttcattcactttttatacccccttttgacatgcttaagccattttatttaagtcatttctcgcttaacctaaaaataaaataaatatccaccgatcgtttgaattgtattatccgntaactttgggtgaaatgat

SEQ ID NO: 79012 - DNA, 345 bp, Glycine max
  unsure (1)..(345): unsure at all n locations
aagcttgaagaagttctgaagaagttttgtcttttacatgcnncactctcttgagtggcatgtgtattggattgtatcttgtctggcgcatcttantatatatgatatctgtattgcatcatgcatcatcatggggttggttttgagacaacgtttctaagttagaaaagtntcttcacaggcataaactctctgtgttgatccgatacagcctcattgtaantgattacaaccaagttgtctaaagcttgtagacttgagtctcggatcggnttaatcgattacaactatctcataatcgattacattgttgtttgagagaatagactgtattatcaagactct

SEQ ID NO: 79013 - DNA, 390 bp, Glycine max
  unsure (1)..(390): unsure at all n locations
gtgctcgctagagcagcgatgacaacattatattgcactcgagacaaaaaaaactcattcgccctttttgagaacaatattactctacaatttcacatcccatacaggcttttacatttaacagaaaaaattaacgtctgagcattttcaaattaatttctatctcaaaaccgtcttacacctccaatggcacctcttagggtttatataaagagaaagtatcaacgggatataactgtaacaatttaaacgaattgaatgattaaattggagataaaatatattaagaaccaaaaatccacgcattaattttgaaagagggacagaccatgtgaatcangctattctttaccgcaacagtaaataatgtttngctaccaaatacattat

SEQ ID NO: 79014 - DNA, 336 bp, Glycine max
  unsure (1)..(336): unsure at all n locations
atgatggttcaagtacatgtggatttggtacgaccatgccctcctgatttccagctaggaaattggngagtggaggaacgccccgacatttacgcaccgagcataatgtaaacctttacggttttaaaagctctacaanagggcctaagcttcagagatttatttctgttaaggctatgtgacttttgttgtttgaatgtataatacaaggatctatcttcatctgttcctacatctctacccattctcatccatttgcatgtatacttatttatttctgaaacgggagatccaatgactagtcctccgaaggtactaatacctgggacacgccta

SEQ ID NO: 79015 - DNA, 355 bp, Glycine max
catcctatacacatgaggtttaatgattttcatattccttatggcgcgggtatgatatgcaagattctcttgatgaaattacctatatgaatgccatgtgaggatgcttgtatgagattgcgctgaattctctgtgcacttattattgtataatgggtgccctacctattagcgcacatcaacgattatgactaagagtatggcgatgctatgtgattgcttgactcttaacattcgccaaacgtttttggttcatatagcttgagactccaactacgtcatgtgttaatccctaaacgattaggctggttcatttacctcgactcaccatgtttaacacattacgtcctatatg

SEQ ID NO: 79016 - DNA, 374 bp, Glycine max
ataaaagtgccctatactaaaagagatgttgatgttaaatgtttattataaaattattttttagtgagacaaaaggggatagaaagagttgtttttaatttttttgggagtatttgatataaggaagaaaaaataatttgtggtcataaaccagtattaatagatattatgaattatagaaatgagtgaatttatatgataaaaattacatgatgatattagggagtagttatttaataataggtgtaatagttatgaattcataatgagaataggatgtgtatgatagtgtatttaaaataatctaaaagttgatttaccgtcttatgagataattaggagaatttagtaaaatataagaagaattggggggg

SEQ ID NO: 79017 - DNA, 434 bp, Glycine max
agctatgaatgatctagagctggccttgattgctgctgtgtagcatagataagaaatgctctgagctctgagcaaacctgtaagaactggagctgctagtgctagagggaggggagaggtataaggagctgagatagggggagctgaagtaaatagggcctcagatatcctaaccttggaattttgggttccccgaaaagtgaccgagggtcatccaggttccggtagttctttttaacatatgccaaattaatggcttggctcaagttctcgaaagtcatagagtcagaggtgactccccgggtcttgcacaaggcagtgatgagggcatgaaaacctagcctcagggagtcttgctgagcaataagagtaatctgactcgagatgaggtacccaaagatcatgtccatcttttgaataatcccatatattaa

SEQ ID NO: 79018 - DNA, 432 bp, Glycine max
  unsure (1)..(432): unsure at all n locations
acctgagcatccaattctcatttactaaccagtaaatggttccactaatcaatcttaattacaacaagtatnttgacctatcactcttgacttgtaggtattctctagaccactattggcataacacttagactccccctaatctaagaacacccaactatattttgtcactaagccactactagctttcacaaacaacagattgtagaatcatgaactctaacacttagagagtgtgcttataatgaaatataactagataacatggctaagcaaaggattgactctataagcacaatgcttctcacttcttttctttcaacttgaacttgagtatagtgttttgataattggtcggtggtctttatgaagcttgaacattattttactgacaatgacatatatngtngacttgacactaaaatataccat

SEQ ID NO: 79019 - DNA, 430 bp, Glycine max
  unsure (1)..(430): unsure at all n locations
agctcctggtgggacatattgacttgttttttcatttgtactnaaccacaaactcggccttctttcattttcagattgcgaatgcctataacagcacctttgtagatggattatttcaagcccgtcacgtccaaatgttcaaatcattgatgccatattgtgacttcatcttctttgtaaaatagacctgtggtcgagatactgacttcttgacgtgtcacataggtaacagttgtgctttgatctgctgaccttcataaggacttcactcttctcatttggcacacaacattctgactttgtgatgtttacatagaatccttgtcacacaactgactgtggctgatcaagtacgattcataacttcatcagagctctttgtaagataagaaatcttccggtctagctatccattcactgattttcctta

SEQ ID NO: 79020 - DNA, 450 bp, Glycine max
  unsure (1)..(450): unsure at all n locations
agcttgcatgttactagagaatgatattatttcgttgntgaaaaggaagaggatatcagtggattgaagacgcttatataggcagagaagagaagggctgatttcgagagcaagaaagctgctgaagcttgcaagatggtaggggatgagaagaataatgctgcggaaaatgagaacgaaatgagtagattgaaggagcttattgaggtggagaagagaaaggatgattctgagaggaaggaagacactgatgtttgctagttacttggagaagagaagaataaggttgctgaaaaggaaaaggaaattggtagattgaaggggcttatagaggagaagaatagaagggttgattctgagagcaagaaagctgctgaagcttgcatgttactagaagaagagaagaataacgcttcttgtaagggggagatggccagaattgaatcggag

SEQ ID NO: 79021 - DNA, 371 bp, Glycine max
aaactagtataatataagacaggttagaaaactaaatgaatgaggtgtctctttttattgagatgtcaaaaattatgttcgtgatgatgtcttttttttatattctctaacaatattacattaaaatctttgttctttgagttttttagtaagtattacaagagtactggttagtcaaaattaatttaatgtaatttttttataagatttaaatgtaatatgatggttattcctcaatataaaagagaagaaatatattaaaaataactgagagagaatggagtttaatgatataaaagtttataaaaattaagatttagatagaatataatattaataatctactagataaatatggaatctatataata

SEQ ID NO: 79022 - DNA, 454 bp, Glycine max
  unsure (1)..(454): unsure at all n locations
tgcagcttncttgagaagctagagcttatctattcacactcatctaaaaactaagctcacctgcttgagaagctttcttgagaagctagagcttagctacacacccctataatagctcagctcaccctcatgacaaaaaaacatgataatactaaaataattctactacaaagactactcaaaatgccctgaaatacaaggctaaaaccctatactactagaatggccaacatacaaggcccaaaataagaaaacaatctattctactatttacaaagaagagtggacccaaccttggcccatgggctcaaaaatctaccctaaggttcatgagaaccctaaggccttctttatcaactctagcccaatcctcttggagcctcttgctcatggctctggtaactggtcctttcctagggaggattgcatcatctaatgacctgatcactgcaca

SEQ ID NO: 79023 - DNA, 328 bp, Glycine max
  unsure (1)..(328): unsure at all n locations
agagaaggagtccacggagganatgcttaccacctttcaagactgganagtggtttctaatgactcctctgcggcttccacataaggaatagaggatgggcagctcaccaagatgtctttcttgcctgatacgatgaccagatgcccttccactacgaatatcaacttttggaggagtgttgagggaacaactcctactgagtggatccacgggcgccccaacagacagctgtagggagggttaatatccattatttggaaagtaactcgacaggtgtgagggcctatctgtactgggagatcgatctctcccctaacctctcggcgg

SEQ ID NO: 79024 - DNA, 300 bp, Glycine max
agacagagagcggtgatggctggttcatctgcaggacctggatatacctcaccctcgtctttctcgctgataagatgtactgctcccatatgatgagggatgtgcggatcctccgccccagagtgtgtcttgctctctggaacttggacctgtgtctctctatgacctatccacactgctccccattccatattcggcctgggtccacattaatatgggctttgtccctgcgctaggtggatccgatagaggtggtgaccttatcgctatggtggagcgtttatcgcgcatgatggaaca

SEQ ID NO: 79025 - DNA, 462 bp, Glycine max
  unsure (1)..(462): unsure at all n locations
cagatttgatgattgagagtttccactttaattataatctctacctctacatggtgatgacatatgnanaatggagactaagatcagcaatcaataagattccactcaaagagttgggcatgaaaaagacaaacttcttaagatcaaagcttaatcttcatgttgttcccctatctctaacatccttaatttcaaaaaagtaaaactgatggtggcagtggaatcacaaaaacatgttaagatgattgtggctttccaaatgcctgatttattttaattagctatgctaagatgatattctcaatgatgcatctctatattcaaattctataatcttattcttccatgcttaattggccagttatnttatagtgttcatgcatgtttcttgaccatntatatgtattataggctaaatcctgtntcttcatagtatagagaaagcatactaatcgaaaagag

SEQ ID NO: 79026 - DNA, 310 bp, Glycine max
aatatgccaaaactggcacgggtgtgtattaaaacttacagacacataattctagaagtgcagttcatcaatttaaaatataacaggtggtggccacccttaaatttaccatgggaagagtgaactgttagcgacatatgaccttgcaaatgctgtcagccttaccatttccaaacattatactaaggctcttctcttgatatgtggcggggtgtgctcgaggctttagttacatgtcaaggtctgggttcacctgcatcattgatagagctatactccatgagtcacacatgaagtttatactccatga

SEQ ID NO: 79027 - DNA, 243 bp, Glycine max
  unsure (1)..(243): unsure at all n locations
ttcatgaatgaagcttctggttatttcacatgacgcattgtggttagacacaacagattgctttatgcccaatctcttgctcgagtttcatgctactcccttgaggagccagttgggaatagccaagaccatccacagactccaatccagtgtgtattgggtcaccatgtgtcaagatgttacgaagntcattaatgtttatataagatatgctgtaattaatatttcaaaatgtaagtatat

SEQ ID NO: 79028 - DNA, 454 bp, Glycine max
  unsure (1)..(454): unsure at all n locations
agctntctcataagtcctaaatgacattttatgctatgattaactcactttaacctccatttaccacagaatccagatttaaccttccaactctcaaagcctcactctttttccactcataacaccacattctcactttctaaacctaggttaactctacccttcatctctaacagtttccataagcaatttcagcatataaacatcacaagcatcatcacaaaaaccctaaaacagaatgggtatgtctaactcatccaaacatggcaagttcaacatgctttcaacaagagtcttcacaaataactatcacgaagcagaaaactaacaaaactacccatcatatctcccaaaaccccatacccacgaaaatcaaaggagaaagaagtccacccaaacttgagatttcgaagtcccactcgtagacacgcacttcacgaccccgaaaatgccc

SEQ ID NO: 79029 - DNA, 293 bp, Glycine max
  unsure (1)..(293): unsure at all n locations
cccttttttgcacatattnggtagttgcatcctatccgaagccattataccgacactgnctaacgaaggcaaccattanggtcctccaggaatggactcgggaaggttccaagttagtgtaccagataacaactaccccagtaagactttcttggaaggaatgtatcaacaattcctcatcttttgcgtatgcccgcatgttccgacaatacatctttagatggttcttggngcaagtaatccccttgtacttgtcagaatccaacacctttgacttgggaggggtgatgata

SEQ ID NO: 79030 - DNA, 446 bp, Glycine max
  unsure (1)..(446): unsure at all n locations
tctatacattaatattggntagaatatttttacacanagctagcacttggtattgacaccttgattaaataagtcgctacaggaagatttacttttcgtaatgctttatttgagcttatcttgttgaagttcggccaaaatattttgtaacatgttttttttaaaaaaaattaaacaccttaatttttacataagaatcaatcatacataagaaaataaagtagaaaagtataagaagaaaataaaacagacagtgtatgttaagaattgatttctttaaccactcaaatatcaccttttacaaatctctcagttttttttttcttcacaaaaacaattattttcttatcacattataattatatcactttttatttctcttctctttctatctctacattgaagtgattttccaccaattaacgttatccttttctttnttacac

SEQ ID NO: 79031 - DNA, 432 bp, Glycine max
  unsure (1)..(432): unsure at all n locations
ctatgtacccgtagaggtccacattgggtttcgtgcttttttattctcgntagggttactttntataccccctgttgacgtgcttaagccattttacttaagtcatttctcgcttaacttaaaaataaaataaatttccaccgaacgttggaattatattatccgttaacttcggttaaaatgaattccgaccgttcggtcgtgccgtaaccacgttggaaatcaaaaagaggtaaaagataatattataatcaaaaaacatcttttagtaaaataaagcggaaaatcaatcggacgttttctctttgggatttctcattcttaatcgaattgggtaataactaaagtgaaactaaggctaacatcaactcgcctagtcaagctcgtccattaaaaataggcttttgaagtttgtcatttcattttctcact

SEQ ID NO: 79032 - DNA, 223 bp, Glycine max
ttattgtgtgcacatgtccatgcaatcctgtattaaagagaaggaaatatttgcactgtttcacgccccagctcaccgggcaattcaacattcagtctattatccccttgcaacgacctgttgtgggacctaatacttcgagaatgctctagagtctattacatctatgacgactatcatgccctccacacatttctttaagtcttctggacccttaaaatag

SEQ ID NO: 79033 - DNA, 334 bp, Glycine max
  unsure (1)..(334): unsure at all n locations
cccttgtcactagatagatggagattaggtntagaggtggactcttcgactcccacaaggcctctcctttgtcctttcccatcaccgccaccaagatctaatcaaaatcttgttctcccactctcgctgncaccatcaccacctgcgacagctgtattccactcattggtctcactgccctagtttcgactccatcctctcgccaccagcatggacaatgcaacaccaccactntaacaacaacaagtcgatctaagaaccacataaatccagatattcgctctcggcacacgattattaatccagcttggcncgtcgagtctcacattgcagc

SEQ ID NO: 79034 - DNA, 339 bp, Glycine max
  unsure (1)..(339): unsure at all n locations
agtggcctgtctcaaatgtcaaatcaaatgttcaaattatatggctcaaaatcaggatgctcaanaggtataaaatgatgcctaactaatctatgaaatgtcctatctatctcangatcaaaggtttgtaagtcagatggatggcctctagtcatatactacattcagcatgcacaactagttgccttcttatgcaagtaacagtgtaggtttgaactacagctaccctcaaatgatatctaaatgacttgaaattttgtgagcaacaccctaaaatcatgaanagaatggcacaaaaatttcaggtaaaaattcanagtctaactatggaaactaccc

SEQ ID NO: 79035 - DNA, 449 bp, Glycine max
  unsure (1)..(449): unsure at all n locations
agctntntggagtagaaacctgggaccatctcattttatttcaaaaaggaagtcatatctagtcaaggtctgagagaccatacaagtttgctaacgatttctaattatgtgggccattaagtctatcatatgctgacaatagccgagaagcccatgaatctcttcgggggcggagtacgtgtctgccatcgccttggccttggctaacaatcggggaagttcttgactcccgttcaaggtaagagcaaaccgatccatccacatgggtgcctcttggtgtaaagagtcgatcacccttcctctagcctctttttccgcatatacttgggcatactcatccgcgattctatgctcgtgggccgtggctagacccagctcttcttggtacttggcgatgatagctaacatgttggtctctgactcacatagacgctgagacaagcttcttt

SEQ ID NO: 79036 - DNA, 318 bp, Glycine max
  unsure (1)..(318): unsure at all n locations
catatgctaactngcttccataactactcgataattcaatgctagccataacccaagccaagggtcctcaacctccattttttcaaggatacaactccaacgcaacatgtgcttatcatggaggagttccggngcattccattgagcattgtatgaccctgaagcataacgtgcacggtctaattgatgcgggttggctgaaattcgaagagaatcgctcatgaattctgatgttgtcgagcaatactatgtatgatcattggacaatgtgaaagttgtgatagatgtctccatgactcatangaatttacagttatg

SEQ ID NO: 79037 - DNA, 349 bp, Glycine max
taactcactgtagcctgcatttaccacagaatccagatttaaccttacaactctcaaagcctcactctttctacactcataacaccacattctcactttctaaacctaagataactctacccttcatctctaacagtttccataagcaatttcagcatataaacatcacaagcatcatcacaaaaaccctataacagaacgggtatgtgtgactcatacaaacatgagaagttcaacatgctttcaacaagagtcttgacaaataactatgacgaagcataagactaacaaaactacccatcatatctcccaagaccccatacccacgaaaatcaaaggagaaagacgt

SEQ ID NO: 79038 - DNA, 218 bp, Glycine max
acacatccaaaactcatacatataaaatatataacaaactaacatagataaaaacatagaaaaggaaatatcaactcacctcacttgctggtgctgcccatcattttagctctcacaacagataggaatcaagtaccttcatggacggatccacataaagctctaaagagatgatcgctcccaataaaatatttattgtacttgaatatatataataa

SEQ ID NO: 79039 - DNA, 451 bp, Glycine max
  unsure (1)..(451): unsure at all n locations
agcttttcacccatacaggcgaatgaagattgcatntaatggcacatctgagtttgacagtgcaccgattccttttcaggtcatgaagtatttgatcgggtgaagaacatcgtcactatatatgggaagacacaaaaaaaggatgggtcccacaaccagctttggaagaaaaagtctatattttttgatctgccttactggtgtcatttagatgtgagacattgtttagatgttatgcatgttgagaaaaatgtatgtgatagtctagttgggacactgctaaacattaaaggcaagacaaaagatggtttgaaatgccgtcaagatttagtagagatgggcatacgacaacagttacacccagtttcaaaaggtgttcgaacttatttgccgcccgcatctcatacaatgtcaaagactgagaaaaaaagcttttttcattgtctgaaaa

SEQ ID NO: 79040 - DNA, 434 bp, Glycine max
tatgatgacaaaagcctctgcgattgattcaagattgactcaagacttcaagatcaagcgtcaagaatccaatccaagattcaagattcaagagaagaaatcaagatgcaacaagtcaagacttcacataggataagtattaaaaatatttttttcagaaataaaaaagcacagctgtgttgtacaaaagaattctttcaatattttctaagttaccagaatgattactctctggtaatcgattaccagtgaccaatttggtttcaaaatatattcaaatgttttgcaacgttccaaaatgatcttcaaatagtggaatcgattacactatattagtaatcgattacaagcgaatctgaacggtgaaattcatatccaattgtgaagggtcataacttttcatataatacattgtgtaatcgattacaccatta

SEQ ID NO: 79041 - DNA, 411 bp, Glycine max
  unsure (1)..(411): unsure at all n locations
tctaagacctccataatgtgagagctnttcttttgttctttcttatccctctgatcagattgtcttccatgtttttttcctttcgaactctaagttagggaatntaaggattntgatgattaatcttatatggggggtttatcatatagattaatccattaaaaaggataacaaaacattatttatgtagttattgtgagtttggatgattgcgtggccattaatggtgttgggcattgttgaaatgaaccttagcttgaagaatcaagtttccagctgacttgaatcattttaattgattacatangcttgtgattgattattttttattcccatgggttgtaacaatcaacgatccaagttcttgtcgaattgattgtagtaagggtgtattgattacaacatctaaaa

SEQ ID NO: 79042 - DNA, 345 bp, Glycine max
cctccaatattaagcagaggggtcccctctgagaacccgatgccaattcttattgatgctgtatattctgttatctgggaagtcatagatatagggtcttatattcccacctctatgaacagagttttagtagatggattcatactctgtgaaagcttatccctacactactatatagatatatggtctgaataggatataaattgactacgacgcagcctcacagccaaaagcatattaacatctgccctaggaatgtgagaatttctacagtctcaaattgatagagtgtctgtgacatgtgtgacactcttctattgacacatgaacgaactacagttgcta

SEQ ID NO: 79043 - DNA, 428 bp, Glycine max
  unsure (1)..(428): unsure at all n locations
gaggttttattttngcgcataattatcgagacactcgaaattgaacaattcaagctctcgagaatttcanatggtcataacctttcactgggaggtccgactcatgcgcataatatatcgagacgctcgatattgaacaacggaagctctcgagaaattcaaatggtcataacttttcacacggaggtcagatttatgcgcataatatatcgagacgcatgaaattgaacaacggaagctctcgagaaatacaaatggtcataacttttaactcagaggttcgatgcaggcgcataatatatcgagacgcacgaaattgaacaacggaagctctcgagaaattcacactgtcataacttttcactcggagggccgattcatgcgcataatatatcgagacactcgagattgaacaacggaagctctcg

SEQ ID NO: 79044 - DNA, 446 bp, Glycine max
  unsure (1)..(446): unsure at all n locations
agctttgagccaaaatcctgactcttcatttccttgacccagggtgagaatgtcaatccttacccttggaagcaaaaaagaaaagaaggaaaatttgcaatcaatgagaaagcatatagaatagaaaggaaattcccaatcaaagagtgggagaaagcaaaaagaaaagaaagaaaattcccaatcgaaaaatgggagaaagttaaaaaaagaagaagaagaagaagaaggaaagaaagctcctgatcaaggatcgaaagaaaaaaaaaagaaatgtgcagaaaggtctttagaccagacaatatctgaacaatacagaattgtcaccaaatgaacaaaagagagagaaggaaaccataacctanaagtggtcttctccctttgattaccaaccaaaatcctgtgcgtcggtgacttgttcgcctcgcgcacaaccaaaaaggaaa

SEQ ID NO: 79045 - DNA, 366 bp, Glycine max
  unsure (1)..(366): unsure at all n locations
gccggtggttgacttacaagaagtcttcctctcatnaaacaaacctgcttgcctatcatggagggggggcggataacgccccttgagtgagtatgtcacatgggccctcaatattcaacgacgtaacaatctccttaaggtttatctacaaagcattgcatatagcgagcatgattcctcgcggcggtggcagaaaagattcttgttaatgcattcgggtgcactacatgacacgtgatcatgttcggcggccagagatctattacgacactgagaaggaggaggagcaacgctgctacacgcaatgagcatataatgaaggactctatagcctataccactggtagtacacttgagcatatacac

SEQ ID NO: 79046 - DNA, 360 bp, Glycine max
  unsure (1)..(360): unsure at all n locations
tcctgcctccttaatgggggcacatcgatcctaagcttatgtttcttgtgtgcagaaataatcaaagttttaaaaagagaggggaaaatcctangatcaatattttggttgattgattaaacgttaaacggctttattgtcgtcactccaaaattgtcaagtgactaaatcaaataaaacatatactctgagggagtccccaaaaatatgtgcaaaaagataggatgaggtctcatgagttatcacgtctttcanaaaaagatagtccatttgtgacttccaaaaaaagaaaaaaaagcaaaanaaatcaaatcaaaatcacaaaaataggagagaatgtcatgagcattatcataattt

SEQ ID NO: 79047 - DNA, 316 bp, Glycine max
atagatccctttagaacgtgcaagaatctttctcaatgaaacaaggctaccacagtacttttgggctaatgctatacatactatctgctgcacattgtatagaatacttattatacctatttttaagaaaacttcttatgaacttgttacaaggagaaagctgtatatttcttcacctaagagattttcggttgcataagtcttggtatacaccacgacaaagaatatcttgaaaatttgatgtaagggcgtgacgggtttatcttggtattcatcgctaaaaagcatatagatatttataaagaactctagtgtt

SEQ ID NO: 79048 - DNA, 362 bp, Glycine max
  unsure (1)..(362): unsure at all n locations
cccattaagccttttggtaatcgataacaggatggttgaatcaatacaggttgcctgttcatgtgtaatcgatacactggatggtaatcgattaccagagcctatcctaggctagtttctaagagaatatatatatttatgctcaagtacatcctatatgactaattttcactactaatacactaaattcaatcattcaattactatatacacaagaaatcataaattctatcataaaaacaagaattcaaacaagatcaaacaaaataatctacaatcaaaaggtaaaagtaaatcaaccaatcaatcaaccaatcaatccctatntttanaatctcttacatctaagagacctaattctc

SEQ ID NO: 79049 - DNA, 280 bp, Glycine max
gacctggagatatgtcgcggtggtcaagagacacttgggacgtcacgtggggtgctattgcccaaaaccaagcttgaccaatcccgacccaacccgggcatagtcggtcagtgagaacctgtgatgtacctaaacaggcgagctccttgcagtcaacagataataggaaaacaagaccacaaagcaaggaggcttgtggtggctggccagctgtgaattttgtgtaatatgtggatggtggcctctggtaatcgattaccaagggtgggtaatcgattac

SEQ ID NO: 79050 - DNA, 399 bp, Glycine max
ttttgatacctgcaagaggggacattcatggatggtacccatcacacagcgtgtgaacatgtgcacacaatatgagtatctcttattacattaaatggctcatttccgaggcgtctcttacacttttgctggattatttcagttaaaagtagaatattaagtggatctgatcagtatcataaaaagacattaaagtatgggcatggtgttctggcatgatatttgacaccagtatgtttgtctgttgagttgtgaacatagattctcttcttttctgagatgaaacattaatggaattgaagagggtgttatagcccctacttagttctcgaatgtttggtaatgctccaatttaatctcaatttatgagcactttactatgaatcaacaataaaaaat

SEQ ID NO: 79051 - DNA, 330 bp, Glycine max
caaaacgaacattcctctttctgttggttgtggcgggactagcctcattggtggagagtctctgcccttcatatttttgcagtctattctgaggtataccagattctttcttttttttggcaagagcgatcttcctatgttgtgcaggcagctcctctgataccatttctgcgatctcatgcactgaatgaggcgatctcatatcctttttaacgacacttacatggattatacgtggatgaggtacataatgcgtcctccggtattcatataaacaaaagtatctaactgctcaacattatgctgtctcaatcaccaaagttatgccta

SEQ ID NO: 79052 - DNA, 402 bp, Glycine max
  unsure (1)..(402): unsure at all n locations
ttcttaatctcagagtctttttggattgaatagntacaaaagtgttttgattagttattataatgctcttttgtatttgcattgccatatcgaaaggtacagctgcactaggattgactatagcaagtgaacatttctaatataggggaaacaattgagattgtgttttcctaacatccatggttggagcgctcctcagctatttttcactattgttttaagcattattgaacattttgtgagtgagtgagatatttcatttacatgtgttttccttgctgaccattgactgcttcatcgccaaccanaaaaaggagacaatcaaccgctatgtgatntcttatagagtatttgatgattatatgcctactgaaaaaaggctttacgacggcgcacaacatc

SEQ ID NO: 79053 - DNA, 374 bp, Glycine max
tctcagcgcttatgtgagacaaagactgttattctgatcccatgacagatgtcgtaccggatgtcacgacatctcgcttcataacatgcagattatatttgatagtatgaacagattaaaccagctaataccactagagaattgtggacccagttcggcgcaacggcacctacatctgggggctctcaggccatggaggaaatccactacaatagtgatagttcgaagatctaacagccactgtttacaaccttctcacctaaccactacccatgcaacctgtacctaagagccactcttacatatgagaacccctctcactacctcataatcactcttccgtgtttacaaataaatcatagacacaccagaga

SEQ ID NO: 79054 - DNA, 227 bp, Glycine max
  unsure (1)..(227): unsure at all n locations
gccgctacggagcactatggatgcggatcttaggcttattgatgttctttaatggngattttccaccatggacatgcagcggaagacaaaggagaagaggtgagaggaggcgccatccattatggaataagccattgaagaatgagcttcaccaccaagatgagccttggataagaagcttggagaggatgcttcaatggaggaaaagaaagaggaagagaaagaga

SEQ ID NO: 79055 - DNA, 335 bp, Glycine max
tcgattaccaggctgtgtaattgattacacagaggaacatgccactggtaatcgattaccaggtatgtgtaatcgattacacagcgcatttttgcaggtttcatgtcctgaggctgtgtaattcgagtctagcctctggtaatcgattaccaaggctgtgtaatcgatttccagagatgaaaagccttgagataccctttttacttacatgtaggggttatgagacgcattgtgttgctctgtagttagatatcacgtgaaagagtctacccctttcttttctttcttgtagatcgtgatggcggcacaactaatacatgaccgagtggagatgg

SEQ ID NO: 79056 - DNA, 496 bp, Glycine max
  unsure (1)..(496): unsure at all n locations
atggaatcaccacaaatttttaccnctatattacctcaaaagaatggtgttntggaaaggaaaaatagatcccttaagaaggtgcaagaacccttctcaatgaaacaaggttaccaaagtacttttgggctaatgctatacatactattngctacacattgaaaagagtacttattagacctattttaaagaatactccttatgaactgtataaaggaagaaagctgaatatttctcacctaagagtttttgtttgcaaatggtttgttttaaacaacgacaaagactttcttggaaaatttgatgtaaaggccgatgagggtatttttcttggttattcattgcataataaagcatatagattattctattaaagaactctaagtgttgaagaatctgttcatgtagtttgtgatgacactaactttattgttcacgataattctctcagaagaagatgtacgttctcatgaaaagggatctactctctgagata

SEQ ID NO: 79057 - DNA, 438 bp, Glycine max
tcttaagcacctgagctgcaactgaatgagaaggttgaaggtatacttcctgctcttattgtagaccacagagtggtacctgcagatatgtcgcggaggtcaggataccttcgtgacgtcatgtggtgtgctattgccctaaaccaatcttgaccaatcccgacccaacccgggcatagtaggtcagtgagaacctgtgatgtacctaatcaggcgatctcctggcagtcaacagataaaaggaaaacaagaccacaaagcacggatgcttgtggtggctggccaactatgaattttgtgtaatatgtggatggtggcctctggtaatcgattaccaagggtgggtaatcgattacaacgcttataattgaggacaggaggctaagatggtctctggtaatcgattaccaaggggtgtaatcgattaccacgcttgaa

SEQ ID NO: 79058 - DNA, 311 bp, Glycine max
  unsure (1)..(311): unsure at all n locations
caaaactcttatctacttacacctcttttattttaattatngacaaccgtgtggcattggaaagaagcaaatattaaataccacactctagaaaggcctatcatctactttcttctgcaaatcctttttcatttctctgtccaaactctactttcacgccatgcacaaaatgagcaccacatcttcaaccgcatcaactganggaagtcatttctactctcctcttcacggcacctaccttgttgttgggtttattgtcattntcatgggttcttggtttgcggtttttctgctatgtgtctgatgcacgt

SEQ ID NO: 79059 - DNA, 450 bp, Glycine max
  unsure (1)..(450): unsure at all n locations
agctntgataccttgtcttgaaccatactctcctaanaacttaagctattaggagaggtccaataatggttntatatctcctaacatttggctttatgcangactgtgggcagcctgggtttaccttgtctgaaagaaaacggtttggtaccattttaagagagtgagtgatctcattattctttttgttaattggtttttgttacatataacatcagcatggcaaaacctaccctgaagttgttgctatgcttggattggttagtaattcatatttcccaatattttctctttcattccatccgaaactgtaatttggaaagttagcttcttgcagtctatctgacttcatagcaagatcgattgtcaggatccatataatgcctgttctgcctttatttgttaaggtttaggaagtgattttgtatctctagtaatagtaatacctta

SEQ ID NO: 79060 - DNA, 344 bp, Glycine max
  unsure (1)..(344): unsure at all n locations
gacattatntactgcttggaactcttatgttgtcagtagtgctgcgttttgatatagaatttttcaattgttatttttcacaattctgttttctgagttctgcaggtatgtggcctcttggttggtggtacttgccgtcaaattcacttttgcttactttctccacgcaagtcattgggtttctatatgttttttatgtatatacgtcgtatgtatcttggtgaggctattgagccgatttccgctttttacatttatacctttattctactttntaaactntccctctattgagttattcttcgagataaaagatgacatacattacaattactttcttcata

SEQ ID NO: 79061 - DNA, 301 bp, Glycine max
agcttataaacgaaataaaataaaatctgtacatgatatgataagattggataaaataaaatgtggacgaaataaaatctagatgaaataaaatatggataagataagatttgataaaataaaattgtttactctcttcaagtccaagcctaatttcgaattcaagcccaattgcttataattctcctaaaattaaattaaaaacacaaaattagtcaagttggcccaaatgataaaactgcataatcaatttgacaattaaggctaatcacttatttaaaatggtgaccaaaagggttaa

SEQ ID NO: 79062 - DNA, 316 bp, Glycine max
  unsure (1)..(316): unsure at all n locations
ctctgtctcttgaagctctacgaagcagttctcttttttttcatctgngaagattctttcataggtgtctgttgatggaacaagtggccctggaataattaagaaggggggagttgaattatatatgatagtgctctgactaattaaaattttatccttcttgatggtactagattcaattaggctttactactaagttatgagaacagttaaaacagaaacactaacttagacaaaagttaagcggtaataaaaagttcacaatggataagtatagatcgtatgacaatagacagaaaacacaagttttatactg

SEQ ID NO: 79063 - DNA, 344 bp, Glycine max
  unsure (1)..(344): unsure at all n locations
gggactcaagcacacatccgagtcaaaaggtattgatggtggaatcacgcctatgctaccacactccatgtcgtgggacccgatatattacgggactcgctcggacatccatgagaaaggatattgtctttctatttcggtcagagcataatcacacaatgcctagcgaggtgatttctcactggactcactgaggcatatccataagatagaatggtctataagaattgctcagacntgccgcattggattcttagcgtgtggataggatacatgacataatcggacatacttgttcatctgttcttttagagaatttaccttatcgctattatacattcctc

SEQ ID NO: 79064 - DNA, 420 bp, Glycine max
  unsure (1)..(420): unsure at all n locations
gatttcaaacgacaataactntgtactctgatgctgattgagncccgcaatatatcgagacgcgtctatattgaatgttgaagctctgaccaaactcaaacgacgataactntttactcggatgtctgattgagtcccgtaatacatcgagaccctcgaaattgaatgttgaagctctcagcaaattcaaacgacaataaccatttactcggatgtctgactgagtcccggcatacatcgagacgctcacaattgaatggtgaagctctcagcatattcaaacgacaataacttttttactctgatgtctgattgagtcgcgaaatatatcgagacggctctaattgcatattgaagccgtgaccaaattcaaccgacgatgagcttttactctgatggcttattgagcccccgaataca

SEQ ID NO: 79065 - DNA, 387 bp, Glycine max
atgccaaaatacatgagaatgcttatctacacacatccccctaatagctaagctcacctccctgccaaatatacatgataaataccgagaaagttctctacatacacaagactaattcatatatgcctctgaaaatacagcgcttaaaccatatactaatagaatggccaaaatacagggcttaaaataaggagaacctattatgatatttacaaagaagagtggacccaaccttggcccatgggctcagaaatctaccctaagggtcatgtgaaccctaaggccttttttaactgctctagcctaatactcttggagtcctctatccaatatccttggtgggtaggattgcatcattccctctctcttggaaggatttgacctcaa

SEQ ID NO: 79066 - DNA, 364 bp, Glycine max
  unsure (1)..(364): unsure at all n locations
taccaacgaatggtactcttaagacaaaaatggcgtacaacctccttcaatagacacaaacatcaatgtaaatttagagcaaacttatgcacatatttccttacgaacattcactcgcacaagatattctatctaactaacaaaaatgcacccatgcacaatcgaggcaccttcgttacctacattatttgaatgtacttccaaggtgtactacctacatcacatgcatatccttggctgaatttacatacatgcatactcgaagcatattggctaccaaaaagtgcacacgtgcacagtctgggatgtncaatacctatgcacatactaacgttgtgatgaatctaggctatctacacaataa

SEQ ID NO: 79067 - DNA, 367 bp, Glycine max
  unsure (1)..(367): unsure at all n locations
atttgctcaacacaggcattgatttattgtttaattttttattttatcttctttacagagtttgaggagcaaagagaagttaagaanaatggcgggtttttggagcgtgttttgtggggaatctgggtgctcagaggctggaaaaatgcctggcagctatgatattangcttctcatcgatccttccacttgtgtcaaccatttgctaatctcttgctttgatgtgttgctgcttatcatgcttgtattcattatgatccagaagtcaacattaaaaccatctcggngtctaatacaggtgcaaagatatccatatttccagctagtttctgccatagtcaatggtgctcttgggttggcacatttg

SEQ ID NO: 79068 - DNA, 407 bp, Glycine max
  unsure (1)..(407): unsure at all n locations
acaaacgctgtggctataaatntactgattactatgtcaaaactcgggcaaatcatccttactcccagctccaacaagtgttcaagcatgtggtaatatgtttagttcaaccacaaatttgctttaattttttttttcttcctcccttcaaatgaacattgactaacagataagggacttgcagggatttggagctgttgtgggagctttatctcgcaaccttcacgaacttcaggagaatcaggagagccaaggaagcttcttatcaatttatgatcagcccacacttccccttcaggtttctttttacatcgactctgtttcatccactggatgttaattgtaatgttntctcttaatgttctcagccaagctttagtagctggctatgaagcaacatnaagttg

SEQ ID NO: 79069 - DNA, 380 bp, Glycine max
ctatctacccacacccctctatgaactaaattaacctcctttgaaataattacagaataaataatcaaacattaaataatattactatatatatatatatcagggtgttacaattttaaaacacgtaaatttcaattttaaatgaaaactctgttaatttgtttatgaaatatgagagtaaatttttcgtgatacactttcatcaaacaatgcacaaatacttaatcaaatatgtatatatatatatatatatatatatatatatatatatatatatatatatattaaccaagtatacatcattcgtgtgacggagaatatattagttcatacatatatttaaatctgtgattacatccccacataaaaagaatatggac

SEQ ID NO: 79070 - DNA, 323 bp, Glycine max
tcttagcgtttatgcgagacaaagaccaacatgttagctatcatcaccaagtaccaagaagaactaagtctagccacggcccacgagcatatggtggcagacgagtatgcccaagtgtacgcggaacaagtggctagaggaagggtgatcaactcgttacaccaagaggcaaccatgtggatggaccgatttgctcttaccttgaatgggagtcaagaacttcctcgattgctagccaaggccacagcaatggcgaacacctactccgcctgcgaggagatccacggacttctcgactattgtcagcatatgatagatttaat

SEQ ID NO: 79071 - DNA, 250 bp, Glycine max
gcgcttccgaacggtccgaggggattacccaaagctttcagccgtcctcacgacttcattcgtacttcgacagtctcgggctcaaccggaaagcccccaatcgaactcttcattcattctatgacccttagggcctcattgcgatacgcgcttcattacactccttactttcgacccccttgtgcggcttagcattgcgaagaattcctcgctaacaaaaaaaaaaatccaccacattgatagacatcgt

SEQ ID NO: 79072 - DNA, 359 bp, Glycine max
  unsure (1)..(359): unsure at all n locations
gagtgtaaactgaaattgttgggcaccaaaagtcacccccatcagccaacaagtcagccaccatttggtctcccacaaggctgatagcctaggttgccaatgggcccttattacaacttgaactaaagcccttttagttgattaacccaaaacatatttttggtcagccaactntacaaggattgggccattatttatacaaactaaacacctctagaatgaaataaagtggtgtcatttagtcctccatatgtgccatgatacaactcacaacattggacttttctccttgaacttgggcttgtattcaatagtatggacagcacttggtgaagagcttcctttgctttccttgctct

SEQ ID NO: 79073 - DNA, 399 bp, Glycine max
agcttgaaggtgtgtaacccaccattctccatattatattctctggaacgcgactactatcagtgtgataatctctttctctgctcattgggggcactacttgagctgccaagtctttccattattgggcgtattcttttgaaagattcgcgccccctttttgcacatgttctgtagttgcatcctatccaaagacattatactgacactgtctatccaaggcaaccactatgtcctttccagaatggactccggaaggttccaagttagtgtaccagggtacagctaccccacgaagactttcttggaaggaatgtacatccaattctccatctttgcggatgcctcatcttccgagaatacatctttaaatagttcttggtgcaagatagccccctt

SEQ ID NO: 79074 - DNA, 439 bp, Glycine max
  unsure (1)..(439): unsure at all n locations
ctggtctctcttatcatacggnttgttntagctgaaacgctttgtctcaattgtggaatacttgcactggacgaacctaccacaaatttggatggaccaaatgctgaaagtctagctgcagctctcgtaaggtgtgaatagattgtcgcctagctctgattaaattgtcatgcgctcattcctaattataagatcctntcaactaattcacacctcttaagaaaattagttaatgtatttaattacattaaatttgtcaattatntatacaatcgttctaaaattttttttttatctctctatccacttaattacttctcattaatatttggagatagaataatttagtatagatatataggaaacaaaatttaatgtgtcttataattagagagaagtcttatataaaatgacacacacatttctcgaaatgatgtta

SEQ ID NO: 79075 - DNA, 343 bp, Glycine max
  unsure (1)..(343): unsure at all n locations
agcttcaatatgtaccaaaacttcatagttattgtccgnttgctgtgtcttgaaaaggctttgttagtaaatcatcgttataatatataaacttggtttgggtgtcattagataacatggacttttatatctctaaaagcctatggtccacaacaacggaggttcttactaccataaacctatgaagtgcttcttgcacaacttgttctgattgcacaaccattgcacattttgcctaataaacaattactatctttgagatgccaattatggcccttgcaattgcaattctctgcgtatgaactgctgatagaagcactcccgtttctccataatcaaaaca

SEQ ID NO: 79076 - DNA, 233 bp, Glycine max
ggttaaatggatgaatgattaggatagtgacttgtattggaaacactgacatgatataatgtatgttgaatgtaatgtgctcgactttttaatgtatgtcattctcacgtgttgttatatttccgtagtaatatttataattggcacatttgacagaaatgattttttaacagttattgaatgaaataagtactttcctgaaatttattcggtgaaatttatatcgttatttt

SEQ ID NO: 79077 - DNA, 420 bp, Glycine max
  unsure (1)..(420): unsure at all n locations
catgcaagcttgttgaatgctttcctgccaatcttatcataatacgatgtatctgcgtcaacgaagaaatatctatttgtgaagctcctagagagctggccttaacccaaagggttattatgtcaacatagcctctagtctctactttntcgcctgtgaagctaaggaatggaccaacgtgaaggtggacaatggcaggcaagacttcaagcctctggaaagatttctaatgtatgatgttagcggagcttccttgttcaatgaggaccttggacaccatgacgctggcgatgacaatgaagacaaccatggngttgtcctggttgatggggttgatacccttgaagtctctatccatgaaagtgataggagggagacttcgntgtgatggtgcttctacaaagttgtgtcgatgtgttg

SEQ ID NO: 79078 - DNA, 299 bp, Glycine max
tatacttgatttacccgctatgccacacacataccaacatgttatctatcatcaccaagtaccacgaataactaagtctagccacaggcctcgagcatagggtggcagacgagtatgcccaagagtacggcgaataagcggctagaggaaaggtgatcaactcgttacacctagaggcaaccatgtggatggaccgaattgctcttaccttgatcggagtcaagaacatcctcgattgctagccaaggtcaaagcagtggcgtacacctactcctgcttcgaggagatccacggacttc

SEQ ID NO: 79079 - DNA, 451 bp, Glycine max
  unsure (1)..(451): unsure at all n locations
agctatataactntggttgaaactcatgattgatattgtggttatcactaagctggtgaaaatataagtggatgttatttcaacaaggctattattgaccaactatttttttatattgcattaattatgcaaaatcatgtgaagaatgtcaaaaacatggtcccatacaataagttcaacaaatgagttacattcagtaacaaaatcttggcctttttgaggatgtgctttagatttaataggtcaaatttgtggaagcaatgctttccaagtttattttgatgatgccaaagactcaaatcaagaatcaacagtcaaacaagtttcaagaatcaaagagtcgttcaatcaagaatcaagattcaagtaaagaattcaagagaagactcaagatatgcaagaacttcaagaaaaacatcaagatangtataaaaatattttttcaaataaa

SEQ ID NO: 79080 - DNA, 444 bp, Glycine max
  unsure (1)..(444): unsure at all n locations
actcatgaatgaccctcgctcatccatggaaaacatgtacatcactatcgaatgtggtgtgcttcactattgaaactnttacttaaaaaaagctaaagtagacttttgccaaaaatgggtattcttgccttttacaaaaactagtaaattcttattctaaatgccttgattattgtgctaactttcttgattattgttctaacctccctagtaacacgtgtaaccaaagtgaacctcacacaaagatcactctcatgtagagttaattacactgccactcaatgtacacacaattctagtgaatatctagctcagacaactgttatgtctctgtcaagctttactaaaccaatcaacacacacacatgcatacatatacatagcatgaaactctataataacaacattaactattgaaataaatcatacacgcacaatgaccaa

SEQ ID NO: 79081 - DNA, 456 bp, Glycine max
  unsure (1)..(456): unsure at all n locations
tgcggatgcagcttgaatgaagataagaaatatctctctatagtagacacagaacagttcagtcactacttggaaaccaaacatcagctgaagccagtccaaaatatatcttcatttaatntgttgccatgttccttaatttggccaagggcccctggtattacgaagtgcagaaacaacagcttgaatctgtaaaagcaaatgagtacaagcaacctaatcaacaaattgaacaaaattctagcagagcttattcataagctaaaagtaataataataagttggtggcagacaggaaaaaagatgagaaaattattaaccatacattgtttcatcataacttctgcctgtgtttgtaacactggtaatgcctaaaccactaaaagacttgatttttctaggaaatatcagtttttgattcagtgactctacaacccttgatctnttttgttttca

SEQ ID NO: 79082 - DNA, 417 bp, Glycine max
  unsure (1)..(417): unsure at all n locations
actggaagccagaactatacagtatcttatgtaaggtgaagaaagtgtcacgatcatgttcccttggtgcagagagtacaatatcattggaaaagttttcaggaagatccataagaccataattaattgaagaggcaaagatttttagatcttttatatgcaaaactgatgggggcagttcattcaaacctgatccttctaaatacaaatgttggagagattgtgaccaagtattgctgccaaggctcttaagcgacgtgcatccactcacatttaaaatttctagcttcgggagggaccaaaatgacggatcaacgtaagacaagctttcacagtggcttattgatacttgtataagtnttggggcaagagacagatttggacactccattaggtttatgcagccaaaaaggtcaa

SEQ ID NO: 79083 - DNA, 405 bp, Glycine max
  unsure (1)..(405): unsure at all n locations
gctactgtattctgcagtgctcgatttaaatctatcctagagttacaaattatggctactactcacgagaatntcaaacagtcaataaacagaatgttaacatatccatagacaatgctctcaaaaaaaccatatccatacacaatagttgtctaaaaaatagttcattgctgactgtactcagaaaaaactaccaccccacctnccaaccaaaccttgtatcactgggccttaccatgaagtgcactaactttctagattgaatctttaactccaatgtcaatgcaatgatactaatcagtgatcctgaaccgacccttggctaatcttcgagcaaatactcatctgccacccttggttgcttttctgctcatgtaaagaaaaattatgtcatctacacagcat

SEQ ID NO: 79084 - DNA, 263 bp, Glycine max
gcattgaatggagactttttttctttttcaccagaagccttgtttcttgaaacagcctcactacaaggggtgctcacttgaacttaattaaaaactaagagcttcgcaaaatgggttcctgctttacatacctttattttctattcctgaaatggcaacctctgcatgtccacccccatgacccttacgaagtgaactcctagacctccaataaatattcttgcactatgacccttctattaaagtcccggcacgttttcgct

SEQ ID NO: 79085 - DNA, 270 bp, Glycine max
ctgctcaaaaaacctttaaacttagtactgactcagagactctatacattgtgatgtcattcattcatcattatatgttagaataaatatattgcatatggccttagaagtgttaatgaatggataacaactattacagggtcaatatcgtattattgtaatataaataaaataaaattataatggataacataaatatttaagttcaatctatataatctgtgcaccatttaattttgatcgatcgagcctatagtgcagactatcatg

SEQ ID NO: 79086 - DNA, 199 bp, Glycine max
tctcttctgagaagatagacatatatgcataccatatgagatggcaccactctaacccgcttctattcattcaagtcaacatatactaaatgatattaacgattttgtaccttgtctaagaatggactgatatcaatggtttggtatctgccagacaggcgtctccgagtatctcataaagcacacttgaggatcgact

SEQ ID NO: 79087 - DNA, 87 bp, Glycine max
atatacttatcagcgtacaccagcgttaagcaccatactgcttaaaaatacgcccgcctgcctctccagactgtgaattataacatc

SEQ ID NO: 79088 - DNA, 415 bp, Glycine max
  unsure (1)..(415): unsure at all n locations
cttgcaagcttctggtgtctgggaagcacgttattctgttgntttccagatcggttccttcgccaagtatgtgtatatgtgtatatatgtattatatttcgtgctctggttgttgtttgtattttgttttgtgcagaagaaaaaagaagaagtagagacgagagtcgtcatcacggaaagggcagggcggacgaaatcagtgtcctatctttgctttcctcttatctccgatgagaggtaagtaaagaggggcaactgtcataccctaatttcgtctggggattattacttgatgacatgcaataaatgaagtcccgagacgtctcagaaatcaaaaggaagcagacttgcgcgatccgtgaaattccgtaatgtggcggaaatcgaaaagaggtgtttgtgcacaatccgtgag

SEQ ID NO: 79089 - DNA, 386 bp, Glycine max
  unsure (1)..(386): unsure at all n locations
aataaatcaaaatcaaaatcacaaaacatggaaagaatgacatgaacattgtacaactntccattacattgcattatttcatatgaagtccgcatttaccanatttcacaacaaaggttgcatgcatctgcatccctaanaatcatgttaactacatagatntgctacatctaatgtccaatcttgtgaatntgggatgaccggccctctcgatgagtcgatctcttgctntctcataagggtggaccctngggtactagtacctatcttcttcagaggactacgcgttctcacctccctgatattggagggggccaactgtgcgaatacaaccagagagggaggctatcacgtagttactatgcataccatggcangattcactc

SEQ ID NO: 79090 - DNA, 464 bp, Glycine max
  unsure (1)..(464): unsure at all n locations
agcttcatgcttaagtatgtatggcanaactttattactggttgttaacacatacaagtgagctggtacaaatcttctatacttggagtgatcacatgcaatcctctcgaacccttaccacccactttgtcatcatgccgagactcaagaaggccaacaggtttagccttctcaacgtattctaaacaaaattcaatggcttcttatgcaacatacctctcaacaatagatgcacctggacgatataaattctttgtatacccttttaagatcttcatgtatcgctcaaccgggtacatccactgcaaataaacaggaccacaacattngatttctctgacgagatgcataatcaagtgaatcatgatgtcaaagaagaatgcaggggaaaaatacatctccaactggcacagtataattgcagcttcattttccaactcatcanacttgacaggatcaacaac

SEQ ID NO: 79091 - DNA, 324 bp, Glycine max
  unsure (1)..(324): unsure at all n locations
agccacaagtaacacatcacatacctttttctgacttgatcccggaggagtgcaaagcaatgtcngtgatgccngtgtcngaagagtggangtggcattcanntagtgatggtggagttagaaaatgtggaattaaaatggaaagaacccaagtgcaagtagaagaagagtctcanaagtcaaaactcattaataaataaagcatcatcattngatgatcattgcatntgatggcctatatattgtgataactcatactcattaattactagaatcattntcatttggatctgatagtagagatagctngcangaataaaaata

SEQ ID NO: 79092 - DNA, 383 bp, Glycine max
  unsure (1)..(383): unsure at all n locations
atggacacttaattcacccccctctttagttatttgaggtcacttgccaacaaaaacactttttacgtccgttaaaagacacattcgatgatggttcttaaccatcgtcgtaggcaatgtcgtagaaagtgaagattccgtgaaaaatcgtattagaaaaaggtacccttctaagacgggtnttagctaanaatcgtcttagaagggtcaactttctaatacgaattttcatagagccgtcttagaatgtatttcttttaaaaaaattaaaatatattgaggattctaagctgattntgtcaaaatattttttagataattgtcttagaatgtgctttttttaaaaaaaattaanaaccacaattgaaccacatgcatacact

SEQ ID NO: 79093 - DNA, 273 bp, Glycine max
  unsure (1)..(273): unsure at all n locations
caacccgggcatagtcggtcagtgagaacctgtgatgtacctaagcaggcgagctcctgacagtcaacagataaaaggaacaaagaccacaaagcaaggaggcttgtggtggctggctagctgtgaactttgattgatatgtgggttatggcctctggtaatcgattaccaagggtgggtaatcgattacaaggcttaanaatgaagacaggaggctaagatggtctctagtaatcgattaccacggngtgtaatcgattaccaagcttgaaa

SEQ ID NO: 79094 - DNA, 281 bp, Glycine max
  unsure (1)..(281): unsure at all n locations
ctcattntgtacatgacaatnctggacgagtcaatggggtgtattgctgggccacatgacgaatcctggaagaaagagcgcgctgtttactacctaagtaagaagttcacgacctatgagatgaattactccttgctcgaaagaacgtgttgtgctntagtatgggcattccatcgcctaaaatggacccggttaagtacatctntgaaaagccaactctcacgggacgaatcgcccggtggcaagtcctgctatccgagtttgatatagtctatgtcacc

SEQ ID NO: 79095 - DNA, 279 bp, Glycine max
tactggataaatgtggggggattgttattggacatatgattttgccatgcttatgtttatttgtcatgctgatgatatatatatgctagtctttcttaatttcaattcgactgtcaataaataaaaaaatcaatgtgcaatttgcattctctatcaaaaaaaaaaaaaatgagtgataatagctgattaactgattgacctggtattgtattaaggtggttcactggctattcatatccatgtctattcttgatactctatctatttctctctgctgcc

SEQ ID NO: 79096 - DNA, 446 bp, Glycine max
  unsure (1)..(446): unsure at all n locations
tatctttgatcttcaattcccatctccaacttcttcttccncatgtctactacgcaactagcagttgacatgaatggaagccncaagatcagagggatcttagcgtcctcctcaatgtcaatcacaacaaaatcagtggggaaggtaaaatgtttgactcggacaagaacatcttcaataactccatacgatctggtgatggagcggtctgctaactgcagagtcattcttgtgggcattatcttcaactctcctatcctctgacacatcgagagcgtcatcaaattaatacttgctcctcaatcaataagagcttttcccattgaaactacaccgatcgtgcaaggaatagtgacattgcctggatctctatgcttatgtgggaggatgcgttggataacaacactgntagtttcttccacaactatggtgtcacggtgtatgta

SEQ ID NO: 79097 - DNA, 305 bp, Glycine max
  unsure (1)..(305): unsure at all n locations
cacaccaaatgattatgatgatggatggctcanattctcacaaaggtcaactcatcactttcannatgagctctcaaactatcatgacatgtagaggagaatcaaagaattcaagtcacanaatgtcaaaaacttttattttcacaacaattacccatttcttgaacatatcttataattcagagaagaacatgcaaagtcgtacatgcacatagaattgacccacaatattaaactagaaatccgacgaaattaagaacattaacaaattaacacaactaacaaattaaccaaacccgacaaac

SEQ ID NO: 79098 - DNA, 209 bp, Glycine max
  unsure (1)..(209): unsure at all n locations
aattaaaggaaacagcttaactacattcgtggattcactttggctctgaaagtcgcaacatgagagacaaaaaggggtgtaacgggcgagcgccttcctaccatgcaagtntgagttggaggctatgtatagaatatatagcgggtccgcttaataaagggataccacccacaaggtttcatgacgtacattacccatgtgggtgacat

SEQ ID NO: 79099 - DNA, 420 bp, Glycine max
  unsure (1)..(420): unsure at all n locations
catgggatcaactcattntatttcagaaagtcatatctagtcaagatctgagagaccatacaagtttcctagcggtttctaattatataggccattaagtctatcatatgctgacaatagccgagaagcccgtggatttcttcgggggcggagtaggtgtccgccattgctttggccttggctagcaatcggngaaattcttgactcccgttcaaggtaagagcaaaccggtccatccacatggtcgcctcttggtgtaaagattcgatcacccttcctctagcctcctttntcgcgtatacttgggcatacttgtccgccaccctatgctcgtgggtcgtggctagacttagctcttcttggtacttggcgataatagctaacatgttggtctccgtcacgcataaacgctgagacaag

SEQ ID NO: 79100 - DNA, 380 bp, Glycine max
  unsure (1)..(380): unsure at all n locations
atcaaccatagatgctgttntgctttcacatgcggatacactataccttggtgcccttccatatgccatgaagcggcttggactctctgccccggtttattcaacggagcctatctacatattgggcctcctcactatgtatgaccagtacctctcatgacatgtgaaattccatgctggtttgtttgattctttgttgttaggaggaagattntctgcgctcggtggtttgtatgatacgaccggaactataagtactatcgtcggattcagaaacaggaagtaaaggaagcgttgcacagaatgagtaatggtaatgcggtgggggcagacaacatacctatagaagtgtgaatactcttggagatagaagcttgagt

SEQ ID NO: 79101 - DNA, 331 bp, Glycine max
  unsure (1)..(331): unsure at all n locations
atcatcacaccttaatttgtgacaattctttgcaaccaatgcttatttgattgcagttgattggtgtctcattctattggaacacaaccatgttntgagagttaaaatataacattaaacatgccattgagttccaacacaagtaggtataagtggatattaatttggtacaaatgcctaccttntcatggttgtaagttccaaattgtcctagtgtcaattccttactttntatgcttggtgaacaactntctcattcatagggagatctcttaatgcatangaactagttaattagtcgcaactaatntacaagcaatatgtntaattt

SEQ ID NO: 79102 - DNA, 421 bp, Glycine max
  unsure (1)..(421): unsure at all n locations
aactgcttcatctgattcttgtactntcaatgttctttcatatctagaagtagacctttacatgaactgtgacagttttgtactttcgataatgttcattcatttatagagttgtctaccatcttcaatgtgctccacagaaagaaattattatatacctaagctaaggaccttctattggtgtcatgaacactttttttttaaatgaattaggagttttttttttggttacaatcaatcaccatttggataatgtctcctacaaacaatcaaacatgcgcagcttctctaaagtctcttctaataaattgctgcctgtaaataaatagtacttatgacacaagagaacaacaaaaaatgtgcatttcaaacctgcactatgctaaaagcanacactttatcttcagtatgggcaatatct

SEQ ID NO: 79103 - DNA, 219 bp, Glycine max
  unsure (1)..(219): unsure at all n locations
tacttacatcacacacatctnctttggctaaatcacatacatgcatactcaaagcantttggggcaccaaaaattgcacatgtgcacatcttggcatntctaatacctatacatacgcaaacttcatgatgaatcttgactatctacacaataaggtgctacatttcatgctctntnnttcaagttttgtacctaaagccgcatgcanattcaagcata

SEQ ID NO: 79104 - DNA, 384 bp, Glycine max
  unsure (1)..(384): unsure at all n locations
ttacacaacaggtggaatgtatcctccccctcaaaatagaaatttattgagacttcctttaaattttttatttataacactttaacagcctgcagtacaatgtacacttaatcataaatgggtcagttccttttgcaaatagtttagcaaaatatgccactgcaacatatacatctgtgatctgccacaccaattgtgtctgtctagtgtctggtgcggatatatgtacatctatttttttctttgttcatgagaaagttgttactgggagatattntgattatcctagtccctaatatataagaaaataatatacacttttctttgcgtattattactaggagaaacatgatacataattgagtattattagaaaaatataca

SEQ ID NO: 79105 - DNA, 376 bp, Glycine max
  unsure (1)..(376): unsure at all n locations
ctggactcacagcataaaacaagtatatactatatattctctaaaacaacaaaaatcacaacaaatccagcatcatcaagttcacatatcacaaaatcaatacccaaattcttttgtcanggctgtcgcgggcgcagtcgtgggcttcccgccaccgtatttcggcacaaaatcatccttcgcacgctccagaaaagccacaggcacctgtctcccaatcgattcatccgcaacaacacaataagctaaaanaaagtgagtcagacattcatttccaaaaacataacgctgaacttcanattagccactaaacaaatcatagcaacacgaatttcatttcattntcaaacacattcaccaaacttcaattagttct

SEQ ID NO: 79106 - DNA, 449 bp, Glycine max
gagaccgatggagacccggtgttgataggaacgaggataagggctacgtgggagtacgtgatctcagtgaaggtgggcaactggggatggtgggtttatgtgtgatctgtggatgtggagagttgacttgcaccatcgcccgaccgccacctattaccacatgtgatgggtaccgcataatcctacaagcttgaaatgaggaagtgtggaaaggtgagacttcctacttttattcgttgaccacagagtgatacctggagatatgtcgcgggggtcaggagaccttggtgacgtcaggtggggtgctattgcccaaaaccaatcttgaccaatcccgacccagcccgggcatagtcagtcagtgagaacctgtgatgtacctaaacaggcgagctcttggcattcaaccgataatagaacaagaccacaaagtcaggaggcttatgtgg

SEQ ID NO: 79107 - DNA, 292 bp, Glycine max
gacttgagtgtttgtgagccacttgatgtactctacatcaatgttgacctgatgtgtagagtgatctcttttgtcaagagcatctctgtgtgtattgaataattgaaacccgagtggtttgaaggatgagaggttctatattaaagtggtcttagtaagtgccggtatggtagtgaaagtgtacagggtgtaatcttaatacattttatgattctcctgtggaccccaatgaggactgccaacggtacatcttggtatattgtattgtatcgcaaatactctgtctgacgga

SEQ ID NO: 79108 - DNA, 405 bp, Glycine max
  unsure (1)..(405): unsure at all n locations
cgacccgggatccttgagtcacctgggcttgcagctgatgaaccgaaatctcttccttcttcatctctaaatntcatccaccaccacttgcatcaccatagagagctccaaaactttgctttcctcaagctcttactctactttctcttaaactctctactatgagtgtgtttaagtgtgttaaacccaaataatccttggggtatttatagggtaaatgtgaggcatangtagtaaataagaccaatgagtgttaaggatcatataggtctttaggttacaaagtaattggtcttatcttttaattntatttttttcttttcttttattaattagatattctagatgcttcatgggttattagagtagagattgtaaatgtatgtatacatgattntgatgatg

SEQ ID NO: 79109 - DNA, 399 bp, Glycine max
  unsure (1)..(399): unsure at all n locations
aagacaatgactgatttattcacgagtctctgctctaatcaaatataattgactacttctctttctataagtgtttcagaagtaaacaagaacactctattcgattacttagagtatctaatngattgcattggtcttaagttgcttcatcttttgtgaagaacactctacatgattaacacgataatntaattgattacttcatngaattaatcgattaccttgtagaattaatcgactacaggcggttataattatattctctattaatagccaccttgtgttctctctaataacaaaacctgttaagcttctgaagagccatgatcacgtgttgttatttgtaaagaaagaggaagaaagtgctagaaatagtactcacacttcaatctttgatat

SEQ ID NO: 79110 - DNA, 348 bp, Glycine max
  unsure (1)..(348): unsure at all n locations
atgtgtctaacatcacgaatatccgcttcctctttgcacatgttctggaagtgcattctatccggaaccataataaaataatactgatacttgcctacgaagggcaaccataggtccttccaagtatggactcgggaaggttcccagttagtgtaccaggtaacaactaccccagtaagactttcttggaagaaatgtattagcagttcctcatctttgcgtatgcccttatcttccgacaatacatctttggatggttcttggggcaagtagtccccttgtacttgtcaaagtccaacaccttgaacttgggaggagtgatgatattgggtactangaacaactctt

SEQ ID NO: 79111 - DNA, 411 bp, Glycine max
  unsure (1)..(411): unsure at all n locations
acttcatcgataggttcatctccattgtangttctcatcatnganggacttctggaatcgagctcttctagaagagggttcaccgacctagataggaatcacgacatcagtgatataggtcaatctaaaaggagtctcctttgtttttgattgaggagtgcaatggtattccatccacttcttcatgtcgttgaagatgaaccttgtggatgtctctacatgcccgttcatctaagggtgtntcactgaagatatagaatgtgtgaccttgagctattgaaggaactgctcatatccgcttcttagtgaatttcggccattgttagtgactatggcaaaggggagaccatgcctgcatatgagtgtcctccaagtgaacttctagattttctaagttgtgatcttggcaag

SEQ ID NO: 79112 - DNA, 230 bp, Glycine max
  unsure (1)..(230): unsure at all n locations
gtggtggggatgtctcctccacctctaagacctctcaatcactcacaaactcagctcacgctctcaagacagcttacttttccagctctggtctctgtagatcttcacacaacaaaatctctcacactctntggaatgtggacctctctctctctctaaaactgaagacatgcaagagctcctcaacaaaaatggccaaactcctcctctaaatctgatttcaggcttaa

SEQ ID NO: 79113 - DNA, 165 bp, Glycine max
  unsure (1)..(165): unsure at all n locations
catatttacacctacctccaancgccatatataacttccatcacacacactcccttgccaaactcacatacatgcatactctcaccatctttgcctccacatactccacatgtgcacctcttgccatttcttatccctatacatactctaacttcatcatgaatc

SEQ ID NO: 79114 - DNA, 494 bp, Glycine max
  unsure (1)..(494): unsure at all n locations
tggactggactcacccactggctgtcagagatggggtagatgattccagcttgtaagagcttcgtcacttcctttttcaccatatctagaataacgggattgagtctctgccgtggttgcctctctggcttagctccatcctccaaaagtatcctatgcatgcaggtagatgggctaataccaggaatgtctgctaaactccatccaatggctntcttgtgcttcttgagaactagcaacaacttctcctcttactcagcatcaagggaggcagagatgatcactggannattttccttgtcctccaattaagcatatntgagggtttgttggtaaggggcgtcaactatggtgtggatggtggctgaacagtgngaggaaccatggtangagaagaagaaaggtgtttgttntgtaaatanacaacaactaaatttgaattagaaatatcanaataanacacgttgttccctngattacaacaagctctatct

SEQ ID NO: 79115 - DNA, 408 bp, Glycine max
  unsure (1)..(408): unsure at all n locations
agcttttcgattcattctatgtacccttagtggtccacattgtgtttcgtgcatttntattctcgtttcggttactttttatacccccttttgacgtgcttaagccattttacttaagtcatttctcgcttaacttaaaaataaaataaatntccaccgaacatttgaattgtattatccgttaacttccgttaaaatgaattccgaccgttcggtcgtgccgtaaccacgttggaaataataaaaaaaggtgaaaataatataataaataaaaaaaaaacatcttttagcaaaataaagcgaaaaatcaattggacgttntctctttgggatttctcattcttaatcgaattgactaataactaaagtgaaactaaaggctaaaatcaactcgcctagtcaagctcg

SEQ ID NO: 79116 - DNA, 528 bp, Glycine max
  unsure (1)..(528): unsure at all n locations
gcgaccttagatactcagctagcgttattactctttagtantggtgaatcattttattcattcatactcttgtttgcgaaagtcaagagtgaattattgttatggaatacttgggtgggcttagattcaaaaggagtggcaggacaaaatacttggttgtaattaaagttttgattagtagaattctttacagtcacataaaggagaattgaacattgctttgcttaagtgaactagtataaaccaagtgttaccacatctttcttaattggttntattgagtattcttttaagcttatcttgacaccgtttctcaccaagtgtgtacctganaaacctttgtggaaatattactttattattactggacgaccaaactnggttntcatcaaacttgttttccttattagtggatgactccattgcatctatctttttggactggtaataaaagcctctattttgaaaatggtattatctntagctaacacactattcaaccccncttctagtgtgaatgtcatattc

SEQ ID NO: 79117 - DNA, 323 bp, Glycine max
tcgacactacttcgttctgaattcactcaaagtcagtatgatcccctctcttttcctacaaaggactcctaaaagcatcgtggtgctttttgtttatgtggatgacattgtggtcagtggttcacatcaagatgctgtttctagaataaaaaatcaattgcattcaacctttcagatgaaagacttaggccatctcacttatttcttgggtttagaggtgcattatcatcaccaaggcatttctctatgtcagcacaagtatattcaagagttggttcaactagctggactcccaaatgccacccctggtgacactcccatga

SEQ ID NO: 79118 - DNA, 430 bp, Glycine max
  unsure (1)..(430): unsure at all n locations
tataaactaatgacttgaaccgctcaataagatgacataatgagaacttgcgtacatatttaggatcagagctgcactttgcatgaaattggtaatgcggacttcatatgaaacaatgcaatgcaatggaaaagtgtacaatgacattcntttcctatnntgtgaatttgattnttttttttcgaanacacagaattgactgtcctttgaaagaagtgataattcatgcaaccttatcctatctttngcaaatctctccaggaactccctcagagtgtatgttctgtnntgattagtcactttgaccatttggagtgacggccatgatgccgtttgacctttaatcaatccatataaattccagggtttgtccctctnttttgttaanaacatcgacgggtgagaacttttgatctgcccctatgttcac

SEQ ID NO: 79119 - DNA, 346 bp, Glycine max
  unsure (1)..(346): unsure at all n locations
tcagtggttnggttgtaaagaagtgtcatgtatgtacgtgtgttaatctnggtgtaccagcaaactggtaattaaattttgcagttaacttgacatgaaatanttgtgtttttggttattggtaggtggactntgcanatngaatgcggnaagggttgacaattacattaacgaaggatttgacactangctttttgtcctttagatgaaactaagttgaagtgctttctagtgctggccttgtccttcgatactttgtggtntaggaatgtaatcttttgtgcttanatgaattaactaacgcttattagcgctgtgtgatactntacatatgtcaatacgattt

SEQ ID NO: 79120 - DNA, 419 bp, Glycine max
  unsure (1)..(419): unsure at all n locations
aacaattanggatcatcttgaaacttatgtgcttcaagtgagaagaaatgcttctttttccacttgtgaagatgttcaaagtttggctatgaagatggttcaaactgagaaacatttggtatttccattggtttataaacttattgagctagctttgatattgcggtgtcgacagcatccgttgaaagagctttttcagcaatgaagattatcaagtctaaattgcgcaataagatcaacgatgtgtggttcaatgacttgatggtatgttacaccgagcgggagatattcaagtcgcttgatgatattgatattattcgaacatctaccgcanagaagtctcggaaaggacacttgcctcgtaattntatttaacccgctattgtaagatatgattatctcttntatttacactatat

SEQ ID NO: 79121 - DNA, 337 bp, Glycine max
  unsure (1)..(337): unsure at all n locations
tattatgatcagtcngtgaggtgcttcaccttggggacttccagctatcacctatggtagaagaacttgaaaaaatcctaggatgtcctctatggggaaggaaaccatacctcttctcagggttatatccctcattagctagaatttccaagatagtccaaatctcggcacaggaattagaccacaaaaagcaagtcgaaaatgaggtggttggaattccgagaaaatatttggaggcaaaagcaagaatctaggcaggtaaagacgagtgggccccgctcatagatattctcacactcgtgatcttcggaggagtcctctctccgaatgtggatgg

SEQ ID NO: 79122 - DNA, 347 bp, Glycine max
  unsure (1)..(347): unsure at all n locations
ttttatggtcatgtgatgctacggctcangattcaatttctctattttaatcaacccaatgtttccaaaatatnagtcttttatcaattgtgcattcatccgagtccatatcgggcgtccgggaaaatcttcacagcattcacccttcaggtgtatacacattntntcaaaagctagttacgaatcagtgaattttccaaagaaaagttggaaatcgtctcttttcaaaagcatgttggtctttcaactngacannactatttnnntccttttctacctttntcttactttaccccttnnttctcttattngctctcttttttctttcactctcttttcttttctat

SEQ ID NO: 79123 - DNA, 410 bp, Glycine max
  unsure (1)..(410): unsure at all n locations
aaaattgttacatcagtcgctgttagatccagttggaaagtgtgctcaccattggctctattttgaatcaagtatatgtattgaagagcattccattacgcttataagctaactatctgagcttcactaaattcacttttagtaccagccttgatgggactaatgtgagtttccagatcctaacattatcactttagataatatggtgtacatgttctgtatttactttcaagtccataatacaccacttggcacatgcacactntgacacctcagcatcacaagctgaaccatattattgtttataggtagccagagtccagacataatatatttgttttaaaattgttaggagtattgtatatggtttattggatgtaatagctatataaagtgcatcacactgaatg

SEQ ID NO: 79124 - DNA, 458 bp, Glycine max
  unsure (1)..(458): unsure at all n locations
tgttttgctcatgtatgtgttntattccatagttaattattaattgacttataagaagctataatctagagtatgactctgtgagttgttagtatgtatagaattagaagtattggtagttatctggaatgatgttctgtaattatgtgtgaattggtcatcctcttctggtaagtggtggcagtgtatgtnttattttgaanattaaatatgcatgagatacctccatttgggatgggaaaaagatatatacctccacctgngatgggaatgagataatagatatcttcatctaggatgggaagagaatttggatacctccatccatgatagggaagacaatgagatgtcattgcatggatatgagctcatagatcctttaaaaatccgaaatcacaccggtttggnaccaagagtgagttaatgatctcaaatcactaatgtgttgtgatattgtt

SEQ ID NO: 79125 - DNA, 415 bp, Glycine max
  unsure (1)..(415): unsure at all n locations
aatacttttaattaatatttaaattnttattcctttattaatatatatgtgangggtagagggtgtcacaagtgaggctcgctatatctggaacgttgacaaattgggctntattgcttgtataggtgggtttcttgggttattgtttgcaatagtacatagagattgcccttcttgttcgagtaagtcattggccacttaaattttttcctctatcgcaccaattgaaaaagaacatattttatctcttgattggttagttttatttccttntttgctgtgatgttattntttaattagagacaaaactagatgataatggtgcaaatggtttgtgtggtagctgcacattaactagtatcttgtcagctacaagcaacanaaaattgattaagaacttacacttgagatgtta

SEQ ID NO: 79126 - DNA, 494 bp, Glycine max
  unsure (1)..(494): unsure at all n locations
gccttgttccacttatacatntatggtctgcctacanaaatcaatattcattctaaaatgacaatagaccctactactcttaagtattcaatattcattctaaaattgaaaattcaatattcagtattcatacctcttctgctctaacaaattgttgttcatttgatagcaatcaccggagaaagaacactatatctgcttggtgaatcttaatcatgaatagaaacaagaattatcctcttagaactctcattgtctgtcacatgaataagtaacacttttaatagccaacaagcagtttcacatactttggttgagcataagctgaattagtttgttgtagttgaacttggttngactntgagttcttctaatgccattactcattagttctcanaggttnttttgtgcaaaatgtgatacatataantngtgtggcagtatgggccatggctaatngccatatgcttttatattanggtatattcactact

SEQ ID NO: 79127 - DNA, 437 bp, Glycine max
  unsure (1)..(437): unsure at all n locations
attacttttcaagcaattctttggtttctttngtncggccgctgtccctaaataaatgaatttttaattaattcacagtctgtaacaaaaaatattaatttaatttggaacattaaatttattaataatttatattttttaaaaaagtatccttaaaataatttaaattcatcttcttcttttcaattaattactttctatctaattaattaattagtgtgttagtcttcttctccaatccttataaagagaaaaaaatattttcatgacatttattgcaaaataattaaggatattntaataaaaaataattaatacaaaagatagctntaaaaaatcttataaaaattagcaaacaattttttttggataaataatcattnttatccctgaatatggtataacactaataaatgggttccgaaagatgaaaattc

SEQ ID NO: 79128 - DNA, 267 bp, Glycine max
  unsure (1)..(267): unsure at all n locations
catgcntccccttctctctttctcttcctatttcttttccttcaatgaagcatcctctccaagctacttatccaaggctcaatctggtggngaagactcttcttccatggcttattccctagtggatggtgcctcctctcacctcttctcctttgtcttncgctgcatctccatggtggaaaatcaccattaaaggacctcattgaagctcatagatccagcctccatagaagccccatatgcaagcttccatcacaaacactttat

SEQ ID NO: 79129 - DNA, 426 bp, Glycine max
  unsure (1)..(426): unsure at all n locations
agttttggcttttacttgcctaactcccttgagtggcatttggatttggtggtatcttgaatgattcatcttagtacatttgatatctattttgcattgtgcatcatcatagtgtgtgtgaagaaaattttctaagttaaaaaaatttcttcagaggcaaaaactttattttaatcgattatagccttgttgtaatcgattacaaaaagttgtttggagcttgtagagttaagtctcatatcggtttaatcgattaccggtatctcctaatcaattacattgttgtttgagacaatgactgatttagttaggagtctctgctntaatcaattaccaagtggattaattgattacttatctcttgttcaagtgttcagaggtgaacaagaacactntaattaattacttanggtcatataatcgata

SEQ ID NO: 79130 - DNA, 468 bp, Glycine max
  unsure (1)..(468): unsure at all n locations
atgaacaaggatgattangagatagttgttattgacatggaaccgaaggttntcaatgtgtcacattcattaaaagttcctttctttctttatacttttatagctggtttttgttccacaaaagatagatgctatttaatttagttaaagtctggcctatcgtttggttggttatctaatatttataatgtcctatgttgagcangctntactntattttatttatagagacactcttttggaagatgaagagctctntatgttacattcgtcattctttccttcattgtctaaatcatttatagcanagttgctagctgctggcctgaagtatggttggccaagactaatgtngatgtgtgaatctatactttgtanagacatatgtatagaactttgtgcctacattntcactctttgtgatcgttattgtgctacccacttgaagtctgtctgtaaaaaatttct

SEQ ID NO: 79131 - DNA, 72 bp, Glycine max
acacttgatactcagctgccacccgcggaacacactacagtggaccaagtgtcttttataatggacatcata

SEQ ID NO: 79132 - DNA, 426 bp, Glycine max
  unsure (1)..(426): unsure at all n locations
agctttcataagtgaaattgggtgcggccatctcctaagagtcctctcacgaggtggatgttgagccacgttcttagtatgaaaattattagttgaatgctcaaaatcaaaatattcagaatcactagcaacaaaatactcaaaatgctcaaaatgatcaggatgcacactatacctaactaatctatgaaaggttctatctatttcaagatcaaagggttgtaaatcacctggattacccctagtcatgcactatatgcagcaaataatgtgttctcaaacaagcaccaggggagggttaaaactacaactgtagtcaaatgatatccaaatgagcttagattttgtgagcaacaccctacaatcatgaaaagatagcacaaagaaattcaaacaaanattcaaagtctaactatgaaaactact

SEQ ID NO: 79133 - DNA, 543 bp, Glycine max
  unsure (1)..(543): unsure at all n locations
tcctgactcaccatanaccttacnctnggaagcataataaggaaagaaggaaaggaaatntccaatcaaagagaaagcaaaaaaggaaggaaaggagattcccaatcaaagagtgggagaaagagaanaaaataaacgaaaggaaattcccaatcaaagagtgggagaaagaaaaaagaaaagaaagaatattcccaaccaaagaatgggagaaagtaaaaaagaaggaaaccatgacctaaaagtggtcttctcccttngattaccaaccaaaatcctgtgcgctagcgactnttcgccccgcactaaacaaaaacagaaaaggaaaaaagccaaccaaaaatcanaagccaaaaacacacaaaagccaaaaaaaaatccatcataagaacccattcccaagggagatcttattgatccatgatcacgcatgtaatttttgatttgatangannataattgcanagtcaattcatgacatatctatggntcngaattangatgaaacacttacctgtgcgagaatgatacactntgagtgga

SEQ ID NO: 79134 - DNA, 377 bp, Glycine max
  unsure (1)..(377): unsure at all n locations
tctttaatggagatggttaccactactggaaaacccgaatgcatatttttatcgaggcaatatatctatatatctgggaaaccatagaaatatggccttatatacccaccacagtagaaagagtttcaatagatggtagttcatcaagtgaaagcataaccatagaaaaacctatagatagatggtctgaagaggatagaaaacgagtacaatacaacttataagccaaaaacataataacatctgccctatgaatggatgaatatttcagggtttcaaattgtaagagtgctaaagaaatgtgggacactcttctattaacacatgaaggaactacagatgttaaaagatctangataaatgcactaactcatgag

SEQ ID NO: 79135 - DNA, 353 bp, Glycine max
ttcaactaagaaccccattgggtggtgcatacaaacattcttctctaaatctccattaagaaagacaattttcacatccatctgatgtagctccaagtcataatgggctactaatgccataataatcctgaaagaatactttcgtgagacgggtgaaaacgtatcttataatcaatgccatctttctgagtaaatcccttagcaacaagtctagccttgtacgttcaaggtgccatgagagcacgtttagtcttgaaacccacttcaaccaactctcttacaaccctctggtattctacaagcccaaccaattatgtccatggatctatcttttttatggattaacactttca

SEQ ID NO: 79136 - DNA, 359 bp, Glycine max
  unsure (1)..(359): unsure at all n locations
taaaacaatcttaaaataatagtgtgcatgaaccatggagacgaccacgttgtggtccccgaatgacttgttacattgaagaatccaaattttgagtttagtttgttccatcacttgaaccttttggaacaaaattatcataatatcactgaaaacttaattgtaaaataattattgtattttttatgtatatataacatgaacattgatgaaatgacaaaatttgtgatctagataaactcaattatatatgattcattcttagttacaaaaatagccaacctatttctaaattaattaaatagcaatgactntatgtaattgtttactaaccaatataaatntgggtttactatctt

SEQ ID NO: 79137 - DNA, 512 bp, Glycine max
  unsure (1)..(512): unsure at all n locations
cttctgggtattttgtcactttanggtatgcagttcggattaattatctcactctcaaataagatatcttactcctggatgatatgttctctctctctctctctctcacacacacacacacacacacatatatatatacatataatcttttccgatttggttttattaaattatgtttaaagcaataaattcaattagtatctttacaattcgntgattganttnggttttaaaatgatgttttgaaagcccatatatatatatatatatatatatatatatatatatatataatagccttgtatttaanatagaaaaattaagactaaattagaattttgatcccnctgtagnttcacatctatcccncttatntctaaatcaagacatgcatnnctttatntttcanacntaagtaatttgattctttcgataattgatcatncaaagtcatacattaactntgatatggcgtgtgcttatgtggagagtngacatgacacttatatgac

SEQ ID NO: 79138 - DNA, 275 bp, Glycine max
  unsure (1)..(275): unsure at all n locations
aatacatctcttttttggtagccctcacttaagaacttcatagttaagtgtgatttccttgaagtagttatgggatgagtgaccttctgagaaattttctagaatatgtgagtgatgacaaaatatgttgaaaagtctcgtgttggtttgtggagttagttatttatcttgaaagcaaacatggttgaatntcaaggttntggaaagggctacctacaaaagattctgaccggtggagggtctgagcaacaagcatgttgagtgaagtgtcactg

SEQ ID NO: 79139 - DNA, 403 bp, Glycine max
  unsure (1)..(403): unsure at all n locations
taacttgtcaatatgaagtctttnccctttntaaagcaaagaccaagattagtagttcaaataagatatctaaatattattttaatagcatttaattgaacttccattggatctttttgaaatttggcacataagcatacactaaacatgatattaggtatgggcagagttaaatacaataatgatcatttcattgctttatattgagtgtngctcacctttgtcaattcctcatgcagtccaagatatgtggttggatgcatcagagttttcatttccttaaccttgtccatgttaaatttcttcaaaagttctttngcatacttgatctggtgaacatatattcctttgtttggttgatctanattccaaggaagaacttcaattcttctgtcatgctcat

SEQ ID NO: 79140 - DNA, 436 bp, Glycine max
  unsure (1)..(436): unsure at all n locations
tagagtccacatctgtcttcgagtcgatattatttgcactacgtttggaaaagtctaaaaaaaatgctcttgggtcatggctggaatagaactttgagaaagaaatatgtctgagcttagtcctaacaaattagagtcattaattgtagttattattcaattgataccattgttaggaacaacatagtgttaggaacaacatagtgttaggatgcagagatggcaatgctggtgggtggctctaacttggtccacttggaagcttatgaacaacatagtgttctctaatgcaacctttaatgctaacaaactgtttgaagatgcaatattcactctatggacgtggctcaggcactctgagaaagattntactatccattntaatcaatggtcaagtagcattagacacggcttntgcatcagtagaggatacata

SEQ ID NO: 79141 - DNA, 479 bp, Glycine max
  unsure (1)..(479): unsure at all n locations
cacacaacataatctcttagaactctctagaaactggacctttctttctctagaaaccctagacatgcaaagctttgaatcccagtccaaactccccttctaaaatctgattntaggcttaaataggtggccttgttcgtgctcgttcgcttagcacacttatggaccgcttagcgcacattagtgaattctagcttagcgtgtgcctttctcgctttgcggatgaactgaagcggtgcgcttagcgaacctatacaggtcatcttcttccagagtcttcctcgtgcttaacccatgagtgttgcgcttagcggacgctcgctaagccagtagatnggcttagcgagaagggtgaaaacaacactntccanagctggcctaattaactngaaattgagtganaatgaatattaaacacacanaatggaagtactaagtatntattacctatacttaatagannatactttatacactac

SEQ ID NO: 79142 - DNA, 239 bp, Glycine max
aggataactaacccagacattcaacaatgtccaaccaactggaataaagaaaccccctgatgacacgaaaaggactattttcaagcacaaacaaaaaggttgaggagggctaatgacaaagagagggggcgaaaagggagccctcctcgaatgaataaatacaagcacaaccaggctaaaaagggttgaaaacttaaaaggaaggaaaaacccaaacagccctagaagcgaaaaaacaa

SEQ ID NO: 79143 - DNA, 469 bp, Glycine max
  unsure (1)..(469): unsure at all n locations
agttatctcctactanacatcctctanaatctatatggcaangataatngatataattaatacagccattaaagttaaatattataaatagaagatagatgattaacaaagagaaagagtgaaaataaagttgaatatttgattggctagattaagagtagaaataagatgagtttgttagcttgaatgacaagaaaggagagaatttaataaatgaagaaaaatttctattacaaccttggatgcacatttatgccaaaatttaatttaacccattaaaatttttaatataataacatattgatcaccttataagatntgtaaattgaattataaaaattataagaatgatttggtgcttgataacgagggttgaagacataaaagaatanagaacaatanagttatgggttcanatcctgatcttctaaccaaaaaactaacaacctaatattacttttataaaaat

SEQ ID NO: 79144 - DNA, 407 bp, Glycine max
  unsure (1)..(407): unsure at all n locations
aatgggtagtagaaatcaaacttacatcatagaagattatgctacaactattagtttgtgttaaaagcaattcaaatgatgacattgtgatattctctgttaaactagtggattggttcacagatattaaggtatgcttttactttgcagctagcaagcaagaagaaatgccatcatatggagtgttccctgagtatagagatcatccagatggcacacccattaccaaagaaatcagtagaattgggcatggtcctcttagaccagaatcaaatgaagtgagccattcattaccagcctcttatcatgtccacaaaagcatggtagaagacagaaggcacntgtttgtacccataacttttatagttatgaacccaacaattntacttttcttttatgaatcaaaa

SEQ ID NO: 79145 - DNA, 442 bp, Glycine max
  unsure (1)..(442): unsure at all n locations
tacaaatcttttgttttgtcgatgatggtgacaatatgttcaaactctggatctaatgatctaagaatnctcatcataattnttagatcaatcaatatttcaccatctctcttacagtgattggtgattcttaaagatctagagaaatagtcggagatgacttcattgtatttcatatgaaacgtttcagacttggctcttaatgtttgaagacataccttcttgactggattcgctcccttgtatgtggtctgaagcttctcccatgcttctttngtcgacttctcttttgaaaccttctcacaagcattgtcatctaatccttgatagattagatagaaagccttctagtctctctctcttgaggctctcagaccatctctctgcagttgagagagactacccttattccctggctcggtgtggcctttctctattatct

SEQ ID NO: 79146 - DNA, 303 bp, Glycine max
  unsure (1)..(303): unsure at all n locations
acagataanaataacgcaacaaatataatcgaacataattactaataaaatatagatatatattagggtgttacactcaacaatctttgacccanacaatcatgtttgttttgggtgcctctacaatcacagggtctcgaanatacttatggcctccttctatcatatgcaaatgagagaaagcaattttcagatcaaactttgaaatgcatcaatcactactcgagagagtatctttccaaagctagtaaagaagttctaattaaatcctgctctanagcaatccttcatattgcatgagta

SEQ ID NO: 79147 - DNA, 215 bp, Glycine max
tcgtgggaagtatggtttatgctataagcccactcacgctgatataatgatacgcacctcgggaaggaagagctgtagtcaaaacttgcggttgacacaagaaagtgaaggaagcccaccctgccacataagtagaagctatatgagcgcgggtatggtggacgacggtcatgtggtccctatatactaagatgacgttccgagtacattggata

SEQ ID NO: 79148 - DNA, 331 bp, Glycine max
  unsure (1)..(331): unsure at all n locations
ctttatgggacaataaccccgtggttgaacctttgaccatactcgaccataagtgggacagccacacgccacctcgcctatccgtccttgtccaatggtctggcttgcaaccaaaagattcgacttgggagaactggtctgaactccaagacatctatcaccttgaggacaaggttttcctcgatggagtagggaatgatagcaacaatccaaggccaagaagaatcacgaanaggccctcaggatggaggagttcattcactaagcaattaccagcaaaggacagtatatgaatttaccgtgtagtgcttgatttccctgagtaatcgta

SEQ ID NO: 79149 - DNA, 351 bp, Glycine max
ttatcaacatcacacacagtacccacatgaaaccaaaatttcaatccttgtagaagtgaattcttgagtgaactcaacaattcatcgatccaagttatatatgtgtgcctttcaacatcatacatgatctccattgccatctgcaattgccttcctgcagccttcttaatgtctttcataataggtgaaccatcgaattccaaggttccacaaaaaaaggttcataaatttctccattttcttgagaggatgctggtcctagcagcatcatttattggcaatttagataaaatggctacagggattccatctggtaattggttgataagatctccttcataatcttcctca

SEQ ID NO: 79150 - DNA, 534 bp, Glycine max
catactaagcttggctagagtttcactttgaaggacaatcttcacattcaagttattctcttattatattacaaagtgaaaagaagacagatagaatgttctgaccaagtcaatagtaaccacaccactgctatagtgcaggctgaaaagaagtggaacatgatcatgttcagcatcagtaaaagaattctttatttgtagaagtagttgtttatgccttgcgtgtaggatactataaatacacttcatggacgagcgaagatagtttttcagtatatttagttgtttatgtaaccttgtgcaagtgagtccactccaaacgatgatacgaacacacttgctgaacgcagatctagtttatatctcaagtatttgtctaatataatgtctttctctaaatgattgacttaacactcctcttcatgagatactaattatgaccaaatattaattattctctcatctcatttgactagaaactgttctttctattatgacactctgattatactatgtgtatagctcatacttgat

SEQ ID NO: 79151 - DNA, 295 bp, Glycine max
  unsure (1)..(295): unsure at all n locations
ctctatggtaatcgattaccggcagttgaatatggttatcacagtcactagaaatttgaattcaaaatttataatgtgtgatngattaccagaggggattttcagaatataattgccaagagtcacacctattcaaattttttatgaatgaccatcaaaggtgacttggaaacatgaacttatagggagttgtcattgtccaaaaaatatatcctctcaaaagattaagagtntttctgaactgaaatgtctttatcctctcanaaagattgcttggtcaaccacttgcatattc

SEQ ID NO: 79152 - DNA, 500 bp, Glycine max
  unsure (1)..(500): unsure at all n locations
ttgagcttaatgatgtccttaatggtgatttacaccatggagatgcagcanaaggcaaaggagaagaggagaggggaggcaccatccactacggaataagccaaggaagaaggagcttcaccaccaagaatagccttggataagaagcttgaagaggatgctntaatggaggaaaagaaagagagaaggggcgagcacgannatgaaggaataaaagagggagagaagtggaactttgaagtgtatctcataagactntcattcatcanagttacaacaagtgttacacatgcttctatntatagactagatagcttccttgagaagctntcatgagaaaacttccttgagaagcttctttgagaaaaacttcttgagaagcttctntgagaaaaacttcttgagaagcaagagcttagctaaacacatccatctanaaactaagctgaccttcttgagaagctagagcttagctacacacacncccctctatactatgc

SEQ ID NO: 79153 - DNA, 170 bp, Glycine max
  unsure (1)..(170): unsure at all n locations
gagaatgagantangagagagagagagagagagaaagagaaagtggcatggaaattgaaggagaagaaagagagaagttgaactttgaagcgtgtctcacaagtttctcattcatcaaagtaatgacaattgttacacatgtttctatttatagcctantacatgggaag

SEQ ID NO: 79154 - DNA, 308 bp, Glycine max
  unsure (1)..(308): unsure at all n locations
ctgatgcacaagagatgtaccctctcttgttctcagtattacaaacccaagtagatgtaccctctactttgatcacaaagaatgtaccctccaatgtgttaagaacaaagaatcttaggcgggtagtcccttgaatctctgtaggggaaacaaaagatatctcaggcggttagtcctttgaaatcttttggttaaagggaagaggaagaatcaaaagaattctcaggtggttagtcctttgaatctttnggcaagagggagaaggaagaatcanaagagttatcaggcggttagtccttcgaatcttt

SEQ ID NO: 79155 - DNA, 389 bp, Glycine max
  unsure (1)..(389): unsure at all n locations
tatcatatcttgcgnaagactcatcacctctatcatatctaataatattcacatttatgtctaattgcccttttatttcattgtagtcaatttctaaagcatccattgcctaaaataatctcgggcagtaagtaaacataaccgtaacgtgaataatcatcaataatggtgataaagtatctttcctttccgaaagaactatcatctaaaggtccacaaatatcatcatgcacaatttcaagaagctgagtgcttcttgtagctcatttttatagatgatntgattgatatcccttaatacaacccacacaaatatttatatccgtataatctagatgaggaagaatatcattctttattaatcgttccatcctttctctagaaatgtg

SEQ ID NO: 79156 - DNA, 350 bp, Glycine max
tcttatcttatccagattgtattccatctagattctattctatctacgatctatttcatctagatcttatctcgctcagattatatttcatgcaatcttatcttatcttgtccagactttagtttatttcgtttatgagattggacttataatagattagtgagctttggggctgatgacctaatccatacattttttaagattatgctctcttaatttcttttgaatacttcgtgcttaacgacttgaaacaatatgattgtgttatgaattatttgtggatttgacattgctatacgagatatataagttctttcttagttatattcgctacgcttaaaataataatt

SEQ ID NO: 79157 - DNA, 316 bp, Glycine max
  unsure (1)..(316): unsure at all n locations
acctttcaaagttagtgagaaggctaaacgaanaattatggaacttagaaaaactaaatccttaattgaaggcgtaggtgacaatcatagtgaattactaaacaagaatggtagtttacttaaggtcattccagatactccccaagcctcgaaaaatacttccaaaatggtaataagaagtacctccaaattaattaatgttattaatgaagatagtgaccaaaactcagatgacacaactgagatagaatcagtgtcagaaaagaatataaatccaattaattccatacactggaaaacaccctccaaattatat

SEQ ID NO: 79158 - DNA, 122 bp, Glycine max
atgccgcacattaatctcgtgacacagagtgcgagacgatgatttggcaattatatgcgcaacttggtatgcatgcacctatgacgacactcaaatgtcaaatatttatggtcatgtgatgc

SEQ ID NO: 79159 - DNA, 422 bp, Glycine max
  unsure (1)..(422): unsure at all n locations
tctagataagataagataagattagatctagatgaaataatatctagatgagatcaaatctaaataatatctagataagataagatctaattttatagaataaattagtctgccctcttcaagtccaagcccaattctagattcaagcccaatgcttcattaattcctgaaattagattaaaaacatcaaattagctgaatgggcccaaataataaaactgcctaattaattgacaattaagaccaatcaataattaaaatggtgcanaaagggtttagaaaatagaagataatgatggcacatcagagggggcgtccctaaactagaaccttggtgctgttatatagttttttttcagccccanagcttacaaatatgttntaaatccaagcccataagtaaaatcaaatcatatctagat

SEQ ID NO: 79160 - DNA, 299 bp, Glycine max
  unsure (1)..(299): unsure at all n locations
gcaaaaaaaaggagagaaggaaaatttccaatcaaagaanaaaagagaggaaaggaaattcccaatcaaagaatgggagagagcaaaaagaaaagaaagaaaattcccaatcaaagaatgggagaaagaaaaaaagaagaagaagaaagggaagaaagttcccgatcaaagaanacagaagaaatgtgccgagaggtccttggaccagacaatatctgaacaatacagaattgtcaccaaatgaacaaaaagaaagaaaaggaaaccataacctanaagtggtcttcttcctttgatac

SEQ ID NO: 79161 - DNA, 375 bp, Glycine max
  unsure (1)..(375): unsure at all n locations
acaaatagtgcanacgcagtgtacgtaagctcttaaacatgacttatataaaagatagattctcttaagaaagaaagaaattcaaacaaactagcgtaagtaaggaaaggaggaaaactactacaaaagcagagcaaggagacaccgaagttgatttacctgttgctctagaaccttgggggcgtaggagacctcagttcaggtaatatatacactatgaacacgcgctcctactaggaagattttaaatcatattaattcttcaaaccagatgtccaatgatgtatcatctatgcgtaatcaatagtgcagcgaataatcattcgacacattaattaaaacatgcacacgtagaatctctctctcctttcatat

SEQ ID NO: 79162 - DNA, 434 bp, Glycine max
  unsure (1)..(434): unsure at all n locations
catctagatcagaatcagattaatcagccatttcaatatcagaatcaccattgtcagccccaccctgatagcnggagttttggtaggtacgtgtctgcaataaccaagacaacaagtatggaagtggtggggagcgaagacgaaaaccaaacagcctgcgctggtcaaatggtgattcttgagnttttgaaacgttactggcttcagaaagaatcttcattgagtagcataagagcaacaagagaggcctccaactttgaccattatgaagcaccttctggccatctctanttttccgacaagaaggatgattntcaacaagagaaactggattcattaagctcggattcataagacgtangtccncaacagcttngtccaatggttgtngaactatgtgagatctttgagcaacanatacatcataactcaat

SEQ ID NO: 79163 - DNA, 390 bp, Glycine max
gcccatcccgaaaacttagaagtctttgattcttaagaaacttatctgctccttgagtcaccatcccactttgcccataggtttgtacctgggggagaaaatattcggccgttcagtggagacacttctatcatgatctccagacttgagagtggttttacacaaccaacggtcgagaatatccgctcataccttcaagctcgaggtactaacttacttttttgatttctaaattgatatgtatttttgccttttctaatattcttactctcaggcacaacaatcatgacaaagaaaattgctgaaacgtctcgagctgatgtgagacccaagacacccactgtggtgaagatccaagaatggaaacaagaagagatggtactcttctga

SEQ ID NO: 79164 - DNA, 368 bp, Glycine max
ctaactctcggggtcttttacctcaatcaagccggttttttttggttctggggggtgggtggtgttcttactaatggttgtttgtttggcagctgagaggatataaatcatgcagggtgctgtccgactgagtgagtattattttttattcactttacttgggaagggaaaaagaacaattattaactcaaactcgctttacacctagttagggtaggaattgccatgaaattgtatataaaactgctatactagtaaggcaactcaaagactatgactgagttgttcagaaaaggctaaaagtctggtgtgataaaatgaggactgtatgttgaaagatattgatgttgacagactaactcgaggat

SEQ ID NO: 79165 - DNA, 435 bp, Glycine max
taaaacacttgacattaaaatgctaacctattaatcctaactaatcaatacaaaagtatcacactaaatagaatcaaagtataacacactaaaagaagcatattataacataaaacatgtcttctaccctagggttttacataaacaaaattgaaaacagagtagaagtaagcttacttggaatgcataatgattgagtatgagtgaaatgtggatgattagaggcagaggagaagaaaatgcatagttatagtgaggagcaaaagtaactaccctattgcagttatgttttctttttgcagttacaaattgctcgctaagcgcgagtgtcgcgcttagtgagcactctgtgacgtttgaatttttaaatcttataacacacgcttagcgagacattcttgcttagcccaattatcataatttacaaccagaaag

SEQ ID NO: 79166 - DNA, 354 bp, Glycine max
  unsure (1)..(354): unsure at all n locations
aaattcacttattaatttgaatgattaattaataatatgtgtaaatgcttatgcatatgaattgcattttacaactgagtggtggaaattgtatganggaaaacaccacactttgcaaccattgccattaaagttctaagtttgacttgtagctcatcaggatgtgagcgtaattggagtacctttgagcatgtaagtaactaacattcatgtnttttttttaattatgaaactttagaagctgaaattgaaactaagtaactaacattcatgntttttaaattattatagattcactcanagaagagaagtaggcttgagcaccanaagcttcaagaattggttatgtaagta

SEQ ID NO: 79167 - DNA, 389 bp, Glycine max
  unsure (1)..(389): unsure at all n locations
tcatttatcctatctncgacagcaaatgggtgagtcctgtccaggtagttccttataaaatgagaaggaggagctgattcctacttcggtgcagaacaattggagagtctgcatcgactataagaggctgaaccaggttaccaaaaaggaccattttcccctgccattcattgactagatgcttgaacgcctggcangattctacaggcgctntataagatantttagcaaggtagcccttccactatccaacttgttgcaaaaggaggtggagtttgactttaatgataaatgcaaataggcctttcattgccttataagagcactgactaccacccctgtcattcaagcacctgattggacaaccccatttaagctaatatgcgatg

SEQ ID NO: 79168 - DNA, 524 bp, Glycine max
  unsure (1)..(524): unsure at all n locations
ctaagctttcaaaggactgacttgtgttgaccaacttgctaagaggcatttgttgagtcgaggaagaagcttaccacctctcttatcatgcagccaccaaattgggagctcctatttgagctcatgtgtgatgcctctaactntgcacttggggctattntgtcacatggagttggtagactatcccatgtcactatttatgcatcacgcactttagatgcaacccatgttaactacacccaccgtgagaaggagcttttagctattggttttgctttagataaatcaaatcttacttgcttttctctcatatcactattnttactgaccgtgcacctctaagatacttgtagtagaaccctgatgctaaaccttgattgatntggtggatgtttttcttcaggaagttgtactaagatcaagacacaatggtgagagacttggtgtgatatnttacagggatgagacatgtgatccttcctgtatgatatatcatatgacgttgagcattgatcatactgtca

SEQ ID NO: 79169 - DNA, 351 bp, Glycine max
cccctaaaggtacatagatcacatccatccttcaaaataaaaactaaccgacggtcgcacgaagaacgccgaacaagaaaaaaataaaatgaatgatcgcggtagcgattcaatagcgcttcggcctcgtttcctcttctttctctcttctctcaattcctaaccttttgccccctttttcccaaggaaaagacccttttgcccctttttttggtattctctgcattcttgatcaaaacactgaatgatcctttatttcgcactgtaactagcgttcaacaccgtaagccgactagcaaagatcaaaatatcaatgaacggtagttcctgaacgaaattaaggtatgacag

SEQ ID NO: 79170 - DNA, 383 bp, Glycine max
  unsure (1)..(383): unsure at all n locations
gctatgtgtatttgtcaccgcgggtgaagatagtcgtgaagggcgtttgcattntgtgaacattatttccacgtttctttatttgcagcgtanggaattgaccttagttctgctggaagaggcgcttatcgagcttgcgaagttnggggttaaacttggccttgatgacatanagcttctttcgctactttgtcctcatgtaaatngattgggtttgtttttcatattcattnttgtggtggcactttgttgttttatacatgcttgttccctcttgattcatgttgtgaggtatgatggtatgtctattatgtgctaacaatgaggttgtangaatggnngattgtccttgaagagttattccacgctgaatgcattcattc

SEQ ID NO: 79171 - DNA, 303 bp, Glycine max
  unsure (1)..(303): unsure at all n locations
tcttatatccttatatgaaataaagcttgtaatgtanaggcgttgaataaaactacaatataatctatgatcattgcaaaataaaaaaatttgtggcacaatttatctgattaaactccctacagtgcctaatgcaacacattaagcttgatccacggtcggcggacttaattgaaatatttgggtaacttaagctatgctaccaagacaattatgtttgtatttataagactattcattatataaccaaataattatttaaataaaatattatttagtaaagtgtgaattgcatttccttta

SEQ ID NO: 79172 - DNA, 494 bp, Glycine max
  unsure (1)..(494): unsure at all n locations
atacatgcaataggatatgatagtccttgttaagaaataatgtgctagtttcataagtgttacaagttacaagattntacctcaaacgaagcatttacaatgccttatgctgtttcctgtgcttcatctctcctctgttcctctttctattagtggccattcagtgtacttgaatttctaaccatcctttggtctgattaattaattattagcttacagtagcagcttacgaggattatccagtgatattgtactttagattcctttttcgtgaaatattgtagtttttatacattagcattcaattgtcttggccttatatatantatttttatattctttccaaatatgacatttaataatataatacgcatcctgatcttgagcagattcgaacagctttgaaagaagtggatggtgaattcctaaaggtaacatctcatttcttgctttcatgccacattctatggaaaccatatcatgagtaatgtctt

SEQ ID NO: 79173 - DNA, 294 bp, Glycine max
  unsure (1)..(294): unsure at all n locations
acaatattggttttctcttatgaaacactcttgcctntaccactctaattccccttgagttcttaggcaattcaagagattatggccacaacaaagaacaattcaccaatatgtgtaaggtaaggctagagagacaaggaaaaggttaaccaagaaaaaggctaacaatgtttttaggcacaaatgaaggaaataaaattcagaatttatgaattcaagtaacaatccttcatgcaaccaatatattaccttaaagagatttttttttaaaaaaagtcttcaagcatgaaccat

SEQ ID NO: 79174 - DNA, 399 bp, Glycine max
  unsure (1)..(399): unsure at all n locations
ctcgtacccgggatcctcttagtcatctgctggcttgcaagctatgatatttataaagaccttgctttgagagtctatctgttccttgtgatctagcttcttcaagaagatttttaatgattttcaaatccttagaagatacacatattcatggaatgattctaggaaaagacgaacgaagcaatgaggattctcaagataatggggctagaggaaataatgaacttccaagagaatggaaagcctcaagagatcatcccctcgacaacattattggtgatatatcanaaggagtaacaactagacactctcttaaagaattatgcaataatatggcttttgtatctatgattgaacctacaaacatanaagaagccatagtagatgataacaggatca

SEQ ID NO: 79175 - DNA, 497 bp, Glycine max
  unsure (1)..(497): unsure at all n locations
caccaagtaaccagttagatatagaagaatattgctaaaatgaactaaggaaatgtcaatgccaccttctgcagttttggactgatgcatcaaattctttctctgatggtctttnttttcttggctcacatttgaaagtttatcttcaatgcttctctggaaaaattaanaacataaaaataaacaaacaaaagacataacttcaaacacacaatccttaattaatgttagctggcctttggttagtgcttgttntanaaaataaacaacaaaatacaattntaactaattttgcaaggacaacttatgaccagttagatttctcatgcctacaaacaaactatagcctccataatatgacgcagtaccctactaataataatgctgatattntaatgccgtatattattacnattcaaatctaaaaactttataacaattggntgaaagttgtgctctagagttttggtggaagtatgcatnctcacatataaact

SEQ ID NO: 79176 - DNA, 200 bp, Glycine max
  unsure (1)..(200): unsure at all n locations
gaatattattnttctcatatcctgcttgattatttacatagctatatatagaagaattccccttaacatatttgtataatttctatccaaaaggaatctaataacggttttgatatgcatgactgnctatganggagcaaccactacaagcgggattntgggcttgattcgctagttcgatctttcaattttgcccttac

SEQ ID NO: 79177 - DNA, 505 bp, Glycine max
  unsure (1)..(505): unsure at all n locations
gatcaagattcaagactcaagattcaagaatcaagagaagacttaatcaagaatagtatgaaaaagttttttcaaaaactgagtagcacatgggattttctcaaaacctgtttaccaaaggggcgtattacctaaccggtaatcagaanatgcagaaccatagaccccangcccatacaccccaagcctagtaaggtcactgtataaaggggagaaccccacaggtaaaatgacaaattcattcttgaatattcattaaatatcatcaacaactctgagctgaaactntaattatgttccaaanaatcactaaatcaaattaaattatgctaattattagatgatagtctataataataatcactagccataagaaaaatttcttataaattattgagtattaataggaaaaaaaagaatggtgttcgtacaatagtcatgtggtgaaatacattttggcaataatatctagtttgttctccanattacaggaacataactaaca

SEQ ID NO: 79178 - DNA, 451 bp, Glycine max
  unsure (1)..(451): unsure at all n locations
gctcatatatgcgaaactacactccatcagagatgtgattgaatctgagaacgtgaaggtcgatcacgtttcaacagatgaaaacaccgctgatatgtttacacaatccctctctagtgtcaacgtcaagcactgcttggacttgataaatttgaggatgcctacagcacattggtagacatgctccctgaatctcaagataagcacttgttgatctggagtccaggtggagatttgtggtgtgtgactcacaatcacaaatggcacatgtgggaagactttaagaggtgctatcataactaacatcagctatgacaactgaatcggtctggcaccacagcatagctagaatgcgtgcgcgtgatatatatatatatatatatctatatacatatatctctttttntccatacttctacatgtatctatatatctacatatatatctatat

SEQ ID NO: 79179 - DNA, 293 bp, Glycine max
  unsure (1)..(293): unsure at all n locations
actgatgacagatacccgagtaggtaactcacctcaagtaccatgtacccattgcaagagtaaagcatcatactcaacctgcatagcttgcttncacgtagaattagagagtgctgccttgacattcttatgttcagcgtgtgctaacattaaagtgggattgagtctaaacttcactatgccagatttggccctagtgcacatggcgtgcacattattctctctcaccaatgagcctgaaccagaatcatcagaaatggatgctacacaggtggatggcgaagcttgagatg

SEQ ID NO: 79180 - DNA, 481 bp, Glycine max
  unsure (1)..(481): unsure at all n locations
agcactctgatctcagcttcgcgaccagagttcaatgcacactgtaaataactctaattttaatcgatnntnnnttttntggggttgtgaacatgtgntttagtttcatttaattattataattttaaaataataataacaattaaaaatttgcactatattcattatgtgtgtaaaaataattcaaanaatgaattattggctttgatgatttttaatggtcattatgttaaaattattaactacacaacttaaaaaagaaattattttattgacttaaaaatttaaggattaaataaatatttaaaagataaagactaattgataaattgacaacatacataataaacatctttatcttttatttcttcatgtatagtgcttgattgtgacatgaatgtgtaaatattaaagaataacacgtgaataatgtgctcggaagtgtacttatcatattgagtatatattgcatgataaatat

SEQ ID NO: 79181 - DNA, 373 bp, Glycine max
  unsure (1)..(373): unsure at all n locations
aagacagtgatgaggtacaagccctataggcagagcttgaaagagcccgggtagtcgaagagaatttcaagtccatagccatcatagtctgaaaagagtatgatgaactaagggacgtcagtatggccacagctgaagccttggaacgagaaaccaagaatgctcgaaaggaagaacacgaccaaaacaagttttgaggggctttatatggcagcaatagtgagctcaagctccgaagaggtgaaaggaatcatcacgggtcataggcatgatctggaaggaggagctaaaggtttgccttatgtcgaanagaaatttgtcccaacagttaagcgagactgaagggaatatgtgggccatcatcaataagtgc

SEQ ID NO: 79182 - DNA, 353 bp, Glycine max
  unsure (1)..(353): unsure at all n locations
attctttcgtaatntacgagaaagttacggaagctntattgaagcctatangactntgatntcttcttttntttctcttccttatcacccatattaagtgaaatatgcttatttaggggttatgggaatttacggaagtattacgggtgtcccggaagctccagaagccattttttgacaaaacgggggaggtggttgtcacccatcttgcccatgcgagctatgttgctctaccttatcaagactatgccagaaacctctagaacgcccagattggaaattactatctgtaccccatttactacataccctctttgcccctcttgctgatctttttttaacgtacggatctc

SEQ ID NO: 79183 - DNA, 453 bp, Glycine max
  unsure (1)..(453): unsure at all n locations
gcttgagaggatgcttaatggaggatttgatgagggagagaaagagagaggggggagcacgaaattgaaggaagaaaaagggagagaagttgaactttgagttgtgtctcacaagactctcattcatcanagttacaacaagtgttacacatgcttctatttatagactaggtagcttccttgagaagcttctttgagaaaacttccttgagaagctagagcttagctacacacacccctctcataactaagctcacctccttgagaagcttccttaagaagattcctaaagaagctagagcttagctacacatacctctctaatagctaagctcacctccttgagatgagaagctagaacttagctacacacccnctataatagctaagctcacccncatgacananaaacatganaatacaaaanaaaaatccttactacaaagactactc

SEQ ID NO: 79184 - DNA, 552 bp, Glycine max
  unsure (1)..(552): unsure at all n locations
cctctgatctcagcttatacacactnntagagctcgatctgttgagagatctcaggtagtcgttgtctaatatgcttggcgcttaagacgaggccgctactatgcagagagagagtgggaaccacanacactntctacagcatatctntagagaagtacaatctgtcaatgttgtttagtgctcagagttgactntcaacgtacaaatcanaagaaacgttaacaacataagacaaaaggaattaataatgtcaaggcaagacaatttaaatcttcccttttgtgcgttatgactgaacttatggatgttactttntgatgatcatttttagtactcgaggatcaagtgactatntcattgcttttgtactgngagcctganaaaagatgatcgaactcacaaaccaagagggggtgaatnggtttctaaatcaaatcaaacttaanaaacannagtntgaanaactntattttccanggaccgtatcacanacttntattagaaccaatatctaatcaatcacccttaacacannaatccgtgtaaaagtc

SEQ ID NO: 79185 - DNA, 465 bp, Glycine max
  unsure (1)..(465): unsure at all n locations
agcttgtgttagcagcaatctgaagatttgtgaatgaatggaaagggaaaacaaagtatcctgagaaactaagcgcanagcataaaaatgttgtatgacaaagacgcggtgtaagtaaaccaaatatgaagcagagctggaattgatgctaattagattgcaaaaagtgtgacccatgaatggtattgaagagaatgaaagcagcgcacctgtctctggaacataggggaatcgtcgagcttgacgaacgccgatgccattgttgcgttggtcggtgttggtgactgagtctgagggtggctcgtggctcaagattcaaggttcaaggttcaaggctcaagctctgttatgttacagtttagatcgcatgtcattgttatgtntatgcacacgcttcagatggagatgaagatggagatntgtaacgtgactattttgtccccgccgttaacccaccctcgtaca

SEQ ID NO: 79186 - DNA, 449 bp, Glycine max
  unsure (1)..(449): unsure at all n locations
atgcctccataaagtattgacaagtcaaagttgtatcgaggtatttcatcttctgggatgtctgctgggacaatagccttgagaaacatgtcttctatgcctactgtgnatccttgaagttgaccttggatgatntgaccatnttctgcatttgtttcaatgtgaacatcaactatacctggtgtgggttccctgggctccaaatcaatctcaaccgtagctctatanttttcctcttccctggaatcatttccaacaccaacaggaacaatacttanggagggcatttgagatgctggatctntattgtaagggtcaccaagaagaaatggtatacgataggatggaattgacccatatggtgcagatgacgagaatttaacacagaccatatatagcaggaagtgatctacctcttcanagatgtggagtttatctattccaacatg

SEQ ID NO: 79187 - DNA, 410 bp, Glycine max
  unsure (1)..(410): unsure at all n locations
actctctctcacttatgatagccgccgatgatcccattacttgcttccctaagctctctgtcctttcttcacgccgcatcccatgccttgcgaactccttggagtaccctcgcgttgtggtcactgaaaccccgtgcgatgaaaggcgtgatgctttcgtctgatggcactcctctcatggggtagccaagagttggtcccaattcgcctttcctttnttcgacgcacgagcgatgaccttgtagcggatagacgggcctaccttcttggagaanaaggtgcgaaaccagccacacatagagagccggtgtacaacaaacaattcttgcgccgctcttttcacatctccggtcaaacgtgtcatacatggccaaaatggcgacgatcgggctttccttgcatgatgaaag

SEQ ID NO: 79188 - DNA, 324 bp, Glycine max
  unsure (1)..(324): unsure at all n locations
gatcttgagcttaatggtgtcctctaatggtgattntccaccatggagatgcagcggaagacaaagganaagaggtgagaggaggcgccatccattaatgaataagccatggaagaaggagcttcaccaccaagatgaggcttggataagaagcttggagaggatgcttcaatggaggaaaagaaagagggagagaaagagagatggtggagcacgacattgaagaaagaaaaagggagagaagttgaactctgagttgtgtctcacaagactctcattcatcanagttacaacaagtgttacacatgtgtctatttatagact

SEQ ID NO: 79189 - DNA, 486 bp, Glycine max
  unsure (1)..(486): unsure at all n locations
ctctcctacatggctttatctctagtggatgatgcctnctctcacttcttctcctttatcttctgctacaacttcatgggtgaaaatcaccattgaaggaacttattgaagctcanagatccagcttccatagaagcttctcaagcaggcttccatcagttatcaacgggtttttgacatgaggcacacagatacaagtgttgacatcatagatatgtgtttaaaataagttgtatacttgtaaaaattatgtaagtcaatcgtgtagaagcacagcttcatggtgaatcanaggtgattcacagggtgtttgatgataacaatgatgataacaaaagatgatgacaaaggagatgacaaaagctcanagatcaatcaaagaacaactcaagggaatcaaagatcaatcaaagaacaactcaagtgaatcanagatcaatcaaagaacaactcaagtgaatcaagaacacttcaagagttcaagat

SEQ ID NO: 79190 - DNA, 363 bp, Glycine max
  unsure (1)..(363): unsure at all n locations
gcacccctattattactatatacatcccccttgctcttttgtggtgattctttntccgtaatgttacgatactttacgactttcgtaacgatgcatggtttctttccgtaatgttacgaaaccttacggactatgtaatcaaccactttttggtttccgggatgtcatggaactctacggattgcgcacgaacacttccttttaatttccagcatgtcacggaacttcacagattgtgctacaatgctntctttngacttccggcatgtcacgaaacttcacgaatngcctaacgatgggtgccaagtacctcgaagtggtcatacgacggtcactctcatacacaatcatcaaagacaatca

SEQ ID NO: 79191 - DNA, 540 bp, Glycine max
  unsure (1)..(540): unsure at all n locations
gctgtanagaacttcgaaaaaataagaacaagcttgttcgcacatcgttcgcgtgtatgacatccactccacaagggttgaagttgaggagaccttcaatcctattacacaacgtggccgacaaaagtgggcagttaacttgaatggtcattattgtcaatgcagaaggtattctgcgcttcactatccatgttcacatattattgcagcttgtggttacgtgagcctgaactactaccaatatatagatgttgtttatacaaatgagcacatcgtanaagcttactccgcacaatggtggcctcttgngaatgaagcgactattcctccttctaatgacgcatggacacttatccctgacccaacagcaattcgtgcgaaaggtcggcctatatcaacaaggataaggaatgagatggatngngtcgaaccctctngagcaccgacaanatgcagtagatgtggagccgaagcgcataacaggcgtcgatgtccaatgcaatctgagccgtggagtnngtcaactcgtgattatgtatg

SEQ ID NO: 79192 - DNA, 368 bp, Glycine max
  unsure (1)..(368): unsure at all n locations
cgtaaaattttcttgcgttgaacatattcatttgaggatngaacacactntcattggcttcaggattngttgctgtctctgacttaattatntactttntttgttgaagtataattagtttaatttatcattgggtttctatattcatttggctaatgagtatgtctgagttaagatgatttgttattggattgacccctttttcttatntgagttccctcccactcctagtgtgtgaaatgttcaatgtctttctagccaaatttcaaacctcagtgtagtttgaaattgacatcaaacgtcttttttccttggctctntatttcangaactctagacataattgggtctgtatctgaactatattc

SEQ ID NO: 79193 - DNA, 245 bp, Glycine max
tatgcccacagatggagagatctcgcaagccaagttgtaccgcccatgatggagagggagatgaccacaattatggtagatacgttacccacgttctactatgaaaagctgatatgctacatgccaactaactttgcggatctcgtcttcgccggagaaaggattgaatccggactatgaaaaggcaagttcgaatatgctgccaatatggcccccaacaacaacagacgaccccatgtatgggg

SEQ ID NO: 79194 - DNA, 442 bp, Glycine max
  unsure (1)..(442): unsure at all n locations
cttagtggaatttttatgaacactatttacaagtgtagatangaattttntgtaccacaagtaaagtttccaacatttattttccacggatgattactacatagaaggaaccttactacggagtactgactatgacatctctcatggggccttcatcttatattaattcaactcattntcttagctgtcacttcataaggcatgacttaattgaagaggtagttcacccccttattaatgcaatgggaaaaaaacacaatacanaatgggaagggtgttacaaacagaaacttatacaagaagggtctntgatcagcagaagaagatngaaaacttcttaggcatattactaagtaccggcatggacattggagctgagttcctaagcaagaaagtacaccaacactctatagtctataccaccccatttagcatanaaatc

SEQ ID NO: 79195 - DNA, 264 bp, Glycine max
  unsure (1)..(264): unsure at all n locations
tcactacaaagaaaaaatgacctaagcctacggacgcctttttnctacagacattaattagtgtaggtaaatctcaaaaatacttctacctacaagtgactaatgtaggtaaaactcaaccatttgtaccaaccattanttggtgtaagtaaattcattaaaactgaaaaaagacttctacctacaattacattgtgtanggtaaaacttcaaanaattgtgcctatggttgattagtgtanggtaaactcanaaggatactac

SEQ ID NO: 79196 - DNA, 351 bp, Glycine max
  unsure (1)..(351): unsure at all n locations
cttttctctataccttgtactgttttttgtccacacaagatagatgctatntaattcagttaaaatctggcctatcgtctggggtggtatctaatntaatcgagttctatgttgagcaggctatacttcattnntgtgctctcgctgatgctacccacttgaagtccatctgtcaaacatattctgctgaaaactctgatggtgagtntccatgcttaactntcaaacccaactctacatttgagttcatagtcaattacttcttagcgttgaatatatattcatcatttcggtgtctacattatatgtcagttgacagtggattctcatatcaattctttcattattatg

SEQ ID NO: 79197 - DNA, 305 bp, Glycine max
  unsure (1)..(305): unsure at all n locations
tcactttgtcatgtaacctcttcacatattcagccttaacttttccatctttatgctntaagatataagtgctagacaatgaanaaaaaatcaagaggagtaaggggttgaatccatacacaatttcaaattgagagtgtcgagtagtgctataagcaaccctattataagcaaattctacatgagggaaacattctcccaaagacttatattctttttaataaattctctaaggagaaaagagagagttctattcactacctcagtttgtcccttagtttgggggatgacacgtagtggagaaa

SEQ ID NO: 79198 - DNA, 249 bp, Glycine max
  unsure (1)..(249): unsure at all n locations
ttgagataacttccttgagaagctagagcttagctacacacacccctctcataactaagctcacctgcttgagaagcttccttaagaagattcctaaagaagctagagcttagctacacatacctctctaatagctaagctcacctncttgagatgagaagctagaacttagctacacacccgctataatagctaagctcacccctatgacacagaacatgaanataccaaanaagtccttactacaaa

SEQ ID NO: 79199 - DNA, 301 bp, Glycine max
  unsure (1)..(301): unsure at all n locations
agaagctccatcatatgctatgagtgcaagaaaccaagacacttcaagtcataatgtccagatcttgataaatcagcttacaagataaggtacttcagaccanaggacaagaatgcactaatgagcacacgggaagaactagacaacatatcgtcaggtgaagaaatagaagaggaggaagaagccaacctttgtctaatgacaaacactacatcagaaggatccgattntgaatcagatgaagaagtaaatataganaccttgaactctntaatagcatatcatgacatctcttcactca

SEQ ID NO: 79200 - DNA, 359 bp, Glycine max
  unsure (1)..(359): unsure at all n locations
gcttcacgnaagttgaagatgggtcaatcttggtgcttcacgtggtgactccctgtgcgataccaacaaaaggcgaatcttttgtttgtgtgggtggaaaaaagtgatggtgaggtgggggaattggtattgggattggaattcttggtgaattcgtttangggttcgacgatgtcgttttgccanagcttcttgcggaggtggaaagggttgtggtgttcgaggttgagggtgtggagccggtggtgacgtgctggttgtttcatcgttgccattatagatggttctctgtgtgcttgctttgatggggccactcagacaacgagtacacgtggcgccacacgtcgcatgcccacatg

SEQ ID NO: 79201 - DNA, 518 bp, Glycine max
  unsure (1)..(518): unsure at all n locations
tcgattaccagagccatattttagaagatattctcaacagtcacatcttnnttattggttcttgaatggctatcanaggcctatatatatgtgacttgagacatgaatttgacaagagtttttcagaacaaaaaggtcttatcctcttaaaaagaagaatcgttntatcctcttacaaattccttggccaaaacactcgtgattcaataaggaattatttgagtgctcanattgttcaatctatctctntcaagagagatttcttcttctcttcttctttattctgaagagggattaagagaccgatggtctcttgttgtgaaagaattctaaacacacaggaaggattgtccttgtgtgtntagaacttgtaaaaggaatctacaagatattggaactctcaagcgggttggcttgggatnggacgtangcacaagggtgtggccgaaccanctataaatctgagttgactctctcttcccttaaatccttcatttattatggtntatattcatatt

SEQ ID NO: 79202 - DNA, 465 bp, Glycine max
  unsure (1)..(465): unsure at all n locations
agcttcaacattcacgtgtgagcgnntnggtgactatcttactcactcatacatccgagtaaaaatctattgtcgtttggattggctcaaagattcaacattcaatttcgagcgtctcgatatattacgggactcattcagacatccgagtaaaacgttattgtcgtttgaattagctcagagcttcaacattcaatttcgagcgtctcattatatcacgggactcaatcagacatccgagtaaaaggttattgtgcgttgaattggctcagagcttcaacattcaatttcgagcgtctcgatatatgacaggactcaatcagacatcgcggtaataagttattgtcgtttgaatttgctcagagcttcaacattcaatttcgagcgtctcgatatgtgacggggctcaatcaacatacgagtaaaagatatcgtcgttgaatggctacagcttcacattaattc

SEQ ID NO: 79203 - DNA, 344 bp, Glycine max
  unsure (1)..(344): unsure at all n locations
tgtggaagctctgagccatttcanacgaacataacctnttactcggatgtctgaatgagtcctgtcatatatcgagacgctcgannatgaatggtgaagctctgangagattcatacgacaaataacttttactcggatgtctgattgagtcctgtcatatatcgagacgctcganattgaatgtggaagctctgagccaattcanacgacaataactntntactcggatgtctgattgagtcctcgtatatatcgagacgcttcgaaatgaatgtngaagctctgagcacatcaaacgacaaaacttntttctcggatgtctgattgagactcgtcatatatc

SEQ ID NO: 79204 - DNA, 338 bp, Glycine max
  unsure (1)..(338): unsure at all n locations
aatagaacctttttttaagcgaagcgcccgactcgatcctatgttntactaaaagtgaaacaaaacccagtgcgaatcaagactccaacatttatcatgggtggaatgaatgaagaaatgcgtatggcacagatgcattttatgaatacgagagcccaggagattgtttccttcttagatacaacattcgggcagcatagcgcccgatgtatgcatttaagaaggcgacacggaccctccatcggttcgtgacaaagtgaggggattaagacgcaacctgtgcatgatgcagatgcgataaaaaggcacgacacggggatgcacatagtatgacaata

SEQ ID NO: 79205 - DNA, 485 bp, Glycine max
  unsure (1)..(485): unsure at all n locations
cttagaatgactctagagtagagtaaanaacactataataaaagactcaacaaacctctagctgtggcccttggttttntcacactaattttcaattgaaatttatgaactaagaattgtataaaataggaaccaattatataataaattntgagccaaaacaacaagcacacttccctttcacttttttttcctggatattgattttctgcgaaattggttgattnttagtattttttccttttatccaaatcacttggttattcttttataactcattttccagatgtgtagaanattcagtaaatatttcagctcacaattcgaagtaaccaattctcagtaatttttacaagtntgtatgtccaagctgccaccaccagcgaatttntttttggttttaagcatggatattgattccttggcttacttcaacttctatgtatgtgaactactangatgttacacagtctgagttatatcac

SEQ ID NO: 79206 - DNA, 296 bp, Glycine max
  unsure (1)..(296): unsure at all n locations
tgagatccaatctagattacattagataagataagatctatatgagatcagatctagataacataagataagataagatctagatgagatcnaatctagataacataagataagataaaatctagatgaaataatatctagatgagatcaaatctagataagataagatctagatgagatcaaatctaaatattatctagatgagataaaatttagataagataagatttggtagaataaaatagtatgctcccttcaagtccaagcccaattctggattcaagctcaatttcgga

SEQ ID NO: 79207 - DNA, 269 bp, Glycine max
  unsure (1)..(269): unsure at all n locations
gctcagcggatggactaaagcggtcttgttagcgnggtgacccttcgctcagctaatatgcacaactcatcctccttccagattcttcctcgcgctcagccgagaagtgttgcgctcagcggatggctcgctaagccagaagattggcttagcgagagggtgaaaatcagcacttcaaaactatcctaattaacttgaaattgagagaaaatgattattaaacacacaaaatggaagtactaagtatttattacctatctttaacaaaa

SEQ ID NO: 79208 - DNA, 440 bp, Glycine max
  unsure (1)..(440): unsure at all n locations
gtaagttaaaaactcttttcanagtanaaacatttgttctacctcanaacccctngaacatcttcacatagacttatttggtccctttaaaactatgagnttgggtggtaattactatggcttagttatagtagatgcttactcaaggttcacatggactntgtttttgaaaaccaaaaatgaagcttttgatgctnttcgcaaacttgccaagggtattcanaatgaaaaaagtctgaagattgttcacttataagtgatcatggagaagaatttcanaatgagtctttngaaaagttntgtgaagaanatggaattcaccattaattttctgcgccaagaactcttctaaatgaaacananatacctaagtacctttgggcttgatgtgacatactanttgctacactttgaacaaagtacttatttagacctatcta

SEQ ID NO: 79209 - DNA, 486 bp, Glycine max
  unsure (1)..(486): unsure at all n locations
gcttccatagaccatctganatggtgatagtccaatgggagtcttgatagcagtcttgtaagcccataaggcgtaatctagcttcacagtccaatctttccttgaggatgcaacaatcttctctagaattctctttagctctctattagacacctttgcctggccatttgtctggggatgatacggtgaagccaccttatgtttgacattataatgccccaatacctaatgtagaaatgtgaagccccatcactaattagcactctgggaacctaaagcgagagaaaatgttnttcttcaggaacttgatgacaatcttggcatcattctttggtgcagccacaacttcttacccattggacacataatcaacagctaccaagatgtactcatttccataaaaggatgggtaagggcccacaaaatcaataccccaacagtcaaatacttccattttcaatatgttctacaatggcatttcatttc

SEQ ID NO: 79210 - DNA, 370 bp, Glycine max
  unsure (1)..(370): unsure at all n locations
aagcttctatggaggctagatctntgagcttcaatgaggtccttcaatggtgattntcagccatgtagttgcaatgaaagataaaggagaagacgtttgaggaggcgccatccactagagaataagcaatggaaagagaagcttcaccacctagagagtgccttggataagaagcttagagaggaagtttcaatggagaaagagaatgagagagagaggcacagagggacgtggaaatcgaaggacgatagggaaggaacgtgaactttaaagtgtgtctcacaagtttctcattcatcanagttgtgacaagtgttacacatgtnntatattatagcctaggtcactagcaaatggaaagcttcattga

SEQ ID NO: 79211 - DNA, 413 bp, Glycine max
  unsure (1)..(413): unsure at all n locations
aactttggtgtggcaaagctggtcaaggaaaaatggagtggtgaattgtatgctatcaagttcattgagagaggcttcaaggttccattttcaaactccatgtatcttttctgttgtcataccttagtcttgtacatatgtactttggattggcctttgttaatggggttctatagggccttgcagattgatgaacacgtgcaaagagagattataaatcataggtccttgaagcatcccaatatcattagatntaaagaggtaaggaattggagacatttttggnttcaatgagtatagtctcaaagtgtaattatttgccttctcggaagaaaatcattcccttcctttagctacttcttaccaactttgtgaaaatatatatgcatccagcgacatatacacctaaactc

SEQ ID NO: 79212 - DNA, 342 bp, Glycine max
  unsure (1)..(342): unsure at all n locations
acatgaaaccaggactgaatatctctggtagtggaaaatttcttattaatttaatgattaattaataatccgtgttaatacttatgcatatgaatngcattttacagttgagtggtggaaatngtatggagcanaaacaccacacttgccaaccattgccattaaagttctaagtttgacttgtagctcatcgggatgtgagtatagttggagtacctttgagcatgtaagtaactaacattcatgttttttaaattatgaaactttagaagctgaaattgaaactaagtaactgaaattcatgtttttaaattattatagattcactcaaagaagagaagt

SEQ ID NO: 79213 - DNA, 203 bp, Glycine max
  unsure (1)..(203): unsure at all n locations
gacatctgtcgtgaagtagccaccgatatttttcagcccacattgcaccattctttttagaataactcgctggtccgatatgggtctttttaccggcagagtaaagttttctttgtttggtgttgcataaaaaagttacaatgtacttcngctagggttttcgtgcgagttcaaccgacantttgtttcggccaggaaaacat

SEQ ID NO: 79214 - DNA, 382 bp, Glycine max
  unsure (1)..(382): unsure at all n locations
catgtttcgcatgaatcccacaagatgctcacacaccacccaattggaccgatccatccgaattggccttcacccaattattctcatgcaatcctaatctcttagacactcccaccttcatcaatagtggaaccaaattgcgaagaacttacaacaccaacaacccacctcatagcctcctcaaccacacttgcaacatcaaattgcaccatcttaaacacaacaccattgaactccatatataggtaagcataacttggaataaattacaccaagaaatattgtcttgcacccatctgtatccatagtattagcttcaatcactactataaaataggcttttaacatcgactattaanggactttaacatctggtatgaac

SEQ ID NO: 79215 - DNA, 423 bp, Glycine max
  unsure (1)..(423): unsure at all n locations
gtggtatgtaatcaagctctagatccgatgaggtggcgaatcacatanaagaattaatgaatnttgtgaaaaatatgggattcgtcgccctctaatggttcctagatctccataacaaaatggggtagcggagagaaaaaataaaactattcttaatatgactagatgtatgttgaaggctaanaatatgccaaaggagatttgggccgaagctgttgcatgtgccatntatntgtccaatcgctccccaacaaagaatgtcaaagatcaaacaccacaagaagcatggagtggagtgaagccaagagttgatcacttgagagtatntgggagcattacatatgctcatgtacccgaccaaggatgattcaagcttgatgatcggagtgagaaacatgtgttcattggctatgatgcaagctc

SEQ ID NO: 79216 - DNA, 428 bp, Glycine max
  unsure (1)..(428): unsure at all n locations
atgttgatggatgatcatgtttaaggaaggattgattaaatattgatcacattcaattcatatatttgttngtgatatgattcatacaaaagtttgtttgtaactgtttttagaagtacattttgttttgaaaccaattcacccccatcttggtttatagagctccatcatcttttttcaaataattgttttgttttgttgcgtcaatatggtgatgtttgttctctcaactctcttttgttgagtatttgtctctatgtgtacttagaactagttagaatgtcaatacattntattgagtttgatggttcgtgtctagaattactagttgaatntagagggggaatggagaaagatagaataaaatggtttagagagaattgagaataagaatgctttcttagtggaaactatttccttaacttata

SEQ ID NO: 79217 - DNA, 414 bp, Glycine max
  unsure (1)..(414): unsure at all n locations
atcatggtatggtattgtaagtgacatccttgaccagagtgggtttgattgggatgacacntagcacatgatcatagttgagaatgannatgctgggantgaatagtgcaccataagtattctttaatatatggctatttgtaattcaaagtagaatggatttgactttttcttttttccagtcgcataaatcggctaaaccatttcgattcaggtgctncanaactgggatgatatnagtggattgtatgctaaagatagagccattggtcatgaagctgagactgctatagatgtaattcatgaagattntgatgatgtcaagaagaattaagaattgcttgagaaagggagagaatgtaaatcatgcaagctttgatggtgttgagaagaaatcacatgtntgtcatcatc

SEQ ID NO: 79218 - DNA, 402 bp, Glycine max
  unsure (1)..(402): unsure at all n locations
acaagaaccaagatttactctttctagtttttctgtatttgataagtctaagatctcaaattaagtcttggaagcaataaagatcaattgccattcaacatggaaggttttgtaacagaaaaaatacatcagaatactaaaaaatcattaaattcttactcgttacttttcttgaaaagagaaacctaagcatacaaaaagcacatcatcctatccactatgtgtggattttgtgaatgagctaccagctaccacatagaactctntgtcgtactttagacaccaaaataaaaatgtattatgtatagcccctttatattaaacaaaaataccgcaccacanataaggttagtgtctgatcttagttgaaaattgaaaagaaacacactattaaattgtcaa

SEQ ID NO: 79219 - DNA, 322 bp, Glycine max
  unsure (1)..(322): unsure at all n locations
cgccctaacctgtggaatgagctatatanatagccaagacaactacctctagttcagttgtaaagaaagaaagatacccacatataacacatatcctcctaagagagcagcagagtaataatgaaataacctaccatagcgaaaggaaccatgaaatgatcttaccagccttgggtgcatgaatattgatgttaaaagctttgatgacctgaaactcactcacagaggatctcatacagctcgaagtaagataaccggcccacaagataaatatgagcaaacataaggatcattgcttgctgctatgagacatatagattat

SEQ ID NO: 79220 - DNA, 464 bp, Glycine max
  unsure (1)..(464): unsure at all n locations
tactcaagctagacagaaccatcaaaataagttgaatccaatcaaaggaagggactcacccattgatccccgttggacagaaccaacaganttgtagcaaccaaagcttctcaactgacaaggcatcacattaacagcaactaaacaaatatcgaattcagctttttcttatcaatacaactgaaaaggagaatntagtatctaaatcaacttagtgcgattcanattatntagaattgcagtcccataggttcagagttgataaaattaattntataccaataaaggaagttaaaatacatatctaaattaaatctcaagcatgcactntnntattgattntattagaaattacaattattaaattcctaactntagccgataagagaaaaccaatgtttcattcgtggactgattctacaacacacccgcatntagcttggagcatggatgcaccanactat

SEQ ID NO: 79221 - DNA, 439 bp, Glycine max
  unsure (1)..(439): unsure at all n locations
ctcagcttctagcggttcttatatatgggccataaatctatcatatgctgacaatagccgagaagtccgtggatctcctcngnggcggagtangtgtccgccatcgctttggccttggctagcaatcanggaagttctttgactccgttcaaggtaagagcaaatcggtccatccacatntgtgcctcttgatgtaacgagtcgatcacccttcctctagccttcttttccgcgtacactcgggcatactcgtctgccactttatgctcgtgggccgtggctagaattagctcttcttggtatttgttgacgatagctaacatgntggtctctgtctcgcataaccgctgagacaggtttcttttggaccttgagcaaaccttcaactcatctttcaagatcaaactgtgtactcgtgaaatgtggtccctttctctct

SEQ ID NO: 79222 - DNA, 326 bp, Glycine max
  unsure (1)..(326): unsure at all n locations
ttaatctcggttcatttacctattatacccccttctgacgtgcctaagccattntatttaagtcatttctcgcttaacctagaaataaaataaatttccaccgatcgtgtgaatagtattatccgtaacttcggtaaaatgattccgaccgtcgatcggccgaaccaccttgaaatcaaaaagaggtcaataatattaataatanaaaaacgtttttataaataagcggatatcgtcggcgtttctcttggattctattttaatgaatgactaaaactaagtgaactaagtaaatcacttgctagcagctcgtcataaaatagttt

SEQ ID NO: 79223 - DNA, 416 bp, Glycine max
  unsure (1)..(416): unsure at all n locations
cctcatcgtccctcacagtctntagaattgggagccaatccaatccttgtgttcggactctcagccacttatgatagccgccgatgatcccattactgcttccnctaagctctctgtcctttcttcacgccgcatcccatgccttgcgaactccttggagtaccctcgcgttgtggtcactaaaaccccgtgcgatgaaaggcgtgatgctttcgtctaatggcgctcctctcatggggtagccaagctgtcttatggcgagaacgggattataattaatacaaccccttgttcccatcaagggaacatttggacatccttcgcatgaaaatagaatcttgattcttccttccttctagcgagggaaccaattaacagacgcccncccatgctagccaagagntggtcccaattcg

SEQ ID NO: 79224 - DNA, 269 bp, Glycine max
  unsure (1)..(269): unsure at all n locations
cacacccgaacccatttncttgacctgatccagcgttttctccacctataaataagattagaaatttttttctaaaataaataaataaatgaaattatattccttctggctaatgggtatgcgtggaatntgttagaattacttgggtgagagaagagacaatctggtccttggcgatgctgacagcggctttggcttcgtttggaggggcgaagagagcgagcaatgaaatggtggttgaagttggtagtgctatgtgagagcgtctg

SEQ ID NO: 79225 - DNA, 405 bp, Glycine max
  unsure (1)..(405): unsure at all n locations
tatgtcctgaggggaaaaagggagagataatgaacatctatcgatataagtacattcatcacatgcatttagccatttagcgaagaanaaaaattgacgataaaccgttatttgtgctgaaaagtgaagaacaaatatttggagaagacacatacaaacatcagccaagtnttcaccttaatcatgggtatcanactcatgaattgactnttaagaagtgaacaatgtgttaactcgcacacaatcanttttatttagacttgatgagattgagcanactcagtcagacttggtcaaaattgtgaatatgagcacaactgcacacanagccaaaatgacagcactccatctccatntgttcattcttctgcaactaagccttcacaaaagacccagacctatgac

SEQ ID NO: 79226 - DNA, 351 bp, Glycine max
  unsure (1)..(351): unsure at all n locations
ctcagcttctggatcaagtacgagcgtctcgatatactacgggacataatctgacatccgagtaaaaaggtatttatcgttgattaggctaagagctcgtgttttgaatntcgagcgtcttgatatattacaggactcaatcaganatccgatttaaatggtattcattcggacatccgagtaaaaagttattgtccttggaatatgctacgagcttacggtttcaattacctgcatcttgatatactatgagacacaatcggacatccgagtaacaagatatcatcgtttgaatctgctcagagccttcgctgtcaatttacagcgtctcgatatattacgggattcatt

SEQ ID NO: 79227 - DNA, 431 bp, Glycine max
  unsure (1)..(431): unsure at all n locations
cttctcttattatntaagatacttttctcaccacaccattntatcagcaatcttaagaatttaaaaatatttcatttcacaagtgattggtggaactgagggaaacaaaggatagattgtaagcatttcagaacatatagtgcaatgttaagggagaaggacaagatcttgggttcaactagacaaagaataaaatagaaaaatcttgaccaagtttaaataactttagcagtcaatagatcctagaatagcatttaaaatagatgtgataaggatgccttacataattgacagttaaacaattgaatntatgatgtagcaagcatgttcaaaagaatctgagtgaaacatacaatgagctacatgcattntgagtntgtgactaacactaanaccttcaccaactgtgacctaanatattcaaactagtc

SEQ ID NO: 79228 - DNA, 300 bp, Glycine max
ggacttaagcacgcgctgcgctgcccatgatagagtacaacttatatgaatcccacttagggaatctggatggctacaccatttcccttatggcggccatccattgcgctcagtctatacagcgacctattgattaattattttataacagagtgaattataaaaaagatgaaccctggatttatcatgaaaaaggcaaagatagacttgaagtctgatcacatgtcctttaaaccattaatcagaaaaactataaggcggctaagcaaaacctcaattgctacaaagattatcacacat

SEQ ID NO: 79229 - DNA, 365 bp, Glycine max
  unsure (1)..(365): unsure at all n locations
gatgttcattctccttggagactccataattatgttaatatctcacctatccttgngagataataatagcctttcctaagattaaacctttacagaattcttgccaataaaagggaaatctcctagcttctccatcacatttatagaaaagacttgtgcagtcgggaataattgngttcaatataatcttatgataacgagtcttgaatttcttcttataggagttgaacaaggtgaacaaagacccatgtgcacctgtcatggaaacccacccaaccttccctgacttgcctaaacccaataaaagtacaaaaatttgttgacaatggaagtgatattaaaataatagcacagagtttaaaatg

SEQ ID NO: 79230 - DNA, 443 bp, Glycine max
  unsure (1)..(443): unsure at all n locations
tgctgagagagtcttcgatgtgtttgcgagatcatatgtttttttggagatctatggaaagacatctcttgagctcttttagaaggtgtatacaatactcctcaaaatagtcagaagtttgattatctttcagantctgattaatttaaaacacatttaattatgtttcttcaaatgagagtagatctcatgatgaataaaaccatacatattctaaataaccattaggtcaaacgaattaaattcaaacattactaaattatatcagataacatgacgttgtctccaatgtgaataagcaaaacccataaacctaagacaatatgtaactcaggtaacaaaaccttgtgattgggctaaaatactaaatagaactgcaaatgtaagacaaatacacttcagaccttttagtcgaacaaactgaaacccatatcctgcagaac

SEQ ID NO: 79231 - DNA, 442 bp, Glycine max
  unsure (1)..(442): unsure at all n locations
agcttcaacatcagaccacttccgggtgctggaactacttcacatggacttgatggggcctatgcaagttgaaagccttggaggaaagaggtatgcctatgttgttgtggatgatttctccagatttacctgngtcaactttatcagagaaaaatcagacacctttgaagtattcaaggagttgagtctacgacttcaaagagaaaaagactgtgtcatcaagagaatcaggagtgaccatggcagagagtttgaaaacagcaagtttactgaattctgcacatctgaaggcatcactcatgagttctctgcagccattacaccacaacagaatggcatagttgaaagaaaaaacaggactttgcaagaggctgctagggtcatgcttcatgccaaagaacttccctataatctctgggctgaagccatgaacacagcatgc

SEQ ID NO: 79232 - DNA, 466 bp, Glycine max
  unsure (1)..(466): unsure at all n locations
ntgacaacgatttctatacaaaagttagtcatatgaagcgactaacactttgcaaagatttaatagataaaatgcatgaagttctaattctagatgcttgctttgatgcatgggcataatgctatcattctatgtctagcaatgattttattaagatacccttcctttttgttctactagaaactaccctctgtcaagcgactaattcctaaaaatgatgcatgcaaaactntccttgtattcttattaaggattaccatttgtcgagcacttgacccctaaaataatgcacggatgaatgatgcatgaaattaanagtaagaaaggataatatgaaagaaaacacttgttgcattgataaatacaaggtgtacaatacatcttttggctttttaggcatgtcaggccctacctctcattgccataaggggccttacacttgaaaaggggtttagaaactaatgga

SEQ ID NO: 79233 - DNA, 427 bp, Glycine max
agcttgaaggtaaactagatgccttggttaacctggtaacctaactgactatgaatcaaaaatctgcacctgttgttagactctgtggtttatgctcctttgctgaccactacacagacctttgcccttctgtgcagcaatctgaagcaattgaacaacctgaagcttatgctgcaaacatctataatagacctcctcaacctcagcagcaaaatcagccacaacaaaacaattatgacctctccagcaacaagtacaagcccaggtggaggaatcatcccaaccttaatggtcgaattcttcacaacagcagcaacaacaacaacaaccttattttcaaaatgctgctggcccaagcagaccttacgttccttcactcatccagcaacaacaacaacaacaacaacaaccctagaaacaacaaaca

SEQ ID NO: 79234 - DNA, 443 bp, Glycine max
  unsure (1)..(443): unsure at all n locations
gtttgatgatgacaaatgtgatgacaaaaagctcaaagatcaagaacaattcatgataacaaagatgatgatctcaagaatcaaagaatgagttctagattgaatcaagaacacttcaaggttcaagaggaaatttgatttctagaatcaagaatcaagtttcaagattcaagcttccaagaattaagatcaagattctttcaagaatctagagaagacttaatcaagataagtattaaaaagttttttcanaaactgagtagcacatgaatttttctcanaaccttttaccaaagagtttttactctctgataatcgattaccagattattgcaatcgattaccagtagcacaatggttttcaaaaagctttcaactgaatttacaacattccaattgatttcaaaatgctgtaatcgattacaatgttntcgtaatcgatt

SEQ ID NO: 79235 - DNA, 438 bp, Glycine max
  unsure (1)..(438): unsure at all n locations
ctgcaagctagtatcacacgctattatgatcgagagtgataatttcttcattctatgtgaggatgtagtttgtgttcttcgctgcagaccatgagataaactgattatatatcgttccttagacctttacagttcaaaaatatctgactatgaataataactgccttgtgattaactgagtatggagccacatctaagagttgactntgttaatcagatagctctttctattcaagatgggtcaatatatctcctgatctcattatatttggcacaagttacacaacttcatttttgcatatattaatgttgcatgatgtcattccgatacatcagaattctggtattatttctcgacttctctcttataagtcgaaaagcaataaccctttattctgctggtctgtgcggagatgcacagagcacaatgagctgatt

SEQ ID NO: 79236 - DNA, 422 bp, Glycine max
  unsure (1)..(422): unsure at all n locations
tcatgacagacttatatggcatgactntaggttgaaataatatattttcattttattctattattatcccacctgcatctttgtttttttctctctgttacgcttctcatccaaacaaataacaattacatattaaaatgtttagcaagaaagacattctataatatatcaatcaagtaatatatatatatatatatatatatatatatatatatatatatatatatatatataaaccataatctacagacattagatagagcctttcttgtgatatcccaattataatttatctatgagaatcatttgtttactttatggtgtgcctgtgtcatactcacacgacttgtttctgcctcggtttccttcctctcaaaatgcgttttcttttgaaagtgaagtctggaagagagagagtatag

SEQ ID NO: 79237 - DNA, 235 bp, Glycine max
  unsure (1)..(235): unsure at all n locations
gctntgtcacctctttcagaacacctagagatcattaatggtccaatgccttaatgttttctctcctttcaaaagaatcgaaagatcgtttaatggtccaacgccttaaatgacctttcattcaatcaaaatatatcttgcaaaaaaggataaaaacaatgtaaccaacgtttagttctcaaagaactacgtattttntactcgggtatagggcccttttgtatttttttatctt

SEQ ID NO: 79238 - DNA, 461 bp, Glycine max
  unsure (1)..(461): unsure at all n locations
tgagagagtccttctgattgtgattatatatttctgacttcatgacatgagatgaaatgcaaagattggacctcctgttagttgttatcaataagttgcttaaacacttgtgcttaagtgagacagtagccatgagactgtggtttgagctactttccttgaatttgtcttatgattaacctcatctaattgtattgttcacattntggtctcctctttgtctagctgcatattctgtganaacaagggataggtacacattgcttcatctttctcatcatgcaatcaatgaattttgatgcatacacccctgtcgcaacctacccttcggcgggagggcgacgcgagactcgcgggatgcgggttccacgaaaggaatacgcgcggagtcgccaccaacgtttatttgaggaaaacgtcgganaaaccgganaagacgcgatctacaaacttttaagtga

SEQ ID NO: 79239 - DNA, 462 bp, Glycine max
  unsure (1)..(462): unsure at all n locations
cttcacctttggtcctcctcatagttggtgcatgagaaaacatgctctantttcatctcccactccaagtaggcctccggatcattctttcccttaaagggaggaatgttgggccattatttagacaaactaaacactctaaaattgagacaaagtggaagtcctcctccatttgggacatgatacaactcacaaccttgaacttttctccttgaaacttgggcttgtattcaaatagtatggacaacatttgttgaagagcttgcttggctttccttgctctagcccttgtcatatgtcctccaagtccttcaagtggatccttgcccttgctcttggtcatgtcctcatcaccatgacttcgaagttcgacgagcttctccatcgtatgaatcaattggagacctcacataccaatcctcacgttccatcagcatttgttggcccttccttccgcgcact

SEQ ID NO: 79240 - DNA, 390 bp, Glycine max
agcttgtccagaagctccctttcatagtaagagggaatgcgcctcttccttagggcattcttaagatcattccaatactctactagaggattgttagtcggtgaaaacgactaactcttgtgtataaaacttgtataaattgtatcaaactcttccaatttatggttattttgtagtgttataagtattttctgttaagtataggtaataaatatttagtacttccattctgtgtgtttaataatcattttctctcaatttcaggttaattaagcaagccttgaaaagtgttgtttttcaccttctcgctaagccaatttgttggcttagcgagcgtccgctaagcacaacactcatgggctaagcgcgaggaagactctggaagaatat

SEQ ID NO: 79241 - DNA, 458 bp, Glycine max
  unsure (1)..(458): unsure at all n locations
tcttgtatntgtttacatctaatcaaaataattaagggtcttganttgtcttaagacataaatatcttttgacttaacattttgaatgacttttgcaagtttcttgaaagctttaaaagcattattctctatagcaagaaaaatagtccatgttaaatcttgagagtaatcatcaagaatgacaagaccataatagtcacctcccaaactcatagttctaaaagggctaaacaagtcctagtgtagaagttccaatggtttagatgtagaaactacaccttttggtttaaaagagactatgacttgtttgccttttaacaagcatcacaaagcttatccttttgaaatttcagttttggaagtctttttacaaggtttttggcaatgattntatttaaataattcatatgaacatgtgcaaatatcctatgccaaagccatccatcaccattcttact

SEQ ID NO: 79242 - DNA, 422 bp, Glycine max
  unsure (1)..(422): unsure at all n locations
agctngcctgtccgatgcagtagtaatgatggcccgagttatgttggggaacggttacgaacccggaatgggtttagggaaagacaacggcggcatgactaacctgataaatgccaaaggaaatcgtgggaagtatggtttaggctataaacccactcaggcggatataaagagaagcatcgtgggaagaaagagcggtggtcaaagctcgcggttgaagcaagatagtgaaggaagcccgccctgccacataagtagaagctntataagcgcgggtctgggagacgaaagtcaagtggtcgcgatatacgaagatgatgttccgagtacattggatttggtacgaccatgccctcctgatttccagctgggaaattggcgagtggaggaacgccccggcatttacgcaacgagcataatgt

SEQ ID NO: 79243 - DNA, 467 bp, Glycine max
tgttaaagaaacttcgaaaaatcaagaacaagcttgttcgcacatcgttcgcgtgtatgacatccactccacaaggtttgaagttgaggagaccttcaatcctattacacaacgtggccgacaaaagtgggcagttaacttgaatggtcattattgtcaatgcagaaggtattctgcgcttcactatccatgttcacatattattgcagcttgtggttacgtgagcctgaactactaccaatatatagatgttgtttatacaaatgagcacatcgtaaaagcttactccgcacaatggtggcctcttgggaatgaagcgactattcctccttctaatgacgcatggacacttatccctgacccaacagcaattcgtgcgaaaggtcggcctatatcaacaaggataaggaatgagatggattgtgtcgaaccctctgagcaccgacaaaaatgcagtagatgtggag

SEQ ID NO: 79244 - DNA, 388 bp, Glycine max
  unsure (1)..(388): unsure at all n locations
acctgcggcatgcaagctntgagccaaaatcctgactcaccatataccttgacccagggtgagaatgtcaatccttaccctcggaagcaaaaaagaatagaggggaaatttccaatcaaagaaaaagagaaggaaaatttccaatgaaagcaaaaaaagaaaagaaggaaaattccccaatcaaagagtgggagaaagcaaaaaaagaaaagaaaggaaattcccaatcaaagaatgggagaaagcaaaaagaaaagaaagaaaattcccaatcaaagaatgggagaaagaaaaaaagagaaaagaaggaaagaaagctcctgatcaaggatcgaaagaaaacagaagaaatgtgcagagaggtctttggaccggacgatatctgaac

SEQ ID NO: 79245 - DNA, 466 bp, Glycine max
  unsure (1)..(466): unsure at all n locations
tatgcgcctatntccttacaaacgttctcttgcacaagacattcaaccgaaaaaaatgcacccatatacaatcaaggcagcttcgttacctagattatttacacgtacctccaaggtgtatttgttacttacatcacacacatctccttggctaaattcacatacatgcatactcaaagcattttggggcaccaaaaattgcacatgcgcacatcttggtgtttctaatacctatacatacgcaaacttcatgatgaatcttgactatccacacaataaggtgctacatttcatgctctttttttttcaagtttttgctacctaaagtcgcatgcaaattcaagcatattttcctttgctgactaaaattgtattcaaattaaaaggtatattttttgtaatatgttttcttcacataacatgcaacgtatntatatatattttttgtgagacantttgactacca

SEQ ID NO: 79246 - DNA, 353 bp, Glycine max
agcttcatgagagagtcattgatctaattgagaggaaaaataaaagttatgctaaacaagccaacaaagggagaaagaaggttgtcttctaacccggagattgggtttgggtgcacatgagaaaagaaaggtttccggaacaaaggaaatcaaagcttcaaccaaggggagatggaccatttcaagtgcttgaaagaatcaatgacaatgcttacaaagttgagctgcccggtgagtataatgttagttccaccttcaatgtctctgatttatctctttttgatgcagatggagaatccgatttgaggacaaatccttctcaagagggagagaatgatgaggacatgttcaag

SEQ ID NO: 79247 - DNA, 367 bp, Glycine max
  unsure (1)..(367): unsure at all n locations
ctctgcaaggaagctcagtgtgaagtatgcagtcctgcttatgattggcactgccaactgggtacccaccaatcatacttncactgttgccacaggtttgggtgaatttctgtatgctgttggaaccaagtccaaatttaattttggaaactatatttttgatcaaactattaagcattcagaatcttttgctgtcaaattacccattgccttcccaactgtattgtgtagcattatgttgagtcaacatcccaatatcttaaacaacattgactctgtgaagaagagagaatctcctctatccctgcattacaaactggttgaggggacacatgtcccagacattgtctcgacatcanggaaagct

SEQ ID NO: 79248 - DNA, 432 bp, Glycine max
  unsure (1)..(432): unsure at all n locations
agcttctcacacanatctgtgaagtggaacaattgatattactattgtacaaggtatgctctaattgttttcatgatatgataatggaaatttgcagagagatgagtggaaatgtggaatggttattttcctgttgttgcctaacatgtcttatgatgagattgcaatacgtgttaatttagtataaaataacgataattttaaaggagagttcctcaaatgtaaggaaggtcgtggctgcggcaaaatcaatactgccacgtttgactcctgtgcaagtttgtaaatttttttatacagtacactcttaaaaggttattnttaatttagattattcaatgatatattttcttatattatttatggttaattaagattataccaattacatataagttttttgctttgtgaaaaatgtgttgacataatatc

SEQ ID NO: 79249 - DNA, 322 bp, Glycine max
atgaagaatgagaggcactcggataggatgggtctggaccacttgtatggctttattagaccatgaacatctcctctaatgatttacaagctgatgcagattatcatttcgtgacgtttttctgtccgacggacggactctagcctggatactctggcgaactccacgtaccatagtcctcatgagctgcgatcatggtacaatactcgagacagaaagacacttcaccgagtgacgccctctctaacgcattgtgcaagctcacacatagtggcgtcgaggtccatatctgtcttatagagagacagaggagagacgacac

SEQ ID NO: 79250 - DNA, 346 bp, Glycine max
  unsure (1)..(346): unsure at all n locations
aatggtatatatctatgttctgctattttttaggatttgatcgangttctcttccaaataattttgaaatttaattcatgactttgaaacataggttgtctacatcaaaaaatctacttgcttcaattcaagagaaaataaaatgggctgatgctatgagtgaaattgagaagaagcgcangaaggatgtggaagagaaggtacaagaactaaagtctgttatcaaggtcggntgaatatattttcttcctttctcttaacagcatccttcccccctccccattacaaatgagaaaatgtccaataaaaaattgcttgtgtgcatataattctgatcttgtatata

SEQ ID NO: 79251 - DNA, 471 bp, Glycine max
  unsure (1)..(471): unsure at all n locations
actcatcttaagagatcagtggaaagtggtcattagaataaatgttagattcattgagagaaatggtttttgttttctttcaaatatattaatttagaatcaagatattctcatgttagcaaaagatatgataatatatgatgagaaaaaaaatgccaaaataaaattactgggtcttacattattattattattgtgaagaaatataattttgtattttcatgtctcctttttttagggaaaatatcataatangtttttntaaaaaaaaaactttgatgaacttaagggtgcatttcggggtaaaagcaatgtaattaaatacttgtttaataaggtcttattaaataaaagtttcattataagttttaatggatggggtaacctgcctcaccaaagatcagttaaaacctacgaggaaaaatagtaacatgtacatcggaaataacatacacatcaattaaaaggaaa

SEQ ID NO: 79252 - DNA, 403 bp, Glycine max
  unsure (1)..(403): unsure at all n locations
tagagatgcctctgtcgcaacgtgcccttttgcgggcgagcgaggcgaggctcacgggtgcgctttccaaaggaggaaagatgcgcggagtcgccaccaacgtttatttgtggaaaacgtcgaanaaaccgaaggaaaccggtcgaaataaaaattctaagttcgggagttgtatttacatttgaggaaggtattagcacctcttacgtttgtctcaaaggacaacagcctattttttagaattgtgaaattgtgttatcttaacttttatttctttntattttttgaggtcgacaaaagcggggctcttgctcctacgtaccctccatcanagaggaaatcagacctacatagttcttctttaaggtgaatcaagcgattcttttacttgaaggtgatcact

SEQ ID NO: 79253 - DNA, 472 bp, Glycine max
  unsure (1)..(472): unsure at all n locations
aagcttctccgctcatactgggaacgcctctagttcaacacccgtgcagcctatggcacccacccagagggaagctccccaagtcccaactccgaacacgactcgaccggctggtaattccaacacgacaaggaacttccctccgaggccatttncggaattcaccccactcccaatgacgtacgaagatctnttgccatccctcatcgccaatcatttggccgtggtaactcccggaagggttctcgaaccccctttcccgaagtggtatgaccctaacgcgacctgcaagtaccatgggggtgtcccagggcattccgttgaaaaatgcttggcccttaaatacaaggtccaacatttaatggatgctggatggctgactntccaagaggatcggcccaatgtgagaaccaacccgctcgccaatcatggagggggagcggntaatgcagttgagtccgataggccgcac

SEQ ID NO: 79254 - DNA, 395 bp, Glycine max
  unsure (1)..(395): unsure at all n locations
agcttaaggatggaacacttacttgttggtgatgaataatagcgcaaaacggaatcaaagaatgcgaaaagtagagaccctaggggtgcaaactcgtaaattccgtggctatggcttttgaaaggggggaaaagaagtttttgaatgcaaaaacgtcccccctttcgtcacttttattatttggtgcaggggttgctcgcccaggcgagctcagcttgcccaggtgagctaacctgcacttttttttttttgagaggaacattaactatgtcccctccttccttatgggttagncgtttgcctaacttgaacttacttaagttagaattaggcattgatcacttatttttaaaacaaacaattagtaaaagaaaactgcaaatacaaaggatacg

SEQ ID NO: 79255 - DNA, 467 bp, Glycine max
  unsure (1)..(467): unsure at all n locations
tcacaccacagcaacacanaatctaggtgtccaaaacccctcaattcaatggcttttctaggctnganaggtggaatttagaatgaggtaaatntggagcaaactctcacctcacacaagtctataacatcaatctaaacttgctcaaactggatttacacctaaatttccaccgaatcaaaatttgactcctcaacacccaattttgccctagaaatggctcttggttcactctggtcatttgtttttctctctagctcagcctaacctttctcacatgtcctaaatgacatttcaagctattattaactcactttaacctccatttaccacagaattcagacttagccttccaactctcaaagtctcactctgtttccactcataacatcacattctcactgtctaaccttgggttagttctaccctttgtctctaacagatttccatcagcaatttcagcatat

SEQ ID NO: 79256 - DNA, 430 bp, Glycine max
  unsure (1)..(430): unsure at all n locations
agctngaaatgaggaagtgtggaagggtgagacttcctactntttattcgttgaccatagagtggtacctagagatatgtcgcaggggtcaagagaccttggggacatcaagtggggtgctattgcccagaaccaagcttgacgaatcccgacccaacccgggcatagtcagtgagtgagaacctgtgatgtgcctaaacaggcgagctcctggcagtcaacagataataggaacaaagaccacatagcaaggaggcttgtgtggtggctggccagctgtgaacattgagtgttatatgggatatggcctctggtaatcgattaccaagggtgggtaatcgattacaaggcttanaagtgaagacatgaagctaagatggcctcttgtnattgataaccaagggtgtaatcgattaccaggcttaaaaat

SEQ ID NO: 79257 - DNA, 443 bp, Glycine max
agctatctaagctaagtctagtccaacaagagggatctgaggatgaagcttactttaaattattctaaacctaggagggctgtctaaattaagcctactccaataagaaggatatgatgacaaagcttggatcgatttactctaactacggatcgatgtttaataatttaagctatagcatataacacaaaagcacaattgattagagaaacatctttatatacatcagctggtctgttataaagacccaacatctttacctattgttgtcaatcgtacttactagcattcctactgattttagcctagacttagtttaattctattctaaatcatcaactatcaatgtttctttcgacaatgccttatttctgaatttaaccctatctaagactagtgtcctgagttcgatactcggattcatccgttgtaagtttaaatac

SEQ ID NO: 79258 - DNA, 399 bp, Glycine max
  unsure (1)..(399): unsure at all n locations
tcaatatcctgatgagggtgttccatatgttctcaagatcggactaatacatttgctgcccaagtttcatggtcttacaggtgaagatccttataagcatcttaaggagttccatattgtttgttccaccatgaagccccctgatgtccaagaagatcatatctttctaaaggtttttcctcattctctagagggagtggcaaaagattggctatactaccttgctcccaggtctattttcagctgggatgaccttaagagggtgttcttggagaaattcttccctgcatctatgaccactgccatcaganaagacatttcatgcattangcaacttagtggagaaaacttgtatgagtactangagagattcaagatattgtgtgcaagctaccctca

SEQ ID NO: 79259 - DNA, 466 bp, Glycine max
  unsure (1)..(466): unsure at all n locations
ggtntctctcgggctcttgcacaccactcccaaagtcctccttaagcttctgatctttctctggaggtgctcttccaattgaagccattgaattacaaatgcttcagttgttggagatggcagaatctgaatatttacaaacacaaacccattaattcaataacaacaaaaagcaagttggtgagacaagaaacacaaacctatatacaagacaaaacaaagtaccaaaaaaaatctcaagcaaagcatgttcaaactccaaaagtaagtaattcccttatttcaacattcaaaccattgaacaaatctcttgcatgatgaaactatcaagtcaactcaagtcatagtcagttatctaatttgaaaaaggtagaaaagaaagaataaaattaaaccataaaattctttcagacaacatatagtaataatcttataagaactccaacaggattgttgtttgatcaag

SEQ ID NO: 79260 - DNA, 430 bp, Glycine max
  unsure (1)..(430): unsure at all n locations
agcttattagatagtattagnnttgtttatgatcatattgcatcgaaggtcattttcaacaattgtttattcgcaaatgcctttcaaataatggcttcaatatttttctttattgatcaatgaacacttaaaacttggttaaatttaagtgcttgaattgttttcccataggtcaagattcactagttctgtcttccttttcagaggtagggaactgatgggggttttcaaggtagagcaaataaatctagtgatacatgttatgcattttggtaagcacagtatggagccttaatcattttttatgatatttcattatttgctagttgtcanagccttgacaagcatcatattgttgttaggattggagctgtgcgttttaaagattctaaataaggctctacgtggatttttgcttttcttgtaatat

SEQ ID NO: 79261 - DNA, 453 bp, Glycine max
tctatgtacgtagatatgtttattaaaagtttaaaacacaaataccaaagcttaagttgacgtttcgtctgagtaaaaatatatagtcattgtaccaagcgaggactgattatagtaatagtctaatagatggggaattcacaattatggtagatcatgtgtgtctaatatatacctctaaaaatgtataagaaataaaaaattaaataaaacactctctttaatacattgtttttattaattgagttcttttgaaatttgctaaattatatagatcttttcctgtttaactagttttacaactaattttataaattttaactagaataaagaatatattgtaaatgttaggttgccatttttttgtttattaacactaattagaaattaaacaacggttactaccaaaacaaaaaccacgttcttgattctcttatgtggtcgcatttgaac

SEQ ID NO: 79262 - DNA, 260 bp, Glycine max
tctataatgtctaccagtgacctctaatatcttaataagaaggggtctgattaaaatatttcacactattccccctaattgaaaatatattttactttatactcaagttatgaattcccttaatgacaatcttcttgaatatttattcatatgaaacaaattgaacttgaatatatagcattaattattaaatgagattaatggaacagaacatgcctactcagttatattctggttcggccacacccttgtggctacat

SEQ ID NO: 79263 - DNA, 463 bp, Glycine max
taatatatctatatatggcttataacaggcgtgccgtctgttgtacctccaggttcatgggataattgcttcatgtggttttgatgaaaaccctatggatcaatgcatataccacaaggtcagtgtgagtcaaatatgtattcttcggttatatgtagatgacatattacttgtagtcaatgatcggagtttgctacatgatgcgaaacaattgctctcttagaatcttgacatgaaggatatgtgtgatgcatcttatggcatcggcgttaagattcatagagatagatctcgaggtattttgggtctatcacaggaaacctatattaacaactttctagagagatttctgatgacagattgcttcaccagtgttggtcccattgggcagagtgataagtataaattgaaccaatgtccaaagagtgactttgagagggaacatatgaataacattccttat

SEQ ID NO: 79264 - DNA, 438 bp, Glycine max
  unsure (1)..(438): unsure at all n locations
agcttatgcgcatatttccttacgaacgttcacttgcacaagacatcctatcaactaagaaaaatgcacccatatacaatcaaggtagcttcattacctagattatttacatgtacttccaaggtgtatttgttatttacatcacacacgcctccttggctgaatttacatacatgcatactcaaagcattttggggtaccaaaaactgcacatgcgctcatcttggtatttctaatacccctacatatacaaacttcacgatgaatcttgactacctacacaataaggtgctacatttcatgcttttttttttcaaagttttgctacctaaagccacatgcaaattcaagcatattttcctttgctgactaaaattgtattcaaattagaaggcatatanttttttgtaatatgtnttcttcacataacatgcaaca

SEQ ID NO: 79265 - DNA, 465 bp, Glycine max
tcaagaaaaagatggcctcagcacattccttatttccagaagggaattctatcaatagacctccaatctttaatggagagggttaccactactggagaacccgaatgcaaattattattgaggcaatagatctaaatatctgggaagccatagaaatagggccttatatacccaccacagtagaaagagtttcaatagatggtagttcatcaagtgaaagcataactatagaaaaacctatagatagatggtctgaagaggatagaaaacgagtacaatacaacttataagccaaaaacataataacatctgccctgcgaatggatgaatatttcagggtttcaaattgtaagagtgctaagaaaatgtgggacactcttcgattaacacatgaatgaactgcagatgttaaaagatctaggataaatgcactaactcatgagtatgaaatatttagaatgaatg

SEQ ID NO: 79266 - DNA, 439 bp, Glycine max
  unsure (1)..(439): unsure at all n locations
cgcaagctttaanaatgattngacttcatatattttatatgaagatgtatttaaagagttgcatgttcaacttccctttatggattttgaatgtgaaatattaagcaccttgaatgttgctcttgttcaattccaccctaatagttgggcctttttgtgatctttccaaattctttccagaagtttgcaaatcgtcctttatggagttaagattggttgggcttccttgaatgctcataaatttgggaaattgttcctgatatataatcaataatggaggaatttcaaatctaacttcttctgagttcatcctaaccctgagtgtagagactcgaagagttatttttcanaaaggatgaaaaaactcccaaatttcctttctactggagacatttcccattcaaattcaaatttctccttcatcaagtgttgtcaccat

SEQ ID NO: 79267 - DNA, 457 bp, Glycine max
  unsure (1)..(457): unsure at all n locations
ntataaagttntctagttntctaaaccttgaaaacttgtgctattcatcttttcattctcttctccctttgccaaaaagaattcgccaaggactaaccgcttgaattctttntgtgtctctcttctctcttttccaaaagaacaaaggactaaccgcctgaattcttttgtgtctcccttttcccttgtcaaagaattcaaaacgacacagtctgagaaattctttgattcttccctttccctaatacaaaagtgttcaaaggactaaccgcctgagaattcttttgtatccccattcacaaagtatcaaaggtttaacagtctgagatctttgtcttaacatattggagggtacatcatttgtggtacaagtaaagggtacatctacttgagtttgactgagaacaagagagggtacatctcttgtggatcagttctagtggagggtacatccact

SEQ ID NO: 79268 - DNA, 171 bp, Glycine max
aaagaatttaatattagatatttcaatggttttggttgctcattggggtcacttttcacgcaatttttcctatgtttatcaacctttcttttcaaactggttttgtgagcaacacttacattttacacaacaaaacaaaacttttctagacccttaacacattcaattttt

SEQ ID NO: 79269 - DNA, 487 bp, Glycine max
  unsure (1)..(487): unsure at all n locations
ctattacggacacttaaaactaagctgctctagatntaaccgtctctctcagctnttcaaaaccgctttcaccaacaacaacgccgttctcgaccccatcgcccaagggctccagcagctccaaaacgacgctgtttccgaccctctagacggcactaccgttgttccaccgcagagcttccaaaattcggaccccgggatgcagcagcagcagcagtacccgaacggggccgtttcggacccggattcgcgggcaattgtgccggtcccggaggaagggcggtcctcttcggtggcggtcaccacgccgcggcagcggcgcttcaaggagctggtccgcctgacggatgtcggcgggccggagcaacggcacttccgggacgtggtccgccggacgaggatggtttacgactccctgcgcgtcctggcgacggtggaggacgagggccgggtggatgcccgccgggggcgcagcgatctgcgcgcc

SEQ ID NO: 79270 - DNA, 402 bp, Glycine max
  unsure (1)..(402): unsure at all n locations
agcttcaatggagcttgcatcatggggggtctcantatcaatcaccaccccgacccttgcattntgcgatagaaggaaggccttccagagtacttgagaaggaaaggattgagcatatggaggagaggctaagggccattaaaggaggaggaaattatgcctttgctgaaatgacaaaattgtgcttggtatctgacgtgttcattcctccaaaattcaaggtgccagatttcgataagtacaagggaactgcttgccaaaaagaatcagttgaaaatgtattgtatgaagatggggcttatgatagagatgaaaagttgttgatgcatntctctcangagagtctngatggggcagctattacctggtataccaatatggaacccttttcggtccttcctg

SEQ ID NO: 79271 - DNA, 408 bp, Glycine max
  unsure (1)..(408): unsure at all n locations
taagtccaagttgtctggcccattcacaatcatatatgtgtatccttatggagtagttgagtcgatggactcctcttctactgactctaagcacagctggatagtgaatgaccaaacgttgaatgtctacaatggtggcaatattgagagattggccaccatcatacacctgcatgacccgcgagggtgttttatgatgttaaagaagtgcttactgaaaggcgaccccagatttctacccttctttctttatgttaattcatgttgacttgatgtatgctagttaattcttgagtatgtggatcttgattcattatagttgagccttaactttcaataatggtgcgagcttgtttgtgctataatgtgatgttgctcaatattangaatgctctgcatgattaaaat

SEQ ID NO: 79272 - DNA, 429 bp, Glycine max
gcttgtatctgaggttgctactcctgtctattccatgagctcaactccctgcgttggagttgtggccaatccagactctatgaaggtgtctagtgatagtaacagagaagcagaatatactgaatatctggctaaagctgaaaaatctcaaaatagttaaagcaagagaagcccattacatgatctattggcagaagatcttgtacccaaatctagtgaaagagatgacaaggttccagacagtatgctcccctcacaaaatatagctgttcactcagaaccagtagatgatggagactttattgaagcttaagacactataagaagccggaaataatctgcgaagttgaagagttcgggagctaaggtttcaatgccagttgcttctaatgaagtgcccataagttcaagccacattgaaaaggtaaa

SEQ ID NO: 79273 - DNA, 458 bp, Glycine max
  unsure (1)..(458): unsure at all n locations
tcgagcataattcagagctcagacctcaaatgatcaatatctaaaccaaaatccagagcaacgatcgtttaattaacttccatcaataaataagagcaaacagaagacccaatcaacaactgatccacacagagcaggtcatgaaacaccagatccagcaatgaagaaagacatgcaatgaatacccacaatcaataattcagaattgttccccctaaacatgcaaacgataaaatctattcaacccacaccgcgaagaaacccgcatttgaaattccaaattaaaatatctgagtgaatgattcggataacaattcgcgcacttatgttcagaatagttcaaaatataagacacctacaacaagcaggggcttcagagcaattaaatntgatcagaaatagacatgtgaggaaataataataataatgaaacagaggatagaaaaactgaccgacac

SEQ ID NO: 79274 - DNA, 374 bp, Glycine max
  unsure (1)..(374): unsure at all n locations
tctacctcatgcactcctctaatgactatggcatcatttctggcgcctaactgctgggaagtggaggccatcttctcaattaaatntctggcttcagcaagaatcatgtctccaagggctccaccactggcagcatctatcatacttctctccatattactgagtccttcataaaaatattggagaagaagctgttctgaaatctgatggtgggggcaactggcacataatttcttaaatctctcccagtactcatacaggctctctccactgagttgtctaatacctgagatatccttcctgatggctgtggtcctggaagcaaggaaaagtttttctaagaatactctcttatagtcatcccagctcgtgat

SEQ ID NO: 79275 - DNA, 465 bp, Glycine max
  unsure (1)..(465): unsure at all n locations
agaactatcatcacatgacgctntattggcacagaatatgtttctttctatgcaacttgagaatttaacaaaaacacttggtaagttgccaactaaattgttaattggtcaaccaatacattcttctattttgcaagttacaggttgtaccatctgtggtgaggctcatgaaacaggccaatgtattcccattgaagaaaacattcagtattcccattgagagagnttgagatcatgcccactangatgactntacaacttgatgaccgctctattaccagaccatatggagtaattgaagatgtgctggtcaaagtgaaacattttatcttcctggcagactttgtggtaatggatatctatgaagataatgacattcctgtaatattgggccattcatgttaactgcgagctgcatagttgatatgggagaaagaagttggaaatggactctgaagatcaaaa

SEQ ID NO: 79276 - DNA, 404 bp, Glycine max
ggatccttaagcaccgcggctgcagcttaccaaataagatgaaaggtttttaaaaactgagtagcacatggatttttcacaaaacatgtttaccaaagagtttttactctctgtaatcgattaccaaataattgtaatcgattaccagtagcaaaatggatttgaaaaagttttcaaactgaatttacaatgttccaattaatttcaaaaagttgtaatcgattacaatgttttggtaatcgattaccagtgcctttgaacgttgaaattcaaattcaaatgtgaagagtcacatcttttcacataaaagccttgtgtaatcgattacactaatttggtaatcgattaccaatgattgtttctgaataaatcaaaagatgtaactcttcaaaaggtttttgact

SEQ ID NO: 79277 - DNA, 466 bp, Glycine max
  unsure (1)..(466): unsure at all n locations
nttcgattcattctatgtacccacggtggtccacattgtgttttgtgtatntctattaccggttcatttactttgtataccccctcttgacgtgcttaagccattttacttaagtcatttctcgcttaacttaaaaataaaataaatttccaccgaacgtttgaattgtattatcccgtaacttcggttgaaatgaattccgaccgttcggtcgtgccgtaaccacgttggaaataaaaaaaaagagggtaaaaataatataataatcattaaaataaaaatcaacatcttttagcaaaataaagcggaaaatcaatcggacgttgtctctttgggatttctcattcttaatcgaattgattaataactaaagtgaaactaaggctaaaatcaactcgcctagtcaagctcgtccataaaaataggctnttgaagtttgtcatttcaatgtctcactaagtaaaat

SEQ ID NO: 79278 - DNA, 465 bp, Glycine max
  unsure (1)..(465): unsure at all n locations
ttagagtcacccgcggcatgcaagcttccttgggccatttcctgcgagaacaaacatttagaagttagttttacaagataatgcttatcttaacgcaaaaaatgtcatgctaatccctctaattntaaaacgaactcatgtaacctatttatgcacacgcgtatgtgtggaatatcctactatttaggtcaacatagaggccatccaacacattctaattgccatacatatatatgcatttgaaaagaacatacattctcacgcccaaggcattgtgtcaaaactcacacttaattatatcctaaacatttgctattacaaactaactacacacatttggaatatatatcatacaaattntattgtttctgcatatgggaaagctaattacatcctgcacacacttgcattcaaaagagaattccatgctatcatacatccatttaggagaataatcattcacac

SEQ ID NO: 79279 - DNA, 469 bp, Glycine max
  unsure (1)..(469): unsure at all n locations
ngtaatctaccagtgacgtanactggaccacgtaaaaattacaaggcaaatcagtgatacgtatcttcccttccttttcccaatccctgtgaagtttggcttcaagccttttgaaaccaaccttccagcctagcacatgcaccaccaaggcattcttccacgatttactctattgtgtcatttcttcatctgataccccaatctctgaacaagggtcaaaggcggtctttgtctttgtcattaacaatcttggcgtttttcactgtctgtgatcatattctcctttgtgatttcggaattgtccaaactatgacctccacaccagtttaggctgccttcaccgaagggaaccaactacttctctntatagggtgaaaaatgttggtccacttccattcttgtctctctctaaaanatgnttttctttnttttatatatgttgntaggtttaattacttagtcctataat

SEQ ID NO: 79280 - DNA, 440 bp, Glycine max
  unsure (1)..(440): unsure at all n locations
agcttcttatccaagactcatcttggtggtgaagctccttcttccatggcttattccctagtggatggcgcctcctctcacctcttctcctttgtcttccgctgcatctccatggtggaaaatcaccattaaaggacctcattgaagctcaaagatccagcctccatagaagcctaacaagcaagcttccatcagaaaggattgaggaattgttctccatcgaatccttgaggtggattttgagggttcctcttcgattaaaatgttcctcttgatctggtgattcggttgcaagcaacaacgtcttgtggtggccactattggtagaggaggaggtgttatggtttggggtgggcgtttggagagaaacagagtgaaaaaaatcgtatntttcatgctgaagaacgtattaatagtttgtagatcttgcttagcgagct

SEQ ID NO: 79281 - DNA, 459 bp, Glycine max
  unsure (1)..(459): unsure at all n locations
tgggcaatagcaccccacctgacgtccccaaagtcttctgacccccgcgacatatctccaggtaccactctgtggtcaacgaataaaagcaggaagtctcacccttctacacttcctcatttcaagcttgtaggattatggggtacccatcacatgtggtactaggtggcggtcgggcgatggtgcaaaacgattctccacatccacaaatcacgtataacccaccatcccctgttgcccacctccaactaagctcacgtactcccacgtagcccttatccttgttcctctcaacgccgggtccccatcaatcctcccaagcttccacaacatccaggtaattccacatccaataatcatggcctaacaaaaccaagcaaaacagggcaaaggcagaaaactcagcccaaaacacaactcanaatcacagcttttcacatacaaataccccagtaacat

SEQ ID NO: 79282 - DNA, 425 bp, Glycine max
  unsure (1)..(425): unsure at all n locations
atctaacaaggtaaaccatgtgcgatgtgtcanaggtgtcatatccacaatatactgtgtaatttacctatatgggaaagaagatctgtatnttgtctgacatattccatctcctttggagttggatgcatactgtagctattttcctcttcagaatgaatattgatcatgttcttaacaaatgcagcttttccttttacctagtgacaccacacccaataaaaatattggtctaactcttggtctcacattcagatattgaatcataatgttggatctggatatgatgcacctgaagctgccttgtctggtcagtatactctgaaaagcgatgtctacagctttggagtcgtcatgttggaacttctcagtggacggaacctctcttgataggtgaattaatgggtttctctatgtctgctctc

SEQ ID NO: 79283 - DNA, 451 bp, Glycine max
aagctggcgcccactaccaatatctatatgctatccccctgattacaaacccatccctgatttggctggaccagtagtggaatgggatgtcatcctttttccaagttgtttatcccgatccaacacaagaatagagcattctccatcagattgttagcgttgaagctgtcgctagagaaaacaatcctatatctatggtgccgcatacaccatgtaagggagatccaccaagtctgccattgctgtaacctaatacgagaagtattgctttatgagtgttggatgagatgatgtctcggaatttgcgggaatcggcccactatgtttatccaagacattgatttccaccaaagcaacatgattggtacacaattgacaaatagatgagctgcatcctctttattatttctgtggaatggacatgtgacatcattagcttacacgtaccttc

SEQ ID NO: 79284 - DNA, 423 bp, Glycine max
  unsure (1)..(423): unsure at all n locations
agctngaaggagaactagatgccttggtcaatctagtaactcagcttgccatgaatcagaaatctacacctgttgcaagagtctatggtctatgttcttctgcagatcaccatatagatctttgtccttctttgcagcaatctagagtcaatgagcaacctgaagcttatgctgcaaacatttataatagacctcctcagcagcaaaaccaacaatagcagaataattatgacccttcaagcaatagatacaatccaggttggaggaatcatccaaatctgagatggacaagtccttcacaacaacaacaacctgtccctcctttccagaatgttgctggtccaagcaagccatatgttcctcctccaatacagcagtagcaacaatagcaacaacaaagacnacaagcaactgaggcccctt

SEQ ID NO: 79285 - DNA, 463 bp, Glycine max
  unsure (1)..(463): unsure at all n locations
tcaacatcagaccacttccagggtgctggaactacttcacatggacttgatggngcctatgcaagttgaaagccttggaggaaagaggtatgcctatgttgttgtggatgatttctccagatttacctgggtcaactntatcagagagaaatcagacacctttgaagtattcaaagagttgagtctaagacttcaaagagaaaaagactgtgtcatcaagagaattaggagtgaccatggcagagagtttgaaaacagcaagtttactgaattctgcacatctgaaggcatcactcatgagttctctgcagccatcacaccacaacaaaatggcatagttgaaaggaaaaacaggactttgcaagaagctgctatggtcatgcttcatgccaaagaacttccctataatctctgggctgaagccatgaacacagcatgctatatccacaacagagtcacactt

SEQ ID NO: 79286 - DNA, 440 bp, Glycine max
  unsure (1)..(440): unsure at all n locations
agcttcattctacactngagaaagaggatgagatagctgcacaaaagagaaagcttcctaacaaaaattntcatgcaagtggaccttcttctagtaattctgactttcagcagcatcctatccctcttccattcccacctagagcaattccaaacaaaaaaatggaagaagcggaaaaggagatcttggagacctttaggaaagtagaggtgaacatacctctgctagatgtcatcaagcatattccaagatatgccaagtttctaaaggacctgtgcacccacaaaaggaagctcaaaggcaatgaaaggattagcatgggtagaaatgtgtcaacattgataggtaaatctattcctcacattcctgagaaatgtaagacccaggtactttctgtataccttgcattattgggaacagtaaatttgagaatgccatgc

SEQ ID NO: 79287 - DNA, 486 bp, Glycine max
  unsure (1)..(486): unsure at all n locations
tacggacctatgaatactaagcttccacacatccaagtaatgcaacattcaatcatcacaaactaacacagtcaagagaacagggcagaggcagaaaactctgcccaaaacacaaaccaatatcacagcttttttcacattcaaataccccagtaacattctcttcgttccagttcgttaaccgttggatcgactcgaaaattttactggacgtctctagtacataagtctacattttgaccgttgggatctgctaganaatgtccagaaccccatatgtactaccctttccacaaccagccatacataagcatttttttctgcacatatacaaaattctgctgcacatttcaacagcaaaattctgcataaagtgcatatttcgaaaaccactcttaccttcatccagttttacccaaattgaatcctacaagtcccaaatcatgtatcaatcatgtctaaaccaagtacaagcttcagacccta

SEQ ID NO: 79288 - DNA, 435 bp, Glycine max
  unsure (1)..(435): unsure at all n locations
agctgtccttggtttagacatgattgatacatgatttgngacttgtaggattcaatttgggcaaaattggatgagggaaagtgtgatttcgaaaatctgcactctatgcagaattttgctgtcaaataggtgcagcagaattttggctttgtgcagaaaatgttgtgtatttgctggttgtggaaagagtagtacagattgggctctggatgttntctagcagatcccaacggtcataatgtagatttatgtgctagagacttccagtaaaatgttcgagtcgatccaacggttaatgaattggaacgaagagaatgttactggggtatttgtatgtgaaaagctgtgatattggtttgtgttgtgggcacgagtttctgcctttgcctattctgcttggttttgttagttcatgatgattggatgtggaattac

SEQ ID NO: 79289 - DNA, 459 bp, Glycine max
  unsure (1)..(459): unsure at all n locations
aagtgaacggattagcatgggcagaaatgtcttcgtattgattggtaaatctggtcctcaaattcctgaaaaatgcaaagatccaggtacattcagcataccttgtatcatagggaatagtaagtttgacaatgccatgctagatttatgagcttctgttagtgttatgcctctgtctatttttaattctctatctctaggtcccttgcagtcaactgatgtggtaattcatttagctaacagaagtgttgcctatcctgttggtttcatagaagatgtcttatttagagttggtgaactgattttccctgttgatttttatatcttgaatatggaagatggattttctcaaggatcagttcccatcattctangcagaacctntatgaaaactgctagaactaagatagatgtttatgcaggcacactgtccatggagcttggtgatataactgttca

SEQ ID NO: 79290 - DNA, 418 bp, Glycine max
  unsure (1)..(418): unsure at all n locations
agcttctaagccttacaatggcacaccaacattaatggatgagtagaatttctttactttcttcttcgtatggtgctcatggttttgggctatgataggggaggagaatagtggtttttgtgttctctcaaggtggctgaaagttgaggtgagagaagagagaatnttaacttgctctccaagtagaaagtgagagaaaaaagtaagtgtgtaagagtgtgatgctggccatgagatttggagtacagggggaggttgactgttcaagtggataaagacgggattggggaaggattctgccttgcatggtcagcccctttcccttgttggtgagtggggattttgcgtcatgatgactaaatggggttgtgcactgtctaatttattaacacaatccaactatgtgctgtgaaattat

SEQ ID NO: 79291 - DNA, 412 bp, Glycine max
tatcattattcaacttatctcatggtttcctttaggtagtctcactgacagacatgcaatgtgattaaaaagcttaattgtattcgtgagtatgtttgtctttgttgtcatgttttgttctatccttttaacgtaatctcactggtatgaaggatttatttaccttgtcctttgtttgtactccattcctctattgagctgtcttcattcagtaaaatgagtatgtttctacttactctcttatctatttttcattagaactccttcattctcatgtgtatataagtatattcctcatctcaatctttctctgttattgcatgtcatgcttttctttcatatataatgaagcatctgaaaagacaacattccttgcagcttcctgatcatgaccttacgttggaagcagcat

SEQ ID NO: 79292 - DNA, 453 bp, Glycine max
  unsure (1)..(453): unsure at all n locations
gagtcacctgcggcatgcaagctngtcaaattctgtgtgaaacaacactttcttcatgttgttatttccttattgctttctacttttagttccacaatcagtatcatcattgtcaggttttcccatattcaccttcaaattggtgtttgtcaacctcaatcacttgactatggaacaagcaccattgaaaggccaccacttattattaattgttattcttgtttccacatgtaccaccactttctcgcttcttcttatctgatagtaaaacgggaagttntttgtcttgatcatgctttccattatgctataataatcatcacatgtagatattaatgtaaggttttcttctcctcccaaataaagaaaggagacacatacacattcaactcatatntagtcaattaagttcctttatggttcctttatagttatttggccaaagtgatttta

SEQ ID NO: 79293 - DNA, 267 bp, Glycine max
ataatagatatattcatccgcctcacggaattcccacaaagatcttcccttcttataaggagtcctttccaaataataaaagggttccgagaaaatacccgattacataacagtggggatgtcttctccacctctatgaacctaagaatcactcctaaaccttaaatctacctaaaaattagggcctttttcttccttgctcaacttttgctctgttattcattcagcactatgctcatgcagtctattcagacctctctcttcttt

SEQ ID NO: 79294 - DNA, 331 bp, Glycine max
  unsure (1)..(331): unsure at all n locations
agctccacctantggccctactcatagatgatgcttgagataacatgctctattttcatctcccactccaaataagccttcggatcattctttcctttacatggaggaatgttgagtttaataccatcgattcgggtttgtctatgaacaccatcatttcctcttctcctcctttcttcttcattatgagctctatcctccacttgattccacctctcatggagcgcatcatgtcgttgtttcattaacctctccaaatgatggatccatcttgcttttggaattgctaacgccccactccatcattatgattagtacctgacatgtcaaa

SEQ ID NO: 79295 - DNA, 295 bp, Glycine max
  unsure (1)..(295): unsure at all n locations
gcgcaagatacatccgttgaacattntcatattgttacaggcacantcagtctagaatcgcgcggttctctgttttctgatcttactatggcatgagattacattcttatatgcgacattgggcgtacattgatcatggcattgattgtaagcacgtgccactaaatcttccgttgctgggataacactgtggagatttagaggatgtgccagaatcttatcttgtcgattcgcactccatgactactccttcgcttcatgcctatgcataggcttggtgaacctacacttgata

SEQ ID NO: 79296 - DNA, 387 bp, Glycine max
  unsure (1)..(387): unsure at all n locations
agcttaccaatntagacttatgtgttnttcttccctctcaatagcttccagatcatgcttaaagagccttccagggtagactctgatatatatgggtggtgaagcttcttcatcttcttctatcaataacagtttcccttgtagcaattagcctttctgaacaaaacaagcttgtccactactatcttgaacttagtgttggatgtggccacacaaagacacctacccttagcccaatctagaaaaccctattctagcatgcctttagaaattcatgcatacactaacaacatgtaaaacacacaatgttaacaacttacttttaccatgaatgcttcanaaaatgaagtttagaaagtgtgagtcgcacaaacttattcttagaac

SEQ ID NO: 79297 - DNA, 460 bp, Glycine max
  unsure (1)..(460): unsure at all n locations
gagaggatgcttcaatggaggagaagaaagagggagagattgatagaggggggagcacganattgaaggaagaaaaagggagagaagttgaactttgagttgtgtctcacaagactctcattcatcaaagttgcaataagtgttacacatgcttctatttatagactaggtagcttcctttagaagctttcttgagaaaactatctttagaagcttctttaagaaaacttccttgagaagctagagcttagctacacatacccctctcataactaagctcacctccttgagaagcttccttaagaagattcctaaagaagctaaagcttagctacacacacctctctaatagctaagttcacctccttgagatgagaagctagagcttagctacacacccnctataatagctaagctcacccgcatgacacanaacatgataatacaaaataaaagtcct

SEQ ID NO: 79298 - DNA, 394 bp, Glycine max
  unsure (1)..(394): unsure at all n locations
ctggaactacttcacatggactngatggggcctatgcaagttgaaagccttggaggaaagaggtatgcctatgtcatccacaacagagtcacacttaaaagagggactccaaccactctgtatgaaatctggaaagggaggaagccaactgtcaagcacttccacatctttggaaatccatgttacattttggcagatagagagcaaaggagaaagatggatcccaagagtgatgcangaatattcctgggatactctacaaacagcagagtatatagagtattcaattccaaaaccagaacagtaatggaatccatcaatgtggtttgtgatgatctgtctccagcaagaaagaatgatgtctaaaaagatgtcataacatcgggagacaatg

SEQ ID NO: 79299 - DNA, 493 bp, Glycine max
  unsure (1)..(493): unsure at all n locations
tacggacctatgaaactcagctggaggattatggngtacccatcacatgtggtactaggtggtggtcgggcgatggtgcanaacaagatctccacatncacaaatcacgtacaaacccaccatcccctgttggccacctccaactgagctcacgtactcccacgtagcccttatcctcgttcctctcaacgccgagtccccatcactcctcccaagcttccacaacatccaagtaattcaacatccactcatcacaaactaacaaaaccaagcaaaacagggcaaaggcagaaaactctgcctaaaactcaaaccaaacatcacagctttttctcacttaaagaccccagtaacatttccttcgttccaatttgttcaccggtggatcgacttgaaaattttactggaagtccctagtacataagtctacattttgaccggtgggatctgctaggaaatatcgagaaccccatatgtactacccttttcacaa

SEQ ID NO: 79300 - DNA, 446 bp, Glycine max
  unsure (1)..(446): unsure at all n locations
agctggggtttaaaagaactcaagataatcatgattagcaagaagaaagtattatgcaataacaagataaactacacaagactagaaaagaaaataagttatgtaaataagaaagaaattaaagtgcaagagatataaaccagatggatcctaagagtgttaagatgacctcatttaaggttcccaacaaagcactcactatcctaagggaaaattgcctaaaattattacacataaatggaagaagggtgacctattggaggctcccaacttacttccaatgaaaggcctttttgataaaaaaaaatttgaaagtaatgaaggtaaatgtacaagtgtccaattacaaataaattgccaattagaanaagggcctcaattttggtggatattctctctttggtgtttcactcaatttgaagtgcttcttagtccaatagctctta

SEQ ID NO: 79301 - DNA, 470 bp, Glycine max
  unsure (1)..(470): unsure at all n locations
nttacaatatggtggttacaactggagtaactatcatcctagtggttgtggtggntttgttctcaagcagaaattaaagttcataaaaaatcacataaggcagtggagtttacaaaatggtggtattacagctactaaaatccagaatttaaagaaggacatgaatgctntggaggctggagtcaatggttcaaacatatctcaagctgaaatggagcttaagaaatctttgcaggaatagctgtgaacagcaactatagcttatgaatccatgatgaggcaaaaatctagagtgaagtggataagagaaggggatacaaattcagcttattttggaagaaatctctcagattacaatccaacgacaaatatctgatagctggatgtgggaagcagagcctaatggatgttactcttcaaggagtgcatataacatgctacaagaaagttcaatgggtgccaatctggat

SEQ ID NO: 79302 - DNA, 440 bp, Glycine max
  unsure (1)..(440): unsure at all n locations
agctntactgtcactctctctgtgcctgactatgtacacaaaagcaatgatgggggtacccgccctgcaacatcaacatacacgcgttcaccatcaataatctatgtggatcatccatacctgaaataaaaacaaattataatattaacatatcacaaaaaaatgtaatatatggtaaaagaaatataaaaagacagtaacattataaaaaattacaatattaagatgactttgtaataccacacaaataaaagcaaattataagacaaaaaaaaacagcattatataacaaattattatattaccaaaaattataatatgacacaatatatatgaaccaaattgtaaggtatacaaaataatcacagaaatattattacaaaataattaataatatcaaaataaaatcggaatgtgttaatattcaaaacaggtataca

SEQ ID NO: 79303 - DNA, 450 bp, Glycine max
  unsure (1)..(450): unsure at all n locations
tagtctttgaagcttctatgatcactgattattgntgtgttaatgaatgtagtcattccaatttgtggctatcatcctaaatgtacgggctgcttttgcttgctcatcattttcaaaaatagactctctctctctagctctctatctatctatctctctatctatctatctctctatctatctatctatctctctctctctctctctatctctctcatttttgcgtgatggtattacattgagtagttgattggtccatagatgattgaacaaatattagatatgaacttaagttccattctcttggtttgcaggtagcaagcatatttgttcctacggttgtttctttagcattattgacactattgggatggtaaagtcatcttaactggcttgggcatataaatagatgttggcttctaatgtgattggaatgcttattcctacttc

SEQ ID NO: 79304 - DNA, 444 bp, Glycine max
  unsure (1)..(444): unsure at all n locations
agctngataacttgaagaaagttagagaaaatgactaccagatgtgtcacaccctgaggtgtgacaattcacatgggtgtaacaagcaccaaaaaacctaaattgacaaacaaaatgcaccatggctaaggtgtgtgaatttccaccaccgggaaacgcattagacgacaacatgcgtatgtataatgtttttaggatatcttaaattgtagaaatcgaaacgacacgagacaaatgtctaatttcaagaataaattgtccacaactttcgtgaagatgagttaagaatttcatgtcctaacagtgattttggtcacacaagttacgcacattgtaataccctgtttcatgtttttgtgtggtttaactataatgagcttggactccttntaagcccttaggtttaaataaaccttttagatataagagaaataattatatatt

SEQ ID NO: 79305 - DNA, 465 bp, Glycine max
  unsure (1)..(465): unsure at all n locations
tatcaagtaactgactngatacactntgcatcagcaacaacacggtaagtttataaagccaaacattatttggcaaaaggtacgcaagttaaaaataaaaacattagtgcaacaataactaaacaaatatgtattcctgtatcaatttctaatatatagtgataaataccatagcaacatataanttgattccaattttcatacatatagattgcaaacttgggggagaatgtctaaggaatattctaaatctgcaacttaagaacaaaagcatataatattggttatggaaaagacatagggaagtcctaacctgattntagataaggcgttccagaaataagtcaaataattgtaccatattntatcaaggcatttacattcacaagttttgagttacacaaaaggatagtggttatcacaaagtccttatctaatagcaatntcagtaacaagttccttcgt

SEQ ID NO: 79306 - DNA, 446 bp, Glycine max
agctggagcttagctacacatacctctctaatatgctaagctcacctccttgagatgagaagctagagcttagctacacaccccctataatagctaagctcacccccatgacaaaaaacatgaaaatacaaaaaaagtacatactacaaagactactcaaaatgccccgaaatacaaggctaaaaccctatactacttgaatggccaaaatacaaggcccaggcgaaggaaatacctattctaatatttacaaagataagcgggctcatacttagcccatgggctcgaaatctaccctaaggctcatgagaaccctagggccttcccttggatctctagccaatctacttggagtcttctacccaatgcccttgcggggtaggattgcatcattccctccaccttggaaaggatttgacctcaaatcccgaggttcttcatactct

SEQ ID NO: 79307 - DNA, 429 bp, Glycine max
  unsure (1)..(429): unsure at all n locations
tcttgagcttaatgagggccttcaatggtgattntcctncatggagatgcagcagaagataaaggagaaaaggtgagaggaggcgccatccactatggaataagccatggaagaaagagcttcaccaccaagacagtgccttggataagaaacttatagaggaagtttcaatggaggaaaagaaagaaagaaggggggggggggcatgaaattgaaagagaaaaagagggagagaagttgaactttgaagtgtgtctcacaagactctcattcatcaaagttaccataagtattacacatgcttctatttatagcctaggtagctgccttgaaaaactttcttgagaaacttccttgagaagcttctttgagaagcttccttgagaagctagagcttatctacacacaccactctaataactaagctca

SEQ ID NO: 79308 - DNA, 411 bp, Glycine max
  unsure (1)..(411): unsure at all n locations
agcttgccacatgctctagatgtactatgatagctagctntaaaaatatgttggttgccacatggagcacatgaatatccgatttggctaagtcacatcattccagagccagagaggaaaggaagccaatatatttaattactaattggttacagatagatagagatatgaaatacatcatcaatcgccatttgtttttattttcaacctttgcaaaaccaactactcctttagcaggcaagttggatcaaaagaaaaagagaatagagcataatgcgcccaaccaggttgattngacttataggtgttccgttcatattattctctccaatgtgttttccgtcaacacttgttgggaactatcatatctatgaaaacaggaaagctaaagaacaagtttttctgatcaaa

SEQ ID NO: 79309 - DNA, 457 bp, Glycine max
  unsure (1)..(457): unsure at all n locations
taatatatacataanattatntagaaactgttgattttttattatataaatagacaagaaagtcaacaaatgaataagaaatacaactaatatagaaatntagtaagacattaatcgagtttaaaattatataagacaatgttattataaataacgttgaaaaagaggaaagtcaatagtacacaataagcattcagcataaaatatagagtaaaaaatggctatgttcaattttttggtaatgtggcgatgttcaataagaaaaccatttattaataaaaatatagaataatttattttaaataaggagcattgtaatattttccgcgttaaaaaaatcaatactttaagaaaaagacaaaacatttttgttttgaaataaactgaaacaaaaacggaattttgcatataaaactgggttagtggattgatttcgtaaagactcgatatcataaca

SEQ ID NO: 79310 - DNA, 383 bp, Glycine max
ctgcagcttacaatcttgtagaatcgattacgatgaggctgttatcgattaaaacagagagtctctctactgaagaattgtttctaacttagaatcttttcttcacacttaccatgatgatgaatgatgcaattcatatatcaaatgtactaagatgcagcaaccaatataacaaccattacaaatgtcattcaagggagttgggcatgtcaaacccaaaactttttcaagcttttccttgagcttcaagctttaacctttgagatgacaccatgtcgatcatgttgcttccctatctctacaatctccctcttttggattgatgatgccaactataaaatgacttgagtgcttaaagagtttgaatctagactggctaattt

SEQ ID NO: 79311 - DNA, 450 bp, Glycine max
  unsure (1)..(450): unsure at all n locations
tatacattgtttcacagaanagtgaaagataagtcatcacaagtaatggactatatgggtgatcataacatgaccattgatctcttggacaattcagtgagaaccattgaagaaggattaaatatggttgaagaagaagagaatggccaagaacaagagttaacgatcgaggaactcgagacgaggatgtggagagaccgaatgctgctgaggaagcttaaggatgagagaaaggagagagagcaagggaaaacggtggagatgatgaagaagaaggccttgactcgtgcacaagacattgtgctgaagaacatgctgaagatgatggaggtttgtgatgtaaggggttttgtttatggcatcatacctgagaaggggaagccagtgagtggagcttctgataaccttcgtggttggtggaaggaaagggtcaagtttgatcgtaatggt

SEQ ID NO: 79312 - DNA, 402 bp, Glycine max
agcttggcgacgatgggagagatgattctatcttagcttcttcacgtgactaaggcgatgtgagagagatagtaaaggtagcgggtcgaatttctatcgtgggcctaaatctggaaatgggtcacaccggcccaattcctatggatccagcaaacccgggtccgattgagtcatggtaaaagggcgtgaggtggtagcaacagggggagcaagaagtaatgctaatgggcccaatgcttgatagctctcccattcatatatgatgaggactgggcctatagataggggcttcactcatctttcctaccaagagcttatggatacgacacagaaagggttatgatttaagtgtcaaggcccctatcatccaaatcacctatgttccgactaacatatactcat

SEQ ID NO: 79313 - DNA, 457 bp, Glycine max
catatcgagtaagtatacttttatacacctgtttgtttcttttatcactatctttaaggggcctattcaaagtcttgtttgtcctaaaatcattccttgaacttatgatatttcgtatagatagaaaagagaagcttatgctgaaaatcatgtgtatcaactcaactacaccatggactcaatatttatctaatgaatatattaaatactaagagtcagtgttcctggataccatatttacttgatgcactgaacctagatattacaatgagccttgacatactaacatgttactaacagacgtttggatgatggatctatatttgctctcttaataatttagctcatgccattttatccacttcccaaacaaaggaatggaaattttataccattccatcatatagtattcacgtattcgaactatgaaactatggagcggtatctttatttattt

SEQ ID NO: 79314 - DNA, 435 bp, Glycine max
agcttcaggaataggaaatagaacttatgagactaaatcaacatgaataaaatgacaagaaaaagaaaggaatcgcacttaaagcctcatcttcaattcaagaagaaattgacaaagaggacttgaatgaaatagaagaagatgatgattttagtttctttgtaaagagattcaataaattcctaagaaacaaaggaaatcaaagaagatcaaacttcaaaccaaagaaaagaggagaagattcatcttctgttccaaagagttatgaatgtaatcaacctggacatttgagagttgattgccatagtttcaagaaaagaatggaaaaatctgacaggaaaaccttcaatgataagaaagcaaagaaagcttacatcacttgggaagataacgatatggattcatccaaagacccagaaaatgaagtcgtgaatc

SEQ ID NO: 79315 - DNA, 473 bp, Glycine max
ggacctatgaatctcagcttccgactaatccttgtagcttgtgttgaagttgtgattatttgtcctttgatttagacttacaaagtttatcttattttgatatggaaataagttctggtttttaagtgaaaaaaactatgtctcttagatatcttacatctttaacttaagtagacttacgcttctgatgaatcctcaggatgtgactcatacagaaaacttgaagatacttaatatggtcttcatatgttgtagtctctagtcttctgatgatacctcacaaagtgtatcatatggatggcttgattttgcctagctctattctgatgagagtttctctagattgtttgctttaagtatcagtctcatgaagtgttcttaaagaattctttgtcttgttgtagataggatctttctcaacatcatttagatgctcattcatataagaatcactacaaactatcattctaatg

SEQ ID NO: 79316 - DNA, 449 bp, Glycine max
accagaggctgcacgcttgtataatggcgtcatcatcatcgtccaatgattctcaaaaggaccatgaattgtttctcagctctagaggtgaggacacgtgaaacactttcactggccatcttaatgcgtgtttaaaaaggtatgatattacaacttacatagatcacaacgtcaacttggatggagaaattaaaacagataaaatactctaataggaatattaaaatgttttcctatgaaataatctgtttggataggatattttagaagttattaaaatattatttattctttaaagcattataatatactaattgtggagaattttagattcttacagaaaataaatgaattaatatttctcactcactatcacgcacacgctctctctctcttagccactctcacgcacatgctctctctacctctcacatactagctctctccat

SEQ ID NO: 79317 - DNA, 457 bp, Glycine max
  unsure (1)..(457): unsure at all n locations
ttagcacactaagaggaaatatgctgaatatattagagtggctggagatgtagccaacatctacgactagagaagtggatacaaagtccagactgcaatgggataaagatgggaagcagactgcatctgctacaaatatgcagaccaaactgcatctgggccaagagataggaccagacttcatctgggacacagatagggaccagacttcatctgggactacatctgatggagagaaacaaagcacgtgaaatgtgactaacaaacaaggaaaaacaacagccaagtaagccaaatagccaagccaggagaaggtggcattggcaaacaagagcatggggctggatccaaccagagacaactaaaggtggcacaaaggataaaaagtgacagcttgtgctcccagaccacgcgaaagactaaatatacagaaccactaactagagtgtnctgttct

SEQ ID NO: 79318 - DNA, 390 bp, Glycine max
  unsure (1)..(390): unsure at all n locations
tcaccaaaagggtcatcaagtttagttgaagtatggaagtcaccgtcttgcgaaaaattggggccaaagatggatcgtngtacatcgctccttcgtctactggcaaacacatttatggctgtcgatgtccctgttacttccactttgaccttgacaaagatgtcatggaccaagttgaaaatctaaaatgattcaaccccatgtcctgtgttaaaattcgcaatacttcaactatgcatcattcgcatacatccatgcttttcattgtgtgcattgctcattacattctttccttgaaaaaaaaggagaacttaatcattgttataaaaaaaaagaacccgcttntacggtgccttaccaaacctgtgctagagctagagtaatgggtaa

SEQ ID NO: 79319 - DNA, 388 bp, Glycine max
  unsure (1)..(388): unsure at all n locations
cgtcaagttctacctcttgcatgtctgtcatcctcaaactttgaatccatgatacagncttacgttgatgtcaggatcaacaaacatagttggtgaacgctgaattgatgaccttgaatgaagaatccattttgttgctcgttattgatatggcctcattaaacatcttttaagtctgatgaagaaagttggaagtctgatgggccccttagtatgctgaaatatcttcctttgctccagacttgcaatcatagcctcatagataaacactttagtactccatatgcttcctccattcttctaagtttgaattcatgcatgacattatgctgtgcaacatcgatcatttgtcatcaacttaaacactagcttggataaaaacatttga

SEQ ID NO: 79320 - DNA, 451 bp, Glycine max
  unsure (1)..(451): unsure at all n locations
ttaagcacctgngctgcagctgcaattcagtttgagaaaacttacgttggcaaaagtatctcaagccttgtttctccaaaactcagaacttgctttggagggtaaccaagcataagctcaaagtggttntactctcaaatataattttgaaaccatcccaatggaaatccaaacatatgcttaattntttgtgtgatcgacctccattttttctaatccaatttctttcttttattaggtaaatttcagactttaataatgacaatgctctgttagtataaaaaatttagaatgttgacaaataagaaatcatgtcttgtaggaaaattattgtaaaagtaaacaaatttaccatacatggtgatttgtgattagatgcgtaaaattactttacatggttagtgtataacttatnttctctaaatttcatgccagtctcacccaaataatt

SEQ ID NO: 79321 - DNA, 407 bp, Glycine max
  unsure (1)..(407): unsure at all n locations
nggtanggaanacgaaatgttcaccgctagtggacttgggtttcactgtattcaaatcattcttcttctttattttatttacggtgcaaaattaattgcggtcactccatccacattaaaatattcactttttatttaccaagaagatataaaaggctcattctggttaagatatctttacgttcattaagatatagaaggttcaaagcatttagtcttttaagattagttgcaactcgcttctttgtagttgcccccacatgcaaagccacatttaacggatgcattagcagtaaaatatgtactaccttacactggattttctttacgaagcatggaaaattatggttccatctatgcaagacaagatgcattacacgtttattgaccaattaaagtcaactaca

SEQ ID NO: 79322 - DNA, 397 bp, Glycine max
  unsure (1)..(397): unsure at all n locations
agcctgagcttctcaaataggagaatccctttctagagccatgtcttcccttcttctccatccctattcttcttccatccncatcaacccctaaagtgtaaatgagccctcattgttgggaacctagcagccaaactcttgtaatgtaattttcccactactatctctttaatgtaatttcaatttttattggtccttttctgtgtttctcattattgattgtggtttgatcatccatactcatgcatttgttgaggatttaagcaatggaaattgtttattttctaaaaaattgggaaaggatatctagntgantcttttttagtaatagaatgatattgtttagcctattcatgtatttctaattgtaatgcaatttatttaatttaatctctta

SEQ ID NO: 79323 - DNA, 468 bp, Glycine max
  unsure (1)..(468): unsure at all n locations
gcttattaactggttgataatagtatntttatagtttctaatgtttntaaaatattatttcaagtattgttttttaaatattaacttctaacttctaattntattcatattttattctccttttatccttaaaatatttattaaatttccttattaccattttaaaataaatttgattttttattaattttttctctttccctcattcacacattttaagtatcatcattattaagtaattggacacaaatagttaatacgttgaagttaaggttgaatggtttggataatacttgagttggatccttaacgaaagtaacttttgataagattntatttatctttcgatcaaactctggattagtcagaatctcattctcccaatgaattagagggttaaaataaaaagaaaagtatcatctttcttgctaatcacacttttttgaactctctctttgttaattattt

SEQ ID NO: 79324 - DNA, 436 bp, Glycine max
  unsure (1)..(436): unsure at all n locations
agcttgcttctacataatacgtgaaagctntaaagaggttgaaatcatgaactcttgagcacgatgtgcttggctaggtgctccatttcttgccaatttatctgcaactactntgccctatatgtgaatgtttatgccggtgtaactttatattattttatatatttcaactgaataatattttttaagacttacagttggattgatagttcatttcacataaatcatatatgcaaaatttcatattaatttaaaatcatttcctactttgtttatatagattagaattgactatatatatagagaaaattaacttattccaagagtaagtttaaaaagttactcttgatcttaacccttttatttctattaaaatataacggtttggattaattcacttaaaaataaggtgaatgtcaattctaagagaagtagt

SEQ ID NO: 79325 - DNA, 420 bp, Glycine max
  unsure (1)..(420): unsure at all n locations
ctattaatatgggttgagtgggtttcancgattatctgttcaagcttctgctaatcggcgactcttccgttggaaaatcctgcttgcttctcagattcgatgtgagtcatcactttatttgcttctcctaagctctctttctgttcacttcctttgtttcttcgtttcgtttcaagatgactcctaagtcgacagctacgtaagtaccattggagttgatgtcataattatcactcttcttctcttttgttatttctatttatggcccaacactcatttttatcttattttcagaaaatcaaaaccgtggagctggaggggaaaaccgtccagctacaaattgtgagtattcacacttcactgacacaaatcaatgtcttttaccgactacttcatatataatgcccccgatctatatta

SEQ ID NO: 79326 - DNA, 446 bp, Glycine max
agcttcaatctttataaaaaaaaaaaatcaaatttgtacaatttcagtttaaaaaatgaaaatgaaagaaaaaaaaaaagagagaatctaagatgtgaaaaaaaaaatggaaagggacaagtaatggagcaaacacactaccattaccctctcttttttccagttttgcagcaccacaagtctccaactccaacaaaaataaaaggcataacgtacaccaagagagaagaaatagagtggggaaataacaaaaaaaagggaaaaaatgacgtttgcaccgccgtccataccactactctcagagtttagttcgtagacaagtcaaatctagttgctcattctctagctcaggcatctagatttcctgctaacatatatctttaatagtattccgagttgtattctagttattattattaatgaaatgatatgagtatcttgcatta

SEQ ID NO: 79327 - DNA, 453 bp, Glycine max
  unsure (1)..(453): unsure at all n locations
cggtgagagtgtgaacttatactgtgagtgatctactacctgtgagtaataatctntgcatcaatctctgacatttagaataaaatgtataaatgaggacatgatgaaggccatgattgtgcatacacaagccttttgaccaaaaagcttacgttgaattataattgtatcattttcaccctttgtgagctgaatgattttgtcaataattgaaccctgaacctgaatgattatctccaattaccttgtttagattctangatagcatatggttcaaggaaattttaccctaaatttgggggagtggaactacatgggatgcaaagaaagagataaaacatcaacacacacaacacataagttgcgtgttacaaaaaaaagaagaagaaagaataagatagccatccaaggaaatgtgtgctgatgtaataaggtcaaaagcaaatgaaagtg

SEQ ID NO: 79328 - DNA, 354 bp, Glycine max
ttgctctatcaaagtactctacaaccacctgtgcagtggagatttactacacacgcccacactcttagttattgggtctacagagttactcagtgatatttgaggcgcggaatttgatattggcgggttatagcgcttcacacccaccatattggtgagcttgctaatctaaaaatacctcaataaggggctctaataaggctattgaatttacttgtttagcggacaacagtagtttaaacataacacataatcctcttgtattcattcatcgaaatcaacatttatggtaataaatatagtgaaacgatctcgttcaatacctcattagtgttgattttaatgataatgata

SEQ ID NO: 79329 - DNA, 434 bp, Glycine max
  unsure (1)..(434): unsure at all n locations
agcttatgagaccaatacatgacatataacgtttccaataatctaattttcacgctaatctagtaaatcttgtccaaaacacaaaagaattatacaaaaatacttctcacaacatggggagtaaaacccctcaaacaatttcacataattatatcaaaatcataggttcaaaaccacgaaaacaccaaaagcactaaattttctcaaccaatttgcattagggcataaattggcccatcaaacataataatctcgtgattataatcataaagggagaattacaatacagtaaacattccaaaataccctaatttgatcctctaaggatccctacagatgttcattctaaccttaattgcgataaactcntcccttacctctaagagagctcacatgtatagttcggtagcaatagtggtgctctagtggtttct

SEQ ID NO: 79330 - DNA, 464 bp, Glycine max
  unsure (1)..(464): unsure at all n locations
ntntggtcttanataaaaggttgtcctctntntctattattttattcaagctctgccacatgtccctatttgattggagcaaaaagggcccactttctctttttgactgtgacccatactcagtcacaaaagtgagaaaaatctgacctttgaaacgctaaaatcctgcctcggtttgcgtgccatttctctgattccagtttctcgcgtttctctgcgtccgccggggccagttttcgaaagcaagcaatatatatatcaaaacgctcagaataaaaccccgagcgtggttcagaggttggcttcgttaaattttaagttgcacgcaaaatgatgatttttaactaattaattaggaattaacccataacctcccagttatggatttctcttccttaattagtctaactcgcgtatcttgccccccactattcctacccttaccaagaacatatatgcatata

SEQ ID NO: 79331 - DNA, 306 bp, Glycine max
atgagagaatgagcgaatatgatcaggatacgatgcgcttggcttgaacataacaagaggaacagagattaattgaaaatacctcaactagcgtacgtcagcattctcttaaagtaatgaagagcgctcgatcaagcattagaatatctatgtgagagggctccaatgcatgatgcacgtaagtaaattccattgccagatgcatgtgcatgggtgaagacaatgctctcggggagaatcctcaatacgaatacctaatagtacgcagttcatataactattgtctgacacctatagataggggag

SEQ ID NO: 79332 - DNA, 427 bp, Glycine max
  unsure (1)..(427): unsure at all n locations
agcttgngttcctaatcttgggattgcatttgtgggcctatttgaattccctatgctgtccctatatatatataaaccagtcccacaatcccaattttacaaaatcacattcatacgtcattggggcatttcaccgagcacttggtgggcgcatgtttagacataaattgcaagagaatgggggcaatgtggcatgccccattgcttcagaatacatcataggcctaaggccttctcacacaaatccttaactcaacaaatcaagcataaaaagcaacccaaaactgccccacaagcatgagcatgttctcacaatttagagcaccaaaatgaacaaaatgcaccaacggaaagcaaaaaactcaaggattgaatacttacttgttggagtgagtagaaacaacgaanatgaaagcaaaacgcaacc

SEQ ID NO: 79333 - DNA, 460 bp, Glycine max
  unsure (1)..(460): unsure at all n locations
tacggacctataaaactcagcttgnagaaatctaaggaccgcgggtcgcttggggactggatgtatgcacgggttattgccaaaccagtataaaaactcttgtgtgtttgtttccttcttccctactcttttactttccattgtgcatttaattttctcttttactttctgttaagattctcttctactcctcattctcttaacaatttagtaaaagccttacaagagtaattttttaattagtaaaggtttaagaataattaattcaaccccccttcttaattattttgaggccactcgatccaacagaaggagtgcgagacatgcgttcatgggtaaggggtcagtggattccctctgacaaagatgccctcagccagttcctgtgtgacccgctagtgttgaaggaaggccaagagtgcgagttcatccagaggaggaacaagggccaagggttcga

SEQ ID NO: 79334 - DNA, 432 bp, Glycine max
  unsure (1)..(432): unsure at all n locations
agcttcaacctctgaccatntactactcatgtcctatctggagtctctgactgaggatcgaacaattctactgctccatacggcttgacttccttgattgtaaatggtccagaccatttagacttcagcttgcctggaaacaatttcaatctttaattgaatagcaatacttgttgtcctagcttaaactccgtcttgagcaacttcttatcatgataagctttcactttctccttgtataatcttgaagacttgtaagcattcatcctcatttcctctagctctaagagttgcaacttcctcttttcacctgataaggactcatcaaaatttaggaatttcagagcccaatacgctttgtgttccatttccacaagtaggtgacaagattttccataaaccatttggaatggcgatagtgttggttcaagt

SEQ ID NO: 79335 - DNA, 464 bp, Glycine max
  unsure (1)..(464): unsure at all n locations
ngatatgaganagcatggaagagttagtcttcctacttttgttgattgaccacagagtggtacctggagatatgtcccggtggtcaggtggggtgctattgcccaaaaccaagcttgactaatcccgacccaacccgggcatagtcagtcagtgagaacctgcgatgtacctaagctggcgagctcctggcagtcaaccaataaaagaacaaagtccacgaagctagaaggcttgtgtggcggctggccagctatgtatcttgggtggtatctggaaattagcctatggtaatcaattaccattcgtgggtaatcgattacagggcttaaaaatggagacaagatgttaaatggcctctggtaatcgattaccaagggtgtgtaatcgattacacagggtgatagggcactggtaatcgattactagttgggtgtaatcgattacacagtggtacctgcttctg

SEQ ID NO: 79336 - DNA, 310 bp, Glycine max
agcttactgtcataatagcctcctgtcttggtttatcttatctcggactaattctgaaggcagctaatgatgtttctcgcctatatacctttcacgatttcaaattggctttaagcttttgaacaaatcatatctggttataccgtactgtcggctctaacctataattttgtatttggggtgtatacgatagctgctatgagaatcaaactttgaggtcgtgaatactactcaaattatcctttgcgaatccatactaatccggaataattctgtacaatctccacctctttagtgatcctacttcatt

SEQ ID NO: 79337 - DNA, 462 bp, Glycine max
  unsure (1)..(462): unsure at all n locations
tctaatctaagacacccactatgcgaagggtgatctattggtttcatcacatctcatgatgagtttgaatgtcattatatatgcaatagctcctacaaactaagtgcataagtgacaaatgaaggcttatacaattctctgagaatatggtataaattaatacattaatattgatagctggacgatatattaaacttcatcagaagggttaccagagcattatgtacagaaacgntaaggtcttgctgattgtggacacttacatcatggaaggctatcacatctaaccagacatatgtaccactcataagagagacttgccgtgctgatgtgttacctccataaatgacaaacactattcgagttccttctcggcgagaaagagacttgttacgtgtgaatgattatgacctgcttggaagcttgcctgatgtaccactagctgatgcaggattatgaaat

SEQ ID NO: 79338 - DNA, 432 bp, Glycine max
  unsure (1)..(432): unsure at all n locations
agctcctctaaatntatattgcataacagcatctagacatagntatactcaaatatattatgtagctagccttaatgtgttgtgtaatatatattctgtgtctcctctggcagcttaaacgatgggagcggaaggagtgtaagccaaacagcctttctatcttgcacaaaatgcaggagatgcggtgcaagtcatatctggacgagaaaggggtaaagttggggagattactaaaatcttcaagcatgacagcagtgttatagtgaaagatttaaatttgaacacaaagcatgttaagagtagagaagagggtgaaccggngcaaattattaagggtgtcttcatttcccttgcttcactgttataattataaagtctttttttcactcttacatgctcttcaagaaatgaaagtgagctaaacaaacatca

SEQ ID NO: 79339 - DNA, 357 bp, Glycine max
  unsure (1)..(357): unsure at all n locations
tatcttcctgaccacattctatactagatgatgggcacctaacctttacccaaagggggtaaatcatagcatggatcctcctttaagtgaacaaagagaatgaacttgaaaccaancttactttctctctatcgatagatctaggaagataaatagacatttcttgtaaaaaaatcactacatcggagcattaacatagtcttaaatgattcaaaacctaacatctaattgccatcgatgtccatcatacgcaaagtaacacttccgtctatagcatataagacaatttttgaacttaacattaattgcatctatcaaattattgagggcccgattcttctatgactcacactaatg

SEQ ID NO: 79340 - DNA, 434 bp, Glycine max
  unsure (1)..(434): unsure at all n locations
acacataaactcagctgagaataatagaacagttgcttcgcaataaatcctttattttagtgctatcacccctattggaccaatgttactttactatccattttcaaatgatatttcaatcttcatttgccattgcgattctagttggnacaactactcattgactaaagctaccctcagcatcatgcttctgatcgtatacaactttgataacactttgactaaaaaaaacataactacatttccaacctttgaaaagctccggttcttatattgcttcgtctgaatatgaaaaatctatgtgtgaaaaacttctactgtgggcctattgtcacaactttatgctttaaatnttggcttgctttcaaaaccactccaagaaatcatattagctaagttcgataactaaacattcctacttagatggttacata

SEQ ID NO: 79341 - DNA, 455 bp, Glycine max
  unsure (1)..(455): unsure at all n locations
agtcacctgcggcatgcaagctngtacgcacatcgttcgcgtgtatgatatccactccacaaggttngaagtagaagagagcttcaaccctataacgcaatgtggcggacaaaagtgggcagtaaacttgaatgatcgtcattgtcaatgcggaaggtattctgcgcttcactatccatgttcacacattattgcagtttgtggttacgtgagcatgaactactaccaatatatagatgttgtttatacaaatgagtacatcttataagcttactccacacaatagtggcctcttgggaatgaagcggctattcctccttctaatgacgcatggacacttatccctgacccaactacaactcgtgcgaaaggtcgggcaaaatcaacaaggataagaaatgagatagattgggtcgaaccatctgagcaccgaacaaaatgcagtagatgtggag

SEQ ID NO: 79342 - DNA, 185 bp, Glycine max
  unsure (1)..(185): unsure at all n locations
ctaagcttacaagactaaatgatgacatacatttcaggaccgaagtaatgttgcatatctgtagatgatgaaaataggtntcactataaaatttatcaaactgaatgtacttgatcaatatttatttagaagatgtctttctttttcttcttaatgtggtagtttaatgtatgcttaaatatgat

SEQ ID NO: 79343 - DNA, 433 bp, Glycine max
ctgcagcatgcagcttgaaaactgaattagtaaactcactcttcctgttatgttcttttggaaatccttacaattactcaactgttgagacgccttatagagtaagacctgtgattatgctttgaaactctacgtgatggaaaggaacacccaaatatttttccatgtccgttggactttgatacccaatttattgacaatttgatctcctgcaatgtgaactatcaatacatataaagggaggataagattctggagaataagatctcatctgatgtgaactatcaatacgtatgaagcttttgaatgtgaacttatcttacctgtggtgatagtgatgtagcataagctcttaaactgtgtaagacattaaaggtaacatggttataaaatgctatctctatgacaatgaatccacacaagtattttatac

SEQ ID NO: 79344 - DNA, 439 bp, Glycine max
  unsure (1)..(439): unsure at all n locations
agcttatgcacatacttctttacgaacgttcacttgcacaagacattcttataactaagaaaaatgcacccatatacaatcaaggcaccttcgttacctagattatttgtatgtacttccaaggtgtatttgttacctacatcacacgcatttcctttgctaaatttacatacatgcatactcaaagcactttggctatcaaaaattgcatacgtgcacattctggtatttctaatacctgtacatacacaaacttcatgatgaatcttgactatctacacaataaggtgctacatntcatgctttattcaagtgtttttgctacctanagccgcatgcaaattcaagtatattttctttngccgattaaaattgtattcaaattaaaaggtatttttgtaaggtattttctttacatcacatgcaacatatatatatt

SEQ ID NO: 79345 - DNA, 462 bp, Glycine max
  unsure (1)..(462): unsure at all n locations
gtcttatcatagagatnggggccttggttatgaggtttattgtataagcctccttgatccttgttaaaattgttcttcaaatggaacttccacccttagccttgattctgagaaaaaaataccaccttggtgatagctctgatttcccttttgattgtagccttggttgcctccttgtttgtagctttgatgatattggcttgccatataattaagctccctattggcctcttcttgtcctatgcatagaccatctttatgggaaccaccacatagagtgcatcctctcacttgcatgttagaaggttgagtaagttgaagagagtgcaattgttgcacgagtttgttgagttgatctgtataagcctcgattttcttatctaggagcttgtttgtgcaacgatagcatcattggaagtaagctccaagagactntttagaagtcatgtaagctctatccct

SEQ ID NO: 79346 - DNA, 444 bp, Glycine max
  unsure (1)..(444): unsure at all n locations
agctngagaggtataatatgaatccttcccatctcagctagagtagacattttttcctaagagacggttaccaattttctattttccacattacttgtccaaataaaattgcaaatccacttatatatcatattcaaagtatatataggccaggcataaatatgaaagctatataatagcatactttgaacaatagaattgactacttgaacatgacgcacaaaagaaaggagagaacttttccaagatcccaattcaacctaaacaatagccacacctcttgcattctagtataaaaccttcatcaagcaagagttttaggtcccatcctcgaatggatattggaatcaaataagctttatctacttgctttttaatcttgtgaaacttctttggctgagacttagagaccaccacagtaaaatactcatcttccttaacaaa

SEQ ID NO: 79347 - DNA, 454 bp, Glycine max
  unsure (1)..(454): unsure at all n locations
tgggatctaaactntgcggtccttgagcggcattgaggtggtgacttgtgaaccctagacagggagtcgaagagtgagagcacaagagagttgagggaaaaatgaaatattaaaaatagtgaaaaatattttaagatggttttgtataaaccatcttaaaattgcaaaactgtcgtaaagctattgcatttatttacaaaaatgtcactagacacattttccactcctgaaaatcaattgatctacattntaaattntaaactaactagaaacccctttctatttttaagggagcactatcatcaattaattttatctaccacaaaccatttaaatatcagaaaatcatagagaatattattttatatttattaaattaaatatgaattaattaatttgattttttattttccctgtcagtattttgttagatcgacgaccatgtaagcaatga

SEQ ID NO: 79348 - DNA, 477 bp, Glycine max
ctataaaaactcaagactctactaatatacttatacaaattgacatctaaaatattgttatgaagttaattaaccattgcattgggtaaccagaggcatttgagccttacaacatttctatacatgaaataaacacgacctaactacttatattcaacacctcttatttcttggcttaatttttatgcggtgtgtaatgagcataataactaagtatgtacttgcgtctgcagatatgaataacattcacatgattgtatttaatgtctaaacaactttgcatgcatgccagccataacatacatctctttgcagattctagataaataaacctcttatgttacgccattgcacaggagttaaaggtacaataccgattttgttatctttgaagtaattacaatcgatgatataaatatctacatcgattatgattgtacctatgaattactgaaccagtgagcaatgaaatcatac

SEQ ID NO: 79349 - DNA, 418 bp, Glycine max
  unsure (1)..(418): unsure at all n locations
agcttggtccaaatcccttccatttaatctctttggctgctttngaattcgtttcacattctaagcaatcctaaacaattaaccatggtcatcctagaagctaaagctcattccaaatccctccaatttagtctcttttgctacttttgaattcgtttcactctctaaggaatcctaaacagtgtagatcaaataattnttttcctttcacaatcaattgcattgaaaagtgggagtatgacattacaaacacactagtagctgagtagctttcacattgaatcaaatgttagctataatcaatgggaaggcacataacaagagataagactctttctaaacaaattngaaaattgaaaataaaaatacctaagcctcgtttgtcagtaaaaagctccttcatggagttgagctttgt

SEQ ID NO: 79350 - DNA, 451 bp, Glycine max
  unsure (1)..(451): unsure at all n locations
ngacaagagttacctatcatatatatgcctatctccattaagatattgaacagattcatgcttctaaattttatcagtgacaaacaagtttagcaaaagaaagaggagcacttctttaacactttattaaattctgttattttgtgaattacacctaaatttcattacttactccatttagtggaactacatgcaatgctgcacttgataaataaaagaatgtgcttaaaagagtctcaacaggaagaacaaggatcctataatgtgatgcaatcctcccaagcagaaaacccatcactagagccatggctccaggaagattgtgttgaacaagtggcctcaataacttaagagggggggggggtgaattaagttntaaaaattntccgactaacaaagttttaatcttcttttaaatgatatgtgatagatttagaatgtagaagaagaa

SEQ ID NO: 79351 - DNA, 433 bp, Glycine max
  unsure (1)..(433): unsure at all n locations
agctngagctntgaattgagtatcatttgttggatcgagtggcctcagaataattatgaaggggggggttgaattaattattcctaaacctttactaattaaaaatttactcttctaaggcttttactatgttgttaagagaataaggagtagaagagaaacttaaccaaaagtaaaagcggaaattaaaatgcacagcggaaagtaaaagagtagggaagaaggagacaaacacacaagagtttttatactggttcggcaacaacccgtgcctacatccagtccccaagcaacctgcggtccttgagatttcttttcaaccttgtaaaaatccttttacaagcaaagatccacaagggatgtaccctcccttgttatctttgaacctaatggatgtaccctccactagaactgatccacaagagatgtaccc

SEQ ID NO: 79352 - DNA, 440 bp, Glycine max
tcagccttacaagatgagagtcttggctagaagaccagtagcaaagctatcctctaaactttacgggccttataagattctggagaggattggtcctgcagcatacaagttggagctccctgctcatgctaaaattcaccctgtatttcatgtatctttgctgaaaaagtcactcaagcctcttcagcaccctcaaccattgcctcctttactttctgaagatatggaactacaggttcagtcggctgaaattcttcaatggagagaggatgctttgggaaatttgaaagttttggttcaatgggaccaattaccagcttgtgagaactcttgggagtcagctattcagattttagaggtttttcctcagtttttccttgaggacaaggtggttcttttgggggagagtattgataagattaagagaatgtctaaacctc

SEQ ID NO: 79353 - DNA, 436 bp, Glycine max
  unsure (1)..(436): unsure at all n locations
agcttgtcatttgccactctntggttagaactaatatgcttcccccgcgtgacaactgcattcctttggacactatacgtggttgctacttcatttgggggtctatttggaggaaggatgggggatattttatcccaacggtttccaaactctgggagaatattgttgtcacaaataagctccagttcagcaattcctcttgctgcaattttgttgttgggattgccttatgatccatccacggccttcaagcacggtctgcttttatttatcatggggttaataagatcctgtaatgctccagccactaacaagtatgtatatccaacattgtacttgtttattttcttttctatttaaaacaccctacatttattggatttcgaaaacaacatacaacacatcgcatttgctctagataatctccttatttatg

SEQ ID NO: 79354 - DNA, 466 bp, Glycine max
tcaattcttgtaagtatggcattctggttgctaggttctacagatatataatgagtcttaggccttagcatgtatttttttttgtgcaatgtttaaaagtgtctgtttcttgtcctgcaaccagaacattaagtcaaaacaatctcagtgggactattcctgaatcacttgccagtcttccaatcttaatcaatgtgtatgtaaaataatggtttctataactttgctgtatttctttaagtatatttcattaatttagtatctgattgattattcaaacttctgttttgcagtctgctagattcaaataatctgagtggccaaatcccagagcagttattcaaggttcctaaatacaagtatggatggtaaaactgtaaaattagtatatgatgcatttaaagcaccaattaaacttgtctttctaaccctgattactaggacaatgtatctccatgaaacactt

SEQ ID NO: 79355 - DNA, 387 bp, Glycine max
agcttctccttccatggcttattctctagtgaatggcgtctcctctcacctcttctcatttatctgtcgctacaactccatggctaaaaatcaccattgaaggaccttattgaagctcaaatatccagcctccatagaaccttctcaagcaagcttccatcaactggtatcagagcacaaaagcttcaagtaagtgctccttaaacctccattaagtttcatttttaccttctcctccattgttggttcttcatttttctccatgtatctcatcacatgtcttgtgctgaatgttgttaacatgattttttagaatttccatcgattaaacttgctatagaagctagatttgattgtctatgggtccaatttcttgttcttgttctt

SEQ ID NO: 79356 - DNA, 194 bp, Glycine max
tcatctgctccacatgtgtaggcgtccctcattgactagctttattaagttcttccaccatccacgtgagtgttctaacctcatgtcttcatttggaagcattaatggccgtacgatacaccacattaatgatgtgtggtggctgaggttgaagactaacgttctctcgtgcatgtggaaggggtagttggata

SEQ ID NO: 79357 - DNA, 432 bp, Glycine max
  unsure (1)..(432): unsure at all n locations
agctntcttcctctagcttccncaggaagctactctgatgcaatcctaccccacagcgatattggatagaaaactccaagtagattgggccagatatgagccttagggtagatntcgagcccataggctaagtacgagcccacttatctttgtacatattagaataagggttcattaattttgggtcttatatttagggctccataatgtaggtagggtaccctagaaatataggattttttggcccttgtattttagggcacctagactagattttgtattaagggtagttttgtaattcacatgcacgaagtggatatatgatgtgtgtgtttggaaataaatataattgaattggtagaagcccaatccaattaaattntatagggggaggtgagcatnttgctactacaccccattgccacatcatat

SEQ ID NO: 79358 - DNA, 426 bp, Glycine max
agcttccatcaagtggtaatcagagcacaagagcttcaagtaggtgctccttaaacctccattaattttttttctttaccttctcttccattgttgtttcttcatttttctccatgtatctcctcacatgtcttgttctaaatgttgttaacatgattctttagagtttccaccgattaaacttgctatagaagttagatttgattttctatggttcaaatttcttgttcttgttcttgaaccatgaattgtgttgagtttaggttcctttgagttttgtcttgttattttttgtggctgaaacctaaaccataaaattcttacaaaaatattatagtagaagaaaacctcataaatctagagtgacttgttcacctattgtagtgttgtcatagaagtcatgtctagtcatgaaacttgtcacat

SEQ ID NO: 79359 - DNA, 425 bp, Glycine max
  unsure (1)..(425): unsure at all n locations
atacacaaaagttattcgtaatcaccgactaacaactcctccaaatttacagttgtgcttgtcctcaagcaaaaagagaacagctcacttgtcctcaagtgacaataacatgcagtgactatgtacaaaggtgtatgcaacaaaagctactgattgcatgataagagaatgaagcattatgtactcatcacttgtctttcacaaaatatgcagctattcaaagagaagaataaaatgtaagcatactattagatgaagttaatcataagatagatattaaggaaagtagcttacaccacagtctcacggctactgtttcactcaagcacaagtgtttaagctattcattaataacaactagcaagaggtccaatctttgcacttcatctcatgccatanagtcagagatgtattaacagaatcag

SEQ ID NO: 79360 - DNA, 468 bp, Glycine max
  unsure (1)..(468): unsure at all n locations
tgaaggtgcatacgccaccattatttcatagtaaaacactggtaatgtgtctactattattgtgataatctctctctctatcattggaggtgccacttgagctgccaggtctctccacctttggacgtattctttgaaagattcatgcccctttttgcacacgttctatagttgcatcctatctggagccatatgagaatcgtactgatactgcctaacaaaggcaaccattatgtccttccaagaatggactcgggaaggttccaagttagtgtaccaggtaacagctaccctagtaagactttcttggaagatatgtatcaacaattcctcatcttttgtgtatgcccccatcttccgacaatacatctttagatggttcttggggcaagtagtccccttatacttgtcaaagtctggcaccttgaacttgggaggggtgatgatattgggtactangaacaactc

SEQ ID NO: 79361 - DNA, 423 bp, Glycine max
  unsure (1)..(423): unsure at all n locations
gtacatgcattgtctatatctacttaacgaagattattggaaatgaagtgagttacctataattcaagaaatgttagtgaaccaatgtggagattgttgattgttggacgatcgacgatagagataaggtggacaacaacattggtcatcttgtctagtactcttgtcttctatataggtcatctaatcttttgtaatctaatggaatgtctagtcacgtagaagggagcgtccagtttggttgttcattaacataggttgtgttgtaattgtaactattttttatttttcttttgtaaccattttcggntagacagttatatgtagtctcctttataangagctttgtattatgggtttagagagcttgagagtgctttgaaccctttcattgtaaattctattatttgcaataaatttaac

SEQ ID NO: 79362 - DNA, 453 bp, Glycine max
  unsure (1)..(453): unsure at all n locations
atacccctcagccaaatagaatccatcttgngcctttttcccacaactctcataaatgggagagaaatgttcatctaaagcatacaagtccctaatattatcaaatcctaaaatttgagctcctagggagcaaaacaatgtgtgtctcctagagagggcatcagctaccacatttgtttttccctctttgtatttgataacatatggaaattgctctaggtactctacccattntgcatgcctcttgtttaacttgctntgccctctaatgtacttaagtgattgatgatcactatgaatgacaaaatccttggaaacaaggtaatgttcccaagtttggagggctcttattaaggcataaagctctntatcataggtggggtagttgagggtggcactatgaagtttttcactaaaataagcaatagggtgcccaccttgtaacaatacagc

SEQ ID NO: 79363 - DNA, 441 bp, Glycine max
agcttcttatccaaggcaattcttggtggagaagctccttctttcttggcttataccctagtggatggcgcctcccctctcctattctcctttgccttccgctgcatctccatggtgaaaaatcaccattgaaggaccacattgaagctcaaagatccatcctccatagaagctgcataagcaagcttccatcagagagacatgtgcatgatcaaattcgggttgttcgccctcaatatgtatgggtgcaaagatgtcggtgtcctcctcaagcaccggtacaacattgggtgctgcatagttgggaggcaagttgtatgatgggaaagaattattgctctgcacaacatggtgaccacctgtatcttccaatgcttctcctccctgacctacgatatccgatactagaggatttacttgaatgaggcccgatgggtgagt

SEQ ID NO: 79364 - DNA, 443 bp, Glycine max
  unsure (1)..(443): unsure at all n locations
tatagaatatataatanaagaacaatgacaatggaagagtctatacatgtttcctttgatgagtctaatgtcattcttccaaggaaggagtttttagatgatatttcagattccttagaagatacacatattcatggaaatgactctaaagaaaaagatgaaggaagcaatgaatattctcaagataatggagttagagcaaataatgaacttccaagagaatggaaagcctcaagagatcatcccctcgacaacattattggtgatatatcaaaaggggtaacaactagacattctcttaaagatttatgcaataatatggcttttgtatctacgattgaacctaanaatataaaagaagtcatagtagatgataactggataattgccatgcaagaagaactgaatcaattagaaagaaataatgtgtggaaactagtaga

SEQ ID NO: 79365 - DNA, 378 bp, Glycine max
agcttgaaagactaccagaataacatatgctatctgttatcttccctgagaggttgttggtggagaggtccaacacagtgaggttactatgcttccctagctcctcaggaatctcacctgttaatccgtttgaccatagctgaagaacctgaagcctatgcaaagatgcaacaccctttggaatcttcccagtgaacttgtttgagaaaaggtggagaatctccagcctctggagcttaaccacacgctcggaaatctcacccgaaagagagttatcacttagatcgagagaaatcatctttttgagctcgaagatagatcctggaattggaccacttagtttggtttggtagagaaagagatactgaagctcggtga

SEQ ID NO: 79366 - DNA, 475 bp, Glycine max
  unsure (1)..(475): unsure at all n locations
tactaagctggtgccaaacaaactaacaccaaagcttacagttcnctggtcatatctgagaactctttttgcagctctaagatgagactcattagcacaatttataaatcttgaaagaacacttacagcatacataatatctggcccttgttgttggtagatacatcaagcagccaaccaagcttctatattcggactcattcactttagtttgtgcattatccttgcacaatttccctttttgacacataggagtgctcatactcttacagntatccatgcagaacttctttagaatctcatctgcatacttatgttgacaaatgaatatatcattttgtctctgcttgatttctattccaaggaaataagacatttttccaagaccagtcatctcaaagactcgcatcatgtcttctttgaattggtgaataagctcaatgttgctggcagagactaagagatcattcaccat

SEQ ID NO: 79367 - DNA, 446 bp, Glycine max
  unsure (1)..(446): unsure at all n locations
agctngtggtggctgaagatgaggatactgctgctntgaatgaacaagtcgtttngaaggacactactaataaagagaatgatgaggtaaaagatgagaggagtcagtggatagaaaaacaaataattgtcggaaagaaagaaataaaagacaatgaaaaagaaatagagggggaaaaacacaaagaaaaagaagataaagaatattttgaaaaaaaataaagaagagaaaaaagttagagtgaaaaaacaagagaaaagagaaaagaaacagcttcagatgaaggagagcaagtgccataccctttggtaccttccaagaaatataaggaacgccacctagcgagattcctagacatttgaaggaaactgaagataacaatgccctttggagaagctctacaactgatgccactctactcannagttttaaaagacatgttgaca

SEQ ID NO: 79368 - DNA, 475 bp, Glycine max
  unsure (1)..(475): unsure at all n locations
actaagcttgagcggatgcttaatggaggaaaaganagagggagagaatgagagaggcgggagcacgaaattgaaggaagaacagggagagaagttgaactttgagttgtgtcgcacaagactctcattcatcaaagtgacaacaagtgttacacatgcttgtatttatagactatgtagcttccttgagaagcttgtttgagaaaacttccttgagaagctagagcttagctacacacacccctctcataactaagctcacctccttgaaaagcttgcttaagaagattcctaaagaagctagagcttagatacacatacctctctaataactaagctcacctccttgagatgagaagcgagaacttagctacacaccctctataatgggtaagctcacccccatgacaaaaaacatgaaaatacagaatataaagtccttactacaaagattactcacaatgccccgaaatac

SEQ ID NO: 79369 - DNA, 433 bp, Glycine max
  unsure (1)..(433): unsure at all n locations
agcttttccataaacacttgtaggagaagaatataaagataggaaattgaaataagcttatctgataaggtaaaattagcttatgcagaagttaactttttggagaagataaattatttggtgtttccaaaaagctgattttaacttgtgcataaactaattttagcttatggaaaaagtttattttctttttcatttttttcctctttaagtgcttatgacttatccaatcaaagggccttattgacaagattacatgttattgttagcttgtacaccggtaattgattttttccgtgtagtttgcattgcctgngctgctgctattaatctaatgctactgtgtctgcctttgtcttcaaattatattgttggatggagatatcanggttgttgacatggttctttatgataaacaggtcccgatggacta

SEQ ID NO: 79370 - DNA, 466 bp, Glycine max
  unsure (1)..(466): unsure at all n locations
tgaggagataactctactagngagaaagtatacttgatcattttctccttgtgctaaaaaactctttcattgattaggagaccaaaccctttagggtccttgattgttggttgaaataaaaagaatgtactaatatgttggagatggaatgggaaggaatgtagattcatgggtggggagcttntgtcattaaagaaaaaataaagtgtgtaaaaaaatgaaggagtagaataaaaaaaaaaagaggttaaaaaaatcgagggagcttaacttgcagaagaagaagagattctaccaaaggaggagattcttcaaaaaaaaaaaagttactagaggagtttttaagggtgtccatgcatagtgggtccttacttagacaaatatctaggtgtaaatgggtgaagaaaagggactttaactcaatattttcactctttggtgaaagtgaggagaaaaaaatacgttg

SEQ ID NO: 79371 - DNA, 417 bp, Glycine max
attctgttttagatattcgtgtattactacctggcaatgtgaaagtttgtattcaatggcaaaacctccctccaagtgaaaatagatgggaatctgtggctaaattacaagaggtttttccgacttatcaccttgaggacaaggtgagtcttttaggaaggggtattgatatgcataagcataagccacacatcaccaaggtgtacactcgcatacaacgagcaaaagaagcaataaccatggaccaccagcagcaaggcgcacaacacccaaggggtgcaaaccacccaatagttacaacccatccaaagggtgtaaaccacctaatagttacgattcacccaaagaatgcaaggtcagaagatgcgaatcaaggtgacatgacccttgggaacagtcacaatcaaccgttatgat

SEQ ID NO: 79372 - DNA, 443 bp, Glycine max
ggtctcatgagatagatgagtctctccaaactatacccctctgacgttgcaaacaagatggatcttccatgtctgcttaatattaatgactatccttctgatacgacaaatcaagctatcaactgacgaagagaagaaatatataaataaaaatataaaacaaaatcattcatattcatccataagaaatataaagccatgccaaacaccacatcccaatccatctctccattagaagaaggcatatatggtgatggtatcatgcatccacgtgcgagaattgttcatgaaagattgagatgttgtcaattcattcgaagtttgctctacacatgttgggaaaaaatgcaatcacgaaggacattagtgatagattcttgcgactcctgacaaagaggacacaagttcaaatatgttagaccctttctatatcttgattcatt

SEQ ID NO: 79373 - DNA, 441 bp, Glycine max
  unsure (1)..(441): unsure at all n locations
agctntntggatntgactattaacataaataatgtcatttaagagataacatcatttttaactataatacaactctatgatataagaaacacaattatctctttagaagtaatctcttcagattattgcacaatataccaaaaattgttatcaataacataataaattctgataagaaattataaataaatttaaatatgaaatattttatcccgtaataaaaaaactcgtctggcatatgcatatataactacgtaagtgtaagaaaacaattatttagtaatttccttgaagcacaaatcgtgtagatagttcatgataattcagatcaactaaaaaagaaaaagttcattataattcttaaaaatcagcatcactgccatatacaataaaaaatatgcaagggtggaatgtgagcaatcaatctttgaccagtcttcg

SEQ ID NO: 79374 - DNA, 466 bp, Glycine max
  unsure (1)..(466): unsure at all n locations
ntcatcanatatatgcatgtgttaataatacaattagtaaaccaatcacacaaaccagtcatataataaccaatcacatatgattggtttgtgttcactctatttagtttcaatgttttattctaaattgaaagctagtattgatttgctacattttatggactcatattaaatagttcaaagaagagacgagtgacagggagtatgtaacgcccttcttcacattgatgtatgttttgtttagattaaggtttggtgcaagtcgggactatatataaatgtgaattaaatattaatcaatctgaataatgtgtatgacttatgtaaatgaatatagcaaaatcaaatatataaatagaaaattacattagacgatgttaattaattctccttcatcatgatcatgacgattagcatgaacgtcgttagcttcttcttctccgacaatgttaggactgatttgtgt

SEQ ID NO: 79375 - DNA, 431 bp, Glycine max
  unsure (1)..(431): unsure at all n locations
agcttcttagtttcagatgatgcagatgattntatggctacttcatgcactcctctaatgactatagcatcatttctggcgctaaactgtttggagttggaagccatcttctcaattaaatttctgactttagcaggggtcatgtctccaagggctccaccactggcagcatctatcatatttctctccatgttactgagtccttcataaaaatattggagaagaagctgctcaaaaatctggtagtgaaggcaactgacacatagttttttaaatctctcccaatattcatataggctctctccactaagttgcataatgcctgaaatatcctttctgatggtcgtggtcctggaagcanggaaattntttctaagaatactctcttgaggtcatcccagctcgtgatggaccttggagcaaggtaatat

SEQ ID NO: 79376 - DNA, 468 bp, Glycine max
  unsure (1)..(468): unsure at all n locations
ngagccaacatttattatttagcatttatagttatctttagtttataaatatgatgagagttntttttttcatttcttttcaactggacttctttctctctttttcaaatttaatttattcactcaacttttagtgaaatatacccatcgccatctctcgtccccttggaatgaaattaagttcttaaatattaaataatatgttcaacaattgaagggacgcatttcggaagaggaaaggttaccactctgggggttgtgtagcctccaattttacttttattcctctcctcaacttttttactaacaaaatattatgaggacaataatttataatttataaaatacaataacatggaggattcaaacaaagattagtttctgtgatagttgaaacttaccagtcaagctttgtagagattgttccagctcccaacaagccataacagcttccatagcatgaacacg

SEQ ID NO: 79377 - DNA, 379 bp, Glycine max
gcaagcttctagcaaaggtaagacttgacacccaatctcctgatgttcagagaggcagaaagtcctatattatgcactcaaattggtctcaaactgaacttccccattggataggtctgtccataatttcaaccttcaaaatacaaaaatgattgctaatagaccgcacaaaagaaaacccaccactaatgtttggatgcctttttattctaaaagaaagttactagtaaaacacggtataaaatttccaatccaaactaaaagctacataaaattgcttcaacttgaaaccaattctagactcgggatcaattcttcatcacgaaataaaaaaaaacgtgaacatttacctaaaatcacgttagttgatgatatttta

SEQ ID NO: 79378 - DNA, 455 bp, Glycine max
  unsure (1)..(455): unsure at all n locations
tgtacctgngcactggcttgagttgatntctgttatatagttaaatggctgctccccccatcctaaacaatacattggcaataagcttggacttggtattacctctgtagccatttggggctacagcttccatgctaagaactaaagccagtgaaatattgtgaactctcggcagatctttggccaggcttattggcagcaatctggcgctgcaacccattccactcaggttcacactctttacgttgctccggaatccaaacttgctaatgatcattgatgtaatggatggtgtaggacagaatatgctacagtttgacacaaggatgtcaaagctcttggatacacttgtgtttcaaaaagaggtctntgacaattctgaatagaaacgattcaccttctgcttgcgcgcgcctcatggaatcgtccggngggagctcatgaaccaatgctgg

SEQ ID NO: 79379 - DNA, 444 bp, Glycine max
  unsure (1)..(444): unsure at all n locations
ctgcggcatgcaagcttgacgaggaagccatcttgcggagctttggatgagattntgagtgattgtgaggtttctagaggtggaggagacatccccactacttgtacttcttcagtctttcattttctcttttcgntgttgtaaaagaagcttccctgctatggagagctaaatcctcagttggttcttcctatggggtacttgatgtaaatactttcaaatttatctaatgatgttttatgtgttcactgtgctattagtacttcattctagtgttcctttgccttgatcacacaactacattcttagttagggtcactcaacattgggaaatggtttgatccttataacttgattggacggggctagcttatcatattttcacgagacatcanggtacgataacttagtttttggtatgttatgccttaatgcgggtctggg

SEQ ID NO: 79380 - DNA, 387 bp, Glycine max
gctgcccctagctgcaggcagctggttgcttctcataacaccacctttggagaattttagaagcccagtggcctggtgcttttgcccccatttttactaagtacacccccatgccttttttgggattctttttccgtaacgttacgaaactttacgaatttttaacgatgcttatttttttccgaatgttatgaaaccttcggactcgtaatcaacccctttggtttcggatgtacggaatttacggattgcgcactacacttctttaatttcggctgtacaaacttacgaatgctaatgaggggccagacctcaagtggcaacgaggtcgatccaacacgaggtcccggacaataggatgaagtgccttgtcttgcttattgaata

SEQ ID NO: 79381 - DNA, 413 bp, Glycine max
agttgtagagctatgagtgtcaatgattaacactttaacttgctgaattagtggaacttggtgacttctcactaactgtaaatagtattggtggttgagacaaaccaatataaattcatgtgtcgcatcatttcttatctaccctttttgtgtattaaactaactaaaggtttgaatttgttttttgttattgaaaaacttttgttttatacacagcctaaggctatctgttgaactcatctatgaaaatctgatatatgtatttgccttacttaccatttgacgatatcattattgttttagaaaaaactttaaatatttaagatcatattcaatccatcttcttagatattaccttacaccccaaataacttgattatcccctctcttctctctgtctctctatatcaatc

SEQ ID NO: 79382 - DNA, 462 bp, Glycine max
  unsure (1)..(462): unsure at all n locations
tatttgattgtagcctttcccatcattatatcctttcatcgaggccctctaaattcaattnttctagttccctttccatccttgatctttcctggaacagcttcatgtcatcaatgatactcaagtggctgtccaacgtcacttccaaccttgttgagcttgaccttagttataacctcttggagggttccacatcaaaccattttggtcgtgtaatgaattctctngagcacctcgacctctcaaataatagattcaagggtgaggttttcacgtccttcatgaatgtatgcaccttacgttctttatccatgccagaaaaccattttgagtgaagaccttccgtcaatccaacatattttgtctagtggttgtgttagacactcgttacaagaattggatntgacatataatcaaatcaccggcttaccattaagtggaaacatacctgaagacatcggc

SEQ ID NO: 79383 - DNA, 370 bp, Glycine max
  unsure (1)..(370): unsure at all n locations
ctaagctcttcaactgcacaaggctcttaatattttgaagaagattcctgggggaccttcactcgacgaagacacttgacaaaacctatcttctcattcttggacaaaatatggcaggctgggggcaagtaaaatttcttcccatcaaaccttggatgcaactgtgatcgtatacccatatcagctagatcttgacgggtattcaagccatccttcgtcttgccttgaatgttaaggagcgtcccaatcacactatcacaaacatttttctccacacgcataacatcaatacaatgtctaacgtcaagatcacaccagtacggaagatcaaagaanatggaccagttcttccatatgcaactcttgactt

SEQ ID NO: 79384 - DNA, 460 bp, Glycine max
  unsure (1)..(460): unsure at all n locations
gctacatgaagttacctcgggtaaaacgcttcccagccttcgttaacccgtggatcttctcgaaatatgttctgcagcttcacacgaatattttccatgatttgacccgtgggatctttgagatgatgtctagagtatgctcgaagcttccattcccgagagcatttcttatttaagcatttcagcctttgctttcatgtagcttatgagaaacgtcatttcttctcctttctttcttccaaagccatttctaacgtcccaagcactttctccatcacccgcagccaccattagccaccacaaaccatcattgttctccattgaaaccccacaccgagaggaacccttcaaccgaagcggaatcttccaacttggcttgcggtttcggtagagagcgaaacctaatctgacctttcgttntctttcgaggtaacctgtagaagcaaagcttcatggtgaa

SEQ ID NO: 79385 - DNA, 449 bp, Glycine max
  unsure (1)..(449): unsure at all n locations
ctgcaagcttcaaacccanatattgaaacagatccatgagacactcatctntgatgctngatcttcatctagccttctcttgccctacaaagaggaaaaaatatacatcctttcattgtgagagcaagagagagaacctaaactcccccccaaaaaaagactgaaatgtttgaacagcaaaagtagctggccatatgcacccaacccaacactttcatttgacacaaaccttccttacccatccagaaagggtaaatagaaaaaagacaagacaacattttttatctagtaaaaaaaagtttacaccctatttgtgtgcaacagaagaaaaaaaaacagacaaggaagtgaagccaatattgcactatcgccttgattagcaatgaaagtactatgccagactttcataggttagcanaatttcaatttcagaatgtataatccattac

SEQ ID NO: 79386 - DNA, 474 bp, Glycine max
  unsure (1)..(474): unsure at all n locations
actaagcttgacataattagagatctanctntgaattgttatntaagagttaacatcggcaattcataatattattnttgtgataatatattgaaattatattcaggaaattttttaattaattgataataaaacttagactaataagtatattaaaaataaattatatactaacatacgacggcacanacatctttacataaagttgcttcttttatctntatttaannattgttatttaattataatntattgatatttattcccaaatttatttttaaaactcaaaaactttgcggattttgttttatttatgtattattccgtctacttcatcgtattattttacttgaggataagaaaaagtcactacaaattatgattataaaaatgtagtagttaaagaatagagcgttacagcaaattacattaataaccttgagattntttcgaattatatatatcatacttctc

SEQ ID NO: 79387 - DNA, 445 bp, Glycine max
  unsure (1)..(445): unsure at all n locations
agcttcatgcttaagtatgtatggcaaaacttcattactgttgtttaacacatacaagtgagcttgtaacaaatcttctatacttggagtgatcacatgcaatcctctcgaacccttaccacccactttgtcatcatgccgagactcaggaaggccaacaggtttagccttctcaacgtattctaaacaaaattcaatggcttcttatgcaacatacctctcaacaatagatgcacctggacgatataaattctttgtatacccttntaagatcttcatgtatcgctcaaccgggtacatccactgcaaataaacaggaccacaacatttgatttctctgacgagatgcataatcaagtgaatcatgatgtcaaagaagaatgcaggggaaaaatacatctncaactggcacagtataattgcagcttcattttccaactcatca

SEQ ID NO: 79388 - DNA, 454 bp, Glycine max
  unsure (1)..(454): unsure at all n locations
tactaagctggtgatttagcgttaggatgagatgggaattgaaaggaagatgcatagcttacaaacaaacaaatctttaattatataagaggtaaaaatcaagaatantttttagttgcttaagagggacaaatacagcaaactagaagcaacaagttacacatcacatacctttttctgacttgatcccggaggagtgcaaagcaatgtcngtgatgccggtgtcngaagagtggaggtggcatccatagttgatggttggagttagaatgttggaattaaaattggaaagaacccaagtgcaagtagaagaagagtctcaaaagtcaaaactcattaataaataaagcatcatcatttgatgatcattgcatttgatggcctatatattgtgataactcatactcattaattactagatcattttcattttggatctgatagtagagatagc

SEQ ID NO: 79389 - DNA, 436 bp, Glycine max
  unsure (1)..(436): unsure at all n locations
ttaagtcacctgcggcatgcaagctnggaggtgatggngacccggtgctgagatgaacgatgataagggctacgtgggggtacgtgagctcagttgaaggtgggcaactggggatggtgggttcatgtttgatttgtggatgtgggagagttgatttgcaccatcgcccgatcgccacctagtaccacatatgacgggtaccccataatcctacaagcttgaagtgagaaagcatggaagagtcagtcttcctacttttgtttgttgaccacagagtggtacctagagatatgtcgcggggatcaggagaccttggggacgtcaagtggggtgctattacccaaaaccaagcttgaccaatcccgacccaacccgggcatagtcagtcagtgagaacctgtgatgtacctaaacaggcgagctcctggcagtcaac

SEQ ID NO: 79390 - DNA, 469 bp, Glycine max
  unsure (1)..(469): unsure at all n locations
atgtactagtagaggatacaatnntggctactaagttttgtacttttcttaagtttctatagagtggtcctctaatctggcagatgcctttatgtaattagaaagggaatgtactggctgagacctcttccaaaaggtgcagcacatatgtacttaagtcaggggttgtagctggtacttaattcatcttgtgtaccagctatgttcaaaatatatttgtactcacagtacctctggtactctttcatctatctaatacatatctatttttgctgagcaaaaaaaaattatctttgctgataaaaaaaaacaaaaataagtacactgcccttaaaataccaacattatactcactactgttcagcttgccataatttatataaaaaacaatataatcctcatacaaatacaatcatgcaagcatatttcaaaacttaaaatangaataaacaactctgaacaaattaac

SEQ ID NO: 79391 - DNA, 427 bp, Glycine max
agcttgctgtgagatcgccggtttggcggtcacctccacatagttgtgagggggagatttgttgggttttttgggctctcttcctatgtggagtaaaggcccaaatgagaaggcccatatgtctcacttatttaagtggagagaggtcagattagagagtgaaatttagtgagaggaactcatttgagagggaaaaatagttacaaatcattgagagagaaagaaggagagggaaaatcattgtgattttcgcatacccactagataatgtttttttagattgcaactgtagattcgttcaccattggatcgggctgatttttggacagcaggttctacgcacgtgataattcaaattgtttggttggatcggcgaaaagatactcgggagagagagagagataagtgtttcaaattatctactcta

SEQ ID NO: 79392 - DNA, 462 bp, Glycine max
  unsure (1)..(462): unsure at all n locations
ntagctntgtccncaaagcttcatgtagacttgtccaanatcgcgaagtgaacctcggatccctgtcagatacaatactagaaggaattccatgcaaccttactacttccttgatgtacaactccacgagtttctccattctatacttcatattcactgggataaaatgagcggatttggtgagtcgatctactatgacccacacagcatcatgtccacgactagtcttgggtaaactagatacaaaatccatagatatgctctcccatttccattccggaatctccaatggcttcaattctcccgatggtcgttggtgctcaaccttagccttttgacatgtcaaacatcttgctacatattcaactacatctttcttcatgccatgccaccaaaaacttctcttcaaatcttggtacatcttagtcattcctggatggaaactaagacgactcttatgcg

SEQ ID NO: 79393 - DNA, 439 bp, Glycine max
  unsure (1)..(439): unsure at all n locations
catgcaagctntcattntattatattgaaaacaaacctgaacagcagatatactaatggctccatccaaaactccaggacaaattcctagaccctgaaaccaaatgacaaagtgacagataaacagtaagctaaggtgcagagcatggatgtcatttttattttgtcaataataactcattcattacacacaaacatcatgaccaaaacacacacagaagagtattataagtttataacataaattagaacacaataacattgagcaggaacagcaattgcaacagcaataatactgattaagcagaaataaggtgaatagtattgatatacctgacccatgtcaccaagtaaaaggtcaccctcaacctctcgctccaccgcaacatcttatacatttaacanaaataaatagaatttagcacacatatataaaaatt

SEQ ID NO: 79394 - DNA, 463 bp, Glycine max
  unsure (1)..(463): unsure at all n locations
tgctgattacattcntcccctttctcaagcaaattttaattcttcttgacatcatcaaaatcttcatgatttacacattntccttccactatgatgttttcctgatgaatatatttatgcttccttgttaacatatctttcaaaaatttagagtagagtgacatctgcagcaaagcttctccgaagggcatggttattttcagtttcctaaaaatgtctaaaaatctcgccagatgacgatctttttccttcttggaaggtaccacaggatatggtacttccatagctttttcacttctactcttctttgcaatcttattatttttttcttctttttcttctttttcatttttttcattttctatttctttttctacttctttttctttttcttggtccttcaattctttattcttgaccattatttgttcctctttttatttattactttcacctctcacct

SEQ ID NO: 79395 - DNA, 457 bp, Glycine max
  unsure (1)..(457): unsure at all n locations
ctctgagtcacctgcggcatgcaagctngataacacgcagagactaacgtcgtcttctgcgaccttcgtcaatcgcggccgtcaagcccgttgacacgtggagacttacgttatcttccgccctcacaagatctgtcatactgattattgagtcacgctgacgggcggaaatacccgagtggttattcgtataaactttttgctgtctgtaagacgaaaagcctgataacacgcagagactaacgtcgtcttctgcgaccttcgtgaatcgcggccgacaagcccgttgacacgtggagatttacgtcatcttccgcgctcacaagatctgtcatactgacttgagagtcacgctgacgggcggaaatacccgagtggttatccgtataaactatttgcattctgaaagacgaaaagcttgataacacgcagagactaacgtcgtcttctgtgacct

SEQ ID NO: 79396 - DNA, 462 bp, Glycine max
  unsure (1)..(462): unsure at all n locations
ntacgtcttacataatgcanaaagtttatacggataaccactctggtatttccgctcgtcagcgtgactcagaagtcagtatgacagatcttgtgagcgcggaagatgacgtaaatctccacgtgtcaacgggcttgtcggccgcgattgacgaaagtcgcagaagacgacgttagtctctgcgtgttatcaagcttttcgtcttacagaatgcaaaaagtttatacggataaccactcgggtattttcgcccgtcagcgtgactcacaagtcagtatgacagatcttgtgagcaccgaagatgacgtatatctccgcgtgtcaacgggcatgttggccgcgattgacgaatggcgcataagacgacgttagtctctacgtgctatcaagcttttcgtcttacagacagcacanagtttatacggataaccactcgggtattttcgcccgtctgcgtgactc

SEQ ID NO: 79397 - DNA, 437 bp, Glycine max
  unsure (1)..(437): unsure at all n locations
agctnggactcaaggagaaacttanaatggctctagagtagagtaaaaaaatatataaaaaaaagactcaacaaacctctagctntggcccttgtttttcacactaattttcaattgaaatttaggaactaagattggtataagataggaaccaattatagaataaatttggagccaaaacaacaagcacacttccctttcacctttttctttttctggatactaatttttcagccttgtgtgatttttcttatttttttccttttatccaaatcacttgtttctttttntataacttttttccagatgtctaanaaattcagtaaaaatttcagctcaaaattcgaagtaaccaattctcagtaattnttacaactttgtatgtccaagctgccagcactagcgatttttttaagcatggtatattgattgcattg

SEQ ID NO: 79398 - DNA, 467 bp, Glycine max
  unsure (1)..(467): unsure at all n locations
tctgcatgtctagatagttctagagagagaaaggtccatgtttcagagagnttgatagatattgttgtgtgaagatctgtagagaccacagattgaaaaggaagccatcctgagagcttgagatgagtttgtgagtgattgtgaggtcttagaggtggaggagacatccccactacttgtatttctgcaatcgntcatctttctcttctctttgttgtaaaggaagcttcccagttatggaaagctaaattctctgttggatcttccttgtaggtacttgatgtaaatatctttttatctatctaatgatgttttgtgtgttctctgtgctatcagtatttcattctagtatgcttttaccttgatcacatagatgcatgctttgttagggtcattcaacagtggaaactggtctgattcttagaacttgataggacagggctagtttgtcgtactatcacgaggga

SEQ ID NO: 79399 - DNA, 442 bp, Glycine max
  unsure (1)..(442): unsure at all n locations
tgcaagctntgccaatccanaatcagatattctagggttgagatctttatccagcaacacattattggccttgatgtccctatgaacaatcttcagtttggactcttcatgaaggtaagccaaacctttagcgataccaacacaaatcctatgccttgtttgccaatccaatctcaattgacatttctcagattcatcatttttggcttatatggaaattaaacaacatataaatgtaagttacatgaataagatagggttcattattacagaaacataaatgagacttgaaagtagagaaaaacaattaccaaataaagcatgagcaagactatttgtttccatgtattcataaatcagtagcaattgatcctcttccatacaacagccgtagagcttaactaaacaagggtgttgcaaagcagaaatcatgcctatctca

SEQ ID NO: 79400 - DNA, 464 bp, Glycine max
  unsure (1)..(464): unsure at all n locations
taattatctntgaatcactaggccggatatttccttcccagtatagtttgttagtcaattcatgaggttcctgactaatactcattgggaagcatttatccacataaagtacttgaagaaagctctatgaaaggggattgcgtatcaagatcatgggcacatataggaggaagcattctctgatgcggatcagatttggtctcatatggaccgcanatctaccatatgagctactgtgtatttntgggaggtaatttaatctcttggaaaagtaagaagcaagatgtgatgaccaaatctagtgtagtggcagaatacagggctatggcccaaatgacttgtgagttgatatgggtgaaacatattttggagaagataggatttgctaatacctatcctatgacattgtagtgtgacaatgaagctgccacacatatcgaatcaaatccaatctatcatgaaag

SEQ ID NO: 79401 - DNA, 434 bp, Glycine max
  unsure (1)..(434): unsure at all n locations
agctngccacccagctcgcccaggcgagcatggttgcttcctccaaaagcaacagccttttggaggaatcttctggagggcccaagtgggcctggttgctatttgcacccccatttttactaagtacaccccctgccttcttttgggtgattctttnttcgtaaagttacggaaacttgcgaatttcgtaacgatacttgttttctttccgtaatgttacggaaccttgcggattatataatcatcccctttttgacttacggaatgttacggaacctcactaattgtgcaacgatgcttccatttgatttccggtgtgtcacggaaccttacggattgtgcatcaatattttcttttgttttccagcacgtcccggaatttcacanattgcctaatgatgggtgccaagcactttacaaggaccaaacaaaag

SEQ ID NO: 79402 - DNA, 454 bp, Glycine max
  unsure (1)..(454): unsure at all n locations
ctttaagaaaaggttntcgtcaaatcaaggtcaagtatggaagtaaccaacttgccaaagttggggcagaagatggatcgagtttacatggcttctttggctactggcaacacatgattgagctaaataatttacaaaacaaaactagggactattgatatccatgttttattctatgtgcaagagaaaatgaaggctgacatgaaggtcatgaaagagcaaatgaccacaatgatggaagccatgatgagtatgagaaaattgatggaggttagcacggctacagtcgttgtcgcaagtaccgccactgaggtggacccgactcacccatttggcctcaatcaagtaaatcatccagtctcgaatatggtaggttagggagacgaagcattgtgaagtatgggtggcccccattttgtgcangtccaaagcaagaattccttcccaccatatg

SEQ ID NO: 79403 - DNA, 426 bp, Glycine max
  unsure (1)..(426): unsure at all n locations
agcttcttagtctcggctgataaagatgaattctgtctacttcatgcactcctctaatgacaatagcatcacttctggcactaaattactgggagtttgaagccatcttctcaattaaacttctggcttcagcaagggtcatgtctccaaaggctccaccactagcagcatctatcatacttctctccatgttactgagtccttcataaaaatattggaggagaagctgctcaaaaatctagtggtgagggcaactggcacatagtttcttaaatctcccccagtattcatataagctctttctactgagttgcctaatgcctgaaatatactttctgatggtcgtggtcctggaagcanggaaaagtttttctaagaatactctcttgaggtcatcccaactcgtgatggaccgtggagcaaggt

SEQ ID NO: 79404 - DNA, 409 bp, Glycine max
  unsure (1)..(409): unsure at all n locations
agctttggttcanagatgcttttgaagatgtgttttattanaacactctatccaaaatggggcatggtcacttgatgatttcctgtgagtctatagaaatctctgagttttgtccatccagctagtatagttgagttcactagatcttggttgtatgtaacggagtgcatgttgccattactgtctaatagatgccaagtatgctctagttaatccttccatcttacaacaaagaacctactcacttcaccataagactacatttaatgtaaactaatataagaaatactgtgttatatcatgtcagtntatttgagaatcgtcttgaaattcctaacataatccttaatatgaacagtgttgaacatttcctctggttttctggttatcttcatcattatcttagcca

SEQ ID NO: 79405 - DNA, 443 bp, Glycine max
agcttccttgtgaggcttgctccttcaaggattcctgtattcaacagatgaaacaaatgtggtttactcatccaacaattattataaaaaaatgaacactaacaaatgagagtgacttataatcctatttgcaatttcctttgctatcttagatgtcatttgactagattttttcgtgctggctatcttacacttcacgtgtcatctaatgggagatggaggatcaacgattgtgccagtgctccttgattgggttgcttcctccaattgtgtttattcataacccccatgagacaacatgcgaggggcagggttttgtttctgaatggcctatgccttctttcgaacctgctctaacaattacacattagcctaacttaataacttagacaataatcgaaagtataaagttttaaacaatgaaaataacaaagctaccaccc

SEQ ID NO: 79406 - DNA, 424 bp, Glycine max
  unsure (1)..(424): unsure at all n locations
agctntctaagttttctagtttccaaacgttgctctttcacaaaaaacaaaagtgtgctatatctttttattctcttctccctttgccaaaaagaatttgccaaggactaaccgcctgaattctttttgtgtgtatcttctcccctttccaaaaagaacaaaagactaaccgcctgaattcttttgtgtctcccttctcccttttcaaagaattcaaaatgacacagtctgagaattcttttgattcttccctttcccttaaacaaaagatatcaaaggactaaccgcctgagatatcttttgtttccccttgacaaagttttaaaggactaactgcctgaaaactttgtcttaacacattggagggtacatcctttgtggtacaagtagagggtacatctacttgggttgttgtgactgagaa

SEQ ID NO: 79407 - DNA, 99 bp, Glycine max
tttccaccttgtgcttgctgctagatttaaatggcttttgagaaacccattacgaaagctaccttgtgtgggttatgcatactctatagagttttttgt

SEQ ID NO: 79408 - DNA, 442 bp, Glycine max
  unsure (1)..(442): unsure at all n locations
agctagatgtggagtntctggttgagaatgatgtgattgtgcatgaattanggagtgataaggaagtggcaactcttgttaatggtctatgcaaacatgttgtgacaaactcaacgtcttactatgaaacaataaataagctcaacgagcattacgtgagcaattggaaccacactgtggctgcattgaggttggtgtacttcaaagacctttggagggcaagttccactgtggtggggattgctgtgctcgttttcgctgtgttccaattcctacgtctagtgggtgttgtcttctactctcctagaatgtccaaaatgtaattactaaactcagtttggattattatgttaagaagttaatttaacaatgaagtgactcatgtaaatttaaatacttactttaactttaaacaaacgatgtagaaaagtagtgtgggagt

SEQ ID NO: 79409 - DNA, 416 bp, Glycine max
  unsure (1)..(416): unsure at all n locations
agcttangctaaattatgctaaactttcatattctgcttgagctgagtctagtcttacacgagggatttgcggacgaaattcactttaaattagtctaaacctaagagggccgtctaaattgggcctagtccaacaagagggatttgaggacgaggcttggattgattctgtctgacgatggatcgaggtttagtaatttaggttacaacataaaacacaagaacatgattgataaaagaaatatatttatatgcatcaacttgtttgttagaaagacccaacatttctacctactactgtcacttttacttacctttcatcttatagttttagcataaaggtttagtttaaattctgtttgaaattatcaatcatacatgttatctcaacaattcttcatttctgaacttaactc

SEQ ID NO: 79410 - DNA, 313 bp, Glycine max
  unsure (1)..(313): unsure at all n locations
agcttgtgcccctactcgcacacgcgattattgttgtttncatgcgaagcatcatggtcttggacgaatctactgtaaggcccaagtgggccttctcgctattgacagcgccctttgggctctgtgcaccccctggctcttgttagaagagacatttttccaaagtatcgggtacttacaaagcttccatctaatcctgctcttttgccgcaatgtatatcaaccttgcggacctaatctgcatgcgctcgttgcatatcgagtgctacagttcgtaacaaacatggcatcgatgcgcatatgccatttacag

SEQ ID NO: 79411 - DNA, 442 bp, Glycine max
agcttacacttcttcactctcctatattatttcagcctctttcccactcagatcttttagctttgggagccaagttattccttgtgttctaaacttcaaccatttgtgatagccaccaatgacgccattgctacttcccctaagctctttatcttttctttccactctattccacgctttatggattttctgaagtatctttgcattcgattcattaaaacctcgcgcgatgaaaggcgcgattatttcctccgacggcgcacctctcaaagggtagcctaattgtcttatggccaacacaggattataattaatacaacccctcgtccctatcaaggggatatttgggaatccttcagatgagtataacactcctgcccctcattctttccatcgtgggaaccaactaatggacgctcctgtcatgcctgccaagagttct

SEQ ID NO: 79412 - DNA, 437 bp, Glycine max
agcttgcttgtggcgcttctattgatgttgtatctttgagcttcaatgaggtcctttaagggtgattttccaccatggagatgctacggaagacaaatgagaagaggtgagaggaggcgctatccactatggaataagccatggaagaaagagcttcaccaccaacatgagccttggataagaagcttgaaaggatgcttcaatgcccgaaaagaaagagggagagaaagagagaggggggagcatgacattgaacgaataaaagagggagagaagtggaactctgaagtatgtctcacaagactctcattcatcaaagttacaacaagtgttacacatgcttctatttatagactatgtagcttccttgagaagctctcttgataaaacttccttgagaagcttctttgagaaaacttacttgaaaagctagagct

SEQ ID NO: 79413 - DNA, 437 bp, Glycine max
  unsure (1)..(437): unsure at all n locations
agcttgaggacatgggctaatcccgaaagaatttatataacaaagactacccttgggtgcgaaaggaaccctangaagtctgcatgagtgactaacatcagatgtaccctactatcgcaattgtctttgggcatcttccacaagctactagtcaaataagttttcttctcaaatatgcaggtgaaaaccttagggactntatctttntttgttttattttttttaacaatttcaagcgtgtgcgggttctattccagaatccaaactcaagcaaaattagtcattcattgattcacatgggctttattgggcttgtaacgtagtcagggggtaagagggctatgaatgaaaggatcagagaggcttaaagagtgtttaagggtgatattgngtaagaaccttgagagtcttacttgtacttntattcatttcaactt

SEQ ID NO: 79414 - DNA, 447 bp, Glycine max
  unsure (1)..(447): unsure at all n locations
agcttctatagaaggttcgctcctaatttctctacaattgcatcacctctcaatgagctggtgaagaagaatgtggcatttacctggggtgaaaaacaagagcaagcctttgctttgctcaaagaaaagtttactaaggcacctgttctagctcttcctgacttttctaaaacttttgagctagaatgtgatgcctctggagtgggagttggagctgtattgttacaaggtgggcaccctattgcttattttagtgaaaaacttcatagtgccaccctcaactaccccacctatgataaagagctttatgccttaataagagccctctaaacttgggaacattaccttatttccaaggaattngtcattcatagtgatcattaatcacttaagtacattagagggcaaagcaagttaaacaagaggcatgcaaaatgggtagagtac

SEQ ID NO: 79415 - DNA, 404 bp, Glycine max
agctagcggagaaaaaggactcctattagattacttatcttcttaggaaggagaatcacaacctatgagatcattgattactgcggatgattcaagggtaaagtattgatccttgctggtttcaaaagaaatagtggttccctggctgctgctattatcatggatttcatggcatgaattgctttgtagtatttggtaatgagtgtaaggatcaatatcttgtgcaggctggtggtataaatggataccagctgaagttgggtgcttctgagaagtttgcatctaaaaagaaattatctacttagtggagaaaagttatcagaacaatgagtcggccaactttgtaattgtattcctagcagctcctggtcaccctttcatcaaatgcataaagctctaccata

SEQ ID NO: 79416 - DNA, 405 bp, Glycine max
  unsure (1)..(405): unsure at all n locations
agctntgaaccttngatttatttgatctaattcataatcatacttgtaactaattataatatgcttaacactttatacatgtgttaactctaattaaaaaacggaaattaattatgcatttagcgtggttgtaatatttaactaaattggcaatgcattcttttagatcatatcaaaaacctctttatatacaatatttttttgttactgttgattattggttgtcgcatattaacacttttgaaccaaattttctcttgactcgtgaaacatcaatatataattgattataagtaaagattgatcttggaagaaataaatctacaattgatcttaactcttatttatagtcacagngaagcacacaaatattgaaaaatgacgtctttggaactgaagttggtc

SEQ ID NO: 79417 - DNA, 434 bp, Glycine max
  unsure (1)..(434): unsure at all n locations
agctntagtagacactggttgttcctttacttccatatgcaaaagtgttgtatctcaacataattgctttagaagtaatataataaccaagactagaactatgtcaggagacataataatgaatgatacagaaactgaaaaattcactatacaattatctacaaattgtgacatttttggcaaaaagatttttataaacaaggctgacatagtagatttgcaacctgctaaagaacaaatgatcctaggacttgattttattaaacatgataatatattagttactattacaaaagattatttattaatctctacaaactcacaaatgtcaaaaataatagatgaactcacataagagatacgagcaaagtgtggtgatacccctaccaaccctacacctaccctcaattcccaatgtccttttgacatacgtg

SEQ ID NO: 79418 - DNA, 438 bp, Glycine max
  unsure (1)..(438): unsure at all n locations
agcttaacanatcaagntcttcaacttatgttatttatctttcatagctgcacttgtcgagtaagtgcttaatgagttatntacncacatacacccctgtaccactataaaaaggggatccccttggtttttttctaaaatcatgacattctgaacttttaattactaaaatcagggagaattttttattccaatacattttgtttacactaagaccctcacttcaagctatgctacttactattgttaacaatgtaatttatattccattggttctctaccaatttcaacttcgaatgccaacactagttattaattatgaatgtatgaaagttttatggtctgttcaccgcccattgttatataaataaataagtaaataactatctcagtgatatagtttggactattttgtattttctgcatttactcattttg

SEQ ID NO: 79419 - DNA, 466 bp, Glycine max
  unsure (1)..(466): unsure at all n locations
atcctatgagtcacctgctgcatgcaagcttcctctcttcttgtttagactgtactctgttttgtcgaataattatntggccatggacaatgacaattggttcaagatctttntttttagaacttgcattctcaaataagtagtgttttgacctagctttttttagagattctcttttccttaaaaggagaggttgaggtaaacataatttttgagttcaaaaataaaaggagccttttttttaatgaagaaaaataaataaaagatggagctttcacatgagtttctgcttctctattttgaaaacatacctccctccttgtccatgtttgtcacagctcctcattggtgatctcttgttcaaccctcccccaatttctattcctttaaagatgtgatctactactatntcctcaacaatatgcatgcccttngttcattctatcagtctcggccacaatcctat

SEQ ID NO: 79420 - DNA, 422 bp, Glycine max
  unsure (1)..(422): unsure at all n locations
agcttanaggactaacctcctgagaactttgtcttatcacattggagggtacatcctttgtgatacaagtagagggtacatctacttgggttgttgtaactgagaacaagagagggtacatctcttgtggatcagttcaagtggagggtccatccacttggttgttccaagaaaacaagggagggtacatgccttgtggatctttgcttgtaaaggattttacaaggttgaaaagaaatctcaacgaccacaagtcgcttggggactggatgtacgcactggttgtagctgaaccagtataaaactcttgtgtttgtcttcttcttccctacactcttaatntccgctgtgcactttaattatcgcttttacttttggataaagatctatgtttggtctttacctttttaacattgttagta

SEQ ID NO: 79421 - DNA, 441 bp, Glycine max
  unsure (1)..(441): unsure at all n locations
agctntgagaatagcactttgaggaacaaagtcatcattaattaaatttcttttcagtcaaattcctgagggaaatgctatgtcagtagaagacaattagtgtgaacatatcatcacaagaattgaggtagatagcaagaaagcccacctcattgtagatctccaagtatgaaactcaaaagagaaactctcggtttggagtctagtatgcagaagaatcagactatgtaatctctataatacaaagttcaacatagagagtggcatttgacatacctcttggataacgctaaaagcatccttcacggcaaggggtatgattccaggagatctttgatcaccctgaatatatgaacatataagcaagaggtatgatacgaacttatgagcaatagtgtcacatcaactaatccaaattcatacagaagtcatcaccatcag

SEQ ID NO: 79422 - DNA, 437 bp, Glycine max
  unsure (1)..(437): unsure at all n locations
agcttctganaatgcctgcaacaatattatatctttgagaaacactaccagaagaatcaaattcatcaaagcacaattcttaaataaaaccaatttcaatgttcaagaatcttattttattgcaatattttggtgattcaaggatgacacataaattgttaataatatacaatgattttgatgaacttcaagaagtttaaactcagtactcaaaatataatatatatgtaattatgtacccattagagttctactaacattcttttttttggaaggcggaaaatatatatattattaatcagaaacacagcagcaccagaggtactgctggtgacatatacataggtacaagacacctattatacaccctccaatacaagatttgagaagaaccaacattgaccccaccacatatgatagatatgttcaacccatat

SEQ ID NO: 79423 - DNA, 365 bp, Glycine max
agcttatacgaagaatcaataccgtccttattcaatcattgtggaaaggtacgtcactgaaaaatctattgagttttgtgttgagtacatagaaacaagtacacctgtaggtctttctgaaagtcgtcatgactgcataaggggaggtaggggtacctgatgatacaatgttgtaacaatggatcaccaacaactttctcaagcgcatctatatatattaaacaacattgcagaggtaatatcatacatatatacttacaaacaaatatcaaactgtatcacccaaaaatgaacatgatgaaggtgttacaagagctcaataaaactttcatcaactggtttagacagatagatttgggtgatga

SEQ ID NO: 79424 - DNA, 438 bp, Glycine max
  unsure (1)..(438): unsure at all n locations
tcaagcttgagcaaattcaaacaacaataacattttactcggatgtccaattgggtcctgtaacatatcgagacgctccaaattgaaaacagaagctctgagcaaattgaaacgacaattattttatactcggatgtccgaatgaatcccgtaatatatcgagacactcgtaactgaaaatggaagctatgagcaaattctaacgacaattactttttactcggatgtccgattgagtcttgtaatatgtcgagtcgctcgaaattgaaaacaaaagctctgagcaaattctgacgacaagaacattttactcggatgttccgattgagtcctgtaatatatcaagtctctcgaaattgaaaacagaagctctgagagatttctaacgagactctcgaaattagaacagaagcnctgagcaaaatcaacgacaataac

SEQ ID NO: 79425 - DNA, 447 bp, Glycine max
  unsure (1)..(447): unsure at all n locations
agcttatcaagtgcattatatgtcagtaacgaaagagatggatttgcttgcctttcaggggtacgaaggtgaaggcaatgaaaatgatgatgaataagctggtatataataacaagtgggtatactcacagttcttgcggttgcactgttgacattggtggtggtagttctatatatacttcaattactttcccaacatttgttgggaaattaactatttcaaggagaaaatacactttggttctcataaggttgttcagctttagtagagaaatgtaaaggaaaaaagtattgaaatacgtgcatgagtgttagttgtttaaaaactaagcactcacaaggcttttttggggtctcaatntcctttacctatgtgaggtttaacctttttcctaatgtttcacacattctttcagaatttaacataatattctttttacgcctaac

SEQ ID NO: 79426 - DNA, 431 bp, Glycine max
  unsure (1)..(431): unsure at all n locations
agctntgatgaaattcanacgacaataacttttgtttcggtggtctgattgtgtcccacaggatatcgagatgctcgtaattgaaaacggaagttcttagaaaaatcaaacgacaataacttttaactcggatgtcctattgagccctgtaatatgtcgagacactcgaaattgaaaacggaagctctaagaaaagtgaaacgacaataacttttgactcggatgtccgatatagtctcgtaatatatcgagacgctcgtaattgaatacagaagctcttagcaaattcaaacgacaataactnttcacacggatgtccgattgagtctcatatgatatcgagacgctcataattgaaaatggaagatctatcaacaatcaaacgacgataacctttaactcggatgtctgatcgagccctgtaatatatc

SEQ ID NO: 79427 - DNA, 343 bp, Glycine max
  unsure (1)..(343): unsure at all n locations
agcttgaannaatattgtcttttacatgccctactctcttgagtggcattngtattagttgctatattgattgttgcatcttattccatatcatatcttntgtgcatcatgcatcatcatgtgtgagtgagaagaaaatttctaaagttataaaatttcttcagaaggcacaacctctctattataatcgattaaagccttatcgcaattgattgcataagttgtctcaagcttgcagagttatgtctcatatcaatttagtcgattacagcctgattgtaatctataacatagtcgtttttaagacaatgactgattaattaaagagtctttgcttaatcaa

SEQ ID NO: 79428 - DNA, 432 bp, Glycine max
  unsure (1)..(432): unsure at all n locations
agctttcaccccataattcccccaaattggctttgtaccaaaatttccttttatgaatgatgctctcctacaacctaagacaaggtagaaggagataaactatatacgctcaaggttcaatcaaacaatcttactttcagctcaaaatgggtgcaagggataaatcaatcatgcacaaggtaacttnttagctaagtggctatcttcaatcaaaacatggccttcatcatctttaatttcacgcattcattacatactcagagattcatgcaaaaaccattacttaacgttagtcgttctctcacaattaaagatcacactctcaccgggttgcggctaatgcgttcctttcacaataacctgacaaaccactaaacattttagtcatgatcctaattccatgctctttcgcttctaatgactgcatgctca

SEQ ID NO: 79429 - DNA, 326 bp, Glycine max
agcttatttgattcataatccgcccatctatttctcgttctctacttcatcataggcatcatgtaggaaacttataaaaaaaaaaaaagaaattcaacagcaagactacttctaggaattgattagaacatgctgtgaactaaataacatgcacgaattatactcaagattcaaaaaataggctctgaatgacaagaatacatgaacaaatgtatctagaatcccatgtacaaacattacaattctacacaaacttagaacataatgtgacgattactatgactaaacatgactctaagaccatttggattaagtgacttacactc

SEQ ID NO: 79430 - DNA, 382 bp, Glycine max
  unsure (1)..(382): unsure at all n locations
agctatntgaagttctcatggggcagttgtttgttctccttggtctgaagtctgataacccttatgttggtaagtcaggtgcatccattctcctatgcagtgaaagaggtttcacagaatggtaagaacaatagtcctttctctgctcttcagcaattattaactacatattttatgaatgctttgttttccttctaacttatgacatggcatatggatatatggtatggtgagagatttctctttggtttgtcaaaatttctagtttaaaatcatcattgagcactatacatcatttatatgatatgtgttatgctatcttttaacatgtgtctgaatctttatactcaacctctgttctgcccattaatagattgaccct

SEQ ID NO: 79431 - DNA, 439 bp, Glycine max
agcttgtcctcagatccctcttgttggactatgctcaatttagacagccctccttggtttagactaacttaaactaagcttcatcctcagattcctcttgttggactagacctaactaaaatagcttacaaaagtttagactaatttagcctaagctttgtcctcagatccctcttgttgaactagacttagaccaaacaacattattgtaacaacatattcaaaaccaaaacttaatccgcagatccctcttgtaagactaagtttcaattcttcttcattcaagttctaaggcaaaaatacatttcccaatgctaaagtcacctaattatgcacaccaatgggtgatcagaccaagagcatacaaaatttaagcactgaaagaaacattgaacacaagaaacacaatcaattagatattaaaataattacatcagct

SEQ ID NO: 79432 - DNA, 443 bp, Glycine max
  unsure (1)..(443): unsure at all n locations
agcttacaccattatatgttgttgctttatattttgttcaaagaatggtgagtagcgcaagataaatgattctttgagagcaaggaaattacttaattataacctacgatagcattttcttagagaaactttaagtttattttaagaaaaacaatgaacaattataactaatagattttgagattgttaaaatttgtttccgtaattgctaaaaataatatgaagcatatataaatgattcaagaaattttagtatggtcaagcctaattggttctcttgttagatcactctctaaataaaagaaataggtgataagtgatattatgactcatgagagaaggaaaagtgcctgaaccggtagtggatattgtgagccttaccactatttggtataaattttgtttttggttcactggtttagatgtttntcaagtcactgtca

SEQ ID NO: 79433 - DNA, 444 bp, Glycine max
  unsure (1)..(444): unsure at all n locations
agcttatattatttttacatttaaaactttataaaaatcattttcgtggaccgaatttgcatttgttacgacgttacgaagtaaaattcaaagtaccttctcagttctcactgcaaggtgcgggcagcgggcagcctctaagtactaagcaaccactgttagggttgaaagttgaaaatcctttcttggggcctcagagacccaaaaccctgaaaagaaaaccccttcttattaccgttgccccttccttcatttttgttcctctctgaagtgtaggaaacgatgagcagttggagaagccttcttctacgaatcggcgacaagagccctgaatatggagtctcctccgactacaaagatcacattgntcgctttctattcttcttcttcttctccctttcgctctgaatcgcacgcgcctaatgtctcttctcttctcttctc

SEQ ID NO: 79434 - DNA, 401 bp, Glycine max
gtcttcacctgctatattgatcaaagtgcggatggaaaaaggccaatctgatcatcctgcattgatgaataccaaaattggggcaaatgaaaaggatgagaatgagggagaaacctttgctatgactgccattcctacaccgacaaaattcctgtcagcccaacaatgtcattactcacccaataacagtttctctcacccaattatccacaaatgccatccccaatcatccacaaagcctgcccgctgcacatccagttgccaaacaccaaccaaaaaggaattttgttcaaaaagcctgtaggattcaccccacattctagtgtcatatgccaacttgctcttatatctacttgataatgcagtggaagccataacccctgccagggttcctcaacctc

SEQ ID NO: 79435 - DNA, 432 bp, Glycine max
  unsure (1)..(432): unsure at all n locations
agctntacagcagaatttagtaatgacccacttacctagaattaaaataacttaatgccattaacctagggaattaaaaaaaacttaatggctgagtgtaactgaaattgtggcaaccaaaagtcacccccaacagccaacaagtcagccaccatttggtctcccaaaaggctgatgcctatgttgccaattgggcccttattacaacttgaactaaacctaactaaagcccttttagttgattaacccaaaacatatttttggtcagccaactttacaaggattgggccattatttagacagactaaacactctaaaattgaaacaaagtggtgtcatttagtcctcctccatttgggccatgatacaactcacaaccttggacttttctccttgaaacttgngcttgtattcaaatagtatggacagcac

SEQ ID NO: 79436 - DNA, 447 bp, Glycine max
  unsure (1)..(447): unsure at all n locations
agcttgtattaagtcatgtacagaaatttcttgcaataatgagctatgttggatcagcatattccatgcaacttcttgattataaaatggatttttttttctctatatggagaggtttgttggatgtggtacaactacggttttaatgttttttatggttggatgttgcagtcgcactatgttttgttgctctgttccttcaaagaacaattgcagcagcatgtccgggtccatgcaatggaagcagtaatggcttgttgggatatagagcaatcattgcagagtctaacaggtgcataaaagtgtcttcttttagtaattgtctcatcttaaaataaatgtgaagaattgttgcgtgatcgaatganaaattgaaaataggatgtttcacattattttctaacaaccagctttttgtctagtttatgttaacatcctttattatgt

SEQ ID NO: 79437 - DNA, 365 bp, Glycine max
  unsure (1)..(365): unsure at all n locations
agctagaatcggacctcagtgtgaaaagttatgatcttttgaatttctcgggagcttccgntgttcaatttcgagcgtctgtatatgtgatacgcctgaatcgaacatccgtgtgaaaagttatgaccatttgaatatctcgaaagcttccttggttcaattccgagcatctcgacatatatgtgtgccccgaatctgaccatcgtgtgaaaagttatgaccatttgaatttctcgagagcttccaatgtttagtttcgagcgactccatatattatgagcctgaatcggaccttagtgtgaaaaagtatgaccattagaatttctaagagcttccgttgtctactttgagcgcctcgattatta

SEQ ID NO: 79438 - DNA, 446 bp, Glycine max
  unsure (1)..(446): unsure at all n locations
agctntttcaaagtncaagttgaaaaccatgcatggtgttattttgaatttagcttcaactaagacctcattagctatcattacaccatggaggatatgtctacctttgaggaaagcaatntgcacagaactgtatctttcaagtgactttggatagggtaagcactaatctaatccaagaaagccacagctactccctcctcatgttcaaataggtgtctcctccatttcaaatcccatctccaaatattctggtagaagctacccatggttgaaataagatcgttctgctgcttactaatggtgaagagctgagggtatttgtgatccagactgcagccctctccaaccaattgtctttccaaaatcgaatattatccccacaacctgccttccacaccagattttgatgaataatcttgaagtcattgtgctgatatatcttc

SEQ ID NO: 79439 - DNA, 450 bp, Glycine max
  unsure (1)..(450): unsure at all n locations
agctntanaattaagcataaattcgaaaagataggtggagaaagagatgagtgaacggtagaacaaaacttgtatgtatcctcttgatttcaaaattttcatcataaaaaagggggagattatggaagaaatgacttgcaagattattttgatgatgccaaagaatcaagagttaagcaagttgcaaagaatcagacttcaagaatcaagtctcaaagaatcaagattcaagaacaattaagtttcaagattcaagattcaagaacaatcaagatcaagattcaagagaagttgatttcaagattcaagagaagaaatcgagaagcaacagtcaagacttcacgagggaagtatttttttttcaaaatatccaaacacagcacatttttgtttacaaaagagttttctcanaaattttgagttaccagagtatttactctctggtaatcg

SEQ ID NO: 79440 - DNA, 375 bp, Glycine max
ttaagtcacctgggctgcagctgaaagcattgatcgaactgcattcttcatatgtggctcatgatgattacaaattaatgatcctatgctaccctgcaatgagacacacacagatactcatacacacacacttagagacaaacacacacactcattaagatacacacatactcatacaccgaggcgcgcacacataaagacacagacaaagacacatactcactgtatcccagacacacacgaagaaactcccactgagtttttaacacacacacactcaaacacactctcacacattggcagaaccacacacacattaagagacaaatacacactcccacacacacacatataaagagactaccacaaactcac

SEQ ID NO: 79441 - DNA, 303 bp, Glycine max
cgccgctgctgcagcttagtctgtcggaaaacatttttttgatggatgatgatcatcatattccattcatcgtgaagatgatgcacttgaatacgatgtcgctatatgcataagtgagatggatatggatcacttacagcctaaacgatttttatggatggatgatacgaacgcgctgaggtgaggtgcgctgctactcctaacaacaaagggaccagcgtgtccaggtcatgccttgatgagagatggctggtggcgatatatatgcttcatcgcctactctgacaagagcataataatgtc

SEQ ID NO: 79442 - DNA, 437 bp, Glycine max
agcttgagaatggaggattgccttgactgttcttatttatgcaatcatgaaacacagcaccaaactccaaaatggaagacatatgaacagccctaagcaatatcattcatgtggctccgaaaaagggtgagaatgaaggattgccttgagggtccttacttaagcaatcatggaacacagctccaaactctaaaatggaggacacatgaacaaccctaaccaataacattcatgtggctccgaaaaagggtgagaatggataattgccttgagggtcctcacttaggccatcatggaacacaacttctaactcttaaatggaggacacatgaacatccctaagcaattacattcatgtggctccgaaaaagggtgagaatggaggattgccttgagggtcctcacttatgcaatcatggaacacagcttcatactcc

SEQ ID NO: 79443 - DNA, 439 bp, Glycine max
  unsure (1)..(439): unsure at all n locations
agcttgttgcctccctttgccattgactactcttcgaacagtccaactaatagtactcatatcttaaacatattcataaataaggataaagaaagatgacctaaaattacaggatcatattagcatcatcccttagaaagggtgacatgttcgaagcaaccaatggcataaccacctctatgttagcaacagtttgcttcgaagctaccatacttatcgtttgggatccattccatatagtaggctttgtagtctccatatccatatgcattgcaagcgtatntattcttttcatctggagaaagatagtagagactccattataagccagactagagttggtcgaggatcccaccatcactactacaaaaataagatttaacatcgtctaactaacatcggttntgataaaaaccgatgtaaaaaaatgtggtggtat

SEQ ID NO: 79444 - DNA, 453 bp, Glycine max
atcctctgagtcacctgctgcatgcaagcttctataatgatgaagatgaatatttgctctataactcaagtaattgtacagtgttatgtcatcagaaaatataaaggggttgtaacattgcattatcagtaagtctcaaattgtatttaagtcaagtaacatgtagatcaaggaattaaacagtgtgtggtagagctaaaacgggcctaaaacaagctacttttacgctatgaaagaataaaaatgcatttgctcttaaaaatgcaaatacataatttggaattctgcattaactcctatataaagacctttatggtgtcaatcaaccaaattcctgcaccagcaaagatattaactttaacttctataataaacgagaaagaaacagagataccacacacaatcacaatacgagtttttaatagtaccagagacacctcactaattagaact

SEQ ID NO: 79445 - DNA, 443 bp, Glycine max
  unsure (1)..(443): unsure at all n locations
agcttcaggttgctcaattgctccaggttgctgtatggaanggcaaaggtctgtatggtggtcagcagaggagcacaaaccacaaaccctngcgacaggtacagatttctgattcaaggccagctgggttaccaagttgaccaacgcatccagtttgccttcaagcttcttagtttcagatgatgcaaatgggtttgtagctacctcatgcactcctctaatgactatggcatcatttctggcgctaaactgctgggagttggaggccatcttctcaattaaatttctggcttcagcaggggtcatgtctccaagggctccaccactggcagcatctatcatacttctctccatattactgagtccttcataaaaatattggagaagaagctattctgaaatctgatgggtggggcaacttgcacatagtttcttanatctct

SEQ ID NO: 79446 - DNA, 370 bp, Glycine max
tgcaagcttctatctagccaagatcatacatatgtgttacaacagaacctaacgggtttctaattatgtgggccattaaatctatcatgtgttgacaggagttgactagcccgtgaatttcctctagggctgaacatacttcggcgatggcctttgctttggctagtagacgcgggaggtcttgacttccatttaaggtcaaggcgaacctatccatccacatggttgcttcttgatgcaatgcataaatcaccctccctcttgcttccttcttagcgcacgcttgtgcgaagtcctctactattatttgttcatgggtcaaaaataggttaacatcttttttgactgccctataaagctaccatgcttt

SEQ ID NO: 79447 - DNA, 439 bp, Glycine max
  unsure (1)..(439): unsure at all n locations
agctttgcataccccaaggatccattatgatattacttgtgaaagagagccatgagggtgggctcatgggccactttgggatagacaagacccttgtcttactcaaagaaaagttttattggccccatatgaagaaagatgtccataagcattgcactaggtgtgtggctggtttacaggccaagtctagggtgatgcctcatgggctatacacacccttacccatcccatctgcaccttgggtagacattagtatagactntgtccttgggcttcctagaacccanagaggtgtagactctatctttgtggtggtgaataggtttagcaagatgacacactttataccctaccacaaggtggatgatgcttcccacatctcanaactctttttcagggaagttgtgagactccatggttngcctangaccattgtgtc

SEQ ID NO: 79448 - DNA, 444 bp, Glycine max
  unsure (1)..(444): unsure at all n locations
agcttcaccttcttctaggtgaccaagctttactaaaactgaaacctcttgtttttttgtatacaagtttatcaacctaggaaggcatattcggaatcatcaagttatatatcatgtattagttacatttatcaaattccctangttaataaaagtaaaacatacttacaattttagattcttttttgtgcaactcctccagagctctctcaagaaactcacattcctctaacaatgagatcagggaaataatattcagtgcagagaaaccccacaggaaaaaataataacagcagtcaaaccatgaataccacccagatcaggtcaacctgagaattaataatgagtattatcatttactccacctgctgcttaggttatgtgaataaaataactagtgtagaaataagccatatctgttggacatataaattcataaattca

SEQ ID NO: 79449 - DNA, 433 bp, Glycine max
gcgatccttaatcactgccgctgcagctttaccaaggactacctgattttttttgatgcccatgacctgttcctttcttgttgaactactcagccttaggagaactgatataccatatcttaggaaactggccctttggaattgatttggcaataagtgtggggggtgtttgtatcattggacaacttgttttgatggctttgcttcatgatgtatttagggccatacttgatgtacattgaatattggttaaatgatggacattcttaatgaaatgctgtttctcaatgctcaagagttaaaaaaaaaaaattcgaagaaaatatatcggacaatagataaagaaaaagaacagcagtacaggtgagtgaattagatcttaaatggcacaagaatgatgaaacttctggttctactcttcatgtctaatttt

SEQ ID NO: 79450 - DNA, 357 bp, Glycine max
  unsure (1)..(357): unsure at all n locations
agctttgtatttcttctgggaaccacacgggcagtatttgtttctatgaaactagacgctcaccccacagagaagatgcagttagaacaacaaacaaaagcatgccataggagatcatatcatcataatattagaacatcatctatgaaaaacatatttattttggatcatcccccgtcccacaggggattaaattaaacaccaataaactctanatagaagaaaatagagaaccttgtcattgggttgccatgtggtataagtataggtcttcttggagcctatatttgagtcatcattagtgctttcctctaccatgtcttcattgggctgcttatgattctcattttcatcatg

SEQ ID NO: 79451 - DNA, 443 bp, Glycine max
tacagtacacctgcacgcatgcaagctagtctgatcatggtgtacccatcacatgaagttctacgtggtggcacggcgatggtgcaaaacgagtctccacattcacacatcacgtataacctaccatcctttgttgtacacctccaagtgagcttacgtactcccacctagcccttaatctcgtctctctcaacgccgggtcctttatggatctttctgaactttcacttgcattcgagttattcacatctcatcctgatggactaacaaaatcttgctacgacggggcaacgctcaaaagtctgcccaaacgacactgaaatcacagttttaattcaatacccaattacatatcttgggacaattcagtaaccgttggatcgacttgaaaattttactggaagtctctagtacataagtctacattttgaccgctgtgatct

SEQ ID NO: 79452 - DNA, 331 bp, Glycine max
  unsure (1)..(331): unsure at all n locations
agctntataagcgcgggtctgggagattaatgtcaagtggtcgcgatatacgaagatgatgttccgagtacattggatatggtacgaccatgccctcctgatttccagctaggaaattggcaagtggaggaacgccccggcatttacgcaacgagcataaagtaaacctttatggttttaanaactctatagttgggcctatgctttaaaagttttcctttgttaaggctatgtgtcctttgttttgaatttataatacaaggatctttcttcatctggttctacgtctctacccaatcctcatcatttgcattgttacgtctttactttt

SEQ ID NO: 79453 - DNA, 431 bp, Glycine max
caagcttggagtttccaagtgccaattcgtcttcttctttagtccagtcttcttctggcttcaattcatcagtgggctttccttctgtgtccagcatcttgggatgttcccagcctttgatgacagctttccaggttctgctatccagtgatttgaggaaggccaccatccttgctttccagtattcatagttggttccatctaggattggtggtctgttcactggtcctccttctttctccatgttcatcagaatttatctccctagatctcactctgtgatttcgagtgttggctctgataccaattgaaattctgataccaggggacagatgtcgtaccggatgtcacgacatcacgcttcagaacatgcagattatatgtgtccgtatgaacagattaaacaagtaaattacacatgagaattgtat

SEQ ID NO: 79454 - DNA, 391 bp, Glycine max
  unsure (1)..(391): unsure at all n locations
agcttgccgcccagctcgcccaggcgatcattgttgcttcctccagaagaaacaaccttctggaggaatcttttggagggcccaagtggacctggttgctatttacacccccctttttactaaatgcacccacttatatattgttctgtaattctttttccgtaacgttacgaaactttacgaatttcgtaacgatacttattttcctttccgcaaagttacgaatccttacggatttatgtatttactctttttggctttcaaagaagttacggaaactcacggattgcgcacaaacacctcttttcgatntccgccacattacggaatttcacggattacgcaagcctgcttccttttggatttctgagacgtctcgggacttcattta

SEQ ID NO: 79455 - DNA, 408 bp, Glycine max
  unsure (1)..(408): unsure at all n locations
agcttatggctataaaagacgactgatatgtatttatttatcggngaggaattccattaagattcaccatcttggtgagggaagcactatgatgcaatcctccctaggaaaggacccgttaccagatccatgaacaagatgctccaaaaggattgggctagagctgatatagaaggccttagggttctaatgaaccttacggtatattttttaacccatgggtcaaggatgggtccactcttctttgtaaatattagaataagttttttttcttcttttgggccttgtattttggccattctaccactatacgattttacccttgtatttcacggcatttagagtaatctctgtactatgattttttttgtatttcatgtatatagccatggggtgagctatactata

SEQ ID NO: 79456 - DNA, 374 bp, Glycine max
  unsure (1)..(374): unsure at all n locations
agcttctatgaactctagatctttgagctttttaaggtccttcaatggtgattttcacccatggagttgcagcggaagataaaggagaagaggtgagaggaggtgtcatccactanagaataaggcttggaaggagaagcttcaacaccaagagagtgtcttagataagaagcttagagagaaagcttcaatggaggaagagaataaaagagagggggcatgggaattgaaggaaattatggagagaagttcaactttgaagtgtatctcacaagtttctcattcatgaaagttgtgataagtgttacacatgtttctatttatagcctaacacatgagaatcttccttgagaagcaaggaaggtagcttcctt

SEQ ID NO: 79457 - DNA, 431 bp, Glycine max
  unsure (1)..(431): unsure at all n locations
agctttcatgtctttntctttggttatttgttgttgaagaagtagtttgttaacggttgacttaactttaggatgttattataattgtttgtggtattgttgaatggccctccaaaagtattgcatgtatgaaaatttttcccaaacaaatatatgaaaaatatattaacatgataagggttacgacttttattggttgcatcttaagttgtcgtggattttaggatntgtgtccacattgctcttgtctcttgatgaaatctaacatgtgttgcttatactgtgtagtattccttaagaccttatttatgaatcttgagactggtcttcgtttcaacatggtcaacgattcttattacctgcagaaatacaatattttgatgctagatgagaagttcctgttgggcttcactggctgattgttttgcaaa

SEQ ID NO: 79458 - DNA, 417 bp, Glycine max
  unsure (1)..(417): unsure at all n locations
agcttagacgaccttgtttgagtcgagaatacttttattatttattggacaagtttgaatatgatgtagaagaaaatgaatgtgagcctttntcccctttgaaagacttgaanaaaaaatgttttaaaaatactttttaactaatatntgaatttttttccttattagtatatatgtgaggggtagagggtgtcacanatatgattcctaggatctagtaagccaactaagtcctttccaatgggtaaaaataaacaaagaattatanngtgtattaatcatgtagaaaaagaaggcccagaatacagataatttcaatgaatcaacattaaataatatgtagaaagattttgatcatgctcatatcatacccttgaaaataagtanactacacaaataaaactacttgaaacattt

SEQ ID NO: 79459 - DNA, 125 bp, Glycine max
  unsure (1)..(125): unsure at all n locations
agcttgttgccacatctgcatctntaaatttcctatgtgtcaacattagcaagactattagttcanagagagagaaaaagtcttttcctccgagcttaaaaaaaaaaaaccaatttttccaaaag

SEQ ID NO: 79460 - DNA, 381 bp, Glycine max
  unsure (1)..(381): unsure at all n locations
agcttctnttggaccttgagcaggaaactaactcctctttcagaaccatgctatgtgctcgcgactggtccctccccttcgcagcttgagttcactattgctaccccacagagctccgcgaaatttattccggccatactcttgcttgcgagccctcttggtctcttgttcaagggctctcgtggtagttgcattctcttcccgtaatccggcacattccttccggatgtgtgtagcggccaacttgaacttctccttggcaagactcgcttttcctaactcacttttgagagcttggacttcttcgtcctcctgcggagcctgaaaactctctacgctggcgacttttaacttggcgagccaatctaaacctcgtatatg

SEQ ID NO: 79461 - DNA, 394 bp, Glycine max
  unsure (1)..(394): unsure at all n locations
agcttcatgatgatgaatcaagattgattcatggttttntgatgataacaacgatgatgacgaatagcccaagagaatgagttcatgattgagtcaagaacacttcaagaatcaagagaaattataattcaagattcaagtttcaagaatcaagaataatcaagttgaagattcaagaatcaagaaaagactccatcaagataagtactaaattttttttcaaaacattgagtagaacatgaatttttcacaaaaccttttaccaaagagtgttttactctctggtaatcgattaccagtttattgtaattgattacccattgcaaagattgctttcaaaaagctttcaactgaatttacaacgttccaattgatttcaaatggtgtaatcgat

SEQ ID NO: 79462 - DNA, 455 bp, Glycine max
atccttaagtcacctgccgcatgcaagcttctatggtccgtaacaatggtgaagcgattgtccaataaatactgcctccacttcttaactgtcgccgtgacggcaaataattcccttacataagtggatgcactcaagagtttcaggggaaaaggcttgctaaagaaagccaatgggtgtccctgttgagataagatagctcccatccccacaccggatgcgtccgtctcaacggtgaagggctgctcgaaatccggcaacgatagcacaggggccgttgacactgctagtttcaattgctcaaatgcggcctgtgctttttctgtccacagaaaatgggctttcgtggtgatgtggaccaaaggagcagctatggtagcatagcctctaatgaagcgcctatagaagccggcgaagccccaaaaacttctaactgctttaatcgaatgtggaat

SEQ ID NO: 79463 - DNA, 166 bp, Glycine max
atacgccgctgcatgctccgtcattcgcgcgaagttttttttgtgacggccaacgagtgacgtgaagaaaagatcttgcctctacgccatcaacgactcgacgtacatctgcataatggcatgctaatataactaacttgttggactcatttattccattacctag

SEQ ID NO: 79464 - DNA, 437 bp, Glycine max
agcttagagttgcaatagtgctaaggtttctggttttagttactccatattgtcgataattaacttgggttcctgtcttcatgatttttaagttcactgtgcaaagttgtttcaagtttggtctttggcaagtgcgtacaaagatattcatgacccgctgattaataggaaagattcaacacctataggatatgaggagacttttggtgtactgctaaactgctgatttcttaatatgatgcaaggctaactcaatgatgtctactccaatatcaatgatatagagtcttggaaattgtgggtttttgcttaaaaaaattcaaatattgaaagttttatttccttaatatcttggttctataaagattccaataaacaagaagaaaagagacacttatcttcaaataattgtattgtctcttacattgaagaattca

SEQ ID NO: 79465 - DNA, 431 bp, Glycine max
  unsure (1)..(431): unsure at all n locations
agctntatcctgatcatggtgccattaatgttataccctagaggtaccctcatcaccaaanagaagaaattgaaaagcaagtgtcagaactcttgaaagctggagtcattcagccgaatatgagttcattttcaagtcctgtgttattagtcaaaaagaaagacaagagctggagaatgtgtgtagactacagggccttaaataaagctacaataccagataagtacccaatccctatagttgatgagttgttagatgaattatatggagctactatgttctctaaaatctggatatcatcaaattagagtgcctgaggatgacatccctaaaatggcgtttagaacacataacggccactatgaatatttagtaatgtctgttggactaatgaatgcccagctcctttcaagccccatgaatgacatttt

SEQ ID NO: 79466 - DNA, 350 bp, Glycine max
  unsure (1)..(350): unsure at all n locations
agcttttcgattcattctatgtacccgtagtggttcacattgngtttcgngcatttttattctcgttttgtttactttttatacccccctcttgacgtgcttaagccattttacttaagtcatttctcgcttaacttaaaaataaaataaatttccaccgaatgtttgaattggattatccattaacttcgggtaaaatcaatttcgaccgttcggtcatgccgtaaccacgttggatatcataaagaggtgaaaaataatataataatcaaaataatatctttttagtgaaataaagcggaaaatcaatcggacgtgttctctttgggatttcttattcttaatcgaat

SEQ ID NO: 79467 - DNA, 436 bp, Glycine max
  unsure (1)..(436): unsure at all n locations
agcttatgcgcatatttccttacgaacgttctcttgcacaagacattctattaactaagaaaaatgcacccatatacaatcaaggcagcttcgttacctagattatttacacgtacttccaaggtgtatttgttacttacatcacacacatctccttggctaaatttacatacatgcatactcaaagcattttggggtaccaaaaattgcacatgtgcacatcttggtatttctaatacctatacatacacaaacttcatgatgaatcttgactatctacacaataaggtgctacattccatgctcttttcaagtttttgctacctaaagccgcatgcaaattcaagtatattttcctttgctgactaaaatngtattcaaattaaagggtatacatctttttngaatgtattttctttacataacatgcaacata

SEQ ID NO: 79468 - DNA, 432 bp, Glycine max
  unsure (1)..(432): unsure at all n locations
agcttggagaatnatgaactngcatggtcgtttggcttctacatggaaactgaaacacaagaataggatgtggagttgcttctcatactngctcagtgcaatttggcatttactatctttaatttgtttttgatgcatcttatgttaataattaatagcaatgatgctccagatttgtatttaacgaaatgtgcgttatataactttgttattatattcctctatatttcacgatcaggaattatattgagttcaatgaataattccaatgaacttgtttgagggtaatgctataataatgctaactcgtgaagtttggtaattcacattgtggttgatagtttatacatatgtgcacctcataactataaactgcagtaaactaatttgtacattatggcgagtgaaatatcgggttcattgaataattcc

SEQ ID NO: 79469 - DNA, 219 bp, Glycine max
  unsure (1)..(219): unsure at all n locations
gagaacaaaaagtaatgttatttcgctgaatgaccntatctaaattttctattgtgcatggctgggattttgcagtttttttttagaggacaattttgtttgcagtttaattctgctgagtttgatccagagaagctaaagtgatattcttgttgtggattctttggttgaatagcttgatttacagttctgctctgtttggctgttaattttgagtgt

SEQ ID NO: 79470 - DNA, 378 bp, Glycine max
  unsure (1)..(378): unsure at all n locations
agcttcacatggagttacataaccctagctctagataccaattgttggaataactgggaatcaagaaaaggggttgaatagattctttgaaatgttaccaattgtttgttagattcaattaaaatcaatacccctttacaaataaaggttttctcaaaagacatgttaaagaaagattaataacacataaaactaatctatttaaaaaccttagaaacacaaagttttatggccctttcacattaattccattacttatattgattcacaaaattaagatttagaaaaggagagaattacacatagaatttatacaggtttagttctcaagaggacctacatctangtgttctaagaattcttagaacttncactatt

SEQ ID NO: 79471 - DNA, 435 bp, Glycine max
  unsure (1)..(435): unsure at all n locations
agcntggtgggcttatgtactgtctaggatccacttaatgtacgtggcaagcgacgtggcacatcaatacacacgtcaatcttccatctcagccctggcataggaacatgtacacatcgcccttagcagtcaagctattgggccgacaagttaactctaatacctcattacttgaatattaatgatagtgttgcaacctccttatcaagtggcaggtacttaattatctataagatacacattacatataagcaacaacttatctactagctattgtctacaagctagcaattatctgcaagggttgttacactaccgtaacaacccctacaaacaaggacccgaagctcctacttcactctataagtatcaggttctatctcaccattttcatatctcattctcatctaactcaggtacttaattgagcgtcag

SEQ ID NO: 79472 - DNA, 447 bp, Glycine max
  unsure (1)..(447): unsure at all n locations
agcttgtcaaccnctntatgcaatgaanaacaagttgatgaatccaagcaatcacaagcaagatggtcttgactaaatgcaaaagtaaacagaaaaacaattaaatttaaaaaaactaaaggaaaagttgggttgcctcccaagaagtgcttctttaatgtcattagcttgacaagtcaaatgcctttaaggtggcatgaaggtcacatagaacacatcttccttgccagttcgccttttagctagaaaatgcatgaactttatgtattgtggaagcacattccaattcattgcaatagaagtgtcggtgatcaaggaacgaatgacacttaanggtttcttatgttctccctacctttcattcttgaccaatcagtgacgaggaaaggtattgatttggagaatactttcttgttgatattctactgttgagcacctcccccattg

SEQ ID NO: 79473 - DNA, 410 bp, Glycine max
  unsure (1)..(410): unsure at all n locations
agcttgtcaggaagctacctagtctataaatagatacatgtgtaacacttgttgtaactttgatgaatgagagtctggtgagacacaactcaaagttcaacttctctccctttttntttcttcaattccgtgcccccgctctctctttctctccctctttcttttcctccattgaagcatccttcttcagcttctttttccatgacttattccttaatggatggcgccttctctcacctcttttcctttggcttccgctgcatctncatggtggaaaatcaccattaaaggaccccattgaagctcanagatccagcctncatagaagccccacaagcaagcttccatcaagtggtaatcagagcacaagagctttcagtagggtgcttcntaaacctccttaatttttt

SEQ ID NO: 79474 - DNA, 447 bp, Glycine max
gagctgcacgcgtgcaagcttatacttatgtggcagggcgggctaacttctctcttttgtctccaacgcgaactttgaccattgttcttccttcccgcgatgcttcttttcatgtctgcctgagtgggcttatagcctaaaccatacttcccacgattaccttgggtatttatcagtgtagtggtgccgccgttgttatttcctaaacccgtcccgggctcataaccgttccccaacataactcgggccatcattaccgctgcatcggacagactaggctgcccaaagagggagtccacggaggaaatgctgaccacctcaaaagactggaaagcagtttctaacgattcttctgcggctctcacataacgcatggaggatgggcagcttaccaagatatctttcttgcctgacactatgaccaagtgcccttctactacgaatttc

SEQ ID NO: 79475 - DNA, 369 bp, Glycine max
  unsure (1)..(369): unsure at all n locations
agcttcacgatccacaaggggttgttttatatatatcctcataatcacttctgccatacccatagcgataccagaatcaaaatacatgatgcaagaaggatgtactcttaagtgaggaagatagntgattgatatcacatgagcgcactatatgtatagagattaaagaagataaacaataactcaacaatggcgatgaccgaaacctaacgaacactttatttatgtaagaatgcaatcctccagcaattgccaagagttgaaatgacgcactaataatctgtgccataatgtgattaaaccaacccacgttacgcatctttatgatgagcccgctcaccaagtaacacatgtaataatcaatgcaca

SEQ ID NO: 79476 - DNA, 381 bp, Glycine max
agcttcttattataaacctaaggcagagtcttctcttctccgaactccaaacacaaacacatacaaacatagttaccgcttctctctctttctctctctctctctctctttttccatgttcatctgataaccctttcctgattctctttcgtggttgttgctattctgagtgatgggtatgccctgccgctgtttccacacctcccacatcactgaaatcatcatcaccaacttcttccgccacaagtcttagatcaacaatttccgtctattattccaaaaccaccttaagagccttttccaaatggccccttaaagatccaacttggtccgaagtaacatggccggtagtggaagtgccttttccaacatcaatagctt

SEQ ID NO: 79477 - DNA, 444 bp, Glycine max
  unsure (1)..(444): unsure at all n locations
agctntaggagaaaccataanaactaatgtattttctaaacaaaaatcaattgaggaagcttcgccaagtatccctattgaaaaacctttattcaaacctttcacaagtagtgagaaggctaaacgaaaaaatacggaacttataaaaactagatccttaattgaaggcgtaggtgataaccatagtgaattacttaacaagaatggtagtttacttaaggtcattccagatactcctcaagcctcggaaaatactttcaaaatggtaacaagaagtacctccaaattaattaatgttattaatgaagatagtgaccaaaactcagataacacaactganatatgatcagtgtcagaaaagaatataaatccaattaattccaaacactggaaaacaccctccaagttatattatcaacgtccaactgcccctgacctactatt

SEQ ID NO: 79478 - DNA, 437 bp, Glycine max
  unsure (1)..(437): unsure at all n locations
agcttcacaagcaagcttccatcttctatcatgcaagaattcattaatcttcttggccaactaaaaaccattgtgagggggaggcatatgacgaaagttaagaatctttttatttgacttccaatttaggtaaacaaaatgggtagtcaaagttatgaaacccttagtattaatagatgtccataaatcagaagttaaacagatcctgccaggaatagcacacaacagttctttactgatggttttcttcctctcatatattctcaacatattagtcttaaaagtatttctagaaattggttaattgaggacacaaataacttatcaaagcctgaaactctggatacttaacataaatgaagggcaaattacgcctaatcattagattacacaacaattcgcgtgccatcattngatctatctctttggacttaaac

SEQ ID NO: 79479 - DNA, 413 bp, Glycine max
agcttatgcctctgtgggaccaaaccattttctctttccaactctacccatcagaagctcacaacaattcacttttattttctatttttcattatgataaaatatttaaataagattagttttccaattttatccctaacaataaaactcaatgaaaatttataaagatatttatatattatttagcaataaaatcaccacatcaatatatgaatccaacggatgtctcttaaaatatgaatttatctcttactaattacatcaatctttttatatttggtgcgtagatttatttaatattgcccttacttttttgcttataaaatatatgtctgcacctcaattacctttttgccccattgtctttgtccttaccttcctagctctcgcaccactgatagttcctttccatc

SEQ ID NO: 79480 - DNA, 394 bp, Glycine max
  unsure (1)..(394): unsure at all n locations
agcttctcaaggaagttttctcaagaaagcttctcaaggaagctagctagtctataaataagaagcatgtgtaacacttatggtaactttgataaatgaaagtcttatgagacacacttcaaagttccacttctctccctcttttattccttcaatttcgtgctccccccttctctctttcttttcctctattgaagcatcctctccaagcttcttatccaaggcacattcttggtggtgaagctcattcttccatggcttattcaatattgggtgatgcctcctctcacctcttttcctttatcttccattgcatctccatggtggaaaatcaccatttgaggacctcatngaagctcaaagatccagtctncatagaaagcttacaagcaag

SEQ ID NO: 79481 - DNA, 444 bp, Glycine max
  unsure (1)..(444): unsure at all n locations
agctntcatgtttccattctctcgtggntagttgaggttaagtgaagtaaaagccaaaaggaggtcatttccaccttgtgcttgttgctagtttgagttggctaaggagaaacccataaggaaagctaccttgtgtgggttaggcatgctttatggtgttttttgttgcattattgaacatgtgatattgtgcttgtgatgatcttggaaaatgcatttgtgggagtagatggacgaaattcaagatccacccttggttattcttcgattatactcaatttgctcattcatcaatggtcaaatgtatcaagatgttgccacgagagatggtcaacaaacaagaggcatactcgtcacatatgtatctcaagaggaggtttcatcttcacgtgaaggacttcaaatctatgagtactttcgagtctttggtctagcttgatgaca

SEQ ID NO: 79482 - DNA, 258 bp, Glycine max
  unsure (1)..(258): unsure at all n locations
agctagactnttatattgtggcacataaggatgttattgtgcaccaagtcaggactgataacggagtgaaacctcttttctctcaccaatgcgcacatgttgcgacccactaccctccatagtattacccgcggtgtcatgtgagcgagcattaacagatcaattgcattcacctcgctgctgcattgacgttggggaaacctgtagagccttctacggtaaggaacactgcggcgcgaaccgcttggcgcctcttcg

SEQ ID NO: 79483 - DNA, 443 bp, Glycine max
  unsure (1)..(443): unsure at all n locations
agcttgtaatcgattacatcatttgtgtaatcaattactagacacaaaaattcaaatntcaagtctgaagcgtcacaactcttcagaaactaactgtgtaatcgattacctcatttatgtaatcgattaccagtaaggaattttcgaaaataactcccaagagtcacaactgctcaagacgtttttgaatggccatcaaaggtctataaataggtgacttgggatatgaaattccttagagtttttctgaacaacattgtcttatcctctcaaaaccaaattatcttatcactctcanaatattccttggtcaaaacacttgcaaattcaataaggaatcttgatcgatcttcaattgtaatatctttctcttaaagagagaaaattcttcttcttcttattcaaagagatctgctaaagagactganggtctcttaagttgt

SEQ ID NO: 79484 - DNA, 402 bp, Glycine max
  unsure (1)..(402): unsure at all n locations
agcttcttggcaatcctcattccagcgatcagtttggttnttgcgtaagagtttgaacaacggctcacaaatggcggtgagctgcgatatgaatctggcaatataattcaagcgtcccaggaaacctcggacttgcctctctgtacggggttcaggcatctcaaggatagccttcaccttttcggggtctacctctatccctttctggcttacaacgaaaccaagcaatttccctgatttgaccccaaaggtacacttagcggggttcaaccttaattgatatttcttaagcctttcgaacaacttccgcaggttgacaaggtgttcttccttggatttagatttagcaattatgtcgtccacgtagacctcgatctcttgatgcatcatatcatggaacaa

SEQ ID NO: 79485 - DNA, 433 bp, Glycine max
  unsure (1)..(433): unsure at all n locations
agcttcaggttgcttattgattccagattgctgcaaagaaagatagagatctgtatggtgatctgtangagaacatagaccacagactcttgcaacaggtgtagatttcttattcatggaaagctgagttactatgttgaccaacgtatcaagttttccttcaagctttctattttcagtagatgaagatgaatttgtggccacctcatggactcctctaagaacaataacatcatttcttgcactgaattgttgggagttggaagccatcttctcaatcaaattcctaacctcagcaggggtcatatcaccaagagctncaccattgctagcatcaatcatactcctctccatgttgcttaatccctcataaaaatatttaagaaagagttgctcaaaaatctggtggtgaggacagcttgcacacaatttc

SEQ ID NO: 79486 - DNA, 430 bp, Glycine max
  unsure (1)..(430): unsure at all n locations
agctntntattntcagcagatgaagatgaatctgtggccacctcatggactcctctaaggacaatagcatcatttcttacatcgaattgttgggagttggaagccatcttctcaatcaaattcctagccttagcaggagtcatatcaccaagagctcctctccatgttgctacgtccctcatagaaatattgcagaaggagttgctcanaaatctggtggtgaggacagcttgcaaacaatttcttgaatctttcccagtactcatacaagctctctccactaagttgcttgatgcccgaaatgtcttttttgatggcagtggtcctagatgcaaggaagaatttctccaagaacaccctcttaaggtcatcccagttgaaaatggacctangagcatggtagtatagccaatcttttgccactgcctct

SEQ ID NO: 79487 - DNA, 397 bp, Glycine max
  unsure (1)..(397): unsure at all n locations
agcttccagaatggtataccatgccactgctgctccggctaagctgtcttgaaagaaatgcatcaacagcttttcgtccgtagaatatgcccccatccttcggcaatacattcgaagatgattttttggacatgtcgtccccttgtatttatcaaaatctggtactttaaacttgggagggatgacgatgtcaggtaccagacacagatccgctaaatccgagaacgggtagttgccgaggccttctaccgctctcagcctctcttcaagtaaatcaatctttcccttatcttttgcanagggaacatattctntaacgggtgtgggtggagataggagatagaggactatgtttggnttaggcaattcatggggggctggatctttgaggggaagt

SEQ ID NO: 79488 - DNA, 359 bp, Glycine max
  unsure (1)..(359): unsure at all n locations
agcttgannaaaaattgtctnttacatgccctactctcttgagtggcatttgtattagttgttatattgattgttgcatcttattccatatcatatcttttgtgcatcatgcatcatcatgtgtgagtgagaagaaaatttctaaagttataaaatttcttcagaaggcaaaacctctctattttaatcgattaaagccttatcgcaattgattgcataagttgtctcaagcttgcagagttatgtctcatatcaatttaatcgattacagccttatcgtaatctattacatagttgttttttagacaatgactggattatntaggagtctttggcttaatcgattatcatgtgatata

SEQ ID NO: 79489 - DNA, 446 bp, Glycine max
agcttgccgattatcataactttccatatcttgttctttccggtggccacccaccaaccatggtcccattttgtttaattaattaatttcttcctaactcgattcaatgaccacacccacgttgcctacttgatgttttaccggcattttttattttctaaacatatgctgtctgcataatattttgaaaggcaaaatgaaaaacctttgcatatggtgtgggtggataataagtttggatattacacattcaatttttatttcataccaaaagagaacaaaataaacagctcattaaaatgatacattcagaacaaaattcacacttttcatttattacgaacaatattgcatttcttcgcatccccgaagaatctgatagtagaatctgatgcaagcatgacaaccggaacaccgaaactcattaattcacacatgtagaacaa

SEQ ID NO: 79490 - DNA, 405 bp, Glycine max
agcttgtgactttggcaattgctttaaatctagtcacttaaaaagttgcgactttcgaaataaaaatcttcagaaacaagtcacttgaagaattgtgactttttgaaatgtatttttcgaaatcagtcactggtaattgattagcacttacgtgtaatcaattacatatcaatatatgtgactcttcattttgaattttgaaaattaaaacatttaaaagctctggtaatcgaatacaagtgttgtgtaatctattacacaagtctaaaatgatttaaaactggtaaacacaacttgtaactcttgtaattcgacattttaacgttttaaaatactggtaatcgattactaccttctggtaatcgattaccataaataaaactctttggtatgatttattaaaac

SEQ ID NO: 79491 - DNA, 332 bp, Glycine max
  unsure (1)..(332): unsure at all n locations
agctagctatggtatcatgtctattcttttcatacccacgnggnttgttataggctctgtcgtttatttatttctggggaatggaccggtggacttatgatacactgaattatgaattgtggtgagtaaatatgaattcaattgctttgattctggtaacattgatgaatttaatgagacaagggctgctccatttatgattttgcacaaaaagtggatccgctttgtttgcttttctgaacctgagtgttgagtgctaaaagtcaatatgtatataatgttgattatattactcgggcccttatggtcttacgtaatttttttaataagtt

SEQ ID NO: 79492 - DNA, 400 bp, Glycine max
agcttaacataaggcatgcgaagtgggtggaattcctatagcaattcccttatgttatcaaacataaaaagggaaaaggtaatattgtagccgatgctctttctcggcgtcatgcattactttctatgcttgaaacaaaattgattggtcttgaatgtttgaaaagcatgtatgaaaatgatgaaacttctggagaaatatttaaaaattgtgaaaaattttcagaaaatggtttctttagacatgaaggctttcttttcaaagaaaacaaattgtgtgtgcctaaatgttctactagaaatttgcttgtttgtgaagcacatgaaggaggtttaatggggcattttggggtccaaaagactctagaaacattacaagaacatttttattggcctcatat

SEQ ID NO: 79493 - DNA, 409 bp, Glycine max
cattacggaccttcaaactcagctcttatcacagctcatcttggaggtgaagctccttcttccaaggtttattccctacaggatggcgccgactcttacctcttatcctttgtcttccgctgcatctacatggtggaaaatcaccattaaaagacctcattgaagctcatagatccagtctacatagaagctccacaagcaagcttccatcacaactgttcttgggtgatggagatggaggcacgtgatgtcctttcatagcatagacttattatgaccccacaccctgctgcatgaacacgacctccacctacatgatctgatcgtcctatggccgtgttaagtatgtcgtcatgaccatggaggacaaatgaaccctgtgtcatttgttcttacaaccattcctaca

SEQ ID NO: 79494 - DNA, 459 bp, Glycine max
  unsure (1)..(459): unsure at all n locations
agcttgaagtggattntcaaatcttaatatgatcatttatagtgaatgcaagtcttacctttgttatttctatattttcaatatttttataatgtccatagtgtttgtgaggaagtgtaacttcaacaatcgacaaaaatttacgataattagagaatatggatgttaaaaaaaattacaaaagtagtaggaacaagaattatgtttttatcttttaacagaatgtgctaatgagttgataaaactataaaaaagacgcgtgtccctgtcatataactttatgcatttgcaaaaacaaaaaanaatgcacttcatctgctttcgatattattatcaccatatatnaggtntagaagggatcaattgaaggttcaagtgacctcanatctcacccttaagggctatgggttgnacgatngatcactgacaacagtgttggatcaagtggcctctgaataa

SEQ ID NO: 79495 - DNA, 465 bp, Glycine max
  unsure (1)..(465): unsure at all n locations
acactatgaaactaagctagagtatgcncgagtcattcatccctatgagatgttgttgtagtattggcgatcagaattgccattccttggattatagggttgaaccaagctcatgcttttacaaaaaggttcatcaagtcaagttgaaatatggaagtaaccgtcttgcaaaattggggcaaaagatgaatcgagtcacatcactgcttcgtctactgccaaacatatttaggattgttgatgtccttgttacttccagtttcaccttgacaaagatgtcatggaccatgttgaaaatctaaattgattcaaccccatatcctgcgtaaaaattcgcaatacttcaattgtacatcattcgcatacatccatgcttttcattggttgcattgctcattgcattctttcctttgaaaataaaataaaataaaataaaatgaacttaatcattgggtataaaaagaa

SEQ ID NO: 79496 - DNA, 403 bp, Glycine max
  unsure (1)..(403): unsure at all n locations
tgcagcttgtgggataaagtctcacgactgtcacgtgctcatgcattaatngtnannccnggctatactagacatcttgccaaacaaagtcaggttaaccatatctatactgtgctttttcttccatgcgatatgtagcacagtccttgatccagtcatgttcgatgagctggaaaccgaggccgccacacaaatgcgccacttggataattattttccccctactatgcccgacaacacgagtcacttgagtatgcctctgggcagagaaatcaaatgttgtggtcctgtctatctactgtggatgtacccggtcgagcgatacatgaagatttaaaagggttacacagaatctaatcggccagatcattattgtgaaaggacattgctaaaaagccattga

SEQ ID NO: 79497 - DNA, 398 bp, Glycine max
  unsure (1)..(398): unsure at all n locations
ttcaagaatcaagagattatttantcttgatagtattaaaaagcgtttttcataaactgagtagcacatgaaattctctcaaaaccttttaccaaagagtttttactctctggtaatcgattaccagattattgtaatcgattaccagtagcaaaataatcttcaaaaagctctcaactgaatatacaatgttccaattgattccaaaatgttctaatcgattacaatgtgttggtaatcgattaccagtgtgtttgaacgttgaaattcaaattcaaatgtgaagagtcacatcctctcacataaaagctttgtgttatcgatgacactaatatggtaatcgattaccagtgatagtttctgaacacatcacaatatgtaactcttcgaatagtttt

SEQ ID NO: 79498 - DNA, 346 bp, Glycine max
  unsure (1)..(346): unsure at all n locations
accttgaacaggccaccaactcctttctccaaccatgctatttgctcgcgactggtccctttctccctttcgcaactggagtncactattgttatctcatagagctcccgcgaaatccgctccggccataactcttccttgcgagccctcttggactctcgcgccagggcacatgagcgtatagcattctcttcacgtaacccggcacactccttccgaacgagtgaagcggcccacccgcacctctccttggcaagggtcgcccttcctaactcgcttttgagagctcggacctcctcgtcctcttacggagcttccacactctctttgctgacgactttaactt

SEQ ID NO: 79499 - DNA, 400 bp, Glycine max
  unsure (1)..(400): unsure at all n locations
cccaacccgggcatagtcggtcagtgattcatgtgacgtacctaagcatgcgagctcctggcagtcaacagataaaaggaaaacaagaccacagagcatggaggcttgtggtggctggccagctgtgaattttgtgtaatatgtggattgtggcctctggtaatctattaccaagggtgggtaatcgattacaaggcttaaaattgaagacagggggctaagatggtctctggtaatcgattaccaacgggtgtactcgattaccaggcttgaaaacgaggtcaggaaactagggaagcctcttgtnatcgatatcggtgggtgtattcaactatcatgcttgaatagggagatggtataaagagacgtcctctgactatcaacacgcatgtctactatc

SEQ ID NO: 79500 - DNA, 465 bp, Glycine max
tacagctgctcaagtgctctatgtagctgcatggaagggcttacgtctgtatggcggtcagcaaaggagtacacaccacacacccttgcgacaggcacagatttcagattcaaagctatctgggttaccaagttaaccaatgcatccagcatgccttcaagcttcttatgctcaaatgatgcagatgagtgtgtagctacctcatgcactcctctaatgactatagcatcatttctggcgctgaactgctgggagttggaagccatcttctcaattaaattcctggcttcagtgggagtcatgtctccaagggctccaacactggctacatctatcatacttctctccatattactgagtccttcataaaaatattggagaagaagctgctctgacatctgatggtgggggaaactggcacatagtttcttaaatctctctcagtactcatacaagctctcttca

SEQ ID NO: 79501 - DNA, 380 bp, Glycine max
tagcttatctttcacaaaacttgccaatttcttgtgttcttcacattccacccacagattatgtttactcactttgagttcatcataatcattgtgtgtttgtgcacactctctccaaagatcatatattacttccttttgatgattgcgaagttattaagctccttcagatcttattgaagatctttcacatttttttttcccactatttgaagttcttaagaagggtagcttttccgccatcatttgtctctatctcaatgcacaactagaactatttttctgtaagagatttgcaagctttacctgcttaagtggactcatccagtgaaccatctacttgatcttaaaggggtttctcaagctttaaatgatctttg

SEQ ID NO: 79502 - DNA, 453 bp, Glycine max
  unsure (1)..(453): unsure at all n locations
tactcagcgtgccaggtggttgcagagttagaggctgngctgatagagttggagtccaagatgggtgagtctgagttgtgggtgtctaaagagagggaggccagtaaggagcttgaaggggagctgatagtgaacaaggaataggctgtggagcgacatgaaaaaggctttcaaaaggacatcacgcaggctgggttctttgccaatgacattgacttgggtctttttgaccctttcaaggacgtgaaggacgatgttctgctcgatgaggaagatattgctgtcgaggaagaagctgttaaggaggaggctagcgaggaggcacaagatgttggggccaatgtttaggcatgtgattctttggttatcttctttttttcttcnngtgtggatattggctgcatangcgttgtaatgatgacaagtattattttttcttgataatgctcatgc

SEQ ID NO: 79503 - DNA, 275 bp, Glycine max
cacaataggatgagggcaagagtgatttcgaatatctgctctattgtgcagaattttgctgttaaaatgtgtagcagaattttgtgcttgtgcaaaaaatgcttatgcatggctggttgtggaaaaggctgtacatattgggttctggacggtttctagcacatcccaacggtcaaaatgtttaattatgtactatggacctccagtaaaatatttgagtcgatccaatggtgaacgaattggaacgaagagaatgttgctggggtatttcagtt

SEQ ID NO: 79504 - DNA, 489 bp, Glycine max
  unsure (1)..(489): unsure at all n locations
nttacatatggtcgtgagccaagccagactcttatgtaagttcagccgagccttanaaaaaagcctatgacaagtaatgagtcaagctcaagccttacgtattcaactcaagccgagctcaagcctaataaaacttggtttggcttggctcatttccacccctatatagggtcatgccctttggcctaaaatatacaagcgctacatactagagattgatggaccgaattttcaagcaacaaatcgggcaaaatgtcaaggtctatgtcgttgacatggtcatcaaatctcaaagcatagcctaacacgtggcagacctataagaggtcttcatagagctccgcaaatacgacatgcgcctcaacctataaaaatgtactnttggggtctacggaggcaagttcttaggctttatgatcatgcatcaaggaatataagccaatcccgacaaatgcactggctatttagagatgcgtagtcctactaacg

SEQ ID NO: 79505 - DNA, 418 bp, Glycine max
  unsure (1)..(418): unsure at all n locations
atccttaaccaccgcggctgcagcttgctgacagaaagtgcttcatgtcatttctacatcctctgacctgtctttacgctgtaaccagatggggaacgctacaggtttcttgttattagctctaagtcttgcgaagttggaaaatagagatattaaggctatcagatactcgccactcacagnnccacaagcccataaaactatctcaatagcggctataagcaataaaaaacctcgcaagaaatataaaggggggaggggtagaccgcgctctgcttaaatgaaacaccattgttcatcaatcaattctgtgataaaactgcaactatttacatgttaattaagctctgaagtgcaatctgtaattgttcaacctaccattattggatagctaaaaatgcataagtgtctattttgc

SEQ ID NO: 79506 - DNA, 473 bp, Glycine max
ggaccttaaaactccctcaatcactggtctcgccgagaaggttagtgtcatctttatttcttcaagctaagctactattggcatgctacatcatacttatgtgcatctcaacaagtgatgatggcatctaaaatccaaattaacataatgtctactttgtcttctacaggttagggcgatatgcagctgagtcttacttggagcagattttatcacatggattcttccatgctgaccctgtgcgttcttgttcttaaaattgctgagtggtttcacatggtctcttgtcttatgtctgtatgagttttctctgtatttcacttctaatccaaacagagcattagtgattcttttggattgctagtaaccggtaaattgtatgcgatagccaacatgttatgttcactatctttgaatatgctcttatactgcaaccttcaagcatctgttacccgaagtacaagagacaatgc

SEQ ID NO: 79507 - DNA, 447 bp, Glycine max
agcttctagattagtgtaccagatgactgctgttccggctaagctatcttgaaagagatgcatcaataacttctcgtccctggaatacgcacccatcttgctataatacatttttaggtgattcttaagacaagtcgtccctttgtacctattgaagtcaggtacttggaacttcagagggatgacgacgtccggtaccaggcatatgtcagtcatgtctgcaaacagataatcactgaacccttcaacaaccctcaatctttcttcaatgagatagagtttcacctttccttccgctgcccggggtggccctcccgcggacagaaacattggctgcattgtgtgggttcgaggttctcccgtgatgttgggttgatgtagtgcattgggcgcctatccctctgcgggaaacggggagtaagagtcgacatctccctgagcatgctc

SEQ ID NO: 79508 - DNA, 462 bp, Glycine max
  unsure (1)..(462): unsure at all n locations
aaaattccttcatctgatcttatcatcaaatttcctaagttttcttttccattgtttaatacaaagcatttgccaccaaaaacatgttgatgtgagatgtttggttttctaccattgaacaattcatatggagttntcttcaagataggtctgattacagccctattcatgatataacatgcagtattaacggcttcagcccaaaaatattttggaagaggggtatcattcaataaggttctagcaatttcttccaaagacctatttttcctttcaacaactccattttgttgaggggttctaggtgcagaaaaattatgttcaatgccattcttttcacaaaataaatcaaattctttattttcaaattcacccncatgatcactcctaatagatataatcttgagacttttcttattttgaataacttttgcaagttcctaaatgcttgaatgcatcatt

SEQ ID NO: 79509 - DNA, 457 bp, Glycine max
ctgttggagtagagacatgggacgcactcattttatttcaattaggaagtcgtatctagtcaagggctgagagactatacaagtttcctaacgatgtctaattatgtgggccattaagtctatcatatgctgacaatagccgagaagcccatgaatctcttcgggggcggagtacgtgtctgccatcgccttggccttggctaacaatcggggaagttcttgactcccgttcaaggtaagagcaaaccgatccatccacatggttgcctcttggtgtaaagagacgatcacccttactctagcctccttttccgcatatacttgagcatattcagccgcaatcctatgctcgtgggccgaggctagacctaactcttcttggacttggcgatgaagctagcatgttggtctccgtctcgcataaacgctgagacaagcttcttttggaccttgaaca

SEQ ID NO: 79510 - DNA, 391 bp, Glycine max
gtgatcgccgaaacttcacctataccgctgcgctcattgtttctacccacatgaaccagagacaatgccgcatgatatagtgaataacgataagcacagctctctgaatatgaaggttagaagcttttccggacaataaatgacattattaagagagaaatgtgatagggacaatattggcatttcataagtttgttgggtgcaccagcaaaaatgctgggtgcacctagcaacactctatatgagaatgtatagagatggatcatacacatgccttgcctaaaggaaaaaagaattcaaatacgtggggaaaaaacaagttggctaatgtatattataattattctataaaacaattgtcacgtctattatatgtttgttctactggaat

SEQ ID NO: 79511 - DNA, 464 bp, Glycine max
  unsure (1)..(464): unsure at all n locations
cttggttgctagagacagtgtaaatgctatggatatagaggtatctttgtcacatcgaaggcttagtcatatcagtgataaggggttgaattgtttagccaagaaggatatgcttccaggattgaagaatgcagatttagagaaaagttctcattgcatggatggtaagcaaaccagagtatccttcaagaagtatcctctctccaaaaaatctgagttgcttaaattaatgcatttagatgtctgtgaccctttgaagatgaaatcctttagtagtgcactgtattttgttaccttcattgatgattattccagtaaactttgggtctatgctntaaagacaaaagaccaagttctcgagaagttcaaggaatctcatgtcttagttgagaggcaattaggcaagaagcagaaacacattcgtactggcaatggtggtgagtattgtggaccatgtgatgtct

SEQ ID NO: 79512 - DNA, 375 bp, Glycine max
  unsure (1)..(375): unsure at all n locations
acttgtgagtngatttagccttattttctctttatttattagccaattcgattaataaagagaaatcccaaagagaaacgtccgattgattctttgctttattttactaaaagatattttttttattattatacctctttttggtttccaacgtgattacggcatgaccgaacggtcggatntcattttaatagaaattaacggatattacaattcaaatgatcggtggaaatttattttattttttgattaggcgagaaaatgacttaagtaaatgactaaagcacgttcaaagggggtacagaaggttaatgaaaatggaaataaaagtacgcgataaatatggggaccaccaatggtacatagaatgaattg

SEQ ID NO: 79513 - DNA, 457 bp, Glycine max
  unsure (1)..(457): unsure at all n locations
ctacattcactgctaagttcctcacttgtggattcatattatttatataaaaaatatatttaggtcataaaattctccttaggtacttgtataggagtaaaacaaaaagatataatgaattgaacttctctcatgagacaaaatcaatgtatgcgcctcattttttgggaagttagatgagagagcttctacaaaaatcaagtgtatcaaatgattttaatttatggaaattcatctcttttcctataagtggtcatacataattttatccaaacatgacttaatggcaaacacactaaatgtgaaccaagtataagcttaaattttttagaaattaaaagatttcttacaacatttagtgatttaaaattnttaactcanacatagtaaaagaaataacanaaattgacaaaanaaaaagaaagcangtactaatagtaatagaaattaataagtg

SEQ ID NO: 79514 - DNA, 301 bp, Glycine max
tcttcctctctcgaggaaagagttaatttcagcataaccatgttgattgacggtgattattgggaaaacctaacagccctgtcctcattctctatatattgaacatgagcataagaactctaaggtatgcaacgagagagctcgacctatgacataccatctgagagagtacagaagcctagaccaaacatcataaattcaatcattgtgacagatcctgtgtcttacactaatctctaagtagaaaagatagaaagagagaatcttaccatactgcgctcatgagcttccacccaacaca

SEQ ID NO: 79515 - DNA, 509 bp, Glycine max
  unsure (1)..(509): unsure at all n locations
acggacactctgatactcagcttacactgtcaatccgctagcgccgatttgatcactcttcctgttttgattcgtctgcaacacccnctntgttaatttagaaatgctagatctattcatcgtgtcacacgttcgatccaaaacctggttccacaagaggaaaaaaataccactcacttcgttcccataaaccctgtgatatttcccttccaatctcgtaacactcgattgtaatttgcgaattgtacagctagaatttcgtttcttttcttttttgattttttttatatttcctttattttccaattgtctttgctgggtttgcaaagtttgtacagttagggttgtagatggtgatggtctgagggtgtttttgtaggaaagttcagattttaattctgggtttttttggggggtggtagacaacaagggtttgaataacaggatgtttgccgtaaagtcaaaggtttcggagtgtctatgaccgtaattgtgactacatccgtcac

SEQ ID NO: 79516 - DNA, 358 bp, Glycine max
  unsure (1)..(358): unsure at all n locations
ctcaatcaatctgtccactgactaacatttntaatcgtgatcctactgtcttgtgctttctcatctatatacatgctcacgcaaaacttattattttacacatgctttaccctttcatgcgatcaagtcacaacacgaatttcacataaaaataattatgtgtgcgctgcatactcagaaattcaagncaaactgttgaggatgcttcaagacatacatacttctatccacaatcaaaagttaaccaatacaccacacaaaaaagtgtactanagacataagcgtaataattatgattatcatcaaaacacaagcgcgagattataatcctgtgacaggcttggactgaggatctcat

SEQ ID NO: 79517 - DNA, 318 bp, Glycine max
tctttctaatcaatctgtccactgtctaacatttctaatcgtgagcctactttcttggtctctctcatctatatacatgctcattcgaaacttatgtatatatacacatgcgtcaccctttcatgcaatcaattcacaacacgaatttcacaaaaaaataattatgtttgcactggatactcagatattcaaggcaaactgttcagtatgcttcaagacatacatactactatccacaatcaaaagtagaccaatacaccacacaaagaagtggctaaagacataagggaacaattatgattatcatcagaacaaaag

SEQ ID NO: 79518 - DNA, 372 bp, Glycine max
ctcaagagggcttcttgagaagctagatccttatctatctcacatccctctattaactaaattaacttccttagaaataattacggataaaaataacacaacaaataatcaaaaatcaaacataattactaataatatatagatatatatatcagggtgttacaattcaccctttaggtgtatacacatttttttcaaaaactagctgtgatcaatgaattttttcaaagaaaagatggaagttatcttctttcacaagcatgttggcttttcagctgaaagatatatttttcgttcttgttattattttcatgaggtattttgctacctaaacatgtgtatatatttgagaggtattgttgctatgcatat

SEQ ID NO: 79519 - DNA, 362 bp, Glycine max
  unsure (1)..(362): unsure at all n locations
ttagtccagtcttcttctggcttcaaatcatcagtgggcttatcttctgtgtccagcatctagagatgttcccagcctttgatgacagctttccaggttctgctatccagtgatttgaggaaggccaccattcttgctttccagtattcatagttggttccatctaagaatgggggtctgttcactgggcctccttctttctcctgttcatcagaatttatctccctagatctcactctgtgatttcgagtggtggctctgataccaattgaaatnttgataccacgggacagatgtcgtaccggatgtgacacatcacgctttaaacatgcatttatatgcgtcgttgaaagattaaccag

SEQ ID NO: 79520 - DNA, 406 bp, Glycine max
  unsure (1)..(406): unsure at all n locations
attcctaatgcgttaatatgaacctcgtttacgttaatgcattatggatcattaattgtcatcggttcagtcgtaaccgctccttttctagcagaaaaagacaaagctctgaagattgctgaccagtaaaatcttcacgtgtgactaattttgtcttatttttggatactttgttttatgaaatcgtgtttctatttttttgttacacttttttttaaacaaattaattgctatgttccatgttttaatacgttttaaattttttatctttattggggatatatatntatgtataacaaagtataacttatattgaattttcttatgctaagatgcatatatttgaatacgtcatataaatataatttagttaaatatgtgatcaaacgtacatatatttaagaat

SEQ ID NO: 79521 - DNA, 276 bp, Glycine max
ttcgccacgtatgtgtatatgtgtatatccgtattatattccgtgttctggttgttgtttgtatattgctttgtacacaagaaaaaacaagaagctgagatgagagtcttcttctcgaaaaaggcatgaccgaccaaatcagtggcctatctctgcttttctcttatctcccgaaagaggtaaattaagatgggctactggtatatcctcatttcgccctggggatattactttatgacatgcaatcgttgtgtagccggtttgagatacttggcg

SEQ ID NO: 79522 - DNA, 459 bp, Glycine max
  unsure (1)..(459): unsure at all n locations
ngtatactgaatngagtatggcacacacattgcatgtctgtattgcctttcagaggcttgaaaagtgcgagaaaacgggctgtgttttctgcattttctggaaaacacaatgaactcactaaacgagcatgcggcgctaagcaagttcatcaatactcattgtgtataagcattatctgaagaactcgctaagtgcgcttaccgcgctaagcgagttcatcctttgaggatgaacactcatcctcttgctgaactacctatggctaagcgaggctgaaccgctaagcccaggtaactcaaccaaattttgtgttgtaagccttgcgctaagccaagtttacttgagctaatcgtatttcatcactacaacttttaggctaagcgagcttagcttcagctaagccaacatgttatgtntcttaaggcgcgctgagtgagctttatcccgctaagcatcta

SEQ ID NO: 79523 - DNA, 391 bp, Glycine max
agcttctatataagctgaaccatcttatctatttacacaagccgagttctattcagaaaagtagagtgtatctctcttatccaccgagagcgattcttctatattcttgagtgatacaagaacaccctggctgtatcataggactctcacaacctctgtgtggtgccctcgctggaaagagtgattctttccctcctatcatctgcacccttgtgctttcaaaccacaatcccagaaatccacctgtgtccacaatatctcgagaccatactcccatccacacactcaaattaagtgaatcttgatcctaaattgaatctcaaaacgagatctttcacctcgtttggaatcacctcaattggagccctgagcctccgtattgccattctat

SEQ ID NO: 79524 - DNA, 464 bp, Glycine max
  unsure (1)..(464): unsure at all n locations
tcatggttggatgagttatacatacccanttttgtttanggttntgtgatgatgtttatatgctgaaattgcctatggaaactgttagagatgaagggtagagttaacctagggttaggaagtgagaatgtgatgttatgagtggaaaaagagtgaggctttgagagttggaaggctaagtctgaattctgtggtaaatggaggttaaagtgagttaatactagcttgaaatgtcattangacatgtgagaaaggttaggctgagctagagggaaaaacaaatgaccaaagtgaaccaagagccatttctagggcaaaattgggtgttgaagagtcaaattttgattcggtgagattttaggtgtaaatccagtttgaacaagtctaaatggatgttatggactggtgtgaggtgagaagttgcctcaaatntacctcattctaaatttcacttttcaaaccta

SEQ ID NO: 79525 - DNA, 287 bp, Glycine max
ttcgagaaaatgagagaatgatgagaactatttatttttatgatcacaatgccatagctgtgggggagtctgagagggggagaaatcattcaaggagacatgatgggccaagaggaagatcaaaatcgcaatcgcgtttgcgacgagacctgagtaacataccatgttactattgtggagagaatggtaatgtgcaagtgaggtgcacacaaatgaatgaggacctgaagaaattgaagatatgaacaaagatggcgccaacttcaagctattggataaaaagtgtc

SEQ ID NO: 79526 - DNA, 485 bp, Glycine max
  unsure (1)..(485): unsure at all n locations
tcaagctgaatagttgtctgtgcaataatatcaagttcttttctttattctcccnctcttccncttttttcctctgttaaactgtaagtatgaatctcactatgtctggctaatctttntgaaggtaccctcaaggggacttagttatctttatttagaaaatgcgaatatgatttagaacccagttgttgtaaacaatgttttttttcttccttctttctctttctgcttgttttttgaaaacctgggattggaaagcctacaaaggtgtgcccttgatagctgtttttgaaaaactgtgaaagtcctctttggttaggctggtgcttggaagaaaataagatcaacgtaagacctaaataagtgtgggctggtagcgatcttcagtactcggcttaatatccagaanactgataaggatcttgtatanttgttcttcanaananaaaaaaaagtctgggttcatcatattttatanttttctc

SEQ ID NO: 79527 - DNA, 231 bp, Glycine max
  unsure (1)..(231): unsure at all n locations
actaacattgattgagnctcctcttgattctcgaatcatgaccttgatcatcctcgatccttgattatggaaatcacatcctctagattcttgaattgttctggacctcactcttgacatcattctctagggaattatccttgactcactctngaaatcattctcttgggattcttgccatcaccttggttaccactcaaacaccttgaatcaatcttgattcatcatcat

SEQ ID NO: 79528 - DNA, 475 bp, Glycine max
  unsure (1)..(475): unsure at all n locations
tagcacttggaagttagacactccatcaactagcctgttgatgttgggcagagagtaggcatctttggggaactccatgttcagatcagtatagtcggtgcacattcgtcattttttgttggctttttttatcatgacaacattgctgagccaggtggaatacttgacttctccgatgaagttagcattggggagtttgtccacttcttttctaatagttntacgttgttcctcttctatcttccttttcttctgcgatatcgatttgacctggggacagatggcaagcttgtggcagataatgctaggttgaattcttggcatgtcaaatggatgccaagcgaacaagtttgtgtttctatataggacataggcaaagcgtcggtgctcatggctggtgaggtccctattgagctgcgtacattgtccgggtttgggtccgagctgcaacttgacaacctcttcgatgggcttt

SEQ ID NO: 79529 - DNA, 386 bp, Glycine max
  unsure (1)..(386): unsure at all n locations
ggatcacaggagagagagtntcatgtaaaccaatactatgttctggatgaaaccccttagctaccaatcttgctgtgaacctattaattgacccatcagcattctccttgaccctgtaaacccatttacagcctatggcctgtctgttaggatgtaatgatactaactcccagggatgatttttcagcaaggcatcatacttctgttgcatatcagagagccaatctttgtttgctagagcttgattcacagctttaggctcagaatgagtgagaaaaagtgtacgatgtactctacgatagtgaatatcatatttagacctcgtttgcataaggagggtagtgactgggactatattttgtgtagacgcagactctgaagcatat

SEQ ID NO: 79530 - DNA, 360 bp, Glycine max
  unsure (1)..(360): unsure at all n locations
taaganaganagattatcagtttagagacatctttcattctgttgaagactacctataaatactataagctaagaagagatgaaaaacccactgaagcactcatattcaagttcattgagtacagaaaggcgcgtagattcttgtaaagtatagaagagcattcaaatcacctcgattatcgtgagagaacaagctacatgctacaatcgtttatccatttggtagacgatcgaatcgctatcattgtacaatctaataaacagagacttatatgtgtgaaagccaacaatgactagataggacatataatacgttgtgcgtttgaaaactcaaatagctttatgagatctactactatc

SEQ ID NO: 79531 - DNA, 361 bp, Glycine max
cttgttgtatttatcttgttgttgcaagttatctatccagattttttattatgcacttttgtctcttaatacctttattttaaatcaatattctcaaacatcaaattaattaatatattatttagagagtatagtcaaatattttttttttggatatgacattaataatacgtaatagctttggtaatcctgcttcttaaatgaattaatccctctaatatataatattacattcttctctaattataagagatttttttaactaatttacatcctttaatgaaattgactaactcattcaataacatatttattaatatatttttttcagattatgtttaatattattggaactcaccat

SEQ ID NO: 79532 - DNA, 269 bp, Glycine max
cacacgcacagacactcgcacgttaaccctgactctagtatgccacggattataatcaattccaacgacattcttagaacttgataggaataaaagacgtcgtggtcgactatgagaaaattaaaacttgttactttaccgccttcaactcgctcactcatttgaagctgacgccatcctctatgtggtgatccatgtggtactaaaaaactatgagtgtttgataataaaccttctttgtatgagaataaatggattacatgctgtcc

SEQ ID NO: 79533 - DNA, 492 bp, Glycine max
  unsure (1)..(492): unsure at all n locations
ngaaagatgctggtgtgccanacacatgtcgtactatgtgtgatgtctggacgatgagtgcacacacatagctttgccactatgcacacaagcagtgcacataactgacaccatcacctctggagaaccacgctcacaagtagagactcaccctactcatcacactaccaccatatatctatgtttctcctcaacacgcgtgttacacactcaatcctcccacgctaccacaacatgcaagctaaacaacatngatacagcacattctatcacaactagacaaaacagagcaatgcatatactctgctcagcacattaaccaatatcacatcttttcttacttacagaccccatctacaattgcttatatcacaatcaataaccgtgggatccactcaacagtttactggatatctattgtgcataagcctacattgtgaccgaagagaacgagtatcatacattcggaactcacttcgaactctatttaca

SEQ ID NO: 79534 - DNA, 192 bp, Glycine max
ctcatccacaacaacaacagcctgctccttccttacaaaaagctgctagggcaagtagaccacacgtatctcctccagtgcgacatcgacaacgagaatagcagcgtcaacagagacaacaaaccactactgaggcgcccccacaaccttcatcggaagaaatactgaggcgaacgacaatatacaacatgc

SEQ ID NO: 79535 - DNA, 487 bp, Glycine max
  unsure (1)..(487): unsure at all n locations
ggtcgaactcatatgcatgatgatgccatgactcanaaatgtgatgctggaatatgataacggacaaatgcaggaacgatatgttcattatgatgttatgaagagatgcttatgcgatgcatgatatgaatgcattttacggacacgagagcccggaaaattatctcttcttacttgcgcatttgggggcgcagtgccccatgtgtatagttaagaaggtgatatggaccttccggcttaccatgacaaaggacgagaccaacatacaatgcatgctagagataaaatgcgggagtgacttgattcgcactgatttttggagtaaaaacgtgggataaactcatcttattcaaaaagttataactagtcaagatctgagcgataatacaaacttcctagtggtttctaatcatatggtccattaagtctatcatatgctgacnatagctgagaagtccgtggatcttctcggtggcagagtatgtgt

SEQ ID NO: 79536 - DNA, 407 bp, Glycine max
  unsure (1)..(407): unsure at all n locations
cagcttngcaagagaggacaacacaaccaagctcaatgggaacagtttaaagacatgggaagaagcagtagagaaatatctgaagaaatgcttccctgaatcttatataattgaaggcaaggaagtcatttcatcattccattagctcccagatgaatctttgagcgaagcgctagagagattccatagcgtcctgctgaaaacacctactcacggattctccgagcctattcagttgaacattctcattgacggttcgagactacagtccaagcaattgttagacgcttctgctgagggaaagattaagtcgaagactccataagaagaaacggaactcatcgagaatatggtcgccagtgatcatgccactttgcatgatagaactcatgttcccaccacaagaa

SEQ ID NO: 79537 - DNA, 449 bp, Glycine max
  unsure (1)..(449): unsure at all n locations
tcgtccctggcacaattgtcagaattcaaactaaacctgcattggacaagtcaagccaaccaattccaaacaaggtcatattccatcgacttttttggttattcaaggcatgcattgatgcanttcgcatttgtaaacccattgtgcaaatcgatggaacatggctttatggacaatacaaagggacactgttaattgcagttgcacaagatggggctaacaacatatttccattagcatttgccattgtcgagggtgagacagcagatggttgacactttttgttgcaaaacttgaaaacccacgtcacaccataacatggtatatgcttaatctctggtagacatgagtcaatcaaaaatgcatacagacgactngacagtgggtggacaacaaacaactcattacatgtgttctgtattcatcacattggccaaaattaccaaaaa

SEQ ID NO: 79538 - DNA, 200 bp, Glycine max
  unsure (1)..(200): unsure at all n locations
caagacgccnattccatgaggttgattccataaccccttactaagagaacactaggaaggacccctctccttgactttgttagatcacagcacggaatccctcctcccttggagctttatagcttttcataccaaaaatgccccttctaatctcctcatctgtaatccccctctctaacatctccaccttctgaaatcaa

SEQ ID NO: 79539 - DNA, 353 bp, Glycine max
  unsure (1)..(353): unsure at all n locations
tatcatataagggaagtctttttaaatttattggcaatcaaatgtattttgtgataatatggtcaacccgtgacagatcatgcattcatgattagtataaattatatgcaggatatatgccttctgatctttacaacttgaattcatcctatggttctgtggaagagcttaaatactgtatagagganatgcattctcaagatctgctggtaagttgtgctgctaattttgaacagatgactacctgaagatgtataggagccaacttatctaagtggtaggaagatgttaagtcattactcatttcatttgagatctcagttgccttcttacgataaatcgtgtgggaatga

SEQ ID NO: 79540 - DNA, 339 bp, Glycine max
tagctcttgcccaatgaacttttcttgtctaattttgtattgaacacaaaatcttagaaagatgttgataataattcagcacaaagtctcttcttaaaattcatgccatgggcacatatttatagccatttgatggctcttgaaaaacccagtaaaaagtggtgactcttggcgatttcttcaaaactagtcactttaaaagttgcgactcttgaaaaatattaagacactagtcactttaaaaattgtgactcacatttatttttcaaaaccagtcactgtgtatcgattaccattatagtgtaatcgcgtactcatcaatagatgtgactcttcatg

SEQ ID NO: 79541 - DNA, 302 bp, Glycine max
acacaatactacagctatgctgatgctggctgtgcatacatatgaaccactgccgttgtctttcgggcatagtgcccactgtgacccagagattgataaggcactctatgcaccacatgcacatgttgtgcactctatggtagaaaacagtgctaccgaccagctgcatgatatgggcacctgccacgtgtgtccattgttatgcctgggactttatcttatagatctcccgaacacatgagatgtggacatatgccctgcacgctgagaatgaaagggctgtatactctttgctggacacc

SEQ ID NO: 79542 - DNA, 477 bp, Glycine max
  unsure (1)..(477): unsure at all n locations
tcttcgctgacgaaaggatcaatgtgggtctgttaagaggcaaagttaatcatcctacttggatgaatgagaaacctgaggcatatggagagggcgagaatgaaggagaaacccatgctgtgactgtcgttcctacatggaaactcccccaccagctcaacaacatcattagttagccgatatcagcccttctcattatccaccacccagtcatccacaaaggccatcccaaaatcaaccacaaagcctgtctaccgcaccttcaatcatgaacaccacattcagcacataccgaaacacaaaccacaaggggaatttgcagcaaaaagcctgtaggattcacaacaaatttnggtgtcatatgctaactagctcccatatctactcgataattcaatggttgctataaccccatccaaggttccttaacctccattttatgaagatacgactcgaacgcaacatgtgtatatcatg

SEQ ID NO: 79543 - DNA, 451 bp, Glycine max
gcttactatatatggcaaagcttcattactgttgtttaagacatacaagtgagcctgtaacaaatcttctacacttggagtgatcacatgcaagcctcttgtacccttaccacccactctgtcatcatgccgagacctaggaagcccaacaggtttagccttctctaagtattctgaacgaggacaaacctattggtaatactagtggagctaaacttctcaagatgcccactatgttatagttcagaggaagatgcagcacatctacttttccactgcacaaaaacattacgtctatggtgggatactcagtcatgggttaatttcttgggtgcattcccacataatcccaaagatcactatctgcaacatgacatcaggtctgctgatggagtaagagtctaaatgtggaagtgtttgtggtatccctcacatcggtcattcggaagcg

SEQ ID NO: 79544 - DNA, 348 bp, Glycine max
gcagcatgcagctagccctaaggagaggaccttcttttgtttgtatatgatcaataataatgcctatacgtgggacctcctagagaagtatgaagtctctattattattaacatatatgatgtaattccttttgcaggcggagctgatattgaggaggagacactaacagacttgaggtcaaatccccttaagggggaggagataatcaaacctccctaggaagggaccagcactataaccatgagcaagacgctccaagaggattgggcttagctgctgaaaacgcccacggttcaacaaacctcagagaaactttgagcccacggccaaagtgggcccaatttctt

SEQ ID NO: 79545 - DNA, 344 bp, Glycine max
  unsure (1)..(344): unsure at all n locations
tcaaatcactcctacatctcatctctagtatgctatttctctctntacccactcctcacgtttggtgtttaggaaaaaacaccatatctaaacgcgccgcaagggatccctatcgcaccagatccaaatctataacgatgggtgatcaagaggagacgcatgaacatatgagagccgacatgtctgctcttaaagaacatatggtctccatgatggatgccatgttaggtatgaagcatctcatggagaagaacgctgccactgcctgcgctgtcatatctgttgacaaagcagacccgactctcttggcaactacgcaccatcctccctcaaacatagtagga

SEQ ID NO: 79546 - DNA, 433 bp, Glycine max
  unsure (1)..(433): unsure at all n locations
ngaactaggcgagttgatattagcctcagttgcactcttgttattagtcaattcagttaagaatgagaaatcccaaagagaaaatgtccggttgattctccgctttatgttactaaaaggtatattgttgttattatattattattttatctctttctgatttccaatgtggttaccgaacgaccgaacagtccgaatttattttaaccaaagtttacggatcatacaattcaaacgttcggtggaaatttattttatttttaagttaagcgagaaattacttaagttaaatggcttatgcatgtcaactcggggtattaaaagtcaatgaaatgtgaatagatatacattaaacacattgtggaccaccacgggttcatagaatgaatctataagcttggtcgaggtacttacccgttgaagatcgaagaac

SEQ ID NO: 79547 - DNA, 373 bp, Glycine max
  unsure (1)..(373): unsure at all n locations
gctgcatgcaagctcgactttcatgcacaggaggcataccatattttagtctgcggactatcattcgctgatcctatgatccgtgctagttgacttacgatgttgaacgcctattatactgcaaaataccacatcattccattnttgacctaaaagcgcgattataccagaaaggaggagcaaaagggtctttaattgagtcttggaccctactggacagataactcccgcattggagccaggatagtcgctgctttaaaaaaagggcctacggtcatgtcactttcaaattgagcacattatctcaagaacggaatgtgcatgacattattggatttgggcgaaggacatttatgataacaatgatttagca

SEQ ID NO: 79548 - DNA, 444 bp, Glycine max
  unsure (1)..(444): unsure at all n locations
ctaagcaacataaacactactctngatttctatgttgaaatcgctggtgctggcagcttgaacatacgagcttgtataaattactgggaattggtcactacgtgtgttgagctgaatttttttactggattttctagacatctggaacaaaaatatgaaaaaagaaccaagcaatttggattaaaggaaaaaataagaaaaatcacacaaattggcagaaaaatcagtgtccaagaaaaaaanagtgaaagggaagtgtgcttgttgttttagctgaaaatttgttctataattggtgcctattttataccaatcctagttctgaaatntcaattgaaaattattatgaaaacaagtgccaaaactagaggtttcttgagtcttttcttttatatagtttttctactctactctagagccattctatggttcactttgagtcct

SEQ ID NO: 79549 - DNA, 370 bp, Glycine max
  unsure (1)..(370): unsure at all n locations
gcttgacttgagtcatcaagagataatatttatgtgaccatggcatgagtttcaattatgataatcaattatcaaacatctttcaatatctttatacagtaatttctgagtcatttctcttcatctttctaaaaggtttttatcaacactttctcttccaagaaaagttctctgttcaaaaacttgtgctattcatattnttcattctcttctccctttgccaaaagaacgatggactaaccacctgaattcttttgcgtctctcttctcccttacaaaagattcaaaggactaaccgcctgagaattcntttgattctccccttccccttangcaaaatatttaaaggactaaccgcttgagatatctt

SEQ ID NO: 79550 - DNA, 446 bp, Glycine max
tatgatgaggtaggccaaaaataagctaaacttgtgtattttgtcatccttaatatgtcttagttgtcttaatatcaactagttcatcaattaagagcacactgtgaaagaaaaaaatttaattaaaagtcactatatttacacattgtttcaatgttgtgttttcttttgatacacctaagaaatatttacacacatgctatcacattttcacctactcatcttggtcatgtttgataagtatatagttttttttactagcttcttaataaaaattctagatgttatttgaagtagctttttttaacataagtaagattattatcattattatgaatatatcttcttcttcttcattttcttccatatatgttaaccatgattctaactatataaattgtacttaccaatattcgaagttgcacacatcatatttgatgtggcta

SEQ ID NO: 79551 - DNA, 447 bp, Glycine max
  unsure (1)..(447): unsure at all n locations
ggtgactcacaatcgtgctaagccatattctgcccctccttggaaatatggaaaccattctggaggacagaggaccagtggaggacttcaaccagttggtgggagttctcagccaattaacagggtgtctcagtctgcgggtagaggtagtggtggtagtggtgctcctgctattgttactacaccactcangtgtgggaagtgtggtccgcttgggcatattgcacgtgagtgcacagatagagaggtgacttgctttaactgccaaggtaagggccacctcagtaccagttgcacatatccgaggagggagaagaggagtggaagtctgaataatcatagtggacgaccaaagaccacagggagagtgttntttcttagtggtgctgatgccgcacagtctgatgaactcatccaaggtatgtgtttcataagtcaagttccctt

SEQ ID NO: 79552 - DNA, 440 bp, Glycine max
  unsure (1)..(440): unsure at all n locations
agcttggtcatcagaattctcttggatggacttctggattgtggaggtgtgttaatctaagagatgctagcatagaagtagctatggtaactgctgatggaaattcattgttaaaggttcctcctccacggggtattgtgagggttggtattgcttgtgaacagtatctatccaacacttcagttgaacagatattttttgtcccggatctctatgcttatttgggagagttagtgagaaaatagcaatagctggaaaaaagaaacaattgaaggatgtcaggaacaaatctcttagtggaaagctgatggacaatataccaagtgacacatctgtaactttgacattataanatctccacttcaattctttgaccatcttctggaaagctgagggaatcctctgcacactttgtcgagatgactgtctttagtgccctc

SEQ ID NO: 79553 - DNA, 480 bp, Glycine max
  unsure (1)..(480): unsure at all n locations
tctcaagggattgtatntataagatacaacagatatttataaagtgacataacccaacaccctgtttactgcaatgttttgaaaactaaatccaagattcaattggtgatgcctctggatcatggtttgattgatttagcctggtaaattttttatttaacatgataaaatttgaacaggacatagagctggttcatgctccaactgtgtgattggntcttttntttccctttatttngttattgctggagagtggagaggctggtctattttcacaaagtaattttacatccccttgttaccactcacttacttcaactggatagagaagtagaagacatttganaaagattaatcattggtctgaaaattatgctatcctgatctcttttngatgataaccgagagttaggaccatttatgagagttattggtagaaagtaatagtagtaaattattacttattatcagaatatgtga

SEQ ID NO: 79554 - DNA, 496 bp, Glycine max
  unsure (1)..(496): unsure at all n locations
ctaagcttattcttannattagccaagaattcaattttaatgggtttatgttttatccatgaccatggacacaaaatcttcaaaccctacgtagatctaacaagtcttcaaaccaccctgtttacaaattttcaaaccaccatcaaccttcattgtcaccatcaaatagatcttgcaattcctctattgcaccttgtttgctccctcaaccacctcaaactacgacaacatgatggctcctttgcacacacacacaaaaaaaataaataaataaaacccattatctaaaatcccgttgttgtcaacatccacttcgacaattgaccaaaagaacataaccacacaaaataatacaaaggcgaaatctaaattgttatagaataataatttgttttcctaaaactttgtaagtatataatgactaaatgtattcaaaagagacaatatttgactaataacaataactatctcaattctaatacgagttttttatttt

SEQ ID NO: 79555 - DNA, 413 bp, Glycine max
  unsure (1)..(413): unsure at all n locations
aaaaaataaaagtgaaccagttcaagacttgatgatacaagaatcgccagtattattttaacaagncttncttacttttgtcttgcctgcatctctgggctntttataatacacagaaaatatgaaaagtaatggttaatatattaaaaggctttaattaaaaaattgatattcaatgccatcagttcataacatatcgcgattgttaataaaaccctttatttaaatagcagccaataaaaatctttaataaacatttagtctgtatatataaatgtgtcaactctccgctctagtctttatacttataaactttacattttgttactttgtaagccttatacctcagaattgcgtggactttacactggccaaaaaattacaccagagactaatcctaaagaaattactaa

SEQ ID NO: 79556 - DNA, 486 bp, Glycine max
  unsure (1)..(486): unsure at all n locations
tctcgccagagaactggcggcatccatggccataacagactcctcttgtaaatagtttaaaaacaaaccctctgtggtaaatagtttttaaaaggaccaccctacagtaaatttgccgctaagtttccttctgacttcacataatctatgaaaattgttccatcttttagcaattgcttaaccacattatgtctcagttgtatatatttatttttcccattgaatgttttattcttagccacaactatcactgactgagaatcataatacatagatattgatggggtcaatttcatttccaaaagaatgttagctaagaagtttttcaaccactcagcctcactaccagtcatttctagagcaacaaactntgactctgttattgatctaggaataatagtttgtctgacttatctncaagctaccgcaccaccaccaagagtaaacacataacccatagtgaatngtggctcatctaaatcaaag

SEQ ID NO: 79557 - DNA, 397 bp, Glycine max
  unsure (1)..(397): unsure at all n locations
cttggagtntccaagtgccaattcgtcttcttctgtagtccattcttcttctggcttcaattcttcagtgggctttccttctgtgtccagcatcttgggatgttcccagcctttgatgacagctttccaggttctgctatccagtgatttgaggaaggccaccattcttgctttccaatattcatagttgcttccatcgagaattggtggtctgttcactggtccgccttctttctccatgttcatcagaatttatctccctagatctcactctgtgatttcgagtgttggctctgataccaattgaaattctgataccaagggacagatgtcgtacatgatgtcacgacatcacgcttcagaacatgcagattatatgtgtccgtatgaacagatt

SEQ ID NO: 79558 - DNA, 475 bp, Glycine max
agtaaacagcctttcatttctctcctgcaacctatctttttactaatggataacattaaaatccactccctaaatttgcaaatcaaattgcacattaataaaattctccgaagacatgatattatggttaagatgagattccaagttcaagagaaaatttatggaagcaaacaattcttctgagatgtctatgagaaatgtcttggagtcattattcaagcttatatcttatgcacttgcaattttgtcatactgcattctacagatatttcagttctatactatagcaaaagggtctggccaacaactaatggcgtgtttggaattgccttcgaatgccaatccaataaaagaaggattggtgttcaacatgcattggaatggaagaatgctccagagcaaacccacactatggagtgacataatgacgatgggtgaagaacatgtaatgcaccctattatatgtttctagcaa

SEQ ID NO: 79559 - DNA, 329 bp, Glycine max
catgctatgtgctcgcgactggtacctttcttcctttcgcaactcgagttcactattgttaccccatatagctccgcgaaatattgtccggccatactctatcttgcgagccctcctggtctcttgttcaatggctcttgcggtaattgcattctcttcccgtaacgcggctcactccttccgaacgtgtgtagcggccaacttgaacttctccttggcaagttatgcctttcctaactcgctcttgagagcttggactttcttcgtctcttccggtgcttcataactctcttcgctgacgacttttaactcggcgagccaatctaaac

SEQ ID NO: 79560 - DNA, 405 bp, Glycine max
tgaccaatcgcgacccaacccgggcatagtccgtctgtgatatcttgtgacgtacctaagcaagcgagctcttggcagtcaacagatcaaaggaaaacaagaccacagagcaaggatgcttgtggtggctggccagctgtgaattttgtgtaatatgtggattgtggcctctggtaatcgattaccaagggtgggttatcgattacaaggcttaaaattgaagacagggggctaagatggtctctggtaatcgaataccaaggggtgtaatctattaccaagcttgaaaacgatgtcaggatgctaaggaagcctctggtaatcgattaccaaggggtgttatctattaccatgcttaataaaggaaatgggagatggtggaagcctctggtattcgataccatc

SEQ ID NO: 79561 - DNA, 408 bp, Glycine max
agcgtgtcactatggtatatcaatatcactctgaatcatatccccgcttcaatgcatgagactcaacataaaaacaaagataaaagagctatttttattatataaagtatacaacgatctaacttctaatattaatctctgagtcattctgataaatgcacaaacagtttatgaacacttgtaatttttacggagaccatcacccaagatacctatatacccagaactggattgagtggtccaattcctcccaacactcttagccgtctctcggcactcaaaactgtccggacttgcatcaaatagcataactaggttctctcccttctgggttttcatagctaaagaatttgacctatctctatctccaatccaacaatttgtctgggaaagcaatagcactctggc

SEQ ID NO: 79562 - DNA, 466 bp, Glycine max
  unsure (1)..(466): unsure at all n locations
tcttatccaaggctcgtcttggtggtgaagctccttcttctatggcttattccctagtggatggcgcctcctctcacctcttctcctttgtcttccactgcatctccttggtggaaaatcaccattaaaggacctcattgaagctcaaagatccaacctccatagaagccccacaagcaagcttccatcacttgggaggaatgaaaaaagttatgaaagaagacataaaaggaataagggtgatgaaagaggaggagacttaagaggagtaaagacctaagtaccttctttccaaggaaaaagtgatcctgaggcctatcgaagttgaacaaatattttcctacgataatgaagagaggaaggtaaaggtggcaaccctnntaatttttgattatgccttaatttggtgggaccaagtacaaaaggacacagaacgaaatanggactaccccgtagatacttggga

SEQ ID NO: 79563 - DNA, 488 bp, Glycine max
  unsure (1)..(488): unsure at all n locations
tagtgtacatgggatgacttctgcagtcaaagatctgctatatctggctccattagataaggtgacagtttaagcaatccaaataagtgttcactgagaaatgagaatatcatttttcagataaatgtaccaaggtctaagaagaaaaaaatattcatgtggtatatgtaaataatattagaagttcactactgtatttcccctgctacaggtatactgattgctgagattgaaatttaaatataaattagttatgtatcggatttgaactctctaatctccatataccagttgatatggcatgtctcaatgactaaattttaaagtcaaaatgtaaaaaaataaaaaaattaccattttcttaaaattcccttactttntattntcagtagaaaagtatagaatgtgcatganatgagccactntatgaaatatacttgaaatataaatgccaattgtnnttaaagtttgtatccttttatgatgga

SEQ ID NO: 79564 - DNA, 354 bp, Glycine max
  unsure (1)..(354): unsure at all n locations
agcttgtatttgttatagggaggatagctatctaaaacacctgcgctctttctcattgggtgaaattcatgttgatctcactaatcggagaacatgtattattataatgggaaacgaaacttacatatnattagcggacctacatgaatttcacgggataaaagaagatattagataatgtgttgccagcatttctcttgcgatactcataatgcctatactaaagttttgtttggaaaaagtccaggaacaccttgcaagaacccttatggccatggacacgttcctggcttcatcagccaagataatttaagaggtggggagatcatcatcaaagatcaaggcagattatga

SEQ ID NO: 79565 - DNA, 476 bp, Glycine max
gggaacatacaatctgaatttaggtcctcttaaggacttattcttaatatctgctggctgatcattagaaccaatgaactcagtgacaatctccttggacagaagcttctctcgaatgaaatgacaatcaatctctatgtgcttagtcctttcatgaaaaactgggtttgaggcaatatgaagagcagcctgattatcacaatacaacttcattggcagctcttcacaaaacctcaattcctgcagaaactgtttaatccacatgagctcacaagtaaccatagccatagatcgatattcagcttctgcactggaccgagcgacaactgtctgtttcttgcttttccaagaaataagatttcctccaatgaagacacaatagcctgatgtagaccttctatccatgggacaaccagtccaatcagcatcacaatatcccgatagttgtgtattacccttgtcttcatacaataacc

SEQ ID NO: 79566 - DNA, 497 bp, Glycine max
  unsure (1)..(497): unsure at all n locations
acacttagaaactcaagctggaataatagattgaatctgtggtcctcttacaatggtttgccanagatttcgtangctgaacatgtgagtttcggtcatgtccacctatacaataagttcatgcttcaattggatgtaaaaagaacgtcatttaattaatataagttatactcataatttgattttttaacaactaagaatatcaacaataactcttatataggatgtcaataacccttgtcaaattggatacctcatgctcatacaatggcaaaacatcccaaatcttcgcaacctanacataaattgagttcttcttaactacatgttttatccacaaaagataaaaacaactcattaaccttatataactcaaactattgtgaacaagtatgatcaataactccaatatttatctcctgatgagtggcgttcaataaagaataatatagctaagatacatttttttagaaaaataactatgctattaaaagttt

SEQ ID NO: 79567 - DNA, 332 bp, Glycine max
taagctgctcctggggcgaacctatcctaactgcccacccttgtgtatttttatatgggcctaaccgcacaacctcgtgctaagccgccatgcccctgtgcccttagtctggtttgtctagacttagcacccctccttgcactaagcccaatttcttctttgtcccataattgtggctagcacccaccaacgcgcactatgcccttgttaccctgcttctgttctaatatggactgagcttagcgagcatcgtcgcataagccttataccttctctgtctgagctgtggcactaattgggcgtagcaagcaacctcgcgctcaaccccacat

SEQ ID NO: 79568 - DNA, 446 bp, Glycine max
  unsure (1)..(446): unsure at all n locations
cgcttcnnactngcaacanaggagttgagcaggtattaaatatttttcttcaaactcttagaggtgactntgagcgnttgtttatgaaggagtccgagtcaatttctgattatttttctcgagtattggccgtagtcaatcaacttaaaagaaatgctgaagatcttgatgaggtgaaggtcatggaaaaaatacttcgaactttaaatccaagttttgacttcattgttaccaacattgaagaaaacaaggatttaaagaccatgactattgagcaactcatgggttccttacaatcatacgaagaaaaaaaagagagaaaaattaaacaaaaggaggctacggagcaactacaacaactcaacgtaaaggaagcatactatgcaaattacaagagccaaagaggacgaagtcgcggccaatatcgtggacgtggacgaagacat

SEQ ID NO: 79569 - DNA, 474 bp, Glycine max
  unsure (1)..(474): unsure at all n locations
attttctcacagataggacatgcgcgatgtccttnttcactatattactcaaatttccatatgctagaaagtcattaatggtacaaaaaaccatatcacgcaaggtgaacgtctgctgcacattcgcatcccacacacgaacctcctcttcccataattttctcaagtcttcaatccagggagtaagatagacattaatatcattccctggcttccttggaccaactatcatcatacaaagcataatgtactttcgtttgatgctcaacaaatgagggaggttgtaaatcatcagcaaaatatgccatgaactgtggttagtgcttaagctaccaaaaggattcattccatccaaagcaagaccaagcctaacgtctcttgggtcgccaccaaaatcatgatacacataatcgattatcttccattgcagagaattagctagatgtcggagaaattcatcagctttctgtcata

SEQ ID NO: 79570 - DNA, 410 bp, Glycine max
tactgttaatcaagtgcaacacagttgttttgttcacccacacataggactgtgactctttatatctatcatacaagactgccggaaacgtcaaactgaccctaccacttgaatgagtgatcgatgcaacctctattactatcgaaatgccaatagaagtcatcagtaggaccttcactacttctttggcacaagaggatgggacatgagtaatggtccttcctgttacaggcgagggagacagacaagatacatcatccaaggtgatggtcatctctacgacaggtatgtggaaagaagacctcttctattgtcatctcttacaaaggcattcaccaaaccctttttttggttaggatactgtgtcataacaagaggtgataacctagatcggccatatagccttaact

SEQ ID NO: 79571 - DNA, 321 bp, Glycine max
  unsure (1)..(321): unsure at all n locations
agctttacttngaaaatattcatttatccaagtactcgttaatgaaacatgttaatcctgctagcctcctcatttgtccaagctaaaagtgtagaagcatatattaatctagtgtgcctgtgcaaaataacctgatcagttntcaatgtcactattcaaccctctctcctagagacaaactggtcccttcaaaatataattaatatcgtcatttcactactagaaattatagatttaacatcgctaggttaacaatgattgtggcattctagcaaataatatgagtgtattaacatcgactttgtcaaaaccgatgttaac

SEQ ID NO: 79572 - DNA, 477 bp, Glycine max
  unsure (1)..(477): unsure at all n locations
atcacgtgacctctaaaactaagcttcccaacatccaagtaattcaacatccaagcatcatgaactaacacagtctagaaaacagggcagaggcagaatactctgcccaaaacacaaaccaacatcacaacttttcacactcaaataccccaataatattctcttcgttccaattagttaaccgttggatcgactcgaaaattttactggaagtctctagcacataaatctacattatgaccgttgggatctgctagataacgtccagaacacaatctgtactactctttccacaaccagcaaaaacacaacactttctgcacaaagccaaaattctgttgcacctatttgacagcaaaattctgcataaagtgcagattttcgaaatcacactttccctcantccaatttgcccaaattgaatcctacaagtgccaaatcatgtatcaatcatgtctaaaccaaggacaagcttca

SEQ ID NO: 79573 - DNA, 337 bp, Glycine max
  unsure (1)..(337): unsure at all n locations
agctngcaccaacttctcatttcatccataagatactatttcatattctaatntaaggttcagtgacaagactaaacatcataataagaccacagatatatttattttatatttgatacttatctgtatatactaaaaggaaaactgctgaaattagtaattattgattatttctgcaacatataggaaagaagacgttatgtgtgcttttttagcgatacgatgttatgtgtttaacagactaataatatagtgttacgcattgaaacatcaaattataaatattttgtataaaaattaatgggatatagttgttggatgtatttattcacaaaaa

SEQ ID NO: 79574 - DNA, 462 bp, Glycine max
  unsure (1)..(462): unsure at all n locations
acactaagatactaagcttatctagccaaattcactaagtgtacaacggaccctaactgtttctaattatatgggccattaaatctatcatgtgttgacaataattgattagcccgtgaatttcctctggggctgaacacacttcggccatggcccttgctttggctagtagtcaagggaggtcttgacttccatttaaggtcaaggcgaacctatccatccacatggtcgcttcttgatgcaatgcatcaatcaccctccctcttgcctccttctcggcgtatgcttgtgcgaagtcctctactagctnttgctcatgagccaaagattggtttagctcctctttatactaccctattatagctagcatgctntgcttcgtgggttctaagtgttgggccaaactcttcttggatcttgagtaagcagctaactctttctttaagaccatgctatgtactc

SEQ ID NO: 79575 - DNA, 475 bp, Glycine max
  unsure (1)..(475): unsure at all n locations
gcttctcaggaggtgagcttagttnttagatgggtgtgtgtagctaagctctagcttctcaaggaagttttctcagagaagcttctcaaggaagttttctcaagaaagcttctcaaggaagctacctagtctataaatagaagcatgtgtaacacttgttgtaactttgatgaatgagagtcttatgagacacaactcanagttcaacttctctccctttttttcttccttcaatttcatgctccccctctctctttctctccctttttcttttcctccattgaagcatcctctccaggcttcttatccaaggctcatcttcgtggtgaagctccttcttctatggcttattccctagtggatggcgcctcctctcacctcttctcctttgtcttccactgcatctccatgggggaaaatcaccattaaaggatctcattgatgctcaaagatccagcctncatagaagccccac

SEQ ID NO: 79576 - DNA, 414 bp, Glycine max
ctccgctcgagatgaggaagtgttgaagggtgatacttcctgtttttttgttgaccacagagtggtacctggagatatgtcgtgggggtcacgagaccttgtggacgtcaggtggggtgctattgcccaaaaccaagcttgaccaatcccgacccaacccgggcatagtcggtaagtgagaacctgtgatgtacctaaacaggcgagctcctggcagtcaacagataaaaggaacaaagaccacaaagcaaggacgcttgtggtggctggccagctgtgaatgttgtgtgatatatgggttgtggcctctggtaatcgattaccaagggtgggtaatcgattacaaggcttaaaaatgaacacaggaggctaagatggactctggttatctactaccacggtgtgtatctatta

SEQ ID NO: 79577 - DNA, 394 bp, Glycine max
  unsure (1)..(394): unsure at all n locations
agctttgatggtgtcgagaagaaatcacatgtttgtcatcatcaaaaagggggagaatgtgaatgtatgtatacatgattntgatgatgtcaaagaagaatctaacaaggctgcttcaaatgataagcatttgcttcaagaataattcaagattgcttcaacaaacaaagccttgtntcaagattcactaaagaccaagccttgccttantacacagtgctttcaagacatgcaaggctctggtaatcgattaccaggaagtgtaatcgattaccagaagacagggttgagaaatagctgttgaaaaatgttttgaattgaatttcaacatgtaatcgattaccatatgtctgtaatcgattaccagcaacgaaactttggaaattcaaattca

SEQ ID NO: 79578 - DNA, 482 bp, Glycine max
  unsure (1)..(482): unsure at all n locations
ntataganattcaactggtcataactgttcacacggatgttcgattctgngacataatatactgagacgctcaatattgaacaacgaaaactctcgagaaattcaaattgtcataacttttcatacggatgtccgattcgaggacataatataccgagacgctcgtaattgaacaacataagctctcaagaaattcaattggtcataacttttaactcgaatgtccgattcgatgatataatatatagagacgctcgaaattgaacaacagaagctctcaagaaattcaaagcgtcataaattttcactcggatgtccgattaagttgcataatatatctagatgctctaaattgaacaacggaagctctcganaaattaaaaatggtcataaattntgactcggatgtctgattcaggcgcataacatatctagacactcgaaagtgaacaacggaagctctcgagaaaatcaaatactca

SEQ ID NO: 79579 - DNA, 320 bp, Glycine max
gcgcgcagctaatgataaagtcaactgtgtaacataccaaaggtatcaaacacaggcaatttgaatcaatttatatttttttgtaatcacgttggcactggaatcaatacacctctggaaatgataccagagagaaattcttgaaaaacttttaattaatttcttgccaaaccttgctactcaatggaatccctcttataaaatacccttctaagactcaagactgtctgacatctacttgatatcttaacgctttgctgaaaaagcttgaacgctggatctttgcacatcaaacacgcttgaccttgcacatttgtggc

SEQ ID NO: 79580 - DNA, 328 bp, Glycine max
  unsure (1)..(328): unsure at all n locations
gcttttcgtcttacagaatgcaacaagtntttactgataaccactcaggtatttccgcccgtcagcgtgacacaaaagtcaggncgacagatcttttatctctgaagataacgnnnatctccacgtgtcaacgggcttgtcagccgcgattgacgaagggcgaagaagacgacgttagtctctgcgtgctatcatggcttttcgtcatacagacaacaaaaagtttatacggataaccactcgggtatttccgcccgccagcgtgactcanaagtcagtatgacagatcttgtgagcgcggaagatgacgtanatctccgcatgtcaa

SEQ ID NO: 79581 - DNA, 476 bp, Glycine max
tcccttatccgtacttggaaggatctgattactgccttcctattgcaatgtcagtataattccgatatggctcccgatcgcactcagctgcagaatatgttcaagaaagaaggcgaaacctttaaagaatacgcatagcggtggagagacctggccgcacaagtggctcctcccatggtcgagagagagatgatcactatgatggtagacactttgccagtgttctactatgagaagctagtaggttacatgtcgtccagcttcgcggacctagtgttcgccggggaaagaatcgaggtaggattgaaaagaggaaagttcgattacgtttcctccacgagtgcgaatgccaaaagaatcgggacaacggtggcataaaggaaggaaggagatgcccatgccgtttcttcaatgcccgcatgggtcatacccccgcagacctctcatggaactcatcagtatgctcaacatcaccc

SEQ ID NO: 79582 - DNA, 316 bp, Glycine max
  unsure (1)..(316): unsure at all n locations
gagcttcagcctntgatgatgaagnaccgaatatagaatgatagggctgatgagattcgaacgctcaagaagaatagagaagagctcccctccgctttactaaattctgatagaagagatgatctggctagagctgcagacctgcgatatggagcaattcaagaggtggaaactgcaatacaacaacttgaagggagcactgaagagaatctgatgttgactgaaactgttggaccggagcaaatagctgaggttgtgagccgctggaccggtataccacttacaaggctnggccaaaatgaaaaagaaagattga

SEQ ID NO: 79583 - DNA, 481 bp, Glycine max
  unsure (1)..(481): unsure at all n locations
cgacattcatctgcaatttcattgtttntagggacatgtatttatgtctgcttatgtttcagattctataattntgtttaaagtcttattttccatctaaacaagtttgcttcttgttcgaataatctaatatgccaaaataagtttacttgtttgtatatttgcagttgatttcacattaaaggaattaaagtcattgagggtgaaacagaagtgtagcttcagggaccaacagtttaatggttagtcccttctttgcagtattgtgttattatctttcgtttgtttgacttgttcattcattggttctgaaatattctgttaccacagctcactacctgatagttctaaaatcattatcaatattatttctaattcatgatagattatgataagaatgacataaatactggaaataagatggaactgaaggaagaaatctcctcttacaggataaattagttctcaacanacaaaaaca

SEQ ID NO: 79584 - DNA, 349 bp, Glycine max
  unsure (1)..(349): unsure at all n locations
agacaagtggcctcataaatcttaagaaggggggctgaattaatatattgtatactattcccccaattaaagatctatttcactctcaatgcaagttacaaactcccttaaaaataaactcttatataatgattcacactgaacaatttgaagtctaatataaagctataataaataaaagattttaagggaagagaaagtgcacactcggatttatactggttcggccacacctttgtgcctacgtttagtccccaagcaaccaacgttgagagtttcactatcttgtanaatccctttacaagtactgaacacacaacgacaatactttctttgtgtcatacatatt

SEQ ID NO: 79585 - DNA, 461 bp, Glycine max
  unsure (1)..(461): unsure at all n locations
tgagatgaggaaatgttgaatggtgaaactttctacttctattgttgaccacagagtggtacctagagatatgtcgcgggggtcaggagaccttggggacgtcaggtggggtgctattgcccagaaccaagcttgaccaatcccgacccaacccgggcatagtcggtcagtgagaacctgtgatgtacctaagcaggcgagctcctggcagtcaacatagtaaaggaacaaagaccacatagcaaggaggcttgtggtggctggccagctgtgaactntgattgatatgtggcgtatggcctctggtaatcgattaccaagggtgggtaatcgattacaaggcttaaaaatgaagacaggaggctaagatggtctctggtaatcgattaccaaggagtgtaatcgattaccacgcttgataactaagttaggaaactaagggagcctctcgtaatcgatta

SEQ ID NO: 79586 - DNA, 273 bp, Glycine max
  unsure (1)..(273): unsure at all n locations
agcaaagaagtcaacccgtccaggagtccaaccaatggggcganccctatgagaattatatcaatcttgaggagacactgaatcaactcatgcatatgtccatgtccaactataggagcacaaagtcatccattaagaacctggagaacaaaagggacaattagcccaacaagtggctgaaagacccactaacagctctggagccaacatcgagaagaatcccaaagagaagtgctagggaattttcactatgagagaaaatgttgagaaaga

SEQ ID NO: 79587 - DNA, 481 bp, Glycine max
  unsure (1)..(481): unsure at all n locations
ngctaggaggaatctgttatcattcttccatgtactattgcataaatcatgtttcactttaaatactttnttgcatcttcggaatcaatacctcgatcgtgacataaattttattttttaatgtaaatttttttactgaaattaattaatttagtcatatatgtctcaattacgttcaataattcaaaataaattatccatataagatttacatactcaactgtaaaacaaaaaggacgatcctattttgatgttcatctatcaataaatattcctccttccaaagatccaataggaagaaaaggaaattctaaaaacaaagaatgctgacctttgaacaaaagctaggagaaaggaaatgttggaattttcttttactaagatggngtggtttgctttaaaaattaccataactattatattttgtttanaaatttaccaatatgatacaagtcagatttctgaaagtcgacttagtttt

SEQ ID NO: 79588 - DNA, 376 bp, Glycine max
tcttgaacttgtttactcaatctctaaatccatcttcgggatatttgtcatcatctttttcatcatcaaaaccacttgaatctacttgaatcatcatcatgaagcttgcttctacaagttatagtgatgacttgttaacctttcgaaacttcaacagaattacaatagagtttcttgccaatatagtgcctgctgaaacattatagcattttttacccttattggcactttacaaaatcaagcaaataaaacaagttcgggaatgaatacatttgatatgctccataccaactgaccaccatgaatgtctaagggattactagaatcacaaatgtttgcacaatttaactttcaaaatcactatcagcactaataa

SEQ ID NO: 79589 - DNA, 466 bp, Glycine max
  unsure (1)..(466): unsure at all n locations
ggaccttgaaactaagcttccttagggttgagaaccattgattgaaatgtacagcatatattcttcttcatagatttaatccatgaccagagtaccagtactacatcgtccagcaatctactcccattaaacgtgtggttgtggaacactattttatttttgtggttccaaattaaccaagtcaaagaaacccaccaacatttccatcttgtaaggttccttactccagctgccccaagtgtgtgctgcaggaaatggtctcttgggttaattggcaatgctattgttatattagtccaagatagagactcccaccacagaggtagggtacagctgcagttgaaaaatagatgctctgcctcctcgtctntaagtccacagaatggacacaacctatcatttaccaacacctggcgccttataagaattcatttttgtggtaacctgtctttgatcagtctccaag

SEQ ID NO: 79590 - DNA, 365 bp, Glycine max
  unsure (1)..(365): unsure at all n locations
gtattccacgcttaatatgattgtatttctgggttgagaagctctggncaacatctaactcactagtcaaacaaaaatcaaaataaaagaatttcctcattaatgatatcttcataattatgttatttttaggctaaaaattattttgagaattgataaaattagtttaattataaataagaattttcatatttttagttaaggaaatgttcattatgcattttaattaattattgagataattaatgtttaatcatgaaaatgactttaactaattgagtattccaacataaaatatgtacacatgattcttattggagcaataattaatatgatgtagaatgccaaaatgtttttaaaaacat

SEQ ID NO: 79591 - DNA, 490 bp, Glycine max
cggacctataaaactcagctgatgtgctgccatggattctcggagctatggtatggcttttgtgtatttgaagagaatggggtgaaatcatatttcaccccgccttttatttatttatttttttctgcagcgcacactcacccaggtgagctggtcactcgcccaggcgagttaacatattttttttattttttttaaaaatatggattattattattattatttattatgattttgttactatatatattttcctctaaactttataatcaagtataaaattctaggcaaattcatcagatgattcaagaaaaataaacaaccctaacctgcaacagagaacgtaaaacataaaattaaagagcaagggtagagatactaggttgtctcctaggagtgcttgtttaacgtctttagctggacgcgtggtctatggtcgacatctcatccttcctaaatctttccttgatgtgagcaatccgatatggac

SEQ ID NO: 79592 - DNA, 406 bp, Glycine max
  unsure (1)..(406): unsure at all n locations
agctntgcagatttggtcttcgccagtgaaatgatctatgtgtgtccgaaaagaggcaaatttgatcatcctactaggacgactgagaaaactggggcatatttaattgtgaggacgagggagaaacccatgctgtgactgccattcctatacggccaagtttcccaccaacccaacaatatctgtactcagccaataacaaactttctccttacccaccacccagttattcacaaaggccatccctaaatcaaccacaaagcctgtctaccgcactttcaatgacgaagaccacctttagcacaaaccaaaaaaaacaccaaccaagaagtgaatttggcagcgagaaagcctgtagaattcacccccaattcagtgtcctatgctgacttgctcccatatctac

SEQ ID NO: 79593 - DNA, 453 bp, Glycine max
  unsure (1)..(453): unsure at all n locations
taacaaacattcactagtccaacacacactcaaaaattagtcattattattccatagttccaatcaatcttgttcagtatgatgcatgcacctgacctcaactctcaaatgcaatgtggtaccattcccaaggaaatagcctaagcatgtccacacgacactctcacttaggaaaactaggcagtaagtttcaaggtcaccctgtcgtgcacaggcaactccccgcccatggtgatcagcctgagtctcaagggagttccaaaccgagtgacatgccgccaagtacaagtattcctcctcatgagaaactacaagtacttactgacaaagtttatactatttccatgtcatatgaagtatgaaacatgggcaccatcaatgcactgaccgtggataattaaagatgcttaaaactctntaaccaaagatgcttagnactctttaaccactcta

SEQ ID NO: 79594 - DNA, 417 bp, Glycine max
  unsure (1)..(417): unsure at all n locations
gctttagctacatattttttgtcaaccaactggggtatatgttcagttggatagaattctgatacgtttaatatcaatggtgcttgcagaaaagggaaagaacaaaagaagttaagaaaggaaatgagatatatgagagaaaatctcccctaagtgtgagaaagtctctactctcccaattctattactaatccttagatgatcccccaagttcctaacaatacaacctcccttcttataacaganaggacacacccactaccaataataactaacaataatagatttagcaattcccttactacccttaaaccctctagaacaaccatacttattagttntgggcctacgatcataaaccttgaagggcttatccccattagaggaacgattcctagncatatcaccctctataac

SEQ ID NO: 79595 - DNA, 306 bp, Glycine max
  unsure (1)..(306): unsure at all n locations
tttctgggtccaaactttgttctttcacagagaacagaaggttgctattcatctttttcattcccttctccctttgcccaaaagaattttaatagactaaccgcctgaattccctttgtgtctctcttctcccttctccaaaagaacgaaggactaacctcttgaattctcttgtgtctcccttctcctctttcaaagaattcaaaacgacatagtctgagaattcttttgattcttccctttcccttaaacaaaagatttcaaaggactaaccgcctgagatatctnttggttcctcttcacaaa

SEQ ID NO: 79596 - DNA, 465 bp, Glycine max
taagcctgatccttaataacatgccgtgctaggctaaacctgtttcttctacatcgtgagtccttgacagattgtgtagcctattgccacccctatttataattggatttggtaaactctaacaagactttcacatcgagtttggatatatggctttctatttcctttacttctgggattttaaaataatagatgtaatttctctaatattcttttaaggatttgtaaggtaatgtgtgagccaatacatcttattagttaataaagtagcttatgattttaagttaccataaattatgtatgtggcactctttatcatgtgacaaggaagtagttgacacacaatatttggagataatacttgactgacgttctcactcagctgaagacattttatatgtatagagaccaatggtcaatagttcaaaaaggagaaatgagtcaacatatatcgatattaagcca

SEQ ID NO: 79597 - DNA, 323 bp, Glycine max
ctgatgatgaccgaagaacaattaaggatcaacttgaaacttatgtgcactaagtgataatatatgcctctttttccacttgtgaagatgttcaaagtttggctatgaagatggtttcaactgacaaacatttggtatcttcattggtttataaacttattgagcttgccttgatatagcggcgtccacagcattcgttgaaagagctttttcagcaatgaaaattatcaagtctatattgcgcaatatgatcaacgatgtgtggttcaatgacttgatggtatgttacaccgagcgggagatattccagtcgcctgatgata

SEQ ID NO: 79598 - DNA, 443 bp, Glycine max
  unsure (1)..(443): unsure at all n locations
ntattgtcaatagaattaagatatatttcttagatttctatggactactcacaaactccatttgaagntctttagtttcctataggccttgcacaaggcatataggtcaagtaagcacaaaaatcccaaaataggccataattatgaattcagctcaatcatttgcgtaagaccaaaactgagttaaggtggaaaaataggagtcaaagtgatgtcaaataagcttagaagaatagaaaaatactaaattacaaatgctcatggtaggtgagaaggtgaatttgcccgagatcattttctattgaatggaggccttcaaggataggttcaaccctaagatgaagaagaatcatatttctaatggaatgttcttcattgagattctaaggctagctagagtggaggtttccttgatgtagccatcatctagagccactcaacta

SEQ ID NO: 79599 - DNA, 440 bp, Glycine max
agcttccatcacacatagcagggtttaacctctattgatacctcctaagcctttcgaacaactttctcaggttgacaaggtgttcctcctcgggcttatattaggcaattatgtcatccacgtagacctcgatctcttagtgcatcatatcgtggaacaaagctaccatagcccgttgataagttgccccggcattcttgagtccaaaggacatcaccttgtaacagaatgttccccacagggtgacgaaggtaatcttttccatatcctccgacgccatctttatctgattgtaactggagaacccgtccatgaaggaaaacaatagcgaaatggtcgtattatccacgaggatatcgatatgcggaaaaggaaaattggtcttgtgactggctcgattcaaatcctgataatcacacacattcgcacatttcccatct

SEQ ID NO: 79600 - DNA, 405 bp, Glycine max
  unsure (1)..(405): unsure at all n locations
tcatgcttaactatgtatggcaaaacttcattactgttgttctagacatacaagtgagcttgtaacaaatcttctacacttggagtgatcacatgcagtcctcttgaacccttaccacccactctgtcatcatgctgagactcaggaagcccaacaggtttagctttctctaattattctgaacaaaattcaatggcttcttctacaatgtacctttcaacaatagatgcatctggatgatatagattctttgtatanccctttaagatcttcatgtatcgcttaaccgggtacatccaccgtagataaacaggaccagaacatttgatttctctgaccagatgcacaatcaagtgaatcatgatgtcaaagaaagtgggggaaaaatacatctccaactggcac

SEQ ID NO: 79601 - DNA, 364 bp, Glycine max
  unsure (1)..(364): unsure at all n locations
catcaatttctggcgtccttntaattgtctcaaacatcttaaaagctgcagcctggcctgccgccaaagcactttattcttgtgagatgcctgccctagagacccgngataggaatcatagctaggtagcataatataatatctaattatctattcatatcttctgaggtttcaaatgggaggagggagtcaactcagtcaaagttaaaaagtggaggctcattctaagaaagaaaaagaaacacaactcacatggagccagtcaatacagcaaatattacaggcaaaaccctgcctccaggatatcccttctctattatcaatttgcaccaaccatacagccagaccatacctgcgataaaac

SEQ ID NO: 79602 - DNA, 451 bp, Glycine max
  unsure (1)..(451): unsure at all n locations
atcattaaggaggcctcgtattctttttatatgttccaagcttggagcatataatttatatgttccagctgaggggggatgttagattaatatgtattttttgtatatgttttattatctttcttattttgcactattcctctgctgtactaggggattcagtctgcaccctatcttgtctcatcttgtcatgtacttgcttcttctttatatatacaatagtctcagctgagtgagacatgttaagttctccaaaatatttagttcattgtcttaactcgaagaaacatgatattatatgcagataagacagtaatcatgtaggcagatactttngaagccaaaaagttgtctgaataataatagtttctgcaagtagcaacgaaagtgggatttttttgaggaaaaaagaacacttcttgcagtanagcatcaatatgataattatcac

SEQ ID NO: 79603 - DNA, 343 bp, Glycine max
  unsure (1)..(343): unsure at all n locations
gcttgatacccatatcaggaaccaacaatcctaaaagcgtnacctattagggaaagacacatcgattttatattatatntctaatactaccaatattttaatattggcagngntcntatcgccagcagatgtaaaagtcaattttaggtctttttaacttcctacacttggtgcctagagttctagcacacaagactcaacccttggattaatccacactttgaaatcctaaagtcattaaaccaatatgttaatgccctttttttggttatcaaatctgatgggatgagtttacatacataaattntggaaattataataatggatgaaactctttctctat

SEQ ID NO: 79604 - DNA, 422 bp, Glycine max
  unsure (1)..(422): unsure at all n locations
gtccataaagtgtcttttctttattactcttatcttcaaaaaggttattgttgttgttgtccttaacttcaaaagtatattgtgtctgttgatattaccttctttgagattatgcatttttccctctctagttccactgttgaagatattcctttggaggttcaccctagtgttccacctattgtgccaacccaattgttgctcctggtacacctccgctaaccacaaacgtccacaacttccactagtggtgccatctcctaattctctagaatcatattctgctccaactgtcccttcatcagtgtcacatatacttgacattcccattgctcttagaaaaggtattcaaccttattgcaaccctaatcctttatatgccttttctctntgattataattgntatctccctcctatttct

SEQ ID NO: 79605 - DNA, 367 bp, Glycine max
  unsure (1)..(367): unsure at all n locations
cagccatctccctattagtcctctcacgagggggagggtgagccatgttctcggatgaaaatagcagctttttttcatatatcagaaggggcagaatcaccagcaacaagacgctcaaaatgcacagaataatcaggaggcacactatgccgaactaatctatgaaagggtctatctatctcaagatcaaaggattggaaatcacctggattgcccctagtcatgcactatatggagcaatcatgtatttctcaaacaagcaccagggggaaaaagggggtaaaaagacaaaaggtanaacgaggggtataactagaactatactcaaacactatccaaatgagctgataattgtgagcaacaccct

SEQ ID NO: 79606 - DNA, 481 bp, Glycine max
  unsure (1)..(481): unsure at all n locations
ngactagggcgagttgatttagccttaatttcactttagttattattcaattcaattaagaatgagaaatcccaaagagaaaacgtccgattgatttttcgctttattttactaaaagggcattttttgattattattttacctcttttttgatttccaacgtggttacggcacgaccgaacggtcggaattcatttaaaccgaaattaacggatgatacgattcaaacgatcagtggaaatntattttatttttagattaggcgagaaatgacttaaataaatggcttaagcacgtcaaaagggggtataaaaagcgaatgaaaacaagaataaaaatacatgaaacaaaatgtggaccaccacgggtacatagaatgaattgaaaagctcggtttgaggtacttacccgttgaagactgaagaanacgaagaacgaacgatgaatgttgaagaacggtcgagaatcttcgcgtattact

SEQ ID NO: 79607 - DNA, 274 bp, Glycine max
tgcttgtaacgacccacctgatctgttgatggttccactctgtacagcgagatattttattatttaaatgaaaagtctgtaaattgcgtatgagatacgaaagatatttcttctcgatgtacattcacccaacaatgcgccgttgcatatgtgaatacatatgtatatataggagatagcacttagtacacatcattcacataatggaaagtcaatgagttcgtacctataagtaagtttgtgatctacatctgtaattctacaaaagaattat

SEQ ID NO: 79608 - DNA, 370 bp, Glycine max
  unsure (1)..(370): unsure at all n locations
gggaaggatgcttcaatggagganaagaaagagggatagatttagagaggngggagcccgaaattgaaggaataaaagagggagagaagtggaactttgaagtatgtctcaccagactctcattcatcaaagttacaacaagtgttacacatgcttctatttatagactaggtagcttccttgagaagctttcttgagaaaactttcttgagaagcttctttgagaaaacttccttgagaagctagagcttagctacacacacccctctcataactaagctcacctccttgagaagcttccttaagaagattcctaaagaagctagagcttagctacacatacctctctaatagctaagctcacctcctg

SEQ ID NO: 79609 - DNA, 395 bp, Glycine max
  unsure (1)..(395): unsure at all n locations
gacacaagaaactcagctgctaaatttggtcatttgaacactctttttatttaaagaagcttgtcatgaagatcatgagatattggtatatgatccactgcacctgacccatcaatttgatgaagcaactctttctccacttcatggtgtcctgcagccaantatactacagaagaccaagttgaggacgcggttgctgagccaacaataagtgctcttatgtaacagctcttatgaactcaagtgtgaacacattctctgaaacagatcatcgttctctggcattaagtatgagtgacaacagattcttcaaacttcaggaggagactttcattctcttctccactatctgatcaagatgaccacttattttttgatggtatgctcatactttc

SEQ ID NO: 79610 - DNA, 404 bp, Glycine max
  unsure (1)..(404): unsure at all n locations
agcttcatcaacattctcagatgttccangttgtaatgcttattgagcacgaaagtaaattggtttattttataaattagaatgaaattcattaaaaggtgaaatagatccattctatgttactaccttatgttntgatatacgtctaattacgtgtgtttagctagaagatacaatatgtagtttgaatacaaatttttatttaaaatgccaataaacattgtcgcggtaaatggtccttttggctagaaataccacatgtgaggtaattatacagtgcagcgactattatcctattcctatccatttacccaatcaattttcttaaagattacagttaattgccaggcttttgagcanaaaagaaagaaaacaaagtcacatacacgtgtgtgtattttctt

SEQ ID NO: 79611 - DNA, 455 bp, Glycine max
  unsure (1)..(455): unsure at all n locations
gcctgagcctggcatttattctattcaagccagatcaggccaaaggcccttgataggcggtctagcccatttctgaccgtagttgtagtgaacgataattatagaactacaacatttaactcataagttgtattatatctttgttgcagtggacagatctttaagaaatatggatattcaagccacaggctgcattttcttttcattgcagtaaacggaaaatacatatatactatgagtgttcgatttataggctacattatctcttcgttttagcaaatgaaaaccatatatatactatgagtattttactcataggctacattatctcttcattgtaacgaacggtaatcanacataaactcacaataaaaaaatctaatatccacttttaaataccttatcaaaactattaagaattcagggaataaatttcataagcataaataatattt

SEQ ID NO: 79612 - DNA, 412 bp, Glycine max
  unsure (1)..(412): unsure at all n locations
gcttgtangaatatggngtacccatcacatgtggttctatgtggcggtcgggcgatggtgcacaacaagtttttccacatccacaatgcgtgcataaacccaccattccctgttgcccacctccaactgagctcacgtactcccacgtagcccatatcctcgtttctctcaacaccgggtccccatcaatcctcccaagcttccacaacatccaagcaaaacaacattcacacagcacaagctatcacagccaagcaaaacagagcaaaggcagagaactcttgccaaacaccaaccaaaaatcacagcttttaccactcaaagaccccagtaacaatttcttctttccaattcggtaaccgttggatcgactccaaattngtactggaagtctctatacataagcctacat

SEQ ID NO: 79613 - DNA, 487 bp, Glycine max
  unsure (1)..(487): unsure at all n locations
ctttatagaagaatggtgaagaactntagttcacttgctacacctttagatgaacttgtcaaaaggaatgaggtgttcaagtggactgatgtgcatgagaaagataagctaaccaatgcacctttgctntgtttgcctaattttgacaaagctttcgaaattgaatgtgatgcgtctagtgttggaataaggattgtactgattgaggactctaaaccagttgcataaaaacttccaggaaatttgttctaggttcatatgaggaaggaaaggtttcctgctcaaagaaaatccaagttgttgtggaagcaataacttccaagaatattttgatgatgccaaagaatcaagagttaagcaagttccaaagaatcaggagtcaaaaagcttcaagaatcaatgttcaaagaatcaagattccagaacaatcaagtttcaagattcaatcaagtttcaagaatcaagattcaagaacaatcaagatcga

SEQ ID NO: 79614 - DNA, 373 bp, Glycine max
  unsure (1)..(373): unsure at all n locations
agcttcccagatccgatcatggaaggactnggcaactgccttcattaggcagtaccagtacaatacagatatggctcccgatcagaaccagcttcagagtattactatattgagagcatgagtccattaatgaatatgcccaaagatggagagatctcgcagcccaagtcgtaccgcccatnacnnaaagggagatgaccacacttatgggagataccggacccatgttctactatgaaaagctgataggctacatgccagctaactctgcggatcgtcgttggggcggagaaaggattgaatccggactaccaataggcaagttcgaatatgctttcaatgtggcccccaccacaacaaaagagccccagta

SEQ ID NO: 79615 - DNA, 398 bp, Glycine max
  unsure (1)..(398): unsure at all n locations
gggttcgaggtacttacccgttgaagatcgaagaacgatgatagatcttctaagaacggttgaaacctttgcgaaattcttcacggaaaacgttacggaaacgtttcggaagcgcctcggcttagattttcttcacggaaacgatttttccaagcaaattcgaaagagagaggagtgcaaaaggggctgaacccttntcttcttcccttcctcccctatttatagcaaaataggggaggtggttgccgcccagctcgcccaggcgagctcagctcgcccaggcgagccaggttgcttcctccagaagcaacagccttctggaggaatattctggagggcccaagtgggcctgggtgctatntgcacccntcattttactaagtacacccccctctgct

SEQ ID NO: 79616 - DNA, 280 bp, Glycine max
  unsure (1)..(280): unsure at all n locations
aacttcaaggaaaacatgaagaagagatagataattcctcagaaatttttatttatatcatgtgatgaccttgaacggctaaagttaaagacaacatagctncaccttgaatagtatgaggctatccaaaagcaaccttaagatggtgttgcgctccattaagagattgaatttttgagagaaactatatccaaatttggtggaagcattgagaaacttaacaaaatgttaagatacaacgaatgtccaactatccaatcgagaaatggataaaaaggaa

SEQ ID NO: 79617 - DNA, 460 bp, Glycine max
  unsure (1)..(460): unsure at all n locations
tataagaaccaaaatgccttaatcatttccaaatatgcatgtgaattatgacgcatcaacaagaatcaagccaaggctattgtgcaagcaatcaatggggcaaaacacaccaaatgattataatgatggatggatcaaattctcacaaaggtaaaatcatcactttcaaattgagctttcaaaactaccatgacatgtagagaagaatcaaggatttcaagtcacaaaatgtcaagaacttttattttcaaaacaattacccatttcttgaacatatcctatgattcaaagaaaaacatgcaaagtcgtacgtgtacacgaaattgacccaaaatattaaactgaanatccgacgaaactaacaacattaacaaattaacacaactaacaaattaacaaaaccaacaaaactagcaaaaccaaagaacactcnnccccccccncatacttaaacaacaca

SEQ ID NO: 79618 - DNA, 379 bp, Glycine max
  unsure (1)..(379): unsure at all n locations
agcttcaatcttttaagtcgttgatcaaacttaataacatntaaaactcttccagttttcctcttcccataaatgtgtctagtccgcgtgaatctcagcgtttattatcaattgagtcactccaatagntataagtagcgcattgaagattagtggacatccttgatgtgaagcttggaggggttaattagatttatactgcatacgactttgtttaattattagcaataatattaatttttattttaccaaaacctactcagaggacatataaagtgaaagaagcttcttgactcgtttcatctctcacgacaacaaggtgctctcaggtcggacaataatcttaaacatatgaagaaacaaatttaaccattattta

SEQ ID NO: 79619 - DNA, 388 bp, Glycine max
  unsure (1)..(388): unsure at all n locations
tcacanaagttagtatggcttgaaacaagcaccgaggcagtggttctttaagtttaatgagtttatgagcaactcaggattcaaaagatgtgacatggaccattgctgctatgttaaaaaatatactaatagttatgttatccttgttgtgtatgttgatgacatgttgattgcaggatctagtatggcagaaattaacaggttgaagcagcagttggcagaaaactttgaaatgaaggatcttggtccagctaaacaaatccttggtataagaattcttagaaacagatcagaaggaattttgaagctgtctcaggagaaatatatacacaagttgctcgacaggttttaccttggagattctaagactaggaatacccctttggga

SEQ ID NO: 79620 - DNA, 317 bp, Glycine max
  unsure (1)..(317): unsure at all n locations
gcaagcccatcaacaaactcagacgcnccacgttgtgaattcttatggagcaggacagcaaagcgctttattttataacttataatgaaattcatcgcaaggtgtattattatcatgttatctcactaccttatgttttgatatacgcctaattactcgtgtatagctagaagatacaatatgtagctcgaataccaatctctatttaacatgccaataaacatagtcgcggtaaatggtccttttggcttgaaataccacatgtgaggtaatagtacagtgcagtgactattatcctattcctatccatgtaccca

SEQ ID NO: 79621 - DNA, 391 bp, Glycine max
  unsure (1)..(391): unsure at all n locations
ggatcttaagtcacctgcggcatgcaagcttggttgagtaaggccattacaatgatctttatttggcatcggatcaacatttcctctaatgccatcttctatttcaaacctggtactagaagatgatttcaaatctcttgnttccacatgagcagtaaagccttgccaatctaaattcttgcaaatggttccttgtgaacaaatctaatcacctgatatctcaagtccgttgcttacccagctattaagttcaaattgttgagaatgtacagtggggactacttgtcagcagctagctccaatttctacaatagtattaacatcaataataatattctatgacgctccaaccacgtctgtctcaataagctgtcgttgaacaaaacgcgat

SEQ ID NO: 79622 - DNA, 487 bp, Glycine max
  unsure (1)..(487): unsure at all n locations
nngcattggaatngcganagccncactccatcattaggattattacctgacatctcanacaaacaaatcaaacgtaacaagacaattatagttgctgtttgaatacctcacccactcaagtgtatcacacaattatggcttttctctaatgaaacactcttgccttttaccactctaattccccttgagttcttaggcaattcaagagattatggccacaacaaanaacaattcaccaatatgtgttaggtaaggctagagagacaaggaaaaggttaaccaagaaaaaggctaacaatgtttttaggcacaaatgaaggaaataaaattcagaatttaggaattcaagtaacaatccttcatgcaaccaatatattaccttanagagatnntntttttaannagtcttcaagcatgaaccattcagcccaannttttttttttttaatttgcttatacgaaaatctgcttcttnnttttttttttt

SEQ ID NO: 79623 - DNA, 411 bp, Glycine max
caatgtatggttttcttgagcctcagtttatacacaatgcagaggatagatgtcaaaaatttcaacattacattaaaacattgtttattgaatcacaacgagaagcatacttaggagcttacttgaatcaatatgtaaaatataactagtacgttcaaaaaaatatttgcattatacgtacctaattatagttctggactttaaggcacaatggaagcttgttgttgtgtgtccatgggacaatactattgtttggttttgttctttgcgtaagaagcctgatgttaacatcaaagctacaattaacaggttatgtttaaaattataattcatttattgtataacaattgtaggatattgtaacagaatttcgatagtatatacgtttaagttttttttaactagtgcaat

SEQ ID NO: 79624 - DNA, 476 bp, Glycine max
  unsure (1)..(476): unsure at all n locations
ctcagctacatccacagtaatttcttttttctgaaggaacattgtgtaacaaatagtagcattctatcttttgattccactatatttctagtccactacttggatcccttatgattattaaacttgttaattaacaaactgtaatgattaagtttactttagatatcatttggagtagaaatcatgttggtttggctccttctgaattagccctggctatagagaggcatgtgttggattgtggttcaattgataatgttggcactgccggtaggttattattgaagtggctcgattaatctagaacttccatttaagcaacctcttttaattttacaaggtatcttggaactgcatcttggagcaatcaacaacatccccaacaaatgtcacctagaaattggtatgtatttacaggacaactntggttgaaccaggcattcttataatgtntaattacaactggtgttaccatg

SEQ ID NO: 79625 - DNA, 399 bp, Glycine max
  unsure (1)..(399): unsure at all n locations
agctntcaacaagagtcttcacaaataaccattatgaaacaganaactaacaaaactacccgtcatatctcccaaaaccccatacccacgagaatcattagatatagaagtccacccaaacctgaaatttcgaagtcccactcgtagccacgcacttcacgactccaaaaacgctctcctttcgcgatttggggcaaaaatgatggccaaaggttgaagctttgcttggagcttcaatggagaatgagggagaaagaaaggcaacgtgagggagagggagagaganaggcttctgcaattttctgctgagtgaagagagagagagttgctttntgggttttaaaggcttnttcctcttttcttattattttattcaagctatgccacatgggtctcatt

SEQ ID NO: 79626 - DNA, 429 bp, Glycine max
  unsure (1)..(429): unsure at all n locations
ntacagcagagtttagtaatgacccactaacctagaattattataacttaatgccattaacctagggaattaaaacaaacttaatggctgagtgtaactgaaattgtgttatatcaaaagtcacccccaacagccaacaagtcagccaccatttggtctcccaaaaggctgatgcctaggttgccaattgggcccttattacaacttgaactaaagctaactaaagcccttttagttgattaacccaaaacatatttttggtcagccaactttacaaggattgggccattatttagacaaactaaacactctaaaattgaaacaaagtggtgtcatttagtcctcctccatttgggccatgatacaactcacaaccttggactnttctccttgaaacttgngcttgtattcaaacagtatggacagcac

SEQ ID NO: 79627 - DNA, 219 bp, Glycine max
  unsure (1)..(219): unsure at all n locations
cagcggcgctagcgcacctcagggcaattattataaaactctagaagaagatgagntggacaggttcgctaaccgcaccgcttcatctcactaagcgcaccacttcaggtcatccgctaagcgagaaaggcacgtgcgtaaccgaaaaaaccaatgcgcgctaagcggcccataagtgccctaagcgcacgagcacgaacaaggccacctattgaagcc

SEQ ID NO: 79628 - DNA, 370 bp, Glycine max
ggccaatctctactggtaagttactgtgtatgtttaaatattctacctagtcttacttttacaaagcgtgtgggggttcatcttcaatcatcttttccttgcccttatagtagtatgccttagaaatcaaaactggcttgtccactactaattgaaacatagcttcattagtgtgcaagacatataaactgagagcctaacatgaaatgcagatgcatgtttagttgattgtagacatttgaaggaagcttgccttgccctgatttcttccttgtattggttgaggcacagacgcaactatgggccatagtcagagaatttccactctgagaagggtggacttagttcaagatcttcatggtaaatgtct

SEQ ID NO: 79629 - DNA, 475 bp, Glycine max
  unsure (1)..(475): unsure at all n locations
gtnggtgtaactagttataatgaccaaaaaattgttgttagttaaagtatttatcttgttctataaggctccaaaagtaagacctattcaaatatgttatcaaatacaatcgacaatcttacgttatccgctcttacagagtaaacttaatatattgctgctctggttctattcattatgtatctactatatgcgtagttgattcatcatgttaaattaagcaacacatacaatacaaactatggaatatgaaatgtttcgttggtacactaattagaaaatgagctgcttcaaatgcttgaacttgtataaggtctatgagttgatgaaatngaatactatattttgaattctcaatatatatatatatatatatatatatatatatatatatatatgggagatacttattattcgattgatatttttcttttcttagctatggtataaagggttaattatagtgaatagtgag

SEQ ID NO: 79630 - DNA, 350 bp, Glycine max
  unsure (1)..(350): unsure at all n locations
agctttgagctaattcaaacgacaataactttttactctgatgttctgatgagtcccgcaatatatcgagacgctcgtaattgaaaacacaaactctgagctatattaaactacaataacttttaactcgggtgtgcgattgtgtcccgtaatatatcgagacgctcgcaaattgaaagggaagctctcaaaaaattcaaacgaccaatacntttaactctgatgtccgatatgagccccgtaaaaatcgagacgctcgaaatcgaatacagaagctcttatgataaccaaacgacaacaacttttgactcggatgtccgactggagcccgcaatatatcaacaccctcg

SEQ ID NO: 79631 - DNA, 477 bp, Glycine max
  unsure (1)..(477): unsure at all n locations
tcacggacactcagaaactcagcttnttacatacgctgcccgataatattnntttacgttagaggatgtctgtttgttcggtgttgccgtaaaaatttacaatgtaggtcggctaggttttgcttgttcgagctcaaccgaagttgtgtttcggccgacaacgacatgttttcatttactcggcaaggaaagcattagcccacctcggaaaaagacatgattcaccgatactgataaacaaatatgttagccgacgtcggccatgaaagatgaccgatcgattgttaaaaaagaagcatcaccggatgacgccgattggacattttctaataaaccntatccaattattatttagggattgaatagaaaatgcattttccgacatccgtcggtgtgagccgcgactgatattttcacccgacattgcgaattatttacaacgctggccgagattattttacgaaaagatctttttgt

SEQ ID NO: 79632 - DNA, 357 bp, Glycine max
tatacgagacgctctaatgtgcatgatgaagctctgaccatattccaccgaccattaatgtttacttagatgcctgaggagatacagtgatataacgagacgctctagattataagatggatctttatcctgaatctatcgacgataaccttttactcggatgcctcgattgatcaccgtagtatatctagacgctctaaatgtattgttgaagctctgatggaactcatacgacaataacttttatgccttaggactgatagagccctgggtatatgaaaccctaagatcgatgttgtgctctagcaatttaagccaaataactatttcgccaagttaaatgagcccgcattattg

SEQ ID NO: 79633 - DNA, 417 bp, Glycine max
agcttgaaggcacactggatgccgtggtcaactgggtaacccaactggcctcgaatcagaaatctgtacctgtcgcaaggggtcgtggctcgcgctcctctgttaattatcatacagacctttgcccttccatgcagcaacctggagcaattgagcagcctgaaacttatgctgcaaatatttacaatagacctcctcaacctcagcagcaaaatcaaccacaggagagcaattatgacctttccagcaacagatacaaccctggatggaggaatcaccctagccttagatgggccagccctcagcaacaacaacagcagcctgctccttccttacaaaatgctgctggcccaagcagaccatacattcctccaccaatccaacaacagcaacaaccccagaaacagcccaacagtg

SEQ ID NO: 79634 - DNA, 388 bp, Glycine max
  unsure (1)..(388): unsure at all n locations
ggtctcaacgtttatgcgagacagagaccaacatgttagctatcttcgtttagtacgaagaagagttaggtctagccacagcccacgagcatagaatcgcggatgagtatgcccaagtatacgcggaaaaagatgctagaggaagggtgatcgactctttacaccaagaggcaaccatgtggatggatcggtttgctcttatcttgaacgggagtcaagaacttccncgattgttagccaaggccaaggcgatggcagacacctactncgtcctcgaagagattcatgggcttctctgctattgtcagcatatgatagacttaatggcccacataattagaaatcgttatgaaacttgtatggtctctcagacactgactggatacca

SEQ ID NO: 79635 - DNA, 347 bp, Glycine max
  unsure (1)..(347): unsure at all n locations
agctngaagacaagactatacgagggatctttcttgtgtatagcaatatctntaaaggctaccgcgtcaacaacttgcaaactaagaaactncgcatcagtttatatattgaagttgangcagctgcttcttggaattgggatgaagaacaagtggagaagaacattcttatacccgctcaataacctcaagaagaagctgaggaagaagacctatgtgaaccaccttcacctccaccacaacaacaagatcaagaactatcatcaccagagtctactccaagacgagtaagatctttggtggacatatatgaaacctctaacttggccatacttgaacctggaagc

SEQ ID NO: 79636 - DNA, 429 bp, Glycine max
  unsure (1)..(429): unsure at all n locations
tatagttgttggagggagaataaacaatccanaatcaattgtactcttntaagtaacgaagaattctttntgcggctnttagatgaggagaggtaggagcctccataaagcgacacacaactcccaccgcatatagaatatcgggccttgtattggttagataccttaaactccccacaagactcttgaagatcgtggagtctaccttctctccttcatcaaactntgataacttcaagccaccttccataggtgtgttcacgggattgcaatcaagcatattaaatttcttcaacacttcttttgtgtacctttcttgtgagacaaagatatcattctccgtttgcttcacttccattcccaagtaatatgacatgagtcccatatctgtcatatcanattcacgagacatggactccttgaagtctt

SEQ ID NO: 79637 - DNA, 327 bp, Glycine max
acagcagaatttagtaatgacccacttacctagaattaaaataacttaatgccattaacctagggaattaaaacaaacttaatgtgcttatgtgtaactgaaattgtggcaaccaaaagtcacccccaacagccaacaagtcagccaccatttggtctcccaaaaggctgatgcctaggttgccaattgggcccttattacaacttgaactaaagcccttttagttgattaacccaaaacatatttttggtcagccaactttacaaggattgggccattatttagacaaactaaacactctaaaattgaaataaagtggtgtcattt

SEQ ID NO: 79638 - DNA, 410 bp, Glycine max
  unsure (1)..(410): unsure at all n locations
tctccnnctatttgctataaatagggggataagtgattaatagaagggttcagcccctgaggtacttctctctctctctctcaatagctgaggaaaattagttccatgaagaaaatccaagccgaggcgcttccgtaacgtttccgtgagtaattacgcgaagattctcgaccgttcttcaagattcatcgttcgttcttcgttttcttcggtcttcaacgggtaagtacctcaaaccaagcttttcaattcattctatgtactcgtggtggtccacatgttgtttcatgtatntttattctcgttntcatttactttntataccccctnttgacgtgcttaagccatntatttaagtcatttctcgcttaatctaaaaataaaataaatttccaccgatcgtttgaatt

SEQ ID NO: 79639 - DNA, 397 bp, Glycine max
taatgatgaatactagtgcgtttggatgggatgacttcaattattgtgtctctcgtgatagcagtcaagtattgcctgagtatttggaagtatttaactttctaatttaagtgcatagatttgtttttaatatttaatgtttatggtatatgttttttgcttatgggactgagagtgcagcaaatgctatggaaaatgaaattggagagacttaaattaatgatgcatactggctacatgatagttcacctgcatctaatgaaaatacttcatacttggtcacctccttaacgactacgcatggctcaattaactactaaatttattgcaagttttgaaaataaaacggatgccttgacttctgatttttggaaagatgtatacatagatctctcat

SEQ ID NO: 79640 - DNA, 290 bp, Glycine max
  unsure (1)..(290): unsure at all n locations
ttacataaatgacatgttatattttatacaataattacatagaacttcgttaaccactttcaatttctgcactggctattgagatggatctacccaacatttattcttctcaactgcctgttcccaacgntgtctaaagatatctaattcttggtaagaaagtcttctcacctgcaccacccacaatacaatgttagtaacgacagaacaaaaacaaaagcaatgttactaaatgtgtggcaaaaatttcccatcatccaagattctcaaatagaaatttataatgcaag

SEQ ID NO: 79641 - DNA, 453 bp, Glycine max
atggtcaaattcttctgtttcttgtatgcagagactgcctcttcacatgtacaaaataaaaactatactttatcacactccactttaaagtaaacttagatccaaaaggatatagaatgacattaaattttgtatttcgattttgatattgctaattatcttgtattcataattgatttactcttatattaagacatctattttcatataggtattcctcattgtttttagtgtatactaatttcgatgctggaacttttagcaaaaaaaattttatgcctttggaatagtaatttcatttggcatcagttagttctaatgagcgtattttggttttctaagtagcaaatagacaaataaatcagagtgctctattttattataatttatgcttttattgggcaactgtccatattgatacccatatttgggggtatattgtataccctgttt

SEQ ID NO: 79642 - DNA, 296 bp, Glycine max
  unsure (1)..(296): unsure at all n locations
tgtgctttccttttcacgctctggtncattcccgacacaggagtacgtcattctctggtcctctagctgtccatagatttattttgatgcttcaaaccggatgtattcgcgtgaatctgaagaccaattcatccttgaatttgtgcttggtttcatgggaatgagggggtgtaagggatggccctatgcctatggtgcattctgaagcaattgggcgtgacacttngcccccactccccaatttttcatgcctaaacatgcgcccaccaagtgctcggggaaatgcctcaatggca

SEQ ID NO: 79643 - DNA, 487 bp, Glycine max
  unsure (1)..(487): unsure at all n locations
ctggagatgatgcttcaatggaggaaaagaaagagataatgttggagcacgaaattgaaggaataaaagagggagagaagtggaactttgaagtgtgtctcataagactttcattcatcaaagttacaacaagtgttacacatgcttctatttatggactacgtagcttccttgagaagctttcttgagaaaacttccttgagaagcttctttgagaaaacatccttgagaagctagagcttatctacacacacccctctcataactaagctcacctccttgagaagcttccttaagaagattccttaagaagctagagcttagctacacatacctctctaatagctaagttcacctccttgagatgagaagctagagcttagctacacaccccctataatagctaagctcacccncatgacaaanaacatgaaaataacaaanaagagtccttattacaaagacaactcaaaatgccccgaaatac

SEQ ID NO: 79644 - DNA, 435 bp, Glycine max
  unsure (1)..(435): unsure at all n locations
agcttctgttntcaattacgagcgtctccatatttactggcctcaatccgacatcggagtaaaaagttattgtcgttagaatctgctcagagcttctattcttatatttgagagtctcgatatactacggaacacaatcggacatctcagtaaaaagttattgtcgtttgaatttgctcagagcttctgttcttaattacgagagtctcgatatatnaccggattcattcggacatccaagtaaaaagctattgccggttgaatttgctcaaagcattcggtgtcaattacgagcgtctagatatattaccggattcattcggacatccgaagtaaaagctattgtctttctattttgctcagagcttctgttntcaatttcgagcctcttgatataatacacgactcaatccgacattcgcagtcaaagtattg

SEQ ID NO: 79645 - DNA, 472 bp, Glycine max
  unsure (1)..(472): unsure at all n locations
tttagcaattcaaatggtcataacgtttcactcggatgtttgattcaagcgcataatatatcgagacgctcgaaattgaataatggaagctattgagcaattccaatggtcataacttttaactcggaagtccgattgaggcacataatatattgagacgctcgaaattgaacaacggaagctctcgagaaattcaaatggtcataacttttaactcggaggtcggattgagacgcataatatatcgagacgctcgaaattgaacaatggaagctcttgagcaattccaatggtcataacttttaactcggatgtccgattcaggcgcataatatctcgagacgttcgaaattgaacaatggaagctcttgagcaattcatatggtcataactnttcactcagaggtcngatcatgcacataatatttcgagacgctcgaaattgaacaatggaagctcttgagcaattcaa

SEQ ID NO: 79646 - DNA, 485 bp, Glycine max
  unsure (1)..(485): unsure at all n locations
accttagaaactcagcttcaacctctcacaaggagaagacaaagtatagaatgtgtgtctccaaactctaagaggtgagtttgaatccttacatatgaaagagtcagagtccatttctgattatttttcaagaattctcactgtttcaaatcaactaaaaagaaatggttagaagttagaagatgtaagaattatggagaagatattatgctcattagatcctaaatntaagcacattgttgtcacaatcgaggaaaccaaatatttagaaactatgatgatagaacaacttcaaggatcactgcaagcttataaggagaagcgtaagaagaagcaagagatcactgagtaactcttcaagattcaactgaaggagaatgaagaaagtcaaggaaatgagagaagtcaatgatgtcgaggtcgatgtcacggtcgaggaaaggttggacatgggatattggaccaaagtcanatttcatcaataa

SEQ ID NO: 79647 - DNA, 412 bp, Glycine max
  unsure (1)..(412): unsure at all n locations
catggatcctttgtaaatctccattatctatcatttgcaatattgctatttacatgtcaactgctaatggcgagtcccgtggaaaggcctgaagaaaaaatcaaggataacatgacattaccataagctggaaacttcaaatatggtaaccagcaatcttgaactagattccagggacaagttgacatattaccatgtatggcaggaagaattgaagaattccaagaattgaaacagctatggtgacatttctattgcatgcaaatattttatgggttttggtaacctctgccttagaaactacttgatgcagagtataaatatctaatatctcanacattcaaaanatacttcatattttcctgtgtaaaatgagaataatgctttttcattcttaatgtgtcctactcct

SEQ ID NO: 79648 - DNA, 478 bp, Glycine max
  unsure (1)..(478): unsure at all n locations
cctctcactccactatggacaggaagaaagtgaattacatgatgtttaaaaccctgaaaggacaaacataatgaacaggataaaatataaatatttgacaattcatagaaaaaaaatatgggatgagttttagggaattttagggagaaagagagaaggtagggaaagttaaaataagaagttatatgctttccaagcctttccagaaattaaaggcactaaggtaggcatgccttccccttaaatggatattaataagaaaattatgcagaataccttctgtgtgttgaagaaacatatagtatatgttttaatatcaccttgttcccctttaattaggaagggggggaaaatcaactttctatgatgggaatggagatcggagaagaattggnctactctattcccgtccttttctttaaatttacataagatgcatagcatatattcaagtatttcagcttcatacatgaagaat

SEQ ID NO: 79649 - DNA, 71 bp, Glycine max
cgaccggacccaagcgccgagcgcactaaacaagcccataaaggaaaccggcaaggccaaaagggaaggca

SEQ ID NO: 79650 - DNA, 235 bp, Glycine max
  unsure (1)..(235): unsure at all n locations
tcctgtataataatgacggttgacaaccacgccacaggtcatgaatcatcacacattattacgaatgatgtctagatatatatatatcacgtgcgtacaagacacatatggagccttcgagagccatctaactcgttgtgtcttgatgacaaatgtgcagagaagcatgaggtatctncatatgctatcataccctcgaggcgcacctgcgtatatgagacggttttagcgtcta

SEQ ID NO: 79651 - DNA, 302 bp, Glycine max
tttttagtatgcgtcatgaggtgaatcaacttcttaagtcttgagataattatggagtaccacgccaaaatggtgtctttcttgatggtcgtggaggtaatttgaaggttttcaaaattctctttatacaagacaaagttaaacttccatacggtccttatatttattatttattgaaattaataaatcaccattaaagatatttttgtgacaaattaattaatgcctgagacaataatgcacacttattcttataaaagaactatatacactttaattggatccttctcataaacttgaga

SEQ ID NO: 79652 - DNA, 448 bp, Glycine max
  unsure (1)..(448): unsure at all n locations
agagaaaatgtttattaaacacacaaaatgatattactaagtatttattacctatacttaacagaaaatatttataacactacaaaataaccataaattgtgagaagttgatacaatttatacaagttttatacacaaaagttagtcgttttcactgactaacaattatgcatgggttttgggaattatgactctttccattccctttctttgtagcccacaactcactttactaacccacctcattcccatcactcaagatcggctcacacctaggcctaaacactcttaaaatctaataatcacacatagaacatgggttaagcataaaaataaatataaacatcacagatcatcatctcataattaattatagacacttagatgtagagtttaantacccttgctaattaataaaaaccacttaatcatacattatgcgaacaca

SEQ ID NO: 79653 - DNA, 412 bp, Glycine max
  unsure (1)..(412): unsure at all n locations
cataatacatggcggtggttggtttggttcaaggataaaagggatgccccacattatttccatgacacaaatgcaaagatgatgatttggaaattntatgcaaaactggtcatgcatgcacctatgcggacactcaagtgtcaaatttttatggtcatgtgatgctagggctcaggattcatttcctctattttaaatcaacccaatgtttccaaaatatgttcttttatcaatttgtgcatgtcatcctagtccatttgggtactcgggaaaatttcacagcattcacccttcaggtgtacacacattntttcaaaaactagttatgatcagtgtaatttttcaaagacaagttggaagtcatctcttttcaaaagcatgtnggttnttcagctagacaacttatattttc

SEQ ID NO: 79654 - DNA, 309 bp, Glycine max
  unsure (1)..(309): unsure at all n locations
ttatgtgggccatcaaatctatcatgtgttgacagtaattgattaacccatgaatctcctctggggccgtacacacttcggccatggcttttgctttggctaatagacgcgggaggtcttgacttccattcaaggtcaaggcgaacctatccatccacatagtcgcttcttgatgcaatgcatcaatcaccccccctcttgcttctttttcggtgtacacttgtgcaaaatcctccactagcttttgttcatgggccacagactggntcaactcttccttgtattgccctatgatagctagcatgcttt

SEQ ID NO: 79655 - DNA, 392 bp, Glycine max
  unsure (1)..(392): unsure at all n locations
cttataaatagggggagatgtgaagaggaatttcgttcagccctcctggtaattcagaatcacttagaattagtgaataaaattggttccgtgaagaanatccaagccgaggcgcttccgtaacgtttccgtgggtgatttcgcgaaggttttcggccgttcttcgacgttcttcattcgttcttcgtcgttcttcggtcttcaaccggtaagttccctaaatcgaacttttcaattcattctatgtacccttagtggtcctcatttgctnttacagtgcttcatttacatttcctttacttntcgtacccncttttgacgtgctntagtcatttgcttaagttattttctcgcctaatcaaaaaataaaataaatttccaccgatcatttg

SEQ ID NO: 79656 - DNA, 317 bp, Glycine max
  unsure (1)..(317): unsure at all n locations
tatatcgagncgctcgcaataaaataccgaaactgtgagaaaattctaacgtcaattaccttttactccgatgtccgattgagtcacgtaatatatcgagacgccccgaattcaatacagaaactctgagcaaaatctaacgacaaaatttttactggatgcccattgagtcgcgctatatttcgagacactcgaaattgagtacagaagctctgaggaaattcaaataaaaatacctttngactccgatattcgattgagtcccgtaatgtatcgagacattcgaaattgaatacagaagctgtgagcaaattcta

SEQ ID NO: 79657 - DNA, 54 bp, Glycine max
tgattacttctaggaaacagttttcactgcattcatcaatgctgaatctctatc

SEQ ID NO: 79658 - DNA, 450 bp, Glycine max
  unsure (1)..(450): unsure at all n locations
tggtctagatgggtggtttttanagggttattatgggggacaactactanctgctgttggacaagatgcaaataaccataactactgtattgcttatgcaattgtggatgctgagaataaagacaactggagatggtttctcacactactgaggaaagatttgggagattgtacgcagcatgggtggaattntatgagtgacatgcagaanggtacgtgtttagtttattgtactattatgattnntttatatgttctttgaaggaccaaactgacagtaagtgaaatctttcatggactaattgctgttgttcatgaagtattcccaaatgcacctcatangtactgtgctatgcatttgtggaggaatntcattaagcaatacacagacttggaattgangggtgtagtgtggaaatgtgcaagggcaaccacacctgctcaattcat

SEQ ID NO: 79659 - DNA, 531 bp, Glycine max
  unsure (1)..(531): unsure at all n locations
ctctgagtcacctgcggcatgcaagctgatatttattcatatttttaacatcaaatntcaaataaactaatgtttttntaaatcaaatgtnttcttaaanaagagtagagttaaattaaataaatttatattgtttaaaatcattntttattaataatattatgtaaaaaatattnttctttataattctgattttttatcaactttttttactcaccaaatattntaaattaaataaataaataaagaatgtattaattcattaaaataaataacatgacattgaacaaaataataataaaaatagaatactaagtttcataataactgagaaaataaatatgtcgcgataaanataattaaatatataaatatgtcatctagtgttngtaagaatgttaaaataaataanagagtttttgaattgaataanagagtaaaaatgaaattcanataaattattganggatgataatgtttataagatatttcannatagtttttatctttttttatttaataannaagtag

SEQ ID NO: 79660 - DNA, 267 bp, Glycine max
cattttctcccaccccagagctctgcccccttacgccatcgataatcaaccagtcctagaacccctttccattatttcctctaaatggatttgaccaccagtcccctaacacccatggttctggttcaatgggtgggtctgccacccgaggaagcaacttgggagccttggaataccatccgcgatacttaccaccttgaagacaagggtggtttcccggcagggggtattgctagcaatctccagaacccaactgaagacataccg

SEQ ID NO: 79661 - DNA, 505 bp, Glycine max
  unsure (1)..(505): unsure at all n locations
agcttatntngatgatgccaaagactcaagtcaagaatcaagactcaagcaagtttcaagaatcaaagagtcattcaatcaagaatcaagattcaagtaaaaattcaagagaaaattcaagatatgcaagaccttcaaaaaaagcatcaagataagtataaaaatatttttttcatagaatagattgaatagcacaatttgtccaaaagaaattttcaaagaaaaatctttntaccagagttnttactctctggtaatcgattaccatggggcaataatcgattaccagaagcccanatagttntataactgttttacaaagtagtaatcgattaccatgggcatgtaatcgattaccaatgttnttgaatgttggatttcaaatttcaagagtcataacttgtgataaaacattntcaaacttgtgtaatcgattacacaacattngtaatcgattaccaatggttttaaacgtgggtttttanatctaacacgaagagcacat

SEQ ID NO: 79662 - DNA, 346 bp, Glycine max
ctatggaagctggatctttgagcttcaatggtgtcctttaatggtgattttccaccatggagatgccgcggaagacaaaagacaaaaggtgagatgatgcgccatccattaaagaataagccatagaggaaggagcttcaccaccaaaatgagccttggataagaaacttggaaggatgcttctatggaggaaaacatagatggaggtgaaagagagaggggggagcacgaaattgaaggaataaaagagggagagaagtggaactttgaagtatgtctcacaagactctcattcatcaaagttacaacaagtgttacacatgcttctatttatagactaggtagc

SEQ ID NO: 79663 - DNA, 471 bp, Glycine max
  unsure (1)..(471): unsure at all n locations
agcttgtgctanaggaagtaagacatgttcctgagatgcgtntaaaccttatctcaacaggaaagctagatgaagttgggatgacaaactatttcgtngccggtagatggaagcttagtagaggaagcatggtcattgctcaaggtaagaaggaaggctctttgtacatcatgcagggaaaaatatgccaaagggagacaaatgttgcttaagatacaaccaaataattgtggcacaagagattggatcacatgagtgagaaaggtttggagtttctagcaaaggatcactttgcaaacataaagggccagccacttgaatcttgcanagactgtcttacaggtaaacaacacagagtgtctttccaaagatcggatgaggccagaaggagaaagcanatcctggatcttttccactcagatctttgctcaacatctgaaaggtcccttgatggtgccgcaatactttgta

SEQ ID NO: 79664 - DNA, 290 bp, Glycine max
  unsure (1)..(290): unsure at all n locations
atcgataatctcgagattgaattgttctatgcctanacctctactttgggcatttggccttcatagaatctgagtccgtcggctgttaatcatgacttcatctgcatttagattatatttatgataataagggtgggggtgtccctctcatttattaaccttattgggacattgggctcattttgcgagtataatattatgatattaatactataataattattattatatcatcaattattgggcatcctgcgtggtatttctgaatacaagcctacctcaggtgagtt

SEQ ID NO: 79665 - DNA, 503 bp, Glycine max
  unsure (1)..(503): unsure at all n locations
agctnngtgtatctcatcaagggttatgtaaccactgccatctttgtcaaaataggagaaggccgacactangttttcctctctctccagcttatttaaatggacagtggcagcaatgaattcaccataatcaattgtcccacttttatcaatatccgcctgccattgccaaataagatcttatgttaaaaaattaaaggcanagcatcatatatcaagaaaatgaacataatttaccacanagagaatgctaataacagacactnttcaaaatactctnttgttagatgaaattcatgtgatccttatttgggtcaacccacatagatttcacctaatgatagtatgttgaggagtattacactgttattagcattcctaananaatcttacagcatccataagatccttgatntcagactccataagttcagatcctactcgcttcanaaccatctttaactcatcaaacgttatggttccactggtgtctgtgtcaatca

SEQ ID NO: 79666 - DNA, 389 bp, Glycine max
  unsure (1)..(389): unsure at all n locations
tattaatatttattcatattaatataaggtttatagattaatgtggtaatctttccctcatatgatcccctctcatctanggtggacattttcattttcattacaagtttaaaggtacattaaacatgctaataatcttaataattgtgagaaacaatataaattttttattttaatagactagagggtaacataatatattatgaattgttttcaaagtatctcgagcttaatatgttaacaacaacaataatcatcaaaaaaattaacataacatagtatcagtatacgtacagcaattctccatcagcaagtagttctgatataatgagttgcccatctagtcttatctgcaatacttctcctagccaatttctcgtttgagtctg

SEQ ID NO: 79667 - DNA, 469 bp, Glycine max
  unsure (1)..(469): unsure at all n locations
agcttatgattacataaacanataataaatgaagcggnaaacgtgttctcatttacttttctagttttgactttctttatttgcggagtaatttagtttgtgcatgtgtatgtacgctataaagacaatgatgggatagaagggtggactcaatacgttgttcctgtttttttttggaaaatggtttttgaagatggtattagttttgaaagttattagatgtccttatatatatcactncgttttaatattttggttgttataaagtgaaggatgagactacttaattattatatagttcgtttacgtttggatgattgtggtggttctatattntatttcaatatagaatggaaattaactggcctacttgttggaatattcaaagtaaaacactaaatgctgacgagctcttgcttatttcagttatttggtagggtacgtgtgaatatgaatagagaaactacat

SEQ ID NO: 79668 - DNA, 271 bp, Glycine max
tcaattcatatttggataaatatctcaattctctctagcctagtacacttatatatttttcttatagccataatagatattatatttaaaataagacaaccaggtaccaccagtagcaggaagcaaggacaaaattaaatactcacaaaagagtcatgaaattgactgtagagaatggtcactgattggttatgataagttgcacttatatatgacatccttctcgaggtaattccatcttatattattaagtatttctattcaacaacta

SEQ ID NO: 79669 - DNA, 338 bp, Glycine max
  unsure (1)..(338): unsure at all n locations
caatacttncaggcatgaagatgggattgaaccttataactggcatttaatggagaacgacatcttggaagaatgccaatgatccatccccaggacacttttattggggtcttttgctttataaccatcccgagtcttatctgatgatgggaacagaaaagtttgtgagagctggaccatggaatggcctgcagtacagcggcataccagaacaaaagcctaacccgatctatgccttcactacctatccaacaaggatgagaagtactacacttatatcctatcaaatgctgctgtgatctcaagactggttatgaatcaaacctcttcaatgagta

SEQ ID NO: 79670 - DNA, 386 bp, Glycine max
  unsure (1)..(386): unsure at all n locations
cctcgatccctgtcagatacaatactagaaggaattccatgccaccttactactttcttgatgtacaactccacgaggttctccattctatacttcatattcactgggataaaatgaacagatttggtgagtcgatctactatgacccacacagcatcatgtccacgactagtcttgggtaaactagatacaaaatccatagatatgctctcccatttccattccggaatctccaatggcttcaattctcccgatggtcgttggtgctcaaccttagccttttgacatgtcanacatcttgctacatattcagctacatctttcttcatgccatgccaccaaaaacttctcttcaaatcttggtacatcttagtcattcctggatg

SEQ ID NO: 79671 - DNA, 357 bp, Glycine max
aattttttttcaaagcttcctctttttctggagataggacatccacccttagatgtccaggtgatggcttccaagcattttgagtagaagtgaaatttctggcttttctttagaattaaaaattggccacccttgacttccctctgacttttagaaactttgtggacccttttaccaaaagggcaagatcatcatcttcatctagatcacattcctatcacttttttcttggattgaagatgagggctttagagcaattcccttctttttcttgtcattttcttcatgtggatttaatctcaacaattccatctcgtgtcttgtacctttccaatagagtagcagagtcatgtagat

SEQ ID NO: 79672 - DNA, 506 bp, Glycine max
  unsure (1)..(506): unsure at all n locations
gctcggcatctatgagatcagaactgattacagaactcaagttgctgatcttactcatcatcgtgacgtgtgtgtgtgcatgttcgtatacgtgtgtgcgtgtntgtgtgctatntctcttgatgaaactagatgccttcagatactattcaaagaccagaataacaataacaatatggctactaagtatcaagaaattaaatatatatacttgatcgagcagatgctgatctggttgaggaaactagacagcaacatcagatgtgaacaaagagaaaaaaaaatcttgaatatagacaaaaataatgatggaaaatattaactacttctatgcctatggaaaatattaactaacagaatatagtagtacctgttgccaaggattgcatgaagttcaacaatggagttctcttctcgctgtgagaatgctcctctcttcatatcaggcctgagataacttatccaccttaatctggcagtcttgagtaaaaatatatatcattatc

SEQ ID NO: 79673 - DNA, 465 bp, Glycine max
  unsure (1)..(465): unsure at all n locations
gagaaagagggagtgtggagaattgaaagcgcccaacanagaataatanataagagaggagaggagaccagtttattgcaaccggaaggagctggaagttcaaccgacaaaacctcgtcgttttgctgcatcatctcctccgcattctccatttctctctcactcttgcctttcaggagttgagtttcaatttggttggaataagaaaagataagattaacaaacgggcaatctctctctctcttctcttatcaacgacatatgataaactcacgcggagcacctcactcctcatgccatntcaaattgaaacccacgtgatntatttatttgtcccttcacacaccaaacaaaacanacaacacttttcttcctttttttaaaattaattcatttcatcctataatttanatngaactaaagatataanaaaacttcactttcaccaattaaaatattaattta

SEQ ID NO: 79674 - DNA, 363 bp, Glycine max
  unsure (1)..(363): unsure at all n locations
tcagagatgtaactcttgacatggatttcttaaagttattactcttccaacgggtttctggaccagacctgaagagtctataaaagcaagaccctgacttgcattcagatatcctttttgaacatctttttgaacttcttcttcttcttctttctttaccaaaaagctttctaagttttctatttttccaaaccttgttctttttgaagtgaaaattctgcagaaaacanaagtgggccatatctgttcattctcttttctctttgctaaaaagaattcaaccaggactaatcggctgaattctttttgtggctctcttctcccttttcccaaagaacgaaggactaaccgcctaaattcttt

SEQ ID NO: 79675 - DNA, 387 bp, Glycine max
  unsure (1)..(387): unsure at all n locations
tgcagctggatntctctagtagggaatctatcctttctaagattggagccaaacctagtctcctcattaagaactggctcctntctttctctatntnctttagttgcatacacctttggttggttcctaaccctctcatgtaacttttttacaaactctgacctagattccccttctttatgtataaaagaagtgtcaagtgggaagggaattangtctaatggtgttagaggattgaacccatatacaatctcanaaggtgattgcttggtggttctatgaacccctctattgtatgcaaattctacatgagaaagatactcatcccaagacttatgggtgcctttcagaagagcccttaaaggggtggaaaagacctattcacta

SEQ ID NO: 79676 - DNA, 356 bp, Glycine max
  unsure (1)..(356): unsure at all n locations
tatctctaacaattacctggtcacttgttacaataataggatacgtcatgaattctagtgtaattgggcaaagaaactcatcaaggataaccaaagaggtgaactgtcatgcatcttgggcatggtaggatcatcaaggatgttggtttcttccatgcctacaatttgttngaatnntgtgagaaggtcaattattttatgagtactctcagtcaattgcctttttctttctatagcaagggtcctaatagtcaatgtcnntatgatctaagcctcaacactatgaagctccaattgtttaagcaacctnnaaatgatagnattattagctatttcttcatcatcaccagagaaca

SEQ ID NO: 79677 - DNA, 142 bp, Glycine max
gccttaaacgacctcttgttcgattaaaatatattctgtgaaaaaagacaaaaaaaccacttaacccacgggtagttcctaaagaactatgtaagtctgatttcctcatcgtaattgcggatacctacgagcgaaggaaaca

SEQ ID NO: 79678 - DNA, 479 bp, Glycine max
  unsure (1)..(479): unsure at all n locations
agcttctcgatatattatgcgcctgaattggactttcgtgtgacatgttatgacnaatttaatntctcgagagtattcggtgttcaatntcgagcgtctcgatatattatgcgcctgaattggacttccgtgtgattaagtatgaccatttgaatntctcgacagcttccggtgttcaatttctagcgtctcggtatattatgcgccagaatcagacttccgtgtgacaagttacgaccatttgaatntctcgagagncttcgttgttcaatntcaagcttctcgatttattatgcaccttaatctgacttccgtgtgataagttatgacaatatgaatttctggagagcttnncgtgtgcaatttcgagcgtctcgatatattatgcgcctgaattggactccgtgtcataacgtataccattgaattttcgagagcttcgttgtcaattcaagcttttgattatatgccctgaatgg

SEQ ID NO: 79679 - DNA, 452 bp, Glycine max
  unsure (1)..(452): unsure at all n locations
ctgcagctatgatttggttcttatttttatntattaatttccatctctatggttaaatttagaaatagatcgtgagactcctaaatcagaagtcgaagttggcgtgtagaaatggatggcacgtttgacgatgaagttgaaccggccgttacaatcggtgagtacctcgaggaagttgaggaacgggaattggtaagtcattcaatattgaaattttaattnttaaattcatatataaaaatganaatttgaattttattgaaattaaattactttatccaaacaagaaaattaaaatacaagaatttgaattgcctcatccaaacaaaatatttacaaaatgaaaggaatntaaatcaaggcaatcaacatgttgtgtatttaaatntcctaganattttaaatctcaattcaccacatgatagagatgtataattctaacggtttgttac

SEQ ID NO: 79680 - DNA, 387 bp, Glycine max
  unsure (1)..(387): unsure at all n locations
cctctntgaacaaatacccctcagccaaatataatccatcttgggcctttntcccacaactctcataaatgggagagaaatgttcatctaaagcataaaagtccctaatgttatcaaagtctaaaaattgagctcatagggagcaaaaaaatgtgtgtctcctagagagggcatcaactaccacattngttttccccttnttgtattngataacatatggaaatngttgtaggtactctacccattttgcatgccttttgtttaacttgctttgccctctaatgtacttaagtgattgatgatcactatgaatganaaattccttggaaacaagataatgttcccaagttcggaaggctcttattaaatcataaagctctttatcat

SEQ ID NO: 79681 - DNA, 493 bp, Glycine max
  unsure (1)..(493): unsure at all n locations
agctntaactcggatgtccgattcaggcgcataatatatcgagacacttgatattgaataacagaagctctcgagaaattcgaatggtcataacttttcacacggatgtccgattcgggcgcataatatgtcgagacgctcgaaattgaacaacggaagctctcgagaaattccaatggtcataacttttcactcggaggaccgattcaggcgcataatatatcgagacgctcganattgaacaacggaagctcccgagaaattcanatggtcataacttttaactcagaggtccgattcaggcgcataatatatcgagacgctcgatattgaacatcgaaagctctctagaaattcaaatggtcataacttttcactcggaggtccgattcaggcgcataatatatcgagacgctcgatattgaacaacagaagctctcgagaaatcgaatggcataactttaactccatgtccgatcaggccatatatata

SEQ ID NO: 79682 - DNA, 505 bp, Glycine max
agcttaagtcgctgttccacccatgtttagtggatataaagacaagaatcttccgaaaggatggctcctcggactgtggaactcgtaatctaattatatatctctgcagaccttatgctctggtaattaattggttagggttccagaaactgccacataccatatattactcaagagggttagaaattgtcaaagaatattatattgttaacattgttaatttgttttagtcagaaaaatatagagtcatgagccttctcttctcttttttctcctttaagaattcaattatttgatttagatatatggagctatctatattattttccatacaataaatacaaagatcatttatttgtgcttaaaagagtgactttaattaagagatttatctccttgattaaatagtattcataagttgatataaattgtctgtggacttgaatctatctttaataaagattatatttactaataaaaacttatgtgcttactatgtacatat

SEQ ID NO: 79683 - DNA, 417 bp, Glycine max
  unsure (1)..(417): unsure at all n locations
ctatctatttggcagtaacccattaaattcagtactcggtgtaacacatcatgtgtcatttatgtgaccctatggattggttgagaatattgctgcttcactggctaatacattgactctcttcccatacattgatgaaatatctgagaagctagactatatatgcatatactactatgggcaggtntgctttattaaccttgacaatgcactgtgcatgatatctggcatactcacatgacaattctcacatttatttcaggaagtggttttatgtgcangcctgaagctggtggaaaatgtcgagtacaatgaatctggtcgtgaggtataccctgatgacttataccgcatgctgcttcagtttcatgaaagatataaacatctaaatattcctctcatcattactgacaatgg

SEQ ID NO: 79684 - DNA, 294 bp, Glycine max
tattcctttcctccactaacttgtattatcgtgagagaaatcctgctagaactaataataaggggcggccatgaatgcacataagatgtcccataacaactgaaagcaaatgttcatattcgttcgaagtgaggatctgtgacgttatgaaacatagtaacatgtaacttaacaagtatcttgtgcccaagaaaacaaatcacgacacagtgcgacctcgctattaccattgttaatgagccaacacattcagaagatgccgtctggatctctctgaaattgctacatgcctct

SEQ ID NO: 79685 - DNA, 501 bp, Glycine max
  unsure (1)..(501): unsure at all n locations
agctngataaagaggttgaagatgtctacagggtcattgaagcatatgaagcctgtcttaaacgcttggaaggagaggctagagatctcctcagtgaggctgattttcttaaagagaaattgaaggtgctcgtcaggtttactataatttgcgtattacataactatttatttaggatttaaacaatcagtggtgataaatatggngaaaaatcagagtatctgaatggccggtgtgcatntaatgctatattagtttgttctgtgatatangcagtgtttggtagatgggtaaggaattattaatgtgttgttttccattntgtcgaaccttccaaatttaccaagagccttgggtgacgacgtatgatttggtttctatacttgngtggagttgttccagatcagttctgtgtgatatcactntctccttcaactatnntntatctctcttctgcttctccctatgagtgccagatcagttatgtgtgacgtcacaatc

SEQ ID NO: 79686 - DNA, 253 bp, Glycine max
  unsure (1)..(253): unsure at all n locations
atcatgaccttattaagtctcatctataaaggtgacattcaacctaaacacacacatgagataaacacatggagagtgatgtatatctcacacacatttaaaactcccagaagacataanaagaaaaaatatattataaataattgtatcacaaaaacacacaacatccacttcaaatgtctcatacacatagacacacatgcaagatgattcacaattaacttatggatttgcatgcatatggcaccatttt

SEQ ID NO: 79687 - DNA, 501 bp, Glycine max
  unsure (1)..(501): unsure at all n locations
gcttcggtcgatgcagattcttcgtgtacctcgttaacactttcatgtagcattttattggatacatccaacgtaggaaaacaagcccacacattctgatcttcctcactagatgaacaatngaatgcaccattatgtccaaaaatgatggaggaaaatacatctccattngacaaaagacaatggcagcctcctcctccaactcatccaatgttgctgggtaaattactttgctacanatagcattataaacaaaacacaaccgtgttatggcaacctgaactttcacaagcaagattccctgaatcgctacaggtaatagatgttgcattagtacacaaggctctttatattngaagagtatccttgtggaactntaagcatacgcaaacaatgacaaaaactcctcttctcgtttgttgacatcgtgtgacatgttgggggtagatatgttcgcgaaccttgtgatattccgcgcaactattctcttatacccatttc

SEQ ID NO: 79688 - DNA, 419 bp, Glycine max
atcccaaaccaacctctagacacaattctaagatggtccccagtggcctatctccacaaacacacagccaccctttgcctcacaagaatagcattcctcaaagtggtgtcttccttcacaattgcagaattcaattctccacaaatcatatcaaaagtttctcttcccatcctaaaagcctttctaaactcttcttcatgaaaatcctctttgtgcattcatcccaccatgcccctgaacgatccttcacccacagccttctctgtgagcctcccacaccagatttcacccctttagcactaccaccaccaccctcttcctcttcttctcacgctatcacctgcaccgcacgtgccttgccgagtgacttcttcctcttcactctctctgactcctcgacgtggctgcaatactcgtca

SEQ ID NO: 79689 - DNA, 474 bp, Glycine max
  unsure (1)..(474): unsure at all n locations
gcttattctagctaanatagattccanngttttgacctacanagactacatgcacttntttgtctctattgttgacatagctccttcagataagtcaatggatgacgatattgaagttattgtatgaacaaataaacctcaatggaccccaatggaccacaatattttgtgaggttaggtgtaagagtcattagtttgttaattgcgaggtgggcatacatgaaatggatatattatggaacttatatanggggcaatattntgaattttggtgattcntggtatttccaaaaatacaatatttaaataaatggtactaaaataaacatatatataaacaatggctattctttgtttatattcaagaagtatataaaattattttttgtaagttgctgatttcagaaatggtacacttatttctaagactgagccccacctatattttgtattaatattaataactctaattca

SEQ ID NO: 79690 - DNA, 349 bp, Glycine max
  unsure (1)..(349): unsure at all n locations
atttttgcttactccttcatgtgttctcattttatccagatctttcacatgcttgggctaatggtgtaacatgaatctttattatttccactgattgatcttgctatagaagctngatttcatnttctatggtgccaaattcttgttcatgttcttgaaccatgagttgtgttgagtttaggtcctttgagtttcggctgctatttttgtgctgaccctaaccataaattcttacaaattagtgaagaaacctaaaaatctaatgacgtgtccgtattgtagtttgcatagaagcatgctagcatgaacttgcactaagattctatgttggctaatttattcctgttct

SEQ ID NO: 79691 - DNA, 529 bp, Glycine max
  unsure (1)..(529): unsure at all n locations
cctgcacgcatgcaagcttgcttgtggcgcttctatggaggatggatctttgagcttcaatgatgtcctttaatggtgattttcaaccatggagatgcagcagaagacaaaggagaagaggtgagaggaggcgccatccactatggaataagccatggaagaaggagcttcaccaccaagatgagccttggataagaagctcggaaggatgcttcaatgaaggaaaagaaagacggagagaaagagagaggggggagcacgacattgagcgaataaaagagggagagaagtggaactttgaagtatgtctcacaagactctcattcatcaaagatacaacaagtgttacacatgcttctatntatagactangtagcttccttgagaacctttcttgagaaaaacttcttgagaagcttctttgagaaaactttcttgagaagctagagcttatctacacacacncctctcataatctaagctcacctcttgagaagccttcttaagaagaattctaaagaagctagag

SEQ ID NO: 79692 - DNA, 312 bp, Glycine max
aatctcctacctaagacctctagattctattccttggtcattgtgattattgaggtttaaatcattcaaggttgacataaggtacaaaattggtggtagtcatgggaggaacaacttaatattagatttagaagaaaaccaccttgccctatttttttctaatcttcttttattcactattgaaggtatgttttggaaacttgctagaaatattagataggaactgcaatttattttgttatttcaatcatccaggggggagtgtaaagtggttatgaatatttttattcttgaaatctaaccctataattt

SEQ ID NO: 79693 - DNA, 380 bp, Glycine max
tgccaccccggaagaattaagccaagcccctactcttgaggggcaactcccaccttatgaagactatcccgaacaagacgatggggaaggagatacccatcttggccccctgctccacctcaaagatccatccccgcatgaactaccccagccgaacatagtccgccataacctggcttcacccacacccgtagaagaatctgttccctctgcggaagataacggaaagattaacgcgcttgaagaaaggttaagagcagtcgagggcctcgcgtaatacccattctcggatttgcagaattatgtcttgtgcccaacatcgtcatccctcccaagttcaaagtaccagactctgataagtacaaagggacgacatgtct

SEQ ID NO: 79694 - DNA, 287 bp, Glycine max
  unsure (1)..(287): unsure at all n locations
tgcaagcttgttnngtcccgaacgattatatggcgtanatatctatctatgcgccgtntagcctactcangggtgttgatccctgaattataacatgttgcatgaatctgactctgcacagtatactccactgcacgttgtttgttccttgaatgatagaagggcgcatatatctgtctctacgcatatacccactcagcttgctattcctgaatgattaagggcgcagaattcgnctctgcgcgtctactcactcagcttgtgtgtgcggataaccgattgtcaag

SEQ ID NO: 79695 - DNA, 410 bp, Glycine max
acatggaccaactcatttatttcaaatggaagtcggatctagccaaggtctgagagaccatacaaggtgcctagcgatctctaattatgtgggccattaagtctatcatatgctgacaatagccgagaagcccatgaatttcttctggggcggagtaggcgtctgccatcgcctaggccctggctaacaatctggggaattcctgactcccgtctaaggtaagagcaaatcgatccatcccatggttgcctcttggtgtaaaaagcgatcaccttcattacccttgtgtcgatatactaggcatctcatctcgatctatgctgtgggcgcgctaatccactctattgtcttgcgacaagccacatgttgtctcgttttataacgttaaacaactctttggcctttacaac

SEQ ID NO: 79696 - DNA, 466 bp, Glycine max
  unsure (1)..(466): unsure at all n locations
gatcatacatctaanatgatggctggacattgcataaattcattacttattctaatttctaaacaacacatggaatagtcattgtggcatttcatcanacagttggtgtgcacatgtcaaaacatgtataaatgagggataaggagcaacatgacatgcaaatntacaacaaaatgaaggataggactagagccatccattgcagccaccaatccaagcattntgatcatgggtttgcacataacttatctcagatattgcagagaanacaataaataaagcaccaaacattntgatactaagttgcctcctaggagcgcttctttaacgtctatagccggacacngngtggtgatcaatacttcgccatctcatcccctcctaacccccatttggtgtgattgatcttatcatggacctagcacctgtggcacctgcctaatgcttgacaagaaatgtaacatgc

SEQ ID NO: 79697 - DNA, 439 bp, Glycine max
tgcaatattacaatagaccatctcaacctcagtagtttaatcaaccacagcagagcaattatgacctctccagcaacagatacaaccctggatggaggaatcacgcttatctcagatggtccagccctcagcaacaacaacagcagcctgcttctttcttccaaaatgctactggcccaagcagaccatacattcctccactaatccaacaacagcaacaaccccagaaacagccaacaagtgaggcccctccacaactttccctctaagaacttgttaggcaaatgactatgcataacatgcagtttcagcaagagaacagagcctgcattcagagcttaaccatcagatgggacaattggctcccaattgaataacaacagtcccagaatctgacagctgcttctcaactgccaaaatccaaaatgtaatgcattat

SEQ ID NO: 79698 - DNA, 402 bp, Glycine max
  unsure (1)..(402): unsure at all n locations
agctngccacccagctcgcccattcgagcagggttgcttcctccagaacaacagccttctggaggaatcttctggagggcccaagtgggcctggtctctatttgcacccacatttttactaagtacacccccccgccttattnttggtgattcttttctcgttaagttacgaaaacttacgaatttcttaatgatacttgttctctttccgttatggtatggaaccttgcggattacataatcgtccccttatttgacttacggaatgttacagaatctcactaattgtgcaacgatgctatcatttgatatacggtgtgtcatgtaaccttacggatagtgcatcaatatatttcttgtgtctctctgccagttctggaatgtcacaaattgtctcatgat

SEQ ID NO: 79699 - DNA, 509 bp, Glycine max
  unsure (1)..(509): unsure at all n locations
agcttgtgcctcttcatgtctggaatatgaatgtttcatatagatccaaagaaccttacgtgctttgctgatggcttattcccgttccaagcttcaatnggtgtcttgtcttttacagacttagttggacatctgttgagtatgtaaacagcagtgtagactgcttcagcccagaatgtgttaggtagtcccttctccttgagcatcgatctagccatttccataattgcgcaattctttctctctgacacttcattttgttgaggagaatatgtgactataagttgtcgctcaatgccttcatcctcacaaaatctttcaaactcgcgagaggtgtactctntgccgtgatcacttcttagtacttntattccgtttccactttgattntccgcaagggcctttgaacttttgaatactccaaagacttctaatntttcttttagaaaatatacccatgtcattctagagaactcatcaatgaagagtatgaggtacctgttgtctca

SEQ ID NO: 79700 - DNA, 399 bp, Glycine max
  unsure (1)..(399): unsure at all n locations
tgttctttataaatgagaagttctgaactcattatggtattttaaanaactttgtgtggatccaagtgatccgatcatncatttgcatactcaccgtggttattttcttttgaatgtcatcataactaagaaaacaccaaggcgcccctataacactcgatccaaaaaaatggattatgaatatggcgtgccagaacagattaatgccgatttatccgcctttaaagatcaaatggcttcaatctcgagggcatgttataaatagtaaaagaatggggacaatgtggcatgtcccattgctggcaaatgcattataagcctaaggccatctcattcaaacccccaatttaaccccatcaagcataaaacaaaccaaaattgtccacatatttgagcaca

SEQ ID NO: 79701 - DNA, 429 bp, Glycine max
  unsure (1)..(429): unsure at all n locations
agcntgtaggattatggggtacccatcacatgtggtactaggtggcggtcgggcgatggtgcacaacaagttttccacattcacaaatcgcgcataaacccaccatcccctgtggcccacctccaactaagctcacgtactcccacgtagcccatatcctcgtttctctcaacaccgggtccccatcaatcctcccaagcttcccaacatccaagttattcaacattcatacaacacanactatcacagccaataaaacagggcaaaggcagaatactctgtcctaaacaccaaccaaaatcacagcttntctcacttaaagaccccagtaacaattccttcgttccaattcgttaaccgttggatcgacttcgaaattntactggaagtctctagtactaagcctacattgtgaccgttgggaactac

SEQ ID NO: 79702 - DNA, 392 bp, Glycine max
  unsure (1)..(392): unsure at all n locations
atcaatntagtggattntcaaggttgagaagtgaaaatgagaatgggggtaatttggagtaaactctcatctcaaacaagtctataacattaatttaaacttgctcaaactggttttacggcgaanactccaccgattcaaaatttgacccctcaacacccaatttaccctagaaatggctcttgctttcacctttgtcanctcattttctcatttgctctgcccaagctttcccacaagtcctaaatgacatnttaaactaggattaactcactttagcctccaattaccactaaccccaaatntagtttntcaaaccctcaaaacctcacacttttncactcacatcactaccattctcacatttaaccctaggttaactcntcccatca

SEQ ID NO: 79703 - DNA, 362 bp, Glycine max
  unsure (1)..(362): unsure at all n locations
ttttcttcacgggaacaatttttccaagccaattctaaagagagagaagtgcctaaagggcttgaacccttttcttctcactttctcccctattcatagcaaaatangggagatggttgccgcccaacttgtctatgcgagctcagctcgcccaggcgagccagagtgctttctccagaagcaacagccttttggaggaatcttctagagggcccaagtgggcctggttgctatttgcacccccattgtttactaatacacccactctgctttttttggtgattctattttcctaaagtactcgaactacaaatatcgtaccatacttgttactttcctcatgtaccgaccttgcgatacat

SEQ ID NO: 79704 - DNA, 405 bp, Glycine max
  unsure (1)..(405): unsure at all n locations
cgccgcatgcaagccttggtaaaggctattaatcttcattntcttattgtttcctcaccatntntgtgcaaaacctttattcttggttccaaatntcttttatcatcctttgaagcttgggaacatccaaatccgagtntgtgtttcattctaagcattttntgcaagcttcatgaaggggggtctttccacttcttgaaccttgatcttgttaccattggaggctagacttcattgcatgacgtgttgatgttcaaaatatcatagcaacttcctttgctggaactgtgtgatatgttgttnttattgaagttnttaagattaaaatgagttctttgggtgtcaaaacttanggttagccttaaatttcacttaaatcggagttttctagcaaaaattatgaac

SEQ ID NO: 79705 - DNA, 351 bp, Glycine max
accaatgactacctgcttatcttgtattctttgacctgtccctttctggttgagctcactcaaccttattgaatacctgttccctatcctaagatttggagctttgattgtttgggataagtggggggttttgttattggatacatgtttggtggccatgctcatgatatatttgagccatacctgatgtacattgcatatagttaaatgtgggacatgctgaatatgatgttgtctctcaaaggcttcagaacaaaatattttaaaaatatcgaaaagaaaagaaagccgtaagtgagtgatagacttaatgacaaagatgatagactctggtctctcttatggttaaat

SEQ ID NO: 79706 - DNA, 343 bp, Glycine max
  unsure (1)..(343): unsure at all n locations
tctttgtgcctanatgatgntgaaatgttggtcatagagtaggtagcaagaggtaaataaggcgtacgtatattgngtagatagccaagtgctttgccaatatgcatatattctgaatatggcacgaaaattcttctcaaaatgggagcatatggcatgaaattgcttttcanaatatgaatgggtagtaaaaaatcgtgcctttcctatgaatgtgtaacatganattgctnttcanataaatgcaaatatgtgtatagcatgaaattgactctcaagtgtgtacgtatatgcgaataaaatgtgaacatatagcatanaaatgccaccccaaatggagtag

SEQ ID NO: 79707 - DNA, 273 bp, Glycine max
tgtgattttccaccatggagatgccggagaagattaaggagaaaatgtgagaggaggcgccatccactatggaataagccatggtagaaagagcttcaccaccaagaatgtgccttggataaaaagcttggagaggatgtttcaatggaggaaaaaaaagagagaggggggagcacacaattgaaggaggaaaagggggagagaagttgaactttgagttgtgtctcacaagactctaattcatcaaaagtacaacaaagcggtacacaagct

SEQ ID NO: 79708 - DNA, 482 bp, Glycine max
  unsure (1)..(482): unsure at all n locations
ccacagcaacacanaatctaggtatccaaaaccnctcaatntaatggaatttcaaggtttgagaagtgaaattgagaatggngtaaatttggagtaaaacctcacctcacacaagtctataacatcaatttaaacttgctcaactggatntacacctaatatttcaccgaatcaaaatttgactcctcaacacccaattttaccctagaaatggctctttgttcactttggccatttgtttttctctcttgcacagcccanactntctcataagtcctaaatgacatttcaaactaggattaactctgtttaacctccaaataccactaaatccagaattggccttccaactntcaaagtctcactctntttccactcacaacaccatactctcaccttctaaccctaggttaactctacccttcatctcntaacagtttccataagcaatntcagcatatanacatcacaagcatcatcat

SEQ ID NO: 79709 - DNA, 382 bp, Glycine max
  unsure (1)..(382): unsure at all n locations
tgcaagctttgctaggagaactattggacattgttctagtcaagaagctgaaatatgggcagattggtatggtatgcccatgctggtgataaagggtttttgaaaattctggtggaaactaattgtattgaggtagttagactcttagaggaagactatccaaatgaaaatcaattcagggagctgagtgctgaaattagagatataaagaaaacctttcagcactgtggtaattcatatactgagggaagctaacagtatgagtgattcctttgccaaggctgatctatccttacaataagatgtttgcttttataacaatgtaccaagttttgctgtaacctnntttatggaggatgccgctatcttcaattataacgat

SEQ ID NO: 79710 - DNA, 409 bp, Glycine max
  unsure (1)..(409): unsure at all n locations
tcaatacgttccaagatntgatggggcctataatatctcttagcaagcgtagagtaagcttctaaagntttgaaaatagtggactgatgatgagggcacaatttcaccatgagttagtcctcaaaattaaaatggacatattttcatttcgtataagcaatntgcttcataagagcccgtgccttcaaaagcttcttcctgattttagagaaaacaacttccctattagttaggaattcgtcaatggcctcgagattagaagttctggcaatgtattgaggaatgttgaaaggcttcttgccgaaactaatctcatacagagaagcctcagaacccanatgacatgatgtattttaagaccattcgacccagttcaaaaaattacccctcgaggatggcttcttatgga

SEQ ID NO: 79711 - DNA, 432 bp, Glycine max
  unsure (1)..(432): unsure at all n locations
agcttaacatannttgtttaatacttccgntatcgatttgtttgtttacattaatattaggtgtaatttgctatatttcaataaaaatcatcacgtnttatttattntcaagtatatgnttttatataaaagatntaatttttttaataattattcaagaggtaaaaaaattctctgctgttagggtttgctcgttcaatataatgaaaaaattatcacgacaaanatagaaagggaaaattatagggaccacagaattagaaggatcaaaatgaaaataaaaacatgaaaccttattgttattgagattaaaaacttatattaagtcacgtttataaaanaaaataaaaatgaaaccttcanatgttgcaaattcattagtaagggtataaaanaattaaaccctaaaatgaagcactgactctnttttat

SEQ ID NO: 79712 - DNA, 399 bp, Glycine max
  unsure (1)..(399): unsure at all n locations
ttgatgaatggtggaacaaattttattcataaagggccatntctcttgaagattgctttaagaatcttacttcatctccatctttcttgcaagaaacatcaaataaagaagaaaggtaaactcaaacactgtcgacaaattaccaaattcaagaatttttacaaggagttttctagccctattgatatacactactaaaaaaatgtgttatttacataagttattttcaacatacgacgtcggttaagagacatcgtggtagccggagtcataaaaagtatttagatctacgacgacggttccaaagaaccgtcttagaatgtggtacattctaagatggtctcgagggcaagactgtcttataatgtagtacattctaagacgggcctagatattcta

SEQ ID NO: 79713 - DNA, 428 bp, Glycine max
  unsure (1)..(428): unsure at all n locations
agcttatcattcataatggtttgcgggtgggaaacagtgtnaaatgcacaaaatccacaaaagaaaacttcaatgggaaaatctacaatattatgaaagttgagtggtaaaattcacgaannataaaattgagcggtgaaatttgtaaaataataaaagtttgatggtaaaatatgtaattatgcaaaaaataaaattaactactacttcaggaatgtgattcttgagtattttatttggaataaataacaatttcgttcttgaatgtattgagcgttgacaaattcgtccccgatagatgaaaattcaaattttagttctgaaagtgaaaaatgtgtgacaatttatccattaacttttatccgttacctttaatgaaagagcttacgtgaaacattcattgaacgaatttgtaacgctctacacat

SEQ ID NO: 79714 - DNA, 323 bp, Glycine max
  unsure (1)..(323): unsure at all n locations
ccaccatcgtttcataggatattatctattatggggctaccctcacgatcatcgtgtccctttccatcattggggggaccacctgagccgccagatccctccaccttttgcgcgtgttctttgaaagatccgtccccctttttgcaaatgttctgtagttgcatcctatccggaaccatatcataattgtactgatactggctaacanaggcaaccattaagtccttccaagaatggactcgggaagattccaagctagtgtaccaagtaacagctaccccacctagacttgtttggaaagaatgtattaacaaatcctcatc

SEQ ID NO: 79715 - DNA, 486 bp, Glycine max
  unsure (1)..(486): unsure at all n locations
atcttaagtcacctgcaggctgaagcntgcatgattacatctccctctntctcaagcaaattcttcttgatatcatcaaaatcttcatgatttacattctcccnnctttttgatgatgacaaccacctgtaggttaggagcaacaacaaagaaaatatctatttgcatatagtttactcccccttggttttacaatgattgcttatatgagacaattgaagatttcatatttttcatatataaaaagtagtctcataaaacaatagaataattntcttactattntatcttttatctttctctccccctttgtcaacatcaaaaacaaatcatgaatagagaggagaaagatgttaccacttgttgcaatgtatgagaatcaagtgataccaaaaggcattaaaacaatcattcaatattaatcaagcanaaacaagtacaataacacatcaatcaaacacaatcaaatacaatcaatcatcaaat

SEQ ID NO: 79716 - DNA, 470 bp, Glycine max
  unsure (1)..(470): unsure at all n locations
agctngactaggcgagtngatcctatccttagtttgaccttagctattactcaattcggttctgaatgagaaattccacagagaacatgtccggttgatattctcgctctattttactaaaagggatatctttggtattatattattattctatctctttttgatttccaacgtggttacggcacgaccgaacggtcggaacttattntaaccatagtttacagatcatacaattcacacgttcggtggaaatgtattgtacttctacgttaagcgagatatgacttaagtaaaatggcttaagcacgtcaacacggggtataaaatgttaatgacatgagaataaaaatacacgagacacaatgtggaccaccacgggtacatagaatgaatcgaacagcttggttcaaggtacttaccctgtgaagatcgaataacgatgaagaacgaatgaagaacgtgcaagaacg

SEQ ID NO: 79717 - DNA, 503 bp, Glycine max
  unsure (1)..(503): unsure at all n locations
agcttccttccacatctacagctccaactccaacatccacttcagcagctccttcaatcgtagctcagagtgattctcagcgctttgaagccatgcttcagagcattcatcagggaccaaatattntacttcagagtttataggtggtggcgcctccaggatccattccttccgttaagcagtttctggagaggagtagcctgcctgtggcccaaccttctcttcactgggaagatgaaggtcccacagcccangtaccacagcatgtagaggatgagtcatccgaggccaccattccagagccattcattgtagaggaggagacaggtgaaacacacgttagacagaaagttgttgctactcctaagagatctcttgagggcacttcanagcctcctgcactagtggtggacctatcctcgccttagcatgcaacagacccctccactcctatattagagataccagaggacccaaccacaccagtcctgactctgaacact

SEQ ID NO: 79718 - DNA, 207 bp, Glycine max
  unsure (1)..(207): unsure at all n locations
ctgggagcgacgcgtccagctcatggacaatgagtatatcgatttccaataagaaatatgtcgtcagcggtgggcatcactggttacccccatggccaagttcgatccagaaatagtcctcgaattttatgccaatgcttggccaacacaggaaggcgtgcgtgacatgaggtcctgngtgagagggcagtggatcccgtttgatgc

SEQ ID NO: 79719 - DNA, 454 bp, Glycine max
tagccaatggactaccttgaattattcctttgtagcctcttgagcctatttcgcctgtctttgttgtgaagctcattacaagccttatgtgagaaaccatgatatcaccttacccttaaggaattttggagctttagaatcgttttgggaataagctgggattaattgtgggggggtatgtttcattggaagatatgaatattggccatgcttaatggtctattttggtcatgctcgatgtatatatatatggcctagttcttctttatcttcaatttcggactgttcaatctaaataaaaaagaattcacttgttgcaattctgaatttcgtctatccaaaaaaaagaaaaagaaggaagtgaataataagcttgaataaaactgattgggagcctggtgatttgagatattaaggttgggtactattggctaatacactatcccattgtctt

SEQ ID NO: 79720 - DNA, 326 bp, Glycine max
  unsure (1)..(326): unsure at all n locations
ataaaggatgcccacatatttcatgacccaatgcaaaatgatgattggaaactttatgccnaactggtcatgcatgcacctatgcggacacctcagtgtcaaattnttatggtcatgtgatgctagggctcaagattcgtttcctctattttaatcaacccaatggtttcaaaatatgttcttttatcaatttgtgcattcatccgagtccatttcgggcgtccggggaaatttcacagcattcacccttcaggtgtagacacattttccaaaaattggttatgatcaatgaactttttcaaagaaaagttggaaaatcgttcttt

SEQ ID NO: 79721 - DNA, 317 bp, Glycine max
taagaacaccatcattccctcttatcctcctttcttgttgattatgatctctattctccatttgatccaacctctcatggagcgcatcatctcgttgtttcattaacctcttcatatgtagcatcaaagcttgcatatggaattgcgaaagccccactccatcattaagattagtacctgacatctctaacaaacaaatcaaacgtgacaagacaattatagttgctggttgaatacctcacccactcaagtgtatcacacaattatggcttttctctaatgaaacacatcttgcttctaccactctaattcacctt

SEQ ID NO: 79722 - DNA, 352 bp, Glycine max
ttccaaactttttcccctaattaaaaagctatcttactttttacttaagttatgaattcccttaatgacaatcttcttaaatattaatgtcaatgaagcaacttgtatttgaatataaagcaatgataaattaatgagatttagggaagaggaaatgcggactctgttgtatactggttcgggcacacccttgtgcctacgtcgcagtcccaagcgacccgcttgagagatcactaacttgtagattgcttttacaagttctaaacacacaaggacaagcccttctttgtgtttagagagtctgtacaacaagagactcacagtctcttaatcgcttagagaatgagaagaa

SEQ ID NO: 79723 - DNA, 525 bp, Glycine max
  unsure (1)..(525): unsure at all n locations
ccgctgcagcttacctnttggtcctcctcatagttggtgcatgagaaaacatgctactattttatctcccagtccaagtatgcctccggatcattctnttctttanaaggaggaatgttgagtttaataccatcaattcggttttgtctaggaacaccatcattccctcttctnctcctttcttcttcattatgatctctgttctccatttgatccaacctctcatggagcacatcatctcgttgtttcattaacctctccatatgttgcatcacatcttgcatttggaattgcgaaagcccccctccatcattacgatntgttcctgccatctcaaacaaacaaatcanacgtaacaagacaattatagttgttggttgaatacctcacccactcaagtgtatcacacaattatgacttttctctaatgaaacactcttgccttttaccactctaagtgcccttgagttcttatgcgaataaagagattattgccataacaaagaacaattcaccaatatgtct

SEQ ID NO: 79724 - DNA, 260 bp, Glycine max
gatcgtgttacatcgctccttcgtctactgccaaacacatttatggctggcgatgtccctgttacttccacgttgaccttgacaaagatgtcatggaccaaggtgaaaatcttaattgattccaccccatgtcctgtgtaaaattcgcaatacttcaactatgcatcattcgcatacatccatgcttttcattggttgcattgctcattacattctttccttgaaaaagaaagagaacttaatcattgttataaaaaaaa

SEQ ID NO: 79725 - DNA, 362 bp, Glycine max
  unsure (1)..(362): unsure at all n locations
gagcccgggtagtcaaagagaagttcaagtccatagccatcaaagtctgaaaagagtatgatgaactaagggacgtcaatatggccaccgctgaagccttggaacgagaaaccaagaaggcccgaaaggaagaacacgtgccagcaaagttntgaggggctntatagggcagcaatagtaagctcaagctccgaagaggtgaaaggaatcatcacgggtcaaaggcatgatcttgaaggacgagctanaggcttaccttatgtcgaanagaaatttgtcccaacagttaggcgagactgaagggaatatgtgggccatcatcgatgagtgcanagagaagctaaatctagcggcgactcacg

SEQ ID NO: 79726 - DNA, 346 bp, Glycine max
  unsure (1)..(346): unsure at all n locations
gaaagtgtggaagagtcagtcttcctacttttattctttgaccacagagaggtacctggagatatgtcgcgggggtcaagagaccttggggatgtcaagtggggtgctatttgccaaaaccaaacttgaccaatcccgacccaacccgggcatagtcagtcaatgagaacctatgacgtacctaaacatgcgagctcctggcagtcaaccgattaaagaacaaagaccacaaagcatggaagcttgtgtggtggctggccanctatgattcttgagtgatatttcgaatatagcctctggtactcgattaccaagggtgtgtaatcgattacaaagcttaaaaatg

SEQ ID NO: 79727 - DNA, 470 bp, Glycine max
  unsure (1)..(470): unsure at all n locations
agctnantanagtctctagtgatccatattatgtgtgtgtgattgcattgaatgagatgatgtgcacagttgtggattataacttcagtcggtttaaatgagatacacataactgaatcacttgtgtgcttgagagaaacactatccttgtgaggagtgaagcatagttgatctatctttgatacctgtcatacttgctaacctatatcaatctctgagtgcattctttgcatgattccatcattgaaaccatggcaagtgtgaacttgagggttggaagctgaaattgtctgaaaagtatgccattatctcagttgttgtgactggttacatcttagacattgccatcgatctaacgtatagtattattagtttatttatttttgtggagaaccaaaaatttgaatttgggggaagttgataattcttatgcatactgaacttgaatatttaagtcacactacaattat

SEQ ID NO: 79728 - DNA, 305 bp, Glycine max
  unsure (1)..(305): unsure at all n locations
agagaccatacgacgttcctaacgatttctaattatgtgggccatntagtctatcatatgccgacaatgaccgacaagcccatgaatctcttctgtggcggagtaagtgtctgccatcgccttggccttggctaacaatcggggaagttcttgactcccgttcaaggtaaaggcaaaccgatccatccacatgtgtgcctctcggtgaaagagtcgncacccttcctctacctgttttacgcgatactagggagactcaacgcgatacttgctcgagggccgggcagacctactcttctggactg

SEQ ID NO: 79729 - DNA, 396 bp, Glycine max
  unsure (1)..(396): unsure at all n locations
ctgcagctctggctgaaaaaaagagctggggatgctcacagccaggaagtgtngatggcatcatcgaccctgcatccatggtcagatgccacgtgaagtggaagatggcccgcacgaagaanacaggggagatgacgactgaggccgcaaagganatcactgagaagattgtaagtcattntcaactaaccattagaattatatttcaatattttgtgaatgctatgtacaactgtgtgttttctatacaggattcctttgaggagcaagcgacacagggatccttcgtcccccatggacgtcaggatgttctcaccgctgctaatggacgtccagagcaccctggatgtgtccgtgcttgtggagccggtgtcactatcaagcaatactttggat

SEQ ID NO: 79730 - DNA, 346 bp, Glycine max
  unsure (1)..(346): unsure at all n locations
gatgatgacatanagcctaagagaatgatttcgagattgagtcaacaagttcaagatcaagattaaatcaagattaatttccagattcaagaaatgacatcaagaagaatcaagattcaagagaagatgatttcacaagggaagtactgaaaataatttttcaaaaaaccaaacatagcacagttttgttttacacgaaaagtgttttctctaaattttctaagttactagagtttttactctctggtaatcgattaccagtttcctgtaatcgattaccagtggcaaagtttgttttcaaaagcttttaactgaatttgcaacgttccaattgatttttaaaatt

SEQ ID NO: 79731 - DNA, 450 bp, Glycine max
  unsure (1)..(450): unsure at all n locations
agctanagtatgcccgagtcattcatccctatgatgatgtgttgaagtattggcgatcagaattgccattccttggatatagggttgaaccaagctcatgcttttacaaaaagggtcatcaagtcaagttgaaatatggaagtaaccgtcttgcaaaaatgcggcaaaagatgaatcgagtcacatcactgcttcgtctactgccaaacatatttaggagtattgatgtcctttgttacttccagttcaccttgacaaagatgtcatggaccatgttgaaaatctaaattgattcaaccncatatcttgcgtaaaaattcgcaatacttcaactgtacatcattcgcatgcatccatgcttttcattggttggcattgctcgtgcattctttcctttgaaaataaaatanaatgaacttaatcatttggtataaaaagaaagggacatgc

SEQ ID NO: 79732 - DNA, 480 bp, Glycine max
  unsure (1)..(480): unsure at all n locations
tacgtaacattacactcagccttaatagcttggctgaacgcgctacactattcttagatatattacaccccaatgcattggtaagagaatttgattgcgctcctctcccaagatacaacaacccgttggttccaattgtgtgcagcgaaaggatccccgaaccttttgaacatcaatgctctttctctcaaaagtaattttttgataagaacatgaagaanataaatttagaggaaaatgttgntgtatgtagtgcctatcaaaaatgtttttctacttgtgtttattggctaaagaaggatatatatatatatataggcatagacccccttatgtagcatcacaaagatctcaaagtanaactaccaaactaccacacctagtaaacattaaaagccaacgtccaggagaataacaaacgtaatagattctaaaataattattntattttacaaacacaagattaatataagtaatata

SEQ ID NO: 79733 - DNA, 467 bp, Glycine max
  unsure (1)..(467): unsure at all n locations
agctntatagattctttatgcaaatcattgattgcttttgaagttcatcaaagaaatagattaggcatagttataagatgnttacctcttcttcgctctcatacattcttgcgcatgagactaagattcatgacttctatttatgagtcacttaatgaatctgtgtcattatcatccccagagatatatgcttggttttctttcttatctgtgaaaattttcttgtcgaatatttccattattctnttagagataggacaatcaaatctcaagtgtccaggttgatcgcattcataacattttggaactaacgaggaatcttctccctttcttcttggattgaagtccgatctcctttgatgtcctttgttcctcangaatntattgaatctctttacaagagactaanatcatcttcttcttctaagntcttatcatgtgagtcttctttgcattttctcatgaat

SEQ ID NO: 79734 - DNA, 327 bp, Glycine max
ttagagttgagtgtagattgatctctatatataataaagattggaccaatcggaaatatgcatggctaaggtcacattgcatgtaattcttatgctgcttatccatattgacctatgtcattgcgtgtatagatgtgggggtcatttgggtctatttacatttgttgtaatgacgaaagacgcaattattccattattgatacatgagatgaacccgtgtgttaaggtgaaaggctcaagggtaatatcatacagatgaacgcttacagatttttgatataattggtacaatatgtactctcagtgggagattatcgaagatttcta

SEQ ID NO: 79735 - DNA, 433 bp, Glycine max
  unsure (1)..(433): unsure at all n locations
agcttctccttccatgacttattctctagtggatggtgcctcctctcacctctaatcctttatcttccactgcaactccatggctganaatcaccattgaaggaccttattgaagctcanagatccaacctccatagaagcttctcaagcaagcttctctcaagtagtattagagcacaagagcttcaagttggtgttccttanacctccattaatattcagctttaccttctcctccattatcatttcttcattnttctccatgtatctcctcacatgtcttgtgctgaatgattttaacatgttttttagaatttccaccgattaaacttgctatagaagctagaattgattttctatgggtcaaatatcttgttcttgttcttgaaccatgaattgtgttgagctagaatnntttgagtattgtattttt

SEQ ID NO: 79736 - DNA, 348 bp, Glycine max
tctgacattcatctcagattctgccttcttctattttcagatagggaatgcctctcacagcacctttggcaaagattatcttcatgcctcttaagtgcagatgtgcgaacctttgatgccataatttgacttcatcttctttggaggatagacatgtggaggaggagctgcgctcttgggagagtcatagagaacaattagtctttgatctgctggccttcattagaacttcactcttctcatttagcaccaagcattctgacttagtgaaagttacattgaatccttcatcacacagctgactgatgctgatcaaggttgcaatcagtcccttcaccacagtacttt

SEQ ID NO: 79737 - DNA, 407 bp, Glycine max
  unsure (1)..(407): unsure at all n locations
aagaacaaaaatgttcaacccttctggtatctgagaatcacttaanattagtgagaaaaattggttccgtgaagaanatccaagccgaggcgcttccataacgcttctgagacgtttccgtgggtgatttcgcgaagatattccgtcgttcttcgtcgttcttcgttcgttcttcgatcttcaaccggtatgttcccgaaatcgaacatttcaattcattctatgtacccttagtggtccccacttgtttggcatgcttttattntcatttcatttactttctgtacccncttttgacctgctntagtcgtttatttaagtcattntctcgcctaatcaanaaataaaataaatttccaccgatctttngaattggtacatattntaatttctgtaanatgaaatct

SEQ ID NO: 79738 - DNA, 292 bp, Glycine max
  unsure (1)..(292): unsure at all n locations
tcatggagcttacatcacatagtgatgtctctctttgcagattttntaatggatgccaaacatgatccatgggagccatggaaaaaagaaaccaaggaaggccttagtcacatcttcgaactcactctccaaggagagaaaatgaaagaaagccctcagaggcttacattaaccttccatactttcattggaaggacaatgtanaggcttacttanattgggaaataaggatagagcaaaaacttaaaagaaagtctactttaaaatcttatggatctcattcttatccaaa

SEQ ID NO: 79739 - DNA, 459 bp, Glycine max
  unsure (1)..(459): unsure at all n locations
agctntanagaagttctttgggattatataattttacattaattgccattcttggggatttttgagttctcaagttaatccttcctgcttaacagagaagactgctagaattactacccatgtatctgcaaattctcaacctgaagcttcaggcaaggagtcctatcagaaatcaaagattgcttccatagaaggaaataaactntcttcttttataaattgcaagatcactcctgctctttcaagcttaaaaacttccaggtctggtgccaagcgtagtacttccttcttctgttntcctctttaacttcatgcagagaaccgttaaattaattntatgttatgtcaagaactttggagctaacagggttctaacaactntaaaccanaaagaaacaaactccttagtaagctctggccaaagcatggacatacanggtattacagcatcaaagaatg

SEQ ID NO: 79740 - DNA, 219 bp, Glycine max
aaaagctaatagtctgatagcccggctatattatatatattatatggtataaccgaatatttttgatccataatactaattatttgggggtataatttttttaacaacaaactttgtcacacatgtgtccaaacttcattttataatatgaaaactttaatataatttaagtgggactgatgtgcccctttatactcatagcaatgaaattaaaattat

SEQ ID NO: 79741 - DNA, 394 bp, Glycine max
  unsure (1)..(394): unsure at all n locations
atggcagngcaatcttactgaaattctggatgaatatcctatagaaacctgcatgtccaagaaaagaacacacttcctgcacagaagcagggtaaggtagagaagtaatataatcaatcttggccttatcgacctcaatacctctactcaagaccaaatcccccaagactataccctcatgtaccataaaatgacaattctcanagttaagaacaaggttagtctcaatgcatcggtcaagaactntagagaggctatcttaacatgcattataaagggaaccataaacaacanaatcatatacaaacacctccatgcaactttaataaatcagaaaatatactcaccatgcacctttggaaggtgtaggagcgttgatatgcanatggcgtct

SEQ ID NO: 79742 - DNA, 178 bp, Glycine max
  unsure (1)..(178): unsure at all n locations
actaacggagagcttgtctaaaagtcccatgtatgcctttcacagggtaaaaaagggtgagaaaaaataaagacaaatgaatgatataatatatagtgataatatatttcaatgtgcccaacaaaactacattccaatntatgacccatttttgtttccagttttcttcaaataatgc

SEQ ID NO: 79743 - DNA, 199 bp, Glycine max
aagcaaggcggggatcacacagaggttactaaggcctatcatctagcagacaattaacatctctagtaaacaattatccagctaaagctaggccaataccgagatacgagtcagaaatgatactaaagctagcaatcacgttacataaaagaagatattaactagaagggggaggcaagccgcaaatagcacatctctc

SEQ ID NO: 79744 - DNA, 450 bp, Glycine max
  unsure (1)..(450): unsure at all n locations
agcttcntagcacaatggactaccttgaattaattctcttgatagctcctttgagctctgtttccctctccttggtttgaagctcactacaagccttaagtgaaaaaccatgatatcaccatatccttaaggaattttggagctntggaattgttttgggaataagtgtggggggtttttggttcattggacaatttgttttgttggctatgcttcatgatgtattttgggccatacttgatgtacattgtatatcggttaaatgttggacatgctgaatgaaatgttgtttctcaaaggctatatagtaaaaataaaaaatcgaaaaataaaaaaaaaagcataaagttagtgaatagatcttaatggccaaaatgataaactcttggtctactttcatgtaaatntatcttacttcttntattgtctatatttcttatatgcacctat

SEQ ID NO: 79745 - DNA, 298 bp, Glycine max
gaattcccctttataaaccgtctattgaatccggcgagaaccaagaaccctcgtagtgctcttggtgatctcagagttgggcattcctgaatggtctgaatcttctcttgcaccggtcgaactccatcttccgctaccacgtgacccagatattccaacttttcttgagcaaacatgcatttggagagttttaatgagaactgacctgtcactagaaatcgaaaggcgctctccaagtgaaagagatgatctgagataattttgctatagatcaatatatcatcgaaaaaaatgatga

SEQ ID NO: 79746 - DNA, 466 bp, Glycine max
  unsure (1)..(466): unsure at all n locations
agctggttaaggtacttacccattgaagatcgatgaacgatgaataacgaatgaagaacgtcgaagaacggtggaaacctttgcgaaattcttcatggaaaacattacggatacgtttcgggagcgcctcggcttatatnttcttcacggaaacaattnttccaagcaaattctaaagagagagaagtgcctaaggggctgaaccctttntcttcttcacttccacccctatctatagcaaaataggggaggtgcttgccgcccagctcgcccaggcgagccaggttgtttcctccagaagcaacagccttctggaggaatattctggagggcccaagtgggcctgggtgctatttgcagccccatatttactaagtacaccnccctctgctttttttggtgattctttttcgtaaggtatggaaactacgaatttcgaacgatacttgtttctttctgaatgtat

SEQ ID NO: 79747 - DNA, 325 bp, Glycine max
  unsure (1)..(325): unsure at all n locations
ctcctctttcagaaccatgctctgtgctcgcgactggtctctttcttcccttcgcaacttgagttcactattgctaccccatagagctccgcgaaatttgttccgggcatactctttcttgcgagccctcttggtctcttgttcaaaggctcttgccgaaattgcattctctttcccgaacccggcacacttctttcgaacgtgtgtagcggncaatttgaacttctccttggcaaggtttggctttcctaactcgctcttgagagcttggacttcttcgtccgtctccggagcttcaaaactctctttggtgacgacttttaac

SEQ ID NO: 79748 - DNA, 382 bp, Glycine max
  unsure (1)..(382): unsure at all n locations
agctgcctcanagaggtccaggaaggacaaggcggtcgaaggaactagttccgccccggagtacgacagtcaccgctttatgagcgttgtacaccaccagcgcttcgaagccatcaagggatggtcgtttctccgggagcgacgcgtccagctcagggacgacgagtatactgatttccatgaggaaataaggcgccggcggtgggcaccactggttactcccatggccaagtttgatccagaaatagtccttgagttttacgccaatgcttggccaacataggaaggcgtgcgtgacatgagatcctgngttaggggtcagtggatcccgttcgatgccgacgctatcagccagctcctgggatattcgatggtattggaa

SEQ ID NO: 79749 - DNA, 269 bp, Glycine max
cttcttggatattggctggcacacaacccaactttttaattcacccctactggaattccaagattagagaaaagaatttccaactggctacaattaagaaattgagctgcatccctacaccaacccactgattttgccacaccaccgaaatggcgtttggcataatttatcttgagccttaaaaccatctgataacacctcatgataaattttaagactctaacattatccttggtggcagccccaaaaaatagagtatcatctgcata

SEQ ID NO: 79750 - DNA, 482 bp, Glycine max
  unsure (1)..(482): unsure at all n locations
agcttcctcggtgccattcctgcgaaggcaaacatttggtaagttagtttacaagaaatataacaatcattacaaacaatggccaaacaacacttctcatggcacgagtgtcaacatgcactttataaaataatcatattgnggtcgtgctattatatgacacatacgtatttgcacacataaaaatattgtgtgaagcattgtacgacacctatccatgtacatattttntgacaaaccttttcatgctacatcctatatatatacacacattntttggaaggcttcttttgttacctactcacaaatacacatactttgagagacacttgtacgctacccatccaacactctgtaaggcacttcatgctatatatattcatattatgcaacgcattttcatgctatatatattcatatnttgcaggcatgttattcacattttgaaggcattccatgcttatatattacatatatacata

SEQ ID NO: 79751 - DNA, 304 bp, Glycine max
agtgggtcactgtctaagagactgttcgattaatctgacaatctagaaggggggctgaatagattctttgaaaatctttagctattcgtggttaacaccgattaaaaacatccgcttgaatcaatcaaagtttcttcaaaaatgctgttcaaataagaaactattagtggggccctctcgatcaattccgcgacccaggtgattacaggactcagagtaatagagaatatgagagatacataagactgtatactggtttaggccagtctggatctacatctagttgttcttaagccttttagaa

SEQ ID NO: 79752 - DNA, 469 bp, Glycine max
  unsure (1)..(469): unsure at all n locations
agcttctcaagggaagtttctcaagaaagcttctatggaagctacctagtctataaataaaatcatgtgtaacacttgttgcaactttgatgaatgaaagtcttatgagatacacttcanagttccacttctctccctctnttattgcttcaatatcgtgctccccccttctctctttcttttcctccattaaagcatccctttcaagcttcttatccaaggcaattcttggtggtgaagctccttcttccttggcttattccctagtggatggtgcctcccctctcctcttctcctttgcctcccgctgcatctccatggtgtgaaatcaccattgaaggacctcattgaagctcanagatccagcctccatagaagctccacaagcaagcttccattcaattttcttagtcaaacctgagagtttcttaatactaagagaagtatcaattccatgtcatcatcatca

SEQ ID NO: 79753 - DNA, 447 bp, Glycine max
  unsure (1)..(447): unsure at all n locations
ctatgtatgggaaaacttcattactgttgttctagacatacaagtgagcttgaacaaatcttctacacttggagtgatcacctgcagtcctcttgaacccttaccacccactctgtcatcatgccgagactcaagaagcccaacaactttagccttctctaagtattttgaacaaaattcaatggcttcttctgcaatgtacctctcaacaatagatgcttctggatgatatagattatatgtatacccttttaagatcttcatgtatcgctcaaccgggtacatccatcgtagataaacaggaccacaacatttgatttctcgaccagatgcacaatcaagtgaatcatgatgtcttagagagcanggggaaaaatacatttccactggcacagtataattgcggcctcattttccactcatanacatgactggatcatgacttac

SEQ ID NO: 79754 - DNA, 400 bp, Glycine max
  unsure (1)..(400): unsure at all n locations
agctggtgctacattccatgaacccataagaatataattntcaatgcagccncattggagtgaagttntgtccaagaaaaggagtagtgcgacagatgacacgtctcatagctatgctagaccggaccttatagcaatgatacgattctatgcaggcacttaagcacaaacaaatgcagccctatagtatacactgatgatccccattgtttaatgttttcatgacatctccatttacatgttgctgtatattctacggccacataatattatattcctctttggtgggagtctactctatattgcatcaaactcatgtttcttgcttacgtgtctcaataatgtctcccaacaaaagaagtataatttattgaacacgaacaaagttntatataaaata

SEQ ID NO: 79755 - DNA, 378 bp, Glycine max
  unsure (1)..(378): unsure at all n locations
gaaaatggggacgggatttaatataatattaacgaactaaatattaaattaacacangaaccaggattcttatttattgacgaaactacttttagctcaaacttaatttgtaatgaattttcagtatgctttagattgacaattcacatataaagcagtcaaatttgcaggaagtgttaatgatataactattacagtaaattaaagggaattcacttgaccacaacaaaagttttcattgaatgtatatctcgagaaaagcatcctataaagtatataaaaataatcaaaactttcacatgtaaatcatttctgatgaagcctncaacgattgctaatgcttgttgcatctctatctcttccagaagcaagggaaaa

SEQ ID NO: 79756 - DNA, 461 bp, Glycine max
  unsure (1)..(461): unsure at all n locations
agcttaagatacagttagaggagttgttagagaagtggtntgtgagacgcantgtatctccatggggagcaccagcgttgttagtaaacaagagagattggaccatgaggttgtgtgtagactatcgcctgttgaataacgtgacgattaagaatacgtaccctttgcctaatatacgaccttatggaccaggtggtataagcttgtgtcgttagcaagatataccttacgtcangttaccatcagattctagtgatgtctgactatattccgaagactactcttatgacccgttatggtcactactagtatctagtcatgccctatggtgtgactaatgctccaggtgtgtttatggactacatgaataaagtctttcacccttactttgatagtgttgtcggagcattcatacatgatatttcggtttcctcagagactagagaggaacatgaatagca

SEQ ID NO: 79757 - DNA, 447 bp, Glycine max
  unsure (1)..(447): unsure at all n locations
gatccttgagtcacctgcggcatgcaagccttgatgatatggtcttcaccgacgaaaggatcaaagtgagtctaataagaggcanatctgatcatcatactntgataaatgccaacaaaaactatggcaaatgaagagggtgagaatgaaggagaagcccgtgctgtgactgccattccaatacagccaagcttcccaccaacccaacaatgtcattactcagccaataacaaaccttctccttacccaccgccatgttatccacaaagtccatccctaaaatcaaccacaaagcctacctaccgcacttccaatgacaaacaccacctttagcgtataccanaacaccaaccaagaaatgatatttgcagcgagaaagccttagaattcaccccaattccagtgtcctatgctgacttgctcccatatctacttgataattcaatg

SEQ ID NO: 79758 - DNA, 411 bp, Glycine max
  unsure (1)..(411): unsure at all n locations
ctcagcttgntaatatgtctatagcatttccctcgtggagtataatgttacatagttctgctgaataattgccaaaaagggctatgttatttgtccaaaatttattttctgaatttcttttggggttgataataatgcttataatttaggctttggatctaattcaatccgaaagttaacttgtgaggacctattttttggctatatcgctagttaatacagaaatctcaacacactcttcttatgttagaaataaatttgatcaagtactatgactatgagtattcaagaccgaaacatagaaatgaccaatgcaatttagtaagaaaacctcttatgcgtctgaagttaattctaatgtaataaaatgttctaatttcaacattggaatacaataattgatagagtgag

SEQ ID NO: 79759 - DNA, 498 bp, Glycine max
  unsure (1)..(498): unsure at all n locations
agctgggttcgaggtacttacccgtngaagattgtagaacgatgaagaacgaatgaagaacgtcgaagaacggtcgaaaccttcgctgaaatcttcacggaaaacgttacggaaacgtttcggaagcgcctcggcttagattttcttcacggaaaccaattttccaagcaaattcgaaagagagagaagtgcctaaggggctgaaccccttccttcttcacttcctcccctatntatagcaaaataggggaggtggttgccgcccagctcgcccaggcgagccaggttgcttcctccagaagcaacagccttctggaggaatattctggagggcccaagtgggcctgggtgctatntgcacccnncattttactaagtacacccncctctgctgttttttggtgattctnntttcgtanagttacgganacttacgaatntcgtaacgatacttgttntctttccgtaatggtacggaaccttgcggatacataatca

SEQ ID NO: 79760 - DNA, 372 bp, Glycine max
atgattattaaacacacaaaatgaaaatacttagtatttattacctatacttaacagaaaatacttataacactacaaaataaccatagattgggagagtttgatacaatttatacaagttttatacacaaaagttaatcggtttcaccgactaacaactcccccaaaattacaattttgattgtcgtcaagcaaaaagagaacaactcacttgtcctcaagtgacaatgacatgcagtgactatatacaaaggtgtatgcaacaaaagttactgatggcataaatagagaatggagtaaaatgccctcatcacttgtctttgacaaggtatgcagttatccaaagagaagaataaaatgtaacctgaacaa

SEQ ID NO: 79761 - DNA, 478 bp, Glycine max
  unsure (1)..(478): unsure at all n locations
agcttgagatgaggaagtgttgaagggtgaaacttcctgctnttatttgtgaccacagagtggtacctggagatatatcgcggnggtcaggagaaccttgggacgtcaggtggggtgctattgcccaaaaccaagcttgaccaatcccgacccaacccgggcatagtcggtcagtgagaacctgtgatgtacctaagcaggcgagctcctggcagtcaacagataaaaggaaaacaagaccacaaagcaagganggcttgtggtggctggccagctgtgaatttgtgtaatgtgtggatggtggctctggcaatcgattaccaagggtgagtaatcgattacaaggcttanaattgaagacaggaggctaagatggtctcttgtaatcgattaccaaggggtgtaatcgattaccaggcttgaanacgaagtcaggaaacttanggagcctctggtaatcgattaccagcctgtgtat

SEQ ID NO: 79762 - DNA, 501 bp, Glycine max
  unsure (1)..(501): unsure at all n locations
gcttgtcatctctcagactggcttagtggcttggttaagagaatgaaatcagaatcatgaatttttagacaaatattctacccggaagagcaagcactctaagtgatgtttaataaatatgttatagataatttgttgaaaactcggacaaataaaattctatccatgagagatgaaccttanagaaactacaaattaatggatagcatatgttcatagatataattaactttttacagtaatccacccttacatattaaatgtgaaggttaattntaaaaataactcatcattctaagtttttcattttcaaaaaaagaaattgagcattctcctttttactaagtggtgggcatagtgtcaaaaaaatacgttgctcataatattttaanattaggtgagaaatgtcataatntaacggtgttactgtgtccggctaaatttatagtcaaatataaaataaagatatagttcagtgtgattcagtctaattataacatc

SEQ ID NO: 79763 - DNA, 331 bp, Glycine max
  unsure (1)..(331): unsure at all n locations
tatagtctggtatacccagattcataataatgatagatttcagaatttcatttcagaaaaccttatttctctctctctcagacaatcctagtttctacaagaacaaagtatgattagaattagacatacagaattttgaaatacaaccgaaaagggaggaagattaagaacaaaaaaagaaaaagggattggaaaaaagntaagaggaaaaagacagacaaagggaaagaacagaggatgaaacacaagtccagaanagagacagaaggagaaagtgaaacaagtggtaaacagagaaggaagaatagggaggacagaacaaaaaagagag

SEQ ID NO: 79764 - DNA, 392 bp, Glycine max
  unsure (1)..(392): unsure at all n locations
tacatgtttgtcatcatcanaatggggagaatgtgaatgtatgtatacatgattntgatgatgtcaaagaagaatctaacaaggctgcttcaaatgataagcatttgcttcaagaataattcaagattgcttcaacaaacaaagccttgttttaagattcactaaagaccaagccttgccttaaaacaaagtgctttcaagacatgcaaggctctggtaatctgataccacaagacagggttgagaaatagctgttgaaaaaggttttgaatntgaattntcaacatgtaatcgattaccatatgtctgtaatcgattaccagcaacgaaactttggaaattcanattcaaaagtcataattcttcaaattataactgtgtaatcgattaca

SEQ ID NO: 79765 - DNA, 235 bp, Glycine max
  unsure (1)..(235): unsure at all n locations
ggaagaatttgggtgaagaaaatgttccccctccacccctttatattttcgtacacgggttgcttccccacgccaactaacctgtactttttttttttatgggaacattaaccatgtctccttctttcttatgggttaacatttgcccactttaacctacttaaatcagaattangtgtcgattacttatttaaaacaaacaatagtaccagaaattgtgaatgcaaaggatact

SEQ ID NO: 79766 - DNA, 413 bp, Glycine max
ttcatctgatttagcatcaaactctcctagagtttcttttccattgtgtaatacaaaacatttgcaaccaaaaacatgaagatgtgagaggtttggtttcctaccattgaacagttcatatggaagtttctttaaaatgggtcttattaaagccatattcatgatatagcatgcattattaatggctctatcccaaaaatattttggaagaggagtatcatataataaagttctagcaatttcttccaaagacctactttttctttcaacaactccaatttgttgaggagttctatgtgtagaaaacttatgttcaatgccatgcttatcacacaataaatcaaattctttattttcaagctctgccccatgatcactcctaatagatataaagtttaatattttctctattt

SEQ ID NO: 79767 - DNA, 197 bp, Glycine max
tctctcaactatattcattcttcttctctttcacttctattttcctttttctgcacaaatttagttctattcactaaagataatatggaaattgaacatctcatgaattcacagaccactccagcaaagtgaattgagactggttatattcaatttatgtgaagtcatttttctcatcctatttcagttgagatata

SEQ ID NO: 79768 - DNA, 344 bp, Glycine max
  unsure (1)..(344): unsure at all n locations
ttctggagaacttnctagaaggcccaagtgggcctggttgctatttgcacncctttgtttactanatacaccccttgcctttttttggtgattctttgtccgtaacgttaccaaactttacgaatttcgtaacgatacttgttttctttccgtaatgttacgaaaccttacggatcacgtaatcatcctccttttgggcttccgggatgttactgaactttacagaatgcgcactaacacttccttttgacttccagcatgttagggaatttcacgggttgtgcaacaatggctgtgtttgacttccggcatgtcacacaacttcacgaattgcctaacgatgg

SEQ ID NO: 79769 - DNA, 419 bp, Glycine max
  unsure (1)..(419): unsure at all n locations
tgtaaggcctggatcttcttcatcaatggagtcctttgcttcttgaagatctatgacagcggaatggagaaagaagttagatgattggagacgtcacttcaaggagaagatgagtcaagaacaagctcaccaccataggaagccatggataaagagcttgaaggcatganaagatgagtggaaggagaaagagagaaaaggcccaaacttttatgcctcaaatgaggtgtgaactttgaagtgtaattctcaaatgatcaaagttgaaaaaatacacacacaaggcctctatttataacctaagtgtcacacaaaattggagggaaatttgaatttctattcacatttcacttgaatttgaatttgtggagccaaacttggagcccaaatttcactaattatgattagggaattttaac

SEQ ID NO: 79770 - DNA, 389 bp, Glycine max
  unsure (1)..(389): unsure at all n locations
agtgagaaacatgtgttcattggctatgatgcttgctcagaacgctacaaagtgcacattcgacactatgcgttgactattgccagccgagatgacggcttctatgaagagtgcacatggaattgagacgagacagaagacactcttgatatactcccgtacttcgaataaatagatgaataagccttgtctcccaatgattnaacttcagcacttttcaccactgctttaaccaatgaagcctcatcatcttccgaagggagttcaagtgaaaggccaacaagaatgagaaatattcatgaattatatgatgacactgaccttatanatgatttgttttggctatatgctgacagngaacccttatactttgatgaagcaatgaaaga

SEQ ID NO: 79771 - DNA, 418 bp, Glycine max
  unsure (1)..(418): unsure at all n locations
agcttgccgccacggagttntccgactatgctcttgtgtggtggaacaagctacanaaggagagagcaagatatgaagagccaatgtgtgatacatggacggagatgaaaaagatcatgaggaagcggtatgtgccggctagttactcaagggacttganattcaagctccaaaaactaacccaaggcaacaagggggttgaggagtatttcaaggaaatggatgtgctcatgattcaagcaaatattgaagaagatgaggaggtaactatggctcgatttcttaatggtttgactaatgatatccgtgatattgttgagctgcangagtttgttgaaatggatgatttgcttcacaaagcaatccaagtggagcaacaattaaaaaggaagggagtggccaagaggaagtttaccaa

SEQ ID NO: 79772 - DNA, 139 bp, Glycine max
cacgtgagacatagacactgagcgtctcgatattatgcaccttaatcagagtgccgttataaaagatatgaccaattgaatttggagagagctttcatagataaattataatcttcttgatataacatgcacctgaatc

SEQ ID NO: 79773 - DNA, 281 bp, Glycine max
gaaaaaactcctgacgagctatgaatgcgtggactaatgctacataaagctgattttcagtgaaacaccattcggtgctttggtgaccaagtaaccctccttactaagaaaacaaaaagggttgatggattatatctttttaaaccctcacacaccagttcctcaagaaacttgaaaaatcaattcaaacctcaagaaagatatcccaccaaatttcaatgtaagaatcacccagcataaccaaaaaaagacaccaggtactttgcccccaaacagcgtct

SEQ ID NO: 79774 - DNA, 261 bp, Glycine max
ttaatcatcatgcttagaccaatgagaaaactggggccaataaagaaggtgaggatgagggagaaacccatgctgtgactgccatttctgtacgggccagtttcccaccaacccaacaatatctttactcagccaataacaaactttcttcttacccaccacccagttatccacaaaggccatccctaaatctaccacaaagtctgtctaccgcacttccaatgacgaacaccacctttagcacaaaccataaacaccaac

SEQ ID NO: 79775 - DNA, 489 bp, Glycine max
  unsure (1)..(489): unsure at all n locations
agcttcctctagaatcgtagtgtgattggttttatgagtgtctaacactcgtacctanggccctttgggagagggtggcgcttgtctggcttgtgcctcttgtccaacttatgtaagtcggtcttggcacttccttcttgcttgtcgcacttttgtctagcttgtcaggcttcattcttgaatctggacatttcttccatctagatgtaaccctcggcttgttcgtgcaactagtctatgttatcagaggctntttaagcatatactatccacaaacatgccgaggtgtaaggcgaggagcatcgaatgcaatgctacctcgaggttaagattttggatttggacggttgtgcaccaaaatctatccatgaatnttctgagagactctntgtctgcttgtcgcaggctggccaaggtcatgcgatgaaatctgttggtcgtgtacttcacatctgaagcgtcaatganggtgtcgaagtgtctatggac

SEQ ID NO: 79776 - DNA, 322 bp, Glycine max
  unsure (1)..(322): unsure at all n locations
taccatgttgactatgacactnttacaaaaagaatgaatcgaattgcttattcacttctctattagattacacgaagaaccttgcttatataacaggggaataataactacttgttgggtataacaaaacaaactcaaccaaccttataactaccaagttacagctttgtaaaactctgaattattcctaacaaacttatggtgggtatggtaacatcaattatctatcctctttggattttctgcgagaagaaacatagtggatgcaanaaatcaagtatactacatcagattatactctgctaaggcctaatatactaat

SEQ ID NO: 79777 - DNA, 514 bp, Glycine max
  unsure (1)..(514): unsure at all n locations
agcttatgaattnnttttgggctgagtgaggagagagaacgtggctntntataagaaagaatgatttccttttcctattattttattttctanagcactcgccacttgtcccattttgagtggaacaaaaaggacccacttttgctcttgatgtgactcatactcagccacaagaagagaaaaaatctgaccttttgaaatgctaaaatcatgcctcgatttgcgtgtcacttctctggttccagtccctcgcgtttctctgcacccatcggggcccgttttcgaaagtaagcaatatatatatcataacgctcaaaatgaaaccccgagcatggttcagaggttggttnntgttaaatttaagttgcacgcanaatgataatttttagactaattaattgagaattatctataactggccagntatggatttctcttctttaattagtctaacccgcgtatctntcccccaatatacctactcctaccaggagtatatatatatatacactga

SEQ ID NO: 79778 - DNA, 353 bp, Glycine max
cttataagtgcgggtctgggagacaaaagtcaagtgggcgcgtatgtgaagatgatgttccaaggactttggattatgtgcgaccatgccctcctgatttccggctgggaaattggcgggtggaggaacaccccggcatttacgcaacaagcataatggtaatacttacggtttaaaagctctatagatgggcctaagctttataagcttcatgatgtaaagctttgagtcttttgtttttgaatttataatacaaggatctttcttcatctggtcctggtctctaaccattctcattcattagcatggtgacttctttgtctgatacggcagattcgatgacgagtgccccg

SEQ ID NO: 79779 - DNA, 459 bp, Glycine max
  unsure (1)..(459): unsure at all n locations
agcttctaaactntatacaagcatgaagctntcataccacttgtagacaagtggcctcagatatcttaagaaggggggttgaattaagatattgcanactatttcccaaattaaaaatctatttcactntctatgcaagttacanaattcccttaaaatgaactcttaaataatgattcanatagaacaatctaactataaatataaaacaataataaataaaagagtntaacggaagagaaaatgcaaactcggatttatactggttcggccacacccttgtgcctacgttcagtccccaagcaactggcttgagagttccactatcttggtaaatccttttacaagttctgaacacacaaggacaatccttcctttgtgtcagaattctttacaacaagagaccctcggtctcttaatcccttagagaaattagaaagaagagaagaatgaatctct

SEQ ID NO: 79780 - DNA, 370 bp, Glycine max
  unsure (1)..(370): unsure at all n locations
gggcaaaacacaccaaatgattataatgatggatggctcaaattctcacaaaggtaaaatcatcactttcaaatngagctttcaaaactatcatgacatgtagagaagaatcaaggatntcaagtcacaaaatgtcaagaacttttattttcaaaacaattacccatttcttgaacatatcctataattcaaagaaaaacatgcaaagtcgtacgtgcacacganattgacccaaaatattaaactgaaaatccgacgaaactaacaatattaacaaattaacacaactaacaaattaacaaaacctacaaaactagcaaaaccaaagaacactcccncnnccatactaaacaacacatngtcctcaatg

SEQ ID NO: 79781 - DNA, 288 bp, Glycine max
ttgtgactggtttttacttcacactatggacaaccagtaccctcgtgatgttccacaagggcttggaatggaaaggacacacttgcttagatattcccatgaagtgcgcagaaacccacatattttgtctctgaaatatcgagaggccacattgggcccctcgggtcatatcaacaaaactgcttatgtggtggccggagaactatctcctacctgcagaaatggctggctgagctgcttgcaaacctaacctttattgctctacgagtcttgcactacctttcctga

SEQ ID NO: 79782 - DNA, 327 bp, Glycine max
  unsure (1)..(327): unsure at all n locations
aagcttttctctctcctcactcagccaaagcagaaattcagaagcctnttctctccctctctcacgtagctttcttcttcttcattctccattgaagcttcaagcaaagcttcaacctttggccaccatttctgccccaaatcgtgaaaggagagcatttntggagtcgtgaagtgcgtggctacgagtgggacttcgaaatttcaggtttgggtggacttctttccctcttgattttcgtgggtatggnggtttgggagatatgaagggtagttttgttagttctctgctgtgtgatgattatttgtgaagacatttgttgaaagc

SEQ ID NO: 79783 - DNA, 408 bp, Glycine max
  unsure (1)..(408): unsure at all n locations
ttcactatgctttttggtgttcttgcatataaaaggatgccttttggaatgtgcaatgcactnaccacctttgaaaggtgtatgttagctattttataaggttcagtggaaaaatgcatcgaggtctttatgaatgatttctccatttttggaagctcatttgatgtgtgcttgtctgaccttgaaattatgctaaaaaggtgtgttgagacaaatctcattctaaattgggattaataccattttattgtgactgaaggaattgttcttggccacataatatcatcaaagggcattanagtggatgaagctaaagtggatgttattgaaaggttgcctncaccagtgaatgtccaaagaatcagaattttcttggtcatgctggtttttacagacgcttcatactac

SEQ ID NO: 79784 - DNA, 388 bp, Glycine max
  unsure (1)..(388): unsure at all n locations
atgatatcaaagatgatgacaaaaagaccaagagaatgagttcaagattgaatcaagaacacttcaagaatcaagaggaaatttgatttcaagattcaagaatcaagtttcaagaattaagtttcaagaatcaagaatcaagaataatcaatttgaagattcaagaatcaagtgaagactcaatcaagataagtactaaaaagtttttcanaacattgagtagcacatgaatttttcacataaccttttaccaaagagtttttactctctagtaatcgattaccacgttattgtaatcgattaccagtagcaaatattgttttcaaaaagctctcaactgaatttacaacgttccaattgatntcaaaatggtgtaatcgattacaat

SEQ ID NO: 79785 - DNA, 315 bp, Glycine max
tctggagaaagacgaaaattttcacaaatgttgaatatgtgtgaggaaagaacatacgtgcatggcacatgcgatattggaatcaatgtggtccttaaggttcccactcatgcgcactcgttggggacttataaatatctctgggtccacgaggggtcctcccacttgttaaaaatcattcaaaatcccttgtcaacctttcttgtgcctgttaccgacattgggtggcacaattttcgatgaagcatttgcaatggtgctagcagtggccaaagaaaaagcacgtgctgaaactgggtgttgacttctttggag

SEQ ID NO: 79786 - DNA, 465 bp, Glycine max
  unsure (1)..(465): unsure at all n locations
acaattaagaacccatccgtggttcttcgtccctctcgttttaattctaatctctttataagaatcatatgtcgntattcctcgctaatccatgccaattttttacttcttaacatctaactattcaaataatcaatattaaaattccatattttcaactcagacaagaagggttctacacataaccataaaacatccgcctctacattagatcactatgaattataatggaacagagtctcagaccaactacataagttgactaagatactgctcacttcanatactcctcaaaattctagcattcaattatatggagcatgttgatcaccaatccagttgcagcagctcaagttccacattaacgtccccccttctaagacactctaaaccattctcactcgaaatatataccattctcgtgatagcctgaacaagcacccaatacagacgtcattacactca

SEQ ID NO: 79787 - DNA, 330 bp, Glycine max
  unsure (1)..(330): unsure at all n locations
agcttcggctctngatacaangtctatcctatcctatcctatcctattttttttctttgtaatgtgtctagggtcgtatntntagccttgttctgttatntgcgttcttgatctctgttcttgtgtctttcacactttgtgtcaaaaaataaagtcgcagaaattttgaacaaaaaagtgggtggttgatctttgaacacaaaattaaggcagttacattcttctctgaattctgagcggttagatatatagcgggcgtcataccgacaaccatagtaagagttatgagcattggaagttgacttgacatatcaattaacttatgtgtta

SEQ ID NO: 79788 - DNA, 300 bp, Glycine max
ctcagccttcacaagagtcttcacatataaccttcatgaagccagaaacttacagaacttcccatcatatcttccgaaattccatacccacgaaatttaagagagaaagaagtccaccccaacctgatatttctgagtcccactcggagacacgcacttcatcgacttccgaaaatgctcttctttcacgatttggggccgaaatgatggccaaaggttgaagctctgtttggagcttccatggagaatgaaagagaagagactggcgacgtgagggagagagagagctgtctgaaaagt

SEQ ID NO: 79789 - DNA, 485 bp, Glycine max
  unsure (1)..(485): unsure at all n locations
agctntttcactaacatggaaagagggctaaatatgtactatcacagacttatagcaaagaacagggagaatagcanatngtgcttgtggaggtagatgggcttaactctaacaacatagtccttccaacgcaaggggtttacaaagatatggagggaagcacatcgaaagaacatgtggtagaaaaagggggaggtgctacaagtacactcatcttatgaggagaggttgggcccaacagattatggacaaactacacataatctctcccaagttgtccataatgacttattccaggtgaatagcttaatcttttcttcaaagccccaaccgaaatctttntacaaacaaggcaattccaaaaggcaaggaatgaggttcacgaagagcaagttcacaaccatgtgtagaaatgctaaacagaagagaaacatgcatgatgatcangggggaagttacaataataagtggnggtcctgatgatg

SEQ ID NO: 79790 - DNA, 450 bp, Glycine max
  unsure (1)..(450): unsure at all n locations
cggacactattaatactcagcttctagccaatggacttaccttgaattaattcctttgatagttcttatgagccttgtttccctttccttgttttgaagctcactacaagccttaagtgaaaaaccatgatattaccatatccttaaggaattgtggagctttggaattgttttgggaataagtgtggagggtttttgtttcattggacaacttgttttgttggctatgcttcatgatgtattttgcgccatacttgatgtacattgtatattggttaaatgttggacatgctgaatgaaatagttgttctcanaaaaaaaaaaaaaaaaagaattcgaaaaataaaaaaattctaaaaaaaaagagaaaagagaaaagcaataaagttgagtgaataagatcttaaatggcacaagaatgatgaaactcttggttctactcttcatgtt

SEQ ID NO: 79791 - DNA, 507 bp, Glycine max
  unsure (1)..(507): unsure at all n locations
agctttaataaggtcaacctatnntatttaagataacaatngatctatattnttnttcaaaaattggcccaattatttgtgctaaaaaanaattcaaataattatttggatgctactatgataccgtcatcatcagatgcgacagaaatattcttgggttgatataattataaaattataaatgtatggaaaaagaatcatataagtatacgacaacattaataaaatgtaattttagtgaaataaaaatatttgattntaaactctaatttagtgagatagatcaatctctgtcaataaatttaatatataaagaacataattaatatcttagggtttttatcgtgtaaaatatatagtgatcttgttgataattaatcagtgtcaaatcttctatttacttacttttttatccataagaattaaaattaaaatatttgcttaagaaatttaacttaattntattgtgacgaatataataccggtagaatactaggatatatcata

SEQ ID NO: 79792 - DNA, 426 bp, Glycine max
  unsure (1)..(426): unsure at all n locations
aacctggatagcgccacagcttggacaagtcttcactgaagaaatgtggcggccaatgactacgataacatnaaaggcntaccaaaaatggaagctgcgtctcatgtttgttcagcaatcatttttgcatggacaattaagggaagaaacatatcttatgaactcatagatacgcgatcaaataaatataaaggctacacctagctactgtaaatggaataaagtggggggataatgcaagttaaagtggctggcagaatctaccatgtggaatactattctggacccggcctanccttggtcccgcgaccagcatggccaagacaccaaaatagcctgaattgtttaattacaagagatagatattaaacacttaattttgtgatacagcatgtgaagattaactgagatatncataataatctc

SEQ ID NO: 79793 - DNA, 445 bp, Glycine max
  unsure (1)..(445): unsure at all n locations
agcccttgacttgattcatcaacattatccnctgacatcgcctgtctcaaatccgaaactgcatcctcaatnntcttggccacttcactgcgaatcttctctctgtattcacctaaactcttctcaatgctatagatggtagtgtcagcactgtttctaatgtcaatgagagcctttctctcttggtctttctgagcatgcaattctgcttctttgaccatcttntcaatctcatcatccgagagtccaccggatgaaccgaatagtattngttgttctttaccagtggacttgtctttggcagagacagtaacaatcccattagcatcaatgtcaaatgtgacctcaatctgaggcagacctctgggagcaggaggaataccaacaaggtcaaactcttcaagcatnttgttgtctgcagccatcttccgctcaccttgtagca

SEQ ID NO: 79794 - DNA, 364 bp, Glycine max
tgacattggttcaattgcctgctcctccctgaagaatctttgcaaagccaaaatcaacaatccttggcttccattcctcatccagcaatatgttactggatttgacatccctatgtataacagggctatcacacccatggtgcaggtactccaatcctctagcaacacccaaagcaatgtcattactaacctcccaccccatctcatacttattcttacacgtgtgtaacctgtcccacaagctcccatttggtaaaaactcataaacaagcaaactgctatcttcacttgtgatgctacaatagagctttaccacattcacatgccttattgagctaagagtgggcacttctgcatcaaattc

SEQ ID NO: 79795 - DNA, 486 bp, Glycine max
  unsure (1)..(486): unsure at all n locations
gcatgcacgcttgagcanatcaacgacaataactttgtctcggatgttcgattgtgtgctgtaatatatcgagacgcgtcgaattggaaacagaagctctgagcatattcaaacgacaataactctntacacggatgtccgattgaatcccgtgatatatcgagacgctattaattgaaaatagaagctctgagcaaattcaaacggcaataacttttaactcgggtgtccgattgagtctcgtagtatatcgagacgctcgaaattgataactgaagctctgagaagaatcaaacgagcataactttttactcggatgtccgattgagtcccgtaatttatcgagacgctcgaaattgaaaacagaagctctgagataaataaacgacaatacttttactcgatgtccattggaccctaattatcgtacgctcgaattgaaacagagctctagaaattcaacacaaaactttgactcgtgtcgat

SEQ ID NO: 79796 - DNA, 424 bp, Glycine max
  unsure (1)..(424): unsure at all n locations
ttaagtcacctgcngctgcaagcttccattggcttaatattaccatccatgactatngagaatcatagagatgcatgtgtggagaaactaaactaaactctgattgttaaaaccttggattcctatttntctttggtcagttggtcatacatgtacagtaatatacctaaaggatgcattataataaatcaggaactttcctcttgtataattttcagtgcaaaacgaaatttcctgtgctattattttctagctaggccgtgtcgaatgatacggtgtgtgcctttaaaaattcagataacgactcagcctgatttataatttattaattacattntgatgaaaattatactacctttctatctcgaagttatcacatcatgtttgcccataacacaagaaaattcaaatcaagatgtataaa

SEQ ID NO: 79797 - DNA, 478 bp, Glycine max
  unsure (1)..(478): unsure at all n locations
agcttccatcattntcttaaccagttaattactatctatgcccaccacatcttcagcttctgataggtgataatgtttcctatctccaaagacaacanaagatagtgctagttntgtttcatgcatatgatagatgctgagagaacaaagaaggcaagaatttagctagctatctagttttccatcctacacggtaactttttatttctttattntactagtttctttttatcaaaattttagcttggtccaagtatttcacctccttttaagtgtgacatgtttagaatgttgaggttattcattntaactctgttttttacaagttcggagttcttgagataacaaaagtagcttaattaatttaaactctcttatcatntgagtggtaacttattgataatntattctttgcaatggttaatttttgtactatntcttaatggaataaaatcaatataanacgggttatatgata

SEQ ID NO: 79798 - DNA, 248 bp, Glycine max
cataactttatgggtatatcttctaatggctatatgcctctcattacttctttggaaaaatgggagttcaaagatgttgttcttcaaatgcactctgatgaatctattggcccttatggatttaacgctgtcttctaaatagattttgggatctccttggtgatgatatttttcacaatggcgtaagttggttgaagcatagtttctttccccaaaattgaacaataaaaatattgctttaatcccca

SEQ ID NO: 79799 - DNA, 459 bp, Glycine max
  unsure (1)..(459): unsure at all n locations
gctaagagagatggtgacaagctagtgaagtatatagcttcggttttaggcanaagcaaggagtagactnttatgaaattttctctcctattgtgaanatgagttcaattcgagttatacctcgaattggttgctagcttggatntggagcttaaataaatggatgtgaagattgcatttcttcatggagaattagataaagagatttacatggatcaaccaagaggatttgaggagacgggaaaggaaaacatnggttacagattgaagaagagtttgtatggattgaagtatgctccaagatagtggtataagaaatttgactcattcatgacgagtcatggatataccagggctgatgtagatcattctgtatatgtcaaaatatttccaggcaacanatntatcaccctcttgttgatgtagatgatatgatgataatgggacaagataagatga

SEQ ID NO: 79800 - DNA, 262 bp, Glycine max
cttttgaacaactcagcgattatagtcaactaaacagggaggatataaggactgatcaagcttacttatcatttgaaagaatgacatgctaaaggagattaagcagagatcagagctctaaggaagccatttatttaagggatagaccaagtgaggggctcctattgcttggaactaagacatattagaaccttaagcctaatccacctaatcatcttttgccaaattatcattggcctcagttaaacataatggctttttt

SEQ ID NO: 79801 - DNA, 248 bp, Glycine max
  unsure (1)..(248): unsure at all n locations
tctattggatctttcctgtangtacctaatgtaaatatattnntatctatctaatgatgntttgcgtgttctctgtgctatcntgcttttcattccagtatgcctttaccttgatcacatagatgcatgccttgttagggtcattcaacagtgaaactggtctgactctaaagtccttgatagtatanggctaagttgctatgacgaggaattggngttcgaaatctagttgtgatgtgtgcttaatg

SEQ ID NO: 79802 - DNA, 204 bp, Glycine max
ctttatgaacctcatgaacttttacaaaccatttaaactcaaaaaaaacatgaagaaaaaatttatattattaattattggatcacataaacacacaacattcacttcgaatggtccatacgcatagacacatatgccaggtgattcacaattaacttatggattcacatacatgtggtaccactttgaaaatactttgtgaat

SEQ ID NO: 79803 - DNA, 324 bp, Glycine max
  unsure (1)..(324): unsure at all n locations
caaccctgtagtgggcccacttttcatcctataccacaaatgaaacgatcacaacccccccgaactctcagttctagtccaatgggcaggactgcagcctgaagatgccacctgggaatgatggaccgatcttaagacatctatcacctcgaggacaaagtgcttccgaaaggggtaggagatgatagaggagcagcaacccaacccaagcgtaccatgaagaggcctaccaattgggaagaatatatccactaatgaattctccaccagcttagttagcanaaagggaaattttggatcttcagagtagtgccttcctcatcg

SEQ ID NO: 79804 - DNA, 295 bp, Glycine max
  unsure (1)..(295): unsure at all n locations
tcgaatacagagtgtatgtaatcgattaccagagtttaaattcanatgtcaaatgtcaagaatcacaactcttcaaaaacattgtgttatgatacaccattttggtatcgataccagtgaggaattttctaaaatactcccaacaggcaaatcttttcaaatgaatttgaatggccttcaagacctatatataggtgactcgtgacacgaatttttgtgacagttttttgactgaatgcttatctctcaaaggatcctggctacactgcatatcataggatcttgatgactcaat

SEQ ID NO: 79805 - DNA, 259 bp, Glycine max
gcttctacttatgtggcaggggcgggcttctttatctttcttgtctccaacgcgagctttgaccactgttcttcctttccgcgatgcttcttttcatgtccgcctgagtgggcttatagcctaaaccatactctccacgatttgcttgggtatttatcaggctagttatgtcgccgttgtctttgcctaaacacatcccgggttcataacacgctcccaacataggctcggccatcattaccgctgcatcagacagaca

SEQ ID NO: 79806 - DNA, 374 bp, Glycine max
gcattccatgaggaatctccttatgaaagacatttgtaaattcctgcaataagggttgaacactaggagaaatagaaatagtaaactcattagaattatcagtagaaattttactgtctttgcaatactggagattaagtgggtcatgagcagggaacactttcctcacttcactcgcctctgcaaaataattaaattttctctcatgtgtatcactctctctcttatgtgtatcactcttttcctcgggtgtatcactcttctttttcatattcctttgtggggcctcactattttctttctcttggtctctcttctcattctgatgtggtcatcatacacttctctaggggatagagggttaagagtaaatg

SEQ ID NO: 79807 - DNA, 419 bp, Glycine max
  unsure (1)..(419): unsure at all n locations
ttgtttatgcctaggtagttccactgattatgctcatttccctggcgggccatgctgccaaagcccgcgtttaaaaaagaactagggttatcattctcaaacatgagtatagtagtattcaaagtgctattaattgaatgagcaattggtttttccaacaccaggtgagcccaccaatcttcttttcttgtccccaataactatttgtgatacattggagttgttntccatcatcattgcatgattgattgagtggttattaggcaatgagttcttacttgaatgcgccaatatcaatttcgagttttggaatatatgtaacaataactgctcaagcattaattcctgattnttaacgacatttgttgtctgttccccatactcaatattgcatttattggcgcatagattttgtttgg

SEQ ID NO: 79808 - DNA, 435 bp, Glycine max
  unsure (1)..(435): unsure at all n locations
ctgcagctagcacactttaagctagagtgaagtanngcttctacctgaacacatctagaaataatgtctgcanaattngacaatgatttggcagggtaattttcttttagagaaggatcaaccatctttgataatgcatcaatgtcatgaagctgaggaatagcccacctcaccagaaactgctcccctcgagggcgtgtcctgtccaagatgttcagaatacatgaattaacaactaccataaataaattaaaagtaaattacactaaccacttatgagaatttgtaaattacacaaatctattctgtttttttttaacatttacaatgtaatattaaggaagtctcaatgtatataaataactaaagggggtagtgtaagaatagataaagacaggagtgcttgtgtaattcattacacttcnacggatagta

SEQ ID NO: 79809 - DNA, 381 bp, Glycine max
ttggagaagttgcttgaaaaccttgttggtgtccttaaagtgcattctgcagaagatccacaaattaatcaagtcttagaagctatagatcaagaggtatcaatatataatccaacttattcaaagatttaactatgatatgatactttacaaagaaaaaacattgttctaatttaggtacttacaaatggttctactagtaaaaatcatcaaactacaaacgatctgaactagaggtgagttgaaatttaataattaatatattgacaatatcatttttgttagcatatggtataagcttgtatccgactatctatgtatataataaagtgacatttaataattaacatgttgaacaatttgttatctcacgaacatggg

SEQ ID NO: 79810 - DNA, 342 bp, Glycine max
  unsure (1)..(342): unsure at all n locations
gatgaataggaagcctggggaaaatggagagaataagaacgacggagatacccatgttgtgaatgtcggtcctacatggccaaatttcccactagctcaataatatcaattctcgaccaatatcagtcattctcattacccaccaccctaccagctaagaacacccaatcatccataaaggccacccctanatgggccacaaaacccgcttgctgcacatccgaggccaaacaccacccttaatacatatcataacaccaattatggaaggaatttccagaaagacgcttgtagaatcacccaaattcgatgtcgtatgctacttactctcatattactcat

SEQ ID NO: 79811 - DNA, 427 bp, Glycine max
  unsure (1)..(427): unsure at all n locations
gcttcaccttctggtcctcctcatagttgtgttatgataaaacatgctctattntcatctcccactccaagtaggcctccggatcattctttcctttaaatggaggaatgttgagtttaataccatcaattcggttttgtctaggaacaccatcattccctcttctcctcctttcttcttcattatgatctctattctccatttgatccaacctctcatggagcgcatcatctcgttgtttcattaacctctccatatgttgcatcaaagcttgcatttggaattgcgaaagccccactccatcattaggattagtacctgacatctcaaacaaacaaatcaaacgtaacaagacatagttgctggttgaatacctcacccactcaagtgtatcacacaattatggctnttctctaatganacactc

SEQ ID NO: 79812 - DNA, 381 bp, Glycine max
  unsure (1)..(381): unsure at all n locations
catatttcatcagtaactcanatgcatncaagaaggaccatacaaagtaccctcttacatttaatccactcctgtcaatgtgtcaaaaataaaggaaaagagtaaacaaaaaccagctttcatgatacaattgacaattatattaaataaagtggaggtgctagtgtgacattgtacaccctcttaactttcccacttgaaaatganaatcaaagtagaattacctaagtgcatcaaccaaacttcctatgtattcatgcaagtaattcaccctcggccagtcatctaatgatgaattatgaggtgtttgttggcaagcatcaaagagttatcatacaactagataaaaggacagctgagtattgttaaagagaggaaaat

SEQ ID NO: 79813 - DNA, 355 bp, Glycine max
ctcaagccgagctcaagcttaatataacttgtgttaacttgactcatttccatccctactcctactaatacatattaacatgaagtttttatggatttttaaagagcaatagtagaagagataacaagaaaagacgtgtatttaaggagtaagcactatttatctttaggcttaatttgtttcaatgtattctattttaaacgcgtaactcggattaatgataaatttcctttatacaatgaagatctttgaccatgagtatgacttgcacagttgcacgtatataacactctagtcaaaacaataccattaatctacaaagtgatagttcgatcattttcccttccaaaaaaag

SEQ ID NO: 79814 - DNA, 418 bp, Glycine max
  unsure (1)..(418): unsure at all n locations
ccttctntccatgtttagtacatagtaannattgttagagtcattttcctagcanaagcaggcaagttgtatataaatgcatctttggagtctacataacaagtaaagaaacttccttactcttctaaaacaagattgtgacttatcagatgcttgtgctctagattctgctcttcctccatcaatcagaagccagataagcaagaacggagaattaacggaaactggtatgcttatggtattgttagacttgtctctgaattatttctttatttcttaacggctaatattgttgaggtccaaaatgaattctcttgttctcagaagtatagaggtataaaaatggtgacattatcaatgaactggaantgattgattttcttagatatttgaaatcttagatgggaggtcatggtgg

SEQ ID NO: 79815 - DNA, 329 bp, Glycine max
gagtcggtagttcttggcagctcacgagtgattcgcgcacgctttgtcggcagaaacattagcccgctcggcaaaaaacatgattcaccgatattgacagaaaaaaatgctagccctagtcggccaggaaagataaccgatcgaggtctaaaaaagaagcatgaccggattacgccgatcgaacatttcctaatagatatcctccaagtattattcagggatggaatggaaaaaacaatagccgacatcggtagttaaatagcccgggctgacatttttcaacatggcgcatttctttcgcaaacgctggccgataatatttctttacg

SEQ ID NO: 79816 - DNA, 237 bp, Glycine max
  unsure (1)..(237): unsure at all n locations
accactttagttcacccgctaagcgagaaaggcacgcactnaagccaaatcactaatgtgcgctaagcggttcataagtgtgctaagcgcacgagcacgaacaaggccacctatntaagcttgaaatcagattntgtgaaaggaatttggactgggattcanagctntgcatgtctagggtaagagagaaaggtccaagttccagagagttttgagagatnttgtgtgtgaagatct

SEQ ID NO: 79817 - DNA, 275 bp, Glycine max
  unsure (1)..(275): unsure at all n locations
tcagccacaatatngaataataggggtgctaataggtcctcttaccttanngccttttgcgggatgaactcatgcgagggactaccatccaccaatactgaggtagaggcggattntaagcatccctcaatccacctaatccatttggacccgaaacccattcttctcagcatatataacaggaaatcccatgacactgagtcgtaagccttctcgtagtcaactttgaatacgatgcatggnttctggcctttcctcgcttcatcaaccacctc

SEQ ID NO: 79818 - DNA, 165 bp, Glycine max
ataccataatttaatttttttaacagaatttaaatatttaatggataaatatatttatatttaagaaaagaccataatctgctgtaagtactttcgtgagcctttgatgctatatataaaacacacatatacgctctcatgtatatgtatataaatagtattata

SEQ ID NO: 79819 - DNA, 404 bp, Glycine max
cctcttctttctcatgtgtacccaaaccctatcacctggttcaagcacgactttctttctgcttttggtggcttgccttgcatagctcgcatatttcttttcaatatgaaccttcacttgctcatgcaacttcttcacatactcagctttagcctgtgcatccttatgcttaaacatagcaatgttaggcataggcaacaaatcaagaggagtcaaaggattaaatccatacactatctcaaatggtgaacaattagttgtgctatggacagcccgattataagcaaactcaacatgaggcaaacaggcttcccaagatttaagatttttctttagtcctaagcagtgtgcctaaagtcctattgactacctcagtttgaccatcagtttgtgggtgacaagta

SEQ ID NO: 79820 - DNA, 354 bp, Glycine max
atgtcaatccttaccctcttgagcaaaaaaagaatagacgggaaatgttcattccatgagaaagagaaggaaaatatccaatgaaagcaaacaaagaaaagaatgaatattcccctatcaaagagtgggagaaagcataataagaaaagaacgaaaattgcccaatcaaagagtgggagaaagcaaaaagataagaaaggaaaattcccaatctaagaatgagagaaagtaaaatatgaagaagaataatgaaagatagctcctgatcagggatcgaaggaaaaacagaagaaatgtgcagagaggtctttggaccggacaatatatgaacaatacagaattgtcaccatatga

SEQ ID NO: 79821 - DNA, 148 bp, Glycine max
atagtaaaaagatcgtcataagtcgcgacgtgaaagtcgacaaaaagattgtgggattggagtgttcaaaaaataagtatgatttcttccttatttgaaaaaatgatgaaattgacacccatctttaggttcttttcaccatttgcct

SEQ ID NO: 79822 - DNA, 228 bp, Glycine max
gagtgccccgcggttcctccgtggtacgcataggtagtgtcggggtcataccactttgggaatggaggttgctaagtctttcctggggtcaccactgccatttggttggcgagcagtgatggcaataggtccctatatgacatgggaattggggaaaatcctggtgttcttcttgcctaagagctccccccatattgtagcttgtgttgagagaaaagttggtgatgg

SEQ ID NO: 79823 - DNA, 396 bp, Glycine max
  unsure (1)..(396): unsure at all n locations
cacccgtcatatgtggtactaggtggttattgggcgatggtgcanataaactctcccatatcctcaaatcaaacatgaacccaccatccncagttgcctaccttcaactgagctcacgtactcctacgtagcccttatcctcattcctctcagcaccgggtccccatcaacccctccaagcttccataatatcccagcaatccaattccaactatcatgaactaccctaaaccaagaaaacagggcagaggcagaanagtctgcccaaaacacattcacatattatagctttccttactcaaataccccaataacattctcttcgttccgaattgttaaacacgtggatcggctntgaaaatttgctgganggtcctagtacataagtatacattt

SEQ ID NO: 79824 - DNA, 231 bp, Glycine max
ctctatttaagggtgcttctgtgttctatgccgaaaacgactactcaaaccaagatccctctagtgaatgagtctaattctatttaaacttcgttctagattcctcgtcgaacgtagcctaaacgagttgcattaagattacgacattttatagcatgccagaattaaataccgataaaagcaatgaacacaataaaacaactttaaatagatagtgaagagcattctagc

SEQ ID NO: 79825 - DNA, 376 bp, Glycine max
  unsure (1)..(376): unsure at all n locations
gaaatatcaaagacaaaggagcacacatgcnnntggatattggaaaaaaaataaatctgacattggctaccgaaaagacaaagatagaatatattagtgagggacaattctcatcccctgagaatttttgggggtgagttagtccaaactcacattctgaaagactgtaaaactgaatttttggcatttatgtacaactaccagagaaaagaattaatataacaccttatacaatcaatgtgagttgcagggagatctgagattcatcttgactggaagaggagactccgcatttgtcttggtcagaggacttgcatacttacatgagcttgcaaccctcccataatcacagagacgtgaatcgactaatatattg

SEQ ID NO: 79826 - DNA, 233 bp, Glycine max
  unsure (1)..(233): unsure at all n locations
agcgaccgcggatgcagcttttacttctacgccctttttgttttttcttgtcctcttctctcggatagatnctgttccttggcgctacgcacgaacggagccggtggtagcgaaggggaagaagcatcttttgacccactgagaaaggagcgcggcgggggttggtggctttgggcctgcgccttctctcgctgggagcagagcctttcgacggtgccttcatatctccctgg

SEQ ID NO: 79827 - DNA, 381 bp, Glycine max
  unsure (1)..(381): unsure at all n locations
ctcatggctgcaacgaacagtggcgaattctaccgtgtgagatgaaactcacaagaattcacgaaaggctagtgaagccagattggagatgcaaagaaaggcgggattgtcagctcaagagcgtcatggaaccacgttttgatgacgcttccatctcatacaatagacctctcaagaatatccgcagccccgatcgccaagaaacanaccaatcttcttcttcttcttcttctactactccttatgaaccttctccactctctaatcctcctccttcctcttcaagaatagtgtttcctttgcttttgatggttcccaacaccccatgcaattccctcactcatttggaaccacaacatactcacctttccctcacccatc

SEQ ID NO: 79828 - DNA, 191 bp, Glycine max
  unsure (1)..(191): unsure at all n locations
acactataatcgattatgtaatgaactggttcgtcactatgatattactactctagaccgcatatatttcaagttttaaaagaaaacatctattaatcggcttatgaaagatganaactacttgtttgcgatataaattcaccacacaatgcacaattacttcaatgaatatatatatgtatatatatata

SEQ ID NO: 79829 - DNA, 217 bp, Glycine max
  unsure (1)..(217): unsure at all n locations
gcgccatgtcaaaangccacaatgatactctctaaacgttgagagcctcgtgcagctggaatctcttaaatggtgataccagacgatttacctaacaaagacaagcatgccctaactagcttgtgcttttttttcaaagccatatgtagcaaaggtattgatacttttaaactcgtatgagctggagaacaagactgctattatattggtcagttgg

SEQ ID NO: 79830 - DNA, 281 bp, Glycine max
tgagggacagtgctcatgccctgagaatttttggggatgagttagtccaaactcacattctgaaagactgtacaactgaatttttggcatttatgtacaactacaagagaaaagaattaataatacaccttaaacaatcaatgtgagttgcacggagatctgagattcatcttgactggaagaggagactccgcattgctcttggtcagaggacttgcatacttacatgagcttgcaaccctcccatattcacagagacgtgaagccactaaatatcgttg

SEQ ID NO: 79831 - DNA, 316 bp, Glycine max
  unsure (1)..(316): unsure at all n locations
gattgatggtatttcctgagtggcaagccatccattacctatagtgagaattgacatcaatgtattgcatgaaaatatatatggtgagagatattggcctttcatgattagttntttagtccctcccagaagctaccatggccacccataaaanatgccattctaaattttcgagtttcttacaaattaagtatggacaatggacctaagtgaatgatttgacctacgatagnttcgatcttgatagttaatatctgaacactcacttattntaaacacttcatcaataattattttttctcttgctatcatatca

SEQ ID NO: 79832 - DNA, 408 bp, Glycine max
  unsure (1)..(408): unsure at all n locations
cttgcatgtctagtgattctagagagagaaagtatcaagttttttagtagtttgagagatcttggtgcgtgaagaactgcagagaccacaagctgtagaggaaagttgtttgagaggctgagatgagtttgtgagtggttgtgagattctataggtgaaggagacattcttaccacttggtttattgcaaactttcatcttgttcttctacttggtgataaggaggcttccttgttatggaaagctaanatcctctattggatcttcctttgaggtacttgatgtagatatcttaatatctatttaatgatggtatggtgttctctgtgctatcagtttttcattctagaatgcctttaccttgatcacatagatgcatgctcttgttgggtcaattcacagtggaaa

SEQ ID NO: 79833 - DNA, 365 bp, Glycine max
  unsure (1)..(365): unsure at all n locations
ggtatattgaatgatgcatcttagtccatatcatatattntgtgcatcatacaccatcatgagtgagtgagaagaaagtttctaaagttaaaaaatttctttagaaggaaaaattctattttagtcgattacatccttatcgtaatcgattacacaagttttcttaagcttgcagagttatgtctcgtatcgatttaatcgattacaaccttatcgcaattgattacatagttgtttttgagacaatgactgatttattcaagagtctctgccttaatcgattcgtgatttaattgactacttctctttctataagtgtttcagaagtgaacaagaacactctaatcgattacatagatcttgag

SEQ ID NO: 79834 - DNA, 310 bp, Glycine max
  unsure (1)..(310): unsure at all n locations
gctgggttgaattgcttcttattgaacctttgtattggagtatctcactatggaacctcttccctgaacctaaccaatttttgaactttggctgatgtctcgagatctaccctcatattttcttcattttgaaggtgctggaacatcaatattcttggcaaatggttctcgacgttgacgggaatcatggcgtctntgccatatgtgagttagtaaggagtttcattggtcactatctagggtgagcaatggttggcctagagtatactggngagttcctctgtcataagcccttagacttgtcgagtct

SEQ ID NO: 79835 - DNA, 444 bp, Glycine max
  unsure (1)..(444): unsure at all n locations
gctgcagcttttatccacggctcatcttggggngattcttcttcctccatggcttattctctagtggatggcgccgcctcttacctcttctcctttgtcttccgctgcatctcaatgttggaaaatcaccattaaaggacctcattaaaactcaaagatccagcctccatagaagctccacaagcaagcttccatcaagtggtaatcagagcacaagagcttcaagtaggtgctccttaaacctccattaattntttgctttaccttctcttccattgttggttcttcattttttctccatgtatttcctcacatgtcttgtgccaaatgttgttaacatgattctttagattttccaccaattatgctatagaagctagaattgattntctatggttcaaatttcttgttcttgttcttgttcttgaaccatgaattgtgtga

SEQ ID NO: 79836 - DNA, 367 bp, Glycine max
aggagaagaggagaggggacacaccatccactaagaaataatgtcttgaagaatgagcttcaacatcaaaaatgtgccttggataagaagcttgaagatgatgctttaatggaggaaaagaaagagagaatggggaagcacgaaattgaaggactaaaagagggggagaagttaaactctgaaatgtgtctcatacaactttcattcaattttattcatatggctatacttattggtgaatcaacaagaaagataagaaagctcatgtatgagaggtcgttttagtaactattataaatgaatttacatgtctaactctttaaaaaatattaaatcgtcaactttgagcatagatttatcttttata

SEQ ID NO: 79837 - DNA, 214 bp, Glycine max
  unsure (1)..(214): unsure at all n locations
tacaatgtcatggtgagacctacaaggtttattcagctgatgaatactcatcgcttctccacgcttccaacaccggccttgctcatcaaccctgctttgtcccttcaccccacaacatcacagattaaaaatgatgttcctcgattgatgggagtgaccctttctgggtgatcnttaagatcacccagtattntgagtaccatgctaccccccg

SEQ ID NO: 79838 - DNA, 428 bp, Glycine max
tgcagcttctcccaatttctataatagggggtgtatttgtttgaataagggttcttgcccttaggcacttctctcttttcgaattgtttggaaaagtgtaccgtgagaaaatcccagccgaggcgcttccgaatcgttttcgtaacgtttccgtgaggaattttgcgaaggtttcgaccgttcgtcgacgttcttcattcgttcttcatcggtcttcgatcttcaacgggtaagtacctcgaaccaagcttttcgattcattctatgtacccgtggtggtccacattgtgtttcgcgtatttttattctcgtttcatttactttttatacccccttttgacgtgcttaagccatttaagtcatttctcgcttaacctaaaaataaaataaatctccaccgatcgtttgaattgtattatccgttaact

SEQ ID NO: 79839 - DNA, 392 bp, Glycine max
  unsure (1)..(392): unsure at all n locations
tgaagctgcttcttccttgtattattccctagcggatggtgcctgcnctatcctcttctactttgacttacgatgcatctgcatggtgaaaaatcaccatcgaaggacctcattgaagctcatagatccagcctccatagaagctacacacgcaagcttccatcactttgtcttacgctgcatctacatggtggaaaatcaccattaaaggacctcattgaagctcatagatgcagcctccatagaagccccacatgcaagcttgcatcagtttcttggcttcaccatggacttcgtcatatcagcaataagtgttatttcagctttagtcaatcgccccgcatatgaatgtccaactcatgacttgaccaattcatgagtatgcactccac

SEQ ID NO: 79840 - DNA, 327 bp, Glycine max
taatcgattaccatgtgagataactgattacttctcccttaaaaagtgtttcaaaagttatcaagaacacattaatcaattacattgaggatctagacgattacattgttcatagaagatttctagttttcgggaagaacactttaattgattgaaatgcacatataatctattaactgatggaagcttgcttgtggggcttctatggaggctgcatctttgagcttcaatgaggtcctttaatggtgatttctccaccatggagatgtagcggaagacaaaggagaagagaggaggcgccatccactacggaataagccatggaag

SEQ ID NO: 79841 - DNA, 404 bp, Glycine max
  unsure (1)..(404): unsure at all n locations
cgaggtacttacccgttgttgatttgttaacgatgaagaacgaatgaagaacgtcgaagaacggttcaaacctttgcgagattcctcactgaaaacgttacggaaacgtttcggaagcgcctcggcttagattntcttcacggaaacaatttttccaagcaaattccaaagagagagaagtgcctaaagggctgggatccttttcttcttcattttctcccctatttatagcaaaataggggagatgcttgccgcccagctcgcccaggcgagctcagctcgcccaggcgagcagggttgcttcctccagaagcaaccgccttctggaggaaccttctggagggcccaacctgggtgtatttgccccccattttataagttcaccccttgctgtttttggtgat

SEQ ID NO: 79842 - DNA, 428 bp, Glycine max
  unsure (1)..(428): unsure at all n locations
ctcgctaagccaatctgctggcttagcgagcatacgttaagcgcaacattcctgggctaagcgccaggaagaatccagaagaagatgagctgtataggttcgctaagcgcaccgcttcatctctcttagcgcacttgttaagntcatccactaagcgagaaagtcacgctaagccaaaaatcactaacgtgcgctaagtggtccatacgtgcgctaagcgtactagcatgaacaagggccacctattaagcctgaagatagatttgtgaaggcgggttggactggggatcagagctntgcatgtctagggtttctagagagagaaagggtcaagttccagagagttttgagagattttgtgtgtgtcgaacctacccttctgcgggagggcgactctgtgctcgcgggtgggtcttccaaggaggaag

SEQ ID NO: 79843 - DNA, 372 bp, Glycine max
  unsure (1)..(372): unsure at all n locations
actcgacgaagacactgacaaaaacttatcttctcattcttggacaaagtatggcaggctgggggcagagtaaatttcttcccatcagaccttggatgcaactgtgatcgtatacccatatcaactagatcttgacgggtattcaagccatccttcgtcttgccttgaatgttaaggagcgtcccaatcacactatcacaaacattgttctccacacgcataacatcaatacaatgtctaacgtcaagatcacaccagtacggaagatcaaagaanatggaccagttcttccatactctgacttttgccttnttttgggtcttcccaaatacagtattcaggtggtgaacccgctgatatacctgctcacca

SEQ ID NO: 79844 - DNA, 377 bp, Glycine max
  unsure (1)..(377): unsure at all n locations
ttattagcattaccttgcttatgtgctagagaacgtcattcttctccttctttttccaaagccattctaacggtccaagcactttctncatcaccccgagccaccattagccaccacaaaccatcattgttctccattgaaccccacaccgagaggaacccttcaaccgaagcggaatcttccaacttggcttgcggtttcggtagagagcgaaacctaatctgacctttcgttttctttcgaggtaacctgtagaagcaaagcttcatggtgaatcaaaggtgattcanaggtgtttcgatgataacaatgatgataacaaaagatgatgacaaaggtgatgancaanagctcaaagatcaatcaaagaacaactc

SEQ ID NO: 79845 - DNA, 381 bp, Glycine max
  unsure (1)..(381): unsure at all n locations
acttaggttctaggagagctttcacccattccctatctgcttaaagaactagtttttctttgacctcccaacctttattgacatgccacaattaatagcacatagagggtttttttgtatatatttgctttcaacttatatttccaatttttagacgacaataggtactacaaaataatgtagttctggttctctatgtgcttgttactcatatccttggaacacaatntacccaaacactcccccaaatttggaacaaatttgtcttgatccataacaatgctctcctatggcctaagatacaaaagatagcatctgcatttagctcaggggttcaatgacacattcattcacatttatgctcaaaagggtgcaaaggat

SEQ ID NO: 79846 - DNA, 127 bp, Glycine max
taatgtgtcatgatgccaactcaacactacatgcattgggaagaagaatgatcgatttgcaagtgattaatagtagcttatatattatggaattgtcgccttccgaacaatttcttaactttttttg

SEQ ID NO: 79847 - DNA, 343 bp, Glycine max
ataagatctgaaaatcttcaaaaaaaaagaaaatatagcaagaaaaggctcttctttgtcgaccttagtgatggcaatgccatgatcatacctgtttcgattgaaacgatccacaagttgggtcttgctcctagtagaaggatcctaagaatgtcagcattacttttattcttgtttattatagcctcatgaagagcatcaacatcagattgtgccaagttggcattaatagcactgcccccatacctaaatgagctaactaaccgctacacaatagctgcataaaataaaccaaacactaatgagatcagagtggcgcttaagcatttcactcattgacttc

SEQ ID NO: 79848 - DNA, 359 bp, Glycine max
catttatattggtaatggaatattgttatgaacattatttatcacttaatcaattaaacaccttctaaaccaaatttacttacatcatccaaaactatagaatggatatgttcaaacattcgtcacctaaaattattctattcacattctggtgtgtgatgaaaatgtcatctttgacatttagtattccaaatgtcaccccatcccacgacaactgaattggcctttggtaaacatcaaacaatcacttaaccaattctcccaatggatcaactgcacgcactgcattatccattttagcagatgtaatccggttggctcacgcttttgtatatatgcatggtaatgaaaattcaata

SEQ ID NO: 79849 - DNA, 254 bp, Glycine max
  unsure (1)..(254): unsure at all n locations
cttttgaagtattcacagagttgagtctaaacttcaagagaaaaagactgtgtcatcaagagaaatangagtgaccatggcagagagtttgaaaacggcaagtttactgaattctgcacatctgaaggcatcactcatgagttctctgcagccatcacaccacaacaaaatggcatagaaggaaaaacaggactttgcaagaagctgccagggtcatgcttcatgccaaagaacttccctataatctctgggct

SEQ ID NO: 79850 - DNA, 353 bp, Glycine max
acagaaaatacattcaaaagaacatgggatacaattctcctgaatcgtagtcgggttggcacacaatttctttggagtctccaaataaaattcctgatctttggagggacattgagcttccaaatctgtacccaatttccaacaaccttgagatggcttgtgtcaaggatttcttccatgattttatggtaagtgcttttaacagtgtaagctccagtattggtgagtctccaagcaagaagattaggttcattcgtgagtattaaaggcaaactcaagatttttccagaatcatcatcattaaaaatatcctcaagctttattccattcttgtaagtattggtttatgagat

SEQ ID NO: 79851 - DNA, 236 bp, Glycine max
tccaaaaaagaggaaaaagtttgggtgcaaagaggttttgtgtgtaagagagaacgtgaaagggttgtttaaagtttgacagcgaaagtgtataagccagattcatgatgatgattcagtttgatcaagacgtttgatgatgacaaaagcccaaagaatgactttcagatgagtcacaaattctaatcagattaattcaagattaagagagttgtttcagaatcagagaagaaata

SEQ ID NO: 79852 - DNA, 244 bp, Glycine max
atttctcgactgcttcccgtgttcaatttcgagcttctcaatatattatgcgcctgaatcggacatacgagtgataagatatgaccacttgaatgtctcgagatcttccgtggttcaatttcgggcgtctccatatgtgatgtgcttgaatcggattctcgtgtgagaagttatgaccattggaatttctcgagagggtgcgttcgttaattttgaacgtctacatatcttatgttcctgaatc

SEQ ID NO: 79853 - DNA, 423 bp, Glycine max
  unsure (1)..(423): unsure at all n locations
ctgacgctgcagctgccatttttgttaatatgtttttttttattaaatgacactcatntttatacataattggattaatataactatcaagtttcaactattagaaattaaactagacattattacttttaaagcagntactattataagattaatagttttttcataatatatagcaatccatgattagtttacagtatacaaaatatgtatttcattaatatatttcaaattaaatcttgataaataaagacacatttttaacatgatctatcgtgtatatgaaagtgttcttcgggcagaatataactctaacaaaatctctaaaacatagatatatacaatatcatataaaatataaaataaattctaaactacaactgcaagatttataatgttataacttcggtacacaaaagaaaa

SEQ ID NO: 79854 - DNA, 336 bp, Glycine max
tcgaattcctctcggaccaggtgcttcccacacaaccaacttatgtaccaatcacacaaacccaaacaccattgcgctaagacatcattcatacagcgtactcaggaagagagacctatagggcgaaagggccacgctacactatgaggaaaatggacttatcacaccgtttaagggcgagtctgtttctattgcaccttaagatcttccccttcgacttagtttgctggaaaacgtaccacctcttcctattgaaaccgcctcaccttttgaccccacacctcttcacccttacataatcttcatgcattggctggcgtccctgcgactgacacg

SEQ ID NO: 79855 - DNA, 104 bp, Glycine max
  unsure (1)..(104): unsure at all n locations
ctctgtactctctntttctctcaattgttcttcattcttcttcctctatctactttcattcttccatnntcttacacaaatttcattgctcttccactggtgat

SEQ ID NO: 79856 - DNA, 195 bp, Glycine max
gagcgcttaatgcaagtctggctcgcttagcgtgaataagttaatttcggcttagcgcccggcttctcgcttagcggatgcatgcaagcggtgcgcttagcgggatgagccctcgcttagcgcatgtgtcctggtcaatccttctttcagaattcttcctcgtgctcagccgcaagagtggtgcgctcagcggat

SEQ ID NO: 79857 - DNA, 303 bp, Glycine max
  unsure (1)..(303): unsure at all n locations
tccatgacacaaatgcaaaaatgatgatttggaaattttatgcaaaactggtcatgcatgcatctatgcggacactcaaatgtcaaaattttatggtcatgtgatgctagggctcacgaatcatttcctctatttaaatcaacccaatgtttccaaaatatggtcttttaataaattgtgcattcatgcgagaccatttcgggcgtgcgggaaaaattcacagcattcacccttcaggtgtacacacnattttttcaaaaattggttatgatcaatgaaatttttaaaaagtggaagtcatct

SEQ ID NO: 79858 - DNA, 345 bp, Glycine max
aatcacaaattcagtaacattaataagtcattcacctcagaaactcttctttgaattgcagctgcaagacattgtatcactctttgtctttctgcatctgatttcacaggggacccatctatgtgcttgatgtagtattcctgcacaagcaaccataaaatattgagccaatgttcttaaaagaccaacatatcgcaccaaacaacaaaaggaattgcaggtctgtgtgtgtacatgtgtgtttgttcagaacaaagtggtgaatctgatatacctgatatgcttctggaccctcagcatcgatgtttgaaaaccacatactgcatgtctgtcaaagtacaaact

SEQ ID NO: 79859 - DNA, 334 bp, Glycine max
  unsure (1)..(334): unsure at all n locations
ccaaccttttcttaaatttattttctaatatacataatattttaaaaattaccttaattttttaccaatttaattctagaaataattatatggaaatggtacctttgaataaattttttaataaaataatcaaatatccttctataattatggtggagcgataacacaatatttcttttttaaaacccgatttctattttctttttaatagaattttttgtaaatacatattntttctatttaaaaaagatatctgagtatcatttatttttaattttatttctaataaaccttggctctataatcctttattctatnttaagggtataaatta

SEQ ID NO: 79860 - DNA, 269 bp, Glycine max
  unsure (1)..(269): unsure at all n locations
ccataatgttaactntaatcaaattgtgaatcaaaattgtgatactttatcaccaganatcacaaatgatagatgcatgacaaaggtttattgttacacatttatagagatgagaaaccaaaagacgatgtttctaanaggaaggattacaacatatgtttaaccatntaataaattacattaacaagttatagtgtttgagatatattattcttattcataacctagtgactttttttacacgcacctcatgaatagacactaacata

SEQ ID NO: 79861 - DNA, 448 bp, Glycine max
taaaaccagctgacgcgctaattctcttacgtggctgcagaacttttttactcttatgagctatccgaccaaacgactcaatcataaactacttcaaaacctaccaaacaagttttgatcaatgacttatggcaatatagccgcaacttcacctgtcaccgcgagagcttcacctgccatggtgagagcatcaccaactacagtgaggacaccaacgtcaccaatgatagctttcacacttatggcaccaatgctggcagcgactccggtgagtacaaaaactactccagcaacttcaacattcctgacatgccattcacacctactccacagcaccagcaggagaacattatctgtctctagctacaatgagcacgagcactctgacgttcagactttccaattctacgacaaaaaacttgttggctctgggaatgagttaccggct

SEQ ID NO: 79862 - DNA, 401 bp, Glycine max
  unsure (1)..(401): unsure at all n locations
ttatcttggnttatgtttattaacctttaatcttttttaaagataacttgcggcactaatgatcggttaaaacctactttaaaaaagggaagagattaccgatgatagaaaaggagatgaaggtgcacaaaatgccaaagaagacccctaagggtgcatagatcatgttcaaattcttaaaatcaaacactaaacgaatgatgaacgaagaacataaagcgaagaatgatgtagaggttgatcacgaaccgtgattggcagtgcctcgaccttggtttcctcttctttctctcaattccttcacttctgtacctttcaaccnctcagcccncttcacgcctatttatagcaaaaaaaggcatttggtggacctgcagctcgcccaggcaagctggttactt

SEQ ID NO: 79863 - DNA, 397 bp, Glycine max
  unsure (1)..(397): unsure at all n locations
tagagaggaagctccaattgatgaagagaaggagagagaggtttatagagagtggcatggaaatcgaaggagaatatggagagaagttgaactttgaagtgtgtctcacaagtttctcattcatcaaaggtatgacaagtgttacacatttttctatttatagcctagcacacgggaagctagaggaagaaagcttcctttagaaggtagaaaaggggctactcacatctgtccaatagctaagctcacaccatgccaaaatacatgaaaatacaataggaagcttccttgagaagcaaggaaggtagcatccttgagaagctacaggggggctactcacacctctccattagcaaagctcgcccncatgccaaaatacatgaaaatacaatggtaa

SEQ ID NO: 79864 - DNA, 187 bp, Glycine max
  unsure (1)..(187): unsure at all n locations
catagtcacctgcggcatgcaagcttcttgagatgtgaacctagaccgttcttactaactngngaaggtgtataaggagccttccttttcttagatgccatctgcnaaaatataagacaaaacacacgagataaacaagtcttattctcagtaaaacaaaaaaattaaactaaaaactgaactgggc

SEQ ID NO: 79865 - DNA, 437 bp, Glycine max
  unsure (1)..(437): unsure at all n locations
ctggttntgggcaatagcactccacctgacgntcctaagtctcctgaccctctacatatctctaggtaccactatgtggtcagcaaacaaaagtaggaagactgactctttcacgctttctcacatcaagcttaatggattatggtgtacccgtcatatgtggtactaggtggcgatcgagcgatggcgcaaatcaactctcccacttccacaagtcaggcacaagcataccatccncagttgcccacctttaacttgagctcacgcactcctacgtgcccttatcctcgttcctctcagtactaggtccccatcaacccctccaagctttcacaatatccaaacaattcgatatcatttaccatgaaactaccctaaaccaagaaaacaaagtagaggcagaaaactctttccaaaactcattcaaataccacagc

SEQ ID NO: 79866 - DNA, 359 bp, Glycine max
ttcttctaaagcttcttctcccttcttctctggggaggggctggacctcgaaatccagaagctatcactggtgctttcattgtccttctgcttccatggctgattccggcactgatcgagtcgaggccgccttaaaccgcctcacttcgcgcattgaagacctccttcagcacgtgaccccttcaccatcaccaccctttccctcttgcaaccccgttcctgcacagacacacagaatgaagttagatgtccccagattcgatgggactgatcctatgggctggatttttaaattacacagttcttcgagtacccactcctaatcaggaccgcatcaccattgctgctttttatatgga

SEQ ID NO: 79867 - DNA, 428 bp, Glycine max
catctgatctgtgcttccttagtgtcctgaatctatcatactttaacttatcatgcagaattcccacgagcacccaacttcagagctttgaagaacttagctacactggaaatcctgagctttgtggtcctcctgtgacaaaaaattgcacagacaacgaagagttgacagagagtgcttctgttggacacggtgatggtaatttctttggaacatcagagctttatatcggtatgggagttggatttgcagcaggattttggggtttttgcagtgttgatttcttcaacagaacttggaggcgtgcttattctcattatcttgaccacttgagagatctggattatgtgataataagtttgaaaggaagaaggatacttgggaaattgtgagttacatgtaactgtaggaggagagacatacacgtg

SEQ ID NO: 79868 - DNA, 389 bp, Glycine max
  unsure (1)..(389): unsure at all n locations
ggatttcactccccgtgccaccccgaaagatctaagccaagcccctactttngaggggcaactcccgccttatgacgactatcccggacaagacgatggggaaggagatacccatcttggccccctgctccacctcanagatccgtccccccatgaactacccccaccgaacatagtctgccatatcccagcctcacccacacccgtaaaagaatctgttcccttcgcggaagataagggaaagattgaggcgcttgaagaaaggttaagagcagtcgagggccttggcaattacccattctcggatttaacagatttatcgtgcccaatatcgtcattcctcccaagttcaaagtatcggactttgataagtacaaagggacgacatg

SEQ ID NO: 79869 - DNA, 442 bp, Glycine max
  unsure (1)..(442): unsure at all n locations
tgggtattaatcccattcataaccactattctcatcatgtaacagttacctctagaaacttctcctatttaacccaattataatttaatccttaattattaattatttatttattagttcctacacaagtcacatgtctcttacatgacacattaattctaacattctcccacttggctcatatgacattaataaatattatggactaaataaataaatagattaaactaacataatgcgcatttaaatgactaaaccgttctatacattgaatacatcataatttcatgattaagaatatgaaccaattcaagtcatgatagttgcacataacttaattgacatagtcccttccatgtactantaaatagtcttctccttaatatgaccattagttangagtacataattggtccaacataatgtctttattcaagacaaa

SEQ ID NO: 79870 - DNA, 224 bp, Glycine max
ttgatagagttttcagaacaaaaaaaaaagtctatcctcttataaagcaaaattggtttatcctcttacaaattccttggccaaattacttgtgattcaataaggaatttttgagtgctcaaattgttcaatctatctctttcaagagagatttcttcttttcttcttcttcattctgaaaagggattaagagaccgagggttgttgtgaaagaattctaaaca

SEQ ID NO: 79871 - DNA, 411 bp, Glycine max
  unsure (1)..(411): unsure at all n locations
ccttgatgattagttntcaccgacgaaaggatcaaagtgggtatgaaaagaggcaaatttaatcaccttgcttggacgaatgagaaaactggggaaaatgaagacggtgaggatgaaggagaaacccatgctgtgactgccattcctaccaacccaacaatgtcattactcagccaataacaacccatctccttacccaccacccagttatccacaaaggccatccctaaatcaaaccacaaaacccacctaccacacgaccaatgctaaacaacacttttagcacgaaccgaagcaccaaccaaaaggtgaatttgcagcaaaaaaatggtagaattcaccccanattccggtgtcatatgctaaactngctctcatatctactcgataatcaatgtagccataacccct

SEQ ID NO: 79872 - DNA, 353 bp, Glycine max
  unsure (1)..(353): unsure at all n locations
gatataactccaaattatccgatgatatattaatgagttatttgtttaagtttaacttttttttttggtcattatagaagattattatatatttttaaagncttttatctttatttaatggctttttatataaactnttaattctatattaatatagggtcanatatattttactcattaataatactcaaatatattntatttaatatttagntntttttgtgcttatcagtgttatcacattacatgtctcattatttttttaatccaaaatataaattattaccaaacttatcagtggtatcactttacatgtcttcttattaaactaaaactagagcaaattaataaac

SEQ ID NO: 79873 - DNA, 346 bp, Glycine max
  unsure (1)..(346): unsure at all n locations
aactttgaagtgtgtctcataagatttgattcatgacagttacaataagtgttacatatgcttcaatttataaactagggagcttccttgagaagctctcttgagaaaacgttcttgagaagctagagcttatctacacacacccgtctaatgactaagcttacgtccttgagaagattcctagagaagctagagcctagctacacacacctctctaatagctaagctcaccttcttgagatgaaaagctactcctatagtagctaagctcaccctcattccagaaatacatgaaaatacaaaaaaagtccatactacanagactacacaaaatgctctgaaatac

SEQ ID NO: 79874 - DNA, 438 bp, Glycine max
  unsure (1)..(438): unsure at all n locations
gcttgcttgtggagcttctatggaggctggatcttttatgctcaatgaggtccttcaatggtgaattttcaccatggagatgcagcggaaggcaaaggagaagaggagaagggaggcgccatccactagggaataagccatggaagaaggagcttcaccaccaagatgagccttggataagaagcttggaaggatgcttcaatgaagganaagacagagggagagaaagagagaggggggagcacgaaattgaaggaataaaagagggggagaagtagaactttgaagtgtgtctcataagactttcattcatcaaagttacaacaagtgttacacatgcttctatntatagactacgtagcttgagaagctntcttgagaaaacttccttgagaagcttctttgagaaaacttccttgagaagctagagcttatcta

SEQ ID NO: 79875 - DNA, 191 bp, Glycine max
atcatgtcgttgagggactgaatcagatgacgattcataaaataagtaccagattttgagggggcgtgaacagttgcttgtgaacttattataaccattaattaataaattcaaatgcatcattgaatgctcacttacctttataaaatatacctttatatcttgagtgctacttacactgtatatttata

SEQ ID NO: 79876 - DNA, 293 bp, Glycine max
tattcaactggtgatcggaatactacagatttgatacagggctatcaactcaaaagactcgtgcaacatagatacccatattaatcagaggtacttatatacacttatgcattagctacccatattttatgcttaacggcctgtccgtgacaatatgcactatttttgtttaagataattacatatgaattacggtgatttgcaatggctttagaataagaaatatatatatatatatatatttatatatatatatattatatatatatattataatcatgtatcataaatca

SEQ ID NO: 79877 - DNA, 464 bp, Glycine max
  unsure (1)..(464): unsure at all n locations
cttctatggaaaatgtcaaatctgtgaaggcaatgcttagatgttttgagatggtgtctggcctgttaatcaactttgctaaaagtaaatttggagctatagggaaatctgaggattggtgcatatctgctgctgccttcttaaattgtgctatgctcaactttcctttctgctatcttgggattcctattggagttaatccgagaagaatggtggtgtgggaacctattatcagaaaatttgaggctagactcaataaatggaaacagagaagcatctctatggctggaagaattactctaattgaagttgtcctaacagctctgcctttgttttatttgtcctttttcagggccccttcagcagtgattaataggctaactgcaatccaaaggaattttctctggggtggcagctgtgaagggaagaatataccttggatagcttggagcanagtctgtgcc

SEQ ID NO: 79878 - DNA, 380 bp, Glycine max
  unsure (1)..(380): unsure at all n locations
caatcatgtgctctggcgaagtacctatcgctcgtttgctcaatcatgtgctttggggttccaactatatgcaattgaggttcgacccattttcaggacattgtatattgcccattgtcataacatgaagttatgaaggcttaaatcacaatctcattatgctataaatcggntgataaaattcatgggaagagatttaattaatgaaattatttttatgtattttttaaccattcaacatttaaggagtcttttatttttattatttaagccattaaaaataattattcttggaattcaagtatgaagatcaactaataattagctacgggtagaaactggggttagtcctgccgttgtagtgcatcttgctactaact

SEQ ID NO: 79879 - DNA, 375 bp, Glycine max
  unsure (1)..(375): unsure at all n locations
ttctcttataagtntgtttttaaattatacactctctatgatcactatttcctgcacatatagataaaaagaaacaaccttctcctacagaattttacggtaagaaatatggaaaaatgataaggggacctgctatatattcgaatgaacaaaaagttcacatgggcagcaagagagaataatcaaggggttatcaattatgatagaatcaataagcaaagatagaaccaaaagccaacccatgcttatgataagaggccaggaatataacatcaggttcacctttagaaccttcagagatgctcagaaacaacttctttgtcttttatttctattgtatccaccagaatccatgatatttatcagaaagataca

SEQ ID NO: 79880 - DNA, 393 bp, Glycine max
  unsure (1)..(393): unsure at all n locations
ctctgaaatcaagaaacacacacacactgttgcctagtcgatcactcacataaatttccgttctccccctttgtttttgaatttatgcttcatttgaaatttagttaattactcatgtgagttcttgatataatccttatttcttgttgatttcatccctatttctctccccctttggcatcaacaaaaagccaaagtgcgtaacatacaaatatcaactaagcattcacacaacattcatgaaaaatataaaccaaatcataaagcaagaaccatgaagcaagaaccatgaatagatcaaatataaaatccacatagttaacgaattaataatttgtcaaacataccatgcanataaagaaatattaaattgttcaaatatcatcataatat

SEQ ID NO: 79881 - DNA, 238 bp, Glycine max
cctcgaaagctagaagagaacaactcaatctaatctagtctattgcacgacatacagatgagaacattcttctctttgttttttaagagaggaagacaacactcccattcggctgggtgaacactatgcttgtgctttccataacgtccatgacattggattagaaacttgcggcgagggcacaccccagggagctaacagtggggtctgaatcctcctccaacttcctgcgcatgtg

SEQ ID NO: 79882 - DNA, 413 bp, Glycine max
agcttatccttatggctggcctctggtttttattctccgtgccaccccggaagatttaagccaaacccctactttcgaggggcaactcccaccttatgacgactatcccgggcaagacgatgaggaaggagatatccatcttggccccctgctccacctcaaagatccgtccccccatgaactaccccaaccgaacatagtctgccatatcccggcttcacccacagctgtaaaagaatctattcccttcgcggaagataaggcgaagatggaggcgctcgaagagaggttaagagcagtcgagggctttggccattacccattcttggatttggcggatttatgtctcgtgcccaactcatcccttccaagttcaaagtaccagactttgataagtacaaagggacgacatg

SEQ ID NO: 79883 - DNA, 389 bp, Glycine max
  unsure (1)..(389): unsure at all n locations
ctcattccctatatgaagtagtgtngtggttctaaagattcgttgtcttaaatatggttattctctgaaatgttattaataacatttcaatctggagctatacccaaggtgagctagatcataatttagattaatttgcactgttataggctccgatnttggttattttgatattgaatgtacaatgtataatctttccagggtgtggagagtcctgttgatttgcattgaaccttgatgggtcatgttagaattcagatgttggaggccagataagaactcaaaattctagattttttttgcttacttctcaaccttgatagacattgtagatatggtaattcttacctggcgtgtgtgtctgaggagcattgacttctgaaatgaac

SEQ ID NO: 79884 - DNA, 420 bp, Glycine max
  unsure (1)..(420): unsure at all n locations
gtcttctttaaaaaagttcttttttatagacccctactattggntctgtgttaacttctgatgtgggcttgaattgttctgtggagatttctggtaggatattcttgattgatttgatttgtttgcctttgagctagattgatgttattcttagtatggactggttatcttccaaccatgtcttggtgaactgttttgataaaagtgtggtgtttgatgattctggagtgagtaaggatatgatgtttatctctgccaaccaagttgtgacatctttaaaggaagatggtcaagtatacatgatcttgtctagcctggaagtagagacaaaggtttctatgtgctccctgttcgtagaagagttccaaaagtgtttcctgaggatatatccngtctgccacctgagagagagatagagtt

SEQ ID NO: 79885 - DNA, 203 bp, Glycine max
ggggattacattcgggctctttatttgactatcccatgctgtttctacatacatataacagccccactgatcgaggccgtacccgaatcaaataaacatgaaaatgcagtaactaggaagtgatcctaggtcgtttcccaatgagcagtgacaagccaaatgttcataatatactcgcagtaacaataacgatgggggggggg

SEQ ID NO: 79886 - DNA, 343 bp, Glycine max
  unsure (1)..(343): unsure at all n locations
atgtgatgatgtgccttgaatggcacttgaggaagtttcttcccttttcttttacatgttgtctcttttgttgcatttcattacatgtctctttggtttttggtttctctggtttttttttctgctttactggttttgntagtattnttgntctgnattttgcttcaatttttgtgtctgcatctgtttcctatntgngcttagatttatttcgctccgtccatttctttgtatatatacgaagattccatcttgatgcgctagcgccatgaacaaggatctttaaaccaccttctcgaggcctctcctccatgatgcccctgcgcaggcatatctccttcct

SEQ ID NO: 79887 - DNA, 389 bp, Glycine max
tagccgaattcagattgaattgaagttagcttagctcaaccttgtccagcttatcggaccaaattagcctcaaatgcaagggttgggcgctaagcgcttgagacttgcagcttaccacttgaacagagatgcacttatcgcgaggcttgcgcttagtgtaaagactgtttttcataaaaaaaagctttcttagctagttttcagtcctttttccaataaattgaaacccttatgttaaacattcaaagataggctgatatactcctatgtacagatcatacagcaagttccaaatgattaaatgcatgaaaaacaaactaagataatagaaattaaaactgggtttgcttccagaagcgctactctaacgtcattagcttgacgctttt

SEQ ID NO: 79888 - DNA, 432 bp, Glycine max
  unsure (1)..(432): unsure at all n locations
atcctctaagtcacctgcggctgcagctataataattatatgcctcatcattttctatatgcatgtgaattangaagcatcaacaagaatcaagccaaggctattgtgcaagcaatcaatggggcaaaatacaccaaatgattatgatgatggatagttcaaattctcacaaaggtaaagtcatcactttcaaattgagctntcaaaactatcatgacatgtagagaagaatcaaggatttcaagtcacaaaatgtcaagaacttttattttcaaaacaattacccatttcttgaacatatcctataattcaaagaaaaacatgcaaagttgtacatgcacacaaaattgacccanaatattaaaaatctgacgaaactaacaacattaacaaattaacacaactaactaattaacaaaaccaacanaacta

SEQ ID NO: 79889 - DNA, 339 bp, Glycine max
  unsure (1)..(339): unsure at all n locations
tgagcctgctgaagacaactgtacgcttagtgcactgaactcagcctagcgtgcggcctagatattgatgccctaccaaattcttctggccgactaaacgcgctgaagctgcgcttagcggtgtatgtccgcttagcccattgatgagctaagctcaactgtcacttttgggacttcatgacttagcctctntnttacttgaaaatgcacatattttatcattaaatccaatggacatattctagagacaactctatccataaaagaaaatttatttacataaaatcacaacgaataaccataaaatggtgaactatacaagttttggaaatgatttta

SEQ ID NO: 79890 - DNA, 356 bp, Glycine max
  unsure (1)..(356): unsure at all n locations
aaagttctaaatggatcgaatgaaaacaatgtgcccttaatttactttataaataaaggttgtttttttttaaagattgcaaaatattaatcaagagtatcacgaactatattaaagatatattacaaattattaataaatatatcgataacattctcaataaaaaaaacttactgatttgtattttcattntgaaatggagaaggtagtacactaaaaatttaaaaaatactaataatatattattctacatcactctcttatatgttggttatacagatcaccctagttagtaaaaatagcatgaattcttattaaatgatatacagcggtaaaaagagtgtaattctgatata

SEQ ID NO: 79891 - DNA, 379 bp, Glycine max
  unsure (1)..(379): unsure at all n locations
agctntgaggtctacttcggtcctaatgagttcttttttatctaattcaccanaaaatgtttaatacaaaanaaaaaaaaatcatggatagagtagtcaaaatggaccaattcggtccaatacatagaaagtgggttgattcgatatttatataggccacaaatttgttggtttggttgacccattgcctgggtcaaattgactccatttttatattaatttatatgtactttatatcaaaaaatagcgtgccaaatatatctgttagtattggagctcacatctcatggccattgcttagaccgcaatcctaaaatcttagacactctctcatcagatctatcacatcactggctcctattttaaatgataaagcttc

SEQ ID NO: 79892 - DNA, 331 bp, Glycine max
atcgtgatgaaaaagctcttatggaagtctgaaatgatagccaccgcatcatttttggaaacgaatgttgatcgggtaaggcatcgcgctatattgggagacctagatgagcatcatctccataacatgtggaaaaaaggctatttctttgatctccatctggctgatctacagtgcgtactgtctaacttatgaagggggaaaaatgctatgatatttattgaacccttgtacacaaggcagaccaagatggttgaatgcgtagactggtaaatggaatacatacattgatccatatacaggcatcaactattaccccagcatgcacaca

SEQ ID NO: 79893 - DNA, 462 bp, Glycine max
  unsure (1)..(462): unsure at all n locations
ttaagtcacctgaggcatgcaagctnggatgatgttgcgcgtattgatgggtaccattataggtctgcggnggcttgacccatgcgggcgtcgaagtgacggcatgggtatctccttccttcctttnttccccagntgctctgattctcctagcattggtacttgtggaggagacgtaatcgaacttccctctcttcaaccctacttcgattctttcctcggcgaataccaagtccgcgaagctggaaggcatgtagcctaccaacttctcatagtaaaacactggcaaggtgtctatcatctccctttcgaccatgggaggggccacttatgccgccaagtctctccaccgctgagcgtactctntaaaggtctcactttcttaaccatattctacagctgagtgcgatcgggagccatatcggaattgactgatattgcctaaggaaggcagtaatcact

SEQ ID NO: 79894 - DNA, 276 bp, Glycine max
tttttgacaccctatttcttcacttattggcgaaatatatggaactactttctactattaggacaagtacacgctcactctgcgcgcatacttcgtcgcgcgtaaaacacctttatagaacatacgttaacccatactgtgccgggcctgtccctaacaaactagagagcgcgtcccccgcacacattgtctctagaagaataaacacactcaactcccaagggacaggagtagattcatcacaagcacctatcttatcgtgtatggtctattcct

SEQ ID NO: 79895 - DNA, 422 bp, Glycine max
agcttcttagtctcggttgatgaagatgaatttgtgttctacttcatgcactgctctaatgacaataacatggcactaaattgctgggagttcgaagccatcttctcaattaaatttctggcttcaacaggggtcatgtctccaagggctccaccactggtagcatctatcatacttctctccatgttactgagtccttcataaaaatgttggagaagaagctgctcataaatctggtggtgagggcaactggcacatagtttcttaaatctctcctagtattcatataagctctctccactgagttgtctaatgcctgaaatatcctttctgatggccgtggtcctggaagcagggaattttctaagaatactctcttgaggtcatcctagctcatgatggaccttggagcaaggtaatat

SEQ ID NO: 79896 - DNA, 395 bp, Glycine max
  unsure (1)..(395): unsure at all n locations
ttatttatgtgttatctgacgtttntagctcttgttttcttgttctagaaattagagattcaggactccttctggtttgaattctctgatagtctctctttaagtttatatactattgagaacttgagatagacagtgcttactgtaggacagtctttatataatacagcgatctgagtataatttctgttctactttcaaactgaagacctgcttgagctaacatgagaagattggggatatgatctatgtacggatcatcggcaagttcaaatgattaatggctgaataacgactaagatttactgtttaagactgggtgccttccataagcgctacttaacctcattagcttgacgctttacctactaggtgacttatgttgggtcttactt

SEQ ID NO: 79897 - DNA, 199 bp, Glycine max
agtctcacacacacagctgtcctccttcagatgtgctgtcagcagccacatgttctctcatcagagagcacacaaacacagcactgagcctctcacttcttgagagtaggagcaatgcatcaatatcattcacagaacagagcttatcaagctacaataatgggcgagtagtgaccactagccaatttgcaatgctcca

SEQ ID NO: 79898 - DNA, 451 bp, Glycine max
  unsure (1)..(451): unsure at all n locations
tctttgagaaaacttccttgagaagctagagcttagctacatatacncctctcataactaagctcacctgcttgagaagcttccttcagaagattcttanagatgcttgagcttagctacacatacctctctaatagctaagctcacctccttgagatgagaagctagagcttagctacacaccccctataatagctaagctcacccctatgacaaaaacatgaaaatacaaaaaaaaagtccttactacaaagactactcaaaatgccctgaaatacaaggctaaaaccctatactactagaatggccaaaatacaaggcccagacgaagggaaatacctattctaatattacaaagataagcgggctcatacttagcccatgggctcgaaatctaccctaacgcttacgagaaccctagggccttcccttggatctctagcccaatcta

SEQ ID NO: 79899 - DNA, 369 bp, Glycine max
  unsure (1)..(369): unsure at all n locations
tcaagcaaagaaagaatagttcacttgtcctcaagtgacaagctcacaggggttattcaaaaatgtgtttgtttccaagcattcaatcacatgacacaagtggcatacaatgcttcaaccaacaacttttcacaagatatgcagattnttaaagataggaacatgattattaagaaacacaagtgaaataagctagcaagcaagacaaatataaaaaaaggatcatcaagccaaatcctgatagtcactgtttcactcaagcacaagtgttttggctatttatcaatcccaacataattctcaactttggcatttcattcaatgccatacagtcacaaaaacacaaattgaatccgaaggacttttctt

SEQ ID NO: 79900 - DNA, 393 bp, Glycine max
  unsure (1)..(393): unsure at all n locations
tatatacgcttatacttacgagttattgatgatctgctcatgtgagaaatttggcttggctcctcatgtagaaaatatttttgggttgaccatcgactntgtcatatcacccataataatcttctcatccttagaccagcatatggatatccaactaacgacttagtcaatgcatgattatgactcccacatattaacttcaccaaccatccttcacctcccaccactgtattcgctcgcaacttatagggacacctatattttctactatcagtaattggtcatactaaatacttcatggtatgcactatatntccatttctttcacaaccacataanatatatgagatccttccttttattccagtatctgtgtctgacctcataatcact

SEQ ID NO: 79901 - DNA, 186 bp, Glycine max
ctaatatagcgattatacttatctactaatttaaaatagataattgaatactagtatattttaaagagatatcctattgataacatattatagtatatcaaaaatactactatatgatgacaaatagtattaaaccatctataacatatattatatatacattttaaaaaaagaattgaaatctac

SEQ ID NO: 79902 - DNA, 191 bp, Glycine max
gtgcttctacagtgtataaatggtgtttttcgaacgcatattctctacagtaaaatggagtaatattggagactataactatcttttgggtcaatttaacacttaatctgcgggcattattgctcgtggaaaattctctatagaaaaataaacatacgcacttacattgcagggtctgttcctaacaaatt

SEQ ID NO: 79903 - DNA, 267 bp, Glycine max
  unsure (1)..(267): unsure at all n locations
caaaaaaaaatggttgaatgaatacacatgttaaaattagtaaatagagtanggtaacacttaagcttgaatacaaatgcataactaggctacacacaggatgaactaataagcactcttttgtatcatctaatgacttgaaaaattctcactttaaaatgctcttactccacacttcgnattttctttcattntcttgcttttgatagtagagcctcgctttntatagtcttcatgaaagtatccattacgagattagtgcttatc

SEQ ID NO: 79904 - DNA, 425 bp, Glycine max
gaagaaaatagtaattaatgtaagtaaagttagaaattatgtggcgattattaaggttgattaatgataatctagattccatagaattagaaaatgggtaattaagtcataagagtttaaagtggaacgccttttggtaaatgaatatataactagtttaaaaatagaattttagtttaactagctggtgtctaattacagtgtctaattatatgatatagaataattaaaataagttagagttgtaacaccttgaaaaattacaactcaaattgatagagaaaactttgtgttgtgtcatctgtgtatgtataaatttacatttagtagctatatatttttaatcatagaatttcgtgctatgcgtgtatacacacacacacacactgacacacacactctcacacacacacgctcacactcac

SEQ ID NO: 79905 - DNA, 431 bp, Glycine max
cagcttatgcttgcggccccacagatgtgtcgttatcaaatactagtttgtcctgccttaatgttgcgcaaatgactactagcatgcccttattcctgagccacctgtgaaacaaacagcccgacatacatcatgtctcgccacttggaagccttttgagccaaacatcaactttttggcataaccttggcctaggatggaaatttccaaccttaccctcggaagagagaacaaacgaatcttcccaaacgaagcttcttttaccttgggttataagtgtgagtccagagaaaagaacagaaaaagaaagaaaatcaattgatcaaagattgaagaaaagcaaaagaaaagaaaaagaaaggttcgtggaacccgacaatgtttgaacgatgtgcagaattgtcagaaagaaagaaaatagtaacaatgac

SEQ ID NO: 79906 - DNA, 332 bp, Glycine max
ccggcgctaagaccaccaaggaagtcccagttcaatcaacacgtcgacggcggtatttaacacgaaaggaacttccctccaaggacattgccggaattcaccccgctcccgatgacgtacgaagatcttctaccatccctcatcgccaatcatttggccgtggtaactcccggaagggtcctcgaaccccctcttccgaagtggtatgaccctaatgcaacttgcaagtaccatgggggtgccccggggcattccgtcgaaaaatgcttggcccttaaatagccaacatctaatggatgccggatggctgactttccagaggaatcggccat

SEQ ID NO: 79907 - DNA, 408 bp, Glycine max
  unsure (1)..(408): unsure at all n locations
cactaacaatctccccctttgtgcaagtttttcntaaacatacgtagacacttcctgagcaggtacgagcagttatgcaagtgggatcagcaactgtcattattagagtaatcaagcacagcagtatctgtagtggtgacagcaaaattctgcaggttgcagatctacaagtctttttcaggatgtcaagacatctcatgtgacatcagctttctgctcccactgactacatgctctttcactgcagcatcttctatcagctactatgttcaatagcttacatcaatcatcatcagcagatactactccccctcaaaatcataactcatgcatacataatatcctactactcaaaatcataaatcatgcataatactattactccccctttttagacagaatttgaca

SEQ ID NO: 79908 - DNA, 377 bp, Glycine max
  unsure (1)..(377): unsure at all n locations
ctacaatatacataatttagagactaaaacaatcgatcgctaaagtgataacttcagtcgctaaaatgaaaattcagtcgctaaaattggtagcaatcgaaatgacgaccgaattctctgtgtcgcanaaccctagtctctaagtccttaatcaccanattcttattcatttccgtgcatgtttggttgctattttgtttgggaccagttcaacaaccganattatcggtcgctaataagtaataaaattttaaatataaaataaattaaaataatattcccgcactattgaataattaatangtaaaaattaagaaaaattacattcgatcactaatttggtgactaagttanaataaaatgtattanaaaatata

SEQ ID NO: 79909 - DNA, 307 bp, Glycine max
  unsure (1)..(307): unsure at all n locations
tcttcttccatggcttattccctagnggatggcgcctcctctctactcttctcttatatcttccgctacatctccatggtggaaaatcaccattgaaggacctcattgaagctcatagatccagactccatagaagcttctcaagcaagcttccatcaagtggtatcagagcacaagagcttcaagttggtgctccttaaacctccattagttttcagctttaccttctcgtccattnttgtttcttcatttttctccatgtatctcctcacatgtcttttgctgaaatttttgaacatgatttttt

SEQ ID NO: 79910 - DNA, 376 bp, Glycine max
  unsure (1)..(376): unsure at all n locations
atataaacaacattatatngaaaaaacttgataattntaacttattatcgtatcatattggtgattacgcatgtcagtacatgtgtcaatgtactggttaaaatatacctaaccttttttatctcaaattaattgcgtaattttttatttgaaatcaatcaaaattacaatcaaatataattttattttgtttatatattcgttacctacttgtgattgactccacttgcatcaattaaataaattgactcatgctcataaatatttgaaagtagaaaatattgtaaaaattattttgagttcgtatatagtatttgctatcaattgagttaattgatgaaagtgcattaaaaaatatcagatttttaatatgaga

SEQ ID NO: 79911 - DNA, 440 bp, Glycine max
ctatgtggaccaatgtatctgggggcatgttccatcctggcaaaatttttatttataccctcgccaattctagctcttagttctagaaagtactgtatgaatatgtggcttgggcttgagcttatccatagaatgaaattactttttatttttccacctcgatcatactgtggtcaaggatcaagtttagatgaagggtcttgaagcacattctattacattctcaattgatttaattatttggttaagctttggggaaatgactgtgatcactaaaatggtttttatttcaaagcaaattattttttttttaatagaaaaaaacataatgaacaacactgaagttttccattttagttcatgtatattgatcaactaaacatcaaacttattcaacctaattatttgctacattaagatacttaattgtcgataggata

SEQ ID NO: 79912 - DNA, 388 bp, Glycine max
attcctcatcttcctctccaaacaaaaaaaacagatcagaatgctaaattgttattcctctaggattaaaaataacaaattcactcattatggttccatcgctttcaaaaataaaatatatatcaacttcatgccccactccccccataagaagcaccaaccagaaaggtgtccttatcatccagatgttgatgaacaccctaacgacaaagaaataaagtaaatgcctaattcctcactggaaaatatcacgtatatcatgtcactctactacctgtgatggataccttgtggatgattcatgagatcaatgaaaaattatttcatgaggaaaccttatagaaaaaactaatacacagcaccactcatgtagaactattaccagtga

SEQ ID NO: 79913 - DNA, 450 bp, Glycine max
  unsure (1)..(450): unsure at all n locations
caacatctggtaattcanggagtgagtatttatgtaatgtaagacttttatgtttcttaacatcgcccaaaaatgagatgtcgcctaattcccagttgcgtatgagtacacaacgaagatttgttgatgattctaatgacattgacaacaatggtgcttctgtacctatccttattgtacagaaacaaaactctaatcattctcatgcctttgaaaattccatctgatacatccaaatttgtatataaatacagaaactcaagattggaacagtctaggtcatctggaatttttctactgcacaaatatctcactgaattatgctccacagtcgcatccttttccaatgcacactcaatcatcttattctcattctttgctatcctgcgggctacatagcgaactaagtcgtgcattttgacccctttatcatccacacacaacaataaa

SEQ ID NO: 79914 - DNA, 289 bp, Glycine max
  unsure (1)..(289): unsure at all n locations
ctactacatgctcatttgcttgatacttgatgtaaaactttgttctataagccatatttgtttattcaaatttcagagttcagtcttcagatctgaagttttgtcattacaggactttntattacctgcatcctacacaaaatacttgattntatggtagtgtggttgctcttctggaatcatgaggcatgatagaagatggtcttgaagtagctactgaccctgactacagatttgatctatcaatacaccttggaaaagtagatgttgcaaggtcatgtatatgtta

SEQ ID NO: 79915 - DNA, 397 bp, Glycine max
  unsure (1)..(397): unsure at all n locations
tcatgatacgaatgattgtcggtacaaatgcacaatgtgcataatgcgcctacgctacgaaagagaatggtattaccgacacaaagaagaatatcttctagaacataaagaattcattgatcatactttgtactccgctttatcttctcaagaatcaccggatgtatggtatgttgatagtggttgctcataccacatgacacagaacaaaagttgctctgtgtaactagatttctcattgtatcccattgcccagaggctcttcgctatgcgaaggtatggtggagagatatngtacgcagccttacccttgcatatgcaaagaggctgtttccggattcgaacccatgaccaacaataaaattcagagttatacttggtgatgaaaatgttcaaa

SEQ ID NO: 79916 - DNA, 330 bp, Glycine max
tgaattggctcagagcttcaacattcaatttcgagggtctcgatatatgacgggactcaatcagacctccgagtaaaaagttattggtcgttgaattggctcagagcttcacatttaatttccagggtctcgatatatagcgggactcaatcagacatccgagtaaaaagttattgtcgtttaaattggctcggagcttcaacattcaatttcgagcgtctcggtatatgacgggactcaatcagacatccgagtaaaacgctattggtcgttgaattgggagcttcaacattcaatttcgacggtctcgatatattacgggactcaatc

SEQ ID NO: 79917 - DNA, 359 bp, Glycine max
ctctttcattggtggttcttaaatattctccatggatcttctcacatgtcttggtctaaatggtggtaacatgaatctttagagttttcaccgattaaacttgctatagaaggtagaattgaatttctatgggtcaaatttcttgttcttgttcttgaaccatgaattgtgttgagtttaagttcctttgagatttgtcttggtattttttgtggctgaaacctaaaccataaaattcttacaaaaatattaaagtagaagaaaacctcataagtctagagtgacttgttcacctatatgtagtttgtcatagaagtcatgtctagtcatgaaacttgtcacataagaattcttatgtt

SEQ ID NO: 79918 - DNA, 433 bp, Glycine max
  unsure (1)..(433): unsure at all n locations
gcttctctatatactgtgaactctgttttatattattataaaaagnatctgtatagcgatttacatgaatcatggaaagagtgctttcaaaattttacatctacaacctttcactggaagtatgatagaatttgtattcacatgaatacaattatatatacatacatattgatttaaatgaagcataatttgaattatagcatcgacaagttgtacttatatttacaacaganaattatttcaataattttaaataaataattaacgtattgagtaatgcaaaaaatagatgcatgcaatgcacaaccatgaactgagccatgtatactcaatgaagcacattatttcaagctgtaggtggcagagaagaacatgcatgcaatcatagccatgatgcanagccatatatgctagtatgcacaccacacacaac

SEQ ID NO: 79919 - DNA, 270 bp, Glycine max
actaaattcttcttctttaatgtagaagaatatacctcctcataaggttccactaccacttgtagtttcccgacttccttaaaacttctataatccgaaacttccatgaaggacttgggccctctccatcacattcttggcattgaaatacttcagaatactgatgaccttcatatatcctaatcacattatacccttaccatccttgaacgagctaacaatgttgaatgtaaacccaagagcacaccacttgaagctaagatgacgatg

SEQ ID NO: 79920 - DNA, 379 bp, Glycine max
  unsure (1)..(379): unsure at all n locations
gaagaaacaccatttcctagttaaccatgcattangtaccatgttcaattattttgtttttaagtgaaacgggtttatgatcccaacatggttggctcgtggtgcctaacacatgaaactaagaatgtagtgtgaagtttcacgcttccccctttttgtttttgttttgtagaggaaaacgcaaggatgagcaaacatgataacaaatggtatgcaattttgcagatcaaaaagtttgttgaacgcatatgcatgatgatgccatgactcatgcaaaatgtgaggctggaatatgataacggacaaatgcaggatacattatgatgttatgaagagatgcttatgcgatgcatgatatgaatgcattctacggacacga

SEQ ID NO: 79921 - DNA, 384 bp, Glycine max
tgcccgaagaaacactcatttctagttaaccatgcattaggtaccatgttcaattattttggttttaagtgaaacgggtttatgatcccaacatggttggctcgtggtgcctaacacatgaaactaagaatgtagtgtgaagtttcacgcttccccctttttgtttttgtttgtagaggaaaacgcaaggatgagcaaacatgaaaacaaatggtatgcaattttgcagatcaaaaagtttgttgaacgcatatgcatgatgatgccatgactcatgcaaaatgtgaggctggaatatgataacggacaaatgcaggatcattatgatgtatgaagagatgctatgcgatgatgatatgaatgcatttacggacacgagagccc

SEQ ID NO: 79922 - DNA, 401 bp, Glycine max
  unsure (1)..(401): unsure at all n locations
ngcactngaggagggaaggatattngcagctaatgaacaagtttcttgactattcgtccttaagatattactatntctttctgctaatatgtaaatataaatggtataagggtattccgtaaaaacatggtctatatttacttctaagattgttaggggtaaaaatgaccatgtccttaaaaaagttgttctcagaaaatcccaaaaataaatccctcttattactagatattttgaattctttagttcctcaatgtacaaccttcaaattgttgctcgttcccctctttcttttgtgcaaaaaagaaaatcaaatgctgtgaaaacatggatgaagtcctatgaaaatcaatatcaaagaanaaatggatgaaatcacaataaaaaacacaactacctat

SEQ ID NO: 79923 - DNA, 324 bp, Glycine max
ccctagactagtggcaaactaaacggaccattcaatcgctggaggaccttttaagagcatgtgtattaaaaaaaaaaggcgagtgggagtgcttttctgtcgttgatagagttcacctataacaagagttttcattctaccattggcatgactccctatgaagctctgtatggtagaaggtgtaggatacccctgtgctagctagaacctggagagaacctcaccttatgacccgaagtggtacaacaaaccactgagaaggttaagttgatccacgagaggatgaatattgctcataatagaagagttatcaagacaatagga

SEQ ID NO: 79924 - DNA, 427 bp, Glycine max
  unsure (1)..(427): unsure at all n locations
tgaacaaattataataacaccacactccatttaacaaaatgtctttttgaagcctacgaattgaataacattctattcatcattacaaattaaggaataactcttcaattaagcagacaaagaataagtcatcttcttagacgagaaacaagactacaaatgaaatttaagacattatatatccatgattttcaaaatatcaaactattcctgcttgaacacccacctgaagccatttgaaacagaaataacaagttgtgatggtaagtcaaaccaatgaataacggcggttcccatacttgttaattatttgtccagctgtgtttcttcanaatttaagctgtacgtattacttgtggtacattttaaattatattaatttattaaagagacatatcatctgaaaattggattatatgttaaagaa

SEQ ID NO: 79925 - DNA, 313 bp, Glycine max
  unsure (1)..(313): unsure at all n locations
agtagtaaagtgacgtgatttgattaaantgagatatgtgataaatatttctataatatgttntgcttatgtctttgtttattcgtattntatttagaaatgtgataactcactccctatgtgatgttngtgtttggatcctgtgatgatctcgaaccttgtgttcctgngagcagatgactaggtggatgactntaaagaacctcgtgctagaggacactangacacaatgctctgataggatggttgngctagatttttgttcaatngatgatgtttnaacatgtattnntacttatttatttttgttact

SEQ ID NO: 79926 - DNA, 251 bp, Glycine max
  unsure (1)..(251): unsure at all n locations
tacaccagtctatacatcaatctaaacttgctcaaacttggtgtacgcctacaattcctgctgatcagaaattgactcctcaacacccaactttaccctagaaatggctctcgcttcactttgtcatttgtattcttcttgccagccacacttctatnagtctaatgacattagctggatactccttacctcaaaccataatattgcttaacttaagctactctttcatatacactattatttacctagta

SEQ ID NO: 79927 - DNA, 416 bp, Glycine max
  unsure (1)..(416): unsure at all n locations
ttcatcctatgatatgtgtttattattggcgatcagaattgccattccttggattataaggttgaaccaagctcatgcntttacaanaaggttcatcaagtcaagttgaaatatggaagtaaccgacttgcaaaaatggggcaaaagatgaatcgagtcacatcactgcttcgtctactgccaaacatatttagggataattgatgtccttgttacttccagtttcaccttgacaaagatgtcatggaccatgttgaaaatctaaattgattcaaccccatatcttgcgtaaaaattcgcaatacttcaactgtacatcattcgcatgcatccatgcttttcattggttgattgctcattgcattctttcctttgaaaataaaatataatgaacttagtcattgctataaaaagag

SEQ ID NO: 79928 - DNA, 386 bp, Glycine max
  unsure (1)..(386): unsure at all n locations
gctgcagctgctctttaggcataatcggttgttgtataagtctttnctttgacactctaaaaaaactttttttttgatggcttgagcttatttcaggttttttttaaataattagaatctatagaaaaaataaaatctgagtaaaactgaaagctattttgaatagtttctcataaaggcacactaaaaaaaagagttttcttcgattgtacataacggttaatgtctataaattgatagtgtacagtaatatatttattataatgatgaattgtgagtatgtgatcggaaaattaggacaatattaactgttttcctcttgaaataaacataaattagctttctttaaaaaagtattactatttgcatcaaattattattaatct

SEQ ID NO: 79929 - DNA, 367 bp, Glycine max
  unsure (1)..(367): unsure at all n locations
aaatacatgcgacaaatatctaataccattgtgcttcaccttaaatgtgcctagcccttttttacatgcaacagatttctaataccattgtgcttcaccttgcagttgaattctgtataaatacatgtttattaccactgtgcttcaccttgcagttgaattctgtaaaaataccattgtgcttcaccttacagaacccaaaattcagtttatgggtgaccagcttcctaccaaagcctttgaaagccctttaatgcangtggttaaggagatgcatatacttattactagcctgngacatggttattctagttngtttagacagtactttatgtgtatcttcttaatcacaaaaataaatctgtca

SEQ ID NO: 79930 - DNA, 381 bp, Glycine max
  unsure (1)..(381): unsure at all n locations
tcacttttaaattcttaaaagcacactcatatgcttttcacaaattgtcttttccctttacccaccccccacccctttttctatttcattatccagttcttgactaacagttaagcaaaaacattttcccacattaaagctggaagttatattaatttcaattaaagaaaaacaaaaggtgaaaacaatgttgtggagcaatattaatagacattaggttcacaagtaaaatgaatagttaaataaaaattagaaaacataaaccatatatacaatcaattgaaatcccnctaagagacaaaaaatattaagggaattttttttggtgcttaaacttggcttagttcatatagaaagggaaatagattgaaaacagaagtg

SEQ ID NO: 79931 - DNA, 112 bp, Glycine max
tgagtggcggaaagctcgggtgcgggcgggtgtatgaaggtgagagggagatgagtatgggagtagtagaaagtagggcggtagagacagcgaggcatttatatagggggga

SEQ ID NO: 79932 - DNA, 421 bp, Glycine max
  unsure (1)..(421): unsure at all n locations
agcttntcttttttcatttattactttatcttatgtattcangcctctatatntttgctctatataaataacaatctctgtgctttgtctaatcaaatcagcttttagaataggcaagaataatatgtaggaaatcttacagtactcacaaaatagattattttgctgccctgagaatttggagagaaatcttgtttggaatttattactaaatccgtaaactctgaacacctttgattatggatctagtcttcttgggtgtgtagagactatatcctataattctaattcttgatcttcaaatctactcactaatttgcaatgttgactagatgcccttgatgatctgaanagatgattacattattntatttanaagttggattggctatgcaaagagggcttggatttgatatttata

SEQ ID NO: 79933 - DNA, 450 bp, Glycine max
  unsure (1)..(450): unsure at all n locations
ctatgctctgatataacttgactgttgtctacatttttgggagaataagctccaatatgcggtttaaaagatatagatgacgttacaatgcaattaatctggngattgagctggttatggctctatctttntaaccttcttgaagtttgatagtgttactgacaaagtctgctgaaagtgctaagttagattattagcaagggcatggatggtggagcatatagattatggggtcaacatactcaattcgatctttacttgcacaaagtgagaggacagctgtgaacaacaatattgcatctttgtccttcaatggtgataaatatgaagtcatggccagtctaccatgtgtaaatagactataatttgctgtggtgaaatctgtgcagtgtgaaacacaaagcatcagtgtagataaatcaattttttaagcctcacatagcatcaatg

SEQ ID NO: 79934 - DNA, 450 bp, Glycine max
  unsure (1)..(450): unsure at all n locations
ttaagcaccgaggctgcagctactcgtgcnaggactctataagaagttttcttattcaatggcttactttntttttgccttgctcaatgcttcagaaagagagattgcttaaaaacatatagcgagtgtagtttacggaacgagtctaaaagcctacactgggattattgattaacaataagctagccacgcaaggtaaactgattcaaagacggataccatacgcattgagaattgcttatagagaacactgactactggtgcggaagatgagctgttaataaagattctcttacttacgcaattcagtctttaacagcgcttatcccgcatcctggactattcttaatgttcttactgggaaaccgtaggttatatgctataagttttaatagcgaggacctaaaggatggaagaggcatgatagcgaagatcaatccatctcaatta

SEQ ID NO: 79935 - DNA, 446 bp, Glycine max
  unsure (1)..(446): unsure at all n locations
tgcagccatttcccttagagtcctctcacggngtggaggctgtgctatgttctcagaatgtgcaaaatcagaatgctcaaaattataatgctcaagatcaggatgttcaaaatcaccaataacagaatgcacagattcaccagtaatggaatgctcagaatgatcaanaggtataaaatgatgcctaactaatctatgaaatgtcctatctatctcaggatcaaagggttgtaagtcagatggattgcctctagtcatacactacattcagcatgcacacaactagttgccttgtcatgtaaataaaggtgtaggtttgaactacagctaccctcaaatgatatccaaatgacttgaaattntgtgagcaaccttataaaatgatgagaagatagcacaaaaactttcagacanaaattcanattctaactanntggagctaaaat

SEQ ID NO: 79936 - DNA, 391 bp, Glycine max
tatcctattctatctctatcctatttttttctttggaatttgtctacgctcgtatttctgtccttgttctgatatttgcggtcctggtcttggttcttggggccttcacactttgtgtcaaaaaaaaaaattgcagaaattctgaaaaaaaaagtgggtgttggatctttgaacacaacattaaggcagttagattcttctctgaattctgagcgttttgatatatagtgggcctcaaacggacaaccatagcaaaagttatgagcattttgaagttacttgtcatatctattatcttatgtcgtatcctatctaatatttggtatcatatctcgtacccaaattaaaggtaatctggtatccaaatccaatctaatatattatccaaatc

SEQ ID NO: 79937 - DNA, 383 bp, Glycine max
  unsure (1)..(383): unsure at all n locations
ntcaacatgagtcttcacaaataaccatcatgaagcagaaatctaacagaactacccatcatatctcccaaaatcccatacccacgaaatttaagagagaaagaagtccacccaaaccttgaatttcgaagtcccactcgtagacacgcacttcacgactccgaaaatgctctccttcacgattggggcagaaatgatggccaaagggtgaagctttgtttggagcttcaatggagaatgaaggagaagagaatggcaacgtgagggagagagagagctgtctgannagtgtggnggctgagtgaagagagagaaaagcttttgggtntaaataaaaaggggtnntctcttttttctatttatttaattaatcaatgccacat

SEQ ID NO: 79938 - DNA, 408 bp, Glycine max
  unsure (1)..(408): unsure at all n locations
agctnntgcaacatagtggtgtgatttgtgagccctgggctactggtcctactgatgtagacagaggcgctggagtagatagtgaagggatgtcatntgctctggctctttttctcgatgccatcagtaatgaaaagaactcaaaattcaccttagactacatttattcaagttgctgaaattgacaatgggcgcttagcgggatacagctcgcttagtgtgccctcaaaaatttaacacttcagcttagcataacagggtgcgctttagccgaatcaacatcacaaaagatacgcgttaagctcagaagggctgcgcttagcggaccaataatttcagaaaattttactgagtatgcttagcgagctaggctcgcttagcccaacggctgtcgcaatgaaatgagct

SEQ ID NO: 79939 - DNA, 277 bp, Glycine max
  unsure (1)..(277): unsure at all n locations
tggaagaatgggatcctcacgggatgaagcatataagggacgtgtcaacctttagaaggttcattttggaagtattgtgcgaggctgatatgattttgcttgatggtgacaaacgagattcctgtgtaatgcatatgggggcatcgcatgatgtggagacgtgtccaatggaggaagagttgctagagggaatgatgaacaggggccaaattgaagtttgcaatgcgaagaaaggngatggngatgtatgaatgcagtcagatgaataaaacccaag

SEQ ID NO: 79940 - DNA, 388 bp, Glycine max
  unsure (1)..(388): unsure at all n locations
aaccaatgtggcatactgtttcctaactctgtttcatgcaattcgatcaataattctaaaaaatcaattactaattttatagtagctaatatatctttgagatcctcgaccacatatcctacttaactattgtaccaaaccaaactcctttgttattgttttcaacaataaatgagtaaaatttttatgtataaaatgtgatattagttagtggtattttggacaaagaagtcatattcaattgttggcaaagaagtgtaatggggtgacgaggttgttgtttgagtantatctattttgaataatggttacattattntgacggtgataacgtgacagcttcaattttaaccggagaagataggaggaaatgcagacaaaatgaaat

SEQ ID NO: 79941 - DNA, 463 bp, Glycine max
gacactataaaactaagctgaaccatctcagcaagtatggaatggtccccgcacgatttggataagggacagggaattgaggccggctccaaattctgatgccaccaaatgctccagcagctttgtgcattccaagagatgggaagtagaaatagctaccaatctggtcttttacctggatagcatatgtgaggttcctcccaggtgggaatggacagtttgtgccatacactccatcctgccatgagttcctcctatgctgtaagccattcctgcagaagatatgataagatcatcaaattctgacaaatggcaattattttctagctgctaaatgtatacattatatcattcacttcgtttgtgtttggaaaaatcatcggtattggatgcacattagataaacctatgaaatagcatcaattctaaaatttagcacatacaatggttcgtgaaatgtgat

SEQ ID NO: 79942 - DNA, 385 bp, Glycine max
  unsure (1)..(385): unsure at all n locations
tattaacactgttggtgttggggactatactattcccgaatgtagacggattagtggacctagcagcgagcaatgcctgtatcgcttatcatcacaccaaggaaagcccggtcatcgctgttttggtcgatgcatatgatacatttgacttgagatgcgagaagaacaatgcaagaatcatcggttgcacgcctgttctttatgtgtggttggtctcccatgttntttgtcatgaagataggtctatctgtcctctgcaaggtcatcgcatgtgcaccaaaaagggaaaagaagaatgggaagaactcttggcgaggaggagcgtccattactgctcccccaatggaaagaggaagggaatgagtgttatctcgtgtgaggattc

SEQ ID NO: 79943 - DNA, 367 bp, Glycine max
  unsure (1)..(367): unsure at all n locations
tcttagtttcagatgatgcatatgggttngtagctacctcatgttctcctctaatgactatggcatcatttctggcctaaactgctgggagttggaagccatcntcttaattaaatttctggcttcagcaggagtcatgtctccaagggctccaccactggcagcatctatcatacttctctccatattactgagtccttcataaaaatatttgagaagaaactgttctgaaatctgatggtgggggcaactggcacatagtttcttaaatctctcccagtactcatacaggctctctccactgagttgtctaatacctgagatttcctttctgatggctgtggtcctagaagaaaggaaatttttt

SEQ ID NO: 79944 - DNA, 438 bp, Glycine max
  unsure (1)..(438): unsure at all n locations
agctntgaatgctctattcaatggagttgactttaatatcttcagactgatcaacacatgcacagtggccaaggatgcatgggagatcctgaaaacctctcatgaaggaacctccaaagtgaagatgtccagattgcaactgttggctacaaaattcgaaaatctgaagatgaaggaggaagaatgtattcatgacttccacatgaacattcttgaaattgccaatgcctgcactgccttgggagaaaggatgacagacgaaaagctggtgagaaagatcctcagatccttgcctaagagatttgacatgaaagtcactgcaataggggaggcccaagacatttgcaacatgagagtaaactcattggttcccttcaaacctttgagctaggactctcggatagggctgaaaagaagagcaagaatctggctttcgtg

SEQ ID NO: 79945 - DNA, 378 bp, Glycine max
  unsure (1)..(378): unsure at all n locations
tcattaatatgcttgtgaatgtttattttcatatagacattgctgctgtctatatcgggtcactgacacgaccatgcatcatcgtcaaactcgagtatggctgtggtcaattgaccacaacccaggtagttttcgtcagtgtcaataatagtcatagtcacgccaccacagccatggtcatttaagaaaaatattntcaatttatttttattctagtttcagcctttattntcagttgtattttagttcttagtttattttaattcaatctttcattatgtctttatnttgttcttattaattgagggcactacatgttntaagtgtgggaaggggtatcattgctcccctatctttgagctctttgtgatatatgtg

SEQ ID NO: 79946 - DNA, 257 bp, Glycine max
aggggggtgaattaaatattgcaactatttccccataaaaatcttttcactttctattaagttcaaattcccttaaaattaactcttaaatataattcaattaacaatctgatataatataagccatattaataaagagtttaaggagaaaaggcaactggattatactggtcgcacaccttggctactcaatcccacaaccgttgaaatcactattgtaaatctttacagttgacacacagacatcttctttggta

SEQ ID NO: 79947 - DNA, 329 bp, Glycine max
tagtaatgttccgcatattttaaaatgtcttcttgaatgatgatgatgctgcattatatcttatagaaccagaggcttatcatgacaatgatattggtctatagaccatatgatatttggtcctcaagacgctaactctgtctccaatgtagaatgagaagggagatttcagctgagcatccactcgtagcccaacaatccaaaagtattcagtagttgccctcagaatccacagttcaagaagaatgtcaaatttatttgtaatttttctttcatgacacctatatttaggacaagacaaagggtacaagataagattacagaagcgt

SEQ ID NO: 79948 - DNA, 426 bp, Glycine max
  unsure (1)..(426): unsure at all n locations
ngagaaagtccttctaattctgtttatacatttttgacttgtggcatgagatgaaatgcagagaatggacctcctattagttgttatcaatgaatagcttaaacactcgtgcttgagtgaaacagtagctgtgagactgtggtttaagctactttccttgatatctgtcttattattaacttcatctaactgtatagttcacatnttgttctcctatttgtctagctgcatattntgtgaaaacaagtgataggtacacattgcttcatctttctcatcatgcaatcaataaattttaatgcatacacctttatacataaacacttcatgttttaccactcgaggacaagtgagttgttcgcttttgcttgaggacaagcaaaactggtaaattggnggagttgttagtcgatgaatatgactaaa

SEQ ID NO: 79949 - DNA, 407 bp, Glycine max
  unsure (1)..(407): unsure at all n locations
agctngatgtgagaaagcgtggaagtgtcagtcagtgagaacctgtgacgtacctaaacaggcgagctcctggcagtcaaccaataaaagaacaaagtccacaaagcaaggaggcctgtgtggcagctggcctgctatgtatcttgggtggtatatggaaattatcctctggtaatcgattaccattcgtgggtaatcgattacagggcttaaaaatggagacagggtgttaaatggcctttggtaatcgattaccaagggtgtgtaattgattacacagagtgatagggcactggtaattgattaccatctgggtgtaatcgattacacagggtgatggggcactggtaatcgattatcatttaggtgtaatcgattacaccagtgtaattttagtttccaatgta

SEQ ID NO: 79950 - DNA, 438 bp, Glycine max
  unsure (1)..(438): unsure at all n locations
ngatgtcattcaaaagacactatgtcgacctaaatgaagactgaacatgcattgttttacgccattgtattcgttatgcgatataatttgttgtaagccattactaactaattaatattattaagtactcgtttcgttaagcaaaaaaattgttggtccaacaaaaatcatttacgcgtgtagcatacatcattgtcataattgacaacacataatgacatgcatgcgtattaaagtttgagcgcgacaacacattgactgacttgactacacattctgaaggaaacataaacacgaaacatgttcacgcgtgtctatttttttggtaacaaagtgaagcaatcgctcggtcacaaccatctgtatatatagcagacacggctaataaatcacacattatcttgctntcacacagtctcccaattgatacacaaagta

SEQ ID NO: 79951 - DNA, 386 bp, Glycine max
  unsure (1)..(386): unsure at all n locations
agcttgtccttggtttagacatgattgatacatgatttatgacttgtaggattcaatntgggaaaaattggatgagggcaagtgtgatttctaaaatctgcactttatgcagaattttgctgtcaaatatgtgcagcagaattttggctttgtgcagaaaatgttgtgtatttgttggttctggaaagagtagtacagattgtgttctggacgttttcttgcagatcccaacggtcacaatgtagacttatgtgctagagactttcagaaaaattttcaagtcgatccaacggttaacgaattggaacgaggagaatgttactagggtttttaagtgagataagctgtgatattggtttgtgttggcagagtattctgcctctgcc

SEQ ID NO: 79952 - DNA, 299 bp, Glycine max
tttttcgtgggtgatttcgcgaagattttcaaccggtattcaacgttctttcgtccgttcttcggcgatcttcggtcttaaccggtaagtcccgaaatcgagcttttcaattcattctatgtacccttagtggtcctcatttgtcttcacgtgcttttattttcatttcatttacttttcgtaccccttttgacgtgctttagtcatttacttaagtcattttctcacctaattaaaaataaaataaattttcaccgatcatttgaattgaacatccggtaatttctgtaaaatgaaat

SEQ ID NO: 79953 - DNA, 422 bp, Glycine max
  unsure (1)..(422): unsure at all n locations
agcttctggtgggacatcttgacttgctttctaatctgacattcaccacagattctgccttcttctattttcagattgggaatgcctctaacagcacctttgtcaatgattttcttcatgcctcttaagtgcagatgtccaaatctttgatgccatatattgacttcatcttctttggagactagacatgtggaggagtaactggtttcttgaggtgtccataggtaacagatgtcctttgatctgctgcccttcattaggacttcactcttctcatttgtcaccaagcattctgactttgtgaagtttacattgagtccttcatcacacaactgactgatgctgatcaagttcgcagtcagtcccttcaccagcagtactttgttcagactangaagtccttcatggactagctttcccat

SEQ ID NO: 79954 - DNA, 428 bp, Glycine max
tggtgtatatgttgaatagtatagccaaaaatgtcaatgtcttacactttggatacatgctgatttggccattatggagctaaacacaagagtcgaatatacactaacatgtgctctatctaaaaatgagtacaagaagctctataggcttaaaacaaccaaagagatatgggactcactaagcataaactatgaaggcacagaagatgtcagactcaaaaaggttgcagctctgaccatactccatgaaagaaggacaatttatggatgacatgtttgggagattgcatgttcttctaaacaatctagaagctttgggccaaacctacaccaaggctcaaataaacctaaaagttctagacaacttttctaaggtgttggaaccacagacaaccattttaacacctaaaatgaatcacattggaatg

SEQ ID NO: 79955 - DNA, 354 bp, Glycine max
  unsure (1)..(354): unsure at all n locations
cgcttcgtaaagagtaaagaaagcgagaaatattaanaagtcatcattggccctatccgccccaacaagtacgctgtcaagattctgcatacacccttcagggtaacatgacacgaaccactcttcatcctcactcttcttcactactactccattatcttcctctttctatttctctcttctcacactgaacccaaaccccaaacccaaacccaccaattcagatcacaatgaagcccaacgacaacatgacaatgctggccaaaaccgactccgaggttagcagcctcacgcaatcttcgccggcgcggtccccgcgacgggacgtgtactacgtgcaaagtccgtcgcggg

SEQ ID NO: 79956 - DNA, 424 bp, Glycine max
  unsure (1)..(424): unsure at all n locations
agcttctntggagccatctgtanaagactcttatccaaactgaaattagcatcaaaatcattttcagttaaacacaaaattcatttcactttcaattntctcaatcatagcaaccaaaaaatcaattttgtgtctttcatcaatttttcagctcaaaacaacacatcatttagatagaacaacacatcaaaccaaaaagttagtttacatcattcagataaaaacaaattcagcatttaaagaacagtttatgtgcaatgtaaccactatagtactataattcagtccaagcaagttagcttaaaaatgaattaatgcttgcataaaaaaatatgaacattgaagaatttatgaattgacaaatgcagttcagtttcacaagtagaatgggaaaatttntaacttccagaacaaaacagtcaac

SEQ ID NO: 79957 - DNA, 466 bp, Glycine max
  unsure (1)..(466): unsure at all n locations
cggaactataaaactcagctttaatatattntagataggaattacgaatttatatatttttaatatgattntgtgagtttttaaatagaaatagggcaattttacaaggtagcctcgcttaagtgaggtataggccgctcaagccagctcaaatagaggagaaaatgaaattttacataagatatctcgcttaagtgaggagcgtgccagacagtgtgtctagaaactaaattaattcaaaacagaaataattatagagatatagctcaaagataaatgaagaaaatcacttggaagataattgcaacaattaaaacaaattatatcaactaaagagataatttccttgtatagattatattattttataaattaaggagatcatttgcctctattaaacacatctatgattctataaatagagaggcataggtagcaacnaaaaaacacctttacacaccaccct

SEQ ID NO: 79958 - DNA, 439 bp, Glycine max
  unsure (1)..(439): unsure at all n locations
agcttcttcctcaacacttacaaaaacgatgttagagaaactaataaagataaccggaaaaacaaaataaaattctctctctaaattctgaaactttctctctctccttctctntgctgaacagaacctaagcaaaacaaaagctagaaaatttaaaataagcaaggaatgaggcacaatgggtttgagtatttaaattttgagtgttgaatacatactcaatttttgaagttttatttgctaacattgcctaaaccttacatagaaataatgataaattgacccactacaagaaaaatgtttatttccgacgaaatttttcccacggaaaatatttcatcggaaatgctgaattttcgcatggaatttaccgaaggaataatttccatgggaaattagcaaanaatcgatgaatgttnttgacggtcaattattctgg

SEQ ID NO: 79959 - DNA, 449 bp, Glycine max
  unsure (1)..(449): unsure at all n locations
tgactntaaaccttgacattggatccttcaactcatgaattgtttctaggtccttatgctctctggatagttctatattagatatatccctgacatatcatcatatatctaaccaatgatatactacatatttatatatatattttttaaaccaacaaataatttatatattatgggtattagagataccatcatgtacataaaataatcctcattgattaattggtattgcttctagtgattgaataatgatatctattaactattagtttaaattataataattcgcataaaaaatctctctactctaccacagctttgcatatatgcacactttcaccaatatttcatacgcccaccttgtttgtttctaaattatccactttcattcacagacactatcactatttcattgctagaaatactcaaaggccgactgtgcacatgca

SEQ ID NO: 79960 - DNA, 426 bp, Glycine max
agtcacctgaggcatgcaagctttacaacttatcctcaaaacaaaatttatcaaacagatccagatatttctgaatcaccaaagaccatacatgtcatgcaattatctttcctaaaacaacttatttcttgactatgagcttcagtagttcagttaacattaagaacatactaagaacagctttcatacctttaaactataaaggtgtagtcggacaaggtacttaacaatatccataagtatgaaatatcagaatcaaataatgtgacacgcctttacctgctcacgatgatatattataggcaaatagtggcacctgcgatacacaacaccaaaactccaccaactttgatgtatataaggtcaacttagaaggaaaaacatgaaattcaaatacccagaaaagatcatactacatgtgacagt

SEQ ID NO: 79961 - DNA, 397 bp, Glycine max
  unsure (1)..(397): unsure at all n locations
aacgtcatagctttcatggaggtcaagggcgatctttatcatatcttaacgtcacaactaaatcttatttatagttgtgtagtattggtttatattatttcattatttttataaatgagttgaaattattttctcattttatgtctatttattcaaattaaaatttgaactgcaagaagaaagtataaaagatttangtttttttcctaatatgttatatgtataaattcatgttaaatgaatttttaagtaagtgtaaaatattaacatagtaaaattaacttttagatactcacatatcttctatgaaagcaacaactgtgctggtaaaattngctcttttgtctttctctatagggntttcactggtggagtgtcctcccttctttcattagaa

SEQ ID NO: 79962 - DNA, 415 bp, Glycine max
  unsure (1)..(415): unsure at all n locations
gcacctgcggctgcaagctgttgaattccattcagaattgttgtacgagacagacaccatatcatacgtacacatacccacctacaagatcgatgtagctagggctataagtatatatagtgcactctaaatcactaataatagtgtttatatatatgtgtgtgtttcctacgtgtccatatgaatgagcctactggtatacgtgagccgttatgggtaactagctaggcataaatacatgactacatatattatattataagtaattaaatatatttataaataaacccaagaattatttagtgtttgatgcaagattctcttgactttcttaacgattttgggacggtttttaagctagtcccagaacccaggcattagtaacctcagaatttattnctttaagaaacttgat

SEQ ID NO: 79963 - DNA, 395 bp, Glycine max
  unsure (1)..(395): unsure at all n locations
tcggagagaagaaagagaccagtcacgggtgcatggcatgttcttaaaggaagagntagctgcttgctcaagatccaaaaggagtttggctcaacacttggaagccacggagcaaagcatgctagctatcatagggcagtacaaggaagagttaaaccagtctgtgacccatgaacaaaagctagtagaggatttcacacaagtgtacgctgaaaaggaagcaagagggaggatgattgatgcattgcatcaagaagcgactatgtggatggataggttcgccttgaccttgaatggaagtcaagacctcccgcgactactagccgaagcaaggccatcgctgaagtgtgacagcccccgaggaaatctcgggctaatcattactgtcacacatg

SEQ ID NO: 79964 - DNA, 392 bp, Glycine max
agcttcaaatggacatcgcttcatcttagtcttcattgactactttgcttcatacactagtgtgacgaggagtgtggtgattacattcatcaaaaaagagataatttgccgatatgggttgcccaagaaaattatcaccgataatgccaccaatctgaataacaagataatgaaggagatgtgtgaggatttaaaaatccaacaccatatttctatgccttacaagcctaagatgaatggggcaagtgaggctactaataaaaatatcaagaaaatagttcagaagatgaccatgtcatacaaggattggcacgagatgcttccctttgaattgcatggttattgaacttcggtgcgcacatctactggggcaacctgtcgcaacctaccct

SEQ ID NO: 79965 - DNA, 434 bp, Glycine max
  unsure (1)..(434): unsure at all n locations
tcatgatgtatcaagagtgattcacagatgttntgatgattacttagatgataacaaaagatgatgacaaaggtgatgacaaaaagctcaaaggtcaatcaaagaatgagtttaagatattcaagatagaatcaagaacacttcaagattcaagagaaaagttgatttcaagaatcaagaatcaagattcaagagatcaagattcaagactcaagattcaagaatcaagagaaggcgtaatcaagataagtatgaaaaggttttctcaaaaattgagtagcacatggatttttctcaaaacatgtttaccaaagagtttttactctctggtaatcgattaccagattgttgtaatggtaatcgattaccagtagcaaaatggatttgaaaaagttttcaaatggaattacaacgttccaattgatttcaaaaag

SEQ ID NO: 79966 - DNA, 183 bp, Glycine max
ttttttttcgaatttttaacacccttggaggcaccccaaggattttgtaaatctatggcaacttgaaacaatcccccgctttggaaaaaaacgggaaaaaaaaatgccgaagtaaggtaaaatgcgggaaaaaaaatacaaggactgatgtaagaagatttaataataaagaggagaaattta

SEQ ID NO: 79967 - DNA, 414 bp, Glycine max
  unsure (1)..(414): unsure at all n locations
tcttgcggagaccgtcttggtgctcatatgatcccaaaataagaccctcttatcactagctatttcgaaatctgtagtacctgaaggcacaacacttcaaatagtagcctcggcccctctttgtnttctgcatatagaaaatcaatctccaagaaatcatggatgaaggcctatggatgccatgtacatgtgtatttctgaagatatagtgtttatattgcatcaagcatacattgactggtgatgacatgtaatagactgtttataacatggttgccccacatcacaattaaaaagctcaactaccaatctttcggagacctgcggacaatctgccttgtctccttctgcggcggggtttgtgttaataatattatacttcttgcttacacaaaaaacttatggctgagcctc

SEQ ID NO: 79968 - DNA, 418 bp, Glycine max
  unsure (1)..(418): unsure at all n locations
agcttgtcagttataataataccgtgttgttacatcaagacaaacaatataccataataacaaggttttttttccaaacatcagtcacttggaggatatttctagtgcattcaaataggggcaaaagtcacaacaacaataatctctcaaccaaaacatcaagataaaacaataggataatgcataataattttaagataaaagcttctcataaactagatacttaagtcaagagtggatcccgtcatgcagtatgtagtaaattccaattaacactaggtggatttattaaacatcatcatacattctgtntaaaagccacctaagtactttcttccagaagttgagtcttcatagttggcaatcctactgtgacataaaagacataacgatgcctcaaaagacatatctataattt

SEQ ID NO: 79969 - DNA, 448 bp, Glycine max
  unsure (1)..(448): unsure at all n locations
actaagcnttgcacatttgaaaacctagcttgaaccaacttagattaattatgggatctggagaaggcatagcttgagcatgtgactggattacataatttgttacttgcagagatcaaaataataacaacatgaatattagtaaatcatatcataattaacatttaattaaacataatgtattacacacttctcgagatctatgaaggtgttggttccataaaagaggagcaactgtagcttccatggtttaggctttggtactaacgtcaagaagttaaagagggatatatgagagaatgagagaaagtgagtttatgtgtgtatatgatggcattacatgcattgtatntatatgcaananattaacagttacacaaattattttgtgtgacattggccgttgattttgtcggtgggatcttgggtcgtcaatgtacgttgttca

SEQ ID NO: 79970 - DNA, 376 bp, Glycine max
  unsure (1)..(376): unsure at all n locations
agctngagatgaggaagtgtagaagggagatcttcctgctattattgntgaacacagagtggtacctggagatatgtcgcggtggccaggagaccttggggacgtcaggtggggtgctattgcccaaaaccaagcttgaccaatcccgacccaacccgggcatagtcggtcagtgagaatctgtgatgtacctaagcaggcgagctcctggcagtcaacagataaaaggaacacagaccacaaagcaaggaggcttgtggtggctggccagctatgaacttgattgatgtgtgagagatggcctctggtaatcaattaccaagggtgggtaatcgattacaaggcttaaaattgaagacaggaggctaagatggtc

SEQ ID NO: 79971 - DNA, 452 bp, Glycine max
  unsure (1)..(452): unsure at all n locations
tattctctgttacatacacaaccattagaaatgggtccatggtgctctactataaccagtactaatagacacctctcactattncttaccaacacatgcatgcagacaccaagagcgagacacaaacaaacaaataatgaccactagttaaaattttaattttgatatgtagtttgattcctttatactatttatgcagtgtgtttaacaaatttccgccccctaattttgacgatttgcaccgaaatcattattaacaactctagagcttgtgaacctgttcatgaaagttttagtgtttattcaaagtataggcataattaattcttctaaaactaaattagcgattgaactataagactttaaactcaacgtgaaaagcatgtgtctagttaaagggatgaacaaataagtaattaaaggattaaataataaattggtaaaaggatcag

SEQ ID NO: 79972 - DNA, 438 bp, Glycine max
cgcttgcttttcatttgttggcttggaatcttttagaaatatatctcctttactttatacacattcactccattttacaggattttatttgggtcacggcttatttcaacagttcttcagtaatgagcaattttttactattaaagactttgaaagtcgtggaaacaatttatttatagtgtatttatatttattttataagatatatatagtgtattccaataaaattttcataatgtatgtaaaaataattttatcttattttttctccttaaatcatagagatagcttgtataatgtacacttatttcattatttgatatagttagtttggttgattattaagatgtttagagttcttctacttttatatctgatggaaacaggtgagtgtgctccgtgaaattttacacaaacatacaccatatatgtaatata

SEQ ID NO: 79973 - DNA, 343 bp, Glycine max
accagagggtggtgtgagctaccattgtcgttcacggaaaccaacaaagcttaccacttcatgacgatggggtgagcgtcatcactacaacagtgacctgacggtggctatgcgagactcaacgtcatgggttagggacaatggcagtgactacgatggcctgagggtgcctttgctagagtgagcatggggggtcagggacaagctagagtttgctggagaccgatgagcgcgagactatatagcttttcaggactaagatcgtaagctaaacacagcatattagaaccgatgttgacatataatcgttaacatcggttgttaaaaaaaccgatgttaacat

SEQ ID NO: 79974 - DNA, 329 bp, Glycine max
  unsure (1)..(329): unsure at all n locations
agctnttccggagcccatgaattgcgnnttctttcatgtgtctccaccttcngagttggagctatgcgtagtgattgcttaatgcaattctccattctcaacctttttcggattctcttgaattgcgttttcgttcatgtgtcctccaccctcgagttcggagctatgcgtaatgattgcttaatgcaattctccattctcaaacttttttggagccccatgaattatgttttcggtcatgtgtcctccaccttcgagtttggagctatgcgtagtgattgctttgggcaattctccattctcaacctctttcggagcccatgaaatgg

SEQ ID NO: 79975 - DNA, 445 bp, Glycine max
  unsure (1)..(445): unsure at all n locations
nggaccaagcatgtccatcacctgcatacgtacccaaatataaatgttctatagtaaagntggtgacgagaaaataaaatggttggtgtgtatgtcataccatcacataatattccccttgtctccctttgtagggtactttaagtattccatgactgccaccaaaggtgcttttcacaaaacaaaacattaaataaataaaaaaactcaggcaatttcacttaaacacaaatcttgtgcataaccgaaagcaatcgtcgacacatatctcttgcaacataaacaaagcacctacttgtacacttgccactcgtaaggagggccatagntacagcctttgctgttcctgtgctcaaatttcaaagccacctgaaacacgaaagaatcagtcaatgcccgagaaaaatgttcaaacagtgagggtaacaagagaagctcttacctc

SEQ ID NO: 79976 - DNA, 351 bp, Glycine max
  unsure (1)..(351): unsure at all n locations
agcttgaaggcatgtaacctaccatnttcttatttaggacaccggtaatgtgtctaccatcatcgttatcaactccctctccattattgggggcactacttgagctaccatatccttccacctttgggcgtacctttgaaagatttgtgctcccttttgcacaagttctatagntgcgtcctatccggagccatatcaaaattatattgatactgcctaatgaaggcaaccattangtctttccaagaattgaatcgggaagggtcccgattagtggaccaggtgacagctaccccaataagactttccttgaagaaatgaatcaacaacttttcatcttttgcatatgcc

SEQ ID NO: 79977 - DNA, 310 bp, Glycine max
  unsure (1)..(310): unsure at all n locations
actcagcttgatgattatggngtacccatcacatgtggtactaagttgtggtctttcgatggtgcacaacaagttttttcacatccacaatgcgcgcataaacccaccatcccctgttgcccaacttcaactgagctcacgtactcccacgtagcccatatcctcgtttctctcaacaccgggtccccatcaatccttccaagcttccacatatccaagcaaaacaacgttcacaccaggacaggctatcacagccaagcaaaacaaagcaaaggagaaaaattctgccaaaacaccaacaaaaaataca

SEQ ID NO: 79978 - DNA, 413 bp, Glycine max
  unsure (1)..(413): unsure at all n locations
agctngtcaatacattggatcacaaaatcattgtgtcgaatttcaaaatcaccgactgaactgatcactcgatattgtagtgttataaataattntttgtatatttatataatatacatattataaacataatatttgtcaatattgttacaagaataacctccatcttagtgtaaggtgtgcttgtgtcagttgctgacgatagatttgagccttgatatgttgctttttgttaatttattccattaaatacgaatatcttattataaatatcacatttgtcaatgctaaaaaataaaaaggctccagggtagtggtaagacttgtttatctcccatcactggagatatattgatacctatcattccacaacaaaaaaaaaaattccttcctaccacttacttgatgaactc

SEQ ID NO: 79979 - DNA, 432 bp, Glycine max
  unsure (1)..(432): unsure at all n locations
agcttatgagaattccaattttctacaatgttaataccaagaagttccatgacagcttgatagctaagaaggactttgtggttggacagaaagttttattgtataactctaggctcaaactcttgagtggtaagttgaggtcaaagtggactggtccttttttcgtgactaatgtttttccttatggtacaattgagatcaaaagtgaatccacagataaaagcttcaaggtcaatggacaccggctgaaaccattcctcacaaacccctccttggtggatgtagtggtggaggagacctccttacttcaccctacttctcttccgccatgacttaaggagntttctatttctatctccttctttacttttattgcacttgtccaaatntattgattggtttgattgctcttgatcttatgaatgtgctaca

SEQ ID NO: 79980 - DNA, 449 bp, Glycine max
  unsure (1)..(449): unsure at all n locations
ggcttctacagtgcgagaatgactntnttgcccttcactattcanaaacagganagtaaaaggccaaaacactcagagccaaatttcccaccaaaaacactattcccaaaaaaggtcctattgatccatgatcacgcatgtaatcttttgatttgataaggaattatttgcaaaatcaagtcatgacatatctatggttcggaattaggataaaacacttccctatgttagattgatacacgttgagtcgttttctttctatttcagttggacccgatgtttcctctaaatggtcatttcgaaacgaaatgctaacatccaagatcacatttgtggttatgggaaaattttatcagcatactctccttccccaatagacacattngtttgctccaaaaattatattttgctctgatcagttggaggtttttgtttcttactacagcatg

SEQ ID NO: 79981 - DNA, 425 bp, Glycine max
  unsure (1)..(425): unsure at all n locations
agcttgctcgtcttgctgatacttatcatgtttactnttctgatgatgaccgaggaacaattatggatcaacttgaaacttatgtgcttcaagtgagaagaaatgcttctttttccacttgtgaagatgttcaaagtttggctatgaagatggttcaaactgagaaacatttggtatttccattggtttataaacttattgagctagctttgatattgccggtgtcgacagcatccgttgaaagagctttttcagcaatgaagattatcaagtctaaattgcgcaataagatcaacgatgtgtggttcaatgacttgatggtatgttacaccgagcgggagatattcaagtcacttgatgatattgatattattcgaacatttaccgcanagaagtctcggagaggacacttgccttcgtattta

SEQ ID NO: 79982 - DNA, 445 bp, Glycine max
  unsure (1)..(445): unsure at all n locations
tanagtataatntactcattatatttttaaaggttgctatttgtaacaagcttaaagtatagcaagctctatctcgaggttgaaggggtgttaaaatatatgaaaaacatccaacaatgtctggattatatctttagagtatcttagattatgttttagcctctgaccacccaatagttacgtccaaatgatgtgcaaacactaatattagtggagactggagaggagaaatctgaccaaaatggaaaaacttgaacaactaagtactacaataaaaaacatggcataatagtgaaaattggggaaaaaatgagcttaatatggagtcaagcaacaatgctaaccaattggacacaatgattactcaaatgaaaagttataagattgttgtgcttaacaacaagctgagtccaaatcagagggccgcatcttatatcgagaaagc

SEQ ID NO: 79983 - DNA, 404 bp, Glycine max
agcttgcttctacatgtaaggaggtaagtgtctcctccaagatgttaactaagaacgaaagtcattttgaaataaatacaaatattaaagaaacttcccctatttgacaacctccacatcttcttctttgtaaaaagacacttgctagcacaaccacacctcttgggcttgaggttattcctcaaataaaggaattgttggatcgaaggtttggtccataagagcttaaatccttgtgctttgcttagacccaaaataggtattattagacaccaaatccctaaaataagtgatatgatgaatgtgtcgagtgctgcaaccctctattgtaaaaacagacacgcacccaacatcttcatgattcacgtacatagggactcactaggtaaggttggtctaatttt

SEQ ID NO: 79984 - DNA, 365 bp, Glycine max
ttcaagaagactgttgctacaccgccagtcctaagttgacttaagccaagagtacctttactcttatacctctcaatagctgacgaggttgtcagctcaaccctcgtacatgaggaagggaaacaccagcttcccatatacttcaccagccgtatccttcatgatgtcgggaagcggtatcagatgatagagaaggtaatgttagcactcataaaagggttgatgacacccttgcgcaaatgcctaaacagccaagaagtagattatgtcatgccagagctacatgaaagaatttgcggtctctataccggcgcacgctcccttatgacaaaggaggtgtgtgtcatctattattgcccgacaca

SEQ ID NO: 79985 - DNA, 422 bp, Glycine max
  unsure (1)..(422): unsure at all n locations
gcttcaagatggagtaccaggcagctttgtaccttttatttccttcattcgnttaaactttagaaatgttgtatttcaattctgcagccttctatcttgtgatatacaggacagatatatcttgcgggttcttggggagtgttgcttgcatgagaaagcttttaacaagtattatacagtgctggcttccaagttatgcgagcatgacaaaaatcacaagtttactctacaggtattgattttctctccttgtaggatttaaataagaactcaaatgtagaattgtgtagtatttgcttcatgagtcaaaacagttacattttataactacttacatagaggaagaatatgacaagaggagcatttgttatgacaaatatgaggagtgcatcatacatgttgaattgtgaattgatagatgc

SEQ ID NO: 79986 - DNA, 429 bp, Glycine max
ttgtcctcaaatccctcttggtggactagacttatactattcagcattattgtaacaacatatttgaaaccaaaacttaatccgcagatccttcatttaagactaagtttcaatcctacttcattcaagttctaaggcacctaaccatgcacacaaatggttgatcagaccaagagcatacagaatttaagcactgaaagaagcattaaacacaagaaacacaatcaattagatattaaagtaattacatcaactattctttaaaaatccccaacaagggtgtttagccagccattacagaaaaaccctaacaataatgagattacaaaacctaggtatctctgcaaaagatgctcctcttgctgccttcagagctcttttcccaaaataagccctgtggtgcgctctggaatttatgcaattatctgc

SEQ ID NO: 79987 - DNA, 58 bp, Glycine max
cccaagaggtgatgactgaacggcaaacccctcagcaaaccacgaccttcttctaaac

SEQ ID NO: 79988 - DNA, 423 bp, Glycine max
  unsure (1)..(423): unsure at all n locations
agttaaaagttatggtcgnttgaatatgcttatagatntcattatcatttacgagcgtctcgatatattacgccattcattcgaacatccaagtaaaaagttgtcatcgtttgattttgctcagagcttctattctgaatatctagtgtctcgatatactacgggacacaatcagacatccgagtaaaaatttattgtcgtttgaatttgcttagagcttttgttttcaatttcaagcgtctcgatatattacgagactcaatcggacatccgagtaaaaagttattgccatgagaaatttctgagagctctcggtatcaattacgagtaanaagatatcgtcgtttgaatttgctacgagcatctgtttcaattactagcgtctcgatacattacgcgacacaatcggatatccgagtaaaa

SEQ ID NO: 79989 - DNA, 346 bp, Glycine max
gaagatcgaaccgcacgaaaccgaacggtgaggctcagagcaaaaccgaacgacaagaatggaacacacggatggcggagcgagaactgcagaatatccagaggccccaaaaggaataccgaagctcggagcgcagacaaacgactataaagggatactcggagggcagattgagccccgaaggataaccggacgctcgaagttgaacgatgaagcactgagcaaactcagacgacaagagccatattacacggaagtccgacagaggaccgcaatacatcgcgacgcgccgaaaggaatacccaagcgacagagcatattgaaacgacaagaaccctccaactcg

SEQ ID NO: 79990 - DNA, 130 bp, Glycine max
agaatacatttatattaattaatacttatacaatattcactagtatattccttcccttgtgaagggcctactcttactacagactatggggcaataaaaagtccaaagtatatcattgtaacatctttat

SEQ ID NO: 79991 - DNA, 443 bp, Glycine max
  unsure (1)..(443): unsure at all n locations
agcttggtcgtgggcaatagcaccccaccttatgtccccaaggtctccttatccacgcgacatatctgcaggtaccactctgtggtcaacgaataaaagcaggaagtttcacccttctacacttcctcgtttcaagcttgtaggattatggggtacccatcacatgtggtactgggtggcggtcgggcgatggtgcaaaacaattctccatatccacaaatcacgtataaacccaccatcccctgttgcccacctccaactgagctcacgtactcccacgtagcccttatcctcgttcctctcaacaccgggtccccattcaatcctcccaagcttccacaacatccaggtaattccacatccaatcatcatggactcacaanaccaagcaaaatatggcaaagacagaatactctggccaaaacacaactcataatcacagc

SEQ ID NO: 79992 - DNA, 475 bp, Glycine max
  unsure (1)..(475): unsure at all n locations
gcgacactatgaaactaagcttaagttgcttgggatagtaacttatttgggccaacaatgtatcttcagatgaaagctccaataaactnttcttggtaggaatatgaacttatcatacaaaattgcgtggtcattggcagccatattttcaattaagttaagttttgtgcctgaacctctggccgcgtaacacttgagaaatattgcggcactgaagtacttgagtaatcttccaaggtcactcgtcgaggttgctctttagccatgacttcgacttcaaattctgctgtctgagattccctggatgtaggtgaattaaaagatgatgactcagaaaagtgagcctctttaaggattgatgctactgttctatcgtgcaaaagctntcttttcctttttgtgttggttcttctaaaggtggcttcaatttctaaatccaatggaacctattcacctgcagaagatctacgcatgc

SEQ ID NO: 79993 - DNA, 437 bp, Glycine max
agcttggttcaaccaatgcttaaacttggttccagccacacttaagcttgaaaaccaacatcccatttttccttgcaggtcatttcacttaagcgcaagtaactcttcactaagtgccatgacttcccagaatttcgaaaaaggagtttttcacttttgatggcttccaaatcaacccaaatggaaacccaatcataccaaacacattcccaaaacattaaacacccaaaatgagaatttttttttgaattaaaacaagtttgtatgaatcaaagatagaatagatctaaagtgttgatttatggagaactaacttcctatgctcctacaacacatctaaatgaaggatactccttaaacaagcaagaagaagaatgaataacttctccacacctaagatccacacaagatgaaggaaaacggatgctctaagcact

SEQ ID NO: 79994 - DNA, 468 bp, Glycine max
  unsure (1)..(468): unsure at all n locations
ggaccttgaaactcagctgtccgaaagtacctnaaccttttaaggtccaacgttttatatggtcctctttgcttttattggttaaaataaaccattaaaagcataaaaccaacacataactttacctcttttgcaagaactacgtaggtatgatttcctcattgcaattgaggatacgtaggagaaaaagtcctgcttttgttgaccaccccaagagatcgttaatggtccaacgccttaatgtttctctcctttcaaaaacaagacatcgttaatggtccaacgccttaacgtttctctcctttcaaaaccaaaagatcttttaatggtccaacgccttaaatgaccttttgttcggttaaaatatatcttgcgaaaaaagataaaaaaaaacttaaccaatgtttagttttgaaagaactacgtaggtctgatttcctcattgcaattgaggatacgtaggagcga

SEQ ID NO: 79995 - DNA, 388 bp, Glycine max
agcttatgggatttgatgactcaggtagtgcttacaccggagcaagatcggtatctgattcgactattgggattcgaatacactatccactatcggccgggacgcgagaacggggttgcagatgctttatcaagggttgccggagaagacgccaaggcttccttgtacttactctcagtgccacagttctccttcattattgaccttaagaaggagttagccacaaaccaggaatttctagcgttgtaggagaagatccaaaaggaccccgacgtatcatctgaatatagggtcgagaatggattgattcttcataaacaacgcatttggcttccacaggatcttccatcatcccgttattaatggaagaattccacagtacgccgac

SEQ ID NO: 79996 - DNA, 410 bp, Glycine max
  unsure (1)..(410): unsure at all n locations
agcttataaactntatacaagaataaagctctaataccacttgttagacaagaggcctcggatatctttaagaagggggggttgaattaagatatcaagaactattcccccaattaataaattacccttaatatgaattactcaagagacaattcaaagtaaacttcttttgaagcaaaaagataaatggcaataaataaaataagttaaagggaagaaggaatgcagactcagtttttatactggttcagccacgccctgtgcctatgtctagtccccaagcaacccgcttgagatttccactatctttggtaagtccttttacaaaactctgaaccacacatggacaacccttcccttgtgtttgaaaattcttacaactcaagaaaccctcggtctcttaatcaatc

SEQ ID NO: 79997 - DNA, 387 bp, Glycine max
  unsure (1)..(387): unsure at all n locations
agcttcaggccaggctactttctcaagatattattccataggtacaattggcctgttctgagccaactctcgcagcctatgcatgataatcagntgtcctctgaataggctctgtagcatagcgactaaagtttacgggtgttggacatctggttctatggtgactgaatgaggagctgggatggatgatgaagagatgtcgtcagttctagccctctttcttgatgccatctgcaaataaaggaaccaaacagctaaacaggacataagttgatcaaattcaaaaactgaaaaatagaactgataaaggcactgacggcttagcgagacatggtccgctttgttggccttcanaaaannaaaaatactaccgcttagcgacacatg

SEQ ID NO: 79998 - DNA, 410 bp, Glycine max
ggaccttaagaaccgctgctcagctttggtcaaaggttttgaagattgtgggatgaaaaaactctatccatagtgggttaaggtcaccttatgatttccagtgtgcccatagaactctctaagatctgtccatccagcatatagagttggactcaccatatcttggttatatgtgacagagtgcatgttgccactaaagtgtagcagatgccaagtagactctagttcatcctttcatcttatataaaatgatctactgacttcaccgtaagggtacatttaacaaacaaaataatatgagcaaaagtggtatatcatgtcatgtttatttgataatagtggtgaaatttctaacctaatttataacatgaacaaaggtgaacatttcttctactttctttggtaattat

SEQ ID NO: 79999 - DNA, 385 bp, Glycine max
atcttgcttctacagtatggtgaaaaaataatgagaataaaatgatgcttcttccattcttacattagtaaaaaatggacaatcatctacccaaatgatacttgatctccttcccagaacaataatttcttatgcaacataaaaagcacacattggctagaatgaatccaatctcttcatagaagaattcaataggttggattagcatgcactataaaaaaacgttgaatacatggattctggcccaatacggattgtggctaccaaaactcacaatgttgtagtacctcctacaatgaaattggttatcttgatattcatggggatcaaatacatctaccttttaccaatttgcctcaccgtggatagaggcatgatgtttaaa

SEQ ID NO: 80000 - DNA, 420 bp, Glycine max
  unsure (1)..(420): unsure at all n locations
atcctcttagtcacctgcggcatgcaagctttgtaagtattgntantataatatgcttgttccattaagcttctaatgtctctagaggttacttcctcgttgacatcttttgttttgaatggaattgccataacaggtttgttgttactgtctttgatattaggttgatgatattgcgttgtgggaagtaattccgattggattaacttaccattcttcacttgccaatttgttatgacatttgttgatggatcacctatgatgtcttgttttcaaggggaatctatatcctttctgatggcataagcatgaaaccaatcaaagataaggacatttattttgactctttcgacaaaatcggagaacttgtcttggatttgttttctgtttgacccttgttaagttggaaaaacacatctc

SEQ ID NO: 80001 - DNA, 119 bp, Glycine max
  unsure (1)..(119): unsure at all n locations
ggacccgcagttaccgcagcagcaactgaggctgaggtttgtctgtcttactcatgataccaggaacagtattaacaggaacgactatacaaatattgaatacgcgttngaactgataa

SEQ ID NO: 80002 - DNA, 401 bp, Glycine max
  unsure (1)..(401): unsure at all n locations
agctaacacttttgtgntttgttatggggtttcccacaatataacaatagaatcacaatttcattgtcatgtttggggtggaaaaaataatgaaatcacgattctgttgtgtataaaaagggacaaaaactaatttgtaatgaaattacgatctcgttgtgcattttgtatatcatcaatgtgatcacttggagaggatatttttaagatataaaagtttcaatcccttgatagatgccaagcgcaattatcatgggctaatacttacttctacaaatgtgtaaaattgtgaattgctttatttggaaattatctaccaattgtttgttttaatttaaatataaatgtaaaacatgggaatgatggatacaaattagacttatcacttttctactgtttat

SEQ ID NO: 80003 - DNA, 416 bp, Glycine max
agcttatgcttaatttaagagaataacatatctaatgggatgaatatctttcatgaaagcatgaatgacaaatttaagcttaacttacaggataaacaatttaccttaaaccactttaaactttgaattacttgaaataaattatagatctatcataatctttgaaaaactttttaattattatgataattttaatataatttttttcttactatcttttgacataattaatttaatgaacttttttatctaatcaaattgtatttttctcttaattaattagtttactgttaattaaattaaataaattaaaataattcacaattttgtttcaattttatcccatgatagatccacttatttcaaccaattagaggaagtggatcccttgcattatatatatatatatatatata

SEQ ID NO: 80004 - DNA, 380 bp, Glycine max
tacaaacacagcatggaagtttctatatttgttcgaagtatgatcgacctttgatgcattccacacatatctgacgtttactccccttaatgttgtgtttagatggcacacctgtcatgcgccgatgacatctactctgtgagacatgacttaccccagatagggtcgatcataaggtcctcatttacaagtcatgcctctagtttccagagagtctcaagcgtcattcctgtgccacacgaagtttctaactacgccggcgaagctgctcaacgggctgtttttcacaagctacccccctttgcaaggaatgcttcatctttgtttgatagctattatggcctccccacttgttgttgatgttggaaaccttggagctt

SEQ ID NO: 80005 - DNA, 248 bp, Glycine max
  unsure (1)..(248): unsure at all n locations
agcttatgctgcaaacatctacaacagacctttctaacctcaacagcaaaatcagccacaatagaataattatgacctctccagcaacaggtacaatcccggatggaggaatcatcccaaccttagatggtcaaatccttcacaacagcagcaacaacaacaacaacagacttatttttaaaatgctgctggcccaagcagaccatacgttcctncaccaatccagcagcaacaacaacaaccgcccc

SEQ ID NO: 80006 - DNA, 457 bp, Glycine max
  unsure (1)..(457): unsure at all n locations
tccaatgtacaccaccatcacataggactntatctataaatgattctggacattgctcanaaagacatatagtcaatgtttcttccatccagaagaaattgatgtcatcttatgacaatcgaaaaaatagaacaactgcttctacatccacatgccaagccagtaatcgttattccaatatgacacagtctcacattcatataggtaatttttattggtatgctattatcatatatctacatacacacattttatttattattacatccttttcaaatttaattctacagtcaacttatatataggatgtcaaattgtctgtttattatgcagataaacatcagacaacaactaacactacacaggataatcaaattgttatgatcaatttatttatataactgcctggaccacccctgcacattntgtattcgtgcttacactcctatacgatttc

SEQ ID NO: 80007 - DNA, 400 bp, Glycine max
agcttctctcctgtcccgagactccatagcttataaagagtgtttgccttcaggatctgattcatggttcaggcccatggacttcgcaagaatccattgctgcttggcctcttcgcagtcttcaaactgattttcttcttggttaatagtcccctcaactgcctgtaacttagtggtatttgggccttcagaagacgcatcatttaaaccacccatagtattatcctccttggagctattagcttgttcaggttccagctcaaggagacaagctttagctaggccgtgtctctgcctcacgtacactttaaggaatagtccagaatccctttttgttgactgggccaagactggttgaaattcatatttgtacccctctgtatttttattgtgcccggat

SEQ ID NO: 80008 - DNA, 427 bp, Glycine max
  unsure (1)..(427): unsure at all n locations
gagattataaatatgtgaccattgttgatttntaaaaaaataatcatcaatcatctctgaatcatctatctttcaatcttttttcaacatcatctctcaacatctttcaatcaatctttcaatatctttctacaaaattttctgattcatttctcttcatctttctaaaagttttttatcaacactttcacttccaagaaaagttctttgttcaaaaacttgcgctattcatctttttcattcttttctccctttgccaaaagaacgaaggactaaccgcttgaattcttttgtgtctctcttctcccttacaaaagattcaaaggactaaccgcctgagaattctttgtcttaacacattggagggtacatcctttgtggtacaagtagagggtacatctacttggtgatntgtacattgagaaaa

SEQ ID NO: 80009 - DNA, 412 bp, Glycine max
  unsure (1)..(412): unsure at all n locations
agcttgccgcccagctcgcccaggcgagctttggtgcttcctccagaagaaacaaccttctggaggaatcttttggagggcccaagtggacctggttgctatttacacccccctttttactaaatgcacccccttatatatttttctgtaattctttttccgtaacgttacgaaactttacgaatttcgtaacgatacttattttcctttccgcaagggtacgaatccttacggatttatgtatttactctttttggctttcaaagaagttacggaaactcacggattgcgcaaaaacacctcttttcgatttccgccacattacggaatttcacggattacgcaagcctgctttcttttggatttctgagacgtctcgggacttcatttatngcatgtcatcaatatataa

SEQ ID NO: 80010 - DNA, 402 bp, Glycine max
tcttcgccggtgaaaggatcaaagtgattcctattttgaggttatattgaccatcctgctcttatgaatgtgaaaactatggcaaacgaagaggatgagaatgaatgagaaacccatgttgcgactgtcattcctacatggccaaacttcccaccagcccaacaatgtcattactcaggcaataacaacccttctccttacctaccacccagttatccacaaaggtcatccctatatcaaacacaaaacccacctaccacaacaccaatgctaaacaccacctttatcacgaaccaaaacaccatccaaggaaggaattttgcatcaaaaaagacttatagaattcaccccaattctggtgtcctatgctaacttgctcccttatctacttgataatgcaat

SEQ ID NO: 80011 - DNA, 419 bp, Glycine max
  unsure (1)..(419): unsure at all n locations
agcttgccacccagctcgttcaggcgagcttggttgcttcctccagaagcaacaaccttttggaggaatcttctggagggcccaantgggcttggttgctatttgcacccccatatttactaaatacatcccttgtctttatttggcaattctttttttgtaaagttacagaaacttactgatttcgcaacaatacttgtattctttctgtaatgttacggaaccttgcggattacataatcatccacttttttgacttacggaatgttacggaaccttactaatcgtgcaatgatgctttcttttgatctccggcgtgtcacagaaccttaccgatagtgcatcaataccttcttttgatttcggcgtgacccggacgtcacaaattgtctaatgatgggcgccaatcacctcaccac

SEQ ID NO: 80012 - DNA, 370 bp, Glycine max
cactcagctgaagagcccggtagtgaaaataagtgcaagaccatttttcttttattctgaagagagtatgacgaactaacggacgtctatatggacaccgatgaaggcctggaatgaaaaaccaacaaagccccataggaataacacgaccaaaaccagtattgaggggctatatagggcagcaattgtgatctcaaactccgattacgagaaaggaatcataacgggtcataggcatgatctagaaagacgagctagaggcttgccttatggcgcaaagaaattctgccagcagttaaggtgacaccgaaaggaatatgtgggccatcatctattagtgcacagagaagcataatatagcggcgagtca

SEQ ID NO: 80013 - DNA, 146 bp, Glycine max
acatcaacattcttggcttgaagttgccctgtcactctcaacctaataaagcctcatgcagttccttctcactcttgggatgtaaatatgaaccctgtaaagtgtttttttcgtgtgtgtgtaatctggaaagaagaaaggatgat

SEQ ID NO: 80014 - DNA, 408 bp, Glycine max
agctaaacatcattttagcgtctcgttatattacgggactcaatcaaacatacgagaaagaagttattgtctgttgaatatgctctgagcttcaacaatcaatttctagcgtctcgatatattacaagactcaatcaaacatccgagtaaatagttattgccgtttgaattggctctgagggtcaaaattcaatttccagcgtctcattatattatgggactcaatcatacatccgagtaaaaagttattggcgcttgaataggctcataggttcaacattcaatttctagcgtctcgatatattacgggactcaatcagacatccgagtaaaaagctattgtcgtttgaattggctcagagctttaacattcaatttcgagcggcttgatatattatcggactcaat

SEQ ID NO: 80015 - DNA, 449 bp, Glycine max
gcttgactcagacccaagagaaagaaatatgggccatttttggtttctttgagacccatcatcaatcatctctgaatcatctatctgtcaatcctctgcccacatcatctctcaacatccttcaatcaatcatgtcaatatcgatctacaaaattatctgagacactcctcttcatatgtctaaaagctgagtatcatcactcgcacttccaagaaaagtcctttgttcaaaaacttgcgctattcatctttttcattcttttctccctttggcaaaagaacgaaggactaaccgcttgaactcttttgtgtcactgcttgcccttacaaaagaatcaaaggactcaccgcctgagaattgtttgtcttaacacattggagggtacatactttgtggtacaagtggagggtgcatctacttggtgattgttacattgagaaaaagagag

SEQ ID NO: 80016 - DNA, 428 bp, Glycine max
agcttgtagggttaaagtctcacgattgtcttgtgctgatgcaacaattgttagtcgtggctatacgagacatcttgccaaacaaagtcaggttagcgataactcgcctgtgctttttcttccatgctatatgtagcaaagtcattgatccagtcaagtttgatgagttagaaaatgaggccgtaattatactgtgtcagttggatatgtattttccccctgctttctttgacatcatgattcacttgattgtgcatctggtcagagaaatcaaatgttgtggtcctgtttatctacgatggatgtacccgcgtgagcgatacatgaagatcttaaaagggtatgctaagaatctatatcgtccaaaagcatctatggtagagaggtacattgtagaagaagccattgaattttgtcagaatacttag

SEQ ID NO: 80017 - DNA, 449 bp, Glycine max
  unsure (1)..(449): unsure at all n locations
ttttattntcagtagatgaagatgaattcgnggtcaccttatggactcctctaaggacaataacatcatttcttgcactgaattcttgggagttggaagccatcttctcaatcaaattcctagcctcagtaggagtcatatcaccaagagctccaccactggcagcatcaatcatactcttctccatgttgctaagnctnttatagaaatattgaagaaggagttgctcagaaatctggtggtgaggacagcttgcacacaatttcttgaatctttcccagtactcatacaagctctctccactaagttgcctgatgcctaaaatgtcctttctgatggaagtggtcctagatgcagggaagaatttctccaagaaaccctcttaaggtcatcctagctaanaatggacctgggagcaaggtagtatagccaatcttttgccactccct

SEQ ID NO: 80018 - DNA, 426 bp, Glycine max
  unsure (1)..(426): unsure at all n locations
agcttgatcaaaacaattatctaatcattcctatccactcatattatacaattgctcattcaaatcattctcaaacactcatttcatgcaaaacaatccactacatatcattttcaatcaattcattgttcaaacacgcttttggtacaaacaaacaactcaaagtgctgaagattatataattgaaatttaaaaaaattgaaatataaaatctgaaattaaaatgactgaacataaatcataaaataattgaaaataaactaanatgttcgagatgcacaanattaaatgtcctgctcctgtggttgctcctatgcatgctcattaagggccaacacctgagcagctggtgcagatggtgtggcataatcaagtatgggtgctaaggatggctttgggatctggnttgtaaaacatccttctctt

SEQ ID NO: 80019 - DNA, 344 bp, Glycine max
gagtatgacgaactaacggacttctatatggacaccgatgaaggcttgtaatgaaaaaccaacaatgcccctaatgaataacactgaccaaaacaagctttgatgggctttataggacaactattgtgtgctcaaactacaaacacgagaaaggaatcaacacgggacatacgcatgatctggaaagacaatctaaaggcttgccttaagcccaaaagaaatacgtaccagcagttaatgtgacactgaaagaaatatgcgggccatcatcttttatttcaaagagaatctcaatatatcggcgaatcactaccaaaggctatatgatgtgtacgccaatatat

SEQ ID NO: 80020 - DNA, 345 bp, Glycine max
  unsure (1)..(345): unsure at all n locations
agcttccttttagtgtgtcacgcttaanacctagctcgatggtggtgcgagcctttgatggtactcggcaagaagtgatgggggaaatcgacattcccattcatattggcccccacacttgcaacgtggtgtttcaggtagtggatataaatcccgcctatagctgcctcttgggaagaccttggattcatgcgctgggagtagtcccttctacgcttcaccagaaattgaagttcgcagtgggtggacttttaatgatagtgtccggtgaagaggatatgttagtgagcttcccttcctctgccccatacgtagaagcggcggaagaatcattggaaatggctt

SEQ ID NO: 80021 - DNA, 465 bp, Glycine max
  unsure (1)..(465): unsure at all n locations
ggacactatgaaactaagctttctgttgaatcaacctgtctatagactaacaattcttattgcaagttcacattcttgttctttctttgtctaacatacatactcgctcaaacttatgaaaagaaacacaaactccatcataatcatgcattcaatccaaaatcaattcataacaccaattttcacaaaaagataaaagtgtttcactgcataatcatcaaagtcaagttaaactattccatatgcttcaaaacaaacataccaactattcacaaaaagtataagtatataattataaacaaaaaccaaaattactcanaacaatgtactaaaaccaatatagttataattattatccaacaagcaaaataatcaggaatntaaaagtccagagatagatcctgggtatcttcagtctaagcatcctnctcatttgtcagatgggaaaacaggggaatcagagag

SEQ ID NO: 80022 - DNA, 390 bp, Glycine max
agcttctcaactcacaccgtgaactcctccttttagcttccgcacagcctagagctcccaccttcatccagagggaggccccccaagctccggctccaaccacgactcgcacagccggcaatgcccactttggtgccggttccaacgtgatgaggaactttcccccgaggccaattccagaattcaccccgatcccaatgacgtacgaagacctcttgtcgtccctcatcaccaaccagatggttgtgatatctcctgggaagatctaccaacctcctttcccaaagtggtatgaccctaacacaacttgcgcataccatgggaaaactacgggccactctaccgaaaaatgcctggcccttatatacaaggtccaacatttgatagatg

SEQ ID NO: 80023 - DNA, 356 bp, Glycine max
ctttacaaatacataatatcatgagaaagaatccaaaatatttatgcttctacaaattaaaattgtctttgacgctttttcatattttgaaaatattctgatttttattgtcaattttataaaaatttaaaatgatagtgtagtaaaattagtttcaatttattctttttttttccttttttttttttttacattcatttaaaaaagtatcttatgggacaatacttacttttttatgggagaatttttttttcattacacatacaaatgaaaaaaaaaatcttgtggggggggggggggggtttttcactcatctactacctaccttcttatctgtcttgaacatgctttttttt

SEQ ID NO: 80024 - DNA, 378 bp, Glycine max
agcttgagcttgttggtcacgttttcgacacatatatactctcttagatccagatccagcacctgcagtgttcagaaaaaggccacatgtttatatgaaacataacacattttgcaggaagaaatagagtaatgaattggtgatcgtgggtggcaaccatcctttccaaagaaatctccccaggaagagtcttcttgaattaccatggaaaaacaaatctatagcctaaagtacctggcctaatcctctacatatatctctactatccttcaggagtctacacatatcacttaatattctgcccgcggatagttatagcaccttattatatatccctcctttttcttaaatggtaataatcgaagtttgtataaatta

SEQ ID NO: 80025 - DNA, 440 bp, Glycine max
  unsure (1)..(440): unsure at all n locations
tgtgcaaagttntggtgcaacatattttgacattatcgctacaatcancaaaccactaattgatggaagtagtggttaaacaacatgatgatgttagaacaatctattttttcaatattgagtttcacaatgaatatatatatagcttgtagtaggtatctaaccttcctatatttggctaacttgatgtcagatatggactatgtcaagctcagtcggagaagatatatcttggcctgaagtattagacaatgagtttcgaagttcacaaatattagaaaaagattaaatttagacttattctatagaactagagagtgtaaatttaattagaatcaaatatttatacatgataaaataaaaaatgaatacctacccttcatgaggtatgcgttcaaaagttggttgtagaccgacaacaccacaaagagcagctagca

SEQ ID NO: 80026 - DNA, 431 bp, Glycine max
  unsure (1)..(431): unsure at all n locations
taactaaaaccatntacgaacnaagatatattctattgcttattgctccgacanaactacaggcactgctattctggtaacatttcctacacaatatttgcgccaccaagctagaaacctggtttaaatataactggtattatattagtacattgttagccttcaataataaaatggatataattaacccttgagatgttgatcctatttttacctaatcgtctgctaaattaagacgcacaggatctctacttttgagtgggttcacattaatattgtttgaattgtcaaagcatatcgacaatgatccgctcgatatgcgtggggagagaaaagaaagtcgaaaaagatatattactcttgcctttacgccttacatataaccgactaattggaattgataaatactcttcaccgtttctttttattat

SEQ ID NO: 80027 - DNA, 406 bp, Glycine max
  unsure (1)..(406): unsure at all n locations
tgaataataaccaaattgggctcctttgagcccatcagacaaaactctattgaaataaattacgctacttgaactcacttcacacaaataatgtgcggactaagtccaatttacaaacgttcataccctttctatatgaagaacaatgatgatgaaattcgttntagttaaaataaatgatagaaaaaaaaaaagagtctactttctcggcacaattagcaagtcttgggttggtctcctctgcaccttcatcaccatttttcaaacttgcactccaagatactgttgtcaaaaaaatagctaaacatttgaatcagagactattgacaggtcagaaatgagaaatggctagtaatattgatactgaaagtatgttacgggctcaaacataaataatactgtattt

SEQ ID NO: 80028 - DNA, 434 bp, Glycine max
  unsure (1)..(434): unsure at all n locations
agcttgtcatatgcgactttgaataggttatgctctcgaggttttccatcattggtaactgcctcacaataaatttgttgacatgaaataaaaatgagtaggcatttcactagaaaaacttatgcataagtttatgtggaagcaaagctcccatgatgattcaccaagatgttttgatgatgccaacgctcatagagttgtttcaagattaaagaatcaagcattcaagattccactcaaagattcaagaatcaaatgaagaaatcaagaagcgtcaagccaagtcaaagtaggtagtaaaaagtatttttaaaaaaaaacatcaaatagcacactttttggtttaaaaaggattntctgaaatcttctaaattaccagagtttatactttctgggtatcgattaccattgtggttgtaatcgattaccaatga

SEQ ID NO: 80029 - DNA, 398 bp, Glycine max
  unsure (1)..(398): unsure at all n locations
ctcagctctctctacactggcaaactctgcgcgactgtcaatatagtatttgacaacgattgagccatnagtgtcggaggcgcacatactcactgatgctgccccatacagcttcaaggaactagttatagccatgttcatgcttacaggccctcatgggtactggatccagggctattgggagggccatatcgatgccccttacatcataatacctctctccaaactatgatgggcacagaatcgaacttctgattgactacatgggcgaactcaagatccgccataaagggttgcacttaatgcctctcctccagagatttagcacgtcccactaatgacgccttcagaaatgcgagccaaccctactctgatgtgatgacgatgagccactgacg

SEQ ID NO: 80030 - DNA, 277 bp, Glycine max
agcttagctacacacacacttctctaatatctaagctcacctccttgagaagcttccttgagaagattcctaaagaatcaagagcttagctacacaccccctataatagctaagctcacccccatgaaaaaatacgtgaaaatacaaaaaatttcctactacaaagactactcaaaatgcctcgaaatacaaggctaaaaccctataatactataatgggcaaaatacatggtcctaccaaagaaaaacctattctaatatttacaaaaataagtgg

SEQ ID NO: 80031 - DNA, 406 bp, Glycine max
  unsure (1)..(406): unsure at all n locations
gttttcttagcaacttgagatcttaacaaaaacacttggtaagttgccaacaaaactgtctattggtcaacctacacattcttcttgtttgcaggttgcaggttgccagttgtaccatcttgggtgaaggtcatgaaacaggaaaatgtattcccagtgaagaacacactcaagaagttcactatatgggaaatcaacagagacaaggatatactcaaggaggattntcaggcttctagcagggtccttataaccaacaaggacagtggatatcacacccttgcaatcaattcaacaatgaccagngtggaccttctaacaggcgaatccaacaagggtctaatatctttcagaggactactaagctggaggcgactntgactcagtttatgtaggtaacaatgtc

SEQ ID NO: 80032 - DNA, 404 bp, Glycine max
  unsure (1)..(404): unsure at all n locations
agcntttatataagctgatctcatttatcattaaacacaagttgagttttattcataaaattagagattatctctcttatcttaatgagagtgattctcctaaattcttgagtgattcaagaacaccttggctgtatcaaaggactttcacaacctttgtgtgttgccctctctggaaggagtgattctttccttcctttcatcatcacccttgttctttcaaaccacaagtgcagaaaatccacctctgcccacaattatctcgtggccataactgccattttacgcactcaaattaagtgattcttgagcctaaattgaatttcaaaacgagacctttctcctcgttgtggaatcatctcatgtggagccctgtagcttcattattggcattctatatttct

SEQ ID NO: 80033 - DNA, 318 bp, Glycine max
ctcaaatatatggggcaattctgatttgttttcatgccagaataagtcgaattaagggttggtatgagatggccctaggcctataacgcattttgaaaccataagatatgccacattgaccctgaactactgctattgatgcctcaacgcgcgcccaccaagtggtcggagaaatgcctcaatggcatcagcgcgcgactattgtaacgagacaacccatggggtattccggtatgcgcacattcctactactaaggaatatggactccttcccgagaaaggcaagagtaactgcccacatatatcctatgcctagaa

SEQ ID NO: 80034 - DNA, 308 bp, Glycine max
gactaccatggtcaatacactttagtgacgaggagtgtggtgattccatgcacacaataaataattgccaagcttggtggctccaccaatcttatcacccgtgatgacaccgtgatgaatgacaccatttcgaaagagaggcgctaagcttatacaattcaaacccttattttatgtcataccagacttacattagtgggggtaagggcgctactcaaaatgttctagaaaaggggtccgaatatacctatacatatcaagattgtacgaaatgctaccgattgagctgcctggttctttaaattacg

SEQ ID NO: 80035 - DNA, 439 bp, Glycine max
  unsure (1)..(439): unsure at all n locations
tcattatgtctccagagtcatacttcaggcgtcttaagcattcttttgtctgaccaaaatatgagtatatataggtgttccttacattcctgcactctttttatttacatttgtttacctgtactacctggaatatgtatgtggacagaataaattgcaagaagggaattcatctgaattaattgtgttttttacttacgctatacttaagccatgtaccaatacctttgaatatgcgtggaaaatattcatctgattcaaatatgtctaatttacataaagatcatgacgttgttacaccagctattacaatgcatttttcttcccttgcagcctatctatctagacatgtacgagtaaatgcataggcgagcanatgaggcccctaaataatttatcggatatggaatataaatgtcgtgaagccaattcagtctat

SEQ ID NO: 80036 - DNA, 419 bp, Glycine max
agcttataagaacaaaattgtctcaatcatttccaaatatgcatgtgaattacgaagcatcaacaagaatcaagccaaggctattgtgcaagcaatcaatggggcataacacaccaattgattatgatgatggatggctcaaattctcacaaaggtaaactcatcactttcaaattgagctttcaaaactatcatgacatgtagaggagaatcaaggatttcaagtcacagaatgtcaagaacttttattttcaaaacaactacccatttcttgaacatattctataattcaaagaaaaacatgcaaagtcatacatgcacacaaaattgacccaaaatattaaactaaaaatccgacgaaactaacaacattaacaatataacacaactaacaaattaacaaaaccaacaatactagc

SEQ ID NO: 80037 - DNA, 390 bp, Glycine max
ctaactctgcatcatcagattggcatgcaacatttctacaagattattggacttccacaattaatctcactattacatatgtttttaagttttattatcaccaaggtgcaggtagtcatcttttattggaagcattaaataaaaacattacccatcatgttaaatacaacaaattatttaaggaacaatagcatcaatatgatctcaaccatggcgaaactaatgttttcaaagaaaaagtatatctcaatgcacgtcttatgcccactaaataggtactacataagagatgtgttagaatggcatgcattatctttctgaggtttatatggatgacagattgaccaatattatttacactgcgagggaaataatcacaaaaagatcaaa

SEQ ID NO: 80038 - DNA, 427 bp, Glycine max
  unsure (1)..(427): unsure at all n locations
agctttangagaaaccattataactaaggtatttcctaaacaaaaatcaattgaggaagcttcgccgagtgtccccattgaaaaacctttattcaaacctttcaaagttagtgataaggctaaacgaaaaattagggaacttagaaaaactaaatccttaattgaaggcgtaggtgacaatcatagcgaattactaaacaagattagtagtttgcttaaggtcattccagatactccccaagcttcggaaaatacttccaaaatggtaacaagaagtacctccaaattaattaatgttattaatgaagatagtgaccaaaacttatataacacaactgagataggatcagtgtcagaatagaatataaatccattaaactccaaacactggaaaacccccttcaattatattatcaacgtccaactg

SEQ ID NO: 80039 - DNA, 444 bp, Glycine max
tgaatacagatccagtgcactcagcataatcatgttctatcacaatgttccctacaatctctgggggattgagtaactaaaaagtaatgacaaaattgattagtttattaattaatggatgcctttttttatcggttaatgaatatgtacttgttgcatgcattactctaagtaagttggcataggaaaaaattaattaaaaagaagcacactcattactctaagtaataattatgtccacttcaagatggagttggatagaattacggaaaacaaagtatgaaaagatcaagagaaaataaagtgatggatataatattgtaatgaaaaaattaaaaagagaaaataatgcacataatatgaaagtgtaaatagaagtatcagggttctaaggatattaaggcccacgagttttgtatatattagtcatattaaataaccttg

SEQ ID NO: 80040 - DNA, 432 bp, Glycine max
  unsure (1)..(432): unsure at all n locations
agcttcctctctaagcttcttatccaaggctttctcttggtggtgaagctccttcttccatggcttattccctagtgtttggcgcctcctctcacctcttcttctttatcttctgctgcatctccatggtggaaaatcaccattgaaggacctcattgaagctgaaatatccagccttcatagaagcttcacaagcaagcttccatcaagtggtaatcaaagcacaagagcttcaagtaggtgctccttaaacctccattaatttttagctttaccttctcctccattgttgtttcctcatttttctctatgtatctccttacatgtcttgagataaatgttgntaacataattctttagagattccactgattaaacttgctatagaagctaaatttgattntctatgggtcaaatttcttgttcttgttc

SEQ ID NO: 80041 - DNA, 433 bp, Glycine max
  unsure (1)..(433): unsure at all n locations
ctgttngaaggatagattctcattatacanagcttgcatgttctagctcagcaaaggccaattatgagcgtagagcagttcattgagaaggttgcctggcctggggctcgaccttcttttatggggcataatgaaagttttacagcccaaacacctcaacagcatgagccagaaccagaaaatgatcactcatctgaagccatcatctctggagctgttgattgtaaaaaaagaagattagagacgagatccaatgaggctgctcatcatgaaccaatgccagcgtcagttgatgcaccatttccaggagtggattcatctccacctcaacatgtagtagactcttccattcctgtcttagagatacatgagggccaaacccataccagtttgcctgtggacacttctcctcccgctgctccagtatggaata

SEQ ID NO: 80042 - DNA, 433 bp, Glycine max
agcttaacaaccctgtgatctattatggaatatttctatccctatcacatagcttacctcacccatatctttcacttcaaagtttctagagagaaatttcttagtttcatgaagaagatcaagatcattagttgcatgcaagatatcatcaatatacagaattagaaaataaccttactcccactgaccttcagatacatataccgataagtagtattttccttaaatctaaaggaaacaatggtatcattaaacctcaaataccattggcgggaagtttgctttaagactgtatattgatttctttagtttgcacatcatgtgtttctttccttcaactgagaaccccattggttgggccatataaacattctactctaaatctttatttagaaagtcgggtttcacatccatgtgatgtagctccaagtca

SEQ ID NO: 80043 - DNA, 405 bp, Glycine max
atccaagatgttaagaacttcctacaaactgtcctaagtttgttcccaaagacctattaacagcttcccgttgcccatctgtatgtgggtgacatgtggttgaaaataacaatttattgcccaactagctccatcaagtcctacaataatggcttacgaacttagagtccctatcactaacaatgctccttggcaaaccatggagtctcacaatctgcttgaaatacaaatcatccacatgggaagcatcatcaacttttttcatggaataaaatgagccattttagaaaacctatcaccaaccacaaaaatggaatctctaccattagcttgttttggcagccccacaacaaaatccatggataaatcaatctaatgatacttcggaattggccatggagtata

SEQ ID NO: 80044 - DNA, 410 bp, Glycine max
  unsure (1)..(410): unsure at all n locations
agcnttcttcattggttgttatgaatgtaatttaaaatgttgcccatgattttttgtataagcaaaaagttgctcatgttaatatgggcatgagaggattgaaccttcatatttaccacaggttaggtacatttattggagaacatcaggaaaaatagatagaataagcaatttgctttaaataaccaaagaacacaaagttgtgccaggaaattccgatgaccacacattttaatgggagaaacttaactctagtatcattatattgaaattctttttacttggttntgcggtacaatgcttcaaataattcatctcctcctgatgttggattaggtttccaaaatgcttcctatcttgtgcttggttgaattcacgtctttcaaaattttcgttgcattatgaaacat

SEQ ID NO: 80045 - DNA, 407 bp, Glycine max
  unsure (1)..(407): unsure at all n locations
cttttcatgcccaactctcttgagtgtcatttgtattgantgttgttttgactgtttcattttaggctctatattttcatatgtacatcatgcatcatcatggaggagtaagaagattgttgctaaagttataaacttctacagcgcataagaatcattgttttaattgattacaagactaatcataattgattacacaagtgtgtatagcttccagagagattcttgtatcgggttaatcaattactctattcaggttagacaatgactgggtttttaggagtctttgctctaatcgattaccagatgattgtaaatgattactttgtccttaaaattattgctagaagtaatcaagaacactttaatcgattacatcaagaatctaatcgattatattgttcttg

SEQ ID NO: 80046 - DNA, 182 bp, Glycine max
atgcattttctacacagctagatctgtacacctatgaatgtggaaacttttgctgtaattttgatacacatgaatgtgcaaaactagaaaaattgcccctgactgaaagtccatccacaacgaatttgactagacactatgggtaaaggttacactatgatattgagcacatggataaatat

SEQ ID NO: 80047 - DNA, 412 bp, Glycine max
cagcttgtgacctattgaataactcaagagcttccattgtgcaattttgagcggctcgatatattatgcgccttaatcggacctccgagtgaaaagttatgaccatttgaataactcaagagcttgcattgttcaatttcgagcgtctcgatatcttatgcgtctgaatctgacctccgtgtgaaaagttatgaccatttgaatttttcgagagctttcgttgtcaatttcgagcgttttgatatcttatgcgcctgaatctgacctctgagtgaaaaagtatgaccatttgaatatactaagagcttccattgttcaattacgagcggctcaatatattatgcgcctgatcagacctccgagtgaaaagtattaccatttgaattgctcaagagcttccattgttcatttg

SEQ ID NO: 80048 - DNA, 426 bp, Glycine max
tcttttggaccttgaacaagcaatcaactcctcttacagatccatgccatgtgctcgcgactggtccctttcttcccttcgcaacttgagttcactattgctaccccatagagctccgcgaaatttgtttcggccatactcttccttgcgagccctcttggtctcttgttcaagggctcttgcggtaattgcattctctttccataacccgacacactccttccgaacgtgtgtagcggccaacttgaacttctccttggcaagtgttgcctttcctaactcgcttttgagagcttggacttcctcgtcctcttccggtgcttcaaaattctcttcgctgacgacttttaacttggcgagccaatctaaacctcgtatgcgaactttcagccattcgtggtacccaccaatgatgccattacgaac

SEQ ID NO: 80049 - DNA, 426 bp, Glycine max
  unsure (1)..(426): unsure at all n locations
agcttcanatggacatcgcttcatcttagttttcattgactactttgcttcatacactagtgtgacgaggagtgtggtgattagattcatcaaaaaagagataatttgccgatatgggttgcccaggaaaattatcaccgataatgccaccaatctgaataacaagataatgaaggagatgtgtgaggatttaaaaatccaacaccataattctatgccttacaagcctaagatgaatggggcaagtgaggctactaataaaaatatcaagaaaatagttcagaagatgaccatgtcatacaaggattggcacgagatgcttccctttgaattgcatggttattgaacttcggtgcgcacatctactggggcaacctgtcgcaacctacccttttgcgggcgagcgatgcgaggctcacgggtgcg

SEQ ID NO: 80050 - DNA, 395 bp, Glycine max
  unsure (1)..(395): unsure at all n locations
gatgantaccaaagatgatgaccaaggtgatgaccaaaagctcaaaggtcaatcaaagaatgagtttaagatattccagatagaatcaagaacacttcaagattcaagagaaaagttgatttccagaatcaagaatcaagattcaagagatcaagattcaagactcaagattcaagaatcaagagaaggcgtaatcaagataagtatgaaaagggtttctcaaaaattgagtagcacatggatttttctcaaaacatgtttaccaaagagtttttactctctggtaatcgattaccagattgttgtaatggtaatcgattaccagtagcaaaatggatttgaaaagttttcatatgaattacaacgttccaattgatttcaaagttggtatcgat

SEQ ID NO: 80051 - DNA, 416 bp, Glycine max
agcttctggaggaagcctcttaatgaagcttctagagaaagttacatggagctgtctcggtaaaaacgatgcccagcgtttgttaaccgttggatcttctcaaaatttggtctacaactccacaagacacttttccattatctgaccgttgggatcttttagaagatgtctgtagtgtgctcgaagcctcttaatgaagcttctggaggaagcctcttaatgaagcttctagagaaaagtacatgaagctgcctcggtagaaacgctgcccagccttctttaaccgttggatcttatagaaatttggttttcaacttcacaagacactttaccatgatttaatcgttgggatctttgagaaaatatctggagtatgctataagctttcgttcccgagagcatatcttatttaagca

SEQ ID NO: 80052 - DNA, 460 bp, Glycine max
  unsure (1)..(460): unsure at all n locations
ctttgtcatcacctaananatcaattttaaggtccaacgccttgaaatggtcctcttcgcttttattggctaaacgtggattttaaagacctaaaaccaacgcataagctttgtcacttctttaaaaaaaaaaccaagagatcattaatggtcaaatcccttaatgttgtctctcctttcaaaaaaatcgaaatatcgtttaatggtccaacgccttaaatgactcttccgttcaataaaaatatatcttgcaaaaaaaggataaaaacaatttaaccaacgtttagttctcgaagaactacgtaggtctgatttccttaccacaattgaggaatacgtaggagcaagggaaacacccttgtcaaccacaaaaagataaaaaaatataaaaggcaccaaaagacataaagacgtataagggaacataaaacaaattgaagtcatgtttgcacactggatt

SEQ ID NO: 80053 - DNA, 396 bp, Glycine max
agcttcaccggatgatgccgatcgaacattttctaatctacatcatccaattgctattcagggattgaatataataaacaatggccggcgtcggtcgttatatggccccgactgatatctttcagccgacattgcgcaatttcttttacaaacgctggccgataatgtttttttatttacggaagaggaacgtttttgttctggagttgcctaaaaaatttacaacgtatgacggctaggtttttccgtgcgagctcaaccgagggttcgttcccaccgacattggcatgttgttcttctcatttacgaggataagaaaacgttcgcccaccccggcaaaaacaaaaaaaaaaacattattcacggaaattgatcgaaaaaaatgatagcgggcgt

SEQ ID NO: 80054 - DNA, 465 bp, Glycine max
  unsure (1)..(465): unsure at all n locations
ggacctataaaactcagcttgggtattgactgaaataagctgccagntgattgtcttcaaatgcaccatatggccttcaaactcagcaacagtagtcgactttgcacattgccacacaattcctttaagttcattgcttaataaaattttttcaaagattcaaggcacaaaatctatgaagtgcacccgacatgactttctgtaaagatggaataagtccctgaaaaaatacagcagtttagtaaatatttcaaagtagtccctaacttatgtcattaactgcaattaaatccctaacttatgataatatatgcaaatcaaaccatgtcatactctttgcatgtctgacatgaaattccacccattctgtatgtaatccccaagatcttcatgcaacanagttaaaaacaatttccaattgtctttgttctccacatccaccacaacatatgccataacatagat

SEQ ID NO: 80055 - DNA, 425 bp, Glycine max
  unsure (1)..(425): unsure at all n locations
cgcaagcttgcatgcacaaacataatcctngaaatggaaaccatgtttcttggatcattattgtctggtgcagccatgattaaatgtaaaaaattatattctaaaatattattgctaaaacttcctgtccaaaccaatatttggtttatttgtgataagtggtgagatacatacaaagcataggattacatttatagagggagatgtagaagacataattatgtacctagattgttatacacaactaattaatatacttttctagttaagcatgtagaaagtggttntatattttatacattatggactaatgagaataatgttgatgctcatttagtgatattgagccatatcttctttctcactacttgaatatttcgcacggtattgtagtgctgtgtacaaaagaggatttgtggtatgtg

SEQ ID NO: 80056 - DNA, 429 bp, Glycine max
  unsure (1)..(429): unsure at all n locations
aaactcaactgctattctttggcacaactaagagccctggtagtatgtctttcttttatgcaatctacacgagnactaagattagcaaaggtaacattcctaagaatgtgttcctttactagcctctaattcttcaagagaaatgtgccctaaatgcttatgtcgaaacgtaaacaaactttcatacataatactttgcttagtaccaatgggggtatggtaggctaccagacctgtttcaaaaataggatctattgaaagcgtagataaatgtaacttagaaaccacaacccacaacgttattgtccttgatcaatttaaagaaacatcgctaaaggcaagagaactagttttggagcctgaacccaaccaagttctagaaaagacacacatataaaggtttctatacctacaaaacccaaatcttgg

SEQ ID NO: 80057 - DNA, 432 bp, Glycine max
  unsure (1)..(432): unsure at all n locations
agcttcaccttctggtcctcctcatagntgttgcatgagaaaacatgctctattttcatctcccactccacgtaggcctccggatcattctttcctttaaatggaggaatgttgagtttaataccatcaattcggttttgtctaagaacaccatcattccctcttctcctcctttcttcttcattatgatctctattctccatttgatccaacctctcatggagcgcatcatctcgttgtttcattaacctctccaaatgttgcatcaaaacttgcatttggaattgcgaaagccccactccatcattaggattagtacctgacatctcaaacaaacaaatcaaacgttacaagacaattatagttgctgtttgaatacctcacccactcaagtgtatcacacaattatggcttntctctaatgaaacactc

SEQ ID NO: 80058 - DNA, 452 bp, Glycine max
gacctataaatctcagcttcaagggaagagagagaccaatcacgagcacatagcatggtcttaaaagaggagttagctgcttgctcatggtccaaaagaaacttgtctcaaagtttatgcgagacaaaatgatgaaagcttgcttgtgggacttctatggaggctggatctttgagcttcaatgaggtcctttaatggtgattttccaccatggagatgcagcggaagacaaaggagaagaggtgagaggaggcaccatccactatggaataagccatggaagaaggagctccaccaccaagatgagccttggataagaatcttggaaggatgcttcaatggaggaaaagaaagagggagagaaagagaggggggggggggggagcactaaattgaatgaataaaagagggagagaagtggaactttgaagtatgtcttacaagacttttca

SEQ ID NO: 80059 - DNA, 414 bp, Glycine max
gagcttgtcactggtaatttttatatattcttgtaatcgattacacagagctattatgaaaggatgtgactcttcacacttgattttgaatttcaacgttcagatacactggtaatcgattaccaatatcttgtgatcgattacacccttttgaaatcaattggaacgatgcaaattcatttaaaagctcttgaaatcaaactttgtcactgttaaccgattaccagagagtaaaaactctggtaactaagaaaattttgagaaaaactcttttgaaaaacaaatttgcgctatgtttgttttttgaaaaagctttcaatacttgcctagtgaagtcttcttgatttattttctggagcctggatttattttttttgatcttgaaataaactctcttgattttgaatttgtttt

SEQ ID NO: 80060 - DNA, 323 bp, Glycine max
  unsure (1)..(323): unsure at all n locations
agcttgatgtgagaaagcgtggaagagtcattcttcttactttngtttgttgaccacagagtggtacttggagatatgtcgcgggggtcaggagaccttggggacgtcaagtggggtgctattgcccaaaaccaagcttggctaatcccgacccaacccgggcatagtcagtcagtaagaacctgcgacgtacctaagcaggtgagctcctggcagccaaccaataaaagaacaaagtccacgatagcaggaggcttgtgtggcggctggccaactatgtatcttgngtggtatctgagaattactctctggtaatcgattac

SEQ ID NO: 80061 - DNA, 443 bp, Glycine max
tatggtgtacctctttcaaacctattgctatcaatatctatgccaataatccatgatgcaccaacagcttttgcgtcctctgcaacctgtaagtgtaaattttgagtcataactcatattggaagccacaagaccaagcaaaaatttgtcaccctggtaagaaaaaaatatttaatcagctgcatttaacaagtttctcttgaccacactatgcgttcccacaggcaaatggaacaccattgtccactagcatttcatgacttgcttacaggctatgaacagtgtcaaaatgatgcaaagaagggataagcactttatacttaacatgcaatgtctcaatacaatgttcatattacaaaaggacataacttaccagttggaacaccacatccaaggagacaaactttgtccaaaggagctttgtgatcgatcttatctacact

SEQ ID NO: 80062 - DNA, 416 bp, Glycine max
  unsure (1)..(416): unsure at all n locations
agctnttcctgngaggcaacccaattttaaattctgttatctttgtttctttttcatgcatttaaatcatttggaacttactatatagtctgtacataggagtatatcagccaatctttggatgattaacataagggtttcaatttcttggaaaaaggactaaaaaataacttataaaagtattttctaaaaaatagtcctttcgctaagcgcaagcctcgcgctaagcgcatctctgttcatgcactaagctatgagtctcaagcgcttagcgcctaacctttgcatctgagactgatttggtccgctaagctggccaaggttgagctaagctaacttatattcgatttgaattcaggtaagcttcagcctgatcgctaagcgacaacttatccgtggctaagcatgacctatta

SEQ ID NO: 80063 - DNA, 363 bp, Glycine max
  unsure (1)..(363): unsure at all n locations
ctcaatatgtgatgtgctttaatcggacctctgtgtgaaaagttatgaccatttgaatttgtcgacatcttctgttgttcaattttttgagtgtctcaatatgtgatgtgcctgaatcggacctccgtgtgaaaatttatgacaatttgaatttctcaaaatcttctgctgttcaattttgagtgtctccatatgtgatgtgcctgaatcggactaccgtgtgaaaagntatgaccatttgaatttctcgagagattttgttgttccatttcgagcatctcgatatatgatgcgtctgaatcggacatccgagggaaaatttatgatcctttaaatttcttgagagcttccgttgtctatttc

SEQ ID NO: 80064 - DNA, 432 bp, Glycine max
agctttctcaagaggcttctttgagaagctatatccttatctatccacacccctctattaactaaattaactcccttaaaaataattacggatgaaaataatgcaacaaataatcaaacatcaaacataattactaataatatatagagatatatatatatcagggtgttacacttcaccctttcatgcaatcaattcacaacaccaatttcacaaaaaaaaaaattatgtttgcactacatacttagataatcaagtcaaactgttcagtatgctttaagacatgcatactactatccacaatcaaaagtaaaccaatatgaccacaaaaaaagtgtactaaagacataaggataataatcataattgtcatcacaacaaaagcatgaatataaaattcctgtgacaggtcctgtgactgagtatcctcat

SEQ ID NO: 80065 - DNA, 392 bp, Glycine max
  unsure (1)..(392): unsure at all n locations
ngaatgtgatgcccaagagcatgttaacgcctcccacctgttgtcgagttccatggaggtccggaccttcgacggcaattgccgagaggtaagggagagatcgacctcccagtacagatatggcctcacacttgccgagttacattccaagtgatggatatcaacccagcttatatctgtctgttggggcatccatggatccactcagtgggagtcgtactctccacactccaccaaaagctgaaatttgtggttgaaggacatttggtcatagtatcaagcgaggaagacgtcctggagagttgttcttcctctacgccatatgtggaaaccatacaagagtcgttggaaatggctatccaatcttttgaggtggtaagcgacgcctccat

SEQ ID NO: 80066 - DNA, 420 bp, Glycine max
  unsure (1)..(420): unsure at all n locations
agcttaaccggtcattntagtatgtaacttttttttgttattatatttaattaatgttatttgtgtctttcctgctacaaaaacattattgaagacaaattattattataaaatgatatttgaaatatttttttatcaatatctattattaaaattatgtgtgttatataaaaaagtgaaaatattcataaaattaatattttttaaaagataatttatttaaattataatgatatgagacgtgtataaaaatatttttatacatagctattaacttctattttataaaatcttagaaaaatagaaaaatacattaacatcatttttttacagaaatgaaatataactttaataaaaaatatagattgtaacttaattcatgttaataacacatccacgtgtcgacttttgccgcacttt

SEQ ID NO: 80067 - DNA, 447 bp, Glycine max
  unsure (1)..(447): unsure at all n locations
tgtgaacatatcagctatgtttagttctctcatgatgaacttgatcctaggctaaacaaattgcactcagactgtcacagaaaatgatagctntatcctgtggaaacccaagaatgctaataagaccttgtaaccaaataccttcctttgctgcttttgctaaagccatgtactctgcttctgtagtgcacaaggtaactgtgaactaaagtgtagccttccaactaacaagagaatttccacttgtgaatgcatatgctgttgtagatcgtcttacatccaaatgtacaatgtagttagaatttgagtatccaacaaaggcacaagatgtgtcatcttgatagaccagtccaatatcagttatacccttaagatacctgaatatatgtttcacaacatgctaatggtccttgctaggtttacccatatacttactcatgatgctga

SEQ ID NO: 80068 - DNA, 193 bp, Glycine max
ttgcttattcgagaaaacacatcatatagatggcgtgatgcaatagcatcactggattaagaggaaaatgtccagaatttcaaaactagaaaatagaataaattttctcaacaattagatgacacggtggtagaaccaatcttgggagggcctagtttctttcgtccacatatatacacatatatatatatat

SEQ ID NO: 80069 - DNA, 395 bp, Glycine max
  unsure (1)..(395): unsure at all n locations
agcttcttatctannnnattgtcttggtggtgaagcctctccttccatggcttattccctagtggatggcgtctcctctcacctcttctcctttatcttgcggtngaantctatggtggaaaatcaccattgaaaaaccttattgaagctcaaagatccagccttcatataagcttctcaagcaagcttatatcactctcagttccctacattactatatatgtgtctagggtaatcatgccacaaattgaatctttgattacagcttcctcttttctaatggtcaagatcatgggtaagttggttattgtatccacttagaagctattatcttgaaaaagaaacaaaagctattcgctgtttangcataataactttggcaaataaatggaaaa

SEQ ID NO: 80070 - DNA, 400 bp, Glycine max
actcgtttatggtgaaaccatggggattcatatctgaattgtgcacctcttagatggacatgcatatattgggcgattggctcaagctgagaatacacctattggtgatctgaagaactcaatggtgaaaccaataaacattttgctaactctgaacgaacactatgcccatagttgtacgaccatcaaaagaacataccatgcacgaagtgcatacgcgctcttccgtaataaagacatgataccgacatgcaacatcttatgaagcctcatgaacggaatcgagctattcattttgctatagaaaaggatgacaacgtggttcgcgatatcttttggtgtcaccatgatgcagtgaaagaagccacacatgtatttgatgttttgagagacagtccta

SEQ ID NO: 80071 - DNA, 418 bp, Glycine max
  unsure (1)..(418): unsure at all n locations
agcttgtttaactatntggtaacaaactttttgtaatagcttttggcattttttgaaatgttacttgaaagagcattttttaaaacgttagcatcaagtttctaactttttatactttcttccatttttatcctcaatatatttatccaatttcttagttcccctttttaaataaacatgattttattggtttttttttatcattttacacttttcagttacttcaatagctacttttatcaaacactttaatttaataagctaacttttcaactctaagtttttcggtaccagctaactttttagctttcagttaactnttcaactagttgtgccgaacatagccttcagatacttgctagttntccagctttcagctgacttttcagctagtttttgctgacacacactatattcg

SEQ ID NO: 80072 - DNA, 428 bp, Glycine max
  unsure (1)..(428): unsure at all n locations
ctcagcttatactttngcattttcagactcaatggaacgacttaacatctgatctaatgcttgtgccagccgggtaacattcatttgcaacctaattgtgacttgtttaatggtttaattggtttaatctttagccataaaaggtggtgtttacaagacattgtatttgtatttaactagcatcttactgcttcgatatagttttaatcttgagaaaaattgcgcctgtattatatttgataagtgtaattatataagaatgctgctgtgagtttttttgatgatatatcntataacttaactcaataattgataaaatattgtaagagatagaattaaaagtgtgtaagatagttattgaaagcgatacattcatatgttggggacagctaccaccgagatattttatctagttcattattgaaaaa

SEQ ID NO: 80073 - DNA, 428 bp, Glycine max
agcttgttgcttcaacttccaccatagactctttcataagcttttaattatacccaaaaagacctaccttcattgaagacacaaaggaaggtggtaaccccaaagcttggtcatagcaaaccactttgcatgccaaacatgagttctcagcctcttggttacatccctagaagtgcaaaaaccattctctagggttttctttagttcatatctccgatgaacacatcgaggaagcttcttttggtgattctcctccaaacctgatttggcaagggctttatcaattattcccagtttctgcctctttcttctgcacccttttcttgcaatttggttatcaaacacaattgcccttcttctcttgttcttttgagacctataatcattgtttactctattttctatgatagattgaagactatggagtt

SEQ ID NO: 80074 - DNA, 306 bp, Glycine max
  unsure (1)..(306): unsure at all n locations
tctaaagagcccctttttctatagngctcctaaagattgcattataggaaatgttttattttgggagactgaactcaattatgatgtcttatataccatcctgacagagcattggatgctgtttccattgtggtgaaagacctgagaacaattatgtggtgctgatgggtagtttctggctgggaactatgctctggttgtaacttacattgacattttgaaactggttccactttgggctgtatttttgaanacaatatgtcatggtttgaggtggataaggtaagatgtaacgatgataatatt

SEQ ID NO: 80075 - DNA, 425 bp, Glycine max
  unsure (1)..(425): unsure at all n locations
agcttgaagaggaagatatatgctctttggcttctgaattccttaccaaaatcctctgaacatttcaaggatgcaatcatttatggaaaagatcaagacattgccctagaagaaatccatacctcaataaggaccaaggagatgcaaaaatagcaagacttcatatatgaggataatggtgaaagccttaatatttctaanncaaggagtgaattgaaaggaccaagaggaaagaagtccacatcaaggtcaaaggattcaaagaatggccagagnnnnnnnttcaaatgctttaattgtcacaagactggtcatttcaagaaagactgcccagacaggatcaagataggatttatggactctgctaacatagttgaagcctctgaaggttatgagaatgaacgtgtctattancattaaatacc

SEQ ID NO: 80076 - DNA, 398 bp, Glycine max
ctccctaagagttctctatgaggtggaggttgagccatgttctcagtatgaaaattagtagtcgaatgctcaaaatcagaatattcagaattaccagccacagaatactcaaaatgcctcaaatgcacaaaatgatcatgatgcacactatgcctaactaatctatgaaaggttctatctatttcaggatcaaaggattgtaaatcacctggatttcccctagtcatgcactatatccaacaaataatgtgttctcaaacaagcaccaggggaggggtaaaactacaactatagttaaacgatatccaaatgagctgaaattttttagcaacaccctaatatcatgaaaagatagtacaaaaatttttagacaaaaattcaaagtctaactatgaaaa

SEQ ID NO: 80077 - DNA, 425 bp, Glycine max
  unsure (1)..(425): unsure at all n locations
agcttgggttcctaagcctataattgcatttgggcactcatttcaaatcctttacgctgtccctatatatataaaacagtcccacaatcccaaccttacaaaaccatgttcatatgtcattgaggcatttcaccgagcacttggtgggcgcatgtttaggcatgaatagtaagagagtgggggcaatgtggcatgccccattgcttcaggatgcaccctatgcctaaggccatcccctacaacccctcaattcaaaccaatcaagcatgaaatcaaaccaaaattgccccacaaatttgagcacattcccacaatttagagcaccaaaagaggaccaaaatacaccaatggaaagctggaaaactcaaggatgagatacttacttgttggagtgagtaggagtaccaaanatgaaaagcaaatgc

SEQ ID NO: 80078 - DNA, 409 bp, Glycine max
  unsure (1)..(409): unsure at all n locations
ctatgaaactaagctgctacccaggagctcctaatatctccaacttttggggtgggccattcttggatggccttgattttctcagggtccacttggaccccatttctaccaactacaaaacctaagaaaactatattatctacacaaaaagtacacttctctatatttgcataaaaggtgtttttcctaaagactgaaaaaacatgtctgagatgtcctaagtgatcatctangctcctactatacactaaaatatcatcaaaataaacaactacaaatctacctatgaaatcccttaagacatgatgcataagcctcataaaggtgcttggtgcattagtgagcccaaaaggcatcactaaccattcatacaaaccaaacttggtcttgaagcagttttccactcatc

SEQ ID NO: 80079 - DNA, 432 bp, Glycine max
agcttgaaggaaaactagaggccttggttaaccgggtaatctttctggccatgaatcagaaatatgcacctgtcgccagactctatggtttatgctcctctaccgacaaccacaaagaccattgcccttatgtgcaacaatctgaagcaattgaacagcctgaagcttatgctgcaaacatctacaatagacctcctcaacctcagcagcaaaatcagccacaacagaataactatgacctatccagcaacaggtacaatcccggatggaggaatcatcccaaccttggatggtcgaatccttaacaacagtagcaacaacaacaaccttattttcaaaatgttgttggcccaaccagaccatacgttcctccaccaatccaacaacaacaacaaccgcaacagccccagaaatagcaaacatgtgagaccc

SEQ ID NO: 80080 - DNA, 405 bp, Glycine max
agcttgtgatttagtttttgttgcagcaagtgatggataacaattcttagattgttggtacaaaataaaaagcagcggattcagtagcacgggctgcaataagagctcggtgtcattatgttaataaaaagaggctcggcggtatgttaacgaattggtatactacagaaacacgacttcaaaagttcatggacttgagaatgcaacaaaagacggggagactcaatagttttccaaaaagagatgccgctatattgaagagacatttagctcatttggaaacatatcttggcggcattaaatatatgacggtgttacctcgatatgtaataaatcgtcgatcaaacaaaagaatatacggctcttcgagaatgataatcttggaaattccaccaatttgttaat

SEQ ID NO: 80081 - DNA, 376 bp, Glycine max
agattagattggatgaaataaaatctagaccaaataaaatctagaccaaataaaaattaaattaaataaaatttggataaataagaattgataaaataaaattaattgctctcttcaagtccaagaccaattctggattcaagccgaaatgcttataattctcctgaaattaaattaaaaacaccaaaatagtcaagtaggcccaaatgataaaactgcataattaatttgacaattaaggctaatcagtaattaaaatggtgacaaaaagggttaagaaatagtagaaaataatgacacatcaatatgattgccaaatctataaccagaggggagaacctcatcacttgcgaaagtgttgaatggccgcgtagtt

SEQ ID NO: 80082 - DNA, 400 bp, Glycine max
  unsure (1)..(400): unsure at all n locations
actgcatactgccttaaaaactatttatttactcgatntagggccgagtggaccagcataaatgagctctcctgcccttttcataaacagaagctgtaaaagttggtttttcgtcagactagtgaagagaaagcccgtgtataatagaaattcaaatagaaaaataatatttgatgctctcttctagaccaccaatcatatcattatagacaggaccaggaaaactggaacatacaacagctacgggcatatgttactcgttcactaacaaaatagaaagaaattacagtttaactatataataatgtcaacaaaaaagtaagttgctccatgagagagagacaatatgttgcctattgctcataagtacaacctcaaatatccatgttaataatgaatg

SEQ ID NO: 80083 - DNA, 446 bp, Glycine max
  unsure (1)..(446): unsure at all n locations
tactcagcttgtaaaagaagctcgcgtgggacagcattatcttctgttatctgctgagagnggcagaggtggcacggctcatgactatccattgcgtgatcctgttgctcttttcaaggcactttaccatcggatcttatgtgatgctgacaccgggcttaactgaaatggtgctagtcctgatgaatcaatgtgcgtctgatgaatggcgcgacatgggcagattatatggttttggtggatgcggtggatcatcaggaaaaaactttgtgcacgggcaatggctaatgtatatgagcagcattacatgaccattgtccctctttgaagcacagctcacattactgttctcttggataggacagatgacagtgctttgaggcatcgacttcttttacttctgaagtgtgcaaatagaattaacttttccttgttttgccttcttg

SEQ ID NO: 80084 - DNA, 403 bp, Glycine max
  unsure (1)..(403): unsure at all n locations
agcttagacttacttctgaagtaattggctctcccaagtgagctggtttcttcacactgaagtaactagcttgtagagagattttagtttaagtttaatctattaccagttaaccgtaatccattacataattcagttgagaccatgtctggtttttcatgaatttccactttaatcgattaccaagtgatcataatcaattacttcattcttaaaggtgttcctagaagtgatcaagaatagtttaatcgattacatcaagaatctaatcgattacattgttcttgaatgttttccacaagttnnnaaaaacactttaatcgattgaaatgataatataatcaattacttcttcgaaataatcgattacattggatatttaatcgattacaggcgattataa

SEQ ID NO: 80085 - DNA, 426 bp, Glycine max
  unsure (1)..(426): unsure at all n locations
ntagccaagctcacttcgagtcacctgcacattaccggtttactcgatgacctcctcaatcgcgttgctgttctggaaaatacccctcaccccaccccttcaccttcatcttcttctgcgaaccctgtaataccaacccacccacttcagccccacagactcaagctggaggtccctcggtttgatggcacggatccatcatgctgggtattcaagatattccagttctttgaataccattccgtccctgatttagaacgcctaacgatcgcgtgcttttatatggacagacccgcgcttgcctggttccagtggatggcaagaaatcatcagctacccacatggacaggattcctgcaagccattgaagctaggttagctcatttcccttacgaggatcccacaggcccagtattcatattaatg

SEQ ID NO: 80086 - DNA, 399 bp, Glycine max
cgcttagaagatagtcatacctcacaaaatatatatgtatgtttagctagcaagataccttggatatgcatgtatatagcaaaaatatctcacacacacatatatatgtatgtttacgtagcaagataccttggacatgcatgtatgtagcctaatacctcacaaaaatatacctatgtttaaataacaaaatacctcatggaaaaaacgagagagcgagccataaaagaatatgaataagaaaaatctgaaattaaaatcataattaaaaaattataataaaaagttgtctatctaaaaaacaacatgcttgtgaaaagagataattttcaacttttcttttaaagaatttactgatcttaaccaggtttttaaaaaaatgtgtgtacacattttaat

SEQ ID NO: 80087 - DNA, 366 bp, Glycine max
  unsure (1)..(366): unsure at all n locations
tgaagtgaggaagtgtggaagggtgagactntctactnttattcgttgaccacagagtggtacctggagatatgtcgcggtggtcaagagaccttggggacgtcaagtggggtgctattgcccaaaaccaagcttgaccaatcccgacccaacccgggcatagtcagtcagtgagaacctgtgatgtacctaaacaggcgagctcctggcagtcaacagataaaagaacaaagaccacaaagcaaggaggcttgtgtggtggctggccagttgtgaactttgagtgttacatgggatatggcctctggtaatcgattaccaagggtgggtaatcgattacaaggcttaaaagtgaagacaggaagc

SEQ ID NO: 80088 - DNA, 403 bp, Glycine max
  unsure (1)..(403): unsure at all n locations
agcttcagacatcttgtgtaatcgattactttaaggctgtaatcgattaaaatagagagttttgtcttctgaagaaacttttctatcttagaaatttttcttctcagttactcatgatgatgcatgatgcacaaaatatatgatatagactaagatgcaacattcaatataacaaccaatacaaatgccactctagggagttaggcatgtaaatgacaaaacatctctaacaaatatgcaatatatatgcaacaaacttgaatatgacattgagtgcatttgaagggtttgagtcttgagattagagacttgcttttcttagtcaatcttgaaaatncttaacacttaagaaaagatcaattcatatcatcatcatcatcatatatcttactatantaattta

SEQ ID NO: 80089 - DNA, 388 bp, Glycine max
agctctataagtgcgggtctggtatacacatgtcaagtggtcgcgatttctgaagatgatgttcctagtacattagatttggtacgaccatgccctcctgatttccaactgggaaattggcaagtggaggaacgccccggcttttacgcaacgagcataatgtaaacctttatggttttaaaagctctataggtgggcctatgctttaaagttttttcttttgttaaggctttgtgtcctttgttgttgattatataatacaaggatctttcttcatctggtcctacgtctctacccattctcattcatttgcatggttacttctttttctgaaacggcagatccgatgacgagttcctccgatgtactattacctgagacccggcta

SEQ ID NO: 80090 - DNA, 411 bp, Glycine max
accatgaaaacagaattttgcaatatttttctttctcttcttccttttccagaaagaattcgccaaggactaactgcctaaattctttttgtgtctctcttctcccttttccaaaagaacgaaggactagccgcctgaattcttttgtgtctcccttctcccttgtcaaagaattcaaaacgacacagtctgagaattcttttgattcttccctttcccataaacaaaggatttcaaaggactaaccgcctgagaattcttttgttcccccttcacaaagtattcgaaagactaactgcctcagaactttgtcttaacacattggagggtacatcctttgtggtacaagtagaggagacatctacttgggttgttgtgattgagaacaagagaggggacatctcttgtgga

SEQ ID NO: 80091 - DNA, 419 bp, Glycine max
agcttacactgttatacctattttcacaactgtataattaaatttagtcaaatttactttagaattttgcataaagtactccagttttgtttagagtttaaattgctcacataaacttcattttttatattttcaaaatttactttaaatgttttaataaattgtgaaaaacttaaatagttcttaaaatgtgggtttgagcctcttaacctcaaaagttaacttatagggtgaggcttgtccttcacttatatactcattctatcttggccttatctctagccgatatgagacttatgttttctcccaatagttttaaaatgaaaaataattgtaaaaaatagaaatttataacttaattcaaattttaagaatatactttaaataatttacttaattcgaaacttgtgatttccatt

SEQ ID NO: 80092 - DNA, 441 bp, Glycine max
  unsure (1)..(441): unsure at all n locations
tttgactngatagaaccttttcttaagcagatgtgtttgatttgatcccatgtatactaaaaataaaaagtttgtttgaatcaatacttcgatatcctatcatggtggaaaataggatgaatgcatgaagggatgcttatgccatgcatgacacanatgcattttacagacacgagagtccagaagatcatcttttctaacttgcaacatttggcagcatggtgccccatgtatgcatttaagaaggtgatacggacctttcgacttcccatgacaaaatgatgaaaccaaatgcaacgcatgcgtgacgatgcaatacagacataaacacgtaaaagtgcatggttggtagcacanaagaggaacgtacaagcatggcaatatcatcaaacaaacatacaatagagacgcacatgagcatgacattannagatatgcatg

SEQ ID NO: 80093 - DNA, 340 bp, Glycine max
agcttgaaagagaaaggatatgattcttgtttggttaggaacgcaataggaaagtaacaaacaaggatacctgtatagaaaacgacatgagctcttgtatcatgaactctcataaggataagattctttgtctacgatatgataggagatgatctttgtttggttaggaacctattacgaaagtctaaaataaaaactgatatcaaaagggtatgaatttttgttaggaacagaatacgatatgataagatatgattgttatttgctctcaaatacctgaacgtaatcaaacacaaaggtaaccttcaatgaataaacacaatgaactgttatacacaca

SEQ ID NO: 80094 - DNA, 380 bp, Glycine max
  unsure (1)..(380): unsure at all n locations
agaaaaacgtccgattgatttttttttattattctattcaaagatattttgattattttattattatttttcaggatatttcgattattttattaatatttttgctttttttgggttaacccgggttaaaacgtgaacgatcgattagattttgttttaacagtgattaaaccaaattacaacgcaaatgatcgattgaaattcattttatcatttattaagtgagaaaacggcttaaacaatcggttaaagctcgttacaaacggaagaaaagaaaccgaaagtgaacaaaataaagatgaaagcttaanaaataagaaatgaatgaaagtctctgattcaaaaacttaccccgtgaaaacgaagaacgatgaagaaca

SEQ ID NO: 80095 - DNA, 376 bp, Glycine max
tcctctgtatgatctcccttgtacgtacttgatgtaaatatcttattatctatttaatgatggtttgtgtgttcactgtgctatcagaactttattctaccatgcttgtaccttgctcacgtagatgcgtgtgtccttaggatcattcaacagtggaaactgggttgatttttataacttgatacgacaagactatgttatcgtatttccataaggaatccgggctcagaaacactattgttgtatgtttgtcttaaatcgggcccgggcgagtttaatccaacagaaggaatctgcggacgatactttttcaggattactagactatcttgaggaatccggaattattctttgtaggagacaccatagaacacat

SEQ ID NO: 80096 - DNA, 438 bp, Glycine max
  unsure (1)..(438): unsure at all n locations
ctcatttccacccctactggcaggccaacacccttgtaattgttctgntcttattatctattaaatgcaatttctatatctattatttcttttctgctcttcatcgttattgtatggtctgatcatccatgcattagttttaggaattataaattgagaaatggtaatttctaatgaactgggaaaaagcatctaaataattcattgctaggaatagagtgactttgttttgcctctgcatacatctccatgcttagtgtgatttactattcaatctttgcaaatgaatttatggaagataatagataaattagactcttcatcgtgagggatcaaagttgagtgtctattatatgttggtggaaacatanattttgacatgctacgccttaacattatcacattagataaagaaaatcttttacattacactataac

SEQ ID NO: 80097 - DNA, 410 bp, Glycine max
agcttcaagaacctttgattttgatgtcaaatcctcttcaagggggagagaatgatgcaatcctacccccaagggcattggatagaagactccaagaagattgggtcagagatgcaatagaaggccctagggttctcatgagccttatggtagattttgggtccacggactaagtatgagcccacatatctttgtacatattatattaaggtttcattatttttgagccttttatttaaggctccatggcgttggaagggtactgttataccctaatttcatccagggactatcatgcggtgatgttgtgattcttgctagccgaattgtgttgttcgacaccagttgccgcacaagatgaaagatcattcgatatttttgtcaaagatgggaaagatgacaaaagggag

SEQ ID NO: 80098 - DNA, 445 bp, Glycine max
tagaaactcaagcttcaccgcattgatgtttatcgacacacgtcattactgtaattttgcttctatcgatatagcgcatagtattatgaatcttcgactgtgattttatcctattacttggtgcaccagaccgttcattatcactttgagaattgaatgcaaattgtgagttgttcaatcaatgtcagttttgttggtgaagcatctattgttttttcagagacttgggtaaattataaagcattgtcaatttcgacgatgatattactcaactacttggtacatcataccacccattatcacttatagaattgaatgccatttgggagttggcatatctatgtctattttttcgggaaacatctattgtttttatggactcgggtatattgcacatgttgtctattccatgggaatttacatgttgctaagcacccgcgccata

SEQ ID NO: 80099 - DNA, 426 bp, Glycine max
tttgaaaggagtgagcccacggcgcatagaggtgtcgactattggtacggtctggggagcagcttggcacagcaccgggtcgtacccacaactcatcttttcttcttattacgattcttgctgtcttctctaacggacccacccctaccctctataataacaacacttccatcctcatttctttttcttattttccctagatacttttaatctctaacggactatatatatatatatatatatatatgagtcaaagatcacgaattttccttaatcaattgaatcagagactaatctcacttatgataaaagaatgttggtggtctaagataatcttacaccttataaaaattcaataatttcttttatttaataaattatttttccccatgtaaacacaatcaaattatagggcccacaataatg

SEQ ID NO: 80100 - DNA, 421 bp, Glycine max
agcttctacagctctttctttatatgatcttgcatatgtcgattctcactattcaacctttcttcgctgctctgaagatttctataaaaaaattgctccacatcaatatcacgctgctttctagaaatttctgctcttttttcatccaccacttcccactctttctcaaacctctgtctctcctcccttaagctttcagcttccttcataataaagtccttctgcaatctggtatgctctatctcctgtcttagatccaattgctaatgagaatgctctgccctatcatctttagtaagcttcaaattctcggtctcttggcattattgcagctccttctgagaaatctcagctttcatcttacccagtgcagcatttaaattctccacgctctctccgccagccaagcagtatttgtttt

SEQ ID NO: 80101 - DNA, 429 bp, Glycine max
agcttattccgaggaaagtttattatcatgcacagcctgcaagagttggctcacaataggccaatcatatctatggagcattttcttgagcaagtagcctggcctgaagctcaacttccattggtgagacccaatgaggctgctccgcctgagcccacacctgtgtaggtcaatccagagccagctgacccacaatctccagtcgtgaatccaccttcttcgcctgagcttgaagcagttcccccatctcctcctctgattgtcatttgtgatgcatcatcagatgaagcagctgcccctcctgattcactagctgcagaaacaactaacccccctatttccccaattggaggaattgctgatcattctgattcgtcatctggagaagctgttgctctcactaattccctagtttaaacacttttgata

SEQ ID NO: 80102 - DNA, 374 bp, Glycine max
ttactcttcttttcagaaacaatagttagtgctgaaattcctattataattccttttggttatatgaaagaaccaacgagaactatgacgcgaaagcatcctaatgttaaggttaaagacaaaattctaaaattcttctgaacacaacttttatcctaatgatttacttccagccattattcagtaaattgttccattaagaatatcctaatgattttttttttggagaattaagacgcatgtatcttctcgtacgccaaagacaggtattacaaatgagcgcgaaaagctttgaattggaagcagtcttattcgcatacctgactttgattatttgatttatatcaattaaagaattagccttcctttacaca

SEQ ID NO: 80103 - DNA, 402 bp, Glycine max
agcttgggccaaacctacaccaaggctcattataacctaatagttctagacaactttcctaaggtgttggaaccaaagacaacaattataacacctaaaatgaatcacatcggaatgagaggaatctaaaagttgtgtaggtatgtgactataagttgataatgacttaaaggaattaattggtactacttgtaccaacatgatgcatctacttttcagtaacccatcacttaagaacttcataattaagtgtgcttggcttaaagagattatgggatagatgaccttttatgagagtgtacaagggttgcttattgctggaaaaattttgggacttagagaacttgaagagcgatggagaatctcacagttttacgacacactatatgtttgaaaattgaa

SEQ ID NO: 80104 - DNA, 177 bp, Glycine max
actataaaactcagcttaagaggcagagtgcaaacatccttcatttctatatgttcacttatgtgtattcaaagaatggatcagatcatataaaagataagggttaatagtcactcttgtacttcaatgtgtgattcgctaacaaatacgtgtctgaaagatgaaaaaagtgcgacg

SEQ ID NO: 80105 - DNA, 424 bp, Glycine max
  unsure (1)..(424): unsure at all n locations
tgcttcctccaatagcaacagccttctggaggaatgatctggaatgcccaagngggccagattgctatttgtacccccatttttactaaatgcactccccttcttattttttggtaattctttttccgttacgttacgaaacttcacgaatttcgtaaagatacttagttttcttcagcaaggttacgaatccttacggattatgtatntactcttttttagctttcgaagaagttacggaaacttacggattgcgcaaaaacaccttttttcgattttcgccacattacggaatttcacggattgcgcaagcctgcttccttttgatatttgacacgtctcgggacttcattcattgtgcaatcaaggacgccaagtgtcttgaagcagccaactcaaggttgtatatcatctaaataataat

SEQ ID NO: 80106 - DNA, 385 bp, Glycine max
  unsure (1)..(385): unsure at all n locations
atcgtcatggttgctaaatctttggattcctcgattgccataacaatgtgctcaaatttaggatctaacgagcatagtatcttccccatgattcttacatcttctaaattctcaccatttctttttagttgattcgaaacaacgagaattcttgaaaaataatgggaaatggactcgaactctttcatatgtaaggattcaaactctcctattagagtttggagagaaaccttctttactttatcttctctgtcgcaacctacccttcgacggnggtgcgaaaaggccaagatgatgaggccaaagcgtttgtctccaagggagaaaacgagcagagtcaccaccaacgtttatttgaggaaaacgtttaaaaaaccaaaaagga

SEQ ID NO: 80107 - DNA, 405 bp, Glycine max
ggctacatcaactttatgtgaagaaacacattcttcatatcaaactccactggtgcataacttcaaaatatcaagaaacaaatatgagaagaagccaaaaaaaaaacacccatgattccataactcatgtttatggactttttaagttgtttaaagctaaagcaataagctcaaagtttttagaaatagtcaatgactatgatttcattcttgatgtttttgggtgtctgtttgtcaccgcaattttaccaagttgacatctcttccttttggtagtgttgaggttcttcagcaatttgggacaaagcgtatttcctacgaaactaaaccctaaaaagctataatttctttttgaaacaattcgtggcataatgaatttgaaaatgtaccctatacaatcaaatc

SEQ ID NO: 80108 - DNA, 54 bp, Glycine max
actatgaatactacgctgctgcctgcggtcgcttagatgtttctttgttcctat

SEQ ID NO: 80109 - DNA, 382 bp, Glycine max
  unsure (1)..(382): unsure at all n locations
ctacaacgcgagccatgaccaccgctcttacttcccgcgaagctcctcttcatatccgcctaactgggcttatagcctaaaccatacttcccacgaatacctttggcatttatcaggctagttatgccgccggtgtctttgcctaaacccataccgggttcgtaaccgttccccaacataactngggccatcattactgctgcatcggacaggcaaggctgcccagagaaggagtccacggaggaaatgctgaccacctcaaaagactggagagcggtttctaacgattcttctacggcttccacataaggcatagaggatgggcagctcaccaagatgtcttcctcgcctgacacgatgaccaaatgcccctccactacga

SEQ ID NO: 80110 - DNA, 307 bp, Glycine max
accactaaaggacctcaatgaagctcaaagatccagcctccatagaagctccacaagcaagcttccatcaatatctctgaaggcgcactaagcgagcagtatcccactaagcacacatagttaatctcaactcttatttctttgctctcgaacttgaataaattctggtctaatgtgaattttgggttcttttctacagatggcatccacgaaaaggaaaagcactgcttctaggccacaagctcagtataataccaagagattccaatccttggaagcttggaaccgatatacagataacattcta

SEQ ID NO: 80111 - DNA, 387 bp, Glycine max
  unsure (1)..(387): unsure at all n locations
cacgagggggagggggngccatgttctcagaatgtgcaaaatcagaatgctcagaatcagaatgctcaaaattataatgctcaagatcaggatgttcaaaatcaccaataacagaatgcacagattcaccagttatggaatgctcaaaatgatcaaaaggtataaaatgatgcctaactaatctatgaaatgtcctatctatctcacgatcacagggttgtaagtcagatggattgcctctagtcatacactacattcagcatgcacacaactagttgccttgtcatgtaaataaaggtgtaggtntgaactacaactaccctcanatgatatccaaatgacttgaagatttgtgagcataccttataaatgatgagaagataacac

SEQ ID NO: 80112 - DNA, 445 bp, Glycine max
  unsure (1)..(445): unsure at all n locations
cttcggaagatgtgatgaggacacgccaataggttttttcganagagcccgaggaggcaaagagaagttcaagtccatagccatcaaagtctgaaaagagtatgatgaactaagggacgtcaatatggccaccgctgaagccttggaacgagaaaccaagaaggcccgaaaggaagaacacgtgccagcaaagttttgaggggctgtatagggcagcaatagtaagctcaagctccgaagaggtgaaaggaatcatcacgggtcaaaggcatgatcttgaaggacgagctaaaggcttaccttatgtcgaaaagaaatttgtcccaacagttaagcgagactgaagggaatatgtgggccgtcatcgatgagtgcaaagagaagctaaatctagcggcgactcacgagcaaaggctagaggatgagtacgccaagatatcagcag

SEQ ID NO: 80113 - DNA, 250 bp, Glycine max
agcaccactaagagcaaacactcttcccgtgggcctcaatcgtcatttggttatcagactccactactttctcctctagatgtggcaactagtactaatgtggcctttacctcgacaattgaaacaagtcacgtcactatctgagcactcacaaccaaaatgaccaatcttaccacgattagcacaccggggatggcatagcaagtgcagcaggagcaccaacaccaccaccaataccacaattacaaca

SEQ ID NO: 80114 - DNA, 310 bp, Glycine max
  unsure (1)..(310): unsure at all n locations
agcgccaagcgagaaccnncnagctaagcgcacgggccgttgtactcaagatgcatcattttagctaagctggtcaagactaagcttagcgagagttgcagcttttctaatctgcaggtctcgctaagcggacataccctcgcgctaagccgagtttctgttcataaaaaaaatattcttattttgaatttgaatcgtcgggtcaacgcgcgtgttcgctaagcgagcctgggtgagaaaccaaacatctctcttgctcacttagtgcaacggtctgctaagcgaaagtatcgaaactacttaagtgagt

SEQ ID NO: 80115 - DNA, 310 bp, Glycine max
agagggaactaatgggagacaacacaactggcaataactttttaaaagaggttcaacacatacatggaactacatcagcatgagtaacaaaaccaaattgtggaccgcacccatattggaaagccttatcaactcataaagtgctatcccaccataaaacaccaattgtatcaaagctggaactcaaagggcattgccaacaatgaaacctttaattggcttttgcaccatcatgaaacccaaggtatgcaggtatatctccccataatggacatgggaggagaaaaaaaagagtaagaaacactgttag

SEQ ID NO: 80116 - DNA, 458 bp, Glycine max
gcttcttatccaaggctcagtctgggggggaattttctttatccttggcttattccctagaggagggagcctcctctcacctcttctcctttgtcttccgctgcatctccatggtggaaaatcaccattaaaggacctcattgaagctcaaagatccagcctccatagaagccccacaagcaagcttccatcatacacgccctcgcctttgtagggctacacgccctcacctttagaggactacaagtcctcgccttatgaaggctacgcaccctcgccttcagaagactacacgtcctcaccttcaaaggactgcacgtcctcacctttatagggcggcacgccctcaccttcggagggctgcacaccccttcgcttttagagggctacgcgtcctcactttcagtgggctccacatccgcaccataagaagaattaaggtcctctgcccttaatgc

SEQ ID NO: 80117 - DNA, 370 bp, Glycine max
tggaagaagagatatagatgatcgagaaaaacaacacatgggagttagtaaatcgtccccatggaaaaaatatcattggggttaagtgggtctataagacaaagctcaaccctgatggcaccatacagaaacacaaggcgaggcttgtagctaagggttactcacagcaacccagaattgactacaatgagacatttgcaccagtagctcatcttgataccataagagctctaatagctcttgcgtcacaaaaaggatggagtattcatcaactagatgtcaaatatgccttccttaacggcgtacttgaagaagatatctatgtggagcagccataaggattcgtgtctgaaggcaaagaaagcaaagt

SEQ ID NO: 80118 - DNA, 414 bp, Glycine max
  unsure (1)..(414): unsure at all n locations
ttgaaaatcacacaaacacaaatcactcataaagcatagcacaaacaatacctgttaatatcagcaatcaagggatttgcatagatgctggaactaacttctgtttgccatctgagctccaaattcttggggcactttgaattcacaagtgcatcctcatctctaaccacgccataacagggaaaagatatcaagagtaattaaaagcacaaaatttatatacagttctacaaacacttatgacctgtttggttcccttctcagtctttgatgataaaaaaagttttctaaaacaatttcacactactcaatcaatttatcatccaaaatctattaaatttaaaaaattgtttctaaaacaattctaaaaaccaaatagctaggagattnnttctcatttcttntattcatttt

SEQ ID NO: 80119 - DNA, 266 bp, Glycine max
  unsure (1)..(266): unsure at all n locations
gaggggggggaanaaggaaggantgataaatgaaagaaaagagagggggaaaaaagacnacacacgccgaaaaagagaagggacacccgaaacacaaggggaggaaaggggccccgccaccaggcagaacncaaccacacgccgaaccgggaagccaaaaaaaggccgacgaaccgcgagaaaaaaccacaacgaaaacgaccgaaacacgacgcaggaaagaaaaaaggagaacgcgcagcaccgaagcaagaacgaaaagagag

SEQ ID NO: 80120 - DNA, 397 bp, Glycine max
cgcaacaaggaacttctctccgaggccatttcaagaattcaccccactcccaatgacgtacgaagacctcttgccgttcctcatcgccaaccatttggtcgtggtaactcctgaaaaggtcctccaacccccttttccaaagtggtatgaccctaacgcaacttgcaagtaccatgggggtgtcccggggcattccattgaaaaatgtttggcccttatatacaaggtccaacatttgatagatgctggatggctgactttccaagaggatcggcccaatgtgaaaaccaacccgctcgccaatcatggagggggagcggttaacgccttctagtccgataggccgtgcaggtctaaacctttaaatgatgtggctacccctaagacgtttatcttt

SEQ ID NO: 80121 - DNA, 318 bp, Glycine max
  unsure (1)..(318): unsure at all n locations
atactaaactcgccacaaggcatccctattcgaccatatccaaatctacaacgatgggtgatctagaggagacacatgaacagatgaaagcccacatgtctgctctgaaagaacaaatggcctccatgatagaggccctgttgagaatgacgcagctcatggagaataacatgccaaccgctgccgctgtcattctgctgccgaatcagacccaactctcttggaactgccaccatcctttctcaacatatangaggggaatggacacaggggacacatggaactctccctggatacaccgacggttaccctatgatg

SEQ ID NO: 80122 - DNA, 267 bp, Glycine max
gatatttaattgactgcccaccaccattcttactttttaatgcattcatattctctaccttatcttacagaaaaaagaatgcccaattatttgacaaatgtgcctttcttaattaaacaagatgaatttttaaagtttttttattagatccgcaggccagacatggactcaaaaatttagtctatttaattatgcggaccaagcagatccggcccatgtgaaatgcgggctatgtgggccggactggatcgatacctacccctaaaa

SEQ ID NO: 80123 - DNA, 367 bp, Glycine max
  unsure (1)..(367): unsure at all n locations
aaaaangcggagagcaaaaaggcggngggagaaaagtaatgtgtggaagcaaagaagggcagactaggggggacaccccctccctgtaccagcgggaaaggcgagggggaacgcccggataacgccacagcaaaagaaacccgacggtttaaaagcgtcaaaagagggccaagccaaaaagaccacttagcaaggcgccgcggcgaccgttaagaaataaaaaacaaggagccagctacaacgggaccggggcctacccatgcgcagacagagcaagggactacgacacaataacggcagaacgagacgagcccccgaaggaccaaaccagggacccgccacaacacgagcagaaacgatcaacgga

SEQ ID NO: 80124 - DNA, 319 bp, Glycine max
aatacctttggagaatcgatatacaactaccactattgcggggtttcccttatatatcggtgattcaacaatgaaaattgagtgataagttctcctatggctgagtatgaaaaggtagtggagatacaatcctgctggtttcatggtcacatattttgtgtgtcgacagttgagacactacgcaacataatcgtgaacgtcctgtcaaatagaattccacgtgaagttgtcttgtagtctggccaaagcttttgtgacacccatatgactgtttgtgggtgtggagtggaattcatgcaataaaagcctgatgaaattc

SEQ ID NO: 80125 - DNA, 224 bp, Glycine max
cataacactgattttcttatataattacactcaagtgcatcacgcctcattatctggccttatacctgcactctctgctttcctctcctttcacaaatgatggtgagctaggcctcacgtctgtatcacattattttcaaaacattatcaaaacatattaatcaattacattatacacgagaacatgaaagttattctaatacagataatagaaacaacacaat

SEQ ID NO: 80126 - DNA, 473 bp, Glycine max
tgaggcatgcaagcttatgttgcaaacatctacaatagaccttctctatctcattagcaaaatcagccacaacagaacaattatgacctctccagcaacaggtacaatcccgggtggaggaatcatcccaaccttagatggtcaaatccttcacaacagcagcaacaacaacaacaaccttattttcaaaatgttgctggcccaagcagaccatacgttcctccaccaatccagcaacaacaacaacaacaacaaccccagaaacaacaaacagttgaggctcctccacaaccttcccttgaagaacttgtgaggcaaatgactatgcaaaacatgcagtttcaaaaagataccatagcctccattcagagcttaactaattagatgggacaattggctacacagttaaatcaacaacaaccccagaattctgatagattaccttctcaatctatctagaatcctcaaaatgt

SEQ ID NO: 80127 - DNA, 346 bp, Glycine max
  unsure (1)..(346): unsure at all n locations
cacgagggagaccnngtgctaagaaagaagccccacgctgacaccgacaatcgagggaagngggccccaaactacgaagggcctgtcgtagagaataaggattattccggaggagccctgttgcttaccaacatggatggccagtagctacctttacctgtgaactctgatgttgacaagcgattctatgcttagaatcagcggcaatgaaggatctcgcagcatgtacttttatttctgcgtgtctacgtggctgctgcgaaggatgcctgtctactgtatatctctcatcacattctcttagaacaagacaaaacgggtgtgatgcttacctcccactttggaa

SEQ ID NO: 80128 - DNA, 335 bp, Glycine max
  unsure (1)..(335): unsure at all n locations
ccttggacgtgtgtggtggttgttgtacagccacaaattgtgatttgattttttaatttttatttttgaatttatgattgttttaatcaccaaaaatcacatttaaaatttaactaaaaaatgctacttatgttcagatgttcaagcttagatcttgacanaaaaataacattttgaattcttttaatatatataccagtttactaatgtatatatacttgtgttttttaatatgagtacgttaacaaattatacctagatattatcttaaaataaaccaataatataacttattaacacacttaatatacaccaataatatacctagatattta

SEQ ID NO: 80129 - DNA, 429 bp, Glycine max
  unsure (1)..(429): unsure at all n locations
agctnntgcctcagatccctctngnggactttaatagtttctacagcattattggaacaggatacttaaaaccaaaacttaatccgcatatccctcttgtaagactaagtttcaattctgcttcattcaagttctaaggcaacaatacatcttccaatgttaaaatcacctaactaggcacacaaatggttgattagaccatgagcatacaaaatttaagcactgaaaggagcattgaacacaagaaacacaatcaatttgatataaaaatgattacatcagctatttagtagaaatccccaacaagggtgtttagccagccattacaaaagaaaccctatcaataataagcttacaacacctaggtatctctgccaaagctgctcctcttgctgcctctagagctcttttcccgaaataagcactatg

SEQ ID NO: 80130 - DNA, 348 bp, Glycine max
gtatggtcttccatcaccatgaagcatgtgtttctttgtgtttaagaggtatttaaatggtactttttttagaagtatcattaatgaacaaatagaacacttattaaattgattaaatggaaattaaagtttagagtttttgaaccttgttacttaataaaattaagatgaatgtacctagtttaaattaggaacatatagaatataataagttttatcctataaattactttaagtttgatgtgtaatatccatgttaaaacttgttctgatattgaagagtataaaggccaaattgtgagaaagtttagaattggaaactattttgtctgttgtgaaaatttgata

SEQ ID NO: 80131 - DNA, 247 bp, Glycine max
  unsure (1)..(247): unsure at all n locations
aggagcaaaagccccgcnnncggggaccaccccaagagacccaaaacggcccaacgccggaacaacgccctcctctcaaaaacaagaaatcgttaattggtccaacaccttaatgtttctctccttccaaaatcaaaagatcgtttaatggtccaacgccttatatgacctttgttcactaaaatcgatcttgcggaaaagatcaaacaacttacccaacgtctagttatataagaactacgtacgt

SEQ ID NO: 80132 - DNA, 268 bp, Glycine max
acaaaaccgcggcaaacgaagagggtgagaaagagggagaaacccatgcagagacagccacacccacacggccaaaggttccaccaaacccaacaaaggcaatacccaagcaaaaacaaaccgccaccgtacccaccacccagagaggcacaaaggccagccctaaaacaaccacaaagcctgtcgaccgcacaaccaaagacgaagaccacccggagcacaaaccaaaaaaaacaccaaccaagatatgaatgttgcagcgaaaagc

SEQ ID NO: 80133 - DNA, 212 bp, Glycine max
ggcccccccccgcgggggaaaaaacgaggccgcgagcaagaggaaaacggggcgcaaaagacaaggagagagagggggagacaaacgagaagaaagaggggaaggaaacaaaggggagaggaacggacggagaagaggacaggaaaaggaaggagcaaaggagagaaagaacggaagaagcgggaggaacagaagaagcaagaccagcgaaa

SEQ ID NO: 80134 - DNA, 286 bp, Glycine max
  unsure (1)..(286): unsure at all n locations
gcaaaaaaggagccgcccccaacaagaancagcaaaaaaggcgacccaagacgngaccacccaccgacaacccgaacaacgcagcgccacggaaagagaaanaaaggacaaccgaaagagaanaccgggcgcaggacaacaggcaaacaaacaccagcggcaggcacaccanagagcacaaccgaacgacacggcacacagaggaaaacaaagccgacagcagcaaaaaaagcgagcagggaacggagacaagcaaaaacaaaggaaaaacagcaagaacacaaaa

SEQ ID NO: 80135 - DNA, 381 bp, Glycine max
  unsure (1)..(381): unsure at all n locations
caaaaaaaggccacccgcaccntatataagnatatcattccatatatatgctacactaagattttgaccaaccctactgacatatctcatatatattcagccgcccatgttaaattagaaattaaaggtataatttgaatagattaattattttgtcgtcatgatcaatattgtaaaacataacatccagcttgtcatgttactactattattatcatcaattgatatcgattatggttatcaaaaatggaaaaatcaaaagctgaatcagctagttaaaaaaaatgacttagttaggtaatctgtatgaacataattaaaaaaattaataggaaaaatactagtcaagaactactaaaaatagtcaacattggtaatgaa

SEQ ID NO: 80136 - DNA, 356 bp, Glycine max
tatggcattgaatgggatcaatcaacatattttgtcacttataacatgaaaagcattaggaagaaaaagaaactcatgaaggggaattatgcacaccaaatacaatacgacttcgacgggaggatattgaccgagcatgatcatctcagaccattgactctagatcccaattccatactacgtgaatcatctttaaatgaaatgtatattcgttgtactggatatcacacacagatgcctgacctatattggtcactgcataacaccataaaaatatgcatggatgtaaagaaccagaatatgctcataccatcttcgacctatctcaacttcttctctacataatacaacatata

SEQ ID NO: 80137 - DNA, 352 bp, Glycine max
  unsure (1)..(352): unsure at all n locations
ccccgtatcgagaggcanngtctgacggtttccctgtgacgtttgaattatattgccagattcatatcacagctcaccgctatttgtgagccgttgttcaaactcttacataataaccaaaccgtccgctgaaacgatgattgtcaagaggcattctgaaggatcaaaaagtgtctcataaaccctctcgtgcttatgccgccggtacccggaatgcctctcatcttgtatatgacgattntggacgagtcgatgggatgtattgctgagcaacatgacgagtccgggaggagagagcgcgctgtctactactngagtaagaagttcacggcctgtgaaatgcaatactccc

SEQ ID NO: 80138 - DNA, 182 bp, Glycine max
aagaaagaagggggaaaagaggaagcccccaaaaaagaagaaagaagagaggaaagggagagaaggaaagaaaaagaaaggggggggagggaggaaggagagaaagggggaagagcaagaaggaaaggaggaaaaaaaaagaaaggaaggggaaaaggaagaaaggcaagaagcagaggagg

SEQ ID NO: 80139 - DNA, 364 bp, Glycine max
tactcagctctttgctccaaattccaattaatatctcaggtcaatccttgtccttaatccgctggtatcaaccccttaatatcttccatttatttggactacttgggggaaattttcttcttttaatgcggtaacctttactttaaccaccaggttttaataacctccgggtttttttattgggcaattttttaattttagtaaatttaaagggttcaataaaataaaatgttaaatttttaaataaacatgtttccactatataaaaataaacattaatttgagcatttaaaaaattacttttaacagtaaagcacatgttgaagaagagatcatcacttttaaaccagacagttatttatta

SEQ ID NO: 80140 - DNA, 303 bp, Glycine max
  unsure (1)..(303): unsure at all n locations
taaattgttgatttctaccctctttgtatattatggagcgatcaatcatatgaccttatgccactgtatgatcgtttgantttctttagaactttcgctgttccatttgcagcttctcgatatattatgcgcccgaaatcgactttcgtgtgacaagctatgaccattttaatctctcgacagctttcgattttcaatttcaacctctcctatgtttgcacctgaatcgacttccgtgtacaagttataccttttaattttcgaaacattcttgtccaattcagccttttatatttatgcctc

SEQ ID NO: 80141 - DNA, 163 bp, Glycine max
tatgggggcattagttagcttttgcttaaaaaacattgaaagcttcttcttgtttctctccccatttgaaaacgacatttttcttgagcacttcattgagaggtgctgccaatgtgctaaaatccttcacaaatcgtctataaaaactcgctaagccatgaaa

SEQ ID NO: 80142 - DNA, 386 bp, Glycine max
gacagtgattaatacttggatcttttacaaagctagtaaaacttaatggctagccaagaactggacgtagtctgtgtggtagagacgaacaagtataactctttgtgtcttctatgcctttatctatcttctatttctaaatggtttttaaattaacttgtgcgttcaaatttgatttttgttttgaaaatcttgttttcctagcaaaatccatttccattgtcttgaacgcatttttgtgaaaaccatttatcttacaaaattcttcttcagaccataactttattttctttaaaaaaagctttaaattttataaaatcccaagtcaaccccttatgatattttcctttacaccattaataactaagattccatcaaaactatgc

SEQ ID NO: 80143 - DNA, 408 bp, Glycine max
  unsure (1)..(408): unsure at all n locations
ccgaagtccagagttaanatacaatcagatcgttatattaataatagatgttggagatctagtaataacatatctataataaagtatataaatgaaagataaaatttattaacttttaaagttaatttaaatttaaatctaaattttatgatgatatagaaattaaagacgggataagaaatttataatatttatatatnttattcaatccattaaattaaactctttaagtagtatcttaataattgttaaacttattgaactatctattattataaatggttaactntatgtttaagatgtctaagccttcaatatatattatacaatatattatagatcatatatagaataatgacatgagcaaaatagaagaaataatttttattttaaaataatttatggaat

SEQ ID NO: 80144 - DNA, 424 bp, Glycine max
  unsure (1)..(424): unsure at all n locations
cgcaagcttgtatctctaataaacttgagagatngttgatgatatctctggatattaaatggctacctcctnctaattgatagttaaaaatgaactgtgatgcctatattatcccggactttctttgttggttgattttcacttttgcttgtaatatgggtctttttaagtttaatgggctgaattatgggcccatgtgtattgtgatctccataagcttggagtanggcgcttcaaatacttnttaagttgagagtggttctagctagtgaattcagttctgaagcatngatgtaatcttctaacttctcttatagtatggcccataatattcattcattctttgacagaggacgtgttttttagtggcaccatgcattgcgagagcatatcatgtggcagacaacattgcaaaccatgaaat

SEQ ID NO: 80145 - DNA, 187 bp, Glycine max
  unsure (1)..(187): unsure at all n locations
atacctagattttgatttaccttgatctgaagtttggttttggtttaaatatgatttatacatgatttangacttgtaggatccaatttgagcaaaattggatgtaggcaagttggatttcanaatctgtcatattatgcagaanaatactgtcaaaattgtgaaagcttggagggggtgatgggga

SEQ ID NO: 80146 - DNA, 368 bp, Glycine max
  unsure (1)..(368): unsure at all n locations
gaacccaacgatttctaatgagatgggcacatcacatctaatctgtgctgacagccactgatgagacatgagacgactttggtgcgacacacactcccgtcatggctgttgctttggctaacagacgcgggaggtcttgacttccattcaaggtcaaggcgaacctatccatccacatagtcgcttcttgatgcaacgcatcaatcaccctccctcttgcttctttntcggcatacacttgtgcaaaatcctccactagcttttgttcatgggccatggactggttcaattcttccttgtattgccctatgatagctagcatgctttgctccgtggcttccaagtgttgagccaaactccttttggac

SEQ ID NO: 80147 - DNA, 418 bp, Glycine max
  unsure (1)..(418): unsure at all n locations
tctggaggaagcctctgaacgaagcgtctagagaaagctacatgaagctgcctgcgtaaaaccgctgcccagccttcgttaaccgctggatcttctcaaaatttggtctgaaacttcacaaaaaacttgtccatgatctgaccattgggatctttgagaagatgtatggagtgtactataagcttcttaatgaagcttctagagaaaactacatgaagctgcctgggtaaaaacgctgtccagctttcgttaaccgatggatcttctcgacatttgctctgcaacttcacaaaacacttgtccatgatctgaccgttgggatctttgagaagatatttggagtgtgctagaagcctcttaatgaagcttctagagaaagctacatgaagctgcctgngtaaaaacgctgcccagcctt

SEQ ID NO: 80148 - DNA, 401 bp, Glycine max
  unsure (1)..(401): unsure at all n locations
gcttctcgatatattatgtgcctgaatcggacttccgtgtgacaagntatgaccatttgaatttctcgacaccatacggtggtcaatatcgagcgtctcgatatattatgcgcctgaatcggatggccgtgggacaagttatgaccatttgagtttctcgagagctttcgttgttccatttccagcttctcgatatattatgcgccggaatcggacttccgtgtgacaagttatgacgcaattgaattctcgagagctttggttgttcaatntcgagcgtctcgatatgttatgcacctgaatcggacttccgtgtgacaagttatgaccatttgaatttctcgagagcattcagttgtcaatttcgagcatcttgatatattatgcgcctgaatcggact

SEQ ID NO: 80149 - DNA, 416 bp, Glycine max
  unsure (1)..(416): unsure at all n locations
tctagatatattatgcgccggaatcagacttccgtttcaaaagttatggccatatgaatttctcgagagcattcgttgctcaatttcgagcgtctcgatatagtctgcgcgttaatcggacttccgtgtgacaagttatgaccatttgaatttctcgagggcttncgtttttcaatttcaagcttctcgatatattatgcgcctgaatcagacttccgttacaaaagttatgaccatatgaatttctcgagagccttcgttgttcaatttcgagcgtcttgatatagtatgcgcctgaatcggacttccgtgtgacaagttatgaccatttgaatttgtcgagagcttccgatgttcaatttagagcttctcgatatattatgaacctgaatcggacttccgtgtgacaagttatg

SEQ ID NO: 80150 - DNA, 428 bp, Glycine max
  unsure (1)..(428): unsure at all n locations
tatcagactcaagtatataaataatgtatcaattaaatatttcaataatattattattaaggatttgatgttattaaaaataaaaattcttttatttaagaataacacatcaattgaaaataactaaagcaacaaaacaaaatacagttataaattgagagtttattgagtttgcataaaatctacctaatccctaatctatctaaaatctacttaaaaaaagaaaatttacactaaaaatacttaacttttttaaattgtaaacaaaccttaatagtgcgggctcgattacaacgattatataataataattaaagtaattataacaagaatatatttttattcaatcaataattaaattttatggaatgtataaattatccaaacatgtccttgataagctntgatgcatgcagttntacaaatgg

SEQ ID NO: 80151 - DNA, 392 bp, Glycine max
  unsure (1)..(392): unsure at all n locations
agcttgtacaatcggattaagcagttactattttaatgtatctcatagaaagcattgccccttgaagaatctcgtgcattcaagagacacactcgtggacaaattaatctttctaagatgatatatagatctatattttcattaactcccatatcttgacattgaggaagtcttatataactgcgtcccggcntgaaatctataatttatatacacccaaatctagtataatctctcagtttttatggcgagataacaattatgccagagtatccaaaacatgatatggagcatgaaaaaagtagtagcacgagcatcttactgaaattaatgtcggagattaagaaaacatgcncacgcccatatagattggacatgttccatatgacctt

SEQ ID NO: 80152 - DNA, 371 bp, Glycine max
  unsure (1)..(371): unsure at all n locations
agcttagaaatcaagagatcattaattccaattcatatggggagtatgaaatgagaacataatgttatatcttgcatatactttgtcttaaatcttgatttcagggattaaattgtcatcatcaaaaagggggagattatagaagcaaagactttgactntgatgctntgatgatgccatatgatcatgatgttttgatgccatgtgaacatgtgattctcaagttaagatcatgacaaaaatccaagagattcaagaaacatcgtcgagcatatctctattgatttaggaagggaattccaaattgaaacatcaagaggcttggccaagaaatttaagctaaaatgtctttttcgagatatttactctct

SEQ ID NO: 80153 - DNA, 427 bp, Glycine max
  unsure (1)..(427): unsure at all n locations
ntgatctaccaccatcgctgccaccatcatctaagttttctattatttttaatattactagtactttgttttctagtcgtgtatttggctatattatgacattttggataatttagtatttctttatttgcatggtttgattgaacaattatgaattatgttatatgactatgtggtttttatatttgatctattcatgtttcttgcttcatgattggtttatattcttcaatgtatgtcttgtgaatgattaatagtatatgattgtcatatacttgttacgcacttgggctttttgttgatgccaaagggggagagaaataggaattaaatcaagaactcacataagtaattaacttaatttcaagtgaagcataaattaaaaaacaaagggggagaatggaaaattaagtgagtgatcgactag

SEQ ID NO: 80154 - DNA, 359 bp, Glycine max
ataagctgttgaacgggtaaaaggaaactcatagaagaatattttctcctaccacattaaagggctctactttgggagctaccaagatatatatgcagaacggcagtataatgaaatatctatggggggcggacaatgtttacatgacgtaagaaatagcaccttacactcccattggtggtaagacccactgctacatattcaaacacatgagactctctctttataacagcaaattcagtgcaaggtgtgctgaggcgacatcaacagatttctgtaggacaaatagatcggctggcacactcatatgcaacaatttactacgctgtatcaagtttgtaaccaacaacaacactcta

SEQ ID NO: 80155 - DNA, 333 bp, Glycine max
  unsure (1)..(333): unsure at all n locations
ctcaagctggtatagttatgtttaatgcttaaatcatggaanctgcatagcattatgaaactgattgatatcaaacagagttcaagacagaatatggaagcttacaacgaattctttcatgtttgagggtaggatagtaattagattggctcgattgttatgtttgtgattcttaaagcgcaaatgtaagacccatataagaaggcttaagaaacataccactatactctaagaaatctgccaatctttctttagatcctatttctgagcattttttcactatagctatttcgcttttctattatgacctatattattttggttcctctatat

SEQ ID NO: 80156 - DNA, 374 bp, Glycine max
  unsure (1)..(374): unsure at all n locations
agcttcaacatcagaccactttcagggtgctggtactacttcacatggactctgtggggcctatgcctgttgaaagcctagtgatgaaagaggtatgcctatgttggtgtggatgatttcgtcagaattacctgggcaactttatcaaagagaaatcagacacctttgaagtattcaaagagttgagtcttagacttcaaagagaataagactgtgtcatcaagagaattacgagtgaccatggcagaaaggttggaaacagccagtttactgaattctgcacatctgaaggcatcactcatgagttctctgcagccatcacaccacaacanaatggcttagttgaaaggaaaaacaagactttgcgagaagct

SEQ ID NO: 80157 - DNA, 253 bp, Glycine max
tgataaaaaaaaaattagattttttcattataggacctgggcaggaatacagaatccaagaatgccaaaagaatgaaggagatcagaaccacagagaagcatgaccttaaaggattctacactaatcaatacaaagcaaattattgtattgctacaacattgtaaaaaacatgtatagaaagaaatgaaaatctagcacggcctttttatttaatgaagggaagggaactattaatgctccttttagactaaa

SEQ ID NO: 80158 - DNA, 364 bp, Glycine max
tcgatacccgagagtaaaactctgtacctaaaaaattgagaaaactctttgaaaatctaatggcctagttgtttttgaaaaatctttcatactcctggaagctcttaatctctttgatctgagtcatcttctttgaatctgaatcaaactctcttgaatcttgaatcttcttgattcttctcatgaaaacttgaattaatcttgatcttgaactttgtgactcaatcttgaaatcattctttgggccttttgtcatcatctttgtcatcaccaaaactacttgaatcaacttgattcatcatcatgaagcttacttctacatcattaacattacatcaagagtagctctgtaagctaaaccccc

SEQ ID NO: 80159 - DNA, 223 bp, Glycine max
  unsure (1)..(223): unsure at all n locations
tttttttaatatcataccattccctaatggattgactaaattcttattaatgatacgagttaaggtttgttctctaaaaaaaaagtaatatgggtttaaaaaatttgctagtgttccatcgtgtttggtgggcgttgggttcatttccttagttatgaatattataaagtattggtggttatttttagtaaggggggagaagggtatatactnggntcactat

SEQ ID NO: 80160 - DNA, 260 bp, Glycine max
  unsure (1)..(260): unsure at all n locations
ggtgtatttttgaaaaggtgtgtaataaaaccagcccacttggccttctgaggtccaaagacgcagtgcttctgtggaacacctgtcgctggcagctggcggaacccctccctttttctctataataggaaaaagagggcagagcaaaatgttcagcccttctggtattgtgaattctctcaaaattagtgagaaaaattgtttctgtgaaaaaaatccaagccgaggtgcttctataacgctntcgagaggttttcgta

SEQ ID NO: 80161 - DNA, 425 bp, Glycine max
  unsure (1)..(425): unsure at all n locations
ctctagctttataccanggaataaacgatacaagtatcattcaaggtaagctaagtggtcaaatgagcttgcgtctatacaattcatggccttcatcatgttctgattaattcaaagatttatgcaaagatcattattcacagttagtcatttactcacagagtaaggtcacactctcatcggtttttggttcatgcttttctttcacaaccagtctatgtagtgactaaccattatattataagttcacactcttgttctttctttgttcaacatgcacatttgctcaaattcatgaaaggaaacacacatctcatcttaagcatgcattcaatttaaaacaatgcataccaccattttcacaaaacaaataaactacttcactgccataccatcaaaagttaagttaaactgttcacgatgct

SEQ ID NO: 80162 - DNA, 204 bp, Glycine max
  unsure (1)..(204): unsure at all n locations
ggcgtgatattgcaatctaccagtcacgttttggagcgtgtcaactctacataaaaccaaccgtcgctgaccgatgattgtcagaggcattctgaagatcaaaagtgtctcataaccctctcgtcttatgcccgcggacccggaagcctctcatttgtatatgacgatntggacgagtcatgggatgtatgctggacaacatga

SEQ ID NO: 80163 - DNA, 412 bp, Glycine max
tgcaacaattgtagaggttaacgattcaacgagatgatgcgctccatgagttgttggatcaaatggagaatagagatcataatgaagaagataggaggagaagagggaatgatgatgttcctagacaaaaccgaattgatggtattaaactcaacattcctccatttaaaggaaagaatgatccggaggcctacttggagtgggcgatgaaaatagagcatgttttctcatgcaacaactatgaggaggaccagaaggtgaagcttgccgccacggagttttccgactatgctcttgtgtggtggaacaagctacaaaaggggagagcaagaaatgaagagccaatggttgatacatggacggagatgaaaaagatcatgaggaagcggtatgtgccgactagttactcaag

SEQ ID NO: 80164 - DNA, 427 bp, Glycine max
  unsure (1)..(427): unsure at all n locations
actcagcttatgataagtngnngatttggctcaaggctngtagaacgantggtcacgatatatgtcatggtttggccagcggttcggggataaaagggatgtcccacattatttccatgatatacatgcaacaatgatgataaggaaaatttatgccaaactggtcatgctggcatctacgtggacgctcaagtgtcaaaattttatggtcatgtgatgctagggcttaagattcattttcctctatttttaagtcacccagcgtttccaaaaatatgttcttttattcaattgtgcattcatccgagtccattttgtgcgtncgggaaaattttcacagcattcacccttaaggtgtatacacattttttcaaaaactagtcatgatcagtgaattttttcaaagaaaagttggaagtcatctctt

SEQ ID NO: 80165 - DNA, 422 bp, Glycine max
  unsure (1)..(422): unsure at all n locations
catcgcagcttgtctcagcgtttatgcgagacggagaccaacatgctagctatcatcgccaagtaccaagaagagttaggtctagccgcggcccacgagcataggattgcggacgaatatgcccaagtatacgcggaaaaagaggctagaagaagggtgatcgactctttacaccaagaggcaaccatgtggatggatcggnttgctcttaccttgaacgggagtcaagaacttccccgattgttagccaaggccaaggcgatggcagacacctactccgcccccgaagagattcatgggcttctcggctattgtcagcatatgatagacttaatggcccacataattagaaatcgttaggaaactngtatggtctctcagaccttgactagatacgacttccttttttgaaataaaatgag

SEQ ID NO: 80166 - DNA, 433 bp, Glycine max
  unsure (1)..(433): unsure at all n locations
tcagaccatagcaactcanaatctaggtatccaaaacccctcaatttaatggattntcaaggttngagaagtgaaaatgagaatgggggtaatttaaaaccaactctcacctcacacaagtctataccatccataaacttgcttcaactggttttacgcctaaaattcttgccgatcaaaatttgactcttcaacacccaattttaccctagaaatggctcttgccctcactttggtcatttggttttctctcttacacagcccaaactttctcataagtcctaaatgacatttcaagctaggattaactccctttaacctccaaataccactaaattcagatttggcctttcaactctcaaagcctcactctttttccactcataacaccatattctcactttctaaccctaggttaaccctacccttcatc

SEQ ID NO: 80167 - DNA, 311 bp, Glycine max
  unsure (1)..(311): unsure at all n locations
ttcttttcaataatcaaataaaattaaaaacagagtaacacaagaactttggtttcttggctcatattttttcttaattacaagtataacangagtctaatagttgcatatttatcctaacttaccttttttattgttaaccctctcattcatcagggaaaaagaatcctaactaatccacataatttatgcagggtatacagtcatttatgcatcctaaccgaatgacagcagataacaattcaatgtagacatcctaaccaaatgatagcaaaatacaataggtgatgcatcaaaactacggagtttgt

SEQ ID NO: 80168 - DNA, 422 bp, Glycine max
  unsure (1)..(422): unsure at all n locations
tgctgagctctccaatntgactngngattgaaccatagattgagttctgatacaagtacaggttctgcaactcactgcacttccctatctcttctgggatagggcctgaaagaagagttgtgtaaatggctatggtttgaattcttttcagcttccctattgaagaaggaagactcccagaaatgctggtttctgcaaggcctaacaccaccaagttggtgcagtttccaatgtcccatggcacctcacccttaaggtttgtgttccctcctgctctcaacacttggagcgcagttaatgagccaatactctntggaatttcaccactcagtttgttgtcatagagtgtcaagttcacaagacttgataaacttcctatgttggatggaatgtttccttcaagaaagttggcatgcagagct

SEQ ID NO: 80169 - DNA, 380 bp, Glycine max
  unsure (1)..(380): unsure at all n locations
agctntacatttgtgtaccaaagtctgngaatactgactatcaaagatagatcccttgagccttgaggaggtatactaagctcttggatcaattagcttgtctctcctaataaattgtaagtagtagaacctcactgatcaaaatcttaaaatggtaaactgagaaatatgtgcatattagggcccgatgacttcaatattcgnttcctaaattcatcatcttattgcactatataattacaaatttttcaccttgtattcaatctatttttcattntcaaagatttatacgtgagacaatgaacgcaacgattttttgtacgttgtctttgtttcctgtataaactttttgaaagtgaaaacatattagaaccacttca

SEQ ID NO: 80170 - DNA, 422 bp, Glycine max
  unsure (1)..(422): unsure at all n locations
ggtaatcaattaaaccgatatgagacataactntgcaagcttaaaacaacgtgtgtaatcgattaatataagattgtaatcatttaaaatagagagttttgccttctaaagaaactttctaacttttgaaattttctccttactcacacatgatgatgcatgatgcacatatgatatgatagagactaagatgcaacatacaatacaacaatcaatacaaatgccactcaagagagttgggcgtgtaaatgagagaacttcttcaagctcttcttcaagcttcaaggctaagtcttcatgttgctccccctatctctgacaatctccccctttttggctttgatgatgccaaacttgaatttgccattgagtgcatctggagggctgagttttgagagtagagactcacttttcttagtcta

SEQ ID NO: 80171 - DNA, 238 bp, Glycine max
ctagggacaagatgtttatctgcaaggagcggactttcgcaaaaactgtccctgagaccaaaaacgcgccgactatgtcttgcttacatggtgaaatgacgaactaatgttttactcagacagagcctctaatgaaaaactggatggcttcaacaaggatcttcgacaagaggttaaccttcctaccctcatttttatcagagagcattatgaaccgcattctcaccatgcctgaact

SEQ ID NO: 80172 - DNA, 421 bp, Glycine max
  unsure (1)..(421): unsure at all n locations
ntattgagttattataactcgcaatatatcatgtacaccgtatagaggtcataggagtgtaaagtaaataaaggcggtaatatcccaagttaagaaatgatatacgaactataggtgttaatagataattgctataatatgaaaatgatatacgatttggatggattgaatagtgtaccacttagtcaagtgtgtttaaggatgattgtgattgaattatttttgggaacatttttccttttgactatgaacatgattttatgtatattgaaatgagtgtgacatgtaatgtgtggttcttatgtgtatgagatgtcagtgccatggtacatgagtaagatttgaaatgtttagagaacctagtccatgtgggataggattctccatgtgatgtaaccatgtgcatcctatgtaatcatgc

SEQ ID NO: 80173 - DNA, 397 bp, Glycine max
aactattcaacgacatgatgcgctccatgatatgttgtatcaaatggagaatatatatcataatgaataagaaaggaggagaagagggaatgatgatgttcctagacaaaaccgaatggatggtattaaactcaacattcctccatttaaaggaaagaatgatccggaggcctacttggagtgcgcgatgaaaatagagcatgttttctcatgcaacaactatgaggaggaccataaggtgaagcttgccgccacggagttttccgactatgctcttgtgtggtggaacaagctacaaaaggggagagcaagaaatgaagagccaatggttgatacatggacggagatgaaaaagatcatgaggaagcggtatgtgccgactatttactcaagggac

SEQ ID NO: 80174 - DNA, 195 bp, Glycine max
  unsure (1)..(195): unsure at all n locations
ccccgatcaccggcggcaagacgaacgcaggacgcctttatcttgtaccagacactctantcgtatgacgaacaaggcgaattgcaaatcaacaggcagatcacccgccctcaattttcatatgcgagtgttgaggagcctgcttctggcattctgaacctggagaaactcatctaatcgtgcttactatctcag

SEQ ID NO: 80175 - DNA, 335 bp, Glycine max
  unsure (1)..(335): unsure at all n locations
tctagaacgtcacaagcgatgcgggaatgctgtagctttggtcatgtggttacacaaaatgatcactgttcaagcgttccctaaccctattttattattctatttttttggctagttatgcgaaactgcgatggtagttattattttactgcctttgacattgacatggcgatcgtatactctttatccttaaaacgcaatttcattggaatgttgaatggtgttgntctccactgcttgatagttagttggttgcagaagtgacatgtgaaaaaatgtgcatgattgtatctgtataatggaaatttaactgccatcggtgcacacataatact

SEQ ID NO: 80176 - DNA, 427 bp, Glycine max
  unsure (1)..(427): unsure at all n locations
agccttangttgttcactatgttgctccccctatctctatcattatcaacctttgacggatgatcggagagaggtgcacaaattccctgttctttttacaaggcacacatcttgatgcgccaaaggttaaagctattattccccatgaatttctcaatcttaattgtgttgaccatcttcttgatgaatgttgaagacacaacacgaacaaaaatagaatggttgatctctaatgacctagacccaccacgaaacagatgcggaactaatctgaaccaaagctctaataccaatttgttgggtttaaaactaagaaaatatgcaaatagatgataggaggagaagagagatcacacaacactggagattgtatatgattatattttgggttcagaagctctctctaactcgcttatcgaaccatgct

SEQ ID NO: 80177 - DNA, 383 bp, Glycine max
  unsure (1)..(383): unsure at all n locations
taaactctgtacctgaagatcgcatcagatattacacaactgaaggaactgtttgctgaggatgtcattgcatacttccctgatgatgaaaagctgtcatggatgctactttgggatggatgttctctgctacaaatcttggaaaagggaaaacttgactatccagaaaaaatgaatgctaaggctgaccaactagttcttgtgtggcaagatgtgcttttgctagagaaccagcttccctatcaagtgcttaaactgttgactggccccgagaatgaagccatgctattaaacatcatgaaggagtttcttaagtgtcatcatttgtcaccagntagaccatatcacagagcaaagacacaagacatggacaaggatataac

SEQ ID NO: 80178 - DNA, 389 bp, Glycine max
  unsure (1)..(389): unsure at all n locations
actcagctatcaagggttcaacttctaactgtttcttttttaaaataaacaggtcccttaagaacaaagtttaacccaagtttcaagntatacttctattgtatctattaagcacataaaatgaatgaccaagaaagtcaaattacttgtttttgcatctgcaaccatcgcggtccataataatcatattgttgtccatagcccgtatgtgctcaaggcaattacagaacacaacattgataattcaaccaacatttctgtacaaaagcaatttgaattggacaaaagcaaggcaatatctaaacctacctctctgggcacaatattaacaaaatcaattcaccactataatattcatcaacatctacataaaggtaacaaaataaaaa

SEQ ID NO: 80179 - DNA, 395 bp, Glycine max
  unsure (1)..(395): unsure at all n locations
agcttgttactatacttcgacccgacactgtcgtgtttctgtctaggcccggttcacaggcggctgcagcaccagctccgcttncctaactgtactggaggcggttgcggtggctntatcctctatggttttctgaagttntaacatgaccttcgagatggaagtcatttgatcttttaaggccgatagatcggccttcatctgttcctgcacgccctcttcattatccatatttctggatcgagtgttataagggtgccttgatgttttcttagttatgatgaacatcctaaagaaataaacaacggtgagtatgctaccaatacatgagtatgcaaatggatgatcngagcacttggatccaccgcaagaatttatataacgtaatgagtcta

SEQ ID NO: 80180 - DNA, 384 bp, Glycine max
  unsure (1)..(384): unsure at all n locations
ttatgtgtaaatttgattttatgtttttggaagaatgatttaatttgcgaacaaaagttcgtttaagacattggacctttgaacgatgttttaaaatttcaaaaagcgggagagaaattgtcaaaggcgttggacctttgaaacgatcccaagtgatgttaatgaaaagcggagagaatcgttaaggtgttggaccttgaaacgatctcaagagatatttgatgaaatgaagaagtttatgagttagttntattttggttttgcttattaaccttcaatccttttttaagataacttacagcataatgatcggttaaaattactttacaagaagaaaatgagattactaatgatagaagaaggagatgaagatgcacaaaacaa

SEQ ID NO: 80181 - DNA, 308 bp, Glycine max
  unsure (1)..(308): unsure at all n locations
tgggtctttggatgataaagaatccacctctcatcaactcggttttattctagcnctcatcaagtctttctgggtcaagcctattgggaaaagatnttgtcacttctaatcaggcctgtttaaattaagcagtcattaaacttnccgttaaatccaccatactcagtcatggattgctatggagacagattctggcgctccatatatctactctaagcgtttgagtctatcagcatccactatatcaggctgagcaacatcaataactttttcatcagcatcagacattggctatggtcgaacaggtt

SEQ ID NO: 80182 - DNA, 301 bp, Glycine max
ttgaacctgccactttatgttggacccaccaccacatgtaacatgttcgacaaaataaccttgccagggggaactgattttgatgaggatgaaccaatatatatgaagacaatccttttcaaagggaacgcgatgactccatcctacctaagaaacgaccagtcactagaaccatgagcaagaggctacaccatgaatgtgctagaactgctgaataaggcccaatgcgtctcaagcaacctatggattaattattagcccattggccaaccatgtgttcaattatcttcgtacatattat

SEQ ID NO: 80183 - DNA, 420 bp, Glycine max
  unsure (1)..(420): unsure at all n locations
acgtggaagagtcagtcttcctactttngtttgttgaccacagagtggtacctggttatatgtcgcaggggtcacgagaccttggggatgtcaggtggggtgctattgcccaaaaccaagcttgaccaatcccgacccaactcgggcatagtcagtcagtgagaacctgtgacgtacctaaacaggcgagctcctagcagtcaaccaataaaagaacaaagaccacaaaacaaggaggcttgtgtggtggctggccagctatgaatcttgagtggtatctgcgaattggcctctggtaatcgattaccaatgatgtgtaattgattacagggcttaaaaatggagacaggaagttaaaatggcctctggtaatcgattaccaagggtgtgtaatcgattacagggcttaaaaatggagat

SEQ ID NO: 80184 - DNA, 402 bp, Glycine max
taggccaaactttttatccactgtacataacaccagcttttcttatggataaatataagataaggaacaaaactattaacaagatgttaagcaatgagaagagtacatctaaaagaaaaatgacaagctaaggccgtgaattaccgccgcaacaataatgtttttagagtatttgcgaaccccatatcccgagttgcaatgaaactaccaccacaaccacaatttaaaaccttgaggacaagagaattgcattggcatgttagaaaatgagaaggttacccgaagttccattctgcacagacataaagtccaatgcggagatgagcatagagccctgctgtctgtattgtcttcacgaatctcaccagatcataccttccttcgaaattgtactgaattgag

SEQ ID NO: 80185 - DNA, 410 bp, Glycine max
actcaagcttgtcaatcacagcatgtatcagtattatatgagtcctgtaatggacctatgttgtataatcttaagaagccacatgcttatggaagaaagggttgaaaaaattaatcatttgatcaaaatatttaatatacaacacgtatgactgagattgagggtatgcccaaaattcacacatgtcaataggagtggcgccaacaagaaatgaaatgttacatagcacaaaatggtttatgattatgaacccctatgctgcattacatttccaaggctaaacttataatccatgacgtattaatctaataattaaaaaaaaatattgccttgggtcggacttaccgaggcatactaaatgccacaaagatgaacgattttgtgagagtactgcaatgtttataggcgta

SEQ ID NO: 80186 - DNA, 358 bp, Glycine max
  unsure (1)..(358): unsure at all n locations
tactaaaaattgtttgccggaatgtttctattactagagttttagtttgtgctgcaaagcaaactatacttactattgttttaatgggttggagaaaattgtggctgattgtacctgtcggttggatattgtgggtgatcatacaacaattcggngacttgcgtatgatattgcttattaattacaggtatttgcaaggaaagtacaactgattggactcggtaagactaaacttgatagtgagacttgcgactgatttctgtattcacatcaactttactcggagagtctacaaacacattctgcgtataggtaatgacttatggagttacctccttttaatttngatgggaaaaaa

SEQ ID NO: 80187 - DNA, 424 bp, Glycine max
  unsure (1)..(424): unsure at all n locations
nttcgattcattctatgtacccgtagtggtccacattgtgtttcgtgcatntttattctcgtgttgtttactttttatacccgctgttgacgtgcttaagccattttacttaagtcgtttctcgcttaacttaaaaataaaataaatttccaccgaacgtttgaattgtattatccattaacttcggttaaaataaattccgaccgttcggtcatgccgtaaccacgttggaaatcaaaaaaagaggtaaaaaataatataataatgaaaaagatatctttttagtaaaataaagcggaaaatcaatcggacgttttctctttgggatttctcattcttaatcgaattgattaataactaaagtgaagctaaggctaaaatcaactcgcctagtcaagctcgtccacaaaaataggcttttgaa

SEQ ID NO: 80188 - DNA, 392 bp, Glycine max
  unsure (1)..(392): unsure at all n locations
atgcaagcttaaagctgtacccggagaaaagcatgcatatgttacgttctttacatgcctaacctccttgagtgacatttgnattggtcgaatattgaatgttgcatcttagtccatatagtcgcaacccacccttccgtgggagggcgacgcgagactcacaagagcgtcttccaagaaaggaaaatgcacggagatgccaccaacgattatttgaggaaaacgtctaaaaaatcagaaaaggtatggtctacgaactttaaatgtgataagatcacgagttgtttttatgcacgaggaaggtattagcaccccacgccgtcgtcacaagggacgatagcctttaatcaagtgtgcaaatatgacttcaaaatgttttattttcccttttt

SEQ ID NO: 80189 - DNA, 421 bp, Glycine max
  unsure (1)..(421): unsure at all n locations
tcaagaaaaggccaaactcctctccaaaatctganttgaggcttaaataggtgtctntgtttgcgcttgcgcgcttagcgcaactctaaaccgcttagtgcgcattagtgaatttcggcttagcgcgtgcttttctcgctcagcggatggattaaagcagtgcacttagcgagatgacccttcgctcattgaatatgcacagctcatccttcttccagattcttcctcgcgctcagccgagaagtgttgcgctcagcggatggcttactaagccagaagattggcttagtgagagggtgaaaatcaacacttcataaacttgcctaattaacctgaaattgagaggaaatgattattaaacacacaaaatggaagtactaagtatttattacctatccctaacaaaaagtgattacaacac

SEQ ID NO: 80190 - DNA, 399 bp, Glycine max
  unsure (1)..(399): unsure at all n locations
agctttgtatttctttntggaaccacacgggtttaccttgtgtctaggaatcttgaggttaaccccacaaagaagaggcagcttgaacaacaaacaaaagcatgcccaaggaaatcatatcatcataatattaaaacatcatctatgaaaaacatatctattttggatcatcccccgtccccacaggggatttaattaaacaccaattaaccaaaaatagaagaaaatagagaaccttgtcatttggttgcaatgtggtataaggattggtcttcttggagctattatttgattcatcattagtgctttcctctaccatgtcttctttgtgctgcttatgattctcattttcatcatgacctgcacatgctagaaatttgagataagagttacaataga

SEQ ID NO: 80191 - DNA, 425 bp, Glycine max
tgtgtgaagagatagacagaaaaagacttagaatataatttgttattgtttatccgctaagcgtagaccttacgctaagtgcccagtcttcatgcgctaagcccgagcttgctcgcgctaagcgcagaaacccctgattggttggctgaatagttcagctaagcgcacatcactgcgctaagcccaacatcttcactaaaattaaaccttaatcagtgggcttagcgtggatgatgcactaagcgccacttcttctctggaaaattttattgtagcagcgctaagcgcgctatcctaagctaagccccagatccattctgtaatttgagctttcaagctgggcttatccgcgcaagatgcgctaagcgccaatctcttactatttttgaattcttggaagtgcgcttagcgcgcctgttgcacta

SEQ ID NO: 80192 - DNA, 398 bp, Glycine max
  unsure (1)..(398): unsure at all n locations
agcttaagctccttcaactgcacaaggctcttaatattngaagagtatccttgtggaaccttcacccgacgaagacactgacaaaaacttatctttctctttttggacaaagtatggcaggctgggggcaagtaaattttcttcctatcagaccttggatgcaacagtgatcgtatgcccatatcagttagatcttgacaggtattcaagccattcttcgtctttccttgaaagttaaagagcgtcccaatcacactgtcacatacattnttctccacatgcataacatcaatacaatgtctaacgtctagatcagactagtacgaaagttaaaagaaaatggacctcttcttccatatggaactcttacttttatccttcttttgggtctttccaaa

SEQ ID NO: 80193 - DNA, 382 bp, Glycine max
  unsure (1)..(382): unsure at all n locations
agtccgagaggcatggttattgccagtctcctgaaaatgtctgataatcgagccagatgatgatctatntgcttcctgcaaagtaccacggaatacggtacttccacaccttcgttccgactttatacggatactcattatgcattcaaaaggaagggaccacctatatcatatacaatccatgtggtacaaaatatgcttctctatggatcttcacaccttatattcttgaccagagacaagatactctgtctctcgataactctcacctatcaccgtattcatgttgcaaacagtacctgctttgcaacaattatgtctattatgcacaacactatcctcatgctcagcctccacatacctataactccttgacatgaca

SEQ ID NO: 80194 - DNA, 348 bp, Glycine max
  unsure (1)..(348): unsure at all n locations
tgtaaaaatgcgcatgtcgctgaaaacatcaatggggctgttaactaccgatgctggctactgttttttctattccacccctgaataatacttggacgatgtccgattggaaatgttcgatcggagtcatacggtcatgctttttttaagaccttgatctgtcatcttttcctggccgacgtcggctagcatttttttcgatcaatatcggtgaatcatgctttttgccaaggtggggctaacgtttcgtggctcatgaaatgagagcatgccagtgtcngccgatacacaatctcgcacgaaaaaccctagccgacctacattgtaattttcgtatgccataccgaa

SEQ ID NO: 80195 - DNA, 440 bp, Glycine max
tactcaagctcgccttgcccctttgatatattgagggactcatggtcactatgaatgacaaattccttgggataaaggtagtgttgccatgttttcaaagcccgtactaaggcatacaactccttatcataagttgaatagttaagggtgggaccacttaacttttcactaaaataagcaattggatggccttcttgcatcaacacagccccaatcccaacatttgaagcatcacactcaatttcaaaagatttttgaaagtttggcaacgcaagtatgggggcattagttagcttttgcttaagaacattgaaagcttcttcttgtttctctccccatttgaaaccaacatttttcttgagcacttcattgagaggtgctgccaatgtgctaaaatccttcacaaatcgtctataaaaacttgctaagccatgaaaact

SEQ ID NO: 80196 - DNA, 446 bp, Glycine max
  unsure (1)..(446): unsure at all n locations
gatccttaagcaccgcngctgcagctgttgacctgacaagactaccttaaagtcatacacactctgatttattattggttgacgtcaacaacgtaatacaattttacattattaatgcctcaccattaaatgtgatattaaattaatctaatttatgtttttttctctaattctcttaatttttaaactaaatcctataaatatttaacttcaacaaaatatcatatttaatctctctttagatatttgtttttattattcatgatctattcagcccttttattttaaaattgtctaataattgttttattaatatttattttttaacatttcttattatcctatatgaattttggaaggttgtgagaaaaaaaagggatagatgaaaggtgggttatgcgtgtgtatatagatgctagaaattgtaatgaaatggtatactactg

SEQ ID NO: 80197 - DNA, 227 bp, Glycine max
gtatggactcgggaaagttccaagttagtgtaccaggtaacagctaccccagtaagactttcttggaagaaatgtattagcagttcctcatctttgcgtatgcccttatcttccgacaatacatctttggatggttcttgagacaagtagtccccttgtacttgtcaaagtccagcaccttgaacttgggaggggtgatgatattgggttctaggaacaactctttt

SEQ ID NO: 80198 - DNA, 336 bp, Glycine max
cacatgctaagatacattcagcttttcgcggctacatggtgacaaacgctgaagatgaatattctgcgcaatgggatctacccaccaagctacgcggtcctgatagcgatgaattctatcctgcaaagagaattggctcacactctatcacataaaggaggagtatctgtgcttcatagcttagcctaaaggtaacacaacatgctcgtcgatatgactgaggatattgatgccttcatgataggatggtgatatatattaatattgctgacactgtatgcacttcattgagtgtaaagagataaaccatatgtagacaagctgcttatgagaatg

SEQ ID NO: 80199 - DNA, 288 bp, Glycine max
aaaacaagtaagatggaaacttttggacccagctaccccatgtatgctttatgactcttaatgggtatgaaaaatacacaaaaactgctcagtactcagtgaggtggcttggtgactagaaattacatatctcaaatagccgtcacagcagttcaaccttgatgtatgcaaggcaaagcattctcagaatgtgaacataccaacattaacatacatgatcaacaaaatcccttgacgaaaaacaaaataacacgaaagaaaatgtagttccacggacatcggatgctt

SEQ ID NO: 80200 - DNA, 425 bp, Glycine max
  unsure (1)..(425): unsure at all n locations
ctctgaatactcaagctcgccaataagcatcaaagatcttattcatttgcgagagatcactcgtaatgtgtgcaagaagctccangctctaccagagcntccaccatgcctgccatcattctgtgtagctgactgcagatcactgagattgtcaagttcaagactgtttaatgaaatagatatgcatactattactatngcataaactngaatcaaaattcactcaacagtatcattgcagacgcaccctttgaggaagcttatacttctttgcaagaaggaacacctctaggtcctctcatttctatttgtttgccaggaactggaatcccagactggttcagctaccaatcaacaaattcttcagtggacatggaaattcctcaacagtggttcaatgattcaaagttcttaggtttttctct

SEQ ID NO: 80201 - DNA, 422 bp, Glycine max
gctttacacaccgtgtatatcataacacatatttatgcatttatcataaattttttaattatttaaataataatttatatttgaatgatattatgaaattatattgttaatatatttacattaaactctataaataatactaataattttaaaaatgacaaaatcatactattaaaataaatatatttatgctgatgatgcttacatgtgagaataaacatgtgaataaaaaaaatagttaataggtattcataaattcctaaattttaaattttaaattttcactcgtttgctattctccttaattacttgacagttgacacctggacacccaccaaaatttcaattctcttcataattcagctaatttaattttccgtgcatcaactaatttatttagattcttaatttctatcgaaaaa

SEQ ID NO: 80202 - DNA, 407 bp, Glycine max
gcacaattcttgcggtgtccagacattatccaaatctgtttcaacttcttcctttacacaaaattcaccatcgacatactctagtgccccatttccattttgtatgaatttaccattgtggtggaaaataagtttgatttcattagacatcctacagagaaacataacaaacattaattgtatattcacaaaaagagaacataaaaagtttcataatagagaagagaagagaagaagtttgagaataaagaagagaatacaagagaagaggtttgacgatagaggctagatggacgatgatcaccacgaaaaaacacgatggtgatggtgtcattatggtcatcgtcgaaaccccaaaacaactgtctgttgacgacgaagacactagtcaacgacggtgctattac

SEQ ID NO: 80203 - DNA, 430 bp, Glycine max
  unsure (1)..(430): unsure at all n locations
ntagattctccatgtntgactccttntagagaatctaaactgagataagtctgcacgggtntggtcttaattatgcctttacgtttccctcacaatcaatatcatggcatatatagcaacagaggaagaacaaaagtcctctgaacctgagatgaattctggtttcttcaactttgctattttatcataattagttatgcgaaaaatatggatgacacgcaagggtgtgtgggacacaatacattgacctgacccttacacgtgccttgaacatttatcttaagttttgtttgccccaaatcatattcacatgccaacaattttaataacatatttttctcatgggtttaccatataagccacatatatcaatagtcaataatcatcgtcatgttctaaattgtcgttgtgatcgcaattacagtttcat

SEQ ID NO: 80204 - DNA, 420 bp, Glycine max
  unsure (1)..(420): unsure at all n locations
gcttcttcttcctggcttattccctaggatatgtgccttcccttctctcttcttctttggctttcggtggatcttcatggtggaaaattaccattggagaatcttattggagcttcaagatcccgcctccatagaagctccacaagccagcttccatcatttgggcttaacgccaatgctgcgctgagcctacaagagacaaatgtcttgcttagcgagctgatctcgtgcttagcgcgcgaccttgattcttgagctcttccagattccctttgtcacactaagcatgctgaagctgcacttagcggtggatgcatgctgagcccatagggtccacttacagcgactgctccttttagcactttaagattntagcctcttttgacctgaaattgtgcaaattntatcattaaataacat

SEQ ID NO: 80205 - DNA, 438 bp, Glycine max
tgttggctagcactcctttgacaacaataatcaaactcatgttttatagaggtcaaaaaatataagaaaaagggttgaattttgttttaaaatcatttttagaaaatatttcacaaatcttagactaaggtttatttgctttgtcttataggacaagtttttcaagaaaaacctattaagtttataacaaactgtttagaaattggaggataaacaccaaggagatctttactaaaggaccacaagtacacaacacaattgaacttgacaccacacttcaacttaaaacttttaagattacaaaccatcgattcatcgattgactttaataccaattgttatgtatttgaagggatgaaaactagaaagatctataccaatgaaccttaagcaaaccatataaatgagattgacttcatacttgaacctaaaaccata

SEQ ID NO: 80206 - DNA, 246 bp, Glycine max
gaagatgtatttccagtggttatattttttccgaccattcaatgcggtccagaatgccggattccttttgtacaataagagttgtttttcaatatattacataaaattttgaatcttattaacttgctaatcctagaacttatttagcatgttcttcaatatgcatgagtttatcgggtatttctgtatttcatgttgcaatattttttatagtgctttgacttagtgcaatttattttgatttaa

SEQ ID NO: 80207 - DNA, 425 bp, Glycine max
ctcagcttggtggatgaactaatcttattgtataagtggatttgatctattgtactaggtctattttgattaattatggtgctctattcttcctttgcatctttttcttgttgtttccctcccaaatccgttaagcaagtcacatcttctgagatcttgaggattcttgtgcaagacccattgttccaccatggagatcctaactctttctctactactggatcttgacaaaaatggatcttgagtgcaagaatccactcaaggatcctgcactaaagttgctcttagacatgtagtgttgagatgtggtgttacacgataagtggtggaataacaatggatgtgttgaagtaagcaatatttcatttatatgatatgtatatctacatgttgtcctatttctttctattagttacgaatgtgat

SEQ ID NO: 80208 - DNA, 422 bp, Glycine max
  unsure (1)..(422): unsure at all n locations
nngtaagtattgttggtattaattgcctgttccattatgcttttaatgtctctagaggttacttcctcgttgacatcttttgtcttgaatggaattgccatgacaggtttgttgttactgtctttgatatttggtagttgatattgtgttgtgggaggtaattccgactggattaactcaccatccttcacttgccaatttgttatgacatttgttgttggattacctatgatgtcttgtttccaagggtagtctatatcctttctgatggcataagcatgaaaccaatcaaagaaaaggacattaattttgactctttcgacaaattcgtaaaacttgtcttggatttgttttctgtttgtacccttgtaatgttggaaaaaccatctcctttgaggttcattctccggagaatagaaatt

SEQ ID NO: 80209 - DNA, 263 bp, Glycine max
tgcttattacgttaacaggaccaccaattactgattggaggagtaattgagagattgatgataataataattcgtataggggaaagttatacatttctatctgattttggaacaatgagcatgtatatatggaaagtgctacgatgatgtatatgtatagaccagctgatgaagctcgcgtggcatattaatcaatcgtacataatcatttatacaaagacagtgaccatcatgtaatctatggataacatgaaataccttga

SEQ ID NO: 80210 - DNA, 420 bp, Glycine max
  unsure (1)..(420): unsure at all n locations
ntgagaacagactagttctgatgaacttgcatccaggaatgctggtgacgctcatggcagaagcaaagagagattaacttattttttgtctttttttctttgttcactgccttcttctctgtttacttgcattgaatattttttatcgcacttatatgtagcaaatttgctgtcatcttggttttaattcaattgttgtaggttctgaattttggtggttttgaataggattcacaattataaggtttaattntgaattcatttagagaagaggactattttgtaaaattgaaaaaaaaagattaagaatttatattaacaaaacgaacaaacaaaaaaatactcaacgaccacttttagtcatggtatatcttcgtttatggagaagaataattgttgacaggaaggggaaagactaat

SEQ ID NO: 80211 - DNA, 398 bp, Glycine max
  unsure (1)..(398): unsure at all n locations
agcttttgaaagctngtttttgtgtttcaacttgtaggttcacactntccttgactaatcatcaatgaaagtggtatagtaccttgttccaccttgtgattgagttctaggtgggcctcatatatcagagtgcacataatccataatcccttttgtagtgtgtgcactagtagtaaacttcacccttttctgttttccatacaagcaatgttcacagaaatccaatttctcataatcgattccttctaataggccttgcttatgtaattcttctaatgccttctcactaatatgtgctagtctaagatgccataatttgattgaattatccttagacactagacaagaattagttgaattgataattgtattaccttacaacctatagagaccattct

SEQ ID NO: 80212 - DNA, 427 bp, Glycine max
  unsure (1)..(427): unsure at all n locations
ttgcatatgtggtcttcgacagagaaaggatcaatgtgtgtccgaaaagaggcacatntgatcatcctactacgacgactgagaaaactggggcaaatcaagagggtgaggatgagggagaaacccatgctgtgactgccattcctgtacggccaagtttcccaccaacccaacaatatctgtactcagccaataacaaacttcctccttacccaccacccagttatccacaaaggccatccctaaatcaaccacaaagcctgtctatcgcacttgcaatgacgaacatcacctttatcacaaaccaagagcaccaactaagaaatgaattttgcaacgagaaaacctgtagaattcaccccagttccagtgtcctatgctgacttgctcccatatctacttgataattcaatggtagccataaccc

SEQ ID NO: 80213 - DNA, 385 bp, Glycine max
  unsure (1)..(385): unsure at all n locations
tgtgtaattgattactagtgtttggttttgaaaaatctaaagatgtaactcttcaaaaaggttttgactctttcaaatgggttttaagtttttctaaaagatataactcttctggatggctttcttgaccagacatgaagagtttataaaagcaaggctttgtttttcattttgaataatcaatcattccaagtctttctaacaatctcttacaatcctttacaagccttgagtctctttgaacttcttcttcttctttgtaccaaaagttttttgaagttttctggttttctaaaccttgaaaacttgtgctattcatccttttcattctcttctccctatgccaaanagaattccccaaggactaatcgcctgaattcttttt

SEQ ID NO: 80214 - DNA, 377 bp, Glycine max
ccctcctggttattggagaatcacttgtaaataatgaaaaacattggttttctgaagaaaaaccaaaccgaggcgcttacgtaacgatttcgtgggtgatttcgagaagattttcaaccggtcttcagcgttcttcgatcgttgttcggcattgttcggtctttaactcggaagttcccgaaatcgaacttttcaattcattctatgtacccttagtggtcgtcatttgtgtacacgtgcttttattgtcggttcatttactttctgtacccgcttttgacgtgctgtagtcatttacttaagtcatcttctagcctaatcacaaggtgaaagagatttccaccgatcatttgaattgtaatatgcggtaatttatg

SEQ ID NO: 80215 - DNA, 401 bp, Glycine max
  unsure (1)..(401): unsure at all n locations
tcttttcttntttttcctaattcctaaatgtgactcttatatttcctttaccaattggtttcttctcttttcggttcattctacatgggtcaagctgcaggcacaacgacccaatgcaatggaatcatattgtatttttctcttaaagggcatgttattggagtggataagaacttctatatattgtgcaaatataagaatgcaatttaacttggttcttacgcgtgtactttttgttcgnttatcttcatttctaccttcttcattnntttaagaaaatcgttcttgaaattgagatcataaaaagttcattgttaaatattttcatgtgtttttaaagatttatttaaaaaatatcacaacaaagctaaattgattctaataattatttttaaatctat

SEQ ID NO: 80216 - DNA, 395 bp, Glycine max
  unsure (1)..(395): unsure at all n locations
ggggttaatatacttcttccatggcttattccttattggatggcgcctcctctcttttcctttcctttgtcttccgctgcatctccatggtggaaaatcaccattaaaggaccccattgaagctcaaagatccagcctccatagaagccccacaagcaagcttccatcatagaagggtcagaatggtcgaggcagatcaaagtcaagaggganaggtcaacgaaaatttcaaagtggcattacttgttggaatcgtgacaagagaggtcacttcagcaatcagtgtaagccaccaaagaagatcaagtcgcacaaaaacaagaagcgcgattatgatgaatccacaaatgctacacctgatgaacttgatgatgcattaatctgcagcttggata

SEQ ID NO: 80217 - DNA, 395 bp, Glycine max
gctgcatgcttatatacgctctgaattcgcgacaattggcatatcgccaccctcgcgctttttgcgggtatgtggatttgagcttagcgccatatgtggccttgatgttgatgctctgccagattgctcttagtgttgagtgcactgaagctatgcttaattgtggatgcgcactctacccaattgctgagctaaacccaactgacactttttgcactttatgacttatcctcttttttatctgaaattgaccatatttatcaattaaatcaatggacaaattctagagactccgtttttcctaaaaacagatttatttacaagaatacttcaaagctatcataaattggtgactattacaatgttggaaataattttttccaaaagtagtctat

SEQ ID NO: 80218 - DNA, 423 bp, Glycine max
  unsure (1)..(423): unsure at all n locations
atctgttgtttgaaatggatagttgggggtgccaatcatatatgcatacaaagcccaattgattatggtagaaacaactagaggtgtntcataaagcttcaaatgaaaaatcaaataaatcgcttctcctcattagcgagacccatcacaatcttattgcccgagaagaattatactagaaacaaaagagcaaaactattcctagctaaggaaggtgacataaactcttgctttnntcgctctttgccatgaccaagaagagaataaatctcatttctaatctcatagtgatgatggcactcttacttaaattcataatggtatttgtaacgttgccaactattattttacaaatttgttttctattggaaatgtttatgttaatacaataataaatcaaattccatcttacctctcatctaa

SEQ ID NO: 80219 - DNA, 426 bp, Glycine max
  unsure (1)..(426): unsure at all n locations
ctccctatgtnttgngaacctctccttcctcaggtgtacccaaacccaatcacctggttcaagcacgactntctttctgcttcttgtggcttgccttgcatagctcgcattnttcttattaatttgagccttcacttgctcatgcaacttcttcacatactcagctttagcctgtgcatccttatgcttaaacatagcaatgttaggcataggcaacaaatcaagaggagtcaaaggattaaatccatacactatctcaaatggtgaacaattagttgtgctatggacagcccgattataagaaaactcaacatgaggcaaacaggcttcccaagatttaagatttttctttaaaacagtcctaagcagtgtgcctaaagtcctattgactacctcagtttgaccatcagtttgtgggtgacaagt

SEQ ID NO: 80220 - DNA, 424 bp, Glycine max
agcttcttatccaaggctcatcttggtggtgaagctccttcttccatggcttattccttattggatggcgcctcctctcacctcctttcctttgtcttccgctgcatctccatggtggaaaatcaccattaaaggaccccattgaagctcaaagatccagcctccatagaagccccacaagcaagcttccatcatagaagggtcagaatggtcgaggcagatcaaagtcaagagggaaaggtcaaagaaaatttcaaagtggcattacttgttggaattgtgacaagagaggtcacttcagcaatcagtgtaagccaccaaagaagatcaagtcgcacaaaaacaagaagcgcgatgatgatgaatccacaaatgcagcaactgatgaacttgatgatgcattaatttgcagcttggatagtcc

SEQ ID NO: 80221 - DNA, 191 bp, Glycine max
  unsure (1)..(191): unsure at all n locations
tatttttttctttaccttctcttccattggtgnttcttcatttttctccatgtatctcctcacatgtcttgttctaaatgttattaacatgattctttagagtttccaccgattaaacttgctatagaagttagatttgattttttatggttcaaatttcttgttcttgttcttgaaccatgaattgtgtt

SEQ ID NO: 80222 - DNA, 424 bp, Glycine max
agcttcccaagttccaactccgaacacaactcgcccggccgataattccaacgcaacattgaacttccctccgaggccatttcaagaattcaccccactcccaatgacgtacgaagacctcttgccgtccctcatcgccaaccatttggtcgtggtaactcctgaaaaggtcctccaaccccctttcccaaagtggtatgaccctaacgcaacttgcaagtaccatgggggtgtcccggggcattccattgaaaaatgtttggcccttaaatacaaggtccaacatttgatagatgctggatggctgactttccaagaggatcggcccaatgtgaaaaccaacccgctcgccaatcatggagggggagcggttaacgccttcgagtccgataggccgtgcaggtctaaacctttaaaggatgtg

SEQ ID NO: 80223 - DNA, 423 bp, Glycine max
  unsure (1)..(423): unsure at all n locations
tctntgggaccttgaacaagcaatcaactcctctttcagaaccatgctatgtgctcgcgactggtccctttcttcccttcgcaacttgagttcattattgctaccccatagagctccgcgaaatttgttccggccatactcttncttgcgaggccctctggtctcttgttcaaaggctcttgccgaattgcattctctttccgtaacccggcacactcctttcgaacgtgtgtacagcaactgaacttctcttgcgagtttgcctttcctaactcgcttttgagagactggacttcttcgtcctcttccggtgcttcaaaattctctttgctgacaacttttaacttggcgagccaatctaaacctcgtatgcgaactttcagccattcgtggtacccaccaatgatgccattacgaatgcct

SEQ ID NO: 80224 - DNA, 411 bp, Glycine max
  unsure (1)..(411): unsure at all n locations
gcttcttgatgaatcaacattgattcanagatgttttgatgataacaaaggtgatgatttgtttgctcaaaggtcaagaacacttcatgatgacatagatgatgatctcaggaattaaagaatgagttcaagatgttcaagattgaatcaagaacacttcaaggttcaagaggaaatttgatctcaggaatcaagaatcaagattcaaggctcaagcttccaggaatcaagatcaagattcaagactcaagagtcaagaatcaagagaagaattaatcaagataagtatgaataagttttttcaaaaactgagtagcacatggatttttctcaaaacctttttaccaaagagtttttactctctagtaatcgattaccagattattgtaatcgatttccagtagcaaaatg

SEQ ID NO: 80225 - DNA, 440 bp, Glycine max
  unsure (1)..(440): unsure at all n locations
actaagcttgtaagctttgtgttaacttctggacgctattaacaaaggattgctctttgtgcgtaancaacacacgcacacgcggatacacaagcacataggctctccttcgccattctcgcacagaaacacattctctctctcacacacacagattgcataattatgaatcatgcaatatgactctgtcgctctcatattggaacccatacatgctcatgagatctcagatcgcacgcacacactcagaaacccacacgcgcacacactacactggctgtgacagacacacacacgttttgcagaaacacgcattcttatcaagacacacgctgagtgaaacacacacacttacacacacacttgctgaaacaaacactcactcagacacacacattctcagtcacacacccacgccgagaaaggcacacacacacaca

SEQ ID NO: 80226 - DNA, 425 bp, Glycine max
  unsure (1)..(425): unsure at all n locations
agcttgtgcaaatcanatcacttctacatctcatctctagcatgcattttctttctttacccactcctcacgtttgggtttttagggaaaaacaccataactaaacgcgccggcagggatccctatcgcaccagatccaaatctagaacgatgggtgatcaaaaggagacacaggaacagatgaaagccgacatgtcagctctgaaagaacaaatggcctccatgatggaggccatgttaggtatgaagcagatcatggagaagaacgcggccaccgccgccgctgtcagttcggctgccgaagcagacccgactctcttggaactacgcaccagcctccctcaaacatagtangacggggaagggacacactggggcacgatggcagtcctcacctgngatacaaccgagcggcttacccttat

SEQ ID NO: 80227 - DNA, 377 bp, Glycine max
caacaggcttctggaggaatcttctggagggcccaagtgggcctggctgctatttgcaccccacattttactaagtacaccccctgcctttttttggtgattcttttttcgtaaagttacggagacttacgaatttcgtaacgacacttgttttctttccgtaatgttacggaaccttgcggattacataatcatccccttttttgacttatggaatgttacggaacctcactaattgtgcaatgatgcttccatttgatttccggtgtgtcacggaaccttacggattgtgcatcaatattttcttttgttttccggcatgttccggaatttcacaaattgtctaatgatgggtgccaagcacctcacaaggacca

SEQ ID NO: 80228 - DNA, 320 bp, Glycine max
  unsure (1)..(320): unsure at all n locations
atttttgaaaccgaggtacgtaaaaacacatcgtatttaatacctatgtatataatagaattacacaaaaaaagtatatatgttcatactaacgttggtagttaacatcagtttttttatcaaaccaatgttaagttccaaccgtaacatcagttttctaaaaaaatggatgttaactgtcaaacgttaacatcaattntctacaaaaactgatgttaactatcaatgttaacattgattttctactaaaatcgatgttaactgccaacgttaacatcgattnttcaaaaaaccgatgctgtcattatatgttaacatcg

SEQ ID NO: 80229 - DNA, 418 bp, Glycine max
  unsure (1)..(418): unsure at all n locations
tgcatgatgttaggttaattgttagttagaatagtgttattgggtttgatttgcataaaatgtatgtcattttgacatgttttggttaggatttgatggtctaatagaggcctaagttgaagggctggaaaagccctaattnttctggaaacggcgatgaacatgctaagcgtgccttgctgcgctaagcgagttcatcactttttgataaatatttgggtttccagatgaacccgaccctgttctgctaagtgagttcatcttttctgatgaatgattgaatgtttatgaactcactaagcgcggctgtgctctaagcgagtaatgtgtttcagacacttagaaaatttttcattgcttttgtgttcgtggctaagcgatcttgcccgctaagcccaaggcatttgtgattttcttt

SEQ ID NO: 80230 - DNA, 288 bp, Glycine max
ctgcgagcacgacgcttctggtcgatgaatgcaaggcttctttttggatggctccgaggccatcccaagaattgttcccactcccaatgacgtacgaagacctcttgacgtgcctcattgccacccattaggtcgcggaaactgcctaaaaggtgcctgcaccccccttccaaattggtatgaccctaactcgccttgccataccataggggtgagccggggccaaacaagaaaaatgtgtggcccttttataggagtgcgacattagaagatggtggatggctgatt

SEQ ID NO: 80231 - DNA, 427 bp, Glycine max
  unsure (1)..(427): unsure at all n locations
taactntaccatatattctcataaagacatgctattgggaatttatgttcttcggacaaacgattagatgttgctgtatgagcataacaataacaagcttatcctaatttataggccaagttatatacaagacctaacattgatgtcatctattggactaggcatcatatcaaattatcaatgaatattccttacacacaaactcccaacatgacaaaagcaccatataaaactgagttatggtaatacttgaatccatgaattttttttagtttaaaagataaaaatctagtgctggcactcataccttattttggtgttattatggaaatttggaaaattgaccacactagatttcgagttccttatttcaaatctaagagagctaataataataataataatagatgacttgagatttacattg

SEQ ID NO: 80232 - DNA, 397 bp, Glycine max
atcttatagtttacaagtctctctgcgaagtcctcaattagctaattattgctattgaagaatatgcgtataataatatgctatcctacaactctaatgtgctctattcataactgcattaaaaaaaattaaaataatgagttggcaacaaaataactcagtacaatatctgctattgaaagaaggaacgaacaacaccaaattctcaatcacacaacaatcattagacttttaatccaaatatccaatcgtattacgccaaatgaaacttgattgaggaatgatctaatgcgacagtgaaccagttttaaaaaaatacttttttgggtacagtaaggtgttttattttgccgcagcatatgagaatccctaatcaaaattaattaaattatcaaat

SEQ ID NO: 80233 - DNA, 428 bp, Glycine max
  unsure (1)..(428): unsure at all n locations
ntacaagttctgtatccatccatccatagacagtcattacatttgacgtacacaaagattattgaacctaataaaactaaaggaggacatatataatataataggcataaaaaaaaagggttaaacagatgaagcttacagtcctcaaataccaaaaacctcaataactctggcggtagattaagttgctattatgtcttgcttgcatgcatggaaacctcgcgtttggaagaagagcaagcaacaatactttggctatgacaatgcgttttcacataggacttcaagaactgaacgagaaaagcagcgtttaacacggagttaaaaacccaagccccgattccattacaccctcctctcaagtaatgcaacgagagcactccaacgtggcacattaagttaaaacccaacagcactatctgaaaatt

SEQ ID NO: 80234 - DNA, 402 bp, Glycine max
  unsure (1)..(402): unsure at all n locations
agcttctaaagaaccacaattgggataattactagatttaaagactctagcaagtaaagaataatccttttgtaacaatctccatcattggtttgccaaaagagccaagttaaaggcttttatttgtctaaagcccattcctccatcttttntattattttggtaatttcttccaactcagccaatgcatttttttcctctccacatttccactcaaaagatgttntaccaatcatgatctcaatctcattgcacaaaaaaattgatgattcanaacaactcatagcataagtaggaattgattgaaccactgattttatgaggatttctctacctacctttgacagagtcttctctttccaaccccttctcgaacaaagctganaaattatggctttgatc

SEQ ID NO: 80235 - DNA, 391 bp, Glycine max
gtttttgttgttgagatatcctatagtagttgaagatatatattggagcattaagaaacatttggaagtatacacgatgggtgggcaccatgagtatttttgtcttagagtatttcaagtatgcatcttcactgtgatgtgttataataatgagaataagaataaataaaataaggttgctatagaaattattgtttcatagtgattatttttgttactttataaattaattgttgtagaagtttttttattttattttgttgaattaatatatttcaatttaatttatatttttgttgcgtcaagtaaatgttactattgaatgatatgtgtaggatgcatgggatgcgataaattattttattatgaaattgtgattgagattgtgtgt

SEQ ID NO: 80236 - DNA, 129 bp, Glycine max
gacaaagagatcttgatatttatgtttcacttatatccaggcgacctaatcttataatacaagtttgctcattgtaaccagatgactatagattcaggatcaaacgcatactgtcccccacatattgat

SEQ ID NO: 80237 - DNA, 356 bp, Glycine max
ttacattcgtaagcttctcatgacaatgagaaactaaaacccactattgtgaggagctatgcaaaccaaactttctttgatgtcatgattttaaactatctatctaatatgacgttgatattattgtttttttctatgtttattcacatgtttgtggtttaatcattataatttcatgtaatgttttaggatttagacattgggaaatatttatatactaagaacttgagaagaacatctaggtgatctatgtctatgggtagagtgatattgtttagtctgttttatgcatctctgttcgtaatgcaaattatttaatataactcttaagggattaagagtgatattagatgatt

SEQ ID NO: 80238 - DNA, 372 bp, Glycine max
agcttgttatggtgaacaccaatgctatcgtgtccttatgaagggaatcctgtattcaatctcttcgatctgctaaaatcatgtctgaaacctgtaatataaattctttcaatattctagactatgtctcaaaacatgtcatcggccattagtgaaggatacatgtgagcaacaataaaacgtctgtactctgcacgagcaaatcatatcccacatacaaatcatatactttcgacaatgattgtcacaattgacggccaactactgcaaggtatgatgggaatcaaatcttataaagtatttgagtgagaactatatcttatataagatagcgcagcctccgaatatgaattaaccggataatggatatat

SEQ ID NO: 80239 - DNA, 337 bp, Glycine max
caacttctagctcaactactaaaagcaagtacacgaaacaacatccataatgtgacccttgacactaactactaacccaagcccatgaggagtcatggggcctctcaaatatgaaacagagtcttaaatgcatagcataaagttaacccgaaatactacccatacacagaagccacacaaattaactaacatatcttgaaattataaagatagagaaaataggttatgcactgacaatgtaaaacagttttatatcgtcattcaatcacaattcgtcatgtatggtgagcttgttaacttttatgctatacaatttaaaaatcatataaatagtaat

SEQ ID NO: 80240 - DNA, 359 bp, Glycine max
atacatcttagcatgtatattacattttattaattcattaataaatgcatttaaatgttgcatttattattattatgtaacgtcataaatgtcttattatttattccctcctccttcaaagcaaagaacaatgtttttcattaacaactatattccaactcattaaactattcttatcaattaaactaacctttgtgatgacaaatgattcattatataatttttaatgtatcttctatcatatttttaagacaatatatactcattagtttggtttgataatttatattttcattcattcatttggattgcttttttattttctatgccacctacttttacttgattgcgcatatatt

SEQ ID NO: 80241 - DNA, 428 bp, Glycine max
tgtagcttctctggaatggttggaccagggttattgttgaaaagccctttggccgtgattcagaatcttcggctgcattaacaaaatcactcaagcagtatctgacagaggatcaaattttcaggtttcgaactaaaactgatcattttcaactttaagattgtaaaatacattttataaaatgggaagtattatacaggattgaccactatcttgggaaagagcttgtggaaaatctttctgttctccgattctcaaatctcatctttgaaccattatggtcaaggcagtatataagaaatgtacagttgatattctcagaagattttggcactgaaggacgtggcgggtaacctttattccttaacagctttaacactttctgttcttatatatgggattcttatccattttcgtatctgtaccat

SEQ ID NO: 80242 - DNA, 320 bp, Glycine max
tggactttatctgaaccttcaaaggatataaatccaatagcgtgttattgggtttacactatatagatcgcaccatatttgaaggctgattcctaccaaactagtctagctcgccaaggcgattctgtctaaatgaacagattagattatgataaaactttcttccatggcaatgctcacatcaccttctgattcttcttgtaatagtgagcattctatgatcatgatacattaaaaggatgttgaaaatgactttccttaatggtgagctgtaagaatatgttgctttgacatctacatgaggtattacatccctttct

SEQ ID NO: 80243 - DNA, 274 bp, Glycine max
acatgggattggttgccaatacactatgcctggttctccggatcataatggggtgggagaaccaataaattgaacattattatacatggtgagaagcatgaggagtaatgtagagcttcctcaatgcttgcggattgatgctcttaagacggctgcgtatatattaaactgagttccaaccaaggctgtctcacagacaccttttgagttgttcaatggttggaaaccagattgcgacatatacacgtctggggatgcccgtttgaagtaacaa

SEQ ID NO: 80244 - DNA, 418 bp, Glycine max
  unsure (1)..(418): unsure at all n locations
gcttgtccaaaanacttgtgatgaggttctggatgtagggatgagggcctgaaccacattaaacaaatttgaggtcgtggatgtaggcatgagagtctgaaccacgttaacaatataaattgtgtggatgtagggatgaggacacgaaccacattaaataaatttgtgatctttttctatttaatcttatggcgttgccttttgttttgtggtgtgttntctcatcaatatgaataaagagatgtctgtgttttcccacaacagaggagagagaggggaaaataaaaggacaagtggcatgagaggagtgaataaaagggattctgctactgattgagaagagcagacataaaggaggaggaatggaatggcaatggatattcacgaattacaattggttggcagtcgggtagccttt

SEQ ID NO: 80245 - DNA, 417 bp, Glycine max
  unsure (1)..(417): unsure at all n locations
ggccacaaccctgagtgagctntcctagttgggtcttaactttcctgctcgtatgtgcttccttgcttcaccttggactcaccacattaggtcgctaggttgaaaggctcgaagctggaccttggtattgtatcttcttgatgctcagagcttggtggcctcttccttgattttggccatctcttggactttgcccttcatctctaattccacccttatattttctttgttcttttgttcccaaaaaaacaaccttcttgtcaatggttcctcgatttcgacagggaacatggcatttgtgtcgtatgtaaggcgaaaaaaggtcccgttagtcgttgtctagggtgaacaatgataagcccaaagtatgctggggagttcctccttccacggacccttggacttgttaagtcttgt

SEQ ID NO: 80246 - DNA, 382 bp, Glycine max
gtcatgcgcagacatgtcttgctataatgacctatgttggatcatcatattccatgcaacttcttgattataaaatggatctttttttctctatatggaaaggtttgttggatgtggtacagttacggctttaatgttttttatggccggatgtcgtagtcgcactatgttttgttgctctgttccttcaaagaacaattgcagcagcatgtccggttccatgcaatggaagcagacctggcttgatctgatatacatcgctcatagcagagtctaacaggtgcataaaagtgtcttcttttagaattgactgatcctctgataatatgaagaattctctacctacctgtatgaaaaattgaaaatatgatgctccacatta

SEQ ID NO: 80247 - DNA, 399 bp, Glycine max
  unsure (1)..(399): unsure at all n locations
acattccttgaatacgtgactcgtgaattgttatgtggcgtgtaaaagtgaatgattaatcatttgctgtctcttggaatgaaggttaattttggatattggagtaatttgatcggatacactaaatggtggaaaatttattggcccagtataagtcttttgaagtgataaaacctttttttcttgagaaattatgtatctgctcaagctctgcgaaatnttcttgttttaaagttgaaaataaatattatgagaaacaacttatatgttcggaattctgctgatgtattttttttaataataaatatcctgcttgacatgggacatatttgcaatctattnttggaatttttctatgacattngtgatgggctgatgagcanaangggcttacattta

SEQ ID NO: 80248 - DNA, 401 bp, Glycine max
  unsure (1)..(401): unsure at all n locations
agctngaattcaacctagaattctntgtcctactaaaccactgctagctntaaaataatcagtaagatttgtcataagattgttcaatgactaanagatgatcatcttatcgacggatatcacactcaacactttagtcttttctctcaaaatatataaggtgctttgagagctttttatctatatagagatttacaaaaaactttacaagaaagaattaaagaatatttcgtgcaagatgattcgtgttttgttattcaaagcatttttctatttataatctgcatcttcaggtgtctcttgtctctcaacgaattgattcttcactctagatcttagtctaatgaattatggtagttggatcatntaatggttgtattaaatgcatgtcccttcttcat

SEQ ID NO: 80249 - DNA, 412 bp, Glycine max
gacttataattaagaaaaaggagcatactcttgacggcatttaagaaaatatcattatacaagtcctgcaaacataacattggatgattggtaagatgaaaaaatatatgcataatgtttgcttgatggtaaatgcttagtgtcagattgagaagtcaaaccaccaaaaaaatatataccagattgagaatgcctgcatttccccaaggacaatcgttgtagtcacacttgttatgaggccaccaatctagagtcgcacagataaagttttcatctgtggtagcaatgcttgtcacccctttcactctaaggtccacatctttagctgaagatgtggaaaataataaaaggagaacacaacatatggttgttttcacattcatggtcaatgaatacttaagaaattaagaga

SEQ ID NO: 80250 - DNA, 416 bp, Glycine max
  unsure (1)..(416): unsure at all n locations
ttaagtcacctgcggcatgcaagcttctcacaatttatttttctcaaacatgagttttggatgaccaattactaagtctttcctaactagatgattgagatgatgcatgtttatgtgtgtagtcctacgatgccacaaccaagaatcatctatttttcttaccaaacaactcagctcatgaaatgatgcatgttcaatgtttaatatatagatattacctatcattttacctatatggacaacctcaccggacatggcttcattaataaggcataaattcttgttgaatttgattttgaagcctttgtcacatagttggctaatgctcaagaggttatgctntagtccatcaatatataaaacactctttaatagtgttttgtattgatttccaatatttccttcttccataattt

SEQ ID NO: 80251 - DNA, 424 bp, Glycine max
  unsure (1)..(424): unsure at all n locations
ctntgtctctcttattaggcaatgggtggccctctctctctctattgtgaaatcctcatctttttttcttttctacttttgcagcaacaacaaatttaatcatcttttcaccgacgagcttgtccctttcaataccaaccccgacaagatgctcgacctccaacacaccaccaccttnctcccctgcaccaagatcaatgcctctgctgattcctctgtcaccgctgactctgacctctgcattttcactactggcgcccgccagatcactgatgagtcacgcctcaacctcctctagaggaacctctccctcttcggcaccaccattctgcctctcgttcgttactcccccaacgctattctcctcatcatttccaaccctgtcgacattctcacctacacacatgcaagaaatgaaggaaaa

SEQ ID NO: 80252 - DNA, 426 bp, Glycine max
  unsure (1)..(426): unsure at all n locations
nntgagaaattcanacgacaatcactntnttactcggatgtctgattgagtcccgtaatatgtcgagacgctcgaaattgaagaccgaagctctgagcaaattcgaacgacaataactttttactcggatgtctgactgagtcccggaatatatcaagacgctcgaaattgattatcgaagctctgagcaaattcaaacgacaataactttttacttggatgtctgattgagtcccgtaatatatcgagacgctcgaaatggaataccgaagctctgagcaaattcaaacgacaataacttttttctcggatgttcgattgagtcccgtaatatatcgaaacgctcgaaattgaatgtcgaagctctgagcaaattcaaacgacaacaactgtttactccgattgttgaatgagtcatggaatata

SEQ ID NO: 80253 - DNA, 384 bp, Glycine max
  unsure (1)..(384): unsure at all n locations
atcttctatataagctgaaccatgttatcaatatacacaagttgagtgttattcataatattagagtttatctcttttatcttaatgagagtgattctcctaaattcttgagtgattcaagaacacccttgctgtatcaaaagactttcacaacctttgtgtgttgccctcgctggaaagagtgattctttccttcctatcatctccacccttgttctttcanaccacaattccagaaaatccacctctgcccaaaattatctcgtgaccataacttcattttacacactcaaattaagtgattcttgagcctanattgatttcaaaacgagacctttcacctcgttttggagcacctcatttggagccctgtagcttccgtta

SEQ ID NO: 80254 - DNA, 415 bp, Glycine max
ttcttgctgggagtgaacatttatgagaatgtgagagcgcacactctacaatggagactcggggctgctggaatcaagttttcccataagccttggcattcttgaaggttggcgaatatctccgagtgaacaatggctgcgaccatgcccattttaaaacgatcgccggacctgctcacctaggctagacacgacctacctagacctccctactcttatgttttttaccaaaactatactatcaatcgtcatgcatatatgatgttgcaaactgccattatatcaaatgagagcggcgcagtgaaccctaatgcttcaccgttaacgtatatctgtctcttctatcacataataaaagataccatggtgccgacgcttcacgcctcactaacgtcttgaaccatgtgctagatgg

SEQ ID NO: 80255 - DNA, 372 bp, Glycine max
  unsure (1)..(372): unsure at all n locations
tcccgcgactgcggtngctgattgaaatatgaagtgtacaacatccaccggagacacggcgagaatggtgattacctgacatatgtaatgaacactcggatagatggtttagattccatctttgagtaagctggaaatgataagaggaaaattctcactcttagagtgtgtgagtgcggatgattagaagaaattttccctctctttaatgggagaaagtgactaaggaagatgactatggagagactgctcctgatcagggatcgaacgaaaacacaataaatgtgcagaaaggtctttggaccggacaatatctgaacagtacagaattgtcaccaaatgaacataaagaccgaaaggaaaccactacct

SEQ ID NO: 80256 - DNA, 379 bp, Glycine max
  unsure (1)..(379): unsure at all n locations
ggacttaagcgacgagctgcagcttgagcaattgaacgacatnacttttgagtcagatgttcgattgcgtcccgtatgatatcgagacgctcgatactgaaaacggaagctctgagaaagatcaaacgacaataacatttaattcggatgtccaattgaaccctgttatatatcaggacgctcgaaattgaaaacggaagctctgagagtagtccaacgacaataacttttgactcggatgtccgatatagtctcgtaatatatcgagacactcgtaattgaaatcaggagctctgagcaaattcaaacaacaatatactttgacacggatgttcgagtgagtcccgtatgatatcgagacgctcagaattgaaaacag

SEQ ID NO: 80257 - DNA, 362 bp, Glycine max
  unsure (1)..(362): unsure at all n locations
acattcgagtcaaaatttattggtggttgaatttgatcagagcttcagttttcaattacgagcgtctcgatatattacaggacttaatcggacatccgagtcaaaagttattgtcgtttgacttttcttagagcttgcgttttcaatttcgagcgtctggatatattacagggctcgatcagacatccgagataaaagttattgtcgtttgactnttcttagagcttccgtcttcaattacgagcgtctccatatattacagggctctatcggacatccgattcaaaagatattgtcggttgaatttgctcagagcttcagtttcaattacgagcgtctcgatatattaaacggctcaattg

SEQ ID NO: 80258 - DNA, 355 bp, Glycine max
caacaagctttacacattcacaatgcgcgcataaacccaccatcccctgttgcccacctccaactgagctcacgtactcccacgtagcccatatcctcgtttctctcaacaccgggtccccatcaatcctctcaagcttccacaacatccaagcaaaacaacattcaaacagcataagctatcacaaccaagcaaaacagagcaaaggcagaaaactctgctcaacacatcaaccaaaatcacagcttttctcacgtaaagaccacagtaacaattccttcgatccaattcgttaaccggtggatcgactccaaaattttactggaagtctatagtgcataagcctacattttga

SEQ ID NO: 80259 - DNA, 396 bp, Glycine max
tgatgggtaccatgaggtgtttgctggggtttgacccacgcgggtgttgaagagacggcatgggcatcttcttccttcctttgtgcccctgtagccccgattcttttggcattcacgtttgtggaggaaacgtaatcaaactttcctctcttcaatccaacctcgattctttccccggcaaacaccagatccgcaaagctggacggcatgtaacccactagcttctcatagtagaacactggcagagtgtctaccatcatggtgatcatctctctctcaaccatgggaagagctacttgtgccgccaaatccctccatcgctgcgcatattctttaaaggtttcaccctctttcttgaacatattctgcagttgagtacggtcaggagccatatca

SEQ ID NO: 80260 - DNA, 429 bp, Glycine max
  unsure (1)..(429): unsure at all n locations
nggatcattgagctagtttatgccattggctctcgtcaattggctgatggatatacaaagtattctttccatgctcgtcattgagagattgtgaggggatccaatgatgtaacattgtgattttcttaatgtgtagttaggtgattttaattagattgcaagagaaaataaatttaattttcatgtttaaaaaaatataataccttgtgttgtttaagtgttgtgggttaaattgttttgggcttgaaacatggttttagagggctttaatattgtaatgtttgataaaaaaaatggtaaacaatggagacatgagcaatgtaattcttgtactttacccaaaaaaaggatcacagtttagtgattntgtgtgatgagaatctctccctttntcattataccttctttttcttcttccttgcttttcta

SEQ ID NO: 80261 - DNA, 425 bp, Glycine max
  unsure (1)..(425): unsure at all n locations
gcttccatcatgcttctgtacagactttgatcaacactggtgctagcttcatccttttacaacttcaagtgagtaggtgcaggtgttcttttatggctggcattttccatcccaaacttcttgacaatgttctttgcatacttgctttgtgagaggaacatgaagtcttccatctgcttcacttggagtcccagaanataagtcagctctccaacaagactcatctcaaattcagattgcatctgttggacaaaatgtcgaagcatctcattcgacatccctccaaacacaatgtcatcaacatatatctgtgctatcatcaagttttcagcatcttgtttgacaaagagagtcttgtcaattcctcccttcctatacccttgctgagtaaggaactctgttagcctttcataccaagctcttgg

SEQ ID NO: 80262 - DNA, 432 bp, Glycine max
tcttagtgtcacctgatgaattcgtggctacttcatgcacccctctaattgacatagcatcacctctggcactaaattgcttggaatttgaaaccctcttctcaattaaatttcttgcttcagccagggtcatgtctccaagggctccaccactggcagcatttatcatacttctcttccatgtgctgagtccttcataaaaatattggagaagctgctctgaaatctggtggtgagggcaactggcacataatttcttaaatctctcccagtattcatataggctctctccactaagttgtctaatacctggaatatcctttctgatggtcgtggtcctggaagtagggaaattgtttttctaagaatactttcttgaggtcatcccagctcgtgatggactgtggagcaaggtaataaaaccagtccttt

SEQ ID NO: 80263 - DNA, 116 bp, Glycine max
gagttgagtctagtcttacatgagggattggcggacaacatttcgtttaaagctacactaaacctaagagggttggctaaatcatgtgcagccttacatgagggatctgcggacca

SEQ ID NO: 80264 - DNA, 154 bp, Glycine max
tcgtccgcagatccctcatgtaagactacacctgatttagacaaccctcttatgtttagactaacttatactgagttgtgtccgcaaatccctcatgtaagactagactcaactcaagtagcttatggaaatttagcctaatttagcctaaact

SEQ ID NO: 80265 - DNA, 445 bp, Glycine max
  unsure (1)..(445): unsure at all n locations
cgggatccttatagacgctctgcaagcatcgcagcttatccttatggcaactcccgccttatgacgactatcccgggcaagacgatgaggaaggagatacccatctcggccccctgctccacctcaaagatctgtccccacatgaactaccccaaccgaacatagtccgccatatcccgacctcacccacacccgtaaaagaatctgttcccttcgcggaagataagggaaagattgaggcgctcgaagagaggttaagagcagtcgagggccttggcaattacccattctcgtatttagcggatttatgtctcgtgcccaatatcgtcattcctcccaagttcaaagtaccagacattgataagtacaaagggacgacatgtccgaaggggcatcttcggatgtattgctgaaagatggnggcgtattctgcggacgagaaatt

SEQ ID NO: 80266 - DNA, 434 bp, Glycine max
  unsure (1)..(434): unsure at all n locations
ttgctaaaagattatggcattngaaaacactcatgcatacgcatacacatgcatatttgttatcttgtgacagggacaggatcgttttaagcaatagtaaaataccgcgccaaatccaagacagagacgaatcgaggtaagcgggaatacggccatgatttgctgcccaatgtcatttcctgcttttaggtacttggggacgggcacgaatggaggctangcccatgatcaacagatcgttgtcccacatccagctctagacaagcaagaagcgctactgggaggcagcctagtatcctttaaattcctacctgttattgctgcttgatgtgccatcattttcttctattttctaaaccctttttgcaccattttaattattgattggtcttaattgtcaattgattaagcagttttattatctgggctcattt

SEQ ID NO: 80267 - DNA, 375 bp, Glycine max
  unsure (1)..(375): unsure at all n locations
accctgctaagtttttactaacatcaaactaaacttcattcttaaattccttttggtggactagacttaaggttaataggttaccaaattttaagctaatttaacctaaacttttgccctaaaatcctcttgctgggttaaacttggcccaaacaacattatggtaacaacatacttaaaacaaaaacttaatccgcagatccctgttcgtagaactaagctcaattctgcttcattcaagttctaaggaaacaatacatttgccaatgttaaaatcacctaactaggcacacaaatggttgatcagaccaagagcatacaaaacttaagcactgaagaagcattgaacacacgaaacgnaatcaattagatatg

SEQ ID NO: 80268 - DNA, 422 bp, Glycine max
  unsure (1)..(422): unsure at all n locations
attatgaaatgataagtgttattatgtcttgacccgtgtgtgcaattcgtgcgtaatgtgattgatgattgaaaaatgaattttaaaagataaagtggtgacgtgacgtggattgtattaaattgatatatgttataaacacttccataatttattttgattacatctttgtttatttgggttttttaatgtgataactcattccctttgtgctatttgtgtttggatcttttgatgatcttgaaccttgtgtttgtgagagcagatgactangcggatgactttaaagaacctcgtcctagagggagttggaacacaatgctctgataagatgtgacattggagcatatgtttctatattaattgcatgaagtgttagacgatctttgtttgagccaagatgcttttactattaatttgga

SEQ ID NO: 80269 - DNA, 400 bp, Glycine max
  unsure (1)..(400): unsure at all n locations
agctcactttaaattttactcgggaccaacatgttatattttgattcataaattcacccttantaaagtattcactcttgaacaaagagaatattaggaactactcactctctttcatgataagctacataacttctcctgtatcaagtatgtcacactaatttatttttaagtttttttatttctcccaattgtttaaattttgtctatctcaatttaaatttgaattttgaattttaaaatttgatacattatatcaatttgatagacatactgatcatatgtatttatttaaataatttgttcacaatgtggtcatagctaaaaaattgcagagctaaaaacttctaactaaatgcttaggtgtaacataaattggaaaatcaaaatattgatactt

SEQ ID NO: 80270 - DNA, 428 bp, Glycine max
cgttccacctatatagcataggttcttcattggtaatgatgttgctaattagttaaactctcccacacctaagtttggaccaagtagtaaaagggtgaccaaagagttaactacaactccaattcttcattaccagtcaaataaactattgttttcttcgatagaccaaaatcattttatatgttggataacactattggtcacatagctgattctctccagcaagatgaataacaataaggaaaacaaactttctcaccaagccactaggagagaagccaatcattgccaagcaagttgcaagggatgtttcatgctcaatttcactcccactattggcaaaaatccatccatgccaatgtttatataaaccccgctctttttactccttggagattgttgttgtccccactctatttactccttgg

SEQ ID NO: 80271 - DNA, 402 bp, Glycine max
  unsure (1)..(402): unsure at all n locations
agcttgaaggcatgtaacccaccattttctcatagtangacaccggtaatgtgtctaccatcatcgttatcaactccctctccattattgggggcactacttgagctaccatatccttccacctttgggcgtacctttgaaagatttgtgctcccttttgcacaagttctatagttgcgtcctatccggagccatatcagaattatattgatactgcctaatgaaggcaaccattaggtctttccaagaattgaatcgggaaggttcccgattagtgtaccaggtgacagctaccccagtaagactttcctggaagaaatgaatcaacaacttttcatcttttgcatatgccctcattttcctgtagtacaccttcaggtggttcttgtggcatgtagtccc

SEQ ID NO: 80272 - DNA, 427 bp, Glycine max
gttgtcctcaaatccctcttgttggactagacttagactaaacagcattattgtaacaacatatttgaaaccaaaacttaatccgcagatccttcatttaagactaagtttcaatcctacttcattcaagttctaaggcacctaaccatgcacacaaatggttgatcagaccaagagcatacagaatttaagcactgaaagaagcattaaacacaagaaacacaatcaattagatattaaagtaattacatcaactattctttagaaatccccaacaagggtgtttagccagccattacagaaaaaccctaacaataatgagattacaaaacctatgtatctctgcaaaagatgctcctcttgctgcctccagagctcttttcccaaaataggccctgtggtgcgctctggaattatatgcaaatca

SEQ ID NO: 80273 - DNA, 391 bp, Glycine max
  unsure (1)..(391): unsure at all n locations
agctagtctcaattcagcttgtgctttctctctcactactggatttctcatcatttctgccatagcccactctagtgttgatgctgaagtatcagntccagcagcaaatatgtcctggtgaaacaaataaaatatctttatataaagtctggtaaaatgaaaagagaaattgcatttatataactaaatcgggcaacttttttaatagaaaaggagatgagaagaaaaggaagaaaaatgtaagataaagtaattagtacaaatgagaggattaaagagattaatgttataaaaagagatngtagtgagaaaaaacgtacttcagaaacaggaaatataatgaaggtttgaggcattacttacaatatncaagctttgatgtgtaatcgca

SEQ ID NO: 80274 - DNA, 426 bp, Glycine max
  unsure (1)..(426): unsure at all n locations
ntatccctcccattactaagatctgaccagcctccatattntgacattaaaattctggcccacaactggttgtgattagaggataaagcccatacccatctacccatcaaagctgtgttgaatttagaaatatctttgaccccaaggcccccatctccttggggagacatatgacatcccacttcacccaagggattttcttatgcccttgatcacccccccacaggaagttcctttgcaaggaaacaagtttgagagctattcttcgtggaagcttgaaaaaagataaagtatatatgggtagagcagtcaggacaattgattagagtaacctttccagccatagataaaattttctgattccatttagatagcttagcttcatatttgctgatcagaggttcccacaccaagctgctggtagac

SEQ ID NO: 80275 - DNA, 391 bp, Glycine max
  unsure (1)..(391): unsure at all n locations
agcttgatntatactggttcgggccacttccgcgcctatgtccagtcctcaagaaacccacttgagatnttccactctctttgtaaaactccttttacaaagtctgaaccacacaaggacaacccctcccttgtgttcaggaatcctctacaacaagagacccacggtctcttaatcccttttcagaaataagaagaagagaagaagagatctctcttagaagaggtagattgtaaaatgaagatcaatcaaaaattccttattgaatatgcaagtggttgaccaaggaatctttttgagaggataagacatttcagttcagataaactcttgatctttcgagaggataaaactgtttgggcaatgaaaactctctttaaaacatttgaat

SEQ ID NO: 80276 - DNA, 427 bp, Glycine max
gctttatcttgacacctacattcctatgcacgacaaactctttctgtacacacgcgcattaaaaactctctctctttatatcaacattgtctataaaacctgtattccttttcaaagatttctttttccctttttcaacatacactcgttgtttatacaaaaaccttctttatatacactaattgttcacacacaagaatttcttttcacacaaagtcttttcttacactatttatatacaaaaacttttttcttttctttatatacagatatgacatttgttcacaacgcccctttctttttctatttttggtgttatcatgatgtttgttcattttatgacgacgttcctaaatgaaaattctacacgattccggaatttgaacaaacattatcgacaataacgaagtaagcactaacgcaatag

SEQ ID NO: 80277 - DNA, 352 bp, Glycine max
tcaagctttatgtataatttgcgagaggccgaattgtcttgaaaccaaattatgctggtatccaaccaggcctaaatagttcgattgaacacctgtacgacaagacaggatctgtggattcaagtaaaatgaccatatttcgttcacctcttcttattgtccggatcgacagtagggaaatagtcagtgaaccaggccgggccaacctttcgactaatgaatggagcatgttggggaagaaacttgtcaaagctcaagaaaattctcatatactttaggaacagtttttgtgagcctggatctaaggtcttgggcgttagtcgaagtgctctctggccttcaatcgagcgat

SEQ ID NO: 80278 - DNA, 367 bp, Glycine max
gcttagcataattacaacaatttccttcacttacaactaccctaaagcaataacctagtagaactacccattatagcttccaagaacccaacacccacagatttcaagtgagaagaagtccacccttacctgaaattgaagggcccacgagctagaggtaggctcctagactccaaaaatagctttatcttgcaatttggtgtagaaatgaagaggaatttgtagcttcaagagagacaacaatggtggagaagaaaagggagaaagcaacgtggaggaagaaagagagggctgctggaattttctggagaaagagagagaagatttggctttgtataaaaaagagtgttcttttctttttgtttca

SEQ ID NO: 80279 - DNA, 407 bp, Glycine max
  unsure (1)..(407): unsure at all n locations
tagctnccattggagagatcccatgagggtgttcctcctaattccaaactagcaaggactgagccgataccagctaaaccacaacctctagtagtggatccacctccttctcttgagcttgaaatatggtctcctccaccagctccagctccacctctgataatcatctccaatgaatcatctaatgaagctgtttcctttcctgattcgccatcttgcaacatagatgatagttctgaattttctgattggatgaactgctgaatgattctccagtttggacattgatttccttttcagattattattattattattataattatgggtntagtacagtatttcccttatgtctacatacactactagttttaattatgattaatngatttgctcatcttgaagca

SEQ ID NO: 80280 - DNA, 324 bp, Glycine max
  unsure (1)..(324): unsure at all n locations
gtaatcaattaccaagcagtgcaatcgattactagaagacaattttgaanannatagcttttagaagggttntgaaatttgaatntaaaagttgtaatcgattaccattgatgtgtaatcgattactagcaacggaactcttgaaattcaatttgaaaagtcatgacccttgaaaatttaactgtctaatcgattaccaaaaatctgtaatcgatttctaatgaagaatttcagaanaaacttttgaaaagacacatctcttcaaatcattttgaaaaggcacgaagcgcctatatatatatgtgngtgtgtgtgtaagtgtgt

SEQ ID NO: 80281 - DNA, 326 bp, Glycine max
  unsure (1)..(326): unsure at all n locations
agaattatgatagaagtgattggaaaaagaccacttaatattctcacacaaacactttcttgccgttgattacactctttttggctcctttcctctaatagactcaccactctttccttttatcactcaacttccccttataagctcttaagtaagaacctttggggttgattatgcacgacangacacaacaaaagatcaatgagaactttagtgaataagaacaaatagagcacaaggaacaatggatttaaaacaagtggttttttaaggagaatttaacctacggaagattgattgaacatgaagaaaataagaccaatagt

SEQ ID NO: 80282 - DNA, 369 bp, Glycine max
  unsure (1)..(369): unsure at all n locations
tcccatccctcagtttagctgtaatattgacaaataacaaggaccagagttcctctttgtttttatgcacaaacataaatgggttgacgacttccatgctagtcttaacataggcatccttaatacatatttatttttgtgaccgcagcatggtgatccaattgatgagcgatacaaataattcatggagaggggtactataatcgaacagattgtctattgtataaataaatacagacaagttgcaatgtcgaatgatcccacatttgagcacattgacattaacgagaaacattatgtgattgcaagacaattatctttcccttgtttatgagagnggatgtgaataaatctgataccatttatctt

SEQ ID NO: 80283 - DNA, 381 bp, Glycine max
  unsure (1)..(381): unsure at all n locations
ggacgttggcctcacctccctnattgaaaatttagttttcttttatgtttgcaatttcaatatctgttggttgctgaaacataggacctgacaatttagggaatcggaatgtttccgtgatattggaaatgatgaaatacccagaaataattgtcgtttttgtagagtgagactggagctataagtgcttggccgttgaattcttgcgttctttctgctgcaagtgaaactggagccggctggacgtgttaatggatgtttgtcgttcattttcgctttgattcacgaaagtgtcaaaacccaaccatcctcaattgttgtacgaatcaaagctgtataaaatactgccaggaggaagtaatctctctcgtcttgatgaat

SEQ ID NO: 80284 - DNA, 400 bp, Glycine max
ctccttcaactgcacaaggctcttaatatttgaagagtatccttggggaactcttacccgacgaagacactgacaaaaacttatcttctcctttttggacaaagtatggcaggctgggggcaagtaaattttcttcctatcagaccttggatgcaacagtgatcgtatgcccatatcaggtagatcttgacaggtattcaagccattcttcgtctttccttgaaagttaaagagcgtcccaatcacactgtcacatacatttttctccacatgcataacatcaatacaatgtctaacgtctagatcagactagtacgaaagttaaaagaaaatggacctcttcttccatatggaactcttacttttatccttcttttgggtctttccaaatacattattc

SEQ ID NO: 80285 - DNA, 310 bp, Glycine max
  unsure (1)..(310): unsure at all n locations
ccagatgatgatctatttgcttcttgcgaagtaccacggaatacggtacttncacaccttcatccacgacttcatcgcgtgatacactactatgcatttcaaaggatgggaccacctatatcatatacaatccaagtggtacaaaatatgcttctctatggtacttaaaccctataatcttgaccgagatcagatacacggtctctcgattactctcacctatcaccgcattcatgttgcaaacagtacctgtcttgcaacaattatgcttaaagtgacaacactatcctcatgctcagcctccacaaac

SEQ ID NO: 80286 - DNA, 387 bp, Glycine max
ttgtgtaaagcgactaacatacatgttttcatgtgatggtggattgtgacattatgagatgtgaaattatgatcaagatgtagttgcgaataagtgtgtggttaacacttgatgtgacattacttgtgttgtgagctaattatacaataacccgaccagtgttatcttgagaaaagtgttgatgtgcaatgataaagaaaaagtgtacgtttcctatttacgaaccaatgttaaagagaaagtgtagatttcctatttatgaaccaatgttaaattgtagcgcagtgtgttaaacgtgtttaaaacacgagtgtgaggtccggggtattgtataattaatgagcagtgtctgcatgcaaaatattatattatgggttggacctaaat

SEQ ID NO: 80287 - DNA, 436 bp, Glycine max
  unsure (1)..(436): unsure at all n locations
tcttgcgtagccgctcttggtgctcaaaanatcccaaaaacaatatcctcttattactagctattntgaattctttagttcctgaatgtaaacccttcaattggtgctcgttcccctctttcttttctgccaaaaagaaaatcaaatgcttgccaaacatggatgaagtcctaaagaaaatcaatatcaaagaanacatggatgaaatcacaattaaaaagcacaactacctatctttcagagtcctttggttaatttggcttgtctccttatgtggtggggttttggttaataatgttatacttttgccttccaaaaaaaacttatcactaatcctcttttcattaatcccaatttgtatgttattgtataaaagatcatgggttctccacctgcctccactcctcctcctcctcctcctacttcgaacgcatcg

SEQ ID NO: 80288 - DNA, 417 bp, Glycine max
  unsure (1)..(417): unsure at all n locations
agcttctaaggatgtgacgcttagctattagattggtgtgtagctaaactctaacttctcaaggaagcttctcaaggaagatttcatttagttagtgatctagggtataaatagaagtatgtgtaaaacttatcataactttgatgaatgtgaaacttatgagacacacttcaaagctcaacttctcttcctctttttctccttcaattntgtgccccccttctctctctctctctctctctctttctctcattctctttctccattgaagcttcctctctaagcttcttatccaagtcactctcttggtggtgaagctcctccttccatggcttatttcctagtggacgatgccttatcttacctcttctcctttatcttctgctgcaactccatggttgaaaatcaccattgaag

SEQ ID NO: 80289 - DNA, 449 bp, Glycine max
  unsure (1)..(449): unsure at all n locations
acactataaaactaagcttatngatggtgctattgaactntctcgaatgtgagggttgtaccttctgttngtgtcaatatcatttctatgggggagatgacatcacatgggtacaagtattgtggttcaaagtggggatgcaagttgtataaagggagacacttattgttgcgaagatagaaaaataaaggtaaactttgttatttagatggacaagccttaaagaggaataatgatagcaaaatgaagaagaaagtgaagttttctaatgttgtataagtgttgggagatactttcattggagggggagtttgttcactntcaaattgatcgaaggatatttctcctttggcttgagggagaaaattatagagtttcaagccaaaagataacgtgcatttaatgcanaatgggaattgaatttttaccattaaggtttacgtggttta

SEQ ID NO: 80290 - DNA, 161 bp, Glycine max
  unsure (1)..(161): unsure at all n locations
agcttccattttcatattnggagcgncgcgatatattacgggngtcaactggacatccgcgtataaagntattgtcgcttcaagacgctcagagctgtggttctaaatcttgagcgactctgaacattaccggactcaaccagacatctgagtgaaaagat

SEQ ID NO: 80291 - DNA, 363 bp, Glycine max
  unsure (1)..(363): unsure at all n locations
tgtagcaatatcaaacgaanataactttatacacggatgtccgaatgagtctcgtaatatatcgatacgctccaaattgaaaacataagcccgtagacaattcaaaggacaataactttttactcggatgtccgatagagtctcgtaatataatgggacctccaaattgaaaatggaagctcctatcaaattcaaacgaccataactttttgctcggatgtccgattgagtcccgtaatatatcgagatgctcgaaattgaggacacaagctctgaacaattttgaacgacaataaatttattctcggatgttctattgagtcccgtaatatatcgtgctactccaaattgaaaatggaagct

SEQ ID NO: 80292 - DNA, 397 bp, Glycine max
agctttttgtccttaagtgaaagacaattatatatattttggctttatttttaagctttcttgttgtttctaaagttgtctgtattattacttcatacaccgtgcaagtcatgaaatgaaacacaagacataatacactgattacagtttattacgttatctggtcatttgggtcaagggttgtttgttttaaattaaaaatagatgtgtgcgcaaggtttgaggcaattgcagaagtaaccattgtagctagatgctagtgtcatgtaagttatgcatgacgtatgcatgcttgatcattatgtcttaaattcacatgaagccaatttccatttgtgatatgtacgttgtattacttagacataatttcgttttacaggatgcaaggcaactatca

SEQ ID NO: 80293 - DNA, 425 bp, Glycine max
tgtgtattgctgcattccactaatatatggagttgtccaccgctttgtctgagaataacaattgctcgaccacaacaacgctggaggcggtaaggggcaatggtctttcaaataaacctgttgtacatgaacaaagattatatcatgcggtgaccgactcaaatgaaccacggaagtcattgcataattgttatactaactatattcaatgtacctgtacaaaatgatttccaaacatgtgaccgacacatatcatgcggtgcctagaagaatgaggtggtggttaacttctaagaggaaaaaatgccatgctttgttctcgggacaacgatacaaggattacgttatactgtgatgcaatcacatatctcatctccgttatatccatccacttgtccacactaacctgaatcaagcaaacatac

SEQ ID NO: 80294 - DNA, 399 bp, Glycine max
accgcacatggctcttattatttaatgagtatccttgcggaatttttacccgacgaagacactgacaaacacttatcttctcctttctggaccaagtatggcaagctggtggcaagtaaatattcttcctatcagaccttggatgcaacagtgatcgtatgcccatttcagttcgatcttgacaggtattcaagccattcttcgtctttccttgaaagttaaagagcgtcccaatcacactgtctcttacatttttctccacatgcataacatcaatacaatgcctaacgtctagatcagactagtacgaacgttaaaagaaaatggaccttttcttccatatggaactcttacttttatccttcttttgggtcattcccaacacattattcaggtgtt

SEQ ID NO: 80295 - DNA, 294 bp, Glycine max
tatgatgatatattttacttcttgcgaagtaccatgtgaatatggtactttcatacacatcgttcacgacctttaacacgtataacacatctttgcatttcatatgatgggactatctatataatatacaatccatgtggtacataatttgcttctctatggatcttcaatccctattccttgaccaggactagtcactgtgtctcatgattactctcacatatcaccgttattatgatgcaaacagtacctgttatgcaagaattatgtatttgtgcacaacactattcacat

SEQ ID NO: 80296 - DNA, 392 bp, Glycine max
  unsure (1)..(392): unsure at all n locations
agctttgtgtaatcgattacactgatttggttatcgattaccagggggtggttctaaatatatcaaaagatgtaactcttcaaaaaggttntgactttttcaaattggttttaagattttctaaaagttataactcttctaaatggtcttcttgaccagacacgaacagtctataaaagaaaggctttgttatgcattttaaattaattcattctatcaatcaatcttttccaattcattctttacacaaacgagttatccacattgattgctgagactctatgaacttcttcttcttcttccttttgccaaaagctctccaaagttttctggtttttgcaaaccttgaaaacttgngctattaatctttatcattctctgctccctttgcc

SEQ ID NO: 80297 - DNA, 429 bp, Glycine max
gttgaacaatatacatgtccttcatttaactatctttgggcttggcggccacgctcaacaaagtactttcgacacctactgtacgttgatttgaccaatgctgttatgggaatgttgcgacaatcctttaaaaccttattgatacattctgagaggttggttatcatgtggccatatcgacgtccttctctatcataagccatcgtccatttttcctttgaaatgcgatcaatccatgttgctatggctagactcagttgacgaaatttttctaaattttgatcaaaaatgtgtttgcaaggagtgtaggctgcataaaattagttatgaataacaattttaagtatatatgaaagttaaataaacgtgaccatcaatttattatatcttacccaatttcttcaacatttctttttgtttggcattatt

SEQ ID NO: 80298 - DNA, 396 bp, Glycine max
  unsure (1)..(396): unsure at all n locations
agcttggtcagcaacgtggcatntgtgcgctatacacaatgcccgatacaccacaacanaatggtgtatcaaaaaggccgtacaaaacttgatggatatgggtaggagtatgttaatcaattatactttacctgtatcattgnggatgtatgccttgaaaactaccatgtatttgttgaacagggttcctagtaanggcagtccaaagacaccttttgaactgtggacaaataagatacctagtataaggcacctgcatgtttggggttgtcaagcacaaataaggatttataatccgcaagaaagaaaattggatgcaagaacaatcacgggatatttcattggttatccagaanatcaaaggggtatatgttttattttcctaatcataggata

SEQ ID NO: 80299 - DNA, 434 bp, Glycine max
  unsure (1)..(434): unsure at all n locations
gttgagccanaatcctgactcaccataaaccttgacccagggtgagaatgtcaatccttaccctcggaagcaaaaaagaatagaagggaaatttccaatcaaagaaaaagagaaggaaaatttccaatgaaagcaaaaaaaagaaaagaaggaaaattccccaatcaaagagtgggagaaagcaaaaagaaaagaaaggaaattcccaatcaaagaatgggagaaagtaaaaaaggaagaagaagaaggaaagaaagctcctgatcagggatcgaaggaaaaacagaagaaatgtgcagaaaggtctttggaccggacaatatctgaacaatacagaattgtcaccaaatgaacaaaaaagaaggaaaggaaaccacgacctanaatggtcttctccctttgattaccaaccaaaatcccgtgcgctagcgact

SEQ ID NO: 80300 - DNA, 387 bp, Glycine max
  unsure (1)..(387): unsure at all n locations
agcttgtctgattatggngtacccatcacatgtattactatgtggcggtcgggcgatggtgcaaaacgattctccacatccacaaatcacgtataacccaccatcccctgttgcccacctncaactgagctcacgtactctcacgtagcccttatcctcgttcctctcaacgccgggtccccatcaatcctcccaagcttccacaacatccaagtaattccacatccaatcatcatggactaacaaaatcaagcaaaacagggcaaaggcagaaaactctgcccaaaacacaactcaaaatcacagcttttcacattcaaatacccaagtaacatttccttcgttccaattcattaaccagtggatcgacttgaaaattntactgga

SEQ ID NO: 80301 - DNA, 373 bp, Glycine max
  unsure (1)..(373): unsure at all n locations
tgtcaatccttaccctcggaagcaaaaaagaataaaagggaaatttccaatcaaagaaaaagagaaggaaaatttccaatgaaagcaaaaaagaaaagaaggaaaattccccaatcaaagagtgggagaaagcaaaaagaaaagaaaggaaattcccaatcaaagaatgggagaaagtaaaaaagggaaggaaagaaagttcttgaaggaaaaacagaaggaatatgcatagaggtctttggaccggacaatatctgaacaatacagaattgtcaccaaatgaacgaaaaaagaaggaaagggaaccacgacctanaatagtcttcttcctttgattaccaaccaaaatcccgtgcgctagcgaacttttttt

SEQ ID NO: 80302 - DNA, 410 bp, Glycine max
tcctgactcaccataaaccttgatccaaggttatttgtcaatccttactttctgacgcgaaaaataatataagggaaattgtctatcccatataaacagaacgaatatgtccaatgaaagcataaaacataaaagaaggaaaattccccaatccaagagtgggagaaagccaatagataatataggaaatttccaatcacacaatgggagaaagttaataaggaagaagaatatggaatgaatgcttctgatcatggatcgaaggaaaaacataagaaatgtgcagaaaggtctttggaccggacaatatctgaacaatacagaattgtcaccaaatgaacaaaaaagaatgaaatgaaaccacgacctaaaatggtcttctcccttagattaccaaccaaaatcccgtg

SEQ ID NO: 80303 - DNA, 223 bp, Glycine max
ggatccttataaattctgtggcttaaacgaacacctcatacacgaacactatatcctatgcgctcttatcatacagcgatagcccttgaccatcaattacgtatcatcagctacagagctggatactgatttgcccctctcctgcgaatcccaaagtatcgataactttgtgctgcaaagtagctgtttcaccaacacgagattgcgcttgaagtggcgcagc

SEQ ID NO: 80304 - DNA, 470 bp, Glycine max
  unsure (1)..(470): unsure at all n locations
tggaggaagaaggagatgaatgaagggagagggagagaagatcactaaattttgtgctcaaaaagagctgtgaaatctgaattaaatattcaaatgatcaaagttgaaaaaaatgcacacacatgacttctatttatagcctaagtgtcacacaaaattggagggaaattcaaatttcacttgaatttgaaattgaatttgtggagccaaactntggagccaaaatttcactaattatgattagtgaattttagttatggttcagcccactaatccaagatcaattccaagattctccactaagtgtgcttaggtgtcatgagacatgaaaagcatgaaggacatgcacaaagtgtgactatatgatgtggcaatggggtgtagtaagcanatgctcacctccccctctaaaatataattggattgngcttctaccaattcaattaaatntatttccaaccacacacatc

SEQ ID NO: 80305 - DNA, 471 bp, Glycine max
  unsure (1)..(471): unsure at all n locations
gtgagaagcatgtgatccatggtgatccttggcatcatcaaaacattcagctngatcctttgtctacaatctccccctttttgatgatgacaatccttgaaatcaagacaagctatatacaagatgatagcacgttcacacaacccttactccccctatcttttggcatgtatgcctaactttaatgattttaattaatttctaacccaagttctaagttctctccccctttggcaacatcaaaaagaactaagcaaaacaatcaatatctaaacagagccaaacataaaaaagaactaagaaaaacaatcaatatccaaacaaagccaaacattaaaccaaaataagtccatacattgtcataaccaaccaaagcaaagtcgataaaactaagtactaattagataatgaaggatgcggctntcanaagccaatgaaccgggcagaaggcgttcggtcatatccgcatgg

SEQ ID NO: 80306 - DNA, 456 bp, Glycine max
  unsure (1)..(456): unsure at all n locations
gtgagccaaaatcctgactcaccatanaccttgacccagggtgataatgcctatccttaccctcggaagcaaaaaaagaatagaggggaaatttccaatcaaaaaaggaaagaaggaaaatttccaatcaaagagaaagcaaaaagaaaagaaaggaaattcccaatcaaagagtgggagaaagcaaaaagaaaagaaaggaaattcccaatcaaaaagtgggagaaagcaaaaagaaaagaaagaaaattcccaaccaaagaatgggagaaagtaaaaaaggaagaagaagaaggaaagaaagctcctgatcaaggatcgaaagaaaccacaagaaatgtgcagagaggtctttggaccatacaatatctgaacagtacagaattgtcaccaaatgaacgaaaaaagaaggaaagggaaccacgacctanaatagtcttcttcctttgataccaa

SEQ ID NO: 80307 - DNA, 370 bp, Glycine max
atcgcgaaagccacactccatcgatatgatttgtacctgacatctcatacagagctagcgtacgtaacaagacaacgattgtagctgttagaatacctcacccactcaagtgtgtgacacaattatagcttttctctaatgagacactcttgccttttaccactctaatgccccttgaagtcttatgccatacaagagattatgggcacaacatagaacacatcaccaatatgtgtaaggttacgctggagagacaaggacgaggttaaccattataaacgctaacaatgcttctaggcgcaaatgaatgacataaaattcatatattaagaattcaagtgacaatccttcatgccaccaatatattacc

SEQ ID NO: 80308 - DNA, 469 bp, Glycine max
  unsure (1)..(469): unsure at all n locations
taagctgttagcattntctgttcaatcatttttagaatttgcttgatattttccctgatgaaaaggtggactgattttgtcttaaattaagtggcctgctgtgataactgatactccaagtctcatcgttctgactagtgagagcaagacatctagtatgccattcagtatgtttgaaatgtgaatgccaagtgcataaaatctgtattgattgttacttatatccatagggtaacaagagaagtgctgggtttacagatgaagagaggaaatcatttgcaaagaacttcttatctaggggatttgtagatacctttagaaggcagcatcctggtgttattggatatacatattgnggttaccgtcatggtggacgcaagtttaacagaggtatttctagcacactcttaaaattgatntattatataatntactgtgtgtgtagaatctagtggtattatgtatagat

SEQ ID NO: 80309 - DNA, 455 bp, Glycine max
  unsure (1)..(455): unsure at all n locations
ntaatctnntgtttattagcttaagtggatatgaccgttgtttggattagagccttccaattnttcatttactcagagcttgttttcttgtgctatgtgtcagcttgtggtggagagtgaaatagacaaaagtctagttttttttttcttttttctgagcaacattcatcttgtctccattacttgtacgaaaatgagtttgtagagaatatactcaatttgcttttgttcttgctttataaacacaaatttgaaatctaaatggggagataaataaaaaatgtgagggaatacaaaggacaaaagattttcaagaaaaatcatattcagtcaaagcataacatatatccattgtgttggacaaaattgaagaaatcttagtgcaagtggaaattagagtgtaagtttattatatacatntggacaccggtctagcatgattgattgctagttta

SEQ ID NO: 80310 - DNA, 467 bp, Glycine max
  unsure (1)..(467): unsure at all n locations
tattaatgtaaatattttctttgacaggtgaagttgaggtattgctaccagttattggaatgctgcttcagtttggtccataaatttcaattttggcatcgtctactttgcatccttaagacttaatgagggagggatgaacttgtgcaaatagcccactctatacgatgttattagatctcaaaaaataaaattaagtgttttaatttcattagaaatcactttgaagtaattttgacttccagaaaaagattttgaagctagttgtaattgactagatttgctgttcagattatattaatcttttataaaattttgaatttcagagtgtgtattttaatgcttgagcagataatgcttgttgatgtagatagagtaagagttgtaatttaaaaattagcattgacaaagggcatatctaattaaaattntatttatctatncgtcaagaaagtgttaattatgac

SEQ ID NO: 80311 - DNA, 397 bp, Glycine max
  unsure (1)..(397): unsure at all n locations
gtgagnccaaatcctgactcaccatanaccttgacccagtgtgagaatgtcaatccttaccctcggaagcaaagaaaaaaggagagaaggaaaatttccaatcaaaggaaaaaaggagaggaaaggaaattcccaatcaaagagtgggagaaagcaaaaagaaaagaaagaaaattcccaatcaaagaatgggagaaagaaaaagagaaggagaagaaggaaggaaagctcctgatcaaggatcgaaagaaaacagaagaaatgtgcagaggggatctctggaccagacaatatctaaacaaatacagaattgtcaccaaatgaacaaaagaaagaaaaggaaaccataacctaaaagtggtcttcttcctttgattaccaaccaaaatcctgtgcg

SEQ ID NO: 80312 - DNA, 450 bp, Glycine max
  unsure (1)..(450): unsure at all n locations
tctgtctcanattctggattcgactaacattgatatcagctatatctntactccattgtttgatggtattttaaagatttctcagcttgtttttaaggacaatgcccccccatccaccctgctgatccttagaccaagactcctgcaccagcttttgatatcctttttggttgagccacaagtccagcaccctaaagggcttagggccccaatcaaccagtttagttttcaaaattacagggcaatggtcagagtaatctctgtggagaacatgctgggatgagtcaggccatagggctagccattgatctgacactaggaatctgtcaagtctgctcttgatagaacctangagtgattataaaatagaanaactaagatgaatctaattgaaattactgctttgtatcattctaatggatgtctaacatcatgagtattactttggtt

SEQ ID NO: 80313 - DNA, 471 bp, Glycine max
  unsure (1)..(471): unsure at all n locations
ggcaaaaacctgcatcatatatgcagtgtccttccaaggctttcttggccacaacagctgtttggatatctgtaatccaaagagtacatcaagatcccaaacatatattataaaataaaacataagttcaaactataccaaagaaaacataaataataagttcaaactacaccaaacaaaacataaataataagtttacacaattacaaaacacaagttcttaaaatgataacatttaaataactaaaaaaggactaatgacacttaaataatccataaaataacttaaataaataaaatgcagtacattacatgaatgttttgggttaaactttntaaccagcaaactgaaacttaaactcatgagtatactgagtctactccgagtctaccaaaaagcaagtttgttaacaagttaactcggaatgtgcctgtgagtttacaagttactaactcactagtttgataacc

SEQ ID NO: 80314 - DNA, 421 bp, Glycine max
tgtacggttaaagtctcacgagtgtcacgtgctcatgcaataattgttagccgtggctatacgagacatcttgccaaacaaagtcaggttcacgataactcgcctgtgctttttcttccatgctatatgtagcaaagtgattgatccagtaatgtttgatgagttggaaaatgaggccgcaattatattgtgtcagttggagatgtattttccccctgctctctttgacatcatgattcacttgattgtgcatctagtcagagaaatcaaatgttgtgcgcctgtttatctacggtggatgtacccggttgagcgatacatgaagatcttaacagggtatacagagaatctatatcatccgaaagcatctattagtgagaggtacattgcagaagaagccattgaattctgttcaaaatac

SEQ ID NO: 80315 - DNA, 468 bp, Glycine max
  unsure (1)..(468): unsure at all n locations
ntaaccgtttattaagccattntctcacgtaataaatgcttaaatgaatttcaaccaatcatttgtgttgtaatgtcatttaatcaatgttaaaacaaaatctaaccgatcgttcacgctataacctcggttaaacaaaaaaaggtaaaataataataaaataatcaaaaaaatcaatcggacgtttttctttgaaagtttccttgaattaattgactaataacccaagtgaaaccaaggctaaaatcaactcacaaatcaagcttgtccgcaaaaaatcactcaagaccgttttaaggtccaacgccttaaaacggtcctctttgcttatattggttaaaatggaccattcaaagcataaaatcaacatataaatttatcgcttttgcaagaactacgtaggtatgattntctcatcacaattgaggatacgtaggagcaaaagccccacttttgtcgaccacccca

SEQ ID NO: 80316 - DNA, 471 bp, Glycine max
  unsure (1)..(471): unsure at all n locations
ntcngcacagttgaacatattgttcttccactacatttatatatgctatgccatcatgtntcaatgctgttgataccactgatattgaatttaggttagaatgattaagagaaacaatgtagactttgatctgcattctttgttgtgagaaccccatgtccatttgaaaacatttttcttttaatcacgttaactttactttctggtgtatatcttttgaagcatttntctttgaatctgctcggtggaagttgctatgtatatctcaagaatttcaagttaatatacatatatgcctgaatggtctgcctagccttgttaaaattgaataaaattaaatttaaccacacaattaagattaaaatngaataaaataaaatgttgtgctagtaggaattgaagacatatttcaggatttataacaacccactctgtttatccaattgagtgaaattntcttcaattttatta

SEQ ID NO: 80317 - DNA, 454 bp, Glycine max
  unsure (1)..(454): unsure at all n locations
tctnttggaccttgaacaggcaactaactcctctttcataaccatgctatgtgctcgcgactggtccctttcttcctttcgcaacttgagttcactattgctaccccatagagctccgcgaaatttgttccggccatactcttccctgcgagccctcttggtctcttgttcgagggctcttgcggtaattgcattctcttcccgtaacccggcacactccttccgaacgtgtgtagcggccaacttgaacttctccttggcaagttttgcctttcctaactcgcttttgagagcttggacttcttcgtcctcttccggtgcttcaaaactctcttcgctgacgacttttaacttggcgagccgatctaaacctcgtatatgaactttcagccattcgtggtacccaccaatgatgccattacgaatgcctctaagctcttgatctttccttaac

SEQ ID NO: 80318 - DNA, 473 bp, Glycine max
  unsure (1)..(473): unsure at all n locations
tgcttgagaaatntccttgagaagcttccttgagaagctttcttgagaagcttcctagagaagttaaagcttagctacatacatccctctaatagctaagctcacctccttgagatgaggagctagaacttagctacacaccccctataatagctaagctcacccccatgtcaaaatacatgaaaatacaaaaaagtccctactacaaagactactcaaaatgccctgaaatataaggctaaaaccctatattactagaaaggccaaaatacaagacccaaaagaaggaaaaacctattctaatatttacaaacaagagtggatccaaccttggcctatgggctcagaaatctatcataaggttcatgaaaaccctagagccttctttagcacctctagcccaatcctcttaaaaatgagtcttctatccaatacccttgggggaggagtgatcatccnctcacccttggaaa

SEQ ID NO: 80319 - DNA, 458 bp, Glycine max
  unsure (1)..(458): unsure at all n locations
tataattatgttacactaatgggacaacaatttctagcatattatcctatttcaatgccttgtatggcttgacaacagtcttcctcatttgacaagttaaaaccaagtatagcaagtccataaacatataaaaactaaacctgaagttgtggcctgaattgctacaccaactctttcttataataaggtggacaattgtgacaggctgacagcaacctaagaaaacttcttttcccccactgacagtaccatccatccttttcccatcattcctcttagccactgttagtttattgcttataatttgtagtaacttttcatcaaagtttttaaaaccagaccagaccgaccggttcaaccggtccagagactctaaaaaaccagaacatctctgaaccggtatagaaaactagggttgaaccggtctttntaaaaatggtttttntattatttatcta

SEQ ID NO: 80320 - DNA, 459 bp, Glycine max
tgtccactactatcttgaacttagtgttggatgtggttattttaagacacctacccttatcccaatctagaaaaccctattctagcatgcctttagaaattcatgcatacactaacaacatgtaaaacacacaatgttaacaacttacttttaccatgaatgcttcaaaaaatgaagtttagaaggtgtgagtcgcacaaacttattcttagaactttttcttttctcttaaaagtgagaacataaggtcattatttatagagaaaatagttataaccgctgtaatcgattatatcaaagaagtaatcgattagattatcattttaatcgattaatgtgttcttcccaacattggaaagctttcaagaacaatataattgattagattattcatgtaatcgattgaagtgttcttgatcacttattgttagtcggataatacgactaactctttgtgta

SEQ ID NO: 80321 - DNA, 446 bp, Glycine max
tgagatgaggaagtgttgaagggtagaacttcctgctcttattgttgaccacagagtggtacctggagatatgtcgcgggggtcaggagaccttggggacgtcaggtggggtgctattgcccaaaaccaagcttgaccaatcccgacccaacccgggcatagtcggtcagtgagaacctgtgatgtacctaagcaggcgagctcctggcagtcaacagataaaaggaacaaagaccacaaagcaaggaggcttgtggtggctggccagctgtgaactttgattgatatgtgggttatggcctctggtaatcaattaccaagggtgggtaatcgattacaaggcttaaaaatgaagacaggaggcttagatggtctctggtaatcgattaccaggggatgtaatcgattaccaggcttgaaaacgaggtcaggaagctaagggagct

SEQ ID NO: 80322 - DNA, 462 bp, Glycine max
  unsure (1)..(462): unsure at all n locations
cttggcagacatgtagttgtacaatgttcatatatttgtatttgttgctccttaattngtgatacttcgtacggtcttttaatcagtgtattaaaaaggtggatttgtatgatctccaatctcctttttagcataaaaatttgaggtctcgtgtttccatagttgaaaccgtcaactacaccaagcggcttcatgggcttgatgaaaggagctaaagaataaggaatggctctatgtggagcttacaacaagagaactcagtcatgcctgccttgagttacttaaagttgccaatgaaattaaggcaatgctttattcctttagtgcttcatttcccaaagatgaaaaatataattaaacaatttctaaaatgagtcaagtctggagttacaatggctantgtttcaaggctatattactaccagtatagcagaactttgtaatcttgatcttaataatact

SEQ ID NO: 80323 - DNA, 458 bp, Glycine max
  unsure (1)..(458): unsure at all n locations
tgtaagcccaaagtctctntcccaaaaaataaagattatattggcagaaaaaaaaagaggtgccataagtgctaaggttggaaataagaaaaatagattacatgtgttaaggctgaaaaacaaataaagcctaggctaagtataagtttttctaggatgaatgctctcttataatcctaagtttttgaaatcccagaaaaaccatgatttcttgtctagccaggccccattacaaactaataaaagtccttagtgatccaccaaatgtaagtaagaataactttaactgagatgaagtgcaaatttggaaatcttaattgcaggtcgtaaaattntaaacacccaccccaaacacttgtgcgcagagataaacactaaccttgtgaggaaagtgaggcanaccaacttgattgatttccgatactaaccaatttcatctngatgtaatttctacttcc

SEQ ID NO: 80324 - DNA, 439 bp, Glycine max
  unsure (1)..(439): unsure at all n locations
ngtcgcattacaccaagttgctgaagggcactttgttgtcttagttgctgatccacatagcggagacggggtattccctcttgctccccaaggcttctttgtgtcacttgaatttggccactgatggcatcacgcaaacaccgaaagtggcgagaaattgttcttaaagcaagtgtagtatatggatctgctgctccacacccggcaaccatgtcaaaagatgacaccacaatctgcatctgatggcagtactgtctgtatcttctatctacctataaccagtggaaacaaggaatnttttatggagttcgccattggccgacactatcatgaattcataactaactgtctttcaatagttaaacacaccgttcaaactttggagcaacaaatgaattctacaaacattatagatataactgtagagcaatattattgt

SEQ ID NO: 80325 - DNA, 472 bp, Glycine max
  unsure (1)..(472): unsure at all n locations
ggtctcgtggtttcggtagagaacaaagcccaatctgaccttcgctgttntctttgaggtaactgtgattctacgcttgttccttgttagttttagcttgtctttgcatcttttctgactttggaaccaccattgtatgttttacgtgtcctttgaaaaaaccctagagaaagagactttgtaaacgttatcttnttttgaaatgggtgttatttttgtgaccttcactgaaccccgatcacattggcatgatcagaattttaaaatgatgttcctcttgtagaatctgaaacgcccttagccttttcatgtagtgacaagagtatttgactcagagtattattgttaaccttatttctgaaatccatagtaatttcccttggttttggcgtaatagagacttgcgttggatcgacaagcgtatatgaaagagaggcctcttagtgacgcaaagaggaaccggcgggaagct

SEQ ID NO: 80326 - DNA, 424 bp, Glycine max
tgtctcgcctaccccgacatagctaactaacttgacacgtaatctctcaaatgtgcgggtctcttgtggatccgagaagttccacgtgcttcttggttacttgcggtattaatgggctgcatgggtgcctctatggtacttatctcggtatcaatttgtcttttgtcctgagttaaaagcaattggaattggtggccgatgtacttgttagttccttcattacatagcatatcaaaaaaaattatacatcatggcatattattttacttacactgaattaaatgtatagcattaaatgatcgctccaaagatatcccttcatattcaagttcctttttattattggcacactaatatttttctggatcagggtatttatgttgttaatgaatgattcgactggaacataaatgcttatataata

SEQ ID NO: 80327 - DNA, 241 bp, Glycine max
tacacgccactgaggccgagcgtgcattatcccctgtagccgccgagaagtatgaggccatgtccatctacgtctgaaacgagtatgatgatcttatggacgtcaatattgccacatctgaagcttccaacgacaaaccacctaatgctccctagataaacaccacccatgcatcaatatgacgggctatatcaggcagcactggtgatctcaaactcctatgacgatatatagaatcatg

SEQ ID NO: 80328 - DNA, 299 bp, Glycine max
agcttaataatatatgtgtggtttaaaacaagcctcccatcagttgttctcttattttcatgggataatttcttcatttggtgttgatcaaaactccatggagcaatgcatatgccatatggtctatgggagttaaatatgagttctcgtcttatatatagatgatattttacatgcatcttatgatcgaagtttgttacaagaaggtgaaaacaatttactttaagaatattgacattaaagatataggtggtgcattgtatgtcattcgcatcatatatatagagatatacctctat

SEQ ID NO: 80329 - DNA, 454 bp, Glycine max
  unsure (1)..(454): unsure at all n locations
tattgtggactcacggagaagatgaatgaaaggattgtgatttggagaaggatagcaaganatgcctagttttccgatggccattggaagattaaggtccaggatcctagaagggggaattattattcagattagaagaatacggtgctagctagccgtatgagcctggggtctcctcgttgctacatatatactctatatatcagaagatgcaatcttcaatgtgttacagattaaatattcaaatataattgctacccgtattagctgttgccatgacttactcttatggatcgatcagacatcaccaaaccacaattattccatggaaataagtcattttttatattaaatatagtgaagacaattacatctactcatcatattcaatcaattaattagactttcttacatgaaaataagttagatgaattgatatttcacaccgatatat

SEQ ID NO: 80330 - DNA, 450 bp, Glycine max
  unsure (1)..(450): unsure at all n locations
tgtttgtgggtcatcttctcactgttttttccctgtttatatattcttcttttccttggaaaaaaggtttaaacttccgatgaagtctatcacttcagtttgtggccaaatgataggaagaataggtccttccagtcaggctggttgttgtctccaatatagatactatctctgatttgttagtcatttgttcgtttgccatgaatggtgcaacatgtactttgaaatcaaagatggctcttcatatagtgctttggtaccaagcagaaaatatagtattttccttgatttgattgttggaaatttctaataaaccttataaaatactaaatgagcaccaaaacacattatgtccgattatcaagatgtnttaaggaataccctgatccattaagcttggttacacgcatcggaatctgacagtggtcacaaactattgatttaatgacc

SEQ ID NO: 80331 - DNA, 371 bp, Glycine max
  unsure (1)..(371): unsure at all n locations
ctgacggagtntggtgcatcgtggaacaatttcacttttatattgtgtcctcattggatacccaatgttcaacttacctatttggaagtgacatcatggccgttaggtcccagctttccattgtggattcagtcacataacaaactttgaatatgttggactatctaacacggggattttcgattctatatccacacagatgtgggaagcactttctcacgttttgtatttaaacctctctcgtaatcatatccatggtgagattgggactacattaaagaatccattatctatcccaactattgatctaagctcaaatcacttgtgtggtaaattacactatctttcaagtaatgtgcttcagttggatc

SEQ ID NO: 80332 - DNA, 378 bp, Glycine max
tagacatcaagtgattaagtgatcatcaattccaatacatatggggagtatgaaatgagtgaacgtaacattatatcttgcatatacatttgatggaagctccattggagcttgtaggcctaggatcttcttcatcaatggattcctttgattcttggaagatgaatggctgctgaatggagaaggaatagagagaggagacgcgccttcatggagaagatgagtctagaataagctcaccaccataggaagccatgcgtaacatcttgtatgaagaatgagatgactgattggatatggagagaagagcactaaattttatcttccaaagagcgtctgtatctgaagtttatattcaaatgatctaattgaaaaaaa

SEQ ID NO: 80333 - DNA, 444 bp, Glycine max
  unsure (1)..(444): unsure at all n locations
tctcttggaccttgaacaagcgatcaactcctctgtcagaaccgtgctatgtgctcgcgactggtccctatcttcccttcgcaacttaagttcactattactaccccatagagctccgcgaaatctgttccggccatactgttccttgcgagccctcttggtctctcgttcaagggctcttgcggttattgcattctcttgccgtaacccggctcactccttccgaacgtgtgtagcagccaactcgaacgtttgcatggcgagtcttgccttgtcctaactcgcttttgagagcttggacgtcctcgttctctgctagcgcttcaaaattcacttcactgacgaactttaactcggcgagccaatctaaaccacctatgcgaactngcagccattcgtgatacgcaccaatgatgccatgtcgaatgcctcttagctcttgat

SEQ ID NO: 80334 - DNA, 321 bp, Glycine max
  unsure (1)..(321): unsure at all n locations
cgtccatctgatatgatgattaagggttggcgaccagaatagacatatgttggattatgtggtagaaccatatctcatgcttntacataaagtgactcttgtgctcgtgcaacttggtaagtcccttctctagaactggggcattagaggaagcgcgtgacatctctgcttcatgtacagccatgcatatttacgattggtgatgtnctggcttgttacaggattacttacataaaaatgtgacggaccatgtggaatatgtaaaatgagtgaaccccatatactgcgtaaaagttacccctactgtaattggacatcatt

SEQ ID NO: 80335 - DNA, 474 bp, Glycine max
  unsure (1)..(474): unsure at all n locations
tgtagaatggctagacatgatacatgtcagggtttggtttggttcaaggataaaagggatgccccacattatttccatgacacaaatgcaaaaatgatgatttggaaattttatgcaaaactggtcatgcatgcacctatgtggacgctcaagtgtcaaatttttatggtcatgtgatgctagggctcaggattcatttcctctattntaaatcaacccaatgtttccaaaatatgttcttttatcaatttgtgcattcatcctagtccatttcgggcgtccggggaaatttcacagcattcacccttcaggtgtagacacatttttcaaaaattggttatgatcaatgaatttttttcaaagaaaagttggaaatcatctcttttcaaaagcatgtcggtttttagctagacaacttattttctctttnntccacctttttcttacttgctttctttttccttattggctctc

SEQ ID NO: 80336 - DNA, 472 bp, Glycine max
  unsure (1)..(472): unsure at all n locations
ntaacactagaatcttcctccaatcacaccaaaccctaaccccttatatgcgtggaccacaacgacaaagacaaagaccaaaggtcgcacccacacgttgtctaaacaaaccctccacgatagcaacaacgaaccaaatcgttaaccctaatcgccttctgtggagaactttgatggaaacctagtaagcaatagagaaacatgtttatcttctgaagcaatgttgttacgccctttctatatgacacaaacattgtcatttttttaacctatagtgccttcattcaaacgacattgttttctttgtttttttaaaaaataattaatccaatgtgtataaacattaacaccaaagattacacttggcagcatacatgtaatcttacgtctccagttaacggccacgtaggcatataacgatttcgaactaatggcaaggacctaagacaaaaattntaaaatattagggacc

SEQ ID NO: 80337 - DNA, 463 bp, Glycine max
  unsure (1)..(463): unsure at all n locations
tgtacttggctcatctcctatcagagcccttgctagaacatacagtaaggtatcaatataaacttgttccccaagtaccaagtttgagtgttatagatatgatttgatcacaataaataggaaaatatctcagctgataattagggattatactcattattagtcattatgtttccttatattgtactcttgattcattataaatcagaataacatgtgtgacacaactacacaattgcagtaagtagcattgttatatggtatctaaagcttaggttattcttgacagaggaataacgaaaattgtgctctactgtccccaatggacctctatgctaactatccctcttttcggcgattnttcccattttcgccgcaatgttcccctttgacgcgaacactaacacgcatgctgcgagcatgcgcgcttacaccgccactgtgctgccatctcgctggtgtg

SEQ ID NO: 80338 - DNA, 464 bp, Glycine max
  unsure (1)..(464): unsure at all n locations
ggccacacgagagtctgataaaacagtgaagagctgtgtatctactaatagctgcaaagccaatgattcaaaatcaatagctntcaaacagtaattagtaaagagctctgccttgcttgaataaacgtccccataaaaacagaactaactacgaagacaatcttcacaaaaaaaataggaagataaaataaattaagtttctcctaaaagctaaaataaagtgatgcacttcagtttttagagaagttaggtgagagaaattttataaaagttaagtgcttaagttgattttagattatgaaagtactttaattcatttaccttcttattttatcatccaataagtgctcatcatggagaagtttatcaaaacaccaatctcactaggaatataagtgaaaataaaataaattccaatgtgcctattctgaaggaatatntaatgtaccccctctcccaatgat

SEQ ID NO: 80339 - DNA, 475 bp, Glycine max
  unsure (1)..(475): unsure at all n locations
tagcctggtatatattagcagaggtagaatcaaagccatgttgtagatggaccatgccaagatagtaaaaattatataagattcactcaggatggactaagattctatgccaaggctcacagtactcgttctatggaacatacaagttacaagcacacaaattattagagttaatgtgtgtctggtaacccgtttcagacatgattctctttatcaacagccaagttactctctgcagcttccatatctttgatctttctctaatttaatgtgaagataagggtgtatataaattggaaatgccactctaaaagacacttattattttttagctagttcttatattatgccttctgagttgcactctctcttccatntgtactcattaccaaaaatatgaacctaatctctccctctgctttcctttgcatttcaatggcagattaacgttaattaactctcctctatatttctg

SEQ ID NO: 80340 - DNA, 488 bp, Glycine max
  unsure (1)..(488): unsure at all n locations
ttgctcttacgcgacctataatactcagcttcacatcagaccacttccaggtgctggaactacatcacatggtattgatggggcctatgcaggttgaaagccttggaggaaagaggtatgcctatgttggtgtggatgatttctccagatttacctgggtcaactttatcagagagaaatcagacacctctgcaactgtcaagcacttccacatctttggaagtccatgttacattttggcagatagagagcaaaggagaaagatggatcccaagagtgatgcaggaatattcatgggatactctacaaacagcagagcatatagagtattcaattccagaaccagaacagtgatggaatccatcaatatggttggtgatgatctgtctccagcaagaaagaaggatgtcgaagaagatgtcagaacatcgggagacaatgtagcagatgcagctaanagtggagaanatgcagaaaactctgattct

SEQ ID NO: 80341 - DNA, 435 bp, Glycine max
  unsure (1)..(435): unsure at all n locations
ngcttctatgtccttttcattgcttanattgttgaataattcttgataaattgtcttgttaaaaatccattgctttagctttcaattcatttttttgtctttggttattgcttgtctctttgtttccttgtttgtgagttgccatataaggaattggaaaggacgattggtgccatcccttgaagaatttgagtcaagaagcaaggggccaaccaccttaagagctattggactaagaagcactccaaattgagtgaatcaccaaagagagaacaaccactaaaattgaggacgttttgtaattttttaatttgcaatttacttaccttcattgctttcaagttttgtaacaaaaaggcctttcattggaagtgtgttgggagccttcaataggttaccaaacttccatttgtgtgtaataattttaggcaattt

SEQ ID NO: 80342 - DNA, 352 bp, Glycine max
  unsure (1)..(352): unsure at all n locations
tctaagaaaattcccaactttcattaggatacacttgaatttgagtttttttttgtgtgattgatatgggaaatcctctcgaagtctcatgaatttatacctacagcaagcatatgatctttttcttattctatttacaaaaggtattgagaaagggaaaggcctgtttgcntttcactntcacacctattaacctacactcaatgtacttgtgtgacacatatatgtattaaatttgcatgcctgctatttgctgtcctaagttatggcttgatatacagaggtattgtagtgttaaactatatctaactagtgtgtattgttcttgtatacatctatctctcaatttctg

SEQ ID NO: 80343 - DNA, 435 bp, Glycine max
  unsure (1)..(435): unsure at all n locations
gagcaaaatcctgactcaccataaaccttgacccagtgtgagaatgtcaatccttaccctcggaagcaaagaanaaaggagagaaggaaaatttccaatcaaaggaaaaaaggagaggaaaggaaattcccaatcaaagagtgggagaaagcaaaaagaaaagaaagaaaattcccaatcaaagaatgggagaaagataaagagaaggagaagaaggaaggaaagctcctgatcaaggatcgaaagaaaacagaagatatgtgcagaggggatctctggaccagacaatatctaaacaaatacagaattgtcaccaaatgaacaaaagatagaaaaggaaaccataacctaaaagtggtcttctccctttgattaccaaccaaaatcctgtgcgtcggtgacttgttcgcctcgcgtcaaacanaaacagaaaaa

SEQ ID NO: 80344 - DNA, 446 bp, Glycine max
taatagcccatctacccatcataaatagaaagcttataacacagtctaacaagtactagtcaacacacttactgaacacacacttttacactgcataaagcataaaaaataaatacacataagaaaattcagcaactacattagaaatttcagtgcattaacagataccatttgtgcttttgaaatgaatatatgttcatagtcttttaaacgtgtttgagaaaggtttgaagtttgatttcctcctaataaaaattaataaattattaattaatatttaccgttaaaataaaataaatatatgttcatagtcttttaaacgtgcttttgaaatgaatatatgttcatagccttcttttgcatgcattcaagcacattgtcaaagctttttgtgaaagaatccagcacctcatgttccagttctgatccaacagaactccaatcaa

SEQ ID NO: 80345 - DNA, 185 bp, Glycine max
  unsure (1)..(185): unsure at all n locations
tcagtaaaccagtgagttctaaaagcaaaattaatataaattataactaacaaaattttaattactgcaaatcagaaacccactttatgagccatgatgtgcaatgggagtttattnncttcttntttgcactacctcctttatgatactattcatttaaactccgttcctatttttttattaat

SEQ ID NO: 80346 - DNA, 436 bp, Glycine max
  unsure (1)..(436): unsure at all n locations
ntaagcanaatcaatcaacaataacattgtactctcctgtttgattgtctcccgttgtatattgagacgttcgatattcagaatagaaactctgagcaaaatctaatgacaataactttgtactcggatatctgattgtgtccatagtatatcgagacgctcgaaattcagaattgaagctatgagcaaaatcaaacgactataactttttactcggatgttcgattgagtaccgtagtatatcgagattctcaaaattcagaacagaagctctgagcaaaatcaaatgacattaactttttactcggatatacgattgtgtcgcgtagtgtgtccagacgcttgacattcagaacagaagctctgagcagaatcaaacgacgataacgtgttactcggacgtccgattgtatcctagagtgtatcgacacgctcg

SEQ ID NO: 80347 - DNA, 418 bp, Glycine max
  unsure (1)..(418): unsure at all n locations
ntgcgngattggtcttcgccggcgaaatgatcgaagtgggtctaaaaagatgcaaatctgatcatcttgctttgataaatgcaaaaaaagactggggcaaatgaagagggtgaggatgaaggagaacctcgtgttgtgactgccattcctatacaaccaagtttcccaccaacccaacaatgtcattactcagccaataacaaaccttctccttacccaccgcccagttatccacaaaggccatccctaaaattaaccacaaagcctacctaccgcacatccaatgacaaacaccacctttagcataaaccaaaacaccaacccagaaatgaattttgtagcgagaaagcctgtagaattcaccccaattccagtgtcctatgttgacttgctcccatatctacttgataattcaatg

SEQ ID NO: 80348 - DNA, 469 bp, Glycine max
  unsure (1)..(469): unsure at all n locations
ntgtgcttaaagtgactnttgatgtacanaagtgaactcttgcatgtgantattaattgagcatgcacctaaatntagggtatgcagttaaccttcaaagcttgttaatcatcttgacaagaaaaatgaatcaacacatggacggtttaataaagagtgactaaatcctcactatataatgtgtgtgtatgaaaaataaatctcacactttattattgtagaatttcaaaccaaaagatatagtgcatttaatacatgaaaattaaatttttatcactaaagttgaagtggtttaaatgcaaatggacaattgaattttacgagctagataaagactatttgaatggatacattgaaaattattttgtttcaatatttaatagaacttatttattttagttggtgaagatcttcactataaatagaaaagagaattagtggagaaaaatactttgttcatagaaaacgt

SEQ ID NO: 80349 - DNA, 438 bp, Glycine max
  unsure (1)..(438): unsure at all n locations
tgcagttgtgaacttgcttagtagcacaataaaatgcgcgtacttatcgagcctatcaataactacccaaataacggtgtggccgtgtgagttgggaaatgggtagattggtaacaaagtccatgcagatgtcgagtgaaaccttcttcggtgatggtaaaggctgtaacaacccgggcttcttatcacgtaggtatatgttttggtggcatatcaaacaagaactgacaatattttttacattgttgctcatcccaggccaataaaaagaggtgggcaacctcgctaggatggatttgttgtcagaatgccctgaatagtcgattatatgcttttgaacggtccatgttaaccgataaaagcaaagaagaccagctaaggcgtgggaccttacaactggtcttagtgattttcggacanaacttgatttgtgagtct

SEQ ID NO: 80350 - DNA, 446 bp, Glycine max
  unsure (1)..(446): unsure at all n locations
tatccatcacatgtggtactaggtggcggtcgggcgatggtgcacaaatagttgtttttttccacatccacaatgcgcgcataaacccaccatcccctgttgcccacctccaactgagctcacgtactcccacgtagcccatatcctcgtttctctcaacaccgggtccccatcaatcctcccaagcttccacaacatccaagcaaaacaacattcacacagcacaagctatcacagccaagcaaaacagagtaaaggcagaaaactctgccaaaacaccaaccaaaaatcacagctttttcccactcaaagaccccagtaacaattccttcgatcccaattcgtaaccgttggaatcgactccaaaatntactggaagtctatagtgcataagcctacantttgaccgttgggatctactaagaaacatccagaactcattctac

SEQ ID NO: 80351 - DNA, 427 bp, Glycine max
  unsure (1)..(427): unsure at all n locations
ntgagggtgcgcagcccaccatcttttcatagtagagtactcgattatgtgtctaccatcacgattatcgtctgccttttcattattgggggtaccacctgtgccgccagatccctccaccttttgggcgtgttctttgaaagatccgtccccctttttgcacatgttctgtagttgcatcctatccgaaaccatatcaaaattgtactgatactgcctaacacaggcaaccattaggtccttccaagaatggactcgggaaggttccaagttagtgtaccaggtaacagctaccccagtaagactttcttggaaggaatgtatcagcaattcctcatcttttgcgtattcccccatcttctgacaatacatctttagatggttcttgagacaagtagtccccttgtacttgtcanagtccagcacc

SEQ ID NO: 80352 - DNA, 484 bp, Glycine max
  unsure (1)..(484): unsure at all n locations
ggacctatgatactcagcttaggggcaaccctccaagaatctaatggcggagaggagattataatagaggttaaacgaccagctctcgatgctaagagcaattgtccccaaaattagtaaggtatgcactatgcagtgagtgagagtcattcattcaatcagagttgtacttacataatgtgtagatctaatttgttgtgttgaatgcatatcacaaatggatagaacatctatacttggagacagtactattgattacatgaaagaacttctggagaagatcaacaatctgcagcaagaagtagaagtagattcaaacatggcaagcattttcaaagatgtaaaaccaaatgaaatcctagtgagaaattcacccaaggtatggattttctctatcacctcccagaagaaattactacgtagtccttcgactccgacctatctttatgtgatatagaactganattttcatttacccaaaaga

SEQ ID NO: 80353 - DNA, 438 bp, Glycine max
  unsure (1)..(438): unsure at all n locations
nttcgtttggcataactatatcagccaaatctatntcatgtgtattgtttggagcacagaagttatattaaacatttgtgtacaaaagctgacaagcaagatgtcacagtagttatatgtccactttgtgccaaaggagttcgcctagttcctgatcaagatccaaacataacttgggagaatcatgtcaacaccgagtgcgacccatcgaattacgagaaagtcacaaagaagaaaaaatgccctgtccctggatgcagagagatattagtattctcaaacacaattaagtgcagggactgcacagtagagcattgtttaaagcatcggtttggacctgatcataaatgtcctggtcccaaaaatgtggaatcaagtttttcattcatgaatcttttgaatgggagtaaaaagcaggagtccaaacccaagtcaagc

SEQ ID NO: 80354 - DNA, 354 bp, Glycine max
  unsure (1)..(354): unsure at all n locations
cgtatagttccncaatttatgggttatttgtagtgatttttgttaataaatcttatttaatggttaatgttgtctctagaacatttcctttggatttaatgttgaaatctgtgtattttcaggtgaaaaagagattaagttttgaattgcaaaatgtagcagttgggctaagcgcatatccactactaagtgcagcttcaacgtgcttagcgcaaaagagaatctggaagagcatcagcatcaaagccgcgccgctaagcacgagattagtgtgctaagcgcagcaggtgccttcagccaggctaagctcgagactggcgctaagcctaatttcacttactcgtgctaaacatg

SEQ ID NO: 80355 - DNA, 367 bp, Glycine max
ccgcttgcattgttgcaatttgaacgtctcgatatattatgcgcctgaatctcacatccgagttaaaggttatgaccttttgaatatctcgagagcttccgttgttcaatttcgagcgtctcaatatattatgcgcctgaatctgacctccgtgtggaaagttatgaccatttgaatttctcgacagcttccgttgttcaacttcgagggcctcgatatattatgtgcctgaatcggacatccgagtgaaaagttatgaccattttaattgctcaagagcttccattgttcaattttgaacgtctctatatattatgcgcctgaatcggacatctggttgaaagttattaccatttgaatttctcca

SEQ ID NO: 80356 - DNA, 440 bp, Glycine max
tacggacactatgaatactaagcttctccgacaatggtggcctcttgagaatgaagcggctattccttcttctgatgatgcatggacacttatccctgacccaactacaattcgtgcaaaaggtcggccaaaatcaacaaggataagaaatgagatggattgggtcgaaccatctgagcaccgaacaaaatgcagtagatgtggagccgaagggcataacaagcgtcgctgtccaatgcaatctgagcgtgggagttgttcaaatcgctgatttatgtatgttagtcgagagattagtatttgcttacattctgttcaatgtattgaatttctggggttcaatgaattcggcagtttaaaacatattgtctttctgtcattactgtattatgggcttccatgaatctcaaaaaatcataaccaccaacttagccttacca

SEQ ID NO: 80357 - DNA, 461 bp, Glycine max
  unsure (1)..(461): unsure at all n locations
ctggctaattcatttctcttccattntcttccctttcatctcacttttatattngtaagtctctcatgacaatcagaagctaaaactacccattattgggagctttgcaaaccaaactctctttgatgtaatgattctaaactatatattaatatgatgttgatattgttatttatctttgtgttcattcacatgtcttcgatctgatcatccattttcataaactgttttaggatttaagcattggaaaatatttatatgctagaactggggaagaacatttaggtaatccatctctagggatagagtgacattgtctagcctatgcatgcatctttgctcgtaatgcanattatntaatataacttttaagggattangagcgatattaggtaatntacgctctctcactcgagggatcatggttagagtatgttagaaggtccaagtaataatcatat

SEQ ID NO: 80358 - DNA, 470 bp, Glycine max
  unsure (1)..(470): unsure at all n locations
ntgcggatntggtcttcgccggcaaaggatcgaagcgggtctgaaaagaggcaaatttgatcatcctactttgataagtgagaaagctagggcaaatgaagagggtgagaatgaaggagaaacccatgatgcgactgtcattcctacatagccaaacttcccaccagcccaacaatgtcattactcaaccaatatcagatcttctcattacccaccacccagtcatccacaaaggccatccctaaatcaaccacaaaacccacctaccacacaaccaatgctaaacaccacctttagcacaaaccaaaacaccaatcaagaaatgaattntgcagcgaanaagcctgtagaattcaccccaattccgatgtcctatgctgacttgctcccatatctactngacaattcagaggactacacgtnctcgccatcagaggactacacgtnctcgccatcagagggctgcatgt

SEQ ID NO: 80359 - DNA, 472 bp, Glycine max
  unsure (1)..(472): unsure at all n locations
ctaagcttacaattgaattaaaacgttcagaaactactggtaatcgattactcatatatgtgtaatcgattacactgtgcaaattttgaattcaaattttaatacctgttgtaaatcagttttggccactggtaatcgattacatcctctggtaatcgattaccagagagtaaatctcttgaaaaagacttttttaacttaaatttcttggccaaaccttttgctacttcaattggaattcccttcctatttaatgtaatcttcctaagactcaagagactgtcttgatcatccatcttgaatatctttgatttctttgtcttgaataaaactttgagaaacatgtaatcctttggcatcgtcaaaacatcagcttgatcctttgtctacaatctcccnctttttgatgatgacaatcctgaaatcaagacaagctatatacaagatgatagcacgttcacacagcccttac

SEQ ID NO: 80360 - DNA, 451 bp, Glycine max
  unsure (1)..(451): unsure at all n locations
ntcaacaagagtcttcacanataatcatcatgaagcagataactaacaaaactacccatcatatctcccaaaaccccatacccacgaaatttaagagagaaagaagtccacccaaacctgaattttcgaagtcccactcgtggccacgcacttcacgaccccgaaaatgtcctcctttcgcgatttggagcagaaatgatggccaaaggttggagctttgtgtggagcttcaatggagaatgaagaagaagaaaatggcaacgcgagggagagagagagctgtctgaaaagtgtgggggctgagtgaagagagagaaaagctttttggtttttaaataaagggttttctctttttctattantttatttaagcaatgccacatgtctccatttgagtggagcanaagggcccactttcccttttactgtgaccacactcagcacaaagtga

SEQ ID NO: 80361 - DNA, 470 bp, Glycine max
  unsure (1)..(470): unsure at all n locations
actcagcttctatccaggctcatcttggtggtgaagctntttcttccatggcttattccttaatggatggtgcctcctctcacctcttttcctttgtcttccgctgcatctccatggtggaaaatcaccattaaaggaccccattgaagctcaaagatccagcctccatagaatccctctttgtaaacaaccaaaatttctcaattgattatttttccttgtttggtgattgttgcaattctcttagtgtagtactagttgaatgaaatagtgtgttaatctctcctctccatttctctagtttttattttcgacttgaatcctttacgaaccctattctacaagttgttgaactatattccaaatttctaccttttgcaactatggaacataaaattattaaagggattttagaatngttaatgcattttgtgtcaatntatgaattgcaattgagtgtttaaccatat

SEQ ID NO: 80362 - DNA, 475 bp, Glycine max
  unsure (1)..(475): unsure at all n locations
tataaatactaacttcaaacccttgattaacttgaaattaaatccgtcgggtcctgtattntttgaatcaccacattcccataccaccgtcttcacctcacactcctcaaaagtagcaagaagcaaaatattatcttcaaccactaattttttgaactccacctcatctagtttaggtttattctcttccgtttctctaaatctttcttggaaaaatttctcaactccctccttcacatcatgcgggtcatcaacccaagccccctcaacaaccaaccctctcaaggcactcttcctccttctccaattcatgcacgattgacaatatttagagttgcgatcaccttccgaagcctacctcactctagacttttgtctagttagtgactcattacaattcaccaccctccgaaattcctcttataatgcttttttattggntacctccttcttcttgacgtattatgcccttgca

SEQ ID NO: 80363 - DNA, 452 bp, Glycine max
  unsure (1)..(452): unsure at all n locations
cctnttcacacattgactggcaagccaatacacaccatgatatatgctcatatctggaatgcacagcacctggataaaccatgttcgtaaaacctgatacataaaacaaattgatttattggagagatcatacatactgaatattcaaaaggggatatcaacccatgtgtgcatcaatgacatgacagtgtatgaagcagttttaaatatcaccttttacaccaacagtctttctcatacaggttacatgataatgacaganactactctgtaattaaaaaaataaacttcttatcttctgagagacctaaagaatatttcacaagatcctcgtcatattccattgcatcacaggtgaatctcttattgatagagatagaatttattagtgtagtagttagcacggaatcaaacagtggacctacttgtgttagttatgtcatagcataaat

SEQ ID NO: 80364 - DNA, 458 bp, Glycine max
  unsure (1)..(458): unsure at all n locations
gctacacanataacctgtgattgtgtcaatctcctgtgtttgtgtgtatgaacaaggaagtaagaaccattagcctatgtgacatctggtaaataaccagattgagatagtttggtgtggccatgactataggtctaatagcagccatgatattaaaagtccctttttgtcaacctaaattcagtttagataaaaaaaattcagtgcccttctccctaattttgatctcatgattgccacttttttctccaatctccctatagtatatttaaaacaataaattaaatctacaaaagtatagaagattaaatattaaaacataataaataaaattagagtagggatagttgacactaaatgagaaatcagaaaaaaaaaaacatgtctagaaatgagtngagttcacagcttgactctaatacaaactnttcatgttgtactctatcctacacacatga

SEQ ID NO: 80365 - DNA, 457 bp, Glycine max
  unsure (1)..(457): unsure at all n locations
tatnganataagttacagaactagattgttaagcttctctacaaaacttattgaaataagctaataagaacttgtgggagggccacacaagtcgtttttatatatccaaatcaacttcattgaagatctacccaaacaccccctaaataaggaatgtctgtattctaactataaaaaaatctacatggttggtggtgcaaaacttgtacggagggatgaagtacctttgccctgtgttgtaaaagcaaacttgtttcaacactctcacgcattccagtggtgctacttgtttccttctgccgtgaactaacctataaatagataacaacatgggaaaattgagtaatgtatgcatatgagatgatagagtaaagcatatacacactgccaatatgaaatagaaacatgtcattgatcaaaaaaaaaatagcatggcttagacagctctctcttattt

SEQ ID NO: 80366 - DNA, 411 bp, Glycine max
  unsure (1)..(411): unsure at all n locations
actcaaagtagatgatctcatagctgttctccttgttcttcttttcgaatcttgaatccttgcgtctgaaggagtgttggaactttcctttcttctccatcatctttttgaactttctagacataaaggtcacttcatcatctatggatccatcagattcctacatctgcacttttatagctttagacaagctcttcttttcgtctcttcagatttgaagggaacaaaattcttcttttgtgtatgctccctattttgaaggtggacttcatggactctcaagagcccaacaactcatcgcatgccaaaattttttagatctcttgcttcttggatggctgtggtattgggttcccataccttgagaaagttgtcaacacctccaagttatctaagcctgngatatgtctg

SEQ ID NO: 80367 - DNA, 326 bp, Glycine max
acatatccttctcaaaacggggtgcaccatcttgttaaacatatctactcaccaattcctgaacttgcaacatgtaaaatatggggaggcattatatgctgagctaagagttctctggatccctttttcaggacaaacattgatgcatatactctgcaactcccctttatcaaaaatacaatgtcttaacacctcccctaagaataatcaccatgatattacctctcatacagaaaaatttcgtcaccaatgattttatgacaagactcttggtataacccttgttgaaatcttcaaatggctacccccaaatttgttgaaaaaca

SEQ ID NO: 80368 - DNA, 460 bp, Glycine max
  unsure (1)..(460): unsure at all n locations
nntggaaatgatttatgtacaaaggttagtcatatggagcgactaacacacaatcttaggacctgacagaacatgggtggtgaatggccaaagattgaaactataccatggtggagagtttggaaaggaaaacaccatcttaaatttgatatcacccaactctgatttctttcattttgtttttcatgcattgcataagttggaatttgctntatgatcattgaaaaaggggtatatcagcttatactaagttatagatattggggtttgatctatatgttttgagaaaatggactgaaattaacttaaaaacattttcttgaaaatagtccactcgctaagcgcatatcacacgctgagcgcatctcctccatgcgctaaacgaggttaacctgcactaagcgctcaaaccctgcatctcaagatgatggggattgctaagctagccatgggtgagctt

SEQ ID NO: 80369 - DNA, 451 bp, Glycine max
  unsure (1)..(451): unsure at all n locations
tgagaatggaggatttccttgagggtcctctcttatgcaatcatggaacacagctccaaactcaaaagtggaggacacatgaatgacaacgcaattcattcatggggctccgaaaaagggtaagaatggaggatttgcttgagggtcctctcttaggcaatcatggaacacaactccatactcgaaagtggaggacccacgaacaggcctaagcaataacattcatgtggctcctaaaaaggatgagaatggaggattgccttgagggtcctctcttangcaatcatggaacacagctccaaactcaaaagtggaggacacatgaatgacaacgcaattcattcatgtggctccagaaaaggatgagagtggaggattgccttgagggtcctctcttangaaatcatggaacacaactccaaactcaacagaggatgacacatgaatgaca

SEQ ID NO: 80370 - DNA, 467 bp, Glycine max
  unsure (1)..(467): unsure at all n locations
tcaactaaagtccataccttgttgatcttcattggttctatttcttattccatagtttcttgccatttcttacaatccaagttttacatagcctcttcatagcttcctggatcatcatcatcatgataaacctcatttgatgtgtcatctaggaccattaagtttaatctatcaggtgcacagtgcactcgagtaaattttctagaaggctcatgcattgngttcatagattggtgaattagctccaagattgattcattaacctgatcttgaacccaattattggaggtgatgacctttgtggtaactctagaacattaaaaaaatgtatctcagtttccatctcatattcctaagttgtttaattgattaattgaatntcatcaagctcaatttctttatcataacttcctttgtgaagggaattcatttctannaaatatagctcctctcgcgaaaaatatttt

SEQ ID NO: 80371 - DNA, 455 bp, Glycine max
  unsure (1)..(455): unsure at all n locations
tcctttacaacanagagaaaaaaaaaatgaaggattgaagaaatacaagcggtgaggatgtctcctccacctttagaacctcacaatcactcacaaactcatctcaagctctcaggacgacttcctcttcaagctccattctctacaggtcttcgcacaacaaaatctctcaaaactctcgggattcagacccttctctctttagaatctctcacatgcagaagctcttcgagaaaatggccaaaatcctctcctatttctgatttcaggcttaaataggtggcctttttggagcttgcacgcttagtgcaactttgaaccgcttagcgcacattagtgaatttcggcttagtgcgcgtcttctgacttagtggatggactcaagcagtgcgtttagcgggatgaaccctcgctcagcgaacatgcacaactcatccttctttcagattcttcct

SEQ ID NO: 80372 - DNA, 456 bp, Glycine max
  unsure (1)..(456): unsure at all n locations
tgaagctcaaggagaagttngaagaagttntggctcttacatgcccaacttctttgagtggcatttgtattgtttgtgaacttgattgttgcatcttagtgcatttgatatttgttttgcattgtgcatcatcatagtgtgagtaaagaaaattttctaagttaaaaaaatttcttcagaggcaaaaactctctagtttaatcgattatagagttgtcgtaatcgattataacaagttgtctgaagcttaaagagttaagtcttgtatcaatttaatcgattacagtagtattttcatcaattacattgttgtttgagacaacgactgatttttcaggagtctctattttaattgattaccaagtggagtaatcgattacgtatgtcatttaatcaattatatagttcttgagttgtttccacatgtcggtgaacacttaatgaatacttggatat

SEQ ID NO: 80373 - DNA, 326 bp, Glycine max
  unsure (1)..(326): unsure at all n locations
tggctgcatgcctctgagcttantctgcgacagagaacctttgtttattagttagatgtggcaagaactgtatatgctatatggcgcacatgtactcttaagcttggcttatcatgctcaatctaagggttcaactgaggttatgaaccgcgtaattgaacaaatcatgcgtgcctctggtcatcatcgtccatcgacatggggtagactgttaccttgtgtcgagaggtcgcataatacatccataaatactagcactgaaacctgcccatttgatgtctcatacgaacggtaaccatggacgatcctttattatatcacaagct

SEQ ID NO: 80374 - DNA, 473 bp, Glycine max
  unsure (1)..(473): unsure at all n locations
tatacatctactgtaagtccaagccgattaacgaaatactatctatatgaaataaaatctggataagataagatttgataaaataaaattgtcggctctcttcaagtccaagcccaattgcttataattcttctgaaattaaattaaaaacacaaaattagtcaaataggcccaaatgataaaactgcacaattaattagacaattaaggctaatcagtaattaacatggtgacaaaaagggttaagaaataggagaaaataatgacacatcaatcattcaatatctttcaactctttctatagaattttctgattcatttctcttcatctttcaaaaagtttttgttcaacactttctcttccaagagaagttctttgatcaaaaacttgtgctattcatctntttcattctcttctccttttgccaaaagaatgaaggactaaccgcatgaattcttttgtgtctctcttc

SEQ ID NO: 80375 - DNA, 452 bp, Glycine max
  unsure (1)..(452): unsure at all n locations
agctgaattcagatcanatggaagttagcttagcttattcttggccagcttagcggagcaaatctgccttagatgcaagggttgggtgctaagcgcttgagactcgcaacttagcgcatgaatagagatgtgcttagcgcgaggcttgtgcttancgaaaggactatttttcagaaaaaaaatttctaagttattcttcagtcctttttccttgaaattgaaacccttatgttaagcattcaaagattggctgatatactcctatgtacatanttatataacaagtccaaatgatttatatgcataaaaagcaaagataacaganattaatactgggttgcctcccaagaagcgcttctttaacgtcattagcttgacacttttacctcactgggtgatcaaatgaacagtgccctgtgtccttgtanattcttcaccatgaatacaattta

SEQ ID NO: 80376 - DNA, 463 bp, Glycine max
  unsure (1)..(463): unsure at all n locations
tgtgcanatcanatcactcctacatctcatctctagcatgctttntctttctttacccactcctcacgtttggttntttagggaaaacactataactaaacgcgccgcaagggatccctatcgcaccagatccaaatctagaacgatgggtgatcaagaggagacacaggaacagatgaaagccgacatgtcggctctgaaagaacaaatggcctccatgatggaggccatgttaggtatgaagcagctcatagagaagaacgcggccaccgccgccgctgtcagttcggctgccgaagcagacccgactcccttggcaactacgcaccatcctccctcanacatagtaggacggngaagggacgcactgtggcacggtagcagccctcacctgngatacaaccgagcggcttacccttatggattgccgcccaactattcaccacccatcttgcagaagatg

SEQ ID NO: 80377 - DNA, 460 bp, Glycine max
  unsure (1)..(460): unsure at all n locations
ntgtgtaatcgattatactgatttggtaatcgattactattgattgtttctgaataaatcaaaagatgtaactcttcaaatggtttttgactttttcaaattggttttaagtttttctaaaagtcataactcttctaaatggtcctcttgaccagacatgaagagtctataaaagcaaggctttgttttgcatttgataacaattcaatcaatcttatacaattccttacaagactngaatctctntgatcttcttcgtgccaaaagctttccaaagttttctggttttctaaaccttgaaaacttgtgctattcattcttttcatctcttctccctttgtcaaaaagaattcgccaaggactaaccgcctgaattcttttgtgtctcccttcttccttgtcaaagaattcaaaatgacacagtctaagaattctttgattcttccctttccttatacaa

SEQ ID NO: 80378 - DNA, 414 bp, Glycine max
  unsure (1)..(414): unsure at all n locations
tattggattatggggcacccgtcatatgtggtactatgtggcaatctggcgatggcacaaatcaactatcacatttccacaagccaggcattaagcacacccatcccncagctggcccaccttttaaatatagctcacgtgcattgtacgtagcccttctcctcgttccttttcagcaccaggttccccatcaacccctccaagctttcacaatatccaatcaattcaatcccatttgtcatgaaactaccttaaacaaagaaaaacagagtggaggcagaaatcttgcacaaaatcaatcaaaatcaacagagtttttctaccccatacctcaaaacacctttggttccaatcttacccatggaacccctaaaaaattaactgagggttcctaaacagaaattaagtttgacc

SEQ ID NO: 80379 - DNA, 479 bp, Glycine max
  unsure (1)..(479): unsure at all n locations
ttacggacactatgaaactcacgctttggttntaataaaagggttntctctttntctattattttatttaagcaatgccacatgtctccatttgagtggagcaaaaagggcccactttccctttttgactgtgacccatactcagtcacaaaagtgaggaaaatctgacctttgaaacgctaaaatcctgcctcggtttgcgtgctgtttctctggttccagttcctcgtgtttctctgcgtctgtcagggccagttttcgaaagtacgcaatatatatatatcaaaacgctcagaataaaaccccgagcgtggttcagaggttggtttcgttaaattctaagtcgcacgcaaaacgatgatntttaaactaattaattaggaattaacccataacctcccagttatggatttctcttccttaattaagctaacccgcatatcttgcccccactatncctacttctaccaagaacatat

SEQ ID NO: 80380 - DNA, 333 bp, Glycine max
  unsure (1)..(333): unsure at all n locations
cgcttgaacaaattctaacgacaataactgtntactcggatgtttgactgagtcccgtaatatagtcgagaagctctgaattgattatcgaagctctgagcaaattcaaacgactataactttttactctggtgtctgattgagtgctgtaatatatcgagacgctcgaaatggaataccgaagctctgagcaaattcacaccacaattactctttactcggatgtctgattcagtcccgtcatatatcgagacgctcgaaattgaataccgaagctctgaacaaattcaaacgacaatcacttttttactcggatgtctgatcgacgcccgc

SEQ ID NO: 80381 - DNA, 449 bp, Glycine max
  unsure (1)..(449): unsure at all n locations
tctatggaggctgatctntgagcttcgatgaggtccttctatggttattttccacaatggagatgcagcggaagataaaggagaagaggtgagaggtggcgccatccactatggaataagccatggaagaaggagcttcgccaccatgagagcgccttggataagaagcttagagaagaagcttcaatggatgataaaagagggggggagcatgaaattgaagaataaaaagagggagagaagttgaactttgaagtgtgtctcacaagactctcattcatcanagttataacaagtattacagatgcttctatttatagcctaggtagcttccttgagaagctagagcttagctacacacacccctctaataactaagctcacctccttgagaagcttcctgagaaattcattgagagcttcttgagaaattctagagaactagagct

SEQ ID NO: 80382 - DNA, 386 bp, Glycine max
  unsure (1)..(386): unsure at all n locations
tgtctcagcgtntatgcgagacagagaccaacatgttagctatcatcgccaagtacgaagaagagttaggtctagccacggcccacgagcatagaatcgcggatgagtatgctcaagtatatgcggaaaaagaggctagaggaagggtgatcgactctttacaccaagaggcaaccatgtggatggatcggtttgctcttaccttgaatgggagtcaagaacttccccgattgttagcaaaggccaaggcgatggcagacacctactccacccccgaagagattcatgggcttctcggctattgtcagcatatgatagacttaatggcccacataattagaaatcgttaggaaacttgtatggtctctcagacctcgactggatac

SEQ ID NO: 80383 - DNA, 441 bp, Glycine max
  unsure (1)..(441): unsure at all n locations
ntgaacanatganatggcaccttgcagcanaacgtaaaacatcattacaaaatacctatattacctttcactcacccttgcctcaantttggtgtggtattgaccatcactcaaaatgactctctattcatcctccaattcgcaggtcgacaggatgcaaatgcatgcatgcttatgatttagatgtttaaacgcaacaattaaacaagtgttatcgtgttcaattttacttaaacgcttacggcaccccgttaattgagccaaatggcttcgaattcagtgggtaagattagaagagtatgttcttaagaagtaaaagacacaactcaggaagttaagatgcatataattaatccaatatttattaatgctgcgatcatggtttacaaaggaatttaagactttgaaaattccaatgagtccttggagaacaaacatgta

SEQ ID NO: 80384 - DNA, 397 bp, Glycine max
cttgactcgaatgtctgatcgatgcccatgatatatcgagacgctcataattgatcaacggaatctctcgagaattcaaatgactataacttttcactcagatgcccgattcacgcgcctaaaatatcgagaccctcgaaatagaacatggaagctcttggaaaattcaaatggccataacttttgagtcgaatgtatgatcgacgcccatgatatatcgagacgctctaaattgaacaacagaagctctcaagaaattcaaatggctataacttttgactcggatgtccgattcacgtgcatcatatatcgagacccaaatattgaacacaaaaacacttcgcatatacaaaccggcataacctttcactcgaatgtatgatcgacggccgtgata

SEQ ID NO: 80385 - DNA, 481 bp, Glycine max
  unsure (1)..(481): unsure at all n locations
cgtacactataatactaagcttaagaataatggcctcagcanacttcttattcccagaatgaaattcaataaataggcctcctatttttaatggagagagttaccactattggaaaacccgaatgcaaattttcattgaggcaatagacttaaacatttgggaagccatagaagttggaccttatgtacccaccatggtggcgggaaatacaacaatagagaaacctaaagaagagtggtctgaagatgaaagaagattagtgcagtacaatttaaaggctaaaaacatcattacttctgccctaggaatggatgaatattttagggtttcgaattgtaagagtgctaaggatatgtgggacactctacaagttacacatgagggaataactgatctcaaacgatctattgtaaatactttaactcatgagtatgaattatntaggatgaagacaaatgaaagtatacaagatattgcaaa

SEQ ID NO: 80386 - DNA, 457 bp, Glycine max
  unsure (1)..(457): unsure at all n locations
tgctaaagaaacttagaaaaatcaagaacttacttgttctctcatcgttcgtgtgtatgatatgctctcgacaaggtttgaagtataggagaccttcagtcctataacacaaagcggcggacaaaaatggacagttaacttgaatgatcattattgtcaatgcggaaagtattatgcgcttcactatccatgttcacacattattgcagcttgtggttacgtgagcatgaactactaccaatatatagatgttgtttacacaaatgagtacatcttaaaagcttattccgcacaatggtggcctcttgggaatgaagcggctattcctccttctgatgacgcatggacacttatccctgacccaacaacaattcgtgcgaaaggttgaccaanatcaataacgataaggaatgagatggatngactcgaaccatctgagcacttgacaaaatatagt

SEQ ID NO: 80387 - DNA, 458 bp, Glycine max
  unsure (1)..(458): unsure at all n locations
nggctaatcctgacccaatccgggcatagtcagtcatgtgataacctgtgacgtacctaaacaggcgagctcctggcagtcaaccaataaaagaacaaagtccacgaagcaaggagacttgtgtggtggctggccagctatgtatcttgggtggtatatgaaaattagcctctagtaatcgattaccattcatgggtaatcgattacagggtttaaaaatggagacaggatgttaagtagctactggtaatcgattaccaattgtgtgtaatcgattacatactttggtaatcgataccagagaggaaatcccttgaaaaagatattttgactatgcgtagccgttatgggacgcattgtatggttacctatgtnagtagatttcttgtgagagagtctaccctctttcttttatctcttgtagatcgcgatggcagcacagntgatccatgatcgcg

SEQ ID NO: 80388 - DNA, 471 bp, Glycine max
  unsure (1)..(471): unsure at all n locations
ntgcaacatatgaattaaagaatgtgcttgttgggcatctggttccatggctgctgtcgaaggagatgggttggatgatgaagggatgtcctcagttcttgctctcttccttgatgccatatgcaaggaaagaatgtagacaattacaagagttaagttgaaagtaacataaaggttgcttagctagatcgaattcgcttagtggaccttcacaaaacaacacataccgcttagcgaaacatagttcgcttagcggatcttaaaggagaaagatatacctgcttagcgacctatatagctcgttaagcctaaaagcaatcgcacatatatgcacttagctctggtacacacggcttagcgctaggttttcaactcanaattntctgagttattttggcttagcgattcagcctcgcttagccacaaggatttcaataggaggatgagtattcattctcacaagatgaactc

SEQ ID NO: 80389 - DNA, 460 bp, Glycine max
  unsure (1)..(460): unsure at all n locations
tgtgtgtcagaataatgattaggttaacatatgcttgctgttaattatagttagaaatcattaaagaaccagcatagggaaggctacagacaagaatttacacagaagcataaccttaagaaaataaaatatttttaatgaagttaacaaaattacaaaatatatctttgtagtatttgtaaatatggggtgtcagattaaataatatttactaaatttttcataaaaaaatggacaataaatagcaaaggaaaagcgcaaacacgagacttttgccaccaatccataaacatcacggtattaaaaaaagagactcatatcaaggggggacgagaacacaccaggcttgtcgaacaggggcgcagagaaacttaccangcacagaaacacacagcgacgccgggcctggtacgcgggtcttttgcagatgtggtagctaggagagaaccacgtatacagc

SEQ ID NO: 80390 - DNA, 439 bp, Glycine max
gtaagaacctagtgcacgtgtatatattttttagccataaataaaacaaaactgcatttcaaccaacaactatctctaaaataagctaatccaaacaaacactcgtgatctaaattttcatttccacaatttagcttcaattaaaaccaaacaaatatacttccctatgataattaaaaaaaaaaaaaatcagcaccgcagacagaagggaatatatcagtacgacatccccataattccaaaccgtaaacgcaaattagattcaaatagttaaaattaaattcaaaatctattttttttttcaataataccaattactcaaaacacacacactacaagcaaatgaatgcatcttcaaaccttctcactccgagcagattcatcgccccgctgcctcccaaactcgtcgtgaaatggcttatcagaatcttcaccgatc

SEQ ID NO: 80391 - DNA, 367 bp, Glycine max
  unsure (1)..(367): unsure at all n locations
nggaacatgacctgaagcatctcaagttgcaccaccaaactggaaaggattgcctattgatggtgttgatgctcccaaatacaaaatttgattgaactgcggtaggttgctgacttgtgtggaggtagaggctgctgctgtcggagtaaatgaaaattgaggagttgatgcactggagaactggtagaagtaacaaacatagtggatgatgatgatgtactaaatgtggaaccaaatgtagacttagtgggctgccaactaaagtagaacttggaccatattggagttaacagagtataccaccgaagaggaagcaggggtgccaagttcaaaagatgtggcaggacttgaagaangaaacaacaaa

SEQ ID NO: 80392 - DNA, 253 bp, Glycine max
gtctatggaggctgatctgtgagcttcgatgaggtccttctatggttattttccacactggagatgcagcggaagataaaggagaagaggtgagaggtggcgccatccactagggaataagccatggaagaaggagcttcccaccctgagagcgccttggataataagcttagagagaagcctcaatggatgataaaagaggggggagcatgcaattgagaataaaagaggagagaagtgaccttgaatgtgt

SEQ ID NO: 80393 - DNA, 420 bp, Glycine max
  unsure (1)..(420): unsure at all n locations
ngaaggtaaactagatgccttggtgaacctggtaacccaattggccatgaataaaaatctacacctgtcgctagactctgtggtttatgctcctctgccgaccaccacatagacctttgtgcttctgttcagcaatctgaagcaattgaatagcttgaagcttatgttgcaaatatctacaatagacctcctcaatctcaatagcaaaatcagccacaccagaacaattgtgacctctccagcaacaggtacaatcccgggtggaggaatcatcccaaccgtagatggtcaaatccttcacaacagcagtagcaacaacaatagccttgttttcagaatgctgctggcccaagcagaccatacgttcctccaccaatccaagcagcaacaacagcaacagccccagaaacaacaaatagt

SEQ ID NO: 80394 - DNA, 260 bp, Glycine max
  unsure (1)..(260): unsure at all n locations
atcaataaaaatcagtttgtctggtaaaatattaactcacttgtcttttcattagtgactcttgatatnattttatcttttgagaaaatacttcaagagattcaactaagggggtttttactgcattttttctcaagattcaagttgatcaaaatttattcattggtcatcatgaattgataattctttgtagaagagcttgagatgttaactacacataaggtgtactanatcaattatgattctttgttgttctgatc

SEQ ID NO: 80395 - DNA, 354 bp, Glycine max
  unsure (1)..(354): unsure at all n locations
taatactttaggctgcaacatagaacacaagaacatgattaattagagaaatatcctcatatgcatcaacttgtttgttagaaagacccaacactttttaccgattgctgtcaacttttacttacttgcatctactgtttttaccatagaagtagtttatttctgttttaaccatcgattatcaatgttgttccaacaatgccttacttctgaatataactttgtctaataagcaagttccctgatttcgatactcggatcactccattntaattntaaatacttgacgaccgggtgtactntctggtgtttcatttcccttgaatatatttgttgaaaaatggagaaaaagga

SEQ ID NO: 80396 - DNA, 307 bp, Glycine max
ttccctttggttctcttgggttcttgtatataactctatgatagttttagtgtatttttgctttaatgtatgcatgagataaatatttattcatttgatgcacacaaacacctacacttttttgcacacatggtgagtatttaagggccctgtacccgggtccgtgggaacatacgaagcggaggtgaatctgtggtcatgctaagttttcgacttgcttgatgacagtgaagtctcatctagagtttttctctctgataatattttgtcgctggtagtccctaccgccacaatgttgatatcaaac

SEQ ID NO: 80397 - DNA, 436 bp, Glycine max
  unsure (1)..(436): unsure at all n locations
gcttgctaggggagctactatggacgctggatctttgatcttcaatgacgtccnnattggttattttccaccatggagatgcagcggaagacaaaggagaagaggagagaggaggcgccatccactagggaaaaagccttggaagaaggtgcttcaccaccaagataagccttggataagaagcttggagaggatgcttcaatggtggaaaagaaagagggagagcaagagagagaggggagcacgaaattgaaggaagaaaaagggagagaagttgaactttgagttgtgtctcacaagactctcattgatcaaagttacaacaagtgttacacatgcttctatttatagactatgtagcttccttgagaagctctcttgagaaaacttccttgagaagcttctctgagaaaacttccttgagaagctagagctt

SEQ ID NO: 80398 - DNA, 350 bp, Glycine max
cacagactgttatgatactgaacagagctattatgctttttagatgcatatgagcataaaataaaatctattttcttgattgaattgcggatgagagatatgaataaatttatggttatattttctttcttttcttttggattctttgtattttggacggtggcagattcttgtgaggggcggtgccaatgaaaactgatcacgtggagagaatgaatcttgtttgagattctaaaggtgatggctatgccagaacatgattattatgtgtaaccacctcgtatatttttatggacggaggcgtgccatgataaagctttccccttttcatgtattattctttcttttaa

SEQ ID NO: 80399 - DNA, 217 bp, Glycine max
  unsure (1)..(217): unsure at all n locations
atgcaaaagcagtattatggggatcaaaacatgtttaacaaaaaaaaagaaatgccctaaatttaaacttcatagcggaaagataaacatattggataccaatcatgtaccataataattacatgctcaataccaccaatttatgttttatagtcacanaaattaaaagggacctaatcagcacatgctgtcacctggagtcaggaatgcaattttt

SEQ ID NO: 80400 - DNA, 394 bp, Glycine max
  unsure (1)..(394): unsure at all n locations
agcttgaacttcnttgcttttccatggactttatcttctttcccacttaggccttttagctntgggagccaagttatcccttgcgtcctagacttcaaccacttgtgatagtcgctgatgacgccatttctactaccctaagctccttatctttcctttcccttgtattccaagatttacaaattctctgaagtatctttgcattggcttcattgaaacctcgtgcaacaaaaggcgcgatgatctcctccgatggtgcacttctcatagggtaacctggttatcttatggccagcatgggattataattaatacaatcccttgctctaatcaaggggacatttgggaatccttcacataagcataacactcctgcccctccttctttccatcg

SEQ ID NO: 80401 - DNA, 355 bp, Glycine max
tccagctcttctcttgcgcaagatgtcctctcttatatctacaattttctccctataaccctgtatgataaaaattcaaaaagtacaaagaagtctatcatatgtgaaaagatttgagaaggggaaatgaacaaccatcaacaattcaacatcccttacctgtttcagctcatgctttaattcttgtcttactcgctccatgagggacctctcgctctctgtaagaacaagagggccaaaccccatgccatctgccccatcgaaactactatcaaagagattggcatcactatctacttggtcatcttcatcatcagacattgttgcccctgtaccttctccaggtgaaactcct

SEQ ID NO: 80402 - DNA, 213 bp, Glycine max
acacacatgcgagctcatttaaggaaagggaccacccaccgcaaatgaggttaagatgaacatgtgtagggatccttaaagaaacaaactgaggtaaatttgggggagtttatgcatcttaattttgcctgcacaatgataaccacgaattgtcatgtttgacggggcaattgaagccctgacgtgaaaataatgagtgtttggctttgaacg

SEQ ID NO: 80403 - DNA, 295 bp, Glycine max
  unsure (1)..(295): unsure at all n locations
ttattcctctcccttcatcactaattttatacgcctgattgattgataaaaatatatggttactaaatttaaaatcagatgctgtatttggtgatccatcacgtgtgattgtgaaaactacttgctgcttagacctatgcagtaatattctaggtgggcctcgaatagcattcccagcatgccatttgcaccccgaccaatagcattgggggtgccttcccattctaccacttttttcacacacaanaaagttttttaaaactattaactttagcatgttatattggactattct

SEQ ID NO: 80404 - DNA, 246 bp, Glycine max
ttctttctggaaacctcttccccttaaggtttgagggggtaatagaaatatgttaatgtaccacccggaaaacattttggtatctaattggaagggcttgtagcttttgctaatagcacccatctagtgataaacagctgtagtatgatggtagggcagttagctttgatagtgttagttagaaactattagtgctagctacaatctgttttctgtaaggtctacacaacatacgtctatatatac

SEQ ID NO: 80405 - DNA, 373 bp, Glycine max
  unsure (1)..(373): unsure at all n locations
gcccccatacttgcgttgccaaactttcaaaaatcttttgaaatngagtgtgatgcttcaaatgttgggaatggggctgtgttgatgcaagaagtcatccaattgcttattttagtgaaaagttaagtggtcctacccttaactattcaacttatgataaagagttgtatgccttagtacgggctttgaaaacatggcaacactacctttatcccaaggaatttgtcattcatagtgaccatgagtccctcaaatatatcaaggggcaaggcaagcttaacaaaaggcatgcgaagtgggtggaattcctagagcaattcccttatgttatcaaacataanaagggaaaagggtatattgtagccgatgctct

SEQ ID NO: 80406 - DNA, 226 bp, Glycine max
  unsure (1)..(226): unsure at all n locations
atgatattctacatgcatctaatgatcgaggttngctacaagaggagaaacaatttctctctaaaaatttgacatgaaggatattggtggtgcattttatgtcattggcataaaaatcataaagaaagacctctacgtattttatgtctatcaccagaaacctatattaacaaagtttatagagatttggatgaaaaattgttcaccaaatatcgctctcattgga

SEQ ID NO: 80407 - DNA, 356 bp, Glycine max
  unsure (1)..(356): unsure at all n locations
tacaagataatgcttatcttaatgccaaaaatgtcatgctaatccccctgatttgagagcgaactcacctaatctatttatgcacacgcatacatgtggaatatcctaccatttatatcaacatagaggctatccaacacattctaattgtcacacacatatacgcatttganaagaacacacattctcacgcccaaggcattgcgtcaaagttcacacttaattatatcctaaacatttactattacaaactacctacacacatttgaaatatatatcatacaaaatttattggttctctcacatttatttatatgcatattggaatgctaattacatcctgcacacacttgcat

SEQ ID NO: 80408 - DNA, 303 bp, Glycine max
  unsure (1)..(303): unsure at all n locations
cttatgcttttgcagntctgttgatangaaancttataacatgcaatgaggatttctagtaatctagcttaaagtcgggcttagccattattcaatgatctgcaggctctgaacagaatgatcaaccacttaatgaaacttgattgctgaaaagtcacaagggctccatttatgcttcagttgatcaaatctgtgaaggaacagaaccatctctaattccttttggtttagaagggaatgatgaggaatgtgcagttcttatttcagttttgcctaccatccatgaagatggttcaaaatctc

SEQ ID NO: 80409 - DNA, 286 bp, Glycine max
  unsure (1)..(286): unsure at all n locations
ctgggagtgtgctcggaagctttccgttcccgagagcattacttatttagcactccacccctttgctttcgtgtagcttaggaaaaacgttatttcttctttctttcttcttccaaagtcatttctaaagttccaagcactttcctcatcacccacagccaccattagccaccacanaccatcattggtctccattgataacccacaccgagaggaacncttcaaccaaagcggaatcttccaacttggcttgcggttcggtagagaacaaaaccctaatctgacc

SEQ ID NO: 80410 - DNA, 312 bp, Glycine max
  unsure (1)..(312): unsure at all n locations
tactctagagcattctcagtttctctttgagtcctagcttgcttatgtgtgcttttcattgctttaattgctgaataatccttgaacatttgtcttgttaaaactctatcggtttaaccttcatttcaatttttttttgtctctggctatcgcttgtctctttctttccttgcttgtgaagtgcatatanggaattggaaaggaggaatggtgtcatacctttaagaatttgagtcaagatgcaaggggccaacccccttaagagctattggactaagaagcactccaaattgagtgaaacaccaagaggga

SEQ ID NO: 80411 - DNA, 355 bp, Glycine max
ctaactcttaattttgcttacctccctccatgggttctcattttctccagatctctcaatggttggctaatgttgtaacatgaatctttataagtttcaccggataaacttgctatagaagctagaatttattttctatggttcaaatttcttggtctcgaaccatgaattgtgttgagttaggttcttgagtttgcttgtatttttgggctgaacctaaaccataaaattcttaccaaaatattaaagtagaagaaaaccctcaaaatctagagtgacttgttcacctattgtgttttgtcatagaagtcatgtctagtcatgagacttgtcacataagatttcttatgttgcg

SEQ ID NO: 80412 - DNA, 320 bp, Glycine max
  unsure (1)..(320): unsure at all n locations
aacgggtggaccactgaaaaaaaaatctaaggcttttctatccatattctcacatgagctttaaaaaaaacccttgttcactactaaacaagctacaaaattaatcacaatcacaagccattattcctaactacatgccagagataagaatgaaaaagagaanagggaaagaaaagtcaggttgcctcccagtaagcgctcttttaacgtcattagcttgacgcatcatcctgttatctgggtccaacaaggttccaacttccaaaaccttcttctctagcctcttnttctccatcacattcaccttcaaacaaacattt

SEQ ID NO: 80413 - DNA, 384 bp, Glycine max
  unsure (1)..(384): unsure at all n locations
aatatatatatattataanttttattngataataaaaaaaattnttaaacatttaaattatgttttaaatttaccataaaaaatttatattaaaataaatagtcatatttaagggttttttttcccacgctgcatattctctttcttgctttttcctgaattacaccaatttggaaaacaattgtcaatttacacgacattctttattcaatggaaagtanggcttcaccacccccactttcgtatggacatttttttataattcatatgtttaattttttaatttagattattaaaagaatacaaatattatattatataaatatatttttaattgattttaaaacaaagagtcaaggaggaaagacacattgattcagatga

SEQ ID NO: 80414 - DNA, 395 bp, Glycine max
  unsure (1)..(395): unsure at all n locations
agcttgtagaccacgtcttttncggttttctttacgtttcctcaaataaacgttggtggtgactctgcgcgtattcctttcttggaacacacacccgcgagtcacgcgtcgcccaccctccgaagggtaggttgcgacaaggtccaacgccttaaatgacccccttccaagtaaaaagaatcacttgattcgccccttttcaaagaactacgtaggtctgatttccttatcacaattgaggaatacgtaggagcaagggaaacacccttgtccaccacaaaaagataaaaaatacaaaaagcgtaaaaagacataaaaagataagaaaagggaaaataaaacaaattgaagtcatatttgcacacttgattaaaggctgtcgtcccttgtgacag

SEQ ID NO: 80415 - DNA, 336 bp, Glycine max
  unsure (1)..(336): unsure at all n locations
acaaagtcaggttagcgataactcgcctatgctttttcttccatgctatatgtagaaagtcattgatccctgtcagtttgatgagttggaaaatgaggccgcaattatactgtgccagatggagatgtattnttcccctgctttctttgacatcatgattcacttgattgtgcatctggtcaaagaagccaaatgttgtggtcctgtttatctacagtggatgtacccgattgagcgatacatgaagatcttaaaagggtatacaaagaatctatatcgtccagaagcatctattgttgagaggtacattgcagaagaagccattgaactttgttc

SEQ ID NO: 80416 - DNA, 297 bp, Glycine max
ttcttttcttccccttgctttttctaatgtctagaactccggaaacaacacagttataacattggaggtacacaatattaatatcaaagtattaaaatccaataagccacactcataatcaaggaaataatctaacctgaattcctaaaacatattatgttaacaaccacacacatatccaagactgaaacacaagaaaaataagccaagtacttagcataataatggaaattctaagaaaccaaacgcgcaaatacacggctctataaagaataataatcacgaacctaaaatcta

SEQ ID NO: 80417 - DNA, 264 bp, Glycine max
ttcattttccacacccaccccacattatttaatttaccaactaataattatggtgcctgaaaccttaatttcttaattatgtgaaaaatcttaacatattcatttggaacgaaggagaaaaaaaactcttccttaacatatagactaactttgccctaaataaaactctttactaatcactcctctagaaattggtaataagtagtatcattaattgtagagatatatacttttaaaataccttaaattatggactatatcttc

SEQ ID NO: 80418 - DNA, 319 bp, Glycine max
agacaaaagcgaccgagttgcagattatgttgaaaacgcccgaattgatcattgctacttacatcgaggctgtacaatctacacaatttctgaatttgctagctgactaaactgattgtggaaaacctcaattgattggctagtaaaaaggaatctaggaatcctccagataattattgtactatatcaagctctctgtctaaggatgcaaattaccatttcttcagtgactaactcatttttgaagtgaattgttgcatgatggagcgtaaaagggctgacgatcctcccataaaaaaattttactcctgcatttgac

SEQ ID NO: 80419 - DNA, 362 bp, Glycine max
  unsure (1)..(362): unsure at all n locations
ttcgattacacaccatatatattatatattaattacattattacaataaaaaacaaaaattaattgcattaattagtttataatagttacattaatttatggaaattaattattattttaatgaatttaaattagaatttgatcatttgatgaacaataatttaatttgagagaatttataaaanaaaagtgtatatatatatatatatatatataccacgtgttcttatcccaataaaaatcatgaatntattattttcttaaatgactggcttttttagacgttataaattaaacttaaattaagctgttaaggacgatatttgttctctccctttcataaattctctaaatgtgtattc

SEQ ID NO: 80420 - DNA, 178 bp, Glycine max
  unsure (1)..(178): unsure at all n locations
actgattttcaggacgagatagggcaccggcggtggacatcaactggttaccccccatggcccagttcgatccagaaatagtccttgagttttatgccaatgcttggccaacaaaggagggcgtgcgtgacatgaggtcctgngtaaggtgtcagtggatcccgtttgatgccgacgc

SEQ ID NO: 80421 - DNA, 249 bp, Glycine max
aaggacattttaaggcacccttgaagatccctttcaaaaaaaatcgttgattacgctaagaaaactccgagctgattcttttgatgaggtacgagaacaaaccccttttgcacctaaaaataaagagtaagtaaggtacacaattcacaaagagctgtgtcttgaacaacggaaaggctatacttctcaacgaaacactcctgactaaatttattttgacggttcttcgtttccgagtttcaaataacg

SEQ ID NO: 80422 - DNA, 287 bp, Glycine max
ttttggttttgaaattataataaaagggtctttcttcatctggtcctacgtctctacccattctcaatcatttgcatggtcacttctttttctgaaacgacagatcccgagaacagtcccccgaaggtactaatacctgggacccgcttatcgacttcgagcaagaaatgaatcaaacggaagatgaaagaaatgaggatgtgggacttccctcagaattagaaagaatggtcgcccatgaggaccaagaaatggggcctcatcaagaagaaacagagctggtagac

SEQ ID NO: 80423 - DNA, 425 bp, Glycine max
  unsure (1)..(425): unsure at all n locations
gcttanagtatgcccaattcattcatccctattttatnngtgttgagtatnggcgtatcagaattgccattccttggatatagggttgaaccaagctcacgctnttacaaaaaggttcatcaagtcaagttgaaatatggaagtaaccgtcttgcaaaattggggcaaaagatgaatcgagtcacatcactgcttcgtctactgccaaacatatttaggattattgatgtccttgttacttctagtttcaccttgacaaagatgtcatggaccatgttgaaaatctaaattgattcaaccccatatcttgcgtaaaatatcgcaatacttttactatacatcattcgcatgcatccatgcttttcattggttgcattggtcgaagcatcttttcttgaaaaataaaaaaaatgaactttattatt

SEQ ID NO: 80424 - DNA, 175 bp, Glycine max
attccatttcatggtcgtcaaaatgttggtgggtcatcagagacaggttgaatttcgtcaattgggtcatccccttcccaaacgagtaaccaaagatgcttatcggggcaaatgagttgcgccctaattatggtcacatttgaaacaatgtctttacgcctttacaccttcgatc

SEQ ID NO: 80425 - DNA, 341 bp, Glycine max
  unsure (1)..(341): unsure at all n locations
ctttattctttttctatccccttctttaatattgaccttttctaagccaaaaaccagacacccacacttctgtgaaacttgaactattagtgttttatataatattttggggcctgaccacatcaccccatcaaaattaccattatnttcaagaatagtatttttaagtgaatgtgatctttgtaggcttaattaatgagattgatgaatttgtgtcttcggaatgtgcctttgttaaataatcacaatgccctctctttgaggtacatgttgacattntaaaatatattattagtccttggttgacggcaacaaaacatggtacagaagaaagaaaaaag

SEQ ID NO: 80426 - DNA, 406 bp, Glycine max
  unsure (1)..(406): unsure at all n locations
catattttttctcatancctctataacaaattttttcttatatgtttaaaannccngccaactacaaaagattaagatccaatatcatatttaattattctcgctcatgattttataatggtcaataaatttcaaccaataataaaatatgtgttacgagtagtatgttagagagtgtattattaatattcatctttgtgaatataaattttatctaataaattaaaaagtcaaattattaatatataaattataaaaaaaaggagttagatatttaagtcagacacaaaaaacacactgtaatatgtttatttgatcattaccaccattattgtatttcaattattttttacaataattaaaatatagagtaaattatattcttcttcatgattaattcaagtat

SEQ ID NO: 80427 - DNA, 342 bp, Glycine max
  unsure (1)..(342): unsure at all n locations
ttaaacccttcgcgccttcttgatttaaaaaaattaaaatgaatactaataatttcgacactggaaatatacacttctaaaattntcaaacttcacattaattggattgctttaagttntttcatcccttccaaaattattgaaagtatgggagtccaaaagcatatcaaagtgttataattaacccgaattcaagccaaatttcaaaatagaacaaagcaagcaaagcctttttttttatctatatataagcattatattntagaagaaaaaaatctttgaaagatcacaacgaagaacttgagagcatattttttatagcaatataccttttgcaaaaaa

SEQ ID NO: 80428 - DNA, 301 bp, Glycine max
  unsure (1)..(301): unsure at all n locations
gatttgtattaggagccaaaattgatctggtaataaacagaacttaatgagtacttattctgatcagtacctggttatcagttttgccttcgagtgtaacattcatattgatattttgttttcggaatgatgattgatgtaagtgctaatcagntatttctttgattcctgctttcattttggaccgtgttgctcatcattacagggccgaatgcttggtaccaatgaatatttttattacgtgctcactgtcattaatgacaattgatatatgctatacaaattgggctcatgatgagtg

SEQ ID NO: 80429 - DNA, 242 bp, Glycine max
aaaattaacgctcaatggaacgagctcgacaataaacacacacttttctcaaggcgatcatctgtataatggaagcccatgaaacggagtcgagcaaattaagacatacttttctcgagtcgatgagctatatatatcggagctcaatgaaaggagctgaccaataaggaatacttatcctgagcgatggtccgaaaatgaagatcaatgaacgagtcgacaatcaacacatacttttttga

SEQ ID NO: 80430 - DNA, 320 bp, Glycine max
  unsure (1)..(320): unsure at all n locations
ttttttangaccatttttgggatttttataaaaaagacaccccccaggaacccaaaaaaaatttaatggctgattgaactgaaattagggcaactaaaaggaacccccaacaagcaacaagttagccaccatttggtcttccaaaaggctgatgcttaagttgccaattgcgcccttattacaacttaaactaaacctaactaaagccctttttatttgattcacccaaaaaatatttttggtcagccaacttttacaaggattgggccattatttagacaaactaaacactttagaattgagacaaagtggcgtcattt

SEQ ID NO: 80431 - DNA, 184 bp, Glycine max
  unsure (1)..(184): unsure at all n locations
tatattataaagttttgttttatactggctacaatatttatntgttagatattattcttattnattaagtgttnctaaagtaagaaaaactacttaagaagtcatataactattataaattatgctaaatagtcacttagatataaaaaaacttttaaatcgatctctgaattttcctgaaatg

SEQ ID NO: 80432 - DNA, 147 bp, Glycine max
aaaaagagcagacaggagactacctcaaatgtgaggtggcagcttgtgatcacttttgttgataacggatcttattttgaacaatatcagaacacaatttaacaaaataactttcctttcataagtttggtctaggttaaattgtta

SEQ ID NO: 80433 - DNA, 390 bp, Glycine max
  unsure (1)..(390): unsure at all n locations
aagagcatgaagncctaatgnatattttaacatgaccnccggggagaacatgattcttttaagcctttgctcacataatatacattggatgaaaatccacttatatattgaaacttgaaagagaaataaaaaacttacagaaagaactttcaaagaaagaaaattaattctcctcaaaggatcaacctgttgatgttataccacttcatagggagatttaatcttctaaaaagaatctttctaaagttgttgaaggatacacacatctcaacaagtttttgaaatacaccataaatccttttgacaaatatggtcatgtttatagaggaacgagatttgcccataatgagtcctacaatgtatgatatttctgcggaacacttggacatg

SEQ ID NO: 80434 - DNA, 279 bp, Glycine max
  unsure (1)..(279): unsure at all n locations
gccaaccaccgcccacgagcatagaatcgcggacgaatatgcnccagtatacgcggaaaaagaggctagaagaagggtggatgactctttaacaccaagaggcaaccatgtggatggatcggtttgctcttaccttgaacgggaagcaagaacttccccgattggtagccaaggccaaggcgatggcagacacctactccgccccgaagagattcatgggcttctcggctattgtcagcatatgatagacttaatggcccacataattagaaaatcgta

SEQ ID NO: 80435 - DNA, 344 bp, Glycine max
  unsure (1)..(344): unsure at all n locations
aaaccacannttctgttttggcgcctgccacccttttttgggtgaacattctatgggatgtgcttgaaaaggaattaccttaatgattgatgtaccaatgggtcggttgagctttaattaacaccaaattttcgcttctccttagacctgttgcatacagttgggaatatcaggaggctggtacttcaacaataaattatttcttctttaattcttattctcatcttgcttttatggattcattttagacattttctattcacttctatctttgcagaataggattggagaaaaagatcattgataatgattgaaaatgccgaacgatactttcttgtcctttc

SEQ ID NO: 80436 - DNA, 349 bp, Glycine max
  unsure (1)..(349): unsure at all n locations
tggacacaaacggacatccgaggcaaatggtattggtcgttgaatttgctcaagcttctatttcaatttcagcgcccgatattacgggcttatcgantcctagtaaagtattgcggttgatttccttagttccttcattttcaattacgagcgtgtcgatatactacgggacacaatcggacacccaagttaaaagttattgtcgctagaattgctcagaagctttgttttcattacgagcgtctcgatattttacggcgctctatccgacatcctaataaaagttattttcgtttgaattccttagagcttccattttaattacgagcgtctcaaatactacgggact

SEQ ID NO: 80437 - DNA, 342 bp, Glycine max
  unsure (1)..(342): unsure at all n locations
tgagtcaccttttgctcaaaaagtcgagtgtcatctttagttttgctaaacaaaaagggttatattgcgcttagattttgattatgaatataggaaaattaacgaaaagaccattacagatcgaatgaatgannaaaaaaagctattcgaaaatataacaataaattaatttttaattaaataaaggaacagaagaaaaaagaaaacatatganacatataatttgtttgatataagacaattatgtttattagtatatagaaggacaagatcaattgatactaaatgccaaacttttgtacttactctactttaatatatattatgcctcaatgaaaatta

SEQ ID NO: 80438 - DNA, 241 bp, Glycine max
  unsure (1)..(241): unsure at all n locations
cgtgtgcttgtcaccgaaaagccccgcgggcgtccattgaacattgtatggctctgaagtgtatggtgcgaggtctaaatgatgttggctgaaactctgaggagaattgtgtgtaaatcctgacattgacaagagatgccacaccatggggcaaattntgaaagcctgttgttagatgtctctaatgactcaccacgattttcaactttcaccggaatgtgggtgtaagccattggtctgt

SEQ ID NO: 80439 - DNA, 410 bp, Glycine max
  unsure (1)..(410): unsure at all n locations
ataggtaattgaatnngagtttatctattgtgtgaaactatntgaacaaattatgagtctcagatttactttttaacaaataaagccaactaaaccaatgcaacagtgagagaanaaatcagaacatgtttcatttataatgggtatattacacaacttggatacaagtttcatagtatcaccactagggtgacctaatctggaatgccaagtggcaaaagaaagatcactattagaaagagtattgacatgtgacacattaggactgattctatttacactagttgaaacaaaatatggagaataagcacttggcacaggttctgagccagcagaagaaatggtattgatagtgaaagagggattgagttgtttgttatcttactaaagcacatcaaggaatttataga

SEQ ID NO: 80440 - DNA, 259 bp, Glycine max
ttgagccaaaatcctgactcaccataaaccttgacccattgtgttaatgtcaatccttaccttcggaggcgataagaatatatgggaaatttccaatcaaagaaaaggaaagaatgaagatttccaatcaaagagaaagcataaaaagaaaagaaggaaaattcccaatcatagagtgggagaaagcaaaaagaaaagaaagaaaattcccaatcaaagaatgggagaaagttaaaaaggaagaagaaaaggaaagaaa

SEQ ID NO: 80441 - DNA, 381 bp, Glycine max
  unsure (1)..(381): unsure at all n locations
ctgcagcttgaccaatctgctaccacattttttctctgaagcggaaagaatagaggggagatttcctatcatagaaagggaaagaaggaagatttccaatccaagagaaaggaaaaaaagaacagaaggaaaattccccaatcaaagagtgggagaaagcaaaaagaaaagaaagaaaattctcaatcaaagaatgggagaaaataaaaaaggaagaagaagaaggaaagaaagctcctgatcagggatcgaaggagaacagaagaaatgtgcagaaaggtctttggaccgatcaatatctgaacaatacagaattgtcaccaaacgaacaanaagaaggagaggaaaccacgacctanaatggtcttcttcctttgatta

SEQ ID NO: 80442 - DNA, 347 bp, Glycine max
tatacgaacataatcgcctcaatcatttccaaatatgcatgtgaattaataagcatcaacaataatcaagccaatgctattgtgcaagcaatcaatggggcaaaacacaccaaatgattatgatgatggatggctcaaattctcacacaggtaaactcatcattttcaaattgagatttcaaaactatcatgacatgtataggagaatcaaggatttcaagtcacaaaatgtcaagaacttttattttcaaaacaattacccatttcttgaacatatcctataattcatagaaaaacatgcaaagtcgtacatgcacacaaattgacccaacaatattaactaaaaa

SEQ ID NO: 80443 - DNA, 457 bp, Glycine max
  unsure (1)..(457): unsure at all n locations
agctntanatagactctaaattcgcgacgttgttcttatcaccaccctcgtgcttagcgcgagtaagtggattctggcttagcgccagtcgtgcgttgagcctggctgaagacacctgttgcgcttagtgcactaatctcgtgcttagtgcatgaccttgatgctaatgccctaccagattcttctatcgcgctaagcacactgaagctgcgcttagcggtggatgcatagttagcccactgatgagctaagctcaactgtcactttgtgcacttcatgacttagcctctntttcacctaaaattgcacatatttcatcattaaatccaatggacatattctagagacaactttatccataanacanaatttatttacaaaaatcactatcaataaccatacatggcgaaactatacacngttttggaaaatgatatctatacaaacgttagtcgta

SEQ ID NO: 80444 - DNA, 383 bp, Glycine max
ctccctctccatttctgatttcatgcttatataggtggccttgttggtgcttgagcgcttagcgcaagtctggctcgcttagcgcgcataagtaaattttggcttggcgctcgtcttctcgcttagcggatgcatgcaagcagtgcgcttagcgggataagccctcacttagcatgtgtgtccagctcatccttcttctagattcttcctcgcgcttagcctcaagagtggtgcggtcagcgtatggctcgctaagccgacaatttggcttatcgagcagatcaaaatcaacacttcacaaacttgcctaattaatctaaaatggaaaggaaatgattatcatatacaccaaatgggagtactaagtatttattacctatatt

SEQ ID NO: 80445 - DNA, 359 bp, Glycine max
  unsure (1)..(359): unsure at all n locations
accattgntcngnggcatgcaactttcgtttgaccactttgaggtacttggcacccatcgttaggcaattcgtgaagttccgagacatgtcggaaatcaaaaggaagcattgttacgcaatccgtgaaattccataacatgccggaaatcaaaaagaagtattgttatgcaatccatgagtttccgtaacattccgaaagctaaaaaaggagtaattacatggctcataaggttctgtaaccttacggaaagaaaacaagtgttgttacgaaattcgtaatgtttcgtaacgttacgaaaaacaatcaccacaaaaaggcaaggtggtgtacttattaaaaatgggggtgcaaatagta

SEQ ID NO: 80446 - DNA, 362 bp, Glycine max
ggattgaaatcaatgtattcaatgtgttgtaaaatgcaagttaaggtcttgcttttaaagacttttcatgtctggtcaagaaaaccattagaagagttacatcttttgatttttattcaaaacttatcactggtaatcgattaccaaatcattgtaattgattacacaaagcatttttgtgaaaggatgtgactcttcacatttgaatatgaatttcaacgttcaaacacactggtaatcgattaccaaatcattgtaatggactacaccattatgagatctaatggaacattggtaattcagttgaaagctatttgaaaacaatctttgctattggtaatcgaatacaataaactggtaat

SEQ ID NO: 80447 - DNA, 347 bp, Glycine max
  unsure (1)..(347): unsure at all n locations
gcttctanactntatacaagaatgaagctcttataccacttgttagacaagtggccttagatatcttaagaagggggggggtcgaattaatatattccaaactacttccccaagtaaaaatctattncactttttattcaagttataaagtccctaaacaatgaacttcttaaatattgattcaaataaaacaatttgaatatgaatatcaagcaataataaataaaggaagttaagggaagagaaagtgcaaactcagaattatactggttcggccacacccttgtgcttacgtccagttcccaagcaactcgcttgagagttncactatcttgtaaatttctttt

SEQ ID NO: 80448 - DNA, 434 bp, Glycine max
  unsure (1)..(434): unsure at all n locations
atgaaggtagtcatacctcacaaaatatatgtatgtgtgtttaagttcgaaaatacctcatatatgcatgtatgtaatataggtagcaacaaaatacctcacaaaagattattagggagagggattactggctcactgctaatattctttcaccactaactcttgtgtacaaaaggtttcaaaatgttatatttcacccaatttatggttctttttgcgacgaatgcaaatatttctcgtctaatttttataattgctcaatagaagctatctgttggatttcccctgtagttacttttnggtccactctttctttgtcaaatatgtccaaggaaatctggttgcccgaagtacatccgagcggaattattaaaatttaaatggatgatccaaattcgacccaggaactagctagactggttaaatcataataa

SEQ ID NO: 80449 - DNA, 276 bp, Glycine max
aaggatcagggcgttatgcacttctctccctctggaaatagctgaggaaaattatttccgtgaagaaaatacaaaccgaggcgcttgcttaacgttttcgtgagtaattacaccaagattctcgaccattctttaagactcatcgatcgtgcttcattttcttcagtcttcaacgggtgagaaactcctaccgagcttttctattcattctatgtacctctggggggccacattttggtgctgtatatttattctcgttacaattactttttatac

SEQ ID NO: 80450 - DNA, 376 bp, Glycine max
  unsure (1)..(376): unsure at all n locations
acatctcatactacgttttacttattataacctctatttaccactgcatccggatttaggcttccaattctcaaagccatactctttttacgctcatgacgccacattctcactgtctaatcctaagtgaacgctaccctttatctctgacagttttccataagcattntcagcacacaaacatcacaagcatcatcgttaaaaccctaaaacagaatgggcaagcgtgacatacaccaagcatggcgggttcaacatgcnttcaacaaaattgctgcacaggttactttctccaagcctttgccaagttaaactacccatcatattttccaaagctccatccctcgagaattacgtgaggagaagtttacccaac

SEQ ID NO: 80451 - DNA, 433 bp, Glycine max
  unsure (1)..(433): unsure at all n locations
atccttaagacagctgggctgcagctgtctancgttatgcgagaccgtgttctatatgctagctatcatcgccaagtgcgaagaagagttatgtctagccgcggcccacgagcatatgattgcgggcgaatatgcccaagtatacgcggaaaaagaggctagaggaagggtgatcgactctttacaccaagaggcaaccatgtggatggatcggtttgctcttaccttgaacgggagtcaagaacttccccgattgtttgcctaggccaaggcgatggcagacacctactccgcccccgaagagattcatgggcttctcggctattgtcagcatatgataaactcaatggcccacatgattagaaatcgctaggaaacatgggtggtctctcataccttgactagatacgacttccttcttgaaataaaatga

SEQ ID NO: 80452 - DNA, 298 bp, Glycine max
  unsure (1)..(298): unsure at all n locations
attgtgagttgantntagccttagtttcactttggttattattcaattcattcaaggaaacttccaaagaaaaacgttcgatcgatttttttaattatcttatttaaagatattctgattattttattattattttgctttttttggtttaaccaaggttacagcgtgaacgattggttagattttgttttaacaatgattaaacgagattacaacacaaatgaccggttgaaattcattttatgatttattaggtgaaaaaatgacttaaacgatcggttaaagcttgttaaaaacg

SEQ ID NO: 80453 - DNA, 387 bp, Glycine max
  unsure (1)..(387): unsure at all n locations
aatgcattagcatacaagctcagtatctttctatgacactaagcgaagaacttcaagaaatgagtgattctatgtccttgcattccatggtaagtgtgacctagtccaccatgagcatgataacctaagctcaacaccatccactaagcactgagactagactttcatagagggattgccaattactgcacattcatgctaaggggggcgtacaccagtattaagcatgagagctngagaagagaagtntgtaaccctatcgcaacaacactaagtatcacttggatggttctagaatacaagttcatacctaagtctgggaatgcctatgtctagcgtgacaaatgttggaattgtttacttattgaagttaagcgcactttatga

SEQ ID NO: 80454 - DNA, 402 bp, Glycine max
tgtgcagatgaaaggaacatattatttggagctagtgtatttcttctacatgtgtgcatgcaccaatttataatgtatatatttttctacaattaatggagtacaaattgaaaaaaatattatggaactcaacaaacaaagaggggggatgaattggtttcaaaccaaaaaagcactgtttaaaaaatatagtttacagaaaaaactttcttatgcatatcgcatcacaaaacaaatatgaatcaaacgcaatcaatacttaatcaatccttccttacacatgatccttcattaacttcctttctttcaaataaaaaaacattgatctttttaaaccttgattaaaacttgaatgagttgatttaaccttatatgagagaaatatttaaccttaatgaaaaa

SEQ ID NO: 80455 - DNA, 382 bp, Glycine max
  unsure (1)..(382): unsure at all n locations
agcttgtcaagtcctccagcctggacatgtttgntttggctgcttctgtcaagttggccaaggtggacatgcttctggttttgcatgtgaggtctaacatgtcaggtgagggaagcctgtatatttggcaactctgtccttntctaacacgtggagaatgcattgaagacaaactttatgttttgtctgttaatgcagttgcgtgtagtgcacacgtagtactcttgcacacgtgtcactcgtggagtgggcacgtactanatacgtgttgcgtgggatatgaagntgttttgtggtctcctcttgccagagaccaccgtcacttcaaatttctatcttctttctctcgaagtataagttttccctcacctacacagcaagt

SEQ ID NO: 80456 - DNA, 421 bp, Glycine max
ctttcttagtgtctcttgtcttttgggtactgtaatatggttgttttacacttcctttgaaaaccccttgaaaatgagacgttgtaaaagttatctttttataaaattgatgttattttcaagaccttcactgaacctcggtcacattggcgtgatcgtgatttcaaaatgaagtctccttttagtagaatccgaaacaccccttagccctttatggtttgacaggggtaattgaccctaaatgttgttattaaccttgtttttgaaatctatactaaatttccttcaatttggtatatagaaccttgtggttggattgacaaacgtgaatgagaggtcttcgagcgacgcacagaggaattgacggagaactcacgataggtgaggggagttcattataatttacggcttttgataccat

SEQ ID NO: 80457 - DNA, 129 bp, Glycine max
taaaaaggcgcgctgcatcttaattgctgagatatccgtttttttttctataatataaccgccgtgggggacaagctaatgttgatggcgttgcgtccatgctcaatggtgtaccacaatgctaagtta

SEQ ID NO: 80458 - DNA, 381 bp, Glycine max
gatcttaagtcgcctgaggctgcagcttgttcaattaataatgtgtttcttttttagattaatgaacacatctgccattggtcgcttagtcgcacctccatggtgatttctttgagtactttgtcttcacaaaatgacaatgtatctctatgtgtggagtccgctcatggaagacagataagcttcatgccttgggtgtctccaaatttgagttgctggagaagttgttgaagccatgttattttacttgcagctgctgccatggcaccgtatttaacttcagcattggatctagcaagtgtgttctgcttcttgcttctccatgaaatcaagtttcctccaataataacacaatagtccaaggtagatcttttgtctgat

SEQ ID NO: 80459 - DNA, 353 bp, Glycine max
ggcccactgaaacatttatgctttacaatttgctgtcattgatactatcaaatcgcgaatctcttattcaattgtcacagcagataggatatctggctaatttgcgtcaccttgacctcagtggcactaatttgccatagatgccagcacacatctgcagactacaagatcttcgtactttgacagtttatattgttggaagacaagatggactcagtgtggagattaaggaattttcatatctgcatgggcggcttcacttttgaacttgccaatgtggttatactgtgggtgcactttgccggtgtaagaacaatgaagattgagagctatcttgaatgggcggtggactc

SEQ ID NO: 80460 - DNA, 381 bp, Glycine max
ctaagcttctagacattttttacagtctggccgttgggattttgttaataataacttttggtctcttgctaagcaagaatggagcgctaagtgcaattccaaccaaagagggaatcgcgttgagcgcccagaggtgcgctaagccagacttcaacagagagggaattgcgcttatcgactagaggtgcgctaagcgagccctattgcagagggggctgcactaagcctaaatttttatgctaagcgcaagaagaggacttcggcttaacgcgacaggctcgctaagcgaaatctgcaacttataaatgcgttctcagtgcgaaaaacatgatttttcactcttttcttctccaaaacaccacccaaaccctatatccttat

SEQ ID NO: 80461 - DNA, 465 bp, Glycine max
  unsure (1)..(465): unsure at all n locations
agcttactgagatttactgcaacattcttcttatattctctcttgtcttcagggtaatctactgcctcaattagagtttctcccttgtctatcaaattaggacttgtagggacatacccatataaggcctcaaaaggtgtcatttgggtggttgtatgaaacttggtattataccatagttctgccattgctaaatgatatgtccattatttgggcatatttccagtagcacatctcacataagcttctagggatgtattgagattcccaatctatccattagtttgtgtatggaaggttgtggatcttaacaatttaacaccatgtgactgcattaaacctgtccagaaagtgcttaaaaaattgtatctntgtctgaaatgatttcctctggccatacatgcaacctcacaactgtgttcatgaataattctgctacttttgctgcactgaatggatgtccta

SEQ ID NO: 80462 - DNA, 350 bp, Glycine max
  unsure (1)..(350): unsure at all n locations
tagcttagtcgtttttctctatgttatcttccctttctttttcctaacatttatttcgcctaatttttactcaccctattctacttagtcttacagagggacatgacagagtgacaagattgaagccgactgttcacaagtttgtggcaccgaggacccataattcgggatggatgtctctgtttcatgctgttccattttatgttaagaatagagttggaaatgttttcttctgtaaataaataaataaagaaggagaagctttgctaaaatatttgctacacccttttacataaattatacattntgttattttcttattaataaattaattttattttcaaaaaatt

SEQ ID NO: 80463 - DNA, 405 bp, Glycine max
  unsure (1)..(405): unsure at all n locations
attatccggntgctcacaccatgatacatttccgacagggaaaggatggtattatcaagaatatcccggctgggtcaattatcgggtcgatggaacaggtgggctttgtagagcgagaccttcccgagccatgcatacttttgaccccgttgttaatatacacagacatgaagttgaagaaaaagaagagaaggaattctacttattataccctacaatgtggagtgaaggggtgtccccaacattatcaattccgaatgagttgtgttggttagatctctcttactgtggatcccttacaagcctttcatttgagtttgacctttctaagttgaaattcctcaagaaacttcttctcgatggttgcttagagttcanaatattcccagaaaatgaggacacaat

SEQ ID NO: 80464 - DNA, 299 bp, Glycine max
tttgaagtaacactatttatgtctgtgtgatacaaacacgttacacatagaatttaatataaaattattgatccaaatacaagttacttaaagctctttaaacttaaaatcaattgtgcgcacaactatttgtaaaatcttcttagatatgaaattatgtgcaaaaatttatctttatctaaaacaaactttagactgttgtccaacttacatcaaacatgtgttgttccgccgttttgtaatgtcatgtataattaactatagagcaaaagaagtgtagcatttgaactaatatatat

SEQ ID NO: 80465 - DNA, 388 bp, Glycine max
  unsure (1)..(388): unsure at all n locations
gctataatatatngatacgctcgaattaaacctcggaagctctccagaaattcaaatggtcataactattcacacggatgttcgattatggcgaatcacatatcgagacgctaaaaattgaacagcggaagctctcgagaaattcaaatggtcataacttttaacactgagatccgattcaggattataatatatacagacgctcgaaattgaacattggaaggtctcgagaaattcaattggttatcacttttcacacggatgtccgattcgggcgtataatatgtcgacacgctcgaaattgaacaacggaagctctcgagatattcaaatggtcataacttttcacacggatctccaattcaggtgcatcgcatatcgagactct

SEQ ID NO: 80466 - DNA, 392 bp, Glycine max
  unsure (1)..(392): unsure at all n locations
ggtagaagtatggggtacccatcacatgtggtactaggtggcggtcgggcgatggtgcacaacaagttttccacatccacaatgcgcgcataaacccaccatcccctggtgcccacctncaactgagctcacgtactcccacgtagcccatatgctcgtttgtctcaacaccgggtccccatcaatcctcccaagcttccacaacatccaagcaaaacaacattcacacagcacaagctatcacagccaagcaaaacaaagcaaaggcagaaaactctgccaaaacaccaaccaaaaatcacagcttttcccactcaaagaccccagtaacaattccttcgatccaatatgttaaccgttggatcgactctcaaaattttctggaagtctat

SEQ ID NO: 80467 - DNA, 442 bp, Glycine max
agcttaaccatcaagcgaaatcaacaacaaaattatttgacagaagctcaaatcattattaatccatgaaactatcaaagcttaaccaccaagcaaagactatacctcaaagtttaaccacttggcagaagcaacgatgcttaatcatcaagagcagaagcaaaataacaattcaatttttaaccatccatgaccaaagcttaaataatacttaatcaccatgcacagaagcttacatcaataaaatagaagaatcacaaaatctgtcttctatgaggacttttcacaaatactttgtgaaccaacaataactaaggcttaaccactcatgacttaagctaacaaataaacaatgcttaaccaccacacatggcagagactaaaatcatcatacaagccaaacaataagctaaaatcttcagaagcatttaataaacacctt

SEQ ID NO: 80468 - DNA, 461 bp, Glycine max
  unsure (1)..(461): unsure at all n locations
cgcatcaatgatctatgacatngaagcaatcgcacgatatttactattaactacacgaaacgagatttggagagagagagcgatgcagtgaaatagaaaacgaacctgagattgaattggccgcaccagttcagtcttcgatcgccgatgggatgtacagtgttttcctccgaggactaactgcaaagtgtgaagaacgaaattcttcaaacgcaccgtttgatcgaagatgccagcgtattagaattattatacaggttaaggttatgcaccacacatatacaaaacatacctataaaaaattctggtttaggaattacgagatgaaaataaaatctacatagtctttattattaattaaaatttattaaatacagaagaaagatttttaagtttaacttcttaattaatactacttcatttcaaattatacacgtattaataaatgtgattaattgatt

SEQ ID NO: 80469 - DNA, 323 bp, Glycine max
  unsure (1)..(323): unsure at all n locations
ccaaantgataaaatctccaccaaaatgcatagagtggatttagaattttttttatctctatctattacatttaggaaagaaaataccatatgctcctcgtcaaggagttacttacaacctacattatcttaagatccatctgatttgacttaacctattcagtacagaattcatattntattaatacaaaatacttatcagacagtaggctagcttatttagaaataatataatttataattgacatattattaataaatatataataaggctaattatactaagtctctggtaaattaataaattctattgagtcactaat

SEQ ID NO: 80470 - DNA, 438 bp, Glycine max
tcttgtgtagcaactatttatggttaaaatatctatcgcttgcatgatattcttgatttattttatgttcacaaagacaaaaatggattgtgctcttagaatgagtttatggattaatcaatctagaaaaaactggcttctaggattggcttaattttataaggattatattaactctatttctagttgagatcttaatatactacctcctttcttatgtataagattatatttactcaattgtttgtcctttctttttataagatttttttctaaaagtctgatgcattaattattcttatctataatatccttaattaattgacaaatcgattgagaaaaatgcttccacagctgaagagttgattcagtcccacatggaaaaatctcttttgtgaagtcctgagctctactatagtttctaaattttagcttgag

SEQ ID NO: 80471 - DNA, 429 bp, Glycine max
  unsure (1)..(429): unsure at all n locations
attgaacaacggaagctcttttataactcnatggtcataacttgtcacacggaagtccgattcaggcgcataatatattgagatgctcgaaattgaacaacagatgctctcgagaaattcaaatggtcataacttgtcacacggaagtccgattcaggtgcataacatatcgagacgctcgaaattgaacaaccaaagctctcgagaaattcaaatggtcataacttatcacacggacatccgattcaggcgcataatatatcgagacgctcgaaattgaacagcgcatggtgtcgagaaattcaaatggtcataatttgtcacacggaagtccgattcaggcgcataatatatcgagaagcttgaaattgaacaacagaagctcttgagaaactcagatggtcataacttgtcacacagaagtccgat

SEQ ID NO: 80472 - DNA, 364 bp, Glycine max
  unsure (1)..(364): unsure at all n locations
tgagnatgaacaacagaagctgtcgagaaattcatatggttataacatatgacacagaagtccgattaaggcgcataatatatcgagacgctcgaaattgaacaacgaaagctctccagaaattcaagaggtcataacttttcacacagaagttcgatccaggtgcataatatatcgagaacgcttgaattgaacaacggacgctctcgagaaattccaatggtcataacttatcacacggaagtccgattcagacgcctaatatattgagaacgcccgaatttaaccaccgaagctgtcgaaaaattcaatggtcataacttatcacacggaggtccgattttggcgcataatatatcgagaa

SEQ ID NO: 80473 - DNA, 431 bp, Glycine max
  unsure (1)..(431): unsure at all n locations
gcttgaacaatatacttgtccttcatttatctgtgnttgggctnggcggccacgctcaacaaagttctttcgacaactactgtacgttgatttgaccaatgctgttatgggaatgttacgacaatcgttcaaaaccttattgatacattctgagaggttggttgtcatgtggccatatcaacgtccttctctattataagccatcgtccatttttcctttgaaatgcgatcaacccatgttgctatggctggactcagttgacgaattttttctatattttgataaaaaaatgtgcgtgcaaggagtgtaggctgcataaaattagttatgaataacaattttaagtatatatgaaagttaaataaacgtgaccatcaaatatgaaatcttacccaatttcttcaacatttctttttgtttggcattattg

SEQ ID NO: 80474 - DNA, 460 bp, Glycine max
  unsure (1)..(460): unsure at all n locations
tagccctaaagtatgagctcgcccaggcgacctgtttgtttatccatgaagctatttcacggcccaggcgagccagatgctatcctgngcgagctggggtctaggaaaatataaaaagacccttttgcccccttccttggtatctttttgtattcttgattgaaacactgagtgattccttgcttcatgctgtaactagtgtcaaacaccgtaattcaactagcaagaattaaaatatcagcgaacgatagtcccagatgaaatgagggtctgacaaacatattcaacattctctctttttgagttgcatatcacacacttgcattgcaactaggcccaaagtttgtcccaacatctcaaattatcataaatttatcttcgtctatatatttaaattnnttaaactatctatctatntcaatcttttatctctatctttaaaataaaatttcatatattt

SEQ ID NO: 80475 - DNA, 402 bp, Glycine max
atgggaggaatctcagcaggtaaagatcattagcaacatcaatagtagcttactcttcgctggatgcttagttctttgagcgcctctcttctctcgcttgttggtgcaaggttgtgtaagaggaagagaagctcgtgtagggttcaccttcttcacatgaggtgtatgggtctcaactaaagtgggtgcagctttacattttctaaacaccaagccatctttatcattatcagtcttattaagctctcttaagcgctctatagtggatgatgggtggtgcttcttaggtgatacccttcttgatacatgggccatcgcatctattgccttgggagaaactcgagttggaggtggacattgcggtgtaggagcaaccttggacaaaggtgtgccctatatttt

SEQ ID NO: 80476 - DNA, 416 bp, Glycine max
ttgagccaaaatcctgactcaccacaaaccttgacctagtgtgagaatgccaatccttaccctcggaagcaaaaaaaagaagagaaggaaaatttccaatcaaaggaataaggagaaggaaaatttccaatcaaagaggaagcacaaaaggagagaaggaatatttccaatcaaaggaaaaaagagaggaaaggaaattcccaatcaaagagtgggagaaagcaaaaagaaaagaaagaaaattcccaatcaaagaatgggagaaagaaaaaagagaagtaaaaaagaagaaagttcctgatcaaagaaactagaagaaatgtgcagaaagatcttttgaccagatgatatctgaacaatacagaattgtcaccaaatgaacaaaagaaagaaaaggaaaccatgacctaaaagtg

SEQ ID NO: 80477 - DNA, 452 bp, Glycine max
  unsure (1)..(452): unsure at all n locations
gtgattcanataagatcaaccctctggtatgcatctttcttattacactagcatgtgcttttgttctgtataaattcattgatcacaatcaccaagagatttcanatttttaactctacatcagggagtgatacatgtactttgaagtttgaactcgcaattccttctgtaatattacttcttatttgttatgcacagtaaaaaaagttttaaatgtccttcatttaagacaaaatagcttttatctagaattaaccatttgtgctatctttaccatatagctgctaaaacttctgcagttgatagtatctgaaaaatattttccaatatatttagtttccctagcttatttttattttggtggaaattggcaatcttttaataagggtcagaaccaatcaagatagaactagtatcttaaatgttcaaataatacttatatatgtctaaaa

SEQ ID NO: 80478 - DNA, 461 bp, Glycine max
  unsure (1)..(461): unsure at all n locations
tgtacatacactacaagaatggtgttattggtntatttttttaatatattagtcttagatgggtcatttattaaatctttagtattgtctacgctgtatttataatacaaactgggaaaggctttgattatgtagctgcaagttctcatactcatcaactttggctaaagcattaaactatatatatgttcaattggtagggggaagggtgcagtaaagaaaagagttggggctcttcaagagttaaggcgtttgctgtcaagatctgaatttcctcctgttgagtctgctattaatgctggagctgtacccttgcttatgcagtgcctttcatttggttccccagaagaacaggtctgaaagttcatcttcctttgaatgatgttcaatgacttctatgaatatttgtgctctcaaaacgctcgagcaacacatctctgtgcatgctatgcaagataata

SEQ ID NO: 80479 - DNA, 217 bp, Glycine max
  unsure (1)..(217): unsure at all n locations
agctactgatccgaagttccgatgtctttatatatcactggccacagncagacatccgagtgaaatgttattgtctggatatactacgggacgccaatggacatgcaagcacaatatgattgtcgttcgacacttcttcgagcaattattctgggttgtgagcatcgtgatctacatccggacactatctgtcatacgagttcaaagcttttgtctt

SEQ ID NO: 80480 - DNA, 435 bp, Glycine max
cgtgaactataaaactaagctttaagcagattctgtaatgacccactaacctatatttaaaataacttaatgccattaacctacggaattaaaacaaactaaatggctgagtgtaactgaaattgttggcaaccaaatgtcacccccaacagccaacaagtcatccaccatttggtctcccaaaaggctgatgcctaggttgccaattgggcccttattacaacttgaactaaagcccttttagttgattaacccaaaacatattttgggtcagccaactttacaaggattgggccattatttacacaaactaaacactctaaaattgaaataaagtggtgtcatttagtcctccatttgggccatgatacaactcacaaacttggacttttctccttgaaacttgggcttgtattcaaatagtatggacagcac

SEQ ID NO: 80481 - DNA, 366 bp, Glycine max
  unsure (1)..(366): unsure at all n locations
agcttgcttccatatatacaaaaccaacatattattaaatattntcactctctgggctaaatatgatataaccatggatggattgagatagaatcatgtttagcatgatgatgtattcttgtatacatgggtatctctgatatatatatatatatatatatatagtactcccattgcttcaacttcttaatcgaacatcaaggcaaagagtcctccactcagttctggacgtaacaacattcccatgcatatctctaatgcccattcaatccaaaacttatcaagttcaaatcattgaaaaatgaagcatcgttattaattattgcatcacagtgtgcccagaaccacaatatatatataaataaa

SEQ ID NO: 80482 - DNA, 451 bp, Glycine max
ctagttcgctgagatattgccaaacaattgtttctttatcgtttgcgataacataaaggtcatcacttttcaacctttttttttctaaatcaatgactcaattaatcaaaacatgcattccactcatgccgatcttgtatgataaaacatagatagcttcagctgttgcgagatacatatgtaataatattaagctcagacggtttcacaggtacataacattgctagagagctctattcaactatgttcggcaaaagaataataaaatacaatactcttttctcttcggaattttttgttcaaatccaattttaacatcttacatgtacaattcgaaggaacaaaaatatgtaaatctgtttagaaacatcgcatatgataaatttcacttaaaactcgttaattatatcgaacacattcgatataccactcgctgcctgctggtggctg

SEQ ID NO: 80483 - DNA, 464 bp, Glycine max
  unsure (1)..(464): unsure at all n locations
gcagcttatatttaagaattcacaattttcttgtcattatcacattcaatccatagatcatgtttacttgcctccaagttttcataatcatgatgagcttgtgaacactctcttcgtagatcatgtctttgttcatataggtgatcatgaagttcattgagttgtttctgctcaacttgtaagtcttccaatgggttttcttgcttctgaagacttttctttaagatcttcaaaggcatcacactcttgagtggaaaattctaaagaactgtctaccttttcttcatgtttcctttgaagntgtttatgatcttttgagaggtttttgaaatcttttcttanaatttgataggctttggacaacatggatgaatttgaaaaaagttcatgatatgttgatcgaagagtttcaaggttatttatatttaccttttcatttgattatgattatgattcttctaatg

SEQ ID NO: 80484 - DNA, 412 bp, Glycine max
gtgacacttaaatctaagcttggaaatgatttcttacaaaagttagtcgtatgaagcgactatacaggtagcatgtgatgaaccttgagagggtgaaaatgtgtgggacaagggcactattccttaaaccaatggaatcattagatagtccaccttcatgttacttatattgaccatttcctattaccctcttatataactttttttattttcatcccttacccttaggatgtagagacttaacttgattttcaccatttaattatatattttttacacaaaacttgccagtaaatttttggtttaaagggtgtatccagcagtatatttatacttctatttatgttttaatataccttcttattaaaaatttaactccaacaactttcacgatatcttttttttttattac

SEQ ID NO: 80485 - DNA, 445 bp, Glycine max
  unsure (1)..(445): unsure at all n locations
atatattattcttttatttatgattagatagaaatntgtgatttagtccttattactcattatcagattaatacaatgtaatcaatactgatcctatttgctcattataaatagaggcttagtgtggtcatccaagacacacaacattacaacagttaaaccactgttataataaggaaacatggtaacctatcctaagagataatgaggaaataaggaaagcaattctaaaggataaaggataatccaaaagtcaaaaatatggttaagacaatattggatattcctgacattctaacaaactgattaaaaaaaattgctattatgttttgcacttcaagtggtaacagaattagcaaccaactacaacaaaaggctgtcatttaactaaatattaacagaggtaaagaaagttctaaatgtggcgtcactgcatcacagatgc

SEQ ID NO: 80486 - DNA, 459 bp, Glycine max
tcgagaattgcccaaactccctctccatttctgatttcaggctttaatatgtggcctcgttggtgcttgcacgcttagcgcaactctagctcgcttagcgtgcattagtgaatttcggcttagcgcgcgtcttctcgctcatcggaatgactcaagcggtgcgctcagcgggatgacacctcgctcagcgaacatgcacagctcatccttcttccagattcttcctcgcgctcagccaaaggagtgttgctctcagcggatggctcgctgagtccatagattggcttatcaagcagatcaaaatcatcacttcacaaacttgcctaattaacctgaagatgataggaaatgattattaaataacaaaaatgggagttctaattattgattactcatctttaacaaaaggtgttacaccacttcaaaataccattaattggaggatttgatataattaca

SEQ ID NO: 80487 - DNA, 412 bp, Glycine max
agcttgtatgattatggggtacccatcacatgttgtactttgtggcggtcgagcgatggtgcacaacaagtgttccacatccacaaagcgcgcataaacccaccatcctctgttgcccacctccaactgagctcacgtactcccacgtagcccataaccttgtttctctcaacaccgggtccccatcaatcctcccaagcttccccaacatcaaagtgaatcaacattcaaacagcacaaattaccacagccaagaaaacagggcaaaggcagaaaactctgcccaaaacaccaaccaaaatcacagctgttctcacttaaagaccccagtaacaagtcgctcgatccaattcgttaaccgtaggatcgactccaaaatttcactggaagtttatagtacataagcctacat

SEQ ID NO: 80488 - DNA, 383 bp, Glycine max
  unsure (1)..(383): unsure at all n locations
tctaagaggcttctntgagaagctagatccttatctatccacacccctctattaactaaattaacttccttaaaaataattacagatgaaaataacgcaacatataatcaaacatcaaacataattactaataatatatagatatatatatcagggtgttacaccgtgtggtgttagctggaatatggatgccaaagtggcaagcgcatccgccatctgaatttcctctcggggaacatgatggaaggagatctcatcaaaggaaccagccaactccttgatatatgcttggtagggtatcaacttggggtctctagtttaccattcccctctcagttggtggatcaccaatgctaaagtcccgtacaccttgagtaacttga

SEQ ID NO: 80489 - DNA, 379 bp, Glycine max
  unsure (1)..(379): unsure at all n locations
gcttgatcgccgcacatgtggttgcttgcgcctgtgtcgaggtaccacttgtttcttttcccttgaaatttgttntggcacgcgagtagcaaagtttcttcttctccgcctttttcttctacaaagttagctttctcttcaaccttcttcgagaatctacactcggatgcgtagtgaccaatcttgttgcaattgaagcacttgatttgtgatttgtcatacctcgaccatgaatttcctcttccacgacctcttgttacttgtggattccaacttctttctccattgttgaatttgttggagtggttgttggaaccacctcttccttctcctccatgtcctcgtccacgtccacgatcttggccgcgacctcgtcctc

SEQ ID NO: 80490 - DNA, 408 bp, Glycine max
  unsure (1)..(408): unsure at all n locations
tatgaggggaaggagtaaaaaggaaaacacaaaataaagctatttcttttcgntggcacataaagcataccccactgaccacaacaaataacatacctttcttgtaaaaacataggtttctcctaatttattagataaatcgtgatttattatntgagggagggttgaataaagttaaacatacttagaatttgaagtacaatatcacttaagttcaaggaatatataaatgcaacttaaaaatttacactaatcatttgctccaatatgagccttctatatatttaagttttgtatttacaaaccaatcgtgtctttagggaacatatagagtatgcctaaacattaaaaacatttaagcaatttacaatgattgccattttttcaaacatgtgccctagcaacccc

SEQ ID NO: 80491 - DNA, 398 bp, Glycine max
gcttgtgatacacttcctactcctgggcgttatgtcttctgatctcctaggtcctcagggacctacactgaacgtactacgtcaaatctccaacttaggacatttcctctggcatcaaacctcactggggtcactttgaattcttgagcattgtgagacacttccataccgaaataaaaacttatgtcattaaaccacgtttgttatcgacaaaacataaatcctcaaagatgtagaagtctccttcatgatcgatagtgatgggcatgacatctggtctatctactggcattgtgtgtaccagagagtcacacgtgtaaactgacatgtgttgctcccaacatggccacaatctttctgtctcgctactatgccaagctcgcaaggagcgtagctcc

SEQ ID NO: 80492 - DNA, 313 bp, Glycine max
  unsure (1)..(313): unsure at all n locations
caaactaagctaatagtcctcttggatgaacagcctccgccgtggatagatattcatgangctttctgctcagctctatgaaatgtatggacactgatataccaaaggtcatgggagaagattgattcctgattaatatagatgaatcttctgcgactatgttagggttgcttatgaggaaacattatcttaaaacttgattgaagattgggaaacatctatgtattgcataaaatcctaagaagatctcatgcttatgcttgttaaaaccctcctcaaattctataagattattgaagatgtaccaaggact

SEQ ID NO: 80493 - DNA, 173 bp, Glycine max
ttctctttctttctgctcttcaatccatgatcaattcattttgttgaagttactattcgctcttaagtgtcaatttatgcaacgattttgtgtttgtgatattctgctgccgtggataccttcttggttatgggttgtgctttgagtttctatatcaacatggggtcttaaaa

SEQ ID NO: 80494 - DNA, 207 bp, Glycine max
  unsure (1)..(207): unsure at all n locations
ntctaacgttttctggttctccaaaccttgaaaacttaactgtgttattcatctattacattccctactccctttgccaaaaagaattctccaaggactaaccgcctgtaattcttttgtgtctctcttctcccttttccaaaagaacaaaggactaaccgcttgaattcttttgtgtcttcattcacaaagtttcaaatgactaac

SEQ ID NO: 80495 - DNA, 468 bp, Glycine max
  unsure (1)..(468): unsure at all n locations
gcttgcttgtggagcttctatggaggctgtatctttgagcttcaatggggtcctttaatggtgattctccaccatggagatgcagcggaagacaaaggaaaggaggtgagaggaggcgccatccattaaggaataagccatggaagaaggagcttcaccaccaagatgagccttggataagaagcttggagaggatgcttcaatggaggaaaagaaagagggagagaaagagggagggggagcacgaaattgaaggaagagaaagggagagaagttgaactttgagttgtgtctcacaagactctcattcatcacagttacaacaagtgttacacatgcttctatttatagactangtagcttccttgagaagctttcttgagaaaacttccttgagaagcttctttgagaaaactctcttgagaagctagagcttagctacacacacccctctcataactaagctca

SEQ ID NO: 80496 - DNA, 446 bp, Glycine max
gcctacggaccttaaaactaagctatgctcaacatctacacagacctctaacttatcttaaatagccacaacagaatattatgacctctccagcaacacgtacaattccgagtggagaatcatcccaaccttagatggtcgaatccttcacaacaactgctgcgacaacaacaaccttattttcaaatgctgctggcccaagcataccatactgttctccatcaattcagcaacaacaacagtatcagtctcaaaaacagcaaacagtttaggctccttctcaaccttctctagaagaactttggaggcatattactatgctaaacatgcagttcttacaagagaccatagcctgcattcagagcttacctatcagattggccattggctattcagttaaataacaatcattccaaagtttgcatgattacctttaatctatttat

SEQ ID NO: 80497 - DNA, 387 bp, Glycine max
  unsure (1)..(387): unsure at all n locations
ggatcctatnagancagctgcnggctgccagcttctctaggaagttntcttaagaaagcttctctatgaagctacctagtctataaatagaagcatgtgtaacacttgctgtaactttgatgaatgagagtcttgtaagacacaactcacagttcaacttctctccctttttctttcttcaatttcgggctcccccctctctctttctctccctctttcttttcctccattgaagcatcctctccaagcttcttatccaaggctcatcttggtggtgaagctccttcttccatggcttattccctagtggatggcgccgactcttacctcttctcctttgtcttccgcctgcatctcatggtggaaaatcaccattcaaggacctca

SEQ ID NO: 80498 - DNA, 416 bp, Glycine max
  unsure (1)..(416): unsure at all n locations
ctgcttgtggtgcttatatggaggctggatcttgatcttattggggtcctttaatggtgattntccaccatggagatgcagcggaagacaaaggataggaggtgagaggaggcgccatccattaaggaataagccatggaagaaggagcttcaccaccaagatgagccttggataagaagcttggagaggatgcttcaatggaggaaaagaaagagggagagaaagagagaggggggagcacgatattgaaggaagaaaaagggagagaagttgaactttgagttgtgtctcacaagactctcattcatcaaagttacaacaagtgttacacatgcttctatttatagactacgtagcttccttgagaagctttcttgataaaactttcttgagaagcattctttagaaaactttc

SEQ ID NO: 80499 - DNA, 323 bp, Glycine max
  unsure (1)..(323): unsure at all n locations
gcttgggagacaattgtgttgattgaagtttttataattgacacacttaatcccactcctatgatattagagaaccccggtaactaaactttttatactgatcttttattatcacagaaaaatgttcttttatccttttattttttaaaatttgggagtttaattccttattttttaattgagatattttgttcttcacatttaaaaaaatataccatgttagtctccttatcttctttaactgtaacatttctgcctctacttttaaaaaaaaacttataattntaatctccttgatcaatttacaacctattgaccgtgat

SEQ ID NO: 80500 - DNA, 361 bp, Glycine max
  unsure (1)..(361): unsure at all n locations
tgttagttgtgtggagcccacctcaacggacttggtagattatgacgcatcattgaagggtatgaacaagttgtaccattccaaactgtaacatctngagcaaagatctttgagtgagaaatctgcattatctgttttaaccctctctgtgagagtgacccactttagtgttgtgctcgtaaatttgtaaagactttagatagagcgagattttctttcctgaatggaatccctctttaaggtgaagactatattctgccaataaacacatagatccctatcattttatgtatgtctaagtgtggctggaaaatctgaaattccattgcgtagcttgttcaactgacgctataattgaact

SEQ ID NO: 80501 - DNA, 415 bp, Glycine max
  unsure (1)..(415): unsure at all n locations
agcttcgaagggaagagagagaccgatcactatcacatagcttggttttaagagaagagttagccatttgctcaaggtccaaaagaaacttgtctcagcgtttatgcgagatagagaccaacatgttagctatcatcaccaagtaccaagaagaactaagtctagccacggcccacgagcatagggtggcggactagtatgcccaagtgtaagcggaaaagaaggctagaggaagggtgatcgactcgttacaccaagaggcaaccatgtggatggaccgatntgctcttaccttgaacgggagtcaagaacttccccgattgctagccaaggccaaagcaatggcagacacctactccgcccccgaggagatccacggacttctcgactattgtcagcatatgatagaattaat

SEQ ID NO: 80502 - DNA, 282 bp, Glycine max
  unsure (1)..(282): unsure at all n locations
tgcgatgacatataatgtacactacctcagttctcaaaggctagaatgcgatctaaggtttcatcaccacacaattccatatcaataaactgagggtccatcatggaacgagatgacaaaagattggagtaccgtctttgctgttcgtccgatgaaaacactccggaagaggacaaagagggtggaattggcgctgaggatgcgctagtggctccagaactatgatctctttaagccgcaactgaggctgtagaaccctttcctntctttgacgagtctacc

SEQ ID NO: 80503 - DNA, 448 bp, Glycine max
  unsure (1)..(448): unsure at all n locations
agctntgacccnctcgattattcccttcttttattctatactctgctcacagatatgttgattaatatttccataaattctcatatggtatcattaccttgctcaaattcgtatgagtattgacaaaatgagggtttgcaaaaaaaaaaaaactaatgcttgctaaataaataaccagagttgttatgagactttttcttttgtcactttgaaatcaaagtgatttcaatttcaaggtaaaaaaaaacaaattttgaaattctgtactaagtgtagaataagaagctttgttctcaaaataacaatgtacagtcaacttaaataaatttctctgatgtttttgcactcgtgggagagtcctaaagcttgatatgaattcaagacattctgatgagcttctattgtgtgactngacatgaatagtgtctctataaatcattatatcatc

SEQ ID NO: 80504 - DNA, 322 bp, Glycine max
  unsure (1)..(322): unsure at all n locations
cgccttgagccaaactcctgactcaccatatacttttttccattgntagaatgtcaatccttacccacggaagcttatcagaaatgaaggttaatttccaatctatgacgaagcaaatagatatgatcgaaaacttccaatctatgagatagccacaagaaaagaatgaaaattccattcgacgaatgggagaaagtatacaacgaactataagagtgaaagacagtcttttgatcaacgatcgaaatgaatcaaaggaaatgttcttaaaggtcttaggacctgacaatattttaacatttcacatttgtaccttttgatc

SEQ ID NO: 80505 - DNA, 399 bp, Glycine max
  unsure (1)..(399): unsure at all n locations
agctntcataagtgaaatcaggtgcagccatttcccttagagtcctttcacgaggtggaggttgagccatattttcagaatattcaaactcagaatgttcaaaatcaaaatgttcaaaattataatgctcaaaatcaagatgttcaaaattaccaaccacagaatgctcagactcaccaataacaaaatgctcaggatgctcaaaaggtacaaaatgttcagggtaatcaagatgcacactatgcctaactaatctatgaaatgccctatctatttcangatcaaagggttgtaagtcacctggattgcctctagtcatgcactatatgcagcagttcatgtgtttctcagacagggcanaagaggtgggttaaaactactgctatactcaaacaatat

SEQ ID NO: 80506 - DNA, 447 bp, Glycine max
ggtctgggttaaactgtttctgttgcttcatttaatgcttacaactgttagaaattcagttatagttagtttattgaactgttatgcagatgtaattatgttatttatttggtagtgaataaaactgagatctaacaggttctatatataaacatgagaacctctctcaaggttatgcatcaattgtaataacatttcgacagacatagctctctctcgatgtacattctcaaaaacctattttctaatattattacatgaaccatctcgagttctattccatttagttaatttcttgtcaattctcacgttgcagctatggtcacacctacaaatgccgattaagatgaatggattgtcattaaaacgtatttttttgatacgaataaaggagtatgtttcctttttgaataaatagtcatgtatgggttcagcaatcattaatgt

SEQ ID NO: 80507 - DNA, 407 bp, Glycine max
  unsure (1)..(407): unsure at all n locations
ggacaagccgacttgtttaactaacaataataataataatatctttattntatcaaatcttatcttatccagattttattctatctagattttattttatccagattttattccatctagattttatttcatccaatcttatcttatcttatcttgtccagattttattttatttcgtttatgggcttggacttaaaatagatttgtgagctttggggttgaggacctatataacaacaccaaggttttagtttaaggatttttttttcggagaggagaataattctaggattttagaattccagtttttattactgttcatgcacactgttcacgtagaataaaattcgttttctgcaatttcatttcggcttccatctacaagttcatttttacttgataatgga

SEQ ID NO: 80508 - DNA, 466 bp, Glycine max
agcttagcacacaaccagcccgcccagtgaggattttgtctcttctcgcgcttagtgcccagccactaactctcgctcagtgagacatgttcactgagcgcaccttcgtaagctgagaagcccaaaagtttttaaaaactgagagaggaggggaaatgaagcgtcaagcagcatgaaaaggaaggaacaaggcaccaaggctgaagagaagacattttcttcacatctttactttaccatttcattcctacatcattttcacccttgtattaagccctctttgctaatagagggctaaacacttcattgttggggagtttttccactgagcactcttgatgtaaaaactctaactggctatttaatattattgctagtgttctctgcttctatctgaggtttttttttcatatttgtggctagccacccatttatatgttttgtaggttctagtattgaaaatact

SEQ ID NO: 80509 - DNA, 424 bp, Glycine max
  unsure (1)..(424): unsure at all n locations
ctcagctagtatcaaaatgatgcttatgattaatatgtgattatgcagaatttacgtttgtaattcgtaacatcctatttttcgtaaaataaataaaaagagttttatttacaaataacctcannnctaacgaaaaaataattgtgtctttgtaatgaaataaatgatgggaaaatggttttattaattaaaataataaattttgaaataaataaaataaatatatgttctagaaaataaagagatattttaatgggccatttatttatttatttaaaatgagttaaataaagttcttttttttatataaaacaataaaataaaaaatagaataaataatagactcagagtaacctagctataaatagaaacatattangtcagtttttacaattacgatatggctctatgttccttctttctt

SEQ ID NO: 80510 - DNA, 465 bp, Glycine max
  unsure (1)..(465): unsure at all n locations
agtcacctgaggcatgcaagcttgtattgtctctcagatcttgactagctatattctttctgaataaaatgagtttatcccattttttactccaaagatcggtgcgaatcaaatcactcccgcatnttatctctagcatgcatatcattttttacctactcctcacatttggtttttttaggaaaaacaccataactaaacgcgccccaaggcatacctatcacactagatccaaatctagaacgatgggtgatcaagaggagacacacgaacagatgaaagccaacatgttggctttgaaagaacaaatggcttccatgaggaaaacgtggccaccgctgccgctgttagttcggctgccgaagcagacccaactctctcagctaccgcgcaccatccntccccatacgcggtatgacgagaaaggagcacactggngcacaacagcaacctccaacacattac

SEQ ID NO: 80511 - DNA, 309 bp, Glycine max
tgtggtactaggtgtgggtcatgcgatggtgcaaaacaattctccacatccacaaatcacatataaacccaccatcctctgttgcccaccttcaactgagctcacgtactcccacgtagcccttatcctcgtttctctcaacactgggtccccatcaatcctcctaagcttccacaacatccatgtaattcaacattcaatcatcacaaactaacacagccaagaaaacagggcaaaggcagaaatctctgcccaaaacacaaaccaataccacagcttttcacattcaaataccccagtaacattctc

SEQ ID NO: 80512 - DNA, 453 bp, Glycine max
  unsure (1)..(453): unsure at all n locations
agctntgtatggtagaaggtgtaggacacctctatgttggctaaagccctgagaagacctcaccttatgacttgaagtggtacaacaaaccaccgagaaggtcaagttgatccaagaaaggatgaggactgctcagagtaggtagaaaagttatcaggataagaggaggaaagacttggaattcgaggttggtgatcatgtattcttgagagtcactctgtggactggggttggtcgagcattgaaatcccaaaaactaacacctcgcctcatcggtcctttccaaattcttaaaagagtcggtcctgtggcataccaaattgcattacccccatcacattctaatcttcacaatgtctntcatgtgtatcaactccataagtatatccatgatccatctcatgtggtcgacatggatgacgtacaagtaaagagaacctgacatatgaaaca

SEQ ID NO: 80513 - DNA, 447 bp, Glycine max
  unsure (1)..(447): unsure at all n locations
tcttatctaaggcattctcttagtggtgaagctccttcttccatggcttattcctgaaaaaattgtatctcttttccttagtaatttaggcactactcatatgctccatttagagttntgtagcgccctataggtcttgcacaaggcaaataggtcaagtaagcacaaaaatttgaaaatatgcaacaattatcaattaagcccaattatttgcctaagacccaaactgagttaaggagagaaaataagactccaagagaggtcaaataagctaagatgaatagaaaaatacttaactaaaaacatttaatcaaattcccccatactttatcttttgcgacttcaggaanagctcatagaaagacttagaaaaatcaaactaaagtgaaaccaccactaanagaaatgaattaacaagggaatacatattttcaatggatcttaaca

SEQ ID NO: 80514 - DNA, 339 bp, Glycine max
  unsure (1)..(339): unsure at all n locations
gcatgcaagcttgcgaaagctngccgctggagctgtctctataactgccctaactcttttagactggtgatccctaggctcttgaccttgacttgatagaacctctttctaagcgaaggtgtttgacttgatcccatgttttactaaagtgaaacacaatcgatgcgaatcaaaactccgacatctatcatgggtggaatggatgaatgcatgaagaaatgcatatgatacaaatgcaatttatgaacacgggagcccgggaaattgtctccttcttagatacaacgtcttggggtaacacagtgcccaacgtatgtatttaagaaggtgacatggacc

SEQ ID NO: 80515 - DNA, 322 bp, Glycine max
  unsure (1)..(322): unsure at all n locations
tatggttccttttatataaaagaaaagttctgaatctcattatgttgtctaaaaaagccttgaggtggatccaagtgctctgatcattcattagcatattcatgttttggtggcatactcgccactgtttgtttctttatggaactcaccataactaaaaaagcacaagggctcccctataacacccgatccagaagtaagatgaataaccaanagggagtgcaagaacagatgaaagtcgacctattggccttaaaagatcaaatggcttctatcacggaggccatgcttaaacttcaaaaaactatagaagataatgcta

SEQ ID NO: 80516 - DNA, 242 bp, Glycine max
agcttaaccgtataggatatgacagactctttattttgtgagccaaccaaccaacgcgcccggaatgtaacctccttaatgaattatccgatacaccccttgctgctatcactaagctccttgtcctcatctcgatcgcaaggccagaacatgcaagctccttgtataagactcatgcagtgggaaccggcaacccgcgcaaagaaaggagaaaacctctcaactgatggctgataaggatt

SEQ ID NO: 80517 - DNA, 465 bp, Glycine max
ggatccttaagcacctgggctgcactgcacttttcgtttctcaggactttttcttctttgccacttaggccttttagctatgggaaccaagttatcccttgcatcctagacttcaaccacttgtgatagccaccgatgatgccattgctacaaccctaagctccttatcttacctctccgctgtattccaagctctacggattctcttaagtatcttcgcattggcttcattgaaacctcgtgcgatgaaaggtacgatgatctcctctgacgtcgcacctctcatagggtagcctaattgtcttatggccaacatgggattataattaatacaacccctcgttcccatcaaggtgacgtttaggaatccttcacacgagcataacacttttgccctcctttttccatcggggaacagctaatggacctctacctacctgcagagtcttccattgctttcctttc

SEQ ID NO: 80518 - DNA, 310 bp, Glycine max
ggaccttaaaactcgctgaatgagaggtaaagggaacttctgtttttcttgccataagggacctgagatattgcggggtaggaaccttgggacgtagggggtgctattgccaaaccaactgaccaatcccgacccacccgggcatagtcagtcagtgagaactggatgtacctaacaggcagctcctgcagtcacagataaacgacaaagacccaagcaggagcttgtgggtgctggccactgtgaacttgattatatggagaatggctctgtaatcattacaaggtggtaatcgatacaagctaaaatg

SEQ ID NO: 80519 - DNA, 463 bp, Glycine max
  unsure (1)..(463): unsure at all n locations
gcttctggtgggacatcttgacttgctttcttatctgacattcaccacagattctgccttcttctattctcaagatgggaatgcctctaacagcacctttgtcaatgattttcttcatgcctcttaagtgcagatgtccaaatctttgatgccataaattgacttcatcttctttggagaatagacatgtggaggagtaactggtttcttgaggtgtccataggtaacagttgtcctttgatctgctgcccttcattagaacttcactcttctcatttgtcaccaagcattctgactttgtgaagattacattgaatccttcatcacacagctgactgatgctgatcaagtttgcagtcagtcccttcaccagcagtactttcgccagactangaagtccatcatggactagcctttcccatccagtgatctttcctttagagccatctccaaatgtcacata

SEQ ID NO: 80520 - DNA, 456 bp, Glycine max
tatatttcttttcttgaatcgtttcatgttcgaacagaatgtctgtcatgtggcctgtcgtgttaccttatattagttcattcagatcctcatcaatgtcttctatgatattacccaactctaaatagtatgtccttcacattctattatcgttgagatgtcaccctcgttttagaacttgacttaccaaatactatctttgaggaagcgagaatcttcgggcttaatagctaagtgcaaaggagtcggataatcgaagagcgcttcaagtaggtacatagcctggtatcaggaactagatgtgtaatctctttcttctcgttctttcggcgacgttttggggaaaaaactttctttaaggggggtggagttgtaaaaccctggttttcataatataaataaaaagaagtttatttaaaaataatagagcgtttagaaaataaataacagagataa

SEQ ID NO: 80521 - DNA, 270 bp, Glycine max
atgatatgtatcgagcaaaatctgctatccacttccgcatctatacaagaagaagcaaaaattgctctcatatattaaacatataattgtgtacttttataaaataacataagctatgactcttaagaagggcagactaaatattttatcaatgaatgaaatatacttctgttcatcaaaacatactctgaaataaaattcttatcgaacacacctatatcgagcttaatagcctgagttatattaatttaaggccatttaatatatata

SEQ ID NO: 80522 - DNA, 359 bp, Glycine max
  unsure (1)..(359): unsure at all n locations
agcttaatgatcgnttatgagtaattggtgtatgtgatgcttaatcacataatgaatgccttatgttgaatttcgcttactaatttaatttagggttggattaagtggttaaactgataaaggataaactctcgtaatctaggataagagacttgcttgtgaatcaaggggaagcaacgtgttttaattctgatattttctaattcacatatattcgctgtttaatttacaaaagcaaacaaccccccccaccccccccatcgttactgttactgttactgcaagtatattatgaacatttggcttgtcactgcttcgtgggaaacgacctacgatcacttcctagttactacatttta

SEQ ID NO: 80523 - DNA, 398 bp, Glycine max
  unsure (1)..(398): unsure at all n locations
tcactctgatctgccatgagcttcanattatgatccatatggctatcaacaggtctacagttctgcatacctgtttcttctataatatcaagagcatacttcctctgagaaatcacaataccatctcctgattgagccacttcaataccaaggaaatacttcaaagatcccagatctttggtatggaaatgactgaataagtgctctttcagctggacaatcttagtagtatcattccctgtaatcactatatcatcaacatagaccattagatagacacattttccaggagatgtatgatagtaaaatacagagtgatcagcttcactttattttattcccacatttgacaacatgactaaattaccaaccatgctgatgagatggttcaccctaaa

SEQ ID NO: 80524 - DNA, 234 bp, Glycine max
agcttgagatgaggaagtagtgaacggttatttttcctgcttttattgctgaccacagagtggtacctgtagatatgtcgcggcggtcaggagaccttgcggacgtcatgcgaggtgctactgcccagaaccaagcttgaccaatctcaacccaacccgcgcatactcggtgagtgagaacctgtgatgtacctaagcatgcgagctcctgtcagtcatcagataacaggaaca

SEQ ID NO: 80525 - DNA, 385 bp, Glycine max
tatcataatcgattgcactgttgttttttatacaatgattgatttattcatgagtctgtgtcttaattgattaccatgtgatatattcgattacttctatttctataagtatttcagaagtgatcaagaacactttaatggactacattgaggatctaatcgattacattgtgcttgagaggtttccagtttttgggatgaacactttaatcgattgataagataatataattaactacttcattgaaataatcgattacattgtatatttaatcgattataggcagttataattgttttctctataaatagtcaccttgtgttctcacttctaagtacaagttcattacgtgtgaaattatatgagctgaaataattgaaagaa

SEQ ID NO: 80526 - DNA, 460 bp, Glycine max
  unsure (1)..(460): unsure at all n locations
gcttcacaacgattgtctcctagcgaattgttggcactgaaccactatcaaaaaccaaggttgagcattgcgccatcgcactctcatgtggaccatttgatcatagttactaatcacatccacctgtgaaatgtctagataccaaagataccaaataccttggaatgcccatttggcttcttccacttaaacaccttttaagccaatcttcttaataatactttgatcctttaccctgctagtataagtttcaagtaaaataataaagatgaacaatgttatttcatcatgtcattcattaaacacaaaaccctctacttgtcgtaccacaataattccatctaattatgttcatcattaacatggagagatttgtggcataacaatgccttgttcatccatagcattctctacaacctcattgccatcacatgaagattncactaagtcaccctcacac

SEQ ID NO: 80527 - DNA, 419 bp, Glycine max
  unsure (1)..(419): unsure at all n locations
tgtaatgatgagcganatttattgtttcattttccggantttatgcttgtgttgaaggtggctgtactcacttttggagttgatatatttacctgcacaaaatatttaagtttgggagtattcaagcatttttgttccttattttctatgcaaagtttctggtaataactactacattttctggcatggagggtgactggtgaaatgtgttgcttttgtcataaaatggcattgttgatgacacatttgcattgtaggctgtaacaatgtgcaggggcatgtgttttcctctttagataatctggcattctgttatgtttgttgattgaggaaaaccactaatacaacaaatgtggatggagtggatacatatatagatgtattgtcgacctttgttaatattgctctaaaaaatttaa

SEQ ID NO: 80528 - DNA, 426 bp, Glycine max
aaatggtctatattttgtaaaggaagatcataaaggtaggttgaataaatataaattattggtgttcttgtgattatcacacaagcaggaagaaagtgatggcatgttattggcttcaatttctatgaccagttagtctgactttgatggtttattgtttcatttttggtaaatatttttgtacaaagcactttgtaagtctgtccctttgattgcctataattaagttatatttgctaagcatctcacctttactttcttagtttcaatattgcatttatgctaattgtaacatttgaaaatgttgtttcacgaccaaagtatgcacagcttagacaaggaggggctaaacaactaaatattcaattctcaaggacatacacgtattagagatccatattaccaggtctcgctagagttaaattg

SEQ ID NO: 80529 - DNA, 419 bp, Glycine max
tctatatagctgaaccgttttatcaataaacacaagttgtgttttattcagaaaattagagtttatctcttttatcttagtgagagtgattctcctaagttcttgagtgattcaagaacaccctggctatatcaaaggactttcacaacctttgtgtgttgccctcgctggaaagagagatcctttccttcctttcatcttcaaccttgttctttcaaaccaaaattccaaaaaattcacttttgcccaaaattatctcgtggtcataactcccgttttacgtgctcaaattaagtgattcttgagcctaaattgaatttcaaaacgagatctttcacctcgttttgaaataacctcatttggagccctggagctttagttattgccatttctatatttctgtccagccaccacttaac

SEQ ID NO: 80530 - DNA, 471 bp, Glycine max
  unsure (1)..(471): unsure at all n locations
agcttgcttctacaatctcncctttgttgatgatgtcttacctgaaatcaagaaacacatacacattctntttcctagtcgaccactcacttaattctcgatattctccctcttttttatgagtttaagcttcacttgaaattaaattacttaattatatgagttcttgatttaatccctattttctctccccctttggcatcaacaaaaagccaaagtgcgtaagacatacatgattttaaaaaaatcatccacatagcacccattgtaaatcaatcataaaagattctgaactaatcatgaagcaagacattaataaaccaaactaaaatataaaccacatagtcatataacataattcataaatgtntagtcatactaagcaaatattaaaagaaatactaaatgttcaaatgccataataatatagccaaatacatggctagaatcagagtaaataataaaatatta

SEQ ID NO: 80531 - DNA, 276 bp, Glycine max
acaactcgagatctatttttctacttctccactgatgattaaaatttatacaagaattgcgttagaagtgatcgttaataggcaataaaatatcctcacacaaatactctcacgtgtatatactaaattgtttcacccgtggtcatcttttggctcttccctatacaagttcaccactattgccttttaccacccaacttctccttatgaactcttaagtaagaacatttggcgttgattatacatgacaataaacaacaaggagtccatgataac

SEQ ID NO: 80532 - DNA, 339 bp, Glycine max
tgacgctggagctgaaccatcaactgccctaactccgtaatgctgttgacatctacgcccttaatcttgacttgagagaatctttatacgatttgaattgtccccatcaattacctcaaaaggggtgaatcaaggctctgatatgaatgatgcaatgcacatgcttgatactaatagacatacaagtggtaatttacatatacgaaaccgaagaagagtcttctttttaatgctaccttctaggcattgcggcgccccaacgtatgcattaaataatgacgcgttactctaaagaaacacgatattcctagatataccagaaaactataatttatgggc

SEQ ID NO: 80533 - DNA, 436 bp, Glycine max
  unsure (1)..(436): unsure at all n locations
tattctaattctgctgacgcangctgagggtgcacaatacaagtattaattaatcataaactattgaatgtntatagcgtctatgttgagaaaaacgatattctttttattaaataatttcttatgataactcaattgaacagtttactgttcgctctgcagccaggatcagcggcccttaatatgactatctcttttggattgctcagtgtatctttctttgaaaataactatcaaacactacatgtgaatacatcttcgtagaaaaatatgaatcttaatcgacaacattataaaaaattagatcacagctgacccagcctacacctatccaatgagatatatgagttgagacttaaattttgaatctgaattacatgcgagcctatctatttctatcaagacccattttatacttattccatcacaactcacc

SEQ ID NO: 80534 - DNA, 424 bp, Glycine max
  unsure (1)..(424): unsure at all n locations
tgatcactaagaaggaaacatttaacgaactcgttatttatagttggtgacctcagcgaaaaatacagaggcaagtgcatttttaacaagcactaatatataagattaattgtacgcgcacaccaccaatcttaatgtattcatggttgtaccgtgttgaccttatatgtnttgtaatcaacataccaattttgaagaagtcataggacaggacgtaaaataaaatggcaaccaaaagtcatagaagtggaataagatttgtatggtctttgaactcaacaacaaacaactgaacagacatatggccctgatcatggtataacatcggcacttgaaaactaaacatgcaccttataaatagatagagtccctcttgtctacttttctttcaatgataacaggacacaaaaaataccggtgattg

SEQ ID NO: 80535 - DNA, 399 bp, Glycine max
  unsure (1)..(399): unsure at all n locations
agcttctgtcagcaaggtgactngtagataatctgtctgtactgagaagcagcatgtgtggaaatgttggccagttgccacaaaatattggcttctatcttgttacagcttcattctttttctaaatgaaataatgaattagcacctttgaagttttaaacctttagtcatgtgtaattgtgtcaagggagattcgaatcaagtgtttaaaatatagaacaaaaggaactacattctggtcacacacctcaaaccttgctgttcttctatgttgttactgttttttgtccttttctacttttgagtatatctcttcaacaaaagaaatgaatttattcaatgacaagttagccgacattggtgggcttatgtctgctgactcattactcggtccatgcc

SEQ ID NO: 80536 - DNA, 388 bp, Glycine max
actatgtcatttgtgcaatacactattcattttttgagagcacccaaatctatcctatggatgtgcatggatgaatggcttgctctctcgcggcaagaacatgatatttcactagtagctggaaacgactgcattcggctcattcctgcacctcttggtgatggagttcttcaagccttggttcgttattgtcagacttcagagcttgatcactccaatgcttggaacctcagtggctcgtataattttgcatatacctatttggtgggaactagtgtttgaactgggaccttgacaataagaagcggtcttatacattggaatttcctattggctcagtgacatgttacttatagcttacacagtattatctgtcatgtcagtaaac

SEQ ID NO: 80537 - DNA, 328 bp, Glycine max
gggttgaaataatatatcacaaactatcttccccattaaaatgttatttcactttctattcaagatataaattaccttaaaaatgaacttcttacatattgatctcaatacaaccatgtgaatatgaatatcaaaccataataaataaagggagttaagggaacagagattgcaaactcacatttatactggttcggtcacacccttgtgcctacgtccagtccccaagctacccgcttgagaagtccactatcttgtaaagcctattacaagatctgaaccacacaaggacaaccctttctttgtgttcagatttctttacaacaag

SEQ ID NO: 80538 - DNA, 392 bp, Glycine max
  unsure (1)..(392): unsure at all n locations
gtttctggttntccaaaccttgaaaacttgttctattcatccttttcattctcttctccctttgccaaaaagaattcgccaaggactaaccgcctgaattcattttgtgtctctcttctcccttttccaaaagaacaaaggaccaaccacctgaattcttttgtgtctcccttctcccttgtcaaagaattcaaaatgacacagtctgagaattcttttgattcttccctttccctaatacaaaagtgttcaaaggtctaaccgcctgagaattcttttgtatccccattcacaaagtatcaaaggtttaacagcctgagatctttgtcttaacacattggagggtacatcctttgtggtacaagaaaggggacatctacttgggttgactg

SEQ ID NO: 80539 - DNA, 367 bp, Glycine max
  unsure (1)..(367): unsure at all n locations
tgggtctgaaaaaacgcaaacttatgtatcctgcttggacgaatgacataactgtggcaaatgaagatggtgataatgagggagaaacccatgctgagactgacattcttataccgccaagtttcccaccaacccacaaatgtcattactcagtcaataacaaacctccttacccaccacccagttatccacaaaggccatccctaattnaaccacaaagcctgtctaccgcacttcctatgacgaagaccacctttagcacaaaccaaaataaaacaccaacccagatatgaattttgcagcgaaaagcctgtacgattcaccccaaattccggtgtcatatgctaacttgctctcatatctactt

SEQ ID NO: 80540 - DNA, 239 bp, Glycine max
  unsure (1)..(239): unsure at all n locations
gatgcgatcgaaaagtcgtcgatttgatgacaatgcaaatgtgatgtaaataattgtcgagataatgctacggtaaccatgtatgttggctacatatatgtctgtgttgtttctcctctattanattaaaaaatgtgataactctactcccggcttgctatttgtgtttggatcctgtgatgatattgaactttgtgttccggggagcagatgaataagtggatgactatgaagaacct

SEQ ID NO: 80541 - DNA, 466 bp, Glycine max
  unsure (1)..(466): unsure at all n locations
agctngcacaacaagtttgacaaaatgaagtgtattgaagtgtttctcccaataaagttctttctccaaatggagttctgtagtgtcctctagggcctgcataaggaagataggtcaagtaaacacaaaatcttaaattagctacaattctcaattaagctcaatcattttccttaaaccaaaaatgagttaaggtgagaaaataagattcaaagagatgtcaatcaagctaagaagaatagaaaatttttaaattataaatgctctattaggtacaagattaaaaatcattaagagctttggtatgctttttatcacctgattagtttatctattacaaattatttttctttttcataatgcttacttaatttctaaaaatacatttgattatgaggatgatgacctattattaccaatcccatactatttttgtgatgactactagagatattgatattgatat

SEQ ID NO: 80542 - DNA, 390 bp, Glycine max
tgctgctccagaacacaatgtttgctaacaggtaatggaatgatgttttatgttctgaaagtatgaaccacaacataagatcacccactgaggtaaaagcgtctatctaatgacgttaaagaagcgctttctatgaggcaacccagatttaaattctattatcttctttggttatacacgcactttaatcatatggaacttgctatatattctcgacatacgagtatatcatccaacctttggatctttaacataagggtatcaatttcttgaaaaaggactgagtaattacttaaaaaaatattttctgaaaaatactcctttcgctaatcgcacctcttgcattaagcgcatctctgtcattcactaagttgctagtcttacgcgctt

SEQ ID NO: 80543 - DNA, 380 bp, Glycine max
agcttacaaggatgtgttatggtacacttttttagaaagagtatattagcaagctatactctgagtatgtagcttttaagataatcgtaattataactttctaacttattaaaaaatgagtatactttaataaatctttgattaaaaattataataagcaaatattttgtaatatacatatatatatatatatatatatatatgaataattttaattatgatataagattctctaactattgataatttgctttaaaacatattataatttaatctatatataaagataaatatagaaggtcgagagagggaaactattaagtctatttaatatataaataaagactaaaagagaatacttcgaaatagttgatagaaaa

SEQ ID NO: 80544 - DNA, 387 bp, Glycine max
tctagccaaatggacttaccttgaattaattcctttgatatcccctttgagcctattatcccctttctttgttttgaagctcattacaagccttaagtgaaaaaaccatgatatcaccttacccttaaggaattttggagctttggaattgttttgggaataagctgggaataagtgtgtgtggggggggggggggtatctttactttttaatcctatttaataaatccttacatggctatatctgtgtgaacctttttatttttaacaatagctctagaattactggttctaaccttgcatttgggcttcatattatattgtttctttgtcaaaaaatttgcatggtatcctcagagctttttttttctctttcttttaaaaaaaa

SEQ ID NO: 80545 - DNA, 411 bp, Glycine max
  unsure (1)..(411): unsure at all n locations
agcttatgaggagaagcataagaagaatctttatatcccacgcaactctcaagatgcaactaaaggagatggaaganagtcaaggaaacgagaaaagtctacgaggtcgaggtcgcgactgagaacaggttggatgaggttcaaatttcatcaacaacacttatgagaaaggaaaaagctcaacaagagaacgtggaagaggctatacaagaacaaggtacaatatatctcagacccgatgctataattcttaaaagattggccactgtgcttcacaatgtagattcgccaagcatagagttgaggaggagactaactatgtggagtaaaaagaagagaagtttgaaacactgctcctagcacgtcaaggtaatgaaggtaaccaagaaaacacatggtaccttgacattg

SEQ ID NO: 80546 - DNA, 428 bp, Glycine max
  unsure (1)..(428): unsure at all n locations
ctgcattcggacctttaaactagcttggcttaattgcagattgatcgttttgatctttagaatgctcangcctactctatcttatgctgaaatcaactctatattgaagaggtggggagacaagaatctaactcttaaccatttgattatggaagttttgataccatgtcaataataaactcttctaaaagattatgaagttagttgaaaggatatgttcggttttaaatctttaacgtatttaacttctatttgaggattatcctcctacaatgcaatagaattggcgacaatcaattctctggagcagtacccaattttatacagagctggataaatcttgagaaactgtgtgaatatattcttctcccctttactttaatgaactttagttgtgtaattttttacgtaatgtcgcttatacaaac

SEQ ID NO: 80547 - DNA, 448 bp, Glycine max
  unsure (1)..(448): unsure at all n locations
agcttgttcaaagacaatgacagtcacaaggtattcttcttatgccattcaaggaaaacaacaaagcttaccaaggttgactgcggtgaacatcctagtagacacgaccaaagcgcgaccacggcctcaccgtggctttgcgagactcagagtaaggagtcacgatggtggcgaaagccatatagcgtgggggtttgtgatggagggttcgcgagagactaagcgagcgccagaagacaacgatgtgcagtctgttactcttcttaataaatacaatattcagtttctgtccaaactgatgttaacatcagttttaacaaaactgatgtttacgacattatgtttacatcctgnttccacaaaaccgctgtttatataatgacactactaaaaaaatgagtcttcacatcgtcttattgacattgattataccaatgtgcgtaagcac

SEQ ID NO: 80548 - DNA, 428 bp, Glycine max
  unsure (1)..(428): unsure at all n locations
ccttgtgtaatcgattacacttattggtaatcgattacctgtgactgtttctgaataaatcanaagatgtaactcttcaaaaaggttttgactttttcaaattggttttaagtttttctaaaagttataactcttctaaatggtattcttgaccagacatgaagagtctataaaagcaagactttgttttgcattttcaattaattcattctttcaatcttgaacacttatttcatacaatcctttacaagcctcaaatctctttgaacttcttcttcttctttgtaccaaaagctttctgaagttttctggttttcaaaaccttgaaaacttgtgctattcatcttttcattctcttctccctttgccaaaaagaaattgccaaggactaaccgcctgaattctttttatgtctcctcttctccttt

SEQ ID NO: 80549 - DNA, 418 bp, Glycine max
  unsure (1)..(418): unsure at all n locations
acgccagctccatgcaatgggtttgatttatgttccaaaagtggatcctgatagtagtattgctgtagctctactggatatgtatcaaagtatgggagatgctcttgctcagcaatacggtggctctgatgctcacaatactgtaggacatattttctgggattctaaatntatttaatctgccgacaaatatctaatctgcttatttgcatcttcttctgcagctgttgtgatatatgtaacatatatttaggtgaatgacaggtgtttccacagaggcagggaaagtggaaagcaacaacacaatcaagagagtttttaaatctataaaacgatactatatcaatgcttacacagatggtgaaaacaagatgcactacactagtattattccctccacctatcttatctcaataat

SEQ ID NO: 80550 - DNA, 410 bp, Glycine max
tgatgctagatggctgacatttcaagaggatagtctatatgtgatgactaatccacttgccaatcatggaggcttgacagtgaacatagtggaacgatgggagtctcaagggctgaagcgaataggggatgtgtcgacttcctggcggttcatattggaagcattgcacgaggctggtatagatgaccttaacggtgacaaaggagattcgtgcttaatgcatctaggggcattgcacgatgtggaaacatgcccaatagctaaggagctaccacagggaatgataagcagggggcaaattgaaatctgcagcgcaaagaaggatgaaggggaggtatgcatgcagttaggtgacagaaacctgagtaagcttaagcctttggtgatccacttcaccagggacattacca

SEQ ID NO: 80551 - DNA, 393 bp, Glycine max
  unsure (1)..(393): unsure at all n locations
gcttgtgaaatgatttctatacaaaagttagtcttattaagcgattaacagggcacatgaagtaccccaccacaatctagccaacttcgagccttgccttggatatgccactgaggggcaagcaattggtggtacctgtcgcaacctacccttttgcgggcaagcgaggcgaggcttacaggtgcgtcttccaaaggaggaaaatgcgtagagtcgccaccaacgtttaattgtggaaaacgtcggaaaaactgaaggaaaccggtcatgaagaatattccagattcgggagttgtatttacgtttgaggaaggtattagcacctctcacgtttgtcccaaaggacaacacgccttaaataagattgtgtganattgtgtacctaaactttta

SEQ ID NO: 80552 - DNA, 349 bp, Glycine max
taaggatggaatacttacttgttggtgatgaataaaagcgcttatcggaatcgaaaaatgcaaaaaatagtgaccctagggctgcaaactcgtaaattccgtgggtattgcttttgaatggggggaaaagaagtttttgaatgcaaaaacgtcccccttcttcattttttatattttggtgcaggggttgctcgcccaggcaagctcagctcgcccaggcgagctaacctgcacttttttttttttaaaaaagggtcgaatgatttaagaagcgactgtacacgggaatggttcgcgtgaggggaccaaagcttttgatgctccgccagccactccgtgaggtactgat

SEQ ID NO: 80553 - DNA, 455 bp, Glycine max
  unsure (1)..(455): unsure at all n locations
ggatccttaagcaccgcggctgcagcttacttgcaggaataccaagaaaatttcttcatctgacttagcatcaaatnttttcctaagttttcctttccattgtttaatacaaagcatttgcaaccaaagacatgtagatgtgagatgtttggtttcctaccattgaacaattcatatggagttttctttaagataggtcttattaaagccctattcatgatataacatgcagtattaacggcttcagcccaaaaatattttggaaggggagtatcattcaataaggttctagcaatttcttccaaagacctatttttcctttcaacgactctattntgttgaggggttctaggtgcagaaaaatcatgttcaataccatgcctttcacaaaataaatcaaatttttttattttcaaactcacccncatgatcactcctaacagatataattttta

SEQ ID NO: 80554 - DNA, 352 bp, Glycine max
  unsure (1)..(352): unsure at all n locations
gattcattctatgcacccatggtggtccacattgtgtttcgtgcattattattctcgttctgattactttttataccccctgttgacgtgcttaagccattttacttaagtcatttctcgcttaacttaaaaataaaatcaatttccaccgaacgtttgaattgtattatccgttaacttcggttaaaatgaattccgaccgttcggtcgtgccgtaaccacgttggaaatcaaaaagaggtaaaaaataatataataataaaaaaaacatctttttagtaaaataaagcgganaatcaatcggacgttntctctttgggatttctcattcttaatcgaattgattaataac

SEQ ID NO: 80555 - DNA, 466 bp, Glycine max
  unsure (1)..(466): unsure at all n locations
agctntatgcgctaagcgcgccagctcacgcttagttctcacaaagtgtcctcgcgctaagccaaggcatcatgctaagcgccaagaccaatgactgaagagaagatcaaaggactcacgcccatcaggtgctaagtgtgttccttgcactaagtgccaacaccattaatgcaactgtaatgtcaggttgtgtgccaagcgggacgtgtgtgccaagcgcgagattcctaactgaagattgaaaaaaccaccatataacatcttcttcttcttcttcttctttacttacacacctttctgcctctacttgcatcttagaaaaatcatcttgcctgcccatatttcccatagtnggtatagtgcgtgcattattnttgcttactgatcatactacgtatgcataaattgtgctcatggttttcgatttgcatctgggggtcgctcaatgtgtgagtctacgcataat

SEQ ID NO: 80556 - DNA, 417 bp, Glycine max
aatctaagctatgctgcaatattacaatagacctcctcaacctcagcttcatattcaaccacagcagaacaattatgacctttccagcaacagatacaaccctggatggaggaatcaccctaacctcagatggtccagccctcagcaacaacagcagcctgctccttccttccaaaatgctgctggcccaagcagaccatacattcctccaccaatccaacaacagcaacaaccctagaaacagccaacagttgaggcccctccacaaccttccctcgaagaacttgtgaggcaaatgactatgcagaacatgcagtttcagcaagagaccagagcctccattcagagcttaaccaatcagatgggacaattggctacccaattgaatcaacaacagtcccagaattctgaccagct

SEQ ID NO: 80557 - DNA, 458 bp, Glycine max
agcttcttttggaccttgaacaagcaatcttcttctctttcagaaccatgctatgtgctcgcgactggtccctttcttcccttcgcaacttgagttcactattgctaccccatagagcttcgcgaaatttgttccggccatactctttcttgcgagccctcttggtctctcgttcaagggctcttgcggtaattgcattctcttcccgtaacccggcacactccttccgaacgtgtgtagcagccaagttggacttctccttggcgagttttgcctttcctaactcgcttttgagagcttggacttcctcgtcctcttccggtgcttcaaaattctcttcgctgacgacttttaacttggcgagccaatctaaacctcgtatgcgaactttcagccattcgtggtacccaccaatgatgccattacgaatgcctctaagctcttgatgctttcttaac

SEQ ID NO: 80558 - DNA, 405 bp, Glycine max
  unsure (1)..(405): unsure at all n locations
ancgcttaccaccatgggaagccatggataagagctcgaatgtatgttatgatgattagagggagaaagagcatgaaattttgtgcctcacatgaggtctgaactttgaagtgtaattctcaaatgatcaaagttaaaaaaatgcacatacatgacctctatttatagcctaagtgtcacacataattggagggaaatttgaatctctattcaaatttcacttgaatttgtggagccaaattttggagccaaaatttcactaattatgattagtgaattttagctatggttcagcccactaatccaagatcaagtccaagattctccactaagtgtgcttaggtttcatgagacatgttaagcatgaaagacatgcacaaagtgtgactatatgatgtggcaatg

SEQ ID NO: 80559 - DNA, 442 bp, Glycine max
  unsure (1)..(442): unsure at all n locations
atggtttcgaatattatttatatttgtgggcacttcaatgactgacatctggaacattnttaagaactgtttctcctgcaatgatatttatgctcatcaagaactcataatagcacaaattataatagtaatgacaactcanatgaaatgtcaaaactatataaaaaatactaggatatgagaataaggagaagacatgttatatatatagaagtaatagaaacaaacattggcgaatgaaggttaaataggaaagactaaaccaaaagaattcttgttaaggattacaagcatacacaagcttatacttcttatagctgacatgaaccatctttgatagatgatcgtttctgcttactaaccagttcataaattaaagaaggccattacctctattaaagaaagtcaaaagacggaaatcgtgttacatgtgatactatta

SEQ ID NO: 80560 - DNA, 374 bp, Glycine max
  unsure (1)..(374): unsure at all n locations
ttcctaggcctagaattgcattcggactctcatnttttattcttcatgctgtcactatgtatatataaaacagtcccacaatcccaagcttacaaaaccatgctcatatgtcattgaggcatttcaccgagcacttggtgggcgcatgtttggacataaattgcaagagaatgggagcaatgtggcatcccccattgcttcagaatacaacctaggcctaaggccttttcatccaaatccttaattcaagaaaacaagcaccaaagcaaactgaaactgcctcacaaacataagcatgttctcacaatttaaggcaccaaaagatgaagaatagcacatcaatggaaagaaaaacatcaacgatgggatactta

SEQ ID NO: 80561 - DNA, 462 bp, Glycine max
  unsure (1)..(462): unsure at all n locations
cggatcttaagtcacctgcggctgcagcttgagcaattcaacgacaataattttatctcgatgtccgactgagtcccgtaatatatcgagacgctcgaaatggattactgaagatctgagcaaattcaaacgacaataaattttttactcggatgtctgattgagtcccgtcatatatcgaaaagctcgaaattgaatgttgaagctctgagcaaattcaaacgacaataactttttactcggatgtctgattgagtcccgtaatatatcgaaaaccttgaaattgaatgtagaagctctgagcaaattcaaacgacaataaccttttactcggatgtctgattgagtcctcgtatatattgagatgctcgaaatggaataccgaagccctgagcaaattcatacgacaataactttntactctgatgtctgattgagtccccgtatatatcgagatgctcg

SEQ ID NO: 80562 - DNA, 364 bp, Glycine max
tcggtattctatctcgagcgttccgataaattattgtactcaataagacatccgagtataaagttattgtcgtttgaatttgctcagagctttggtattccatttcgagcttctcgagggattacgagactcattctgacataccagtcaaaatttatcgtcgtttgaatttgctcgaaggggcgacattccattctgagcgttccgatatattacgggactcactcgaacatctgagtaaaagctattgtcgattgaatatgatcacaacttacgctgtaatggtcgcgtgggggatataccggactcgtccccctccgatcagagggtcggctctggactccctcaagttttcattcatttg

SEQ ID NO: 80563 - DNA, 357 bp, Glycine max
cacgcattaaccagattgactctaggagagaaacatattttcttttattttctcgttattattgagaagattattcaaacatgactgtaaactctttccataagttaaaatctacttacgcttatcagcttttagagaagttggatgacacagctcctgcaaaagctgaagcgcataagttgatcttaacatacttactattttctcttactataagtgcttatgaaaaagctcattcaaggaagaccctaatgcattaatcttactgataatgccactaacaaagtaacatgcttttgcatgcatgagcataagcatcagaatcaattatgttgatggaagatatgaactgcttac

SEQ ID NO: 80564 - DNA, 346 bp, Glycine max
  unsure (1)..(346): unsure at all n locations
atgagatattctaatgtttatacttaaanacgagccgtataaaagaaaagaagactcttctaaactcttatnaatactactgttaaaagaaaatcttcggtttccatgaaaagaaaatattatggatcatagaacattaaattccactaaattagcgtaagtgattagcttccacatgctcagtgttaatagagatatttaatgatacacttaatatcaaaacgtgtgttgactatttaaaataccaaattagtacctctcaagaaatatattttaaaagtacaactgatgtatagagcacttacactttttttttagaatagatagctaaantttaatcaatgaa

SEQ ID NO: 80565 - DNA, 435 bp, Glycine max
  unsure (1)..(435): unsure at all n locations
ctactcctaactcatcttacttggattgaaactggttcatgttgatatgattgagaatagagatgtttgaaatttgagtttaacccagcataactttttttaaaaataaaattgagtgacataatgaaattgaaactgctaaaagttttaaaacgatgttttgaatcctgcattttttgttacatttctaattaatctcatttcttttataactcctggtggactaagcttgtaacatatattgcatgtcttattaaagataagtaatgtctcaagtgttcgaacttcatgaatgaaaaataaaattggtgaagagaaccatccttagaggttgtcaggtggtccatttagttntttttaacaaaaataatattctcttccgaactcattcttaaccattattaaaaaaaaactgattcactcaaaattagtaaa

SEQ ID NO: 80566 - DNA, 404 bp, Glycine max
  unsure (1)..(404): unsure at all n locations
gcaagcttgtagaatggccagacatgatattttgtattgnttggctcggnncaaagagtaaagggatgccccacattatttccacgacacaaatgcaaaaatgatgatttggaaattatatgcaaaactggtcatgcatgcacctatgtggacgctcaagtgtcaaattattatggtcatgtgatgctagggctcaagattcatttcctctattttaaatcaacccaatgattccaaaatatgttcttttatcaattggtgcattcatccgagtccatttcgggcgtccggggaaatttcacagcattcacccttcacgtgtagacacattntccaaagatatggtatgatcaatgaatctttttttcatagaaaagatggaaatcatctctttcgaaagcatg

SEQ ID NO: 80567 - DNA, 377 bp, Glycine max
taagaagaagcttaacaaacttagaaatcaagtgttcatgtattccgaaatatagggggagaaaacggatgcacattttatctatatacaattgtttgttgcttgcttgaatcttgatttcaggtattgtattgtcatcatcaaaaagggggagattgtagatgcaattggctttgatgttttgatgatgatcatgatgatgtgttgcaattgatgcaaatgggcttttcaagattaaaattcaagacaatacttcaagattacaagtcacaacatcaagatgatcactagaatattaggaagggaattcctaattgaattaacaaaggtttggccaagtgattaaaataaacagtgttttcaaagcttttactctc

SEQ ID NO: 80568 - DNA, 454 bp, Glycine max
  unsure (1)..(454): unsure at all n locations
ctgatggtgtaaagaagaaatcacatgtttgtcatcatcaaaaagggggagaatgtgaatgtatctatacatgattttgatgatgccaaagaagaatcaaacaaggctgcttcaaatgataagcatttgcttcaagaataattcaagagtgcttcaacaaacaaagccttgtttcaagattcactaaagaccaagccttgccttaaaacaaagtgctttcaagacatgcaaggctctggtaatcgattaccaggaagtgtaatcgattaccagaagacagggttgagaaatagttgttgaaaaaggttttgaatttgaattttcaacatgtaatcgattaccatatgtatgtaatcgattaccagcaacgaaactcctgaaattcaaattcacaagtcatgacccttcannatatattgtgaatcgatacacaatcattgaatcgataccagtg

SEQ ID NO: 80569 - DNA, 426 bp, Glycine max
  unsure (1)..(426): unsure at all n locations
aagaaaaagaaaanagatgaggatttgtgaaggatgaaattggttctgaaaatgtgaaatctgacatttagtttgattatgaaagtattataagtcacaatatcaatcaaggctagggtctcattgtaaaagttaggaattgaaaaccaacatcatgagattgggattaaacatccaggattggagaaggaacatacatgattgaattagaaaatatgtttgtactaattttctagcaactataaaccgctgaaaaatggtttgtgtttattaaaagctaaaggttattattgacggttttaagccgccaacaatcgttaagttaaactttttttacattaaaattgaggtctgtaatagaaataaatggaaagaatcaattcattttacagacataanannataaaacaatcttcttaaagatat

SEQ ID NO: 80570 - DNA, 441 bp, Glycine max
  unsure (1)..(441): unsure at all n locations
tagccgaattcagaatcgaatgaagttggcttagctcatccttggccagcttagcggaccagatcagcctcagatgcaaaggttgggcgctaagcgcttgagactcgcggcttagcgtatgaccaaagatgcgcttagcgcgaggctcgcgattaacaaaacgactattttttcagaaaaaagttttcttagttatatatcaatccttttctcaacaaattgaaacccttatgttaaacattcaaagataggatgatatactcctatgtacaaattatacaacaagttccaaatgattaaatgcatgaaaaacaaagataacagagattaatactgggttgcctcccangaagcgcttctttaacgtcattagcttaacgcttttacctcactgggtgattatatggtnttggtcttactttcagaacctcattgacctct

SEQ ID NO: 80571 - DNA, 445 bp, Glycine max
gaccttaaatactcagcttccgttgtcaattgcgagcgtctcaatatattatgtgcctgatattggacatcttagtgataagttatgaccatttgaatttctcacgagcttccattgttcaatttcgagcgtctttatatattatgcgccctaatccgacctccgagttaaaagatatgacaatataaattgctcaagagctttcattgttcaatttcgaccggctcgatttattatgcgccttaatcggatctccgagttagaagttatgaccatttgaatttcgcgagagcttccgttgttcaatttcgagcttctccatatattatgcgcctgaatctgaccttcgagtgacgagttatgaccatctgaattgctcaagagcattcattgttcaatttctagcgcctgatatattatgcgccttaatccgaccttcgaggta

SEQ ID NO: 80572 - DNA, 441 bp, Glycine max
  unsure (1)..(441): unsure at all n locations
ctgcagcttgtacaacttgcaagtttaaaaatgttatttgcaagtttaaaaatgtaattntattccaataggtctcaaaaatcaaaatggggagggaagagtaatatatatatacttttctaataaatccagctaacacctgcattgtgtcttgtcaactactaccaaggatgcatgagtaataatctacttatctaattatttgctatctccatctgtatttactggaggtatatatgtggggcgctgatgcaatttccggtttgctggggttatgctttggtacgaagatcatatccattaaccttacgctttacctctgatttgtangaaacatgattctgatttaggtaccactgatttaggtaccagttatattaataacctttttgctgataaaaacattataattacaattggaagcagataaaataataatta

SEQ ID NO: 80573 - DNA, 355 bp, Glycine max
  unsure (1)..(355): unsure at all n locations
tgttgagatacctggtgaagctcatttntcctatataaaggtaaatgaactaaaccataaaaataaaaggcaaacaaaatgtccattgttgagcatgaccacatcaatttcatttgcattagtcttgaagacataaagagtttacatgttgcaagaataagaatgtaacagtagaacatcccatttctcacagaatgtgtacctattccaaaatatggttgtcttcaatgctaagcaatgtataccatgctcattgtgcccatccatttgaatttcactcaagtcatcaccaacgttaacaagttctctagagcacctgactatcacacgacaaagatctttgataaagaaacct

SEQ ID NO: 80574 - DNA, 103 bp, Glycine max
atatagctactcattaaacttatacatatccagctggggttttttagaacactgaaaccttagctatgatattaccaagtagtgaaacaatcaacccggcgca

SEQ ID NO: 80575 - DNA, 439 bp, Glycine max
  unsure (1)..(439): unsure at all n locations
agctntgaaaagtgatgtttttcaccttctcgctaatccaatctgctggcttagcaagcgtccgctaagcgcaacactcatgggctaagcgcgaggaagactctggaagaagatgagctgtacaggttcgctaagcgcaccgcttcatctactaaacgcaccgcttcagtccatccgctaagtgagaaaggcatgcgctaagccaaaattcactaatgtgcgctaagcggtccataaatgcgctaagcgcacgagcatgaacaaggccacctatttaagccaaaaatcatatattgtgaaaggagtctgggctgggattcacagctttgcatgtctagagattctagagagagaaaggtccaagttcaagagagtattgagagatncttgtgtgtgaagatctgcagagactatagcttcaagcacgagtcgatttgag

SEQ ID NO: 80576 - DNA, 338 bp, Glycine max
  unsure (1)..(338): unsure at all n locations
tctactctanatcctgatgaattgcgagaatgatctcanaataagtttatntcttattggtttattaatgagtaatgattaatctcaaaataatttatgcaggtttaacaaaaaggttgaaatttggaaattaagtttaagcacttaccaaagaagagaaagagacttgagacttcaagatactacgatcaagttcattttcctgacaaccagaattaggttttattgtgttagctcattcttattttatatactcatctctggagcggtttatatagttataattttaatttcattcacaaatatatataataagtatgtcaactagaaaatatgaa

SEQ ID NO: 80577 - DNA, 433 bp, Glycine max
atccttagagacacctgcggctgcagctcataattatactttgatatttttctactaaaacttaaatgatgttgatgcagcaattattttctcaaaaaggaaaaaataggagaaaaaaaattacaaattcctctataatctaacctccaaaatatactcataattagcaagtatcaaactcccccaaatataaatctttgcttgtcctcaagcaaaaggaaaaagttcaaatcttaccaatcacaattcatgagataactacatacattccaaaaagcttcattgaccaattctcaagttcatagtcgtcataagttcatgataggagcagagtaagatgtacttcatatgaaatggttatcatgaatgacagatcacaatgaataatctccaacttcacgtcttacaaggctagtgtttcttctaattccac

SEQ ID NO: 80578 - DNA, 441 bp, Glycine max
tcttagcattgccaacacagtacgaatgcttggctctgatatttgtgattcaagaatagctgagaaaatactagtgactgtctctgaaagatttgaggctactattacatccctggagaatactaacgatctgtcacaacttaccttggcagaactttgaaatgctctgctagcccaagaggaaagaaaaagaatgagggttaatgattctgtggaaggagcaatgcaagctaaattgcaaattaaccaacgagagaaaagcgagtggaagaaatacacgaagaagaattttaacacacaagaagcagcggctaacactaacaaaaacaagtggagacaacaacaaaggatttcctccttgcaagcactgcggcagaatgggtcatcctcctcttatatgttggagaagacacgatgctaagtgtgaaaagtgcaacaagt

SEQ ID NO: 80579 - DNA, 302 bp, Glycine max
ggataagaggccacacacatccgacactaatgcatctatttacttaccattctacccctgccccaccgtaccagaactatacaaaactttaacacccttgtttgtgttccattttttcaaatctgagaatcaacggccacgtcggtgcactatcgagagtggagaggcataacattgttagcatcaaaatgaaacatggatcttgatatcatgtggggttctcatatctaaactattatagtggtggtgatttgtcactgtgtgacgaggcaaaacattgataaaggtgcaaaggaacttaa

SEQ ID NO: 80580 - DNA, 458 bp, Glycine max
  unsure (1)..(458): unsure at all n locations
gcttccnctaaaggcttcatatngcccattttttgaggggtaaatgaatcattaaaactcccactccatgaagctgttcggcgtgaatgaggtaaatgagagttacttccttctgttgctccctgctttgagatgttacccatacttggaaacctttgtatggctgttgatgatacatgttttggggatcggtatgaccagtcatctgtggcagatgttgaaggatattcattcgttgcactgtcttcttgctcgccttctgctatagcatccattgcctgctcatttgacgatggtgcaggagtatgaacaaaaaacttcgcattggcagcaagagccggtttcacagaaggaacagaacgcgactgatacaagtttgcagaggctcaccaccttggttgaggtgcaacatcctgtttatccatanacttatcatcgatatatgccttcacatttgt

SEQ ID NO: 80581 - DNA, 310 bp, Glycine max
  unsure (1)..(310): unsure at all n locations
ntataaagctctgcatatctacctcttcattatacatattatcttgtaaatagttgatcaattgggtgggagaaaataattaagtagaagtgtcgatattcatgttttgcatatattggttatcatgcagcacatttattaagttataataagtttaactatattactatctgtttggtttattgattatattgcacgtcgtcattataccttgaatgaacgtgctttaaaaacaataaaaaccctttttttgagaaccacagggtaattatatctgattgcatggtcatgcattgtgtggcctttattt

SEQ ID NO: 80582 - DNA, 429 bp, Glycine max
  unsure (1)..(429): unsure at all n locations
gcttgaacaatatactnggccttcatttatctgtctttgggcttggcggccacgctcaacaaagtactttcgactcctactgtacattgatttcaccaatgctattatgggaatgttgcgacaatcctttaaaaccttattgatacattctgagaggttcgttgtcatgtggtcatatcgacgtccttctctatcgtaagccatcgtccatttttcctttgagatgcgatcaatccatgttgctatggctggactcagttcatgaaattnttctaaattttgatcaaaaatgtgcttgcaaggagtgtaggctgtataaaattagttatgaataacacatttaagtataaatgaaagtaaaataaacgtgaccatcaaatatgaaatcttacccaatttcttcaacatttctttttgnttggattatta

SEQ ID NO: 80583 - DNA, 433 bp, Glycine max
  unsure (1)..(433): unsure at all n locations
ntaacctcatggtctctcacagtctttagatgtgggagcttatccaatacctgtgtccggactctcagccacttatgatagccgccaatgatcccattactgcttcccctaagctctctgtccttatatcacgctgcatcacatgccttgtgaactccttagagtaccctcgcattggggtcactgaaaccccgtgcaatgaatagcgtgatgcttttgtctgatggcactcctctcatggggtagccaagctgtcttattgcgaggaccggattataattaatacaaccccttgttccataaggtaacatttggacattcctctatgaagatagaacctgttcttcctcccttatgagggaacaaattacagacccccttcatcttccaagagtggtccaatagcctttcttttcacgcacgactgtgactt

SEQ ID NO: 80584 - DNA, 452 bp, Glycine max
  unsure (1)..(452): unsure at all n locations
agcttccatgtctcgagactctntatcattgttatgctgcatgtgngcatgacccagatatgtccatttacaaactgtggtgcatagactgcgagtatcatcaccggttgccctgtagaattactaaaagttaatccaagtgaagtgccactagactaaaacacaaaccgatcttggacatagagaagacttcaactacatagagtacctgtatgacaaccaatcgcttaagtccatccacctgaaaaccattgaccaagattcttgcaaattttctttaacccatagaagctgaaaagttagattatataattaaaaattcttggaaaattatatttctaaacattgatcttccattaatttattaaaacattggttgagtggtatcttcatgtgtcttgaaatatccctaatgtaatcaatgaatattagacatcacatggtgagtgtag

SEQ ID NO: 80585 - DNA, 346 bp, Glycine max
atgtgactggtaaacagaactaatatatggtgaatatttgcttttcgtcaagaagcaatatcccagtctaagatcatgaagaagcaattgagacaaaagtgaacttactaggacttataggctacttatattttggattcctatgccctatgaagttggagtgcagaagctgattcatatttagctcatatgggcttagttgtactatgttggtctttttggctatgatggcacatgtatttaactacatctgtgtcatttgttggtgatgatatgctagtgtcattatatcactttgtagcattagacaaggggatgacactggactaacttttggctccatact

SEQ ID NO: 80586 - DNA, 395 bp, Glycine max
tggaccgtccatgagctcgcaatgatggatgttctggactgcaaaaccagaagtatttgaagcaaacataagacagcataattttttaatattctaatatattttagcatgtagaattcggagatcatttaggcacagttgccactacttgaaaaattgataaataaaccaattataaagataaaaattggttcatcgtatcatcaacagagaagtcatctatcaccaacatgctgaaagcaaaatacataggcacatctaattggaagattgatatttgttactcaaaactgtaataacaaattttacgaatatagaccataaccattatttttctgagaatttcaaaacatgagattgataggtaccagaatatgaagcaaaaaacagatgct

SEQ ID NO: 80587 - DNA, 372 bp, Glycine max
  unsure (1)..(372): unsure at all n locations
aattgctttgggaatatatctggggggtttcgttggataacatatttcgttggctatgtttcatgatgtattntgggccatacatgatgtacatagaatactcggtaaatgttggacatgctgaatgatatgctatttctcaaatgctacagtttacacaaaaaatacgcgaatcccttcgttgcaaaaacagaaagagagaaataaatttgagtgatatagatctctaatggaacaagaaagatgagactcttggcttaactctctgcgcataaatcttatcttgtccgtttctttatgttaaactcaatatgcccctcaatcctcattactcctctatatctttgcgataaactatttattcatgtattc

SEQ ID NO: 80588 - DNA, 362 bp, Glycine max
tattgtgaacgacactagtcttagctgggatggagagaataaaaccattgttgctaatgatgaatggtgggaagccaacattcaagtgtgtattatttaactaaaagagtttctgtgcaagccagtcttttgttctttatttgtgattttgttaataattctttttcttttgtgttgccatcttatgctcacttctctagactgtgcttttaatcatcagttctcattattgaatttctctttcgctgatgataattgcgagtggctatcaatcattttactaaagtcttgctcagttgatgcagttctgttctatctcattatgtcccttcttgtccttattttttccacgattttatata

SEQ ID NO: 80589 - DNA, 346 bp, Glycine max
  unsure (1)..(346): unsure at all n locations
acttgtgatgaanagaggaataacataaaagagaagatgcccagctctttgatgaatatgtgagtgtaaagtcaagttcatctactgcatcaagttctcaacaacctactgttgaagaaggtttcagtataaaagaaaatcaagagatggatgatccatatgatgttagccttttcttctgtttgatcatctaattgttgtatgattcaatttatataatttaatttttctcttatattgtcataggaatatatcaattatgtgagcccaaatgttaatgtcaatggcaagtatctctatttggntgagacaccgcttgagccaaagttctttcctaagttggata

SEQ ID NO: 80590 - DNA, 381 bp, Glycine max
  unsure (1)..(381): unsure at all n locations
ttgagccanaatcctgactcaccatanaccttgacccagtgtgagaatgccaatccttaccctcggaagcaaaanaagaatagaggggaaatttccgatcaaagaaaaagagaaggaaaatttccaatgaaagcaaaaaagaaatgaaggaaaattccccaatcaaagagtgggagaaagcataaaaaggaaaagaaggaaaattccccaatcaaagagtgggagaaagcaaaaagaaaagaaaggaaaattcccaatcaaagaatgggagaaagtaaaaaaggaagaagaagaaggaaagaaagctcctgatcaaggatcgaaagaaaccataagaaatgtgcagagaggtctttggaccatacaatatctgaacagtac

SEQ ID NO: 80591 - DNA, 389 bp, Glycine max
  unsure (1)..(389): unsure at all n locations
agcttataagaacaaaattgccttaatcatgtcttatattcatgncaattatgacgcatcaacaataatcattcctaggctatcgtgcccgcaatcaatggggcccaacacaccatatgatcattatgatggatggctcatattctcacataggtaacatcatcactttcaaatagagcttttcaaactatcatgacatgtagagaagaatcaacgatttcacgtcacaaaactgcaagaactttcattttcaaaacaattacccatttcttgaacatatcctataattcacagacaaacatgcaaagtcgtacgtgcacacaaaattgaccccaaatattatactaaagatgcgacgaaactaacaccatttacaaattatcacaact

SEQ ID NO: 80592 - DNA, 334 bp, Glycine max
  unsure (1)..(334): unsure at all n locations
ngcctctgcagcatattagtgaacgaatgaagtgtccacattcattgtatggtcgcttggtagacgtacatgctaataactaataagacttcctgagcacggtatcaacgtttttgcatgagagatggctaccttgtggcaggatattctggacgaatctggctcaccagttatttccaaagccattgacatagacttatgtacgtgttagtttactatatacctaaatctgggttcaagactagttattcttcacctggaatatctaccacgcgattgatctaatacgtgattatatcattcgagcagctcatattatcatttgaccctgctt

SEQ ID NO: 80593 - DNA, 474 bp, Glycine max
  unsure (1)..(474): unsure at all n locations
atgcaagcttaccacggaaagtgaaactaactgataatattattatttcagttagtttaattttcatatattttgggtgtaaatattcttatattacatttaaatttaattaactattaaaataattacttcatttattctttagtacaaaacagcatataaaatgaattgattattttttatgattataatttttataaagtagttaattctgttattatttatctaagtaattagtatttttatattttcaacactgtaaaatgttttttcactttaatattttcacatcactcgataacaagttaataattattaataagaataaatcttggacaatagtaataagtattcttaactaaaatgaaaatctagataacttacatctaagtggaaataatatataaatataaaaaaaatagatntatattggaaaataatgtgtgatctacaacattatataatattaatata

SEQ ID NO: 80594 - DNA, 354 bp, Glycine max
ttaatgaaacacaactaaatgcttataattttcagataatctgcacaccacagttgtgatttgaatagtattcaggatatatttagataaataacttaaaaacattcattcaatacgagtattttcttatgctcttaagaaaagtattttcttatgggaagggccagtggtgggtactaataagagtgatctttcatggaccagcatcctagaacggaatatacggagtttttatgcattttatgtctcgtatgtattaacgagagtctggagtgacgagaataccattttattaatatatggaattaacaaagttggtctcttatgaaattcttatatgacagtgcatcagga

SEQ ID NO: 80595 - DNA, 407 bp, Glycine max
  unsure (1)..(407): unsure at all n locations
cactcctacattttatctctatcatgcattggatgttggtctcgtcctttgtcacgggaagccggaaggtccatatcaccttcttaattgtacacatggggcactacgcccccaaatgcgcaagtaagaagagataattttccgggctctcgtgtccgtaaaatgcattcatatcatgcatcgcataagcatctcttcataacatcataatggacatatcctgcatttgtccgttatcatattccagcctcacattttgcatgagtcatggcatcatcatgcatatgcgttcaacaaactttttgatctgcanaatcgcataccatttcgtttcatgtgtgctcatccttgcgttntcctctacaaaacanaaacaaaaaagggggaagcgtgaaacttcacactac

SEQ ID NO: 80596 - DNA, 434 bp, Glycine max
  unsure (1)..(434): unsure at all n locations
ggatgcttcaatggaggggaaaaaagagagagataaatagagaggggggaagcatgaaattgaaggaagaaaaagggagagaagttgaattgtgagttgtgtctcacaagactctcattcatcaaagttacaacaagtgttacacatgcttctatttatagactaggtagcttccttgagaagctttcttgagaaaacttccttgagaaacttctttgagaaaacttccttgagaagctagagcttagctacacacacccctctcattactaagctcacctccttgagaagcttccttgagaaaatttctaaagaagctagagcttaactacacacacctctctaatagctgagctcacctncttgagatgagaagctagagcttagctacacaccccctattatagctaagctcaccccatgacaaaatacat

SEQ ID NO: 80597 - DNA, 424 bp, Glycine max
ctcgaataattcacatgggcataacttctctcacatatgcttgattaaggcgcatcgcatatagagagactcgaatatgaacaaccgaagctcttctaaaatagaaatggtcataacttttcacactgaggtccgattcaagcttataatatattgatatgctcgaaattaaacatcggaagctctcgagatattcaaatggttataacatctcacatgaatgtacgattcgcgcgcataatatgtcgagaagctcgaaatagacaacggaagctcttgagaaattcaaatggtcataactatttccacggatgtccgattcaggcttattatatatcgatcgctcgaaattaaacatcagagactctcgcgagatttaaatggtcatactattcacacggatgttcaattcgggcgcataata

SEQ ID NO: 80598 - DNA, 354 bp, Glycine max
  unsure (1)..(354): unsure at all n locations
ttacaaccctctcgnaatcgagtataaagctgtttctgatgtagctccacctcgagcttgtaggccttggatcttcttcatcaatggagtcatttgcttcttgaagatccatagtagcggaatggagaacgaagaaagatgattggagacgcgacttctaggagaagatgagtcaagaacaagctcatcaccatacgaaactgatggaagctcgcttgtaaagcttctatggaggctggatctttgagcttcaatgaggtcctttaatggtgattttccaccatggagatgccgcggaagacaaacgagaagaggtgagagaacgcaccatccactacggaataagccatggaa

SEQ ID NO: 80599 - DNA, 436 bp, Glycine max
cgtaagtgtaatatgggctctatttcttgatctttatttttatgtcaggcggcttgaatgatatagaatgtcgtttgattgcagctgtatatattttaccattttttatatagaaaatattcaacatacatttgtgaggaaaaagatatgcactctagtcacaccagaaaactaattctacttttaattttctacagtatatatactaattaacatttttaatttattaatctctatatttactttctcttctatcgcactttaatcttatttttttcttctatattattgttcatctcattacatattacatctatcattttttttcctattatttctgacagagtcagatcttatgttgtctgccgatggctggttcctatttacagatcttcactgtgcaggtcaagaataatcccttattttttatgatgat

SEQ ID NO: 80600 - DNA, 460 bp, Glycine max
agcttaacatcagaccacttccagggtgctgtgtctacttcacatggacttgatggggcctatgcaagttgaaagccttggaggaaaaaggtatgcctatgttgttgtggatgatttctccacatttacctgcgtcaactttctcagagagaaatcagacacctttgaagtattcaaggagttgagtctaagacttcaaagagaaaaagactgtgtcatcaagagaatcaggagtgaccatggcagagagtttgaaaacagcaagtttactgaatactgcacatctgaaggcatcactcatgagttctctgccgccattacaccacagcaaaatggcatagttgaaaggaaaaacaggactttgcaagaggctgctatggtcatgcttcatgccaaagaacttccctataatctctgggctgaagccatgaacacagcatgctacatccacaacagagtc

SEQ ID NO: 80601 - DNA, 454 bp, Glycine max
  unsure (1)..(454): unsure at all n locations
cttggagcttctctgatggactatggtatcttgacaatgtcactggcgcctagtgatgaacatcaatctcaagtacagtttgccctagaaagaggactcccagcaatattaggtgtactaagcattcacaggctaacattcccttcaagatcatttgatatggttcattgctctagatgccttgtcccatggactgattatggtattactttaatcttttcatttttttggtattactgttttttttctttcactttgacattaaatgtatgtattagaaaaaagaattttttaagatatcctacttccattatgagtgttggaggcagttattggtatgcagtttatatatccaacgggcattnttatttaatgttaattggttntaacacagaagctaacatggtaacagagatntcacgtgcgggttatattatatatttggtcgaacaac

SEQ ID NO: 80602 - DNA, 427 bp, Glycine max
  unsure (1)..(427): unsure at all n locations
agcttgaaatggaatggttctttcgtgccttattctctgattaattgattgtgttaatcttattagtggtttcgtttttttgttgttagcatatatttatgcctgattaattgattgtgttaaccttattagtggttccacttttttgttgttagcctatgtttatgcgcgatttggtgcattaattaacctttaattangctttaaggtctttgctggtgttatgaataaaagtaagatgctcaatcttttaatgataatatttttattattttaaatttttatttttaaaaaaatacatttcaagacggttcttagaaaaatcatcttagaatgatacccttctaaaacggtttttgagaaaaatgttttagaatcttcaaatgttctaattttttttaaaaaaaaagacattcttataaagttt

SEQ ID NO: 80603 - DNA, 336 bp, Glycine max
tgttcgcacatcgttcgcgtgtatgatatccactctacatggtttgaagtagaggagaccttcaatcctataacgcaacgtggcggacaaaaatgggcagttaacttgaataaccattattgtcaatgcggaaggtattctgcgcttcactatccatgtacacacattattgcatcttgtggttacgtgagcatgaactactaccaatatatatatgttgtttacaccaatgagcacatcttataagcatactccgcacagtggtggcctcttgggaatgaagcggcaattcctccttctgatgaggcatggacactaatccctgacccaactaca

SEQ ID NO: 80604 - DNA, 421 bp, Glycine max
  unsure (1)..(421): unsure at all n locations
accaagaaatgctactcttaaaacaaaaatagcgtacagcctccacaaatatcaatgtaaatttagagcaaactcatgcacatacttccttacgagcattcactcgcacaagatattcttctaactaagaaaaatgcacccatgcacaatcaaggcaccttcgtaacctagattatttatatgcacttccaaggtgtatttgctacctacatcacatgcacttccttggctaaatttacatacatgcatactcaaagcatcttggctaccaacaattgctcacgtgcacattctggtatttctaatacctatgcatatacaaactntgtgatggatcttggctatctacacaataaggtggctacatttatgctttattcaagtgttttactacctaaagtcgcatgcannatcaagtata

SEQ ID NO: 80605 - DNA, 350 bp, Glycine max
gtgcagagttttctggtttcctaaaccttgaacacttgtgctattcatccttttcattctcttctccctttgccaaaaataattcgccaaggactaaccgcctgaatacttattgtgtctctcttctcccttttccaaaagaacaaaggactaaccgcctgaattcttttgtgtctcccttctctcttgtcgagaaaaattaaaatgacacagtctgagaatacttttgattcttgcctttcccatataccaaagatttccaaggactaaccgcctgagaattcttttgtatccccattcgcaaagtttcataggtttaatcgcctgagatctatgtcctcactcattat

SEQ ID NO: 80606 - DNA, 379 bp, Glycine max
tgcagctgagcttgtcgtaaggatgatgtggttgagtttggcttgcgcgctaagcgagctgtcccttcctcaacttttccttcaaggcttttttcttgaaggttttgcattaatttttctcccaagcacttgaaaatttcttcttttgacttcttttgataaacaattagagtgatattagtttcttcattatttcattaacaacaacggtaaagtgaagacatcgtaatcattcttatccaaaacttactatcaaattaactcaaatttcgcaattatcaagcatgattgtcgcgcctagcgagtatggcagtaatctcacgctcaatgcgtgactcgcactaagtgtaccttcacatattagacttcttcatacttc

SEQ ID NO: 80607 - DNA, 399 bp, Glycine max
  unsure (1)..(399): unsure at all n locations
ntagagaggaatatgtgaatctttggacattacttggtattattcaataatgcatagttgcatatatatacatctaatgcttatcttaattntatgagttntataattntatataaatttaaatattttatataaaaatttatttttattttaaaattgttagaatgaatgcttaacctaatttaatagattttataattcttaaaatgtatattatttatggtataaatattttaaacaatgatgtttatgtaagtaattacatgtcatgtatttcaattgataaaaaaaaaataatattatttaaagttacacaactcatatatacaccaaattgaaaatgggttgagtgctcattttaattgttccgggtttgatactggatatttctactaatat

SEQ ID NO: 80608 - DNA, 377 bp, Glycine max
  unsure (1)..(377): unsure at all n locations
agctatggcattgtcatatccagagttttttctgttgacacttgtctatcgacatgcggattatagccggtcaccttgagctgcttaaagccaattgccgtgcgatccataaaatttcctgatgcttcagagtgaaatgaatcaaaaactcataaagggggtgaaaagatcattttanggggtgtgcttcactcctgggcccatctaagcccattatgaagctataacatgaagcaaccggctcgccagctgttcgcactctgtgatactacttgcttgtgtggatgcgaaatctaccggcaagtgcaccgggccgtcaacgatataatttaagtggtgtgaactgagtaatcaactcacggaacttgttcatttgg

SEQ ID NO: 80609 - DNA, 416 bp, Glycine max
  unsure (1)..(416): unsure at all n locations
agtctcttattttttagtttaaattctgtaatttttaactttgntcttttttgagtccatgaaattcttctattttttttaaaattaatttactttgtcctcttagatatttttttcctaaaatctttatatttttatttttacaattattttgcaaattgaattaagtgtccaaataaaagatgtagaaaaatatatagaagcaaggcgaataagagcgataaagaggcgtgttatttcacttagatatgaatataatacgagtaaatatcaacgggcattacataagatattatcttccttatgagattgttcgagcgatatttcctaaagataaacaaatctctcgtaggtgttgaattataagttttttgtcaccctgaaatgcagagtatctatcacttttattgatgact

SEQ ID NO: 80610 - DNA, 390 bp, Glycine max
agcttcttagtctcagctgatgaatatatattttggctacttcatgcactcctctaatgacaataacatcacttctgacactaaattgctgggagtttgaagccatcttcgcaattaaatttatggcttcagcaggggtcatgtctccaatggctccaccactagcagcatctatcatacttctctccatgttactgagtgcttcataaaaatattggagaaaaagctgctcagacatctggtggtgagggcaactggcacatagtttcttaaatctcttccagtattcatataagctctctccactgagttgccctaattctgaaatatcttttctgatggccgttgtcctggaagcagggaaaatttcttctaagaatactctcttga

SEQ ID NO: 80611 - DNA, 330 bp, Glycine max
gtgtcgtagttagtaaaaagttaatcacttgtccaagaatatatgagaacataaacaacccaaactaaaaaaaagatgatagacaaacatttgcttgtatatcatgtaatgtaaaagtctctcattttgtcatatattgacaccaccacgaaagcaaatggccttttggaaatcagaaaatttttaaatagaacaagaaaaaaaaaaaaaactcacggagttgaaattgttgttccacttctgacatgaataaggagtggaatgaaactcggaatgaaactcggagaaatgcataagagagggaatagcgtgagtcttcggagacaacaa

SEQ ID NO: 80612 - DNA, 474 bp, Glycine max
  unsure (1)..(474): unsure at all n locations
cacacaaaatgaaaatactaagtatntattacctatacttaatagaaaatacttataacactacaaaataaccataaatngagggaagttgatacaatttatacaagttttatacacaaaagttagtcattttcaccgactaacaacttccccaaaattacagttttgcttgttctcaagcaaaaagagaacaactcacttgtcctcaagtgacaatggcatgcagtgactatatacaaagggttatgcttaaaaaattactgattgcatgatgagaaagatgaagcaatgtgtacctatcacttgtcttcacaaaatacgcagttattcaaagagaagaataaaatgtgaactatacagttagatgaatttatgcataagatatatatcaaggaaagtagcttaaaccacggtctcacgactactgtatcactcacgcacaagtgtgtaagatattcnattgatacaactaat

SEQ ID NO: 80613 - DNA, 369 bp, Glycine max
aggctgtataggaatggcagtcacagcatgggtttctacctcattctcaccctcttcatttgccccaggttttctcattcgtccaagcacgatgattaaatttgcctctttttagacccactatgatcctttcggtagtgaaaactaaatcagcaaagcttgaaggtgtgtaacccaccatttttcatagtagaatactggtgatgtgtctactatcattggcatcatatttttctccgtcattgaggtgccacttgagctgccaggtccctccacctttgggcgtattctttgaaagatctgtgccccgtttttgcacatgttctgtagtttcctcctacccgagacattatattgacacttgcctac

SEQ ID NO: 80614 - DNA, 450 bp, Glycine max
  unsure (1)..(450): unsure at all n locations
gcaagcttctgggactgaagaagcagaagcagatgctgagtatgacaatgctctanaagaagctattagaggtgtccaggatgctgtcatggccataaatgaacgtatggaagaagtcagatatgaaattgctgcccttgaagcagaatgattcttttccagcatatttactaaaacattattgacttcaattcacattcaatcatataatcattngcctgtgaatgaataggttcagacacctagtgctaacaaatatttttatgggtctgcaacccgtggaatgttatatagacaccctaaaatgtagttcatgaattttgcccagttgtcaacattntagattatgcccgaaggctaaaatcttcctccctctcactattcttctgctnttccacctcatttccagcgacgtcattntttttctccggcgacggctctgggcgcatc

SEQ ID NO: 80615 - DNA, 415 bp, Glycine max
  unsure (1)..(415): unsure at all n locations
ctcaagcttcacgattaanaacactatgacaaattacattgacaccccttatagtttcttgaaattttacacgatattcattggcccctaccttttttaagcttataggtactccccttaattggttggaaaacattaaacccttgtcccttaatacctaagaaacacaatacatcataaatccctgacactcctgtggtttcttgaaattttcacacgatactcctagtccactacctttttaagggaactnccttgaactgtttgaagcacattggacaatgtatccttattatccaagaaacacatagcatcatgcatccctataatggctggagtattgtgtgaaatttaagaagccacatgaaccatgagcantantntccccgaaacattantatatatgcttaacaca

SEQ ID NO: 80616 - DNA, 469 bp, Glycine max
  unsure (1)..(469): unsure at all n locations
atgagtgagccaaagtatatgcattgcaatntagcaagagacaagaggaatatgattcgagagtaaaaatgggagatgtcataccacaagtctttgagtgtaaatatctggaataatcatacataatgatggaaaaattaacaagggtgttactatacaagcaagatggctaacatggagaanggcatcatgggttatatgtgatcgcacagtacctcccaaactcaaagttntatcacatggctatacttccaactatctatatcgcatagtactcaatagtggatagtggcatggagggaccgccctcaaaaaatgttatagctgaatagcagtagcaggataacccttattctgatccctaagtagatntatattacatgatgtatataatatataattatatatggctgaaaataaaaacacctaaacttaagaacattatgatcaactttcacaaccaatatag

SEQ ID NO: 80617 - DNA, 353 bp, Glycine max
tgaacagctcttgccagaagtggctcacgaacaaaaggtctctatctgttaccagactttaaggcatcccatgaatcttgccattagtttccatgaagattattgcgatggtggatgctatgtaatgttgcgacaacaatcccaaatgcacccctttagagaagtggtcaacgatcaccagtacggcggagtgtccttgcaaagatggcaatcccatgatgaaatcaagtgagaggtctttctacggtctcgtcagaactgggagagagcataacaaccccgattgtttacagtggtcgtatttgatctgctgacacacaacgcaagtggagacaaatatgtgtacattgttc

SEQ ID NO: 80618 - DNA, 538 bp, Glycine max
  unsure (1)..(538): unsure at all n locations
atccttaagtcacctgcggcatgcaagctntgagaactagaaatgattactttcaattggttagttatcttatatctggtatgattattttgaagttgttgattttgtgactacatttataagttgatttacctcanagttgttaattgtcttatctcttagacttgaattatagttatcctgaaaattagcttaaaattttctattttacctcaatgttgatttaatcacttttactattgcatttgttggtaagttcaactggtggtgtgtatttaggctgtncaaatggttattagcaaaacattagtgagtagaanaatagcatattcacttgcattaagaaagtttgggaaacaacttgaagttgaagatgattcanattagtgcagtttatttatgtaggtaagtntgatatttccttattggtgtttcattgagtaccattatttggtctanngtgatgtgtctntatggatcaccctcgatttcttgaanatgttagaatatcccttattgtttctactatttattcact

SEQ ID NO: 80619 - DNA, 343 bp, Glycine max
tagagaagctcgagctcaactacacacacccatctcacaagtccctactacagagactactcctaatgctcttaaacacaacgcttaaacactattctagtaaaatggcccaaatacacggcccaacttaagaaaaaccattctatttttacaaaaacagggatcaaccttgacccatgggactagaaatctaccctaatgatcatcaaaacccgtaagccatctttagcatctatatctcaagcctctaagaatattctatccaatacccttaggaggatggattgaatcatgacctccaccttagaaacgatctgacctcatattctgaggttcttcatac

SEQ ID NO: 80620 - DNA, 364 bp, Glycine max
  unsure (1)..(364): unsure at all n locations
ctctcaccttgctccatgaccactggagtgtccaaaaaggtgttgagggaatcggcatcaaattttatcaggtgccctcgaaccctaacttgctttggttctttgtccttagggacatataggtttgcatagaattctttaacaattgccacatcaatggcttccttagtcaagatnggtcagttgtttatgacagtttcttctaatcaattctcttctgaaatcatcaaacttagtgatatacaacttgacatttctttctggcacaatgttcctggcaagtgtagaagcaaagcttcatgatgaatcaagaatgattcanagatgttntgatgataacaaagacgatgaacaaggtgatgac

SEQ ID NO: 80621 - DNA, 440 bp, Glycine max
  unsure (1)..(440): unsure at all n locations
tcatgatgatgaatcaagtcttgatgatgacttatatgatgttttanagcccaaacaatgatttcaagattgagtaagaatgatttcaagattgagtcaacaagttcaagatcaaatttaatttccagtttcatgagaagaaatcaagaagattccagaatcaagagaagtttgatttcaagattcaagagaagatgaattcaagattcaagagaagaaatcaagaagacttcacaagggaagtattgaaaagatttttcaaaaaaccaacatagcacagttttgttttccaaaagagtttttttcaaaattttctaagttaccagagtttttactctctggtaatcgattaccagnttcctgtaatcgattaccagtagcaaagtttgatttcaaaagcttttaactaaatttgcaacctttccattgatttcaaaatg

SEQ ID NO: 80622 - DNA, 478 bp, Glycine max
  unsure (1)..(478): unsure at all n locations
agcttcacattcagcagatatgcatgttggaggttgtagcatatgtggaggagcacatgaatcttgtgtgctatataccacttgaggatgctacacaggaggtgaattatatgggaaatcagcaccgatcaggatttaatgcaggtggatttgcaggttaccagcaaggttccaattttaatcagaatcaagggcagttgaggtctcatcctggaaaccaattcaataaagaccaaggaggaccatccaatacgcctcanaatgaagagcctagcctttatgagagaacaaccaagctggaggagactttggctcagttcatgcaagttgcaatgtcaaatcacaaaagcatagagtctgctataagaacctggaaattcaagtatgacagctggctaagcagatagccgataattcttcttgcaagcttgnggctaatactgagaacaatcccaaagaagaatgcatagctatcatg

SEQ ID NO: 80623 - DNA, 412 bp, Glycine max
  unsure (1)..(412): unsure at all n locations
nttcgattcattctatgtacccgtagtggtccacattgtgttccgtgcanttttattctcgttttgtttactttntataaccccctcttgacgtgcttaagccgttttacttgagtcatttctcgcttaacttanaaataaaataaatttccaccgaacgtttgaattatattatccgttaacttcggttaaaatcaattccgaccgttcggtcgtgccgtaaccacgttggaaatcaaaaagaggtaaaaaataatataataatcaaaaagacatcttttagtaaaataaagcggagaatcaagtggacattntctctttgggatttctcattcttaatcgacatggataataactaaagtgaaactaaaggctaanatcaattcgcctagtcaagctcgtccataaaaaa

SEQ ID NO: 80624 - DNA, 420 bp, Glycine max
  unsure (1)..(420): unsure at all n locations
atcctctgagtcacctgccgcatgcaagcttgtagcanagttcaacaacaataacttatctctcggaagtctgatggagtcctgtaatatatcgtgacgctcgaatttaaaaccgaagctcgtagcccattcgaacgacaataacattacactcggaagtcctattgagtcccgtaatatatcgagacgctcgaattttaaaaccgaagctctgagcatatacgaacgacaataacatctcactcggaagtcctattgagtgccgtagtatatcgtgacgctcgaattgtataaccgaagctcgtagcagattcgaacgacaataacatttcactcggaagtactattgagtcccgtaatatatcgtgacgctcgaaatttataaccgaagctcgtagcagatgcaaacgacgataacat

SEQ ID NO: 80625 - DNA, 428 bp, Glycine max
  unsure (1)..(428): unsure at all n locations
tcggttntaaaattcgagcgtcacgatatattacgggactcaatcagacttccgagtgaaatgttattgtcgttagaattagctgcgagcttcggttttaaatttcgagcgtctcgatatattacgggactcaatcggacttccgagtgaaatgttattgtcgttagcgtttgctgcaagcttcggttttaaaattcgagcgactcgatatattacgggactcaaccggacttccgaacgaaatgttattgtcgttataatttgcagagagcttcggttttaaatttcgagcgtctcgatatattacgggactcaaccggacttccgaacgaaatgttattgtcgntagcatttgctgcgaagcttggtntaaaattcgagcgtcacgatatattacgggactcaatcagacttccgagtgaaaagtt

SEQ ID NO: 80626 - DNA, 532 bp, Glycine max
  unsure (1)..(532): unsure at all n locations
atctctaagtcacctgcggcatgcaagctngagatgaggaagtgtngaagggtgaaactttctgctnttattgttgaccacagagtggtacctggagatatgtcgcgggggtcaagagaaccttgggacgtcaggtggtgtgctattacccaaaaccaagcttgaccaatcccgacccaacccgggcatagtcggtcagtgagaacctgtgatgtacctaaacaggcgagctcctggcagtcaacannatataggaacaaagaccacaaagcnaggaggcttgtggtggctggccagctgtgaattttgtgtaatatgtggattgtggcctctggtaatcgattaccaagggtgggtaatcgattacaaggcttaaaattgaagacaggaggctaagatggtctctggtaatcgattaccaaggggtgtaatcgattaccaggcttgaaaacgaagtcaggaaacttagggagcctctggtaatcgattaaccagcctgtgtaatcgatacacagagggatgggtcactggt

SEQ ID NO: 80627 - DNA, 409 bp, Glycine max
  unsure (1)..(409): unsure at all n locations
tgtagaataaactntgcaaggccaaagggatgctaccagtgggcatatcattctcagttgttggcatatggtacacagcctgaaatgtccaggaacaacttcccattacttttcaatggataagtgaacttcaggcaaaacaaaataagacaaaccgttctaacctttctaaaataaggaatatgatacaaggtttggagtagagaattcatataacacgtagctccttggttcttaagcccaacatagccagtctccttctttgaatcataagtccagtaatcaacaatcctacgaacaagaacctcagcttcgactataagagtatcatgcacaagataccctctactatgatcatacaattcaccaagaggcatgaaggatgtgaaaccccaatcactttcacgtg

SEQ ID NO: 80628 - DNA, 419 bp, Glycine max
  unsure (1)..(419): unsure at all n locations
aagaaggtcataccgcgggttccatcangggaagcaactaatcctctaaacaagcaattgccatcctcgtttctgctagcatagcctgcaataagagtgcggcaagatccttctaacttttcaaggaaggctctttcacaagaaactgctagtcttgtttcttcatgattcaatgaaacaaggtattctgcctgcagaaatcagccaaccacataaagagaaaactaaactaataattatgcaattgtatcaagtacgacatatttaagacagaatagttcctcagtcctcactataaagtctcttatattgataaaggtagagtggaaaatagggggagggatgtccaggatctattatnaatttgtatgacatcattatacataatatcaatctgatgtcctattcgaagactctat

SEQ ID NO: 80629 - DNA, 433 bp, Glycine max
  unsure (1)..(433): unsure at all n locations
tgctaagttggattcacaagaggcagtgagagcagctgcattagccagggcatcttcttcagttttgcgacctgtagataccaccgtctaccagatggagaatngagctctagtggcaacatgagcatcagaagtagtttgagcacagagactggaactaacaaggaaataaaacacgagttgagattgtctccagtgagaaattctattgctcctagtcaaggaagtcgtgatgagtatgagactggaactcacagtatgagtagttntagtagtcctagccatgttcaagaggcagttacactcagccctcttccacaggaccacagtttgtgtggcttcagggcaggtacctcaattcctagtttggtgcctgagcgtcctttaacttctaaagcaacattgtcaaacttcaggaacccaatatctagtc

SEQ ID NO: 80630 - DNA, 457 bp, Glycine max
  unsure (1)..(457): unsure at all n locations
gtacgtgctccttanacctccattaagtttttgctttaccttctcttccattggtcttacttcatttttctccatgtatctcctcacatgtcttgttctaaatgttgttaacatgattctttagagtttgcaccgattaaacttgctatagaagttacatttgattatctatggttcaaatttcttgttcttgttctagaaccatgaattgtgttgagtttaggatccttcgagttttgtcttgttatttattgtggctgaaacctaaaccataaaattcttacaanaatattaaagtagaagaaaacctcaaaaatctagagtgactcgttcacctatcgtagttttgtcataaaagtcatgtctagtcatgagacttgtcacataagatttcttatgtngngctcgaatttattntcttggttctttgcctaactcatttcgtcatgagtgtatg

SEQ ID NO: 80631 - DNA, 354 bp, Glycine max
  unsure (1)..(354): unsure at all n locations
tcattgcctaacaagccaacttacaacagcaagccccaagagactcagcataaggatgcacaggtcaaagttgagtatgtgaaaagattgtatgaccaagtgaaaggtgccaattgcaaaaaaaatgaaagttatactaagcaagccaacaagaaaaaggaagaagtggtacttgaaccccgtgatgatcctggacatttgaggacaaatgttttccaagaaggagggaatgatgagaatcatgaaactggccaaatacangctanaggcccaagtggagaaagacgaaggcctaagtggagaaggacanaagccccgagtggagaaggatgaaggcccaagtggagaaagatg

SEQ ID NO: 80632 - DNA, 391 bp, Glycine max
  unsure (1)..(391): unsure at all n locations
tgtggtactatatggcgcgtcggctatggtgcatatatcaatcgtgtatcaatcgtgtctaaacccaagtcaagcttcaaaccacagcaacacaaaatctaggtgtccaaaacccctcaattaatggatattctacgcttgagaagtgaaagtgagaatgggacaaattagaagcaaactctcacctcacacaagtctataacatcaatttaaacttcgttaaactggatctacgcttaaaatctcaccgaatcaaaatttgactcttcaacacccaaatntaccctagaaatggctctntgntcactatggtcatttgcttttctctctagcacagcctaacctttctcataagtcctaaatggcatttcaagctaagattaactcactc

SEQ ID NO: 80633 - DNA, 371 bp, Glycine max
  unsure (1)..(371): unsure at all n locations
gacacttaatactaagcttaggagagagatggcttagtcaaagcttgagtgagagagctcgggtggtgttcgagggtcacaactgtnaacacaaagacaaacacacaagttagacagagaacattttatggttagacaatctcgaagagaaatagaaaactaatggggagttgagggagtcgttcaattctaaccttcgagggaagccacaacttggacaacgacaaatgaaagcagagaagaaggttatgcgcaagtgagaggagggttagtggcaaaggaatggtgagaataagttatgtaaaatcgtctttgtactaacaattcaactacgacggttttttctcaacccttttttgtactccatgttc

SEQ ID NO: 80634 - DNA, 447 bp, Glycine max
  unsure (1)..(447): unsure at all n locations
ttaagtcacctgcggcatgcaagcttcatagagtaagaagagaggttcatagagctttgggatacatgctctcagagacagggctcaagagaaggaaggtcagatattgtgctttggagggtattcttaccttcgcagagagtgaaagagcttctagtgttcgaccgcaacaacatggaatatagcttttacaacaacagtggacagaagaagagcatgagacataactccaacaacgtatatgagaaagcgatagagcttcatgagaaggtgcgagagaggcaatgagagggcacaagaatgaaaagggaaaactcgtcccctttaaagacagtttttgaaaactgatgttgaactatttctttcaacatcatttcttgaagaaactgatgtcgtaatgcattntcaaaaacgagtttgagaaaatcatcgctaaagttagtaata

SEQ ID NO: 80635 - DNA, 383 bp, Glycine max
  unsure (1)..(383): unsure at all n locations
tttaaaagtaaacccaaaacanaatcaaccaagtcttcaaaccaagacctcatttattcaacttcattctttntttctgtttttttttaattttttttggttttttggattattttttggacttgaacagtagcaattgaaagcattgaaaaataaagccacaattaggcaatatatgtatatacatcaagcatggccaaaatacatcatcaagcatggccaacaaaaacatatcatccaatgaaacatacccccccccccccccctcccncacacttattcctaaaacaattccaaagctccaaaattccttaagggtagggtgaaatcatgatatttcacttaaggcttgtaatgagcttcaaaacaaagaaagggaaaca

SEQ ID NO: 80636 - DNA, 278 bp, Glycine max
  unsure (1)..(278): unsure at all n locations
tgggagaaagaatgactgatgaanagctggtgagaaagatcctcagatccttgcctaagagatttgacatgaaagtcactgcaatagaggaggcccaagacatttgcaacatgagagtagatgaactcattggttcccttcanacctttgagctaggactctcggatagggctgaaaagaagagcaagaatctggctttcgtgtccaatgatgaaggagaagaagatngagtatgacctgatactgatgaaggtctgactaacgcagtngtgctcctt

SEQ ID NO: 80637 - DNA, 415 bp, Glycine max
  unsure (1)..(415): unsure at all n locations
tgtgtattcctgcattctactaatatatggaattgcccattgctttgcctgagaataacaattggatgaccacaacagcgctgggggcggcaacggacaatggtctttcaaataaaccttgtgtacatgaacaaacattatatcatgctctgaccgtgcccaacgaacaagcgaaagtcttgcataattgttacactaactatattcaatgtacctgaacaaaatgatttccaaacacgtgaccgacacatatgatgctgtggccaaaagagtcangtggtggttgacttctataaggaaaaatgtcatgctctgttgttgggacaacgatacaaggattacgttataccgttgagcaatcacatatcccatgtctgatatatccatccactagtcacactaacctgaatgacca

SEQ ID NO: 80638 - DNA, 511 bp, Glycine max
  unsure (1)..(511): unsure at all n locations
agctntnggtacanagaagaacaagaagttcaaagagattcatggcttgtaaaggattgtatgaataagtgtaaaaatgtgtattgaaaagcaaatcanagccttacttttatagactcttcatgtctggccaagacaaccatttagaagagttataacttttagaanaacttanaaccaatttgaaaaagtcaaaaaccttttgaagagttacatatttttgattattcagaaacagtcactagtaatcgattaccaaatcagtataattgattacacaaagctnttatgtgaaaggatgtgactcttcacatttgaatttgaatttcaacgttcaaagccactggtaatcgattaccaaaacattgtaatcgattacagctttttgaaattaattggaacattgtaaattgaatntgaaaactntntcaaaacaantttgctactggtaatcgattacaacaatctagtaatcgattaccagagagtaaaaactcttttggtaacatgt

SEQ ID NO: 80639 - DNA, 422 bp, Glycine max
  unsure (1)..(422): unsure at all n locations
tctaagttagtgtaccaaactaccgcggctccggccaagctatcttgaaagaagtgtattaatagcttctcatccttagagtgtgcgcccatcttgcgacagtacattttgagatggtttttgggacaagtcgtccctttatacttgtcgaagtctggcactttgaacttcgggggaataacaacatcgggtactaagcaaagatccgtcatgtctgcgaacggatagtccccaaatccttccacggctctcaatctttcctcgaggagatcaagcttcctcttttctttggttgccgggggcggtccttccgtggacaaaactattggttgtgtcgcgatgttgggttgaggcaacgtgctgtgtgccggcccttctgggatcggnggatagaactcgacatcccttcgagcatagtcttg

SEQ ID NO: 80640 - DNA, 451 bp, Glycine max
acagagtggtacctggagatatgtcgcggcggtcaggagacactggagacgtcacgtggggtgctattgcccaaaaccaagcttgaccaatcccgacccaacccgggcatagtctgtcagtgagaacctgtgatgtacctaagcaggcgagctcctggctgtcaacagataaaaggataacaagaccacacagcaaggaggcttgtggtggctggccagctgtgaattatgtgtaatatgtggattgtggcctctggtaatcgattaccaaaggtgagtaatcgattacaaggcttaaaattgacgacaggaggctaagatggtctctggtaatcgattaccaaggggtgtaatcgattaccaggcttgaaaacgaagtcaggagacttacggagcctctggtaatcgattaccagcctgcgtaatcgattacacagaggaatgggtcact

SEQ ID NO: 80641 - DNA, 415 bp, Glycine max
cgctttcgattcattctatgcacccatggtggtccacattgggtttcgtgcattattattctcgttttggttactttttataccccctgttgacgtgcttaagccattttacttaagtcatttctcgcttaactcaaaaacaaaatcaatttccaccgaacgtttgaattgtattatccgttaacttcggttaaaatgaattccgaccgttcggtcgtgccgtaaccacgttggaaatcaaaaagaggtaaaaaataatataataatcaaaaaaacatcttttagtaaaataaagcggaaaatcaatcggacgtttttttctctttgggatttctcattcttaatcgaattgataataactaaagtgaaactaaggctaaaatcaactcgcctagtcaagctcgttcataaaaat

SEQ ID NO: 80642 - DNA, 408 bp, Glycine max
  unsure (1)..(408): unsure at all n locations
tacaggtggaccttcttctagtgattctgacttaccgcagctgactatccctcttccattcccacctacagcaattctaaacaaaatagtggaagacgcggaaaaggagatcttggagaccttcanganagtaaacgtgaacatacctctgctagatgccatcaagcagattccaagatatgccaagtttctaaaggagctgtgcacccacagaaggaagctcanaggaaatgacaggattagcatgggcagaaatgtgtcatcattgataggtaaatctgttcctcgcattcttgagaaatgtaaggacccagcgtacttttgtataccttgcattattaggaatagtaaatctgagaatgccatgctagatctacaaacatcagttagtgtcatgcctctgtccat

SEQ ID NO: 80643 - DNA, 418 bp, Glycine max
  unsure (1)..(418): unsure at all n locations
tgatatggncatcaccgacgaaaggatctttatgtgttttttaaagaggcaaacctgatcatcatgctttgataaatgccaaaaagactacggcaaatgaagagggtgagaatgagggagaagcccatgttgtgactgccattcctatacagccaagtttcccaccaacccaacaatgtcattactcagccaataacaaaccttttccttacccaccgcccaattatccacaaaggcaatccctaaaattaaccacaaagcctacctaccgcacttccaatgacaaacaccacctttagcgtaaaccaaaacaccaaccaagaaatgaattttgcagcgagaaagccttagaattcaccccaattccaatgtcctatgctaacttgctcccatatctacttgataatntaatcgtagc

SEQ ID NO: 80644 - DNA, 431 bp, Glycine max
  unsure (1)..(431): unsure at all n locations
atctctgagtcagctgcggcatgcatgcttgcacatagataagactcgagcatgtgtgctatatactctgccgatatatagccactagcacgaatggtttaatatgacaattcaactaccccaccattcaattattatttatcggtncgagtagaagacgataccaagagatttataacattcagtaatcttgtttaaccaactgaattataccctgtggtaccccaccattcaatttacatgcanagcacataatctagttgaataagccagacacaggcaggctagtgatgtgagttgcttggacgagtatgataagataaaatgctgctttgattgacaacctcatatctagatcaaaatttcgtaatttcgtgtcttctttgataacttttccttttttgcactcggggtcgatgactcaatgtact

SEQ ID NO: 80645 - DNA, 439 bp, Glycine max
  unsure (1)..(439): unsure at all n locations
tctgagatctgagagtagaagtggcagattaggattcttattgtatgcatactcggaggaaatgttcttattaaccccagtttgtatataggctccatcaatggtgtaccttatgttaaatatttcatctgtgtactcattattggttggagtacccccgcaatcaatgcttatgaagcctgaacagaaagacaaagcagattaaggaatacaaaattcaaaattcgttaaaatgatcaaaacccgaaattaaaataaagtattgagaggtgaagataagacatgggtggcttgtaattcacactattccatgattgatgataaacaagaacaaagactattgagttntgagttgagaagctcattaaggctatgcaggggaaaatattccatgacatgaattaataaaggtgccgaaaagtaatatgaaaactcatgc

SEQ ID NO: 80646 - DNA, 516 bp, Glycine max
  unsure (1)..(516): unsure at all n locations
agctngcttgtgtggcttctatggaggctggatctttgagcatcattgaggtcctttaatggtgattttccaccatggagatgtagcggaagacaaaggagaagaggagagaggaggcgccatccactagggaataagccatggaagaaggagctccaccaccaagatgagccttggataagaagcttggaaaggatgcttcaatggaggaaaagaaagagggaaagaaagagagaggggggagcacgacattgaaggaagaaaaagggagagaagttgaactttgagttgtgtctcttaagactctcattcatcanagttacaacaagtgttacacatgcttctatttatagactaggtagcttccttgagaagctntcttaagaaaacttccttgagaaacttctttgagaaaactttcttaagaagctagagcttatctacacacacncatctaaactaagctcannnctcttgagaagcttcttaagaagaatcctaaagaagctagagctt

SEQ ID NO: 80647 - DNA, 301 bp, Glycine max
tatcgtgaaggacactggacttggctacgatatggagaataaaaccattgctgctagagatgaatgcggggaagccaaaattcaagtatggattattcatcgaaaatagagattttgtgcacgccaccctttcgctcttttgtattttatgagggattctacttctatttctttgtactttctgctgcaaacctatgcttctctacactttgcttgatgctggaataatatcgggacacaccgacacatttttactgtaacagaaagcagccggctttgaaactttgaacacgggtgagat

SEQ ID NO: 80648 - DNA, 349 bp, Glycine max
ccggactctagcacgagctgcagcttgatacggatggcactgcctgttatattgttgccagatggaaactgtgacacctaatggaatggcgacatgtgctcttctgactatactataacaggcgaatatgaacgacatatatacagaacagtgtacttatgaagctcaaatgacattgctttgttcttttaccacaagcttaggatttcaaagagtattttatgtagacaacgtacacgggtatacctatacatatacatatatatatcatgtgtggtggatatactcgtacctatgtgtgtctatacatatagatcagcactctcacgctgatacttacttcgaaata

SEQ ID NO: 80649 - DNA, 429 bp, Glycine max
  unsure (1)..(429): unsure at all n locations
tctaatctcttattctagtttggtgctgaacatcacacaatactntatggttgcaaactctggtcttgtccacactagtatggagcatgaacaccccacttagagatttntgcaacggagaatcatttgaccaatcgatccaattgttattcgcctaatagcgacagaaagtgccacaaccaaccaccggaacagaaccaacacaaatgtcatactggcgaccatcaatttgaacaagaaaattaagaacttggaacgatgttagttttacaaaattcatattgaatgttcgaattcaaatttaaccggtaccgatttaacttaacttctacgatcattcgtcaagaaaaatgccaattacaattctgcatgcatgtgtttactagataacggccaaatcgtaatgctggctaaattcagtatacgtac

SEQ ID NO: 80650 - DNA, 532 bp, Glycine max
  unsure (1)..(532): unsure at all n locations
atctctgagtcacctgcggcatgcaagctngtgagaagacaatntccttngattgtctcatatgttatgacaattaacaaggtcaatcaccgaaaagcgtcggcttatacttgccaagacctgtattaagtcataggcaattatatgtggcattttctagaatgcaaagtaaacaagggttgaagattntaatacataacaaagaaggaaaacccttaaagacaaccaccaatgtngtctttatggaagtttttcanaacctatagtcaatgtgtaaataattatgtatcattataaactatatatatatagataaaaaattaaccacattgcttttcttgatgcaaactttntgactacaagatcatttttgaggatttttttngaagaaacaattaatattttggtaagtattatacctaanataatcttactaacaatgcataanataattactctttctcattccattanagcttatgttttcatgggtataaatacanattaatttcatgacgtctatcaccaacat

SEQ ID NO: 80651 - DNA, 348 bp, Glycine max
tctaccacatcgtatgctccatctgggaagccttccaagccagaggataagttatttggagaccttgttgacatggcaaaagtgaagccaaaacccactccaggccgagctggtagcatgtaaaaactatattatcgggtttgcacatttcagttctattgctaacttttgtccccgattttccttgatttttatttttatgtttttatattatatataatttttttggttcttgtttcatattgtttgcttgtctgggaattagcatttgattatgtacattcgttctagagaaaacattgagaagtaggggaaaaagggctaaaccattgggttggattgtagttt

SEQ ID NO: 80652 - DNA, 353 bp, Glycine max
  unsure (1)..(353): unsure at all n locations
tgaatcagaaatctgtacctgtcgcaagggtttgtggcttgtgctcctctgctgaccaccatacagaccttngcccttccatgcagcaacctggagcaattgagcagcctgaagcttatgctgcaaatatttacaatagacctcctcaacctcagcagcaaaatcaacacagcagagcaattatgacctttccagcaacagatacaaccctggatggaggaatcaccctaacctcagatggtccagccctcagcaacaacaacaacagcctgctccttccttccaaaatgctgctggcccaagcagaccatacattcctccaccaatccaacaacagcaacaaccccagaaac

SEQ ID NO: 80653 - DNA, 422 bp, Glycine max
  unsure (1)..(422): unsure at all n locations
ntggcaagctagaatcatttaccccatttctgacagccagtgggtgagtccagtccaagtggttcctaagaagacaggcctctcagtgatcaagaatgagagggatgagcttatccccacaagagtgcagaatagttggcgagtctgcattgattatatgaggctgaaccagacaaccagaaaaaatcattttcccctgccattcattgatcaaatgcttgagcgcttggcaggtaagtctcattactattttcttgatgggttttctggttatttacaaattcatattgctcctgaggatcaagaaaagaccacattcacctgtccctttggcactttttgctataggaggatgccctttggcctatgcaacgccctttgtacccttcagtggtggatacttagcattttcagtgactttt

SEQ ID NO: 80654 - DNA, 535 bp, Glycine max
  unsure (1)..(535): unsure at all n locations
accttgagagactcccgccgcagcttaccttctggcctcctatagttggtgcatgagataacatgctctantttcgtctcccactccaagtaggcctccggatcattctttcctttaaatggaggaatgttgagtttaataccatcaattcggttttgtctaagaacaccatcattccctcttctcctcctttcttcttcattatgatctctattctccatctgatccaacctctcatggagtgcatcatctcgttgttcattaacctctccaaatgttgcatcaaagcttgcatttggaattgcgaaagccccactccatcattatgattagtacctgacatctcanacaaacaaatcaaacgtaataagacaattatagttgttgtttgaatacctcacccactcaagtgtatcacacaattatggcttttctctaatgaaacactcttgccttntaccactctaattccctttgagttcttaggcaattcaagagaatatggccacaacaaagaacaattcaccaatatgtg

SEQ ID NO: 80655 - DNA, 449 bp, Glycine max
cctcggacttcctgtgtttgggaacctctccttcctcagttgtacccaaacccaatcacctggttcaagcacgactttctttctgcttttgttggcttgccttgcatagctcgcatttttcttttcaatttgaaccttcacttgctcatgcaacttcttcacatactcagctttagcctgtgcatccttatgcttaaacatagcaatgttaggcataggcaacaaatcaagaggagtcaaaggattaaatccatacactatctcaaatggtgaacaattagttgtgctatggacagcccgattataagcaaactcaacatgaggcaaacaggcttcccaagatttaagatttttctttaaaacagtcctaagcagtgtgcctaaagtcctattgactacctcagtttgaccatcagtttgtgggtgacaagtagtagaaaacaacaatt

SEQ ID NO: 80656 - DNA, 224 bp, Glycine max
  unsure (1)..(224): unsure at all n locations
attcattactactaaaaagatggaaattatatgaacaaacgctatactttagttaggtcatgccatctcctactccggaaatataacangagatatattggtttaatttaatcactganataataaatctcanaaggctcgtacagggttcgagagatntacaaattaaacacactcacatgatcatgttcatgaactcacacgcatattcatgtgtaaatcgt

SEQ ID NO: 80657 - DNA, 439 bp, Glycine max
  unsure (1)..(439): unsure at all n locations
tattacagtccaattgttgaattgcgtggaggcactgagcttgcatctatctacattgcacgaagtnccttgcagcctcaagcttttggagcatttagcacagcatcaatgacaactggttatgtcattttacactaacatggagttccttatgtaagaaaatattctggatagcttgagttctttggtcataatttgtatttacttatgctgccacttgtgacaacattacatcatacgcagatctgggtgcaatttcgttgcttgcagcgtggatctgactattcttctctcttcaaatcttttcaaatttcatactctttccaatagagttgtttgcagttcactatcacacgtccaaactaataactattcaatagatttcaccatcttatctttatgattgcaaacttatctacgggctaagataaattataat

SEQ ID NO: 80658 - DNA, 493 bp, Glycine max
  unsure (1)..(493): unsure at all n locations
agtcacgccgctgcagctttggagtaaactggaccactattttttaaaaagaagcgatctagtcaagctgagagccatacaagtttcctaacgaattctaatttatgtgngccataagtctatcatatgctgacaatagccgagaagcccatgaatctcttcnggggcggagtangtgtctgccatcgccttggccttggcttaacaatcgggaagttctttgactccgttcaggtaagagcaaaccgatccatccacatggttgcctcttggtgtaaagagtcgatcacccttcctctagcctctntntccgcatatacttgagcatactcatccgcgattctatgctcgtgggccgtggctagacctaactcttcttcgtacttggcgatgatagctaacatngtggtctctgtctcgcataaacgctgagacaagcttcttttggacctgaacaacaatcaactcctctttcagaaccatctatgtgctc

SEQ ID NO: 80659 - DNA, 434 bp, Glycine max
  unsure (1)..(434): unsure at all n locations
ntacccttcacttgcaagaaccacttctcataacaacaacacacactcctctgctaatgtccacaacagtctccttagtccataagaaattcataatactgttggatctagttcttttaaactttggcatcaaagactaagccatcctaacaaggatgcactagaaattgtactaaataaatgtaatataccctttatcaataaaactaacagggatttttgtaattcttgctctatagccaaatctcacaaactaccctcttctccctcttccactgtttatactgcacctcttgaattagtattctttgatgtttgggggccctcttcagtagagtcatcttatggattcttatatttcctaacttgtgttgatgcctattccagaatcacctagaattatctgcttaatcataaaattgatgtttctaaca

SEQ ID NO: 80660 - DNA, 424 bp, Glycine max
  unsure (1)..(424): unsure at all n locations
agcttaacattcaatatcgagcgtttcgatatattacgggactgaaccagacatccgagtaaaaagttactgtagtttggagttgctcggagcttcaacattcaatatcgagcgtttcgatatattacagaacagaatcggacatcagagtaaaaaggtaatgtcgtttgaattatgtcagagcttccgtattccatttcgagcgtctcgatatattacgggactcagtcagacatccgagtaaaaagttactgtcgttggaattntctcagagcttcgataatcaatttcgagtgtctcaatatattacgcgactcagtcagacaaccgagtaaaaagttattggtcgttgaattatctcagagcttctgtattccatttcgagcgtctcgatatactacgggactcaatcagacatccgagt

SEQ ID NO: 80661 - DNA, 398 bp, Glycine max
tgtgcaacgtcggctgacaaatagcagtgcggtctttgtatctgccgatgttggctattgtgttttatattcaatccttgaataatatttggctgatgtctattacgaactgttcgatcggcatcatccagtgatgttttttttaaaacctggattgatcatctttcttggccgacgttaactatcatgttttccgatcagtatcggtgaatcatgttttttttccgaggttggctaatttttttcttgctgagcaaatgaaaacatgtcgatgtcggccgaaacacaaattctgttgagctccaacgaaaaaacaaagccgacctacattgttgattttgactgctacaccgaacaaaaaaccatcctctaccacaaaaaaatatttatcgccatcg

SEQ ID NO: 80662 - DNA, 420 bp, Glycine max
gcatgcaagcttctatggatcaggcctcaatctatcttacctatagtacgagggcatgctctcaccctgctccatgaccactggagtgtccaaaaaggtgttgagggaatcggcatcaaattttatcaggtgccctcgaaccctaacttgctttggctctttgtccttagggacatataggtttgcatagaattctttaacaattgccacatcaatgcttaccttatacaagatggtcagttgtttatgacagttccttctaatcaattctcttctgaaatcatcaaacttagtgatatacaacttgacatttctttctggcagaatgttcctggcaagtgtagaagcaaagcttcatgatgaatcatgattgattcatagatgtttcgatgataactaagaccatgacataggtgatga

SEQ ID NO: 80663 - DNA, 425 bp, Glycine max
  unsure (1)..(425): unsure at all n locations
agctttgaataatataatagcataacagaatagtcttgcacgtatcccacagctgctatgtanatagagatactcacagtcactggggcttactacaatactatggcccagaacgaaataataactgaacaacataggagataattgcgaaagttcctaattagaacctaactatggtaagcgctgttgtatgtgtcctctttacgtctataccgaaaaatcaggatatacccgacgtcttatggccgcccaatatttcattcaccaacacggctactctttggacctcatatgtgtggctattggtttaacgtaacagcccaccttttttcttatcacatagtatgtgttttattttttaaacaaatggcccgcaccttactcccacaattatagggggacatttttttatacaccatataccc

SEQ ID NO: 80664 - DNA, 167 bp, Glycine max
cacacacaatgaaaggactaagtatttattacctatacttagcacaaaatacttataacactacccaataaccatatattggaagagcttgatacaatttacacaagttgtatacataaaaggtagtcggtttcatcgactaacactgacagggctcttcacctttg

SEQ ID NO: 80665 - DNA, 191 bp, Glycine max
agcttcttatccaaggctcatctcggtggtgaagctccttcttacatggctcattccctagtggatggcgccgcctcttacctcttctcctttgtcttccactgcatctccatggtggaataccaccattaacggacctcattgaagctcacagatccagcctccgtataagctccacatgcatgccttca

SEQ ID NO: 80666 - DNA, 408 bp, Glycine max
  unsure (1)..(408): unsure at all n locations
agctgggttcgagatacttacnccgtgtagatcgatgaacgatgaagaacgaatgaagaacgtcgaagaacggttgaaatctttgcgaaattcctcacggaaaacgttacggaaacgtttcggaagcgcctcggcttataatttcttcacggaaacaattttccaagcaaattctaaagagagaaaagtgcctcaggggctgaaccccttccttcttgcactcctccnnctattatagcaaaataggggaggtggttgccgcccagctcgcccaggcgagctcagctcacccaggcgagcagggttgctttctccagaagcaaccgtcttctggaggaatattccagagggcccaagtgggcctgggtgctatttgcacccncattnttactaagtacacccccctct

SEQ ID NO: 80667 - DNA, 385 bp, Glycine max
tgccacccagctcgcctaggcgagccaggttgcttcctccagaaggcaccgtggtgccttctggtggaacttcctggaaggcccaagtgggcctaattgctatttgcacacccctgtttactaaatacaccccctgcctttttttgttgattctttttccgtaacgttacggaactttacgaattacgtaacgatacttgttttctttctgtaatgtcacaaaaccttacgtattacataatcatcccttctttggcttctgggatgttacgaaacttcacggattgtgcaacaatgcttccttttgactttcggcatgtcatgaaacttcacggattgtgcaacaatgcttccttttgactttcggcatgtcacagaacttcac

SEQ ID NO: 80668 - DNA, 403 bp, Glycine max
  unsure (1)..(403): unsure at all n locations
ngctttcgccagttaactactactttatatatatattagcgcatattgggatcattttctaaccttaccacgtttggtgacaacactatgaaaacaacgaggagctcatggataatataatatgggtggtgttaacgtgtagagtttccaagttgcaacgtcctttgaattttgatgttggtgggtgtacgtggtaattcacggtggaagatgtggcaatagtggtaagtctatggtcaggtgaaagtcttatacgtgaacagtgataatctctgccatttataggtgtgggctattgggttgaaatgaaccaggcgatactttcttctataagtacaagttacaagtgtctttttttttcatagacaatcgtgtttcaagttaatacaactattattattat

SEQ ID NO: 80669 - DNA, 430 bp, Glycine max
  unsure (1)..(430): unsure at all n locations
tgatcaatacgtacggttccaatggatcgcttttcttccagtaccattctccccgaagcgtttcaaggtgccaaagatgacttcaccatgcagcttgcattggtgtggaaccaaatcaaagcgccactgattgtcccgttgctgagactagcagagtttctgtgcttgatcatgtcggagatgatgttcattgagagagtctacatgggcattgtcatcactctggtgaagttgtttgggagaaagccagagaaacgttacaagtgggagccaatgaaggacgacattgagttgtgaaactcttgtacncaatggttcttgttcaagtcctcatgtacaacgaaagagaggtactattaccaataaggcaataacttagttntgttccctcatcatcacntttaacacttatactattaagcacaacact

SEQ ID NO: 80670 - DNA, 396 bp, Glycine max
  unsure (1)..(396): unsure at all n locations
agctngagaattgaggcttatcgtaccatcaagcttcaacttacagagagtagttcaggcttagcgccacaggtggtaagcgtacttccaagagttcaaaaaccgtaagagaatggtgcttagtgcctcctggccagctaagcccagcttaaaagctcaagttacagaatggatatggggcttagtgcacgatagcacgcttagcgctgctacaatgaaatgtatacagaagaagaagtggcgcttagcgcatcatccacgctaagcccacaggttaaagttcaattaccacaaagatatggggcttagcgcagtgatgtgcacttagctgaactattcagccaaccaatcangggtctctatgcttagcacgagccaagtcagcttatcgcatga

SEQ ID NO: 80671 - DNA, 414 bp, Glycine max
tctcccccaattttctataaatagagggagaagtgaagtataaaaggggtcagccccttatgcacttctctctcttttcgaattgcttaggaaaattgtttccgtgaagaaaatccaagccgaggcgcttctgtaacgtttccgtaacatttccgtgagtgatttcgcgaaggttttcaaccgttcttcgacggtcttcattcgttcttcatcgttcttcagtcttcaacgggtaagtacctcaaactaagcttttcaattcattctatgtacccgcggtggtccacattttgtttcatgtatttttattctccgtttcatttaccttttatacccccttttgacgtgcttaagccatttatttaaggcatttctcgcttaaatctaaaaattaaataaattctcaccgatcgt

SEQ ID NO: 80672 - DNA, 289 bp, Glycine max
  unsure (1)..(289): unsure at all n locations
tgaaagagcacgtgaccttctggattangactatgcttgaatatatacaatatcagttcaaatccaaacttagtggtctttgcatctgaaagaactctcagttggagctgccatgactgcattacatgnttggattaatgacttgtctaaggcattggaatcaggggaggaccttcctccactacttggaattaatactgggcaaggaaaacacaagtattcagacaaaggctttggctagtgtattgaatcacattngaaggaactcaatgctccatttcatgagtct

SEQ ID NO: 80673 - DNA, 395 bp, Glycine max
tgtggagaaaaaggactcctattggatgatacactagcatatgaaggagaatcacaacctatgagatcattgattgctggggatgattcaagggtaaagtattgctccttgctggtttcaaaagaaatagtggttccctggctgctgctattatcatggcatgaattgctttgcaatatttggtaatgagtgtaaggatcaatatcttgtgcaggctgcaggtataaatggataccagctgaagttgggtgcttcttaaaagtttgcatctaaaaagaaattatttactcagtgatcagaacaatgagtggtcaaactttgtaattgtaaaaatgcttcctagcttgctctgatcaaatgcatactaaagtcctacaacaccgttttgctgtatg

SEQ ID NO: 80674 - DNA, 420 bp, Glycine max
  unsure (1)..(420): unsure at all n locations
tctctttggggtctgctcatgggttcttttaccaaactaattctaagctgatattcacgggaagttggaatctttattcccagaatgaccctggggaatttttctggtttccttcctacctttggtgggaggatatcttaatctcctctatactggacacacttnncttctctcttcattaaactntcttcttatagagatctgaacttgtggaatttgtgtccaggttttgcaacagtngcagtctatgactctgatgaccaatctcataattnntcttttggttctcttttggtatttctcaattacacatcccgttgttatactctngtgtnttaatcccttctatactagntgntcattgtgcttaatatagtttcttctattttaatctcatgcagctntttgggttcaaaaatc

SEQ ID NO: 80675 - DNA, 433 bp, Glycine max
  unsure (1)..(433): unsure at all n locations
nttctgtctcaatcaatctgtctactgactatcatttctaattgtaagcttacattcttgttctttctttgtctagcatacacacttgctcaaactcatgataaaacacaagcttcatttcaatcatgcattcaatccacaatcaccatttcaaaactatactaaaaccgcattntcaaggagtcaagttaaactgttatatctgcatcaggactttcaaaatctttccaaaacaaaaagtatactgtaaaccatattaacataccataaaaccataatagttcatatgtactaaaaaccgtacaaccaatataccacacaaacataataattaaaatgtactanaaacaagataattataataataataataatagaaggacatggtattagatcctgtcattcatcctgatccctatcctcatcatcaaaa

SEQ ID NO: 80676 - DNA, 363 bp, Glycine max
  unsure (1)..(363): unsure at all n locations
tttcatctgcacaactcacatacaaaactatcacgaacacaagatttcaccacaacaacggcactcacgaacaggaagaacggcaccaacaggcaacaacaacgctcactaccacngatgaaggcaaacgatgaccgaaatatggaacaagcactgctcacaggaagacgaagaagcaaattgctagaggaagaggaagaaatggcgtcaggaaatgaagagaagaagcaaatgtgtcgtacggacgaaacttatgcatttatattattagggtgaagggcttatatgccttttcaccacacctactgggtgccccagcaaatatgttaggtgcacaaagtaactcccctcaagaaactatat

SEQ ID NO: 80677 - DNA, 442 bp, Glycine max
tctacttatgtggcagggcgggcttccttcactttcttgtctccaacgcgagctctgaccactggccttccttcctgcggtgcttcttttcatgtccgcttgagtgggcttataacctaaaccatatttcccacgatttcctttggtttttatcaagctagttatgccgccattgtcttttgctaaacccatcccgggttcataaccggtccccaacataactcgggccatcattaccgccgcatcggacagacaaggttgcccaaagagggagtccacggaggaaatgctgaccacctcaaaagactggaaagcgggttctaacgattcttctgcggcttccacataaggcatggaggatgggcagctttacaagatatcttcctcgcctgatacgatgaccaagttgcccttcactacgaacttcagcttttggtggagt

SEQ ID NO: 80678 - DNA, 514 bp, Glycine max
  unsure (1)..(514): unsure at all n locations
actatcacaagcacataaacacattactctatttatgcatcacacgatactctatctgaaaatggatcttttactctgtacctgcaaggactgctgacccttccacctgatagttcattgaatcaattgacaaaatatatcataagatataagtctcagagttcataaatagagagagccacacggtcaaaataagcaaactaaccatgactgcagaaacaaatattgaaataaataatataccactattatgtgtagtggatctttccaattnttgtacctaaaactcgattttcttgttaaccaaggccaaaaagaccaccaaaacgagacttgtcaaccacttgagagcctaactgaacttgcttagaaatataatttgctcttaggaacttacaatgttattacctcggtgaaatatagttgcaactggcaatccaagttacataatggatgttcaactctaacttcttaagctctaagaataacttcanaagtgatatgaagaattacg

SEQ ID NO: 80679 - DNA, 429 bp, Glycine max
  unsure (1)..(429): unsure at all n locations
ngcactgcccagagtggacaatcttctaganaacgttgaagccaccattgatgtcccttatgatgtcgttcagtatctcaaaaaagcctacgatgatttggaagaacccttgacctgttttctcaaatcttgcaaagttgataggcatttctatgacctaattctcttctgggtaggtactttggcttctaaaattggtataatgagttccttttacaacatctgtacttcaccatgtatgggcttcatcagacccccttcagttctcatgggtgatgatcccgcctgagcaaaaatcaaagattcatagttcctccgttgtggatctctttttcgacaattgtggcatattgacactttaagatgaagagaaancttgatgttgactctgataatgacttaagcatttatgacatgtaccattttggt

SEQ ID NO: 80680 - DNA, 296 bp, Glycine max
  unsure (1)..(296): unsure at all n locations
gaaatcatgatgaacttaacactgaagcgctgagattccatatgctgaaagtattaatggacaaaaagcatacacgcatttataggtcttcttgaaaacgcatatacactacaancccctatgccataacttttcagatcttaaacaatggattagataaacataatgttatattctggctgtttgggccgatataatatataaacatatgtattttgcttgatgacaaccaggaggaacttgtaatacttcagactggcatgaactggtgagtgttaagtgcatatgattattca

SEQ ID NO: 80681 - DNA, 434 bp, Glycine max
  unsure (1)..(434): unsure at all n locations
gatccatcctcttctctggtggttttatgtcatcatattgttatgaattagatcacataaattctgtaggacaacaccatgtgacatattgtatgaccttatgctccatatgtcctctgactcttatcttatacactaattgttgaagtagccaacagtttgttacatatcctttcatctatatatattgatggctgcaagaacttangaccgaatcgtccatgtcttgagatatttgaaattcaaacactttcatgttatatttgcttagttnttttattatctgtcttggttcagtgctgcaagtcatcttaacttgtaccaaaataaaagactaaacaatctaaataacaaataataaaatatgtttagtcttcgtacttatggtgaaacttggctttagtccttcgaccttaacatataagttctgatgt

SEQ ID NO: 80682 - DNA, 233 bp, Glycine max
aagcctacccttattgtttgcctacggacttcaatgctcgtaccgattcagacgatatgagccaagcccctaccttcaggggcaactccgtcatcatgctgactatcctctgcaagaagatgatgaacgagatgcccatttacgccctgtacttccactcgaggatccggtccgacaagagttgccccggccaaacataatccgccactcacccattaacgaatatgtccctt

SEQ ID NO: 80683 - DNA, 241 bp, Glycine max
cgacaagccctctaaaagacagcatcgaggggcagaagatcggctaagcgcaaacctcacaaaagaaaagagattaccgaagatcgaaagaggagacgaatacgcgcacaacaacaaagatgaccccgaagggtgcataaaccacactcaaaccacaaaaacaaaaccaatcgatggcggcacgacgaacaccacaccaagaacgatgtcgaggctgaccacacgcatgatgcacgcagcg

SEQ ID NO: 80684 - DNA, 455 bp, Glycine max
  unsure (1)..(455): unsure at all n locations
tactctnatcagactntgatggctatggacttgaacttctattcgactacccgggctctgtcaagctctgcctttagggcttgtacctcatcactttcttccgaagctttaacctcatcgtctctcacagtctttagatgtgggagccaatccaatccttgtgtccggactctcagccacttatgatagccgccgatgctcccattactgcttcccctaagctctatgtcctttcttcacgccgcatcccatgccttgcgaactccttggagtaccctcgcgttgtggtcactaaaaccccgtgcgatgaaaggcgtgatgctatcgtctaatggcgctcctctcatggtgtagccaagctgtcttatggcgagaacgggaatataattaatacaaccacttgttcccatcaagggaacatgtggacatacttcgcatgaagatagaatcttgat

SEQ ID NO: 80685 - DNA, 374 bp, Glycine max
  unsure (1)..(374): unsure at all n locations
cttgagcctatgttgccctttctttgtattgcagctcattacaagccttaagcgaaaaaccatgagtacaccttacccttaaggaattcttgagctttgaaattgattcgggaataagtgtggcggggtatgtatcattggaagatatgattattggccatgctgaatgttattaatgttgcccatgcacgatgaatatatatatngcctagcacatgctttaatcgtcaaattcgtactgtctaaaacataaaagaggaagcaaatgataaaaactcaattgctgcacattatgcatattcctactgttaataaaatgagacataagaacaagtaangctgaataaatgaggacttgttatgaggacttgatt

SEQ ID NO: 80686 - DNA, 387 bp, Glycine max
caagctgtagcttggtagatgaagggtcattaatagcttatttatatatatatatatatatagcgtacccgatgtagagtgtataattctcttttggttgtattaatataacagagtagtatacggtcattattatgtatcacaactatccacattgaattagtgaacatagttgtttgtgtcgattctctatctcattcttgccttttcatctcctcctaaaagttgaacatattagtcataccacccgtatgaccagtgtgtcagctgttggtttcatcttgtagcgctcctagcatatggataatggaactcctttattagcgacttttcatactgttgttagaggtgatcattcaaagccactattcactattatctgaattc

SEQ ID NO: 80687 - DNA, 508 bp, Glycine max
  unsure (1)..(508): unsure at all n locations
agcttaacanaaggcatgcgaagtgggtggaattttatagctattcccttatgttatcaaacatanaaagggaaaaggaatattgtagccgatgctctttctcggcgtcatgcattactttctatgcttgaaacaaaattgattggtcttgaatgtttgaaaagcatgtatgaaaatgatgaaacttttgtgagaaattttaaaaattgtgaaaaattctcagaaaatggtttctttagacatgaaggcttccttttcaaattgtgtgtgcctaaatgttctactagaaatttgcttgtttgtgaagcacatgaaggaggtttaatggggcatgttggggtccanaagactctataaacattacaagaacatttttattggcctcatatgaaanaggatgtgcagaaattatgtgaacattgcattgtatgtaaaaaggcaaagtctaaggtaaagcctcatggattgatactccattgccattctggagtatcttgatngattatca

SEQ ID NO: 80688 - DNA, 343 bp, Glycine max
  unsure (1)..(343): unsure at all n locations
gtattttcatgtattttttcatggnggtgagcttaactattataaggggtgtgtagctaagctctaacttctcatctcaaggaggtgaccttagctattaaagaggtatatgtagctaagctctagcttctttacgaatcttcttagngaagcttctcaaggagctgagcttagttatgagagggatgtgtgtagctaagctctagcttctcatctcaaggaggtgagcttagctattagagaggtgtgtgtagctaagctctatcttctttacgaatcttctcaaggaagcttctcaaggaggtgaacttaattattagaggggtgtatgtagctaagctct

SEQ ID NO: 80689 - DNA, 399 bp, Glycine max
tcatacaattaatatagaacctatatcctaatgtcacatcctatcagagcgtcgggttcccgtgttctctagcatggggttcttcatagtcatccacctattcatctgctcccccgaacacaagttcaagatcatcacaggatccaaacacaacaacacacagggagtgagttatcacattcctagctaatagagaaacaagacaattaaatatacatattatataaatgagataccacttgcttaaacatagctcacgtaacttcaccacttcgtcattcaaaattcacttttcaatcatcaatcacattacacaagaatcccacacttcgatcaagatataataacacatcaattagcaagcatatgcaacagttatgttaagactcaatcctatat

SEQ ID NO: 80690 - DNA, 452 bp, Glycine max
  unsure (1)..(452): unsure at all n locations
agctttggctgcgcagcagctctgatttcttgagtatttatagaagatgacacattgtaatcaattacaggtattagtaatcgattacgggcccaataagccttctggtaatcgattacaggatgttgtaatcgattacaggctgcctgttcatgtgtaatcgattacactggatggtaatcgattaccagagcctatcctagactagtttctatgagaatatctatatntatgctcanatacatcctgtatgactaattttcactactaatacactaaattcaatcattcaattactacatacacaagagatcataaattctattataaaaacaagaattcaaacaagatcaaacaaaataatctacaatcaaaaagtaaaagtaaatcaaccaatcaatcaaccaatcaatcaaccaatcaatccctattnttctaaatctcttacatct

SEQ ID NO: 80691 - DNA, 343 bp, Glycine max
  unsure (1)..(343): unsure at all n locations
ctntattttcagtacatgaagatgaatccgtggccacctcatggactcctctaaggacaatagcatcatttcttgcactgaattgttgggagttggaagccatcttctcaatcaaattcctagcttcagcaggggtcatatcaccaagagctccaccactagcagcatcaatcatactcctctccatgttgttaagtccctcatagaaatattgaagaatgagttgctcagaaatctggtggtgaggacagcttgcacacaatttcttgaatcttttccagtacttatacaagctttctccacttagttgcctgatgtctgaaatgtcctttttgatggcagt

SEQ ID NO: 80692 - DNA, 460 bp, Glycine max
  unsure (1)..(460): unsure at all n locations
agctntaannattgaataatacgttagtaactgctggtaatcaaatatatgtgtaatcgattacacagtgcannatttgaactcaaattntaatagctgttgtaaatcagttttggccactagtaatcgattacatcctctggtaatcgattaccagagagtaaatctcttganaaagactttttaacttgaatttcttggccaaaccttntgctacttcaattggaattctcttcctatntaatatactcttcctaagactctagagactgtcttgatcatccatcttgaatatctttgatttctttgtcttgaataaagctttgagaaacatgcaaccctttggcatcatcaaaacattcagcttgatcctttgtctacagaacaaccaccataattgaggacgcgtttataatattgtaataggcaatttacttaccttcattgctttcaaagtttg

SEQ ID NO: 80693 - DNA, 316 bp, Glycine max
  unsure (1)..(316): unsure at all n locations
tggatntncatttagtagggaatctatcctttctangattgtgcccaacccaggccccttcattaagaactagctcttttcttcctctattgcccttaggtgaatacacctttgtttggttctctatgtggtcttaaccctctcatgcaacttctttacaaactctgacctagattccccttctttatgtataaaagaaatgtcaagtggaaggggaatgaggtctaaaggtgttaagggattgaacccacagacaacctcanaaagggattgcttgtgtggtctatgaacccccctattgtaagcaaattctaca

SEQ ID NO: 80694 - DNA, 400 bp, Glycine max
  unsure (1)..(400): unsure at all n locations
gctcttccttgcgagccctcttggtttcttgttcaagggctctggcagtagctgcattttcttctcgtaaccacgcacactctttacggacgtttgtagcgaccaacttgaagttttctttggcaagcttgcttttctagtctgtttagactcgacttcttcatctcttcggagcttcaaagttctcttcgttgataatctttaacttggaaagccaatctaaccctcgtgtacgaactttcagccattcatgataaccaccgatgatgccattacgaatgcacctaagttctntatctttccttaacgggctttcccacgccttatggactctttgtataaccatgaaactntgtacgccgaaatctctcacaaggaanagagacaggctttcttccac

SEQ ID NO: 80695 - DNA, 417 bp, Glycine max
tgccacccagctcgcccaggcgagataagttgcttcctccaaaaggcaccaccttctggaggaacttcctggaaggcccaagtgggcctggttgctatttgcaccccctatttactaaatacacccctgcctttcttttgttgattctttttccgtaacattacggaactttacgaatttcgtaacgaaacttgttttcctttcgtatttttatggaaccttacagattacgtaatcatcccttttttggctcttggaatattatgaaaccttacggattgtgtaaaaatgcttccttttgatttccggcatgttacggaacttcacgaatcgtgcaacactgctctctttagacttctggcacgttatggaactttacatattgtgcaacaatggggtgccaagtacctcgaagcg

SEQ ID NO: 80696 - DNA, 265 bp, Glycine max
  unsure (1)..(265): unsure at all n locations
ccccttgctttctttgacatcatgaatcactttgatgtgcatctagtcagagaaatcaaatgttgtggtccagtttatctacggtggatgtacccggttgagcgatacatgaagatcttaanagggtatacaaaaaatctatatcgtccagaagcatctattggtgagaggtacatagcggaagaagccatttgaatntgntcagaatacattgagaaggctaaacctatngggccttctgagtctcggcatgatgacagggtgg

SEQ ID NO: 80697 - DNA, 353 bp, Glycine max
  unsure (1)..(353): unsure at all n locations
agcttgtggagcttctatggaggctggatctttgagcttcaatggggtctctttaatggtgattntccaccatggagatgcagcagaagacaaaggaaaggaggtgagaggaggcgccatccattaaggaagaagccatggaagaaagagcttcaccaccaagatgagccttggataagaagcttggagaggatgcttcaatggaggaaaagaaagagggagagaaagagggaggggggagcacgaaattgaatgaagaaaaagggagagaagttgaactttgagttgtgtctcacaagactctcattcatcagagttacaacaagtgttacacatgcttctatttatagact

SEQ ID NO: 80698 - DNA, 305 bp, Glycine max
tgagctattatggtatcgcatatgtctctatacacacgtggaaggtgatgccatgcctcagcctatatatttatgacatacatgctttcctatttagtgcatataatgaaatatctcacattcaactctatatatgtaatgagagttatgatcttatgatgatgaacctttgaactagatactatgcattgaataatataacagttgccctggaactctatttgttaccaaacaaaatgtgtataataacaaggtgatctataaagcccttgccgtatgttctttctttactataccatatctta

SEQ ID NO: 80699 - DNA, 384 bp, Glycine max
  unsure (1)..(384): unsure at all n locations
actcaagactagtagcctactctttaatggtctcgcactccttcattntctggatcttatattctctaacctgatatagggcttgcgtgcctttaatcctttcatctccttcatatttattatggaggaaactccatatttcatatgttgatttgaaggtcatgagtctagtgaaaatttctcttgacacaacaacaaatcaagtagcttttgtccttgactttcttgctttcatttgctttttattttttatctgagccattgttggattaagtggtcagggaagaacttagcattcttcctcaacagcgtcccagagatcatttgccttaagatgtgcctccattctcgctggccagaattgataattatcgtgctctaaca

SEQ ID NO: 80700 - DNA, 440 bp, Glycine max
  unsure (1)..(440): unsure at all n locations
aggttcccaacgctctgttcaagctctcccaaaatctagaggtaaatctatgatctttgtcagatactatgctagatggcacaccatgtaacttgacaacctcacttatatacaaggtggtcaacttctccaaggaaaatctgatattaatgggaatgaagcgagtagacttagtcaatctgtcaacaataacccagatagaatctaaacctctaggggttctaggttgtcttaccacaaaatccatggaaatactgtcccacttccactggggtatctctaagggttgtaacttcccttaaggtctctgatgttctatcttaaccttctgacagactangcatgcatacacaaactcactaacctctctcttcatgttgggccaccaaaacatcatctttaaatcttgatacatctttgtagcaccaagatggatgctc

SEQ ID NO: 80701 - DNA, 356 bp, Glycine max
  unsure (1)..(356): unsure at all n locations
tatgtaagaagcaaggttttgttgccctatctactactaaagcacaatacatataagctgccagttgatgcacttgactcctttggataaagaactagcttgaggatttcagcatctttgagagtaatattcctattttttgtgataacaatgacgctattagtctttcgaaaaatcccacattgcattcaagggtcagacatataaaaattaagcattattttataagagaccatgcttacaaagggacaatggatctacaacttctaccaactgatgatcaactagctcatatatttacaaaacttcctactgataaaagatngattcttcttagaagttaactcggaatgaac

SEQ ID NO: 80702 - DNA, 280 bp, Glycine max
ttatgcgagacatattatcatacaaagacaggatatccataactcgactgcgctattacatccatgctatatgcagctaaatcattgaacctgtgaaggtagacgatccggataatgaagccgctaatatactgtgccagtaggagatgtatatatcacctgcatctttcgcatcaagaatcacttgattgtgcatctacacaaaagaatcaaatgtggaggccagattatctactgtggatgaacccggatgagcgtacatgaatatttaaaaggtata

SEQ ID NO: 80703 - DNA, 429 bp, Glycine max
  unsure (1)..(429): unsure at all n locations
tgtccttgngccattcgaacactgcttgtgccttgtcactctatttaaattcttccttcttagtcaactcagtgagtggcttagccatttttgccataatccttgatgaagttcctataatatccagtcaacccgaggaagcctcttactcccttaacattcttaggtgtgagccacttttgcacacttttcaccttgttaggatccacgaccactccattttttgagataatgtggcccaagtattatgcttccctttgaccaaacacacgtttcttcctattcacaatcaactggtggtgctgtaacacttgcaacacttctttcaagtgattcaagtgggctgtccagctcctactatacacaaggatatcaccaaaaaataccagaactgtcttcctcatcatagaattgaaaatttcattcatc

SEQ ID NO: 80704 - DNA, 409 bp, Glycine max
  unsure (1)..(409): unsure at all n locations
cactcanactagtgaacctactatataaaggtcgtgcctaaccttctctacaatggcattttctctcaatgagctggngaagaagaatgcggcatttacctgcggtgaanaacaagatcaagcctttgctttgctcaaagacaagcttactaaggcacctgtgctagctcttcctgacttttctaaaactctggagctagaattagatgcctctagagtgggagttggagctgtattgttacaaggtgggcaccctattgcttattttagcgaaaaacttcatagtgccacccttaactaccccacctatgataaagaactttatgccttaaaagagccctccaaactgtgaacattaccttgtgtcaaagaatttgcattcatagcgatcatccatcactaaagacat

SEQ ID NO: 80705 - DNA, 269 bp, Glycine max
  unsure (1)..(269): unsure at all n locations
tgtccgtgaaaaatcactaanaaggattctaaggttcaatacctcagtttttctcaccaagtaaaaatggaccacttttaaggtcaacgccttaaaaggaccaccttcccaataaaaagaatccgttgattcacccttttgaaagaactacgtanggctgattttctcttcgatggagggtacctaagaacaagggccccgcttttgtcgacctccaaaataaaaaaaaaataaaaagttagataccccatttcacacaattctaattt

SEQ ID NO: 80706 - DNA, 384 bp, Glycine max
  unsure (1)..(384): unsure at all n locations
tgtattatgatatattaaatttcattgaaataattgtattataagaatatgattntttagttactttacttaaaaataaatgagttattttatcaataaaaagattaggtgattgatataagaattgctaagattatttaataattatgacagaaagtctagcagttccatatactaatataaaggattacaagattattattgtgaagntgtttattatattagtttggataaaatatttgttatatttgaattggtgatccttgagaatgatttgaactaccatgttttatcttattctatctttaaagaanataaaatattagataatgttaataattagataaatctagataatagagtagaaaaagataagaaagattt

SEQ ID NO: 80707 - DNA, 353 bp, Glycine max
  unsure (1)..(353): unsure at all n locations
caatctagcttacattctgcacacgtacaatatgaaaatccatttaaactcaaggaggtacctttggggtacctcaaaccaacattggttgtgcccttaacgtacctactaatccttttgacaacattgagatggtatacctcgcgagtcaatttacaccttctcatatgctcacacttagcatgacgtcaagttggcttcgaccaaatatatgagataatcatncatacctctatactctgactcatctaccgatctacctatttcatccaagtcaagataaatggatgctgccattggtattgtttcttccttacaccttttcatattgacatactatatcaactctgcat

SEQ ID NO: 80708 - DNA, 434 bp, Glycine max
  unsure (1)..(434): unsure at all n locations
ntctcaaggaaatttcttgcacaaacaaatattcgaaaagttattttacaaggaaatgccattntaaagcaaagcctagcaacaacagcctacgaccctttccgagtgtaaacctagaacaacttatatacttacgggcatacacgcatattcaaggtattttcgctacctaagaaatacacatgcacatagccaaggcatttgctaattaagtcaacaaggcatttcgctacctcaaatgaataaggtatcttcgctacctaacacaacacacatacatttcatgagacatttgctacctacacgcaacacacatacattcacgaggcacatgcaacatatatacantttatgaaggcattttgctatcanaatttacatacacacattcaagtantttgctacctgaatttatacatacacgtatttcagta

SEQ ID NO: 80709 - DNA, 60 bp, Glycine max
tgctaagcgcaattccaacccaaggaggtaattcacttagcgcgaaatgtcgcgcttagc

SEQ ID NO: 80710 - DNA, 273 bp, Glycine max
  unsure (1)..(273): unsure at all n locations
ttgacaacatttaaatggtattccctgggattntattatatctttcacatatgcacacacttagcatgatgtcaagttggcttgtagtcaaatataggagataaccaatcatacctctatactttgactcatctaccgatttacctttttcatccaagtcaagatanatggatgttgccattggtattgtttctttcttacacttttccatatngaaattcttaatcaattctgcatagtacttttctcgtatacgtaggttccatgcttcat

SEQ ID NO: 80711 - DNA, 433 bp, Glycine max
  unsure (1)..(433): unsure at all n locations
ntagctgctatganaataacagttcaatatgtagtgatatatcatacattaattccccacgggttgtgtcccaataaatttctttacaacaacccgttatggatcttgcaacttaccaagttgcaaaaaatacagcagggagctcggttacatcggaattttgaatgaaataaatgaaattaacttttgagaaattatgtctgtaactctgtatattggccttgccgaactatagatattcatagaaacttattgatggcaaggcaagttggattgcagaagatatgcaactcttatttttcaatatccaaaagccattctgctttggcagagggtcatcagtcaaatggatgttcattacnggaagatcagatcataattaatcagctttcattgcaacttcatctctctttgtcctagtgntgtcctgact

SEQ ID NO: 80712 - DNA, 304 bp, Glycine max
  unsure (1)..(304): unsure at all n locations
atcttattgtgtggatatggngcccactgagagtgagaacgcgtggccctctaatggtganggcgtgcaccatttgaagcgagggcgtgtatcccactgaatgtaaggacgtgtagtcctctataggtgangacatgtagtcctacgaaggcgagggcgcgtaaccctctgaagtgaagacatgtattcctctgaagatgaggacgtatagtcctcggagccgagggcgtgtagccctctaaaggtgaggacatgtagtcctctgaagatgatgacatgtagtcctcggaaggtgagggcgtgt

SEQ ID NO: 80713 - DNA, 455 bp, Glycine max
  unsure (1)..(455): unsure at all n locations
gacactcacaatactcaagcttctccacagggcatggttatttccagtttcctgaanatatctaagaatcttgctcaatggcgatccttctccttcttggaaggtaccacaggatatggtacttccgcacctttattcacaactttttctcttttcttctctctagcttggtcacttctactcctctcttcattcttattttttttttcatctttttcattttttcccattttttcattgtctttttctttttctacttctttttctttttcttggtcatttaattcttttttcttgaccattatttgnttttctttttcctgattgctttcacctatcacctcatctttctttttatcagtacctttcttttcagtagctttcttcttggacaagacactatcctcttcctctgcttcacaaacctcttactctttgtcatcacagctttgcat

SEQ ID NO: 80714 - DNA, 349 bp, Glycine max
  unsure (1)..(349): unsure at all n locations
gtcttacagaatgcctaaatgtttattacgggataaccacttctgtgtatttccgcnnccgtcagcgtgacttcannaagtcacgtatgacaagatcttgttgagcacgggaagatgacgtataatcaccgcgtgtaaaccgggcttgttnggccgcgattgaccgaatggctgccagaagacgaacgttaagtctctaccgtgctatcagagcttttcgtcttacagacaggaaaaagtttatacggataaccactcgggtattttcgcccgtcagcgtgactcaaaagtcagtatgacagatcttgtgagcgcggaagatgacgtaaatctccacgtgtcaacgggc

SEQ ID NO: 80715 - DNA, 382 bp, Glycine max
ctcaagctagccgcccagctcgcctaagcgagcaaaggtgcttcctccataagcaatagccttctggaggaatcttctggagggcccaagtgggcctggttgctatttgcaccccccttttactagatgcacccccttctatcttttttggtaattctttttccgcaacgttatgaaactttacgaatttcgtaacgatacttattttccttccgcaaggatacgaatccttacagattatgtatttactcttttttagctttcgaagaagttacggaaacttacggattgcgcaaaacacctcttttcaatttccgtctcattacggaatttcacggattgcgcaagcctgcttccttttgatttatgacacagtctcagg

SEQ ID NO: 80716 - DNA, 355 bp, Glycine max
  unsure (1)..(355): unsure at all n locations
ggatttgtgagttgattntagccttagatacactatggtttttattcaatngatctaaggaaacttccaaagaaaaacgtctgattgattttttaattatcttattcaaagatatnttgattattttattattatttctccattttatggtttaaccgtggttacaatgtgaatgatcggttagattttgttttaacagtgattaaacgagattacaatgcaaatgatcggctganattcgttttatcattcattacgtgagacaacggcttanataaatgattaagcacgttaaaacggaagacaagacatcgaaaatgaacgaaatgagatgaagcccacaaacaagaaatga

SEQ ID NO: 80717 - DNA, 332 bp, Glycine max
  unsure (1)..(332): unsure at all n locations
catacattggattacagatcagagcgaaattattctatcaagccgaaangacgacgacaagatagtaaggcactaaaccggccacacagcatacaaataagtatgaagctcacctgtgagaaatcccatgacaggtataggttccaaaactttctcagtgctttcaagtctttgcctaaaacatattaaaaaaacttagaataattntttctccaacttagaaggagcacgttgcaaaaaatgaagcattaaaaatgttaaagaaatggaaaaaatgagaacaccatttaaatcattgctacctaatatacttgcttgaaaaaggatctctc

SEQ ID NO: 80718 - DNA, 421 bp, Glycine max
  unsure (1)..(421): unsure at all n locations
cttcgtgtcactactaaaaaatagcgctttagcgaccaataaattccgtctctaaatcattaaattcggtcgcaattagtatttgtaaccaaaatagcgaccgactccattacgttgcaaaaacccaagtcgctaagtccgttgtaaccgaatttattttcggctgctatttagcgaccgaactagtgacacactaaaataataatttcggtcactatgtagttggttgctattttgcttggtgtaaccgacattgtctgtcgctaattcgggtactaatatgtagttatattttaaatttaanataaaatcgaaaaatattcgggtgctatttcagtcgctatcatataattaaaattaaatataaactaatttcaaagggtgtcggtcgctattgaataatcattttcatatataattt

SEQ ID NO: 80719 - DNA, 431 bp, Glycine max
  unsure (1)..(431): unsure at all n locations
ngcctgtccgatgcagcagtaatgatggcccgagttatgttggggaacggttacgaacccagaatgggtttaggcaaagagaacggcggcataactagcctgataaatgccaaaggaaatcgtgggaagtatggtttaggctataagcccactcaagcggatatgaagagaagcatcgcgggaaggaagagcggtggtcaaagctcgcgttggagacaagaaagtgaaggaagcccgccctgccacataagtagaagctttataagagcgggtctgggagacaaaggtcaagtggtcgcaatatgcgaagatgatgttccgagtacatttggattggtacgaccatgccctcctgatttccagctgggaaaatggcgagtggaggaacgctacgcaacgagcataatgtanacctttacggtttaaaagct

SEQ ID NO: 80720 - DNA, 354 bp, Glycine max
agctacgcgagactatagactactctcgcgcctataaagcgcccgactcggacatccgcagtgagaagctctgacgatattcatatcgccagagctatccacgctgatgttcgagcgtggcgctttatattacgcctggctcggacctgaccgtgagaagctgtgaccatatgaatctggcgagagctttcgcacggcagttccgagcgtgcgcatatgttgtgcgcctgattcggacatcccagcgaaaggttatgaccaatttgaatggtcaagagcttccgacggaagttcagagcggctcgatatataatggcccgactggacatccgtgtgaaaagtttgaccaatgaa

SEQ ID NO: 80721 - DNA, 459 bp, Glycine max
atatgaatcgggcttagcgcaggcttataacaaatttaaataatctatactcgatctataaaattaacatgagattataattccatgttctagttataaaattacattaaatatttaaagacaaaattaatcacctataatgattatataaaactcgagtttggtctacacacacaaaaatgaaacattgtctttatagtccaagttcatattgttttgttaactttgtatttttaacattcgagacatacaactgtacgtactatcaagcagcggcacgttgagtaagtctaggaatactcgtgagatccaatatatagaaattaataaatatttgaacaacattcaagtcaaagtttatatatttaaatatttctactataaatctaaacaaatcttatctcatttaaaaacaataaaaaacgtattactgcgtttgttcattttattttaccctac

SEQ ID NO: 80722 - DNA, 382 bp, Glycine max
  unsure (1)..(382): unsure at all n locations
tctccccctatttgctataaataatgggagatgngtttatataagggttcagcctcttaggcacttctctctctctcgaaaccgctgcggaaaattagttccgtgaagaaaatccaagccgaggcgcttccagatacgtttcatgagtaattacgcgaagattcttgaccgatcttcaagattcatcgtacattcttcgatttcttcagtcttcaacgggttagtacgctcaaccaagcttttcagttcattctatgtacccgcggaggtgcacatattgtttcatgtattttttattctcgttctcatttactctctatacctcattatgacgcgcttaggccatacatttaagccatttctcgcttaatctaagaataaa

SEQ ID NO: 80723 - DNA, 423 bp, Glycine max
  unsure (1)..(423): unsure at all n locations
aaattatactcgattataaattaacaagagatttaatttcaagttctagttataaaattacattaaatatttaaagaanaaattaatcacctataatgattatataaaactcgagtatggtctacaaaaaccaaaatgaaacatttgtctttaaagtctaagnttatattnttttggtaactttgtatttttaacattggagacatagaactgtacgtactagcaagcagcggcacgttgagtaagtctaggaatacacgtgagatccaataaatagaaatttaaaaatatttgaaaaacattaaatntaaaggttataatatataaatatttctaactataaatntaaaaccaaatttatcccatttcanaaacaataaanatagggttttactggggtttggttcaattttaattttaccc

SEQ ID NO: 80724 - DNA, 441 bp, Glycine max
tgtagaaaattttactcatgcttaagccttcatgttaggaaccacttaagaatcaacatgcaactttgaaaatgtataataaagtcttttcctggcttccatagggttccaaaactcaataaacttcatataaagccaacatttgagactcaaagttgaaaaccaatcgtttcaaacaataaaactcattacaattcaaagaataagcttcctttaacgattcaaacacaaaagatgactttgcaaagaaggaaaggaaagaagggtgagctttaggtccaagagaggagctttcctccactcctacaacaaccacactactgatgcatcaaccaaaccccaaagtcaaccaaaaatagaattacccccccccccccccaaatcaaggttttccatgaacttccatgggtgctaaagagaaaaatgaaaatggaattcaag

SEQ ID NO: 80725 - DNA, 308 bp, Glycine max
  unsure (1)..(308): unsure at all n locations
agatgatcacaattatggtagatatgttacccacgttctactatgaaaagctgataggctacatgccaactaactttgcggatctcgtcttcgccggagaaagggatgaatccggactacgaanaggcaagttcgaatatgcttccaatgtggcccccaacaacaacagaagagccccaatagtgggcgtgaggaaaaaggaatgagatgcccacgcagtcaccaccgtcccgacgtggatgaaagcaccccanaatatccaaagctcataccagcctaatcccncannattttaatccgagccggga

SEQ ID NO: 80726 - DNA, 445 bp, Glycine max
  unsure (1)..(445): unsure at all n locations
tgcttgtggagcttctatgaaggctggatctttgagcttcaatgaggtccttcaatggtgatttttcaccatggagatgcagcggaaggcaaaggagaagaggagaggggaggcaccatccactatggaataagccaaggaagaaggagcttcaccaccaagaattgccttggataagaagcttgaagaggatgctctaatggaggaaaagaaagagagaaggggggagcacgaaattgaaggaataaaagagggaaagaagtggaactttaaagtgtatctcataagactttcattcatcaaagttacaacaagtgttacacatgcttctatttatagactangtagcttccttgagaagctttcttgagaaaacttccttgaaaagcttctttgagaagacttccttgagaagctagagcttagctacacacacccctctcat

SEQ ID NO: 80727 - DNA, 361 bp, Glycine max
tgtcgtctaagcattccggttacttcaagatgtgagttggatagaatatcaactttcgaatcctaagttcccattcttcttccaactggagtataacaaagccgagtcttcatacatttgatagcttacataaaattaatggtcggttgaataccagggcgcacgcttcatattcggccatatttgtggtacaatcgaaacccagcctggccgtgaaaggaatacactgatcatccggggacgaaaggactgcccctactccatgggccatagcattagatgccccatcgaagcagacaatccatttgtctatgttctcatgtgtccgcttctcttcaacagggccatgatgtcttcatct

SEQ ID NO: 80728 - DNA, 188 bp, Glycine max
cgagatgaggaagtgcttacaggagaaacttcctgctgttattcactgaccacagagtggtacctaaatatatgtcgagggggtcacgagaccttggggacgtccagtggtgtgctctctgcccaaaccaaacttgaccgataccgacccaaccccggcctagtcagtctctgagaacctgcgatgta

SEQ ID NO: 80729 - DNA, 429 bp, Glycine max
  unsure (1)..(429): unsure at all n locations
gcttctttttagacctcgatcggtcgtcctttctggcttacgccgactgtcattnttttcgatcaatatcggtgaataatattatttttgccgaggtgggctaatgtattcctggccgaataaatcggaacatgccagtttcgggcaaaacgaaacatctgttgagctcacacgagaaaacctagccgacctacattgtgagttttttatgcaacaccgaaacaagaaaacttcccctgccgtaagaaaaaacattatcggccagcgagcgtttattttttaataaaaaactgcgcaatgtctgctgaaaaatatcagtcggggccatttcacgaccgatgtcggctattgagttttctattcaatccctgaatgaaatttgaatgatgtcgattatgaaatgtntgatcggcgtgatccggtgatgct

SEQ ID NO: 80730 - DNA, 439 bp, Glycine max
  unsure (1)..(439): unsure at all n locations
ntcactcggatgtccgattcaggcgcatcatatatcgagacgctcgatattgaacaacggaagctctcgagaaattgaaatgatcataacttttcactcagatgtccgattcagacgcataatatatcgagacgctcgaaattgaactacggaagctctcgagaaatttaaatgattataaattctcactcggatgtccaattgaggaacatcagatatcgagacgctcgaaattaaacaacggaacctctcaggaaattcaaatggtcataacttttcacacggaaatccgattcaagcacatcacatatggagacgtccgaaattgaaccacggaagatctcgagaaattcaaatggtcataacttttcactcggatgtccgattcacgcgcatgatatatcgagacgctcaaaattgaacacggaagctctcgata

SEQ ID NO: 80731 - DNA, 468 bp, Glycine max
  unsure (1)..(468): unsure at all n locations
atctattgatgaagagaaacaacttctataccagaatgtctgcttgaaggtgaaggagtgtggataagagatactaaaggagggaaccaagttcgatccagaccttngaagaccgatgtgtcaagctagtgacgttaaaatagcgcttcctgggaggcagcctagtcctctctctattttcattgcatttaattatagctggcttgttgtggttgcatgaagcattatcaacatgttttgcattgcataaaggggttggatgagcttctttgaagctgtggacgaaaaataacttagaagattttttcagtagtccactcgctaagtgcatcatccgcactaagcgaatcttccttcattcgctaagcgagctattgtgtgcactaagtgccatgaccctttgtttttaagctgaaagagtctcactaagcaaacctattcgcttagtccaaaaacttctctggattt

SEQ ID NO: 80732 - DNA, 53 bp, Glycine max
tctacggaactatgatactcagcttatataatgctgttgactgcgacatacgc

SEQ ID NO: 80733 - DNA, 538 bp, Glycine max
  unsure (1)..(538): unsure at all n locations
cttaagtcacctcacgcatgcaagcttagagagattcccgatctgagaggttactgttctcgtggcaaaaacataactcacgtcaagatacaccannattgagagattcccactctgaggaggaatcttcccacggaatccagtatgagagaggttgaggtgagtcaaggaagtcattgtcccaagaaaagaaggaattgacataccttctccaagacatctattgccgctcaagtccaagtaattcacatgctttaaatcagccaaacaaggacttatctctccaccaaagctccatctcctataagcttcccaatcgaagtgatagttgccatcatagtaatgatagaaaacagaaggtgaagtgtggaggtgaagctgaagaagatgggaagtaaggttgtggcagaggactccataccagtggcaacagttggtattattatgattccaagaccaaagcctattggaaggatctatgagnatattcttanacttcataagtgtctcacgctcacttgtgatgcacacactctct

SEQ ID NO: 80734 - DNA, 439 bp, Glycine max
  unsure (1)..(439): unsure at all n locations
tgagattangtgataataatagtttaaaaactttatgccttttaatgttgtacaaggcttggattttagagaagaatcactctgttcgctaatacaagtggaaaggtgcagagtaatttgagaataatgttttggattgaactacaacaggaaagttccagcctaagtgaatatgaaaaaatacaagaaaacacaaccaagtacaagtaacaactaataatcaaataaaatgagctcttttctctccaaaaaagtgtcagaaaataataataaaaaaaccactttctcagaaattaatcaattctaacttattgtttgtaactatctaagagaaaaacaacaaacatattttgctgctagaagattcttctgaggataacaaggaatatggcacgaaattntcagaaaaatcaagtcccaaaccagtgagcaaccatgt

SEQ ID NO: 80735 - DNA, 446 bp, Glycine max
  unsure (1)..(446): unsure at all n locations
cattatgtgggattttgatgaagcaagggtggccaaaatatattatgcctaactttacantttaacatgacaacacatganatcaaatcattatttttgttagagaccatattgaatatttaacataatttggaactcaaattcgagactactaattaagttgaaacaatattacaccaactagttaaccctcttgatggttcaaattataaatcttttatgtattaaaagagacaaaaggttatgcataaaaaatgtaaaatggttgtacgccatcatctaatcacaatctatcatgtatgttaagtttgttgactcttacgataaatattttaaaaggcataccaacaatgatatgtgattggatgagcaaaactattctacacttgtactgtacaagacccacaggtagttaacactggctaactaactaccactccacacac

SEQ ID NO: 80736 - DNA, 426 bp, Glycine max
  unsure (1)..(426): unsure at all n locations
ntgatgatatggtcttcaccgacgaaaggatcgatgtgggtctaaaaagaggcaaatttagtcatcctgcttggacgaatgagaaaactggggcaaatgaagagggtgaggatgaatgagaagcccgtgctgtgactgccattccaatacagccaagtttcccaccaacacaacaatgtcattactcaggcaataacaaaccttctccttacccaccgcccagttatccacaaaggccatccctaaaatcaaccacaaagcctacctaccgcacttccaatgacaaacaccacctttagcgtaaaccataacaccaaccaagaaatgaattntgcagcgagaaagcctgagaattcaccccaattccagtgtcctatgctgactngctcccatatctacttaataattcaatggtagccataaccc

SEQ ID NO: 80737 - DNA, 511 bp, Glycine max
  unsure (1)..(511): unsure at all n locations
ggatctctgagtcacctgcngcatgcaagctntntcttccatggcttattccttaatggatggtgcctcctctcacctctnttcctttgtcttccgctgcatctccatggtggaaaatcaccattaaaggaccccattgaagctcanagatccagcctccatagaatccctctttgtaaacaaccaaaatttctcaattgattatttttccttgtttgttgattgttgcaattctcttagtgtagtactagttgaatgaaatagtgtgttaatctctcctctccatttctctagttnttattttcgacttgaatcctttacgaaccctattctacaagttgttgaactatattccaaatttctaccttttgcaactatggaacataaaattattaaagggattttagaattgttaatgcattttgtgtcaatttatgattgcaatttgagtgtttaaccatatagcctgctaccgacgcaagaaagacggacacaaatccccatttttttt

SEQ ID NO: 80738 - DNA, 367 bp, Glycine max
  unsure (1)..(367): unsure at all n locations
tctatggagactgaatctttgagcttcaatgaggtccttcaatgatgatntttcaccatggagatgcagcagaagataaaggaaaagagatgagaggaggcgatatccattaagaaataagccatggaagaaggagtttcgtcaccaagaatgtgccttggataaaaagcttggagagaatgtttcaatggaggaaaantaagagagagagagagagagaaaaagagagaaggggagcacgaaattgaatgaggaaaagggggaaagaagttgaactttgagttgtgtctcacatgactctcattcatcaaagttacaacaagtggtacacatgtttttatttatagcctatgtagtttcctttgaa

SEQ ID NO: 80739 - DNA, 526 bp, Glycine max
  unsure (1)..(526): unsure at all n locations
atccttgagtcacctgccgcatgcaagcnttgngctaattcanatgacaataacactttttctcggatgtcntgatgagtcccgtaatatattgagacgctcgaaatcgaattctgaaccttagagctaattcaaacgacaataactntttactcggatgtctgattgagtcccgtaatctattgagacgctcgaaattgaattctgaaccttagagctaattcaaacgacaataactttctactcggatgtctgattgagtcccgtaatacatcgagacgctcgaaattgaatgttgaagctctcagcaaattccaatgacaataactttttactccgatgtctgattgagtaccctgatacatcgagacgctctaaatggaatttcgaacctcagagctaattctaacgacaataacttcttgctcggatgtctgaatgagtcccgtaatctattgagacgcgtctaaatgaattctgaagcttacagctaattcaacgacaatatattttctccgatgtgtga

SEQ ID NO: 80740 - DNA, 360 bp, Glycine max
ggacctataaaactcagcttaacaatcaatttcgagcgcctcgatattttacgggactcaatcagacatccgagtcaaaagttattgtcgtttgaatatgctcagagcttcaacattcaatttcgagcgtctcgatatattacgggtctcaatcagacatccgagtaagaagatatcgtcgtttgaatttggtcagagcttcaacattgaatttagagcgtctcgatatattacaagactcaatcagacatccgagtaaaaagttattgtcgtttgaatttgctcagagctctcacattcaatttcgagcgtctcgatatattacgggactcaatcagacatcccagtaaaacgctattg

SEQ ID NO: 80741 - DNA, 481 bp, Glycine max
  unsure (1)..(481): unsure at all n locations
agcttgtgcagatcanatcactcctactatttatctctagcatgcattttctttctttacccactcctcacgtttggttgtttaaggaaaaaacaccataactaaacgcgccgcaagggatccctatcgcaccagatccaaatctaaaacgatgggtgatcaagaggagacgcacgaacagatgaaagccgacatgtctgctctgaaagaacaaatggcctctatgatggaggccatgttaagtatgaagcagctcatatagaagaacgcggccaccgctgccgctgtcagttcggctgccgaagcagacccggctctcttggcaactacgcaccatcctccctcanacatagtangacggngaagggacacactgnggcacgatggcagcccttacctgngatacaaccgagcgacttacccttatggattgccgcccaactattcaccacccgtcttgcaagaagatgcgggccacact

SEQ ID NO: 80742 - DNA, 431 bp, Glycine max
  unsure (1)..(431): unsure at all n locations
tgccaacccatggaagctcctaatatctcccacactctntggggcgggccattcttggatggccttgattttctcagggtccacttggagcccatttctaccaactacaaaccctaagaaaactatattatctacacaaaaagtacacttctctatatttgcttagagggtgtttttcctaaggactgaaagaacttgcctgagatgtcctaagtgatcatctaggctcctactgtacactaaaatatcatcaaaataaacaactacaaatctacctatgaaatcccttaagacatgatgcataagcctcataaaggtgcttggtgcattagtgagcccaaaaggcatcactagccattcatacaaaccaaacttggtcttgaaagcggttttccactcatcaccctttttcatcctgatttggtgatacc

SEQ ID NO: 80743 - DNA, 391 bp, Glycine max
  unsure (1)..(391): unsure at all n locations
agcttaaggctgagtcttcatggtgctcccnctatctctgacaaatanggggtggagtaagcctagagtagaataagactccctcttaaactctcaactcataccanggcaggcagggaaagactgagactatcgatatcgagccagggttgatgaaagatataggatagataccctatggtttggttggtctctatgcctgcttcactttgtagcattaaggggacaatacaatgagggaaatcaactaacaattaaccccattagacccaacctcaattgggtaccacctctctctaattgattntgtcttataggtgttcctaanagcaagggactcactatggtactgatgcaatcctacctcccaagggtattggataaaagacta

SEQ ID NO: 80744 - DNA, 418 bp, Glycine max
gtgtaactaccgacatatacttatagactagtcacttataatgatgtgaattgtgaccgaatattcagatactactcactcgaacaattgtgactgtcggaaatgtatacatctaattcaatcattgtgaatcggatgccattaaggagcaatcgattacacgtcgccccatgtgactctgcatactgaatcgtgaagaacttaccattttaacacacagggaatcgatgacatgattatagtgatcgattacagctatggaaatcagtgtgaaaaacaatgctggctactggtaatcgattaccacaagacaaactctttggtataagattttgtgaagactacatgtgctactcaatgttttgaaaaacattctagcactatcttgattgaggattctcttgattcttgaatcgtg

SEQ ID NO: 80745 - DNA, 314 bp, Glycine max
tctacgagatttagaaccttcatttgaggaagaggattgattaccttcctatgtttataccttaagagtagttcactacctttagtcgggtagtgatctactatgatcctagatctttttttatattttgatgccatttgttaactcgggttgtgtccaagtcatattggactataccaaacaattaaatccctaagactttgatgttaacaaagtataaattttatgtgttaacctttcatgcttaagatatagggttatctatctctatgagatacaagcaaaaagcatgagtaaaaagctctggatgatag

SEQ ID NO: 80746 - DNA, 395 bp, Glycine max
  unsure (1)..(395): unsure at all n locations
tgtgtctcacaagactctcattcatcaaagttacaacaagtgttacacatgcttctatatatagactangtagctttcttgagaagctttcttgagaaaacttccttgagaagcttctttgagaaaacttccttgagaagctagagcttagctacacacacccctctcataactaagctcacctccttgagaaacttccttaagaagattcctaaagaagctagagcttagctacacatacctctctaatagctaagctcacctncttgagatgaacagctagagcttagctatacacaccctataatagctaagctcacccncatgacaaanaacatgantatacaaaananaaagtccttactacanagactactcanaatggcccgaaatac

SEQ ID NO: 80747 - DNA, 443 bp, Glycine max
  unsure (1)..(443): unsure at all n locations
gacactcataatactcaagctagagcacctctgcagttataagcttcacaatatggagtgagttctggcaagtcattntgaatccaaactttgaactcaagtagtttgaaagatgcatgtaactgattggtaagggcttcgatctttacaattttaatgggaaagaataaaaaatatttatggaagtgaaataaatttaaggggtgaaacttcagtgcgatatagcccatggttaatttaatcatgaccatgaatcttcttcttatcataatattcaaatgccacaatcatcttttatttctcttttttccttctcaggaaacacaacttctgactagctggacatttcaacataatacaattttatggtagcaaaacagtaaggaataagcaatggtttgattaatactacttattcttaaacagctataaaatttctatat

SEQ ID NO: 80748 - DNA, 396 bp, Glycine max
  unsure (1)..(396): unsure at all n locations
atcttcctgcgcaatactggatgaagaatcatcttgcttgctatcagcatcatcatctgaacccaaatatgatgccccaagtcttttcaatgacctgcttgcatattcaagcgcagatgaaccactattctgagaaccaaagatggatcgctggaacacatatagcanaccaagaaagactgccacaccacaaacggaagcaactaaatgcttctttggcgatccatcatatcttcccctcgtcatttatcagttgaaagtaataaaaatccaaatatactgttttcactacctagttattgactaaaactgatcacaactcagatcttgtntcaccagacatgaagcaccatatntaccatccaaaacaacactttaactagcaaactcaatatt

SEQ ID NO: 80749 - DNA, 408 bp, Glycine max
  unsure (1)..(408): unsure at all n locations
taagtacgaacatttagttactagatggagtaccaaaaatccaaaaggtcttaaaaagttagattttgaaaaataagggattttcatttcttaataattaccatctctgaagaaagatgatttgaaattccaccaatgaagatctgccacaacataaaagatacaatcattagaaaaacaattaattgagaaaaaaataagcccattagcaacatataaacaagaacaaattaatttaaactaaaactgtccgattaagcaagaatgcaagatgaatactntaggatatgtttagcccaagttttttcctgcttaaaagctacttttaaattaaaactaanaatatgaacttaaagaaaggtagaagttggtggttgtcagttttcattttttttaacttaaaagctc

SEQ ID NO: 80750 - DNA, 465 bp, Glycine max
  unsure (1)..(465): unsure at all n locations
cagagttagtgcaactcgatgtcataacaatctttctccatggaagaatggaggaagaacatttgatgcaacaacctgaatgttttgaaatggaagggaagaaaaattatgtatgtatgttgaaaagggttatatatgggttgaaacaatctccaaggaagtggtaccagagattcgatgagttcattattactcatgggtacaacagaagtgcctatgattcatgtatctattatagtaaggggggggatggttttcgcatctaggtgctactctatgtggatgacatgctcatagcatctcaagacaagtctgaaattcagaatttgaagtcactacttagtaatataatttagatgaaagatatggaagctacaaaatagaatttgggcatggagatcaagagaaggtgattctagaagaagtnttcttatgttagaaaaatacattagaaagtgtgaatcg

SEQ ID NO: 80751 - DNA, 418 bp, Glycine max
  unsure (1)..(418): unsure at all n locations
ntatcatgctaaactgcctttgttgtgggtgccaagtctatatatatgatcctggtcttgggtttctatggctgggtcgctattggaaaactgcctgaataattctatacctgaatttcatgtaagaacagctcctaagaacaattctggttggtggccatctccccgacagaatggataaaatgtatttcgagcgatgtagctcatggaactcctgggcctacaggttntgtttccttgttctatgatagtaatggtgtccttttanngggtattgttaagtcaagagatatttatatcttaaagaccaatgaagatttgaattattttattagataaataaaataaacgttaaaagtacttctatactatatcnnatatattttttgatctgcaaacaaatgttatcatgatctat

SEQ ID NO: 80752 - DNA, 511 bp, Glycine max
  unsure (1)..(511): unsure at all n locations
ccgcagcttgaatatccttcaattataattttatatgttttaattaaattctaatgtattntaaaaacatcaataattaagaataattctatagtatagtataaattatgtattggtaaattaaaatataatttatatattcaaaatatttatttgttacaaatttcaattataattaatattataatttatatatttaacagtatctattatacaatttatatgtaagaagtaaatatttatcttgtaaattgcaaaaccaaaatatttgtaaatctatatgaaaacccattcttctagtcttctaacttaaaagtacgttcaatttanaggttataataaaagaattacttccttcttgtaaaaaacaaagaaatggaattacttactaaaacatatgttaaacatcatcaaatgaagatacacttaattactntctgaaatgtccatcgagatctagtgacaagaattttattttaagagtaaatgagtattnntagtactaatgcat

SEQ ID NO: 80753 - DNA, 297 bp, Glycine max
  unsure (1)..(297): unsure at all n locations
aggttcgaggtacttacccgttgaagatcgaagaacgatgataaacgaatgaagaacgtggaagaacggttgaaacctttgcgagattcctcacggaaaacgttacggaaatgtttcngaagcgcctcggcttagattttcttcacggaaacaatttttccaagcaaattcgaaagagagagaagtgcctaaggggctggaccatttccttcttgccttcctcccctatttatagcaaaataggggaggtggttgccgcccagctcgcccaggcgagctcagctcgcccaggcgagc

SEQ ID NO: 80754 - DNA, 410 bp, Glycine max
  unsure (1)..(410): unsure at all n locations
atctaggtatctaatacccctcaatttaatggattntcaaggttngagaagtgaaaatgagaatggngtaattntggagcaaactctcatctcaaacaaaactatgacattaatctaaactcgctcaaactggttttacgacgaanactctaccgaatcaaaatttgactcctcaacacccaatttaccctagaaatggctcttgccttcactttggtcactcattttcctcctttgcacagcccaagctttcccacaatcctaaatgacatttcaaactaggattaactcactntaacctcctgtcgcaacgtgcccttcgcgggcgagcgagggcgaagctcacangtgcgctttcanaggaggaaagatgcgtggagtcgccaccaacgtttatttgtggaaaacgt

SEQ ID NO: 80755 - DNA, 266 bp, Glycine max
  unsure (1)..(266): unsure at all n locations
gtaacgtttctgtgaggaatttcgcgaaggtttcgaccgttcttcgacgttcttcattcgttcttcatcgttcttcgatcttcaacgggtaagtacctcgaaccaagcttttcgattcattctatgtacccgtggtggtccacattgtgtttcgtgtatttttattctcgtttcatttactttntataccccctttggacgtgcttaagccattntatttaagtcatttctcgtttaacctanaaataaaataaatntccaccgat

SEQ ID NO: 80756 - DNA, 465 bp, Glycine max
  unsure (1)..(465): unsure at all n locations
ttctttaatttgcacaccatgtgtttctgtccttctactgagaaccccattgactaatccatataaacattctcatctaaatatccattaagaaagagagttttcacatccatctgatgtagctccaagtcataataggctactaatgtcatgataatcctgaaagaatcctttcgtgaaaccagggaaaatgtctctttataatcaatgttatctttctaagtaaacctcttaacaacaagtctagccttgtaacgttcgaagttggcatgagagtcacatttagtcttgaagacccacttacaaccaactctcttacaaccctttagcaattctataaggtcccaaacaccattatgttccatggaatttattnttcccttcatggcatttaaccagttctcanaattatcacaacttacagcttgtganaacgaaactggatcattatcattaatgcttaag

SEQ ID NO: 80757 - DNA, 425 bp, Glycine max
  unsure (1)..(425): unsure at all n locations
cctctgcaagcatgcttacccacatgtccaactctactcacaccccttctccttctggttcctcacccccaaacccctttgtggaaggaatctaatagcagtgtggagaggctctctagtagccatgctctgntgccatgtggcgatcacaaggagggcgggtgaagatgatgacgagggcatggngtgtggtggttctgggaagggtgtcgatgaagaaaggaagaacagataaagaaagggttggtgatctgatgtcaatgattganaagaaagacaaggggtaggtttttacacgtgttggcatccaattggctagtggagcaacttacgtgcacaatcattagacacgtaggttnggattcgtacaaacctaattccaacaaaatgaataagattttatagagactagcaaatgaatttgt

SEQ ID NO: 80758 - DNA, 539 bp, Glycine max
  unsure (1)..(539): unsure at all n locations
atccttaagtcacctgcggcatgcaagctnggccnctctaccactatagatggtctttatttttcataagtgtaacatcatcgaagcttgttcatccacctactactatcgtacaaggcacaaccaccagttgttgtggtagtcattacactcaacgctnggcccctctaccactatagattgtctttatttttcataagtgtgactcttgatctagtttcaatttctccatgattaaaggcatttctttatgttattgttgtttctttcattttctttgttgataggcttcaaaaaggaacacaatgacctagtgtcttgaccaggttgatcactggtcagatttttaaaactatggttttagggtttggtttgggataaaaggagaaaanttttcctatnggatcatactcaagggtcactaaagagttcacagganagtctttccatcacaaaacaaggctataacatgcatattntaacctattttaattattaaaacccaatttanaactcatacccacatttcctataatact

SEQ ID NO: 80759 - DNA, 404 bp, Glycine max
tgaaagaatgcagacaatctgtggttgcaggtagtgaagtactttgttgctatgtgattaccttctctatgctcttcctatgtttataaatgaatcaagcagcctcaagatgtcaagaagtaaatgtggttgactgagaattacataaacaggttgggcttggttgccttgtatgttgttttgagcttcctagttgggggcctaaccttcttgaacaccaaagggaacttgatcttggagttgtggaactgcttggtgctctcccttttgcaaagtttagctgggatggtggcagttttgatgatctggatgcatggagacctgactctatgacgagatgccatttcgttgtacatgtgttcaacagcgccgtttagagtagtatcgcgatattcctttgacat

SEQ ID NO: 80760 - DNA, 451 bp, Glycine max
  unsure (1)..(451): unsure at all n locations
tacttggatttaagaaaaatactattgatcggtgtatatatttgaatgtcagtgtgagtaaggttatttttctaattctttatgttgatgatatcttgcttgcaactggaatgttaggaagtattatgtatgctcagatttatacttgaccagacataagctttgcaattagaatgttaggaagatatctatgtaatttgagaatggaacattggaaagctgcaaagaaagttatgagatacttacaaggaatgaaggatcacatgcttacatatatgagatctaatcatcttgaggagaatgngtatttagacttagactatgttggatgtgtggatacgagaaaatccactcttggctatgtatttcttttagccagaggagcagtatcgtggagagtgcnagcaatcagtgttgctcatctccatggaagctgattgtacatgtttga

SEQ ID NO: 80761 - DNA, 388 bp, Glycine max
  unsure (1)..(388): unsure at all n locations
tacggacctatgaatctcagctntctaagtgaaatcaggtgcagtcatctccctaagagtcctctcatgaggtggaggttgagccatgttctcaatataaaaattagtagtggaatgttcaaaatcagaatattcagaatcaccctcaacagaatgctcaaaatgcacagaatgaccaagatgcacactatgcctaacaaatctatgaaaggttctatctatttaagggtcaaatggttgtaaatcacctggattgcccctagtcatgcactatatgtagcaaataatgtgtttcttaacaagcgcctaacaagggggtgaaactacaactatactcaaatgatattaaaataagtngaaattttgtgaggaacacccttaaatcatg

SEQ ID NO: 80762 - DNA, 501 bp, Glycine max
  unsure (1)..(501): unsure at all n locations
actaccggaccctcttcctttcaaagatcgaacctttctaccactaaacccaagctctgatagcggtgagtgagagaaaaaaattatggttgttaatgagagaaagaaagggggtaaatgaacgcattgagagaaagagatatgaaattaaatatcattttacaaaatgggaaaataggaaattaagactttgagagaagggagagagatagagaaagaggtgagtgatattaattattgaatgatattttgcaacttgcaaggatgagtgagagagagtgggggtgaaccgtattgattacatttattattgaatgactttatgaataaatgggataggaatggaatttttcanaataaanaaaattaattacattatgattntttaacatattttttacgataaacattatntaaaagaatagaattgtnttctataataattacttgaanatttaatacaaatgaatcactatttcagaaaaataaatataagaagta

SEQ ID NO: 80763 - DNA, 420 bp, Glycine max
tatgcacggaaaatgtaattatgaaattgagatgcgcgaataaacaccatttcctagttaaccatgcattatgtaccatgttcaattattttgttttgttgatgtgtgttttttttttacaaatgggtttatgatcccaacatggttggctcatggtgcctaacacatgcaactaagaatgtagtgtgaagtttcacgcttccccttttttgtttttgtagaggaaaacacaaggatgagcaaacatgaaaacaaatggtatgcaattttgcagatcaaaaattttgttgaacgcatatgcatgatgatgccatgactcatgcaaaatgtgaggctggaatatgataacggacaaatgcaggaacgatatgttcattatgatgttatgaagagatgcttatgcgatgcatgatatgaatg

SEQ ID NO: 80764 - DNA, 403 bp, Glycine max
  unsure (1)..(403): unsure at all n locations
agcttcaatgcaaggaaacatgcttatggctatgaatccaaaanttggttttaggattagaaaagcatgaaaatatggacttgtttgtaagaatttgggctgccccatgattggcactttgcacctaagtaacgtgggagatgcttttcaatggtgtgtatgtatatatgtgaatatatatggcataaaaatatgttgcacagtgtgtgaatatatggcataaaaataccttgcaaagtgaacgaatagtaaataatgcatttcaaaaatgtatatttgtggataggtagcgtaaaaatgcatttcanaatgtatatttgtggataggtagcgtanaaatgcctctcanaatatgtatatttgtggataggtagcataagaagctgttcannaaaaatgtacc

SEQ ID NO: 80765 - DNA, 434 bp, Glycine max
  unsure (1)..(434): unsure at all n locations
nggcatggcgtatgttgatcatgagtggatcatgattggagagcaactaacggtagcaaatggtgatcaaatggaagaagaagctgaggaagaagctcaacaagagccaactcatcaatggaacccttctgagtccattatgattcaaaggatggatgctatccttcatctccatcaagagcattaagccgaagttcatagctccttagataacatcacaactaggcttgagaacatagaaactaggttatcccttagtaaccttctaaacctagataaggatgaggcttagatatgttcgtgtgcttgtttgtgatgttttatggtttttctatcatgtcatgttttgtctttcttagtttgatgatagtgtttaagtttttttgtctttcattaaaaanaattacgtaatggttttaagtgttaatgaaata

SEQ ID NO: 80766 - DNA, 497 bp, Glycine max
  unsure (1)..(497): unsure at all n locations
agctngctgattacttcaacattcccggaatctactgtgttgattcaatccaaagcattccttctgataatactcccacatccatagccacctncgtagtgccaacttctctccatgatttcattgaggtcatttttcagaacaacgaaaacaccatgcaatcttggcatcttgacggttatgacttctgggtcgtggggtatgtcagcttcctttctttgtgttcaatcgttcattcctattgttgaacaaaccatctatacttagcttaagagaatgctaaaatgttgttcattgcaacagttatggttttggccagtggaccccagccaaaagaagaacctataatctagttgatgccctgaccaggcacactgctcangtaacttaagaaanaagtgtatataatatatgtatgtatatagggagagtangaatgatgagaagaataaatcttgattatatgatcccaatggacgaataagagtcgttcaatt

SEQ ID NO: 80767 - DNA, 418 bp, Glycine max
  unsure (1)..(418): unsure at all n locations
tatagtaatcgattacatagttctttntgagacaatgattgattntatttcagaatctctactttaatcgattatcaggtgatataatcaattacttctctttcaaaagtgtttcanaagtgatcaagaatactttaatcgattacatcaagaatctaatcgattacattgttcttgaaagttttccaatttttgggatgaacactntaatcgattgatgaaatggtaacataatcaattacttcttcgaaacaatcgattacattgtatatttaatggattacaggtggttataactagtttctctataaatagccaccttgagttcttacttctaacaagttctaacaacttctcttctgaatgagctagaantaagagttgatattagtaaaagagggaagagaagaaaaagtgc

SEQ ID NO: 80768 - DNA, 470 bp, Glycine max
  unsure (1)..(470): unsure at all n locations
agctntgaacaatatacttgttcttcattaactgtctttgggctnggcggccacgctcaacanagtactttcgacacctactatacgttgatttcaccaatgctgttatgggaatgttgtgacaatcctttaaaaccttattgatacattctgagaggttcgttgtcatgtggccatatcgacgtccttctctatcgtaagccatcgtccatttttcctttgagatgcgatcaatccatattgctatggttggactcagttcacgaaatttttctaaattttgatcaaaaatgtgcttgcatggagtgtaggctgcataaaattagttatgaataacaattntaagtataaattanagtaaaataaacgtgaccatcaaatatganatcttacccaatntcttcaacatttattnnttgttggcattattgaatattcgattgaagtngtttgctatgtgtcgcacacag

SEQ ID NO: 80769 - DNA, 305 bp, Glycine max
  unsure (1)..(305): unsure at all n locations
agagcttgagattgagttgtgagtgattgtgaaatcctataggtgaaggagacatcatcaccacttttatttntgcaatttttcatcttggtcttctcttttgtggaaagaagaattcctggttattgaatgctaaatcctctattggatcttccctgtaggtacctaatggaaatatatttttttttttatctatttaatggntttttgtgtggtctctatgctatctgcttttcactccagtatgtctttaccttgatcacatagatgcatgctnttgtagggtcattcaacagtggaaactg

SEQ ID NO: 80770 - DNA, 243 bp, Glycine max
agctttttattcaaggctcatcttggtggtgaagcttcttcttccatggcttattccttagtggatggagcctcctctcacctcttctcctttgtcttccgctgcatctccatggtggaaaatcaccattaaaggacctcattgaagctcaaagatccagcctccatagaagccctacaagcaagcttccatcaatagtttcattcaaagattcattggactctattggaatgattttttatg

SEQ ID NO: 80771 - DNA, 242 bp, Glycine max
agctttacaacgagagggggaggagatagagaaacgagaaaggtggagtaaattgaagtaaatttaagttcgaattcaagaagtcaaatttatctgatttacgaagacaaaaaggtgattttacaagccactgtaattatcaatatgaaaaaattgtacttgttggttttttaagacagtggatagcaaaaaatagtagaaaattttcatcttgatgaataacatgattgtccaacatcatg

SEQ ID NO: 80772 - DNA, 241 bp, Glycine max
agctttaagccaagtgattctatgacatgtgcttactgtcaattgtttctctatattcaatgagtacttgtgttttcatttgtgtttggttagatgcttgtttggtctttcaacttggtgggtcagtttgttaagttctttgttccaactttgattctgtgggctttaccattttgcctgtgcatcatttgctggagggctcctcatcttttgagatttgtgcttcaagccagaaaataga

SEQ ID NO: 80773 - DNA, 530 bp, Glycine max
  unsure (1)..(530): unsure at all n locations
tatctaattaatctgannatggagagaaatgattattaaacacactttatgtaaatactaagtatttattacctatacttaacaganaatacttataacattacaaaataaccataaattgggagagtttgatacaatttatacaagttttatacacaaaagttagttgttttcaccgactaacaactcccccaaatttacagttttgcttgtcctcaagcaaaaagagaataacttacttttcctcaagtgacaatgacatgtagtgactatgtacaaaggtgtatgctacaaagtgactaatttcatgataagagaatggagtaaaatgccctcatcacttgtctttcacaaggtatgcagttatccaaagagaagaataaaatgtaacctgaacagatagatgaagttaggcataagataaatatcaaggaaagtagcttanaccacagtctcatggctactggttcactcaagcacaagtgtttaagctattcattaatgacaactagcangagatccaatctttg

SEQ ID NO: 80774 - DNA, 242 bp, Glycine max
agcttgaatttccttttagtagggaatctatccttcctaagaagggccatcttgctaaacctatccaccaccacaaagataaagtctacacctctttgggttctaggaagcccaaggacaaagtccatactaatgtctacccaaggtgcagaggggatgggtaagggtgtgtatagcccatgaggcatcaccctagacttggcttgtaaacaagccacacacctagtgcaatgcttatggac

SEQ ID NO: 80775 - DNA, 431 bp, Glycine max
  unsure (1)..(431): unsure at all n locations
ctcagcttaacattcaatatcgagcgtttcgatatattacgggactgaatctgacatccgagtaaatagttactgtagtttgaagttgctcagagcttcaacattcaatatcgagcgtttcgatatattacgggactgaatcagacatccgagtaaaaagttattgtcgtttgaattatctcagagcttcggtattccagttcgagcgtctcgatatattacgggactcaatcagacatccgagtaaaaagttattgtcgtttgaatntgctcagagcttcaacattcaatatcgagcgtctcgatatactacgggactcaatcagacatccgagtaaaaagttattgtcgtttgaatttgctcagagcttcagcattcaatatcgagcgtctcgatatattacgggactgaatcagacatncgagtaaaa

SEQ ID NO: 80776 - DNA, 242 bp, Glycine max
agcttttcactcggagatctgattcaggcgcataatatatcgagacgcttgaaaatgaacaacgaaagctctcgagaaattccaatgctcattatctttaactcggaggtctgatttaggcgcataatatatcaagacgctcgaaattgaacaacggaagctctctagaaattgaaatggtcataacttttcactccgaggttcgattcaagtgcatgatatatccagacgctcgaaattga

SEQ ID NO: 80777 - DNA, 466 bp, Glycine max
  unsure (1)..(466): unsure at all n locations
cctttctctgtaaatgagcgccaattcttatttgtggttattcanagcaactcgtataggtaccttgtgataatactggaggcacgcgaaatttttgaagagagtttgcgccagataactaacggacggcattntgatgaatcaacttcttctggtatttgttttgtttggataaaaatctaaccaagagacatgttctgtttgaatgaagtatttgtgtgcgcatctctntaagcagttctccttttgcattttacttttcgagataacgtagactataaagtaaaatggctttatccatttgatcttaatgagttgataacaagagtgctgtgaatntcctccttttttatacacaaagttaatctgttatttggtataatcacggacactcgagtttcaatgtggagtataccatcgtgaagtttggtagtcagagttgtatagtaacctatcaatacacact

SEQ ID NO: 80778 - DNA, 241 bp, Glycine max
agcttttgaaggagtcacctcaatggggggtcgaaccaattgctgggtgataagtgtcggccattgaggaggtatcttgacaataaaggactgaatttggtgagtccaagttggaggaggcaaatggactatatcatctaatggtgagtgtcataccctaatttcgtccggggactattgcttgatggcatgcaacctttaattgaccgcttcaaagtacttggcaccctttgttgcacaa

SEQ ID NO: 80779 - DNA, 244 bp, Glycine max
agcttgtacatacctttgattgatcattgtcaatggtgaaagaagcttttgcaattgcttgcaaaatcctgctgaatcgtccatcgtttggattgtgagagggaagagttttggtgcatgttttatattttacttgtgttttcggtaatagtagagaccattgaacattaattgttgaaggcagacgagtgggtgaaatgagagacattttcacctgcacaattaaatggtattctggctgaat

SEQ ID NO: 80780 - DNA, 470 bp, Glycine max
  unsure (1)..(470): unsure at all n locations
cagcttagtgctgtacaccacgatttacatttagtgtcctcatttatatgtnctacagntggctntgcatgaatttctaattgtcaaaacatatgattcatggatataatctaggcattctttctttctttacattntaagccactggccaaacaactatcccaatgtatatcattntaccatttgcaaagccctttgagccaaacacttgatattttgttggaacactaacctangataaaagttcctaccttaccttangattangagagcaagggtgttttatggaaatttctatcanttggtggctaaggtgatgtaaatactntgttcataatatgggtattaagaagaaatagaaaagaaaagaacanacatatgagaaagaaaagaanagtgaaaagaaaaggannaacaagttctttatggataaataaatgtctgaatcatgtatagagtntgtgtaaata

SEQ ID NO: 80781 - DNA, 237 bp, Glycine max
tttttgagccattgtcaatgagtactttggccataacgtgttctatgcatttgactgacacatgtaaaaccatgttatgtcctctcccctcggcggggatttcctcttcagcaaaggtgaggtaattgatggctgtgatgttattaacgattcccccaaaaccttctatggagatgtcttggggtacgtgagcttctttcaagacttttaccagcaaagctcgatgaggctccaagc

SEQ ID NO: 80782 - DNA, 239 bp, Glycine max
agctttgagcaacttcaaacaacaataacttttttactcggatgtctgattgagacccgtaatatatccagacgctcgaaattgaataccaaagctctgagcaaattcaaacgacaataagtttttactcgtatgttcgattgagtcccttaatatatcgaaacgctcgaaattgaagaccgaagctctgagaaaattcaaacgacaataactttttactcggatgtctgattgagtcc

SEQ ID NO: 80783 - DNA, 392 bp, Glycine max
  unsure (1)..(392): unsure at all n locations
cctcatcgtctctcacagnctttagaggtgngagttattctcttccttgngnncggattctcagccacttatgatagccgccgatgctcccattactgcttcccctaagctctctgtcctttcttcacaccacatcacatgccttgtgaactccttagattaccctcgcattgtggtcactgaaaccccgtgcgatgaaaggcgtgatgctttcgtctgatggcacttctctcatggggtagccaagctgtcttatggcgaggacgggattataattaatacaaccccttgttcccatcaagagaacattnggacatccttcgcatgaagatagaatcctgattcttccttccttctagcgagggaaccaattaacagacgccactccatgc

SEQ ID NO: 80784 - DNA, 241 bp, Glycine max
ttctttggaatgttgatcggtttcaaaaaaatttaaggaccaaaatcagaaaattaaaaagatggagaaataaaaatataattaatccttaaattttctttaaattaataattttaagtatataatatttgaatttttttgtactcttcttgttttctatcctctacggcgcataaatgaaacttacttcctcctttttttcttctccttttcctttttgaatgagtaaacaatcatattt

SEQ ID NO: 80785 - DNA, 408 bp, Glycine max
  unsure (1)..(408): unsure at all n locations
cctacggacagaaaacaaacttaatggctgagagtaactgagatcgcggcaaccacaagtcacccgcaatagccaacaagtcatccaccatttggtctcccaaaaggctgatgcctaggttgccaattgggcccttattacaacttgaactaaacctaactaaagcccttttagttgattaacccacaacatatgttgggtcagccaactctacaaggattgngccattatttagacagactanacactgtaatattgaaacaaagcggtgtcanttagtcctcctacatctgggccatgatacaactcacaaccttggacttctctccttgaaacttgngcatgtattcaaatagtatggacagcacttgatgaagagcttcttagcttacttgcttacccttgtat

SEQ ID NO: 80786 - DNA, 232 bp, Glycine max
agctttaatcttgaatcttgatcttgattcttgaagcttgatccttgaatcatgattcttgaattcaactttcctcttgaatcttgaagtgttcttcaacttttcctcttgagtcttgaattgttcttgattctatcttgaacattttgaactcattctttgattgacctttgagctttttgtcaccacctttgtcataatcttttgttatcatctaaacatctttgaatca

SEQ ID NO: 80787 - DNA, 528 bp, Glycine max
  unsure (1)..(528): unsure at all n locations
gcttagtattaagaaattgctagttctcaatagtactccctaatatttaaaatatctattacaaactacactattccagtaacagaaatgattgtttgtacgaatcataaccaacaaattatacatgctaattctgtcaaaaatagaaactcattctcaactagcagtgtacagtcatgcgccaatggcaatggtcaaagaacattcgtcattttcccatacaaatgatttcataccaaacaacatttctattctagtaattccactgtttttgtctggtttcttgttatacttcaattatattactatattgntactacacatgctgactaatgaaatccaaaccgtaaacacaagttgcaattccacanaaatctttcagaatcatgcaacaatgcaacaataatcacatctaaccaccagatctcacaaacaatttgacatgctatcacagaatcaaagcatagaaacatcaattactcactactaaaaaagctagagtttacgtcatagtatctaaaatcgatg

SEQ ID NO: 80788 - DNA, 240 bp, Glycine max
ttcttgcaagctttcttgtggggcttctatggaggctggatctttgagcttcaatgaggtcctttaatggtaattttccaccatggagatgcagcggaagacaaaggagaagaggtgagaggaggcgccatccactagggaatacgccatggaagaaggagcttcatcaccaagatgagccttggataagaagcttggagaggatgcttcaatggtggaaaagaaagagggagagaaaga

SEQ ID NO: 80789 - DNA, 242 bp, Glycine max
agcttgtggatagagacttcccaagctatttatcttctctctcaaagagactctctaactttctagttttctcactctaagaagtggattcactcttgtcttggatcggttaggaatgaaggctcctacccttatttatactactccacctccataatgaatggaggagattacttgtatcctagggtggagattaattctctagaatgctccacacattctaggaggctctgcactctttt

SEQ ID NO: 80790 - DNA, 461 bp, Glycine max
  unsure (1)..(461): unsure at all n locations
aagctagtggtnaatcttattattgatcattacagtatatattttatatanaaggagttgagtcaactctntgctcanaaagtcgtgtgtcatctttagttctgctaaacaaaaaggtttatattgcgtttagattttgattatgaatataggaaaattaacgaanagaccattacagatcgaaggaatgaaaaaaaaaagctatcgaaaaatataacaataaattaattnttaattaaataaaggaaaagaagaaaaaagaaaaaatatgaanaatataatttgtttgatataagacaattatgtttattagtatatagaaggacaagatcaattgatactaaatgccaaacttttgtacttactntactntaatatatattatgcttcaatgaaaattacattaacttttatgaatatntgtgaagtaattcactttatcttgaaaaataaatcanatg

SEQ ID NO: 80791 - DNA, 240 bp, Glycine max
ttctttcaggtgtctctatatataacactaatgagacacaagtttttacaaactaagcgatgaggaactaagactacaaaactctaacaatccaagtgatgtgggactaagaccacaaaactctaacaattctcccacttggggtctaagttccaaactctagcagcttcttgtaagcgatgagttcatcgactctttacctagtgtagcaccttcatcttcaattatccttgaaggcca

SEQ ID NO: 80792 - DNA, 450 bp, Glycine max
  unsure (1)..(450): unsure at all n locations
atagngaactgagctaagatagtctgtttctttgacttccaagaaacagccccaccagctatgctaaatatatagccgctggttgctgtggaatcatctgaaagagtgttccaatctacatcgctgtatccttcaagtacagcgggaaaccttntataatgtaatccaagatttatggttcttttaagttacctcattaccctttcaatagcgtgccagtgctccatactaggtctactggtaaacctgcataataatcccacaacataggctatgtcaggtctagtacaatcagtggcatacctaaggctgccaatgatacttgcgtactcagnttggcgtataccttcaccagtgttcttaaacagttntacactnggatcatatggtgtactagcanggttacagtcaaagtagtcatantctcttaagatcttctcaatgtagtga

SEQ ID NO: 80793 - DNA, 463 bp, Glycine max
  unsure (1)..(463): unsure at all n locations
tatgaatataaaagcttataaatcattacttattgtttatgtataaatggaaatggtacggtatgctagaagatggacaagaaattgccatcaagagattctcacggagttattcacaaggattgaacgaatttatgaatgaagtcgtattgattgctaaacttcaacatcgaaacctagttaagcttcttggttgttgcactcaaggagaagagaaaatgcttatctatgaatacagaccgaactatngcctagactcctttatctttcgtttgtaatgttatctttcanaaattntatcattcattattggcttanatatgaatttggtctttaataagttagcattttttcacttttggttcctataagttcatnttttnnttttttaatnttagtccttggtaaattgtgtnnnttttaatttgatccttggaggatattttgctcatttttagtcttt

SEQ ID NO: 80794 - DNA, 241 bp, Glycine max
agcttttttaattccccaatttatggtcattttggagtaaattttgtaaataaatcttgttttatggttaacgctgtctctagaacatttccattggatttaatgatgaaatctgtgcattttcaagtgaaaaagaggctaagttttgaattgcaaaaagtagcagttgggctaagctcagtagttgggctaagcgcatatccatcgctaagtgcaacttcaacgcgcttagcacaaagga

SEQ ID NO: 80795 - DNA, 361 bp, Glycine max
  unsure (1)..(361): unsure at all n locations
ctctatttgttgagtcaagagtttattntgagccagaattacattctgagtatccaattccattatacattttcttttaacaggagccttatcatggtgactctaataatcattggctgcaatggagtcaatgattacaatttcttcctcagggctcttagacatcatagtacctctaattgaggcattaagagntcattttgtttggggtctcaaccactgtaaaagatatgtagttgtgcagcatcatcaaaactatggtttgggcacctctacaacaaagacctgaatctttcccatgtttcatcaagagggtccattgacccttgngaaaaagaagcaatgaaggaatttgcactga

SEQ ID NO: 80796 - DNA, 245 bp, Glycine max
agctttcttataactttttagaaaattttaccaaacataacctttatgtggaattaaagatctacttgattataagtatactccttctcgtctcatacaagaaaaaaaaaaaagaaaacacatttttcttggtcccaaatataaaatgtagaagcaaagcttccaagagtattttgatgatataaaagattattagatattcattcaaacaagattaaagaatcaagaagattcaagtgaatatt

SEQ ID NO: 80797 - DNA, 397 bp, Glycine max
gctgtaggaataatgtagcactcaaaacaaatatggggagacaaaataatgtgcaaggagatctgaacacacacaaaggggggcaggaggaatattctagctgatatcttaaggaactataagagaacttctgttactaaggaaactggattcttattacagccttgcgacccctctgtatatgatgaaagcactaataattaattaaaaagcacatgctcacccttatgtctaaatccaaaccatctaaatagctcaaaggaactaatatgcatacacagaatagacaatagacattcatggtagcaactagtacagtagcatgggcagcactctgcttattatggtgataaatatcaaattatagtatgtctaactcatgataaaaaaagagaag

SEQ ID NO: 80798 - DNA, 242 bp, Glycine max
ttcttttatcactcttttaaaaggaaatgaacaattgaacattttagttcaaacttttggcaatgaaccatctttctgaaacaaagttttcagttaacaaaaaccttttttccataaactgtttgaacatttattataagctcaaaacagttcttcattttgaactattgatttgtaagcatatataataattagaagttgttataaaaaaattgtctaagtttgtgaaaacacaattcaac

SEQ ID NO: 80799 - DNA, 437 bp, Glycine max
  unsure (1)..(437): unsure at all n locations
actaagctggtctggcatagccaccacagacgtgccaagtctccttaactttgtatcatatctctaggtaccactctatggtcaacgaataataagtaggaagtctcacccttccacacttcctcagtttaagctcggaggattatggngtatccatcacatgtggtactaggaggcggccatgcgatggtgcagaacgattctccacatccactaatcacatataaacccaccatcccctgttgcccaccttgaactgagctcacgtactcccacgtagcccttatcctcgtttctctcaacactgggtccccatcaatcctcctaagctgccacaacattcatgtaattatgcattcaatcatcacatactatcacatacaatataacatggcaaaggcagaaatctctgcccanaacacaaaccaataccacag

SEQ ID NO: 80800 - DNA, 244 bp, Glycine max
agcttttgcaaatcaaattactcctacattttatctctagcatgcattgtatgttggtctcgtcctttgtcacgggaagccggaaggtccatatcaccttcttaattgtacacatggggcactgcgcccccaaatgcgcgagtaagaagagataattttccgggctctcgtgtccgtaaaatgcattcatatcatgcatcgcataagcatctcttcataacatcataatggacatatcctgcat

SEQ ID NO: 80801 - DNA, 253 bp, Glycine max
  unsure (1)..(253): unsure at all n locations
tccaccaacccaacaatatctctactcagccaataacaaactttcttcttacccaccacccagttatccacaaaggccatccctaaatctaccacanagtctgtctaccgcacttccaatgacgaacaccacctttagcacataccaaaaacaccaaccaagaagtgaattttgcagcgagaaagcctgtagaattcaccccaattccagtgtcctatgctgactngctcccatatctacttgataattcaat

SEQ ID NO: 80802 - DNA, 270 bp, Glycine max
  unsure (1)..(270): unsure at all n locations
attcttttacaaagggggaagaagaagaagataattcaagagggatgtttcaaagtagattcaaagggatgtgataaagattgttaattcacattgtcttttaacaatgcccaagttaagggaccttgcttttatnagactctttcatgtctggtcacagaaaacccatttaaaagagttataancctcttagaaaacgcttaaanaaccatttggaaaatgttaccaacttttanggaaaaactttgaaaactattggacagagttaca

SEQ ID NO: 80803 - DNA, 290 bp, Glycine max
cactactctctcagctcaatatgcttgcataaatggttaccgtgaagaaaacccaagccgaggcgcttccgaaacgtttccgtaacgcttccgtgaggaatttcgcgaaggttcccaccgatctatgacgttcttcattcggtcttcaccgctcttcgatcttcaacgggtaagcacctctaaccaagcttatcgatgcattctatgtacccgaggaggcccacatagtgcttcgagcactactattctcgtgcatctacttttatacccgcctggacgcgctaaaccat

SEQ ID NO: 80804 - DNA, 238 bp, Glycine max
ttctttataaaggttatggagttgggagatgagacagattatgtttctgcattgtgtgacacacactgtcaacgtcttatagttgcattttgtccttatataaggcccattggtttaatcttatttattaaaaacaatttttaaataaaataattagttttttttttctttttttgggtttgtctatactacttttttaaaaaatagtttacgtattttctaagaagcaaatcatata

SEQ ID NO: 80805 - DNA, 234 bp, Glycine max
agctttgtcaactttttttatgggagattgatgcatattttactaattatgttaaaattttgttttctcttattctacattgtagttaaattaaactattatgtgaaagtctggtccatctgtgtttcagccctgcttcaattactttctgggtgtagagctatcaaggttttatttcacaattgatatatttttccttttgttgtttgtctttccagtggaggtttgcatttg

SEQ ID NO: 80806 - DNA, 463 bp, Glycine max
  unsure (1)..(463): unsure at all n locations
gcttagattctaggagagcattcatccatcgataaaccttgactgnttttntcttattcctaccccatacttgccttttatttaagcatttagtttcatttcattactctgcagcatacacacttattaaattcatttgtacttacagtttttcttttgaacatatatacataaacaatatgtgtatatacagaaatagtgtgtgtatgctatttactttgaccatttcaattcttacccagtattttccccaaatttggaacaaatctcaagtgggttgcttggtgatgggacgtangcgtatggcatggacgaaccagtataaaaactgagttggcattctctcttccataaacttcttttattatcataattatatttttctttaaagaaagttggtnttgaattgttcttagagtaattcataataacgattgaattggtattcattaagagaagtaaa

SEQ ID NO: 80807 - DNA, 231 bp, Glycine max
agcttttcaaggaagttttctcaagaaagcttctaaaggaagttacctagtctataaatagaagcatgtgtaacacttattgtaactttgatgaatgagagtcttgtgagacatacttcaaagttccacttctctccctcttttattccttcaatttcgtgctcctcccctctctctttctctccctctttcttttcctccattgaagcattctctccaagcttcttatcc

SEQ ID NO: 80808 - DNA, 519 bp, Glycine max
  unsure (1)..(519): unsure at all n locations
cttcttactctcttaggaatttagcctctntcccacttatacctgttagctatgggagccaagntatcccttgcattctagacttcaaccatntgtgatagtcgcctatgacgccattgctacttcccctaagctccttatcttttctttccattgtattccatgctgtacggattctctgaagtatcttcgcattagcttcaatgaaacctcacgcgatgatttcctccaagatgcacctctcatacggtagcctaactgtcttatggccaacacgggattatcattaatacaacccctcatacctatccaggggaccattgggaatccttcacatgagtataacactcctgcccctccttctttccaccgtgggaactaacttatggacgctcccatcatgcctgccaaaagttcttcctcaattgcttttaccctcttgaagcacatgcgataaccttgtaggggacaaacagatctaccttcatgataagcaacgtgggatgccaaccatacata

SEQ ID NO: 80809 - DNA, 243 bp, Glycine max
agctttcatatggaatgtttccattagcagattgactacggattttatctctaaccttgtctcctaatgatcttggaagactggctagaaatttttctttccaaaaaggttgttgactatcttctctagtgtaaaccctagttaggaaagtatctctataccacttgaagtctgctaaggttctacacttaaggttttatagtaattttgcagacctatctttccacagagatgggtctccaa

SEQ ID NO: 80810 - DNA, 473 bp, Glycine max
  unsure (1)..(473): unsure at all n locations
tatattgatacgctaganattaacatcggatgttctcgatanattcacnatggcatgactnttcagacggatgtccgattatggcgaatcacatatcgagacgctcaaaattgaacaacagaaactctggagaaattcaaatggtcataacttttcacacggatgtccgattcacgcgaatcacatatctagacgctcaaaattgaacagaggaagctcttgagaaatacaaatggtcataacttttaactcggatgtccgattcatgcgcatcacatatagaggctctcgaaaaggaactatggaaactctcgagaaattcatatggtcataactttccacactgatggttcgatcaggactaatatatatcaagacgctcganattaaacatcggaagctctcgagaaattctaattggtatcacaattcactcggatgtacgattcgtcccataatatatcgacacgctc

SEQ ID NO: 80811 - DNA, 239 bp, Glycine max
agcttttgctgttcaattgcttcagattgttgcacagaagggcaaaggtctatgtagtggtcgacagaggagcataaatcacagagtctggcgacaggtgcagatttttgattcatggtcagttgggttaccaagttaaccaaggcatctagtttaccttcaagcttcttagtctcggctgatgaagatgaatttgtggctacttcatgcactcctctaatgacaatagcatcacttct

SEQ ID NO: 80812 - DNA, 402 bp, Glycine max
  unsure (1)..(402): unsure at all n locations
cttgtttgaaggcgaggcattgctcaatctattgccctggngttcccncgtggtatgcgcatgtggcattgngattgtaccacttangaaaggggtcttgataagttcttcccaggattaccatggccatgtggttggacaatagtgatggcaagaggtccccataggacatggggatcggngtgaattctggggctctccttgtcggngggtttcttccagtgttgtagctcgtgctgnggggaaagttgttattgggacgagattgtgccggagtatgcatcggaggggagacctttggtggtgacgcgggcgtccttggttggacgggtgccgagggagaagagcttccggcgcgggccgcanagcttgggtgatgctgcgcatactggtgggtgtcgt

SEQ ID NO: 80813 - DNA, 242 bp, Glycine max
agctttttttcttgtggttatcagagcacaagagcttcaagtaggtgctccttaaacctccattaattcttttgctttaccttctcttccattgttgtttcttcattttttctccatgtatctcctcacatgtcttgtgctaaatgttgttaacatgattctttagagtttccaccaattaaacttgctatagatgctaaatttgattttttatggttcaaatttcttggtcttgttcttga

SEQ ID NO: 80814 - DNA, 241 bp, Glycine max
agctttttattttgcaattaggggagcatattctcataggaaattgatggagctacaaatttcattggcctgacaggaactgacgatattttaacaccttctaaagttgaaaattggggaggacacgccttccacatgttaactcaaacaatttactctataacttatggactgtgacattgccctcaattacagatcaccatcaattaatataaggcctgactctttggacctttatagg

SEQ ID NO: 80815 - DNA, 134 bp, Glycine max
  unsure (1)..(134): unsure at all n locations
aaaaactcagctagacccagctttttttatgctgggaattttttttttttacaccancaccggatgggaagtgaaatacgacagccgtaagatttacccaattggtgcccagagggacttctacctagttcatg

SEQ ID NO: 80816 - DNA, 240 bp, Glycine max
agcttttaagaaattcgactggtcataatttttcacttgaaagtccgattcagctgcataatatatcaagacactcgaaattgaatgccggaagatgatgagaaatttaaatggtcataacttatcacacagatgtctgattctggccaataatatatcgagatgctcgaaattaaacaatggagctctcgagaaattcaaatggtcataacttttcaattggatgtccgattcaggcgc

SEQ ID NO: 80817 - DNA, 525 bp, Glycine max
  unsure (1)..(525): unsure at all n locations
acactaagctactggccccttcctgcaacgctacatttgacagctagttttaccgtggtacgttactcttanagcanaaatggcatataacctcctcccataaatacaaacatcaatgtaaatntagagtaagcttatgcgcatatttccttacaaatgttctcttgcacaagacattctattaaccgaagaaatgcacccatatacaatcaaggcagctccgttacctagattatttacacgtatttccaaggtgtatgtgatacttacatcacacacatctccttggctaaattcacatacatgcatacccaaagcatattgtggtaccaaaaattgcacatgtacacctcttggatgtctaatacctatacatacacaaactttatgatgaatcttgactatctacacaataaggtgctacnattcatgctctnttcaagttttggtacctaaagccgatgcaaattccagatatttcctttgctactaaaatgatcaaataaaagtatcatttttatatga

SEQ ID NO: 80818 - DNA, 243 bp, Glycine max
agctttgatccgttcagagatcccagctagtcgctgtctaatagccttgacacttgacacaaggtcgttattatgtggagagagagaaactagggtccacaaacactttttgcaacatatctttagagaagtataattttccaatgtcgcctagtgctcagagctatcatatgaatcaaaggaaacattaatagtaaaagacaaaaggaattaagaatgtcaagacatgacaatttaaatctt

SEQ ID NO: 80819 - DNA, 238 bp, Glycine max
agctttacttgaaattaagttatttaattacgtgagttcttgatttaatccctattttctctccccctttggcatcaacaaaaagccaaagtgcataagacatacataatttgaaaaaaaatatacacaaggtattcattgaaaaatctaaaccaatcatgaagcaaaaacatgaataacccaaatgcaaacaacatagtcatatatcacaatccataaatatcatgttcaatcatac

SEQ ID NO: 80820 - DNA, 376 bp, Glycine max
  unsure (1)..(376): unsure at all n locations
atgttaatcccttcacctgaacgtattatcgttcttttatatggaaatatcattgcgctaaccttggaccctttgcattgtcatttttgagatttttaattgtttattaacgcttgtggcgtaggaatgtattttctagtcataacacgcgttcttttcacggttgttctcacttagagtgatctcattgcaaatgtgctctcttaggattatgttcatactaatactgatgttgacgtgatgcctttcaatgttgttgtccctatggaggcatcatccactttgagtctgactcctataggtgcacaatccccacctgtgatngatgatgacatggacgacgctatggagttgtagtttgagcctgangaggatc

SEQ ID NO: 80821 - DNA, 239 bp, Glycine max
ttcttttttgaagttgtggatgaaaaataacttagaaaatgtttcagttatccactcgctcagtgcgccttgtacgctaagcgaatcattatgcatgcgctgagcgagtcactgctcgcactaagcacatcaacccctacctattggctgatggggtctcgctatgcgagtcctgtgcgctaagcgcaaaaaagaaaaacctctctggaattgcatttaatggaattaggctaagcgag

SEQ ID NO: 80822 - DNA, 322 bp, Glycine max
atctaattcacacacatactacaatcaaatgatgacattccataccttgaagaaccttgcagaatgtcttgaattctattacacagtacaactaggattggctcaataaattatacacatgtaacaatactgcatcccctgttccatacatagttactgaaaaattaaaaccatactaccgagtagttctaaaagatgcaattaatgagataacacgatatacatggtccaagggtgctcccaattacacaaattaatataacatgctagaattcgcactcgagcctacctttgttcttctatgtcttcagtgactactatg

SEQ ID NO: 80823 - DNA, 266 bp, Glycine max
  unsure (1)..(266): unsure at all n locations
ccccgttccaagagaccctctagaganngaccngtttttttttcagacttttgaaggagggaagtatgaaagtaatttaaaaatttacaagccattagtctgtntttgactagtggacataattcttcagttttcaaaagccaaaattcgatttctcttgcacgtaatgatctaaattatttaaaacagtactactatttattttacttaatgtgctgcattcctacagaaatgctaaaagtaggaaattaagtggaccatttttg

SEQ ID NO: 80824 - DNA, 437 bp, Glycine max
  unsure (1)..(437): unsure at all n locations
accacattcttggtcatgagcctgtcctttggagctttcanagctggctccaaatctgacttctccaattagcctttcctgtaatactgagcagaaggatgtagaggagtattcttattaatcattntagttcatagatgaaaatngcaaagtagaaagttataaaactaaagcttttcaattgatcaagcaaacaatgcaataagcttcaaaccagtagataccaataaaaagaaaatggaaagagggtagctccctagattacaaaatggagcttaatttatttcattcttttatcctttntccaccatcaattatgtcccccaactccaactcattnnctaaattnctaacaacancgacaagttaattaccgtggcatcttgatgatgaatgcgtatcttaagaagataccacanatgatgcataataacacg

SEQ ID NO: 80825 - DNA, 229 bp, Glycine max
agcttattgcacggaaaatgtaattatgaaattgagatggcccgaaaaaacaccatttcctagttaaccatgctttaggaaccatgttcaattattttgttttgttgttgtgttttttttaaaaaatgggtttatgatcccaacatggttggctcatggtgcctaacacatgcaactaaaaatgtattgggaagtttaaccctcccctttttttgttttggaaaaggaa

SEQ ID NO: 80826 - DNA, 450 bp, Glycine max
  unsure (1)..(450): unsure at all n locations
ctaagctctccaagctgctcatttcccaacatgtggagggactnctccagttgtttgtttgtgttatagatcaagngcttctaactntgacagtgtcccaacagaaggtgggatttgacctgagagattattgtaactgaggtctaaaatgatttggagattatgaagttttccaatctcagccggcatctcaccatggaagctatttctagagagccggagctcataaagcttgctcaacttacctatctccggagggattggtccagaaaacttgttgtggtcaagtctgatgacattaaggtatgcaagatcaccaatattagatgggagacttccattcacagagttgtcatttagagagagaactagcaattcggaacatttgaatacgcctaatggaagatgcccagaaaaattattggaggaaagcttcagctctcccaactg

SEQ ID NO: 80827 - DNA, 243 bp, Glycine max
agctttattttcagatccctcttgttggactagacttagcttaaatagcttacgaaagtttagcctaatttagcctaagctttgtcctcagatccctcttgttggactagacttagaccaaacaacattattgtaacaacatacttaaaaccaaaacttaatccgcagatccctcttgtaagactaagttttaattctgcttcatttaagttctaaggcaacaatacatatcccaatgttaaa

SEQ ID NO: 80828 - DNA, 458 bp, Glycine max
gctcaacggagtggattctgtgatattcctctcgcccaattatgatttattttgtagcagacgatagcataaacatgtatgtaaataaaatcacactcataaatgagaatatatttccttgccttattacttctccccttccttctatggaggccctggtcctcgaaaccagctaattagatctccccccctaacagtcaatgtgtttgattgcgagaaggacatcaacgtgccagttaccgttggtctcgtggttgaaaatcgagcccgaggagccagagtggatcgtttccttcatcttgtcacagagtgtgacgacagaattagacaaatccgtgatggtggtgcgacaaatccaacttcaccgagtggtgtgcagttcgtgcctgtgctgcatgaggtctcgtagactgaacgtgacttatggctcagcttacttcaagcgcaagcttgaaaac

SEQ ID NO: 80829 - DNA, 239 bp, Glycine max
atcttgcttgatttacattctccccctttctcaagcaaattcttaattcttcttgacatcatcaaaatcttcatgatttattgaggccacaaggtccaacaggaaattctcatcctgggtcaaggtttatggtgagttgggattttggctcaaggcttgtagaatggctggacatgaggtatgtcagggtgttggtttggccagcggtttagggataaaggggatgtcccacattactt

SEQ ID NO: 80830 - DNA, 420 bp, Glycine max
  unsure (1)..(420): unsure at all n locations
tcgcgactgagccctttcttcctttcgcaacttgagttcactattgctaccccatagagctccgcgaaatatgttccggccatactcttccttgcgagccctcttggtctcttgttcaagggctcttgcggtaattgcattctcttcccgtaacccggcacactccttccgaacgtgtgtagcggccaacttgaacttctccttggcaagttttgcctttccttaactcgctttgagagctcggacttcttcgtcctcttccggtgcttcgaaactctctttgctgacgacttgtaacttggcgagccaatctaaacctcgtatatgaactntcagccattcgtggtacccaccaatgatgccattacgaatgcctctaagctcttgatctttctttaacggnngtttccacgccttatg

SEQ ID NO: 80831 - DNA, 240 bp, Glycine max
agctttgatccggcttttttactgtcacaggtaacttggatctcttcatgatggtagtagtcttagttaccagtctcatgctggatgtgaaaatgcattcttttttattcctaatattgtgcctgctatttattctgtagatttttattataggattttcagtgtgtgggcagacatgttttagttttggatgtttgtatgtgattatagtaacttgctgttaatttttgtgtcatcttg

SEQ ID NO: 80832 - DNA, 406 bp, Glycine max
  unsure (1)..(406): unsure at all n locations
aatgtttagcgaatcgattaccagtgtgtttgaacgttgaaattcaaattcaaatgtgaagagtcacatcctttcacanaanagctttgtgtaatcgattacactgatttggtaatcgattaccagtgatagtttctgaacaaatcaaaagatgtaactcttcaaatagtttttgactttttcaaataggttataagtttttctaaaggacataactcttctaatggttctcttgaccagacatgaagagtctataatagcaagactgtattttgcatttcanaaatcttttccaattcattctttacagaagcaaattttccacattgatttcagagtttctttgtcaaaagctttctaaaccttgaaaacttgtgctactcatccttttcattcccttctccct

SEQ ID NO: 80833 - DNA, 420 bp, Glycine max
  unsure (1)..(420): unsure at all n locations
tgcaatcaagatagtattgtatgttataataaacaacaactattctaataaacagcaactcaacaaacaacattattcattatactactgcatgttataaatattcgactctgatatagcattagcaaagtaacatgtttatatgttctccagcaaggaattaatatggatgtcattattaaatatcattgttgtcgatattcattgcanacaaagggtaaaagcgtcatacctctggccactgaaacgttagacattccacattattattgaactttttcaaaagctcacgagcaataagcagccattgttctgcactccccatataaatgaacggacaaatatcaatatgagcataagcaatatgtcctatagataggtctaacgaagtggtgtctggtaacagaagaccataataat

SEQ ID NO: 80834 - DNA, 244 bp, Glycine max
agctttttatctcagatcagagttgtttaacatgggaacaaggagataaactctctctttctctctctgtgtgatgttattgttattacatcatcatctttaaactccctttgaaccactgtcaaatgaattatcatgttgaacaaaagtcctttgaatccttcaagctgagttgatcttctcatcaataagcattggaagcttgttctggataggaccgacatccttcaagggcatgtctaga

SEQ ID NO: 80835 - DNA, 406 bp, Glycine max
  unsure (1)..(406): unsure at all n locations
tttcatctcttctccctttgccaaaaagaatttgccaaggactaaccgcctgaattctttntgtgtctctcttctcccttttccaaaagaacaaaggactaaccgcctgaattcttttgtgtctcccttctcccttgtcaaagaattcaaaacgacactgtctgagaattcttttgattcttccctttcccttatacaaaagtgttcaaaggactaaccgcctgagaattcttttgtatccccattcacaaagtatcaaaggtttaaccgcctgagatctttgttttaacacatcggagggtacatcctntgtggtacaagtagatggtacatctacttgggtttgactgagaacaagagagggtacatctcttgtggatcagttctagtggagggtacatccact

SEQ ID NO: 80836 - DNA, 240 bp, Glycine max
ttcttagctagacaccagctactacaccttccaatttttctcctttttacctgaaaatgaagtgaaatttatattaattccatgcggagagcctctactgagcaaagataaaactaaacaagaaaatatttacaatcctacaaaaagaaccataaattggagaaaatatatacattttggaaaatgtttctatacaaaagttaatcgtagatgatgactaacaagtagtaaacaagaaca

SEQ ID NO: 80837 - DNA, 351 bp, Glycine max
  unsure (1)..(351): unsure at all n locations
ctaagctcgatgtcataagtataatccccggacgatatagggtatgactgttgcttctctntacttgcctctcatcggagataagaggaaagcaaagataggacactgatttcgtccgtcctgccgtttccgtgatgacgactctcgtctctattccttctttcttcttctgcataaaacaaaatacaaacaacaacaagaacaacgaatataatatacatatacacatatacacatatccggcgaaggaaccgatccagaaaacaacagaataacgtgtttcccagtcaccagaggcttcgcgcttgactatggaggacacatgaatagcgctaggcaataacattcatg

SEQ ID NO: 80838 - DNA, 242 bp, Glycine max
agcttgtctcagcgtttttgcgagacggagaccaacatgctagctatcatcgccaagtaccaagcagagttaggtctagccacggcccacgagcataggatcgcggacgagtatgctcaagtatacacagaaaaagaggctagaggaaggatgatcgactctttacaccaagaggcaaccatgtggatggatcggtttgctcttaccttgaacgggagtcaagaacttccccgcttgttagc

SEQ ID NO: 80839 - DNA, 401 bp, Glycine max
  unsure (1)..(401): unsure at all n locations
ccatgttctcagaatgtgcaaaatcagaatgctcagaatcagaatgctcanaattataatgctcaagatcaggatgttcaaaatcaccaataacagaatgcacagattcaccagttatggaatgctcagaatgatcaaaaggtataaaatgatgcctaactaatctatgaaatgtcctatctatctcangatcaaagggttgtaagtcagatggattgcctctagtcatacactacattcagcatgcacacaactagttgccttgtcatgtaaataaaggtgtaggttngaactacagctaccctcaaatgatatccanatgactngaaattntgtgagcaaccttataaaatgatgagaagatagcacaaaaaatttcagaccaaaaatcaaagtctaac

SEQ ID NO: 80840 - DNA, 239 bp, Glycine max
ttcttttaggattatggggtatccatcacatgcggtactaggtggcggtcgggcgatggtgcaagtcaactctccacatccacagatcacacataaacccaccatccccagttgcccaccttcactgagctcatgtactcccacgtagcccttatcctcgttcctctcaacaccgggtccccatcaatctctccaagcttccacaacatccaagcaattcaacatcccaaacatcatga

SEQ ID NO: 80841 - DNA, 420 bp, Glycine max
  unsure (1)..(420): unsure at all n locations
tctcccatttttaatgatgacaccaccttgtaggtaggagcaacannncaaacaaacaaaaaaaatatctatttgcatataaattacttcccctttgtttttgcaatggtgcttatatgagacaattaaagattcatattttcatatataaaaagtgtctaatanagaatagataatntcttacaatttatctttctctccncttttgcaacatcnaaacanatcatgatagagaggagaaaatgtaccacttgtgcaatgatgagaataagtgtaccaaaggcataaacaatcattcatataatcagcaaaacaagttagtacacatcaatcaaaacacaatcaagcatatcaagacgcaaactaataaaacatcacaccacataataatataaaatatcatcatcaactacaacatga

SEQ ID NO: 80842 - DNA, 238 bp, Glycine max
agctttataagcgttggttcgggagacaaaggtcaagcgttcgcgatatgcgaagatgatatttcgagtactttggatttggtacgactatgccctcctgatttccagctgggaaattggcgagtggaggaacgccccggcatttacgcaactagcataatgtaaacctttacggttttaaaagctctatagttgggcctaggctttagagtttttccttttgttaaggctttgtgtc

SEQ ID NO: 80843 - DNA, 447 bp, Glycine max
  unsure (1)..(447): unsure at all n locations
tatgtggcccaagatattactgagagggcttggaggtctcgttantttatcaccaccaacaactatctcgccttcgccgaagaagaaatccctgccaagggaagagggtataacagggctttgcatgtatcagtcaagtgcatggaccacgtcgtagccaatgtgctcatcgataacggttccaatttaaacgtaatgcccaaaagcactctggagaaattaccgtttaatgcttcccatctaaagccaagttccatggtagtccgtgccttcgacgacacccgtcgagaggtatggagaggttatgggagagatcgacctccctgtacagataggcccncatacctgtcaggttacctttcaaataatggacattaaccccgcttacaacttgcctttgttgcgcccgtggatccactnggtgggagttgttccctctacactcca

SEQ ID NO: 80844 - DNA, 239 bp, Glycine max
tgcttttaaattgtaatggtattgaaacattcataatcagtatttttacaataattgtagttttttatttataattatagatttatattattaggagaaaaagttaactcaatgacttttatttatagatttatgttattagagaatgattgtagtatgtagacgtagtttttttatttataaatttatgtctaattattgtctataaaatatatcagtgtaagaatacaaattcgatc

SEQ ID NO: 80845 - DNA, 306 bp, Glycine max
tggaacgagaccggcaatttaattcaatttatactgtggaatagttggcacggtatgtacatcttgcatcattacaaagaaattttgaaaattttaacttaatttttggcacctttgtcttaatgaatccttctattattactttctaacttaagatgcttgacctcattgatatttgattcttgctgatagcttgaaacatgtatcttggctatcaacatcactgaccttgtcactggtgactagaaaaccatgaactacctctatattaacgatgaatgacaaacaattatgtcggatataatg

SEQ ID NO: 80846 - DNA, 232 bp, Glycine max
agcttttgatgaggaagtgttgaagggtgaaacttcctgcttttattgttgaccacagagtggtacctggagatatgtcgcgggggtcaggagaccttggggacgtcaggtggggtgctattgcccaaaaccaagcttgaccaatcccgacccaacccgggcatagtcggtcagtgagaacctgtgatgtacctaagcaggcgagctcctggcagtcaacagataaaaggaa

SEQ ID NO: 80847 - DNA, 232 bp, Glycine max
agcttttgcacacccaaggtactaatcagtgacggaggatctcatttttgtaatgcccaactcacaaaagtcctccaacactacagtttcaaacacaaagtagccttactgtcataccctaatttcgttcggggaccatccgttgttgggatgcgaccctcgtttgaccacttcgaggtatttggcacccatcgttaggcaatttgtgaagttttgagacatgccggaagcc

SEQ ID NO: 80848 - DNA, 412 bp, Glycine max
  unsure (1)..(412): unsure at all n locations
acacataaaactaagcttgactgtactctacatggagcnngaacgctttgccatgattctcatcacacgggggatggcttaagagttttatttttgtgttgaagatagttgatactatttcaaggcctttgagaattttctacgataactctgttgttatctttatggataagaataataaaagtagaagtcgaaataagcacatcgatattaagtacttagccattagataaagagttactgataagagagtggtcattgagcatataaacactgagttaatgatcgatgatcctctgactaagggcatgccacctgttaagttcaatgatcatgccaagagaataagactaggttctactttatgactgtgtacatacaagctaatgtngatactcttatattgtgatat

SEQ ID NO: 80849 - DNA, 239 bp, Glycine max
ttcttgtcacttgggctttattgggcttggttaaacatcgcatgaaatcattgagctcaaacatcattaggcactgccaaatttgctatcgacaatttcagatcatgcgaaatccctcttttgtccactcaccaaatttacacatgcatcgcatttgtactatctagttactagaaaaaacctattatcaaactaaataaatcacaattaataaactcaaattaagattgaatagtgct

SEQ ID NO: 80850 - DNA, 389 bp, Glycine max
  unsure (1)..(389): unsure at all n locations
atcttctcaaggaagttgtctcanagaagcttctcaaggaagttttctcaagagagcttctcacggaagctacctactctataaatagaagcatgtgtcacatttgttgtaactttgatgaatgagagtcttgtgagacacaactcagagttcaacttctcctcctttttcttccttcaattacgagctcccccctctctctatctctcactctttcttttcctccattgaagcatcctctccaagcttattatgcaacgctcatctgggtggtgaatctccttcttccatggcttattccctagtggatggcgccttctctcacctcttctcctatgtcttccgctgcactctcatggtggacaatcaccattatatgacctgattga

SEQ ID NO: 80851 - DNA, 242 bp, Glycine max
agctttatgctactcaattgctccaggttgctgcatggaagggcagaggtctgtatggtggtcagcagaggaacatagaccacagactcttgcgacaggtacagatttctgattcaaggccagctaggtcagcaagttaaccaatgcatctagtttgccttcaagcttcttagttttagatgatgtagatgagtttgtagctacctcatgcactcctctaatgactatggcatcatttctgg

SEQ ID NO: 80852 - DNA, 465 bp, Glycine max
  unsure (1)..(465): unsure at all n locations
tatcagtattataaagattatgccaaatgtcaagggtttgntgtttggtattatgatatcaaacatgataaanaagagtcattaaattgtgatgcgttagtttgtttgcaacacaggaggattcaaaatcgaataacattgtgatcgagtagatcggattcgagatccctggcctatgattcgaacaaaatgtccagcaaggtttcgtgtaatttatgttacaatacctcacagtggaaagtttctatgtttcataactcccagaatcatgagtagactcctttagaatttgttcacttgtatctcgaatattgttcaatgaatgatggtgacaaagcgcaagttgatagcttacacttatatagtgtgagaacatgccatataatgggattaatgttaggatagaaaggtgggcatgctgatcttgggttgtgtaagaaagatctttataaccacatagacaag

SEQ ID NO: 80853 - DNA, 241 bp, Glycine max
agcttttgtttaggaagtgttgaagggggaaacttcctgcttttattgctgaccacagagtggtacctggagatatgtcgcaggggtcaggagaccttggggacgtcaggtggggtgctattgcccaaaaccaagcttgaccaatcccgacccaacccgggcatattcggtcagtgagaacctgggatgtacctaaacatgcgagctcctggcagtcaacagataaaaggaaaacaagacc

SEQ ID NO: 80854 - DNA, 239 bp, Glycine max
ttcttgatgaagctgatggaggatcgtgtggatccttgtgtcgaaagtcttattgacaatgtggaagtcgagcggcacatttcaatggcagttgctaaaggcggtgcaagtcgagaccatctaatactcatgaaacaaattgcggggattataccaagcatgaaataattgtgactagcatccaaaagctgagagttaaagatgaaattaaaaattttaattgaggatatgagtgttgg

SEQ ID NO: 80855 - DNA, 403 bp, Glycine max
  unsure (1)..(403): unsure at all n locations
ctaagcttataagcgcgggtctgggagacacaggtcaagtggtcgcgattatcaagatgatgttccgagtacattagatttggtacgaccatgccctccagatttccagctgggaaattggcgagtggaggaacgccccggcatttacgcaacgagcataatgtaaacctttacggttttaaaagctctatagttgggcctacgctttagagtttttccttttgttaaggctttgcgactattgttggtgaatttataatacaaggatctntcttcatttgttcctacgtctctacccattctcattcatttgcatgtttacttcttntttctgagatggcagatccgatgacgagtcccccgaacgtactaatacctgcgacccgcctatcgacttctatca

SEQ ID NO: 80856 - DNA, 242 bp, Glycine max
agcttgtccgagcagttaagcaagaccgtagaccagtacaaggaagagctaagcttggcagcgactcataagcaaaggctagaggacgagtacaccaaggtatcaatcctacaagcagaaagggaagcaagggaaagggtgatcgattcattgcacagagaagcaatgatgtggatggacaggttcacctttactttgaatgggagtcaagagcttccccgactgctagccaaggccaaggc

SEQ ID NO: 80857 - DNA, 488 bp, Glycine max
  unsure (1)..(488): unsure at all n locations
cgacaataactnttaactcggatgagtnttgattatatcgagacacacgtcattgaaaacgaaagctctgagcagatgcaaacgacaataactnttaactcgaatgttcgattaagtctcgtaatatatcaagacactagaaactgaaaacgaaggttcgtagcaaattcaaacgacaataacttttaactcggaggttggattgagtcccgtaatatatcgagacgctcgtaattgaaaacgaaagctcgtagcaaatcaaacgacaataacttntaactcggatgtccgcttaagtcccgtaatatattgagacgctcgaaattgaatatagaagctgtgagacaattcaaacagcaataactctttactcgaatgtccgactgagtcttgtaatatatcgagacactccaattgaatacagagactgtgagacaatctacnacaataaattttactccgatgttcacttgagtccgtatatatca

SEQ ID NO: 80858 - DNA, 239 bp, Glycine max
ttctttcttttatatctgattggaatttcttacttgaaagaattccttggttgctttgacacataacactcaacacacaactgttttggtatctcaatttgagggagaccatgaaccattttcttacttttcaattcacttaaactcctgaaatttagatgaccaaacctgtgatgtcacatccagctttcatcacttatagaagcaaccaagcattgaaattttgcaatctgaattcc

SEQ ID NO: 80859 - DNA, 427 bp, Glycine max
  unsure (1)..(427): unsure at all n locations
cggtccttgttgaagataatggctgcacctagacttctagcaggtttgatactattccctgtaacaggaattgtagccaaatgcactagaaacacagcanaaccaataggcagtggtgccaaaatctgatccattcaaatttttataattagacatattgtcataacacanattatacctttgtaaaatactgatataaaatggtgaaagctagtgacactntctttctgatattgattgattgaaatttattaaaaatcatcaattttaatttcatctaatcttagaaagagtattaaaaagaaagtggcactagcatttgtgttaggaaaagtttttactcactggaacatgggagtctctagcatttcttttggcatcagtggcagagaagacagtgtaaacaagcacaaatgtgccaacaatc

SEQ ID NO: 80860 - DNA, 239 bp, Glycine max
ttctttagcgacgatattaaataacaagggtgctagtggatccccttgccttagtcctctttgcgggatgaactcctgcgtgggattgccattcaccagtattgaaatagaagcagactttaagcatccatcaatccatcgaatccatttgtcaccgaatcccatccttcttaacatatacagtaaaaaattccatgatactgagtcataggccttctcatagtcgactttaaaaacaa

SEQ ID NO: 80861 - DNA, 469 bp, Glycine max
  unsure (1)..(469): unsure at all n locations
tcttcttttcagcatanagtacanagagaaggagagttttctattcatataaatatatatactagtactctgttgagactctaaatgcaacttactgcatggccttagatgagaggttgaccagattacaagatattaataccaaatctcaagtgaggttntgttgtgcactntgccatttgaatcttaattcaaatgacacaagaaatttaagcacgaagagacaaacaaaaacattagaatgtaacgacatcatcaaatggcagctcggatttctctaaagcatgccaaaacattgaggccagattcctgtgagcaaactanaacaacagcatanaatgaatacctatagatgtaacattntcttgctcanaaaatgacactggagcattaaacaagaaaaaaaattaaagatgtctatagaaagctgaaacanacactgggcatagataatatgcaattctttatt

SEQ ID NO: 80862 - DNA, 241 bp, Glycine max
ttcttgcttgagattcttctatggaggctagatctttgagcttcaatgaggtccttcaatggtgattttcagccatgtagttgcaatgaaagataaaggagaagacgtttgaggaggcgccatccactagagaataagcaatggaaagagaagcttcaccacctagagagtgccttggataagaagcttagagaggaagtttcaatggagaaagagaatgagagagagaggcagagaggga

SEQ ID NO: 80863 - DNA, 196 bp, Glycine max
tcacggacaagcctaatacataacattgaaacattgacacatagttatgtacaagataatagaaagataattcgtggctgttaaaaattgctgcaaaacaaacaatgagcgacgtgtttttgtcgttgtgtcgctcggaccaggtcctcagaattccctctgaacaaattattcaaaaagtggtagacatagcttg

SEQ ID NO: 80864 - DNA, 232 bp, Glycine max
agcttttgttttcaattttgagcgtctagatatattacgggtatcaatcggacatccgagcaaaaagttattgtcatttgaattttgtgtattcattttttagcatcaagaattattaaatgactcaatcggacatccgagtaaaaagttattgtcgtttgaatttgctgacagcttttgtattcaatttcgagagtctcgaattattaaatgactcaatcggacatccgag

SEQ ID NO: 80865 - DNA, 496 bp, Glycine max
  unsure (1)..(496): unsure at all n locations
tacttgcggggcttctatggagggctggatcttgagcttcaatgtggtcctttattgttggttntccaccatggagatgcagcggaagacaaaggagaagaggtgagaggaggcaccatccactagggaataagccatggaagaatgagcttcaccaccaagatgagccttggataagaagcttggagaggatgcttcaatggaggaaaagaaagagggagagaaagagagaggggggagcacgatattgaaggaagagaaagggagagaagttgaactttgagttatgtctcacaagactctcattcatcanagttacaacaaatgttacacnatgcttctattatagactangtagcttccttgagaagctttcttgagaaaacttccttgagaagcttctttgagaaaacttccttgagaagctagaccttagctacacatacncctctcataactaagctcaccttcttgagaagattcttatgaagatcct

SEQ ID NO: 80866 - DNA, 242 bp, Glycine max
tttcatgcaagcttatggatggcgtgtctggcttccaattgttaagtttcctggacacctattcaaggtacaaccaaatcaggaagcaccctctagatgaagagaaaaccgccttcataactgaagacaccaatttttgttacagggtcatgccctccggactcaagaatgcaagagccacatacaaaaggatcatggaccgggtctttaaacaacaaataggccaaaatgtcaaattctat

SEQ ID NO: 80867 - DNA, 241 bp, Glycine max
agctttagttcgttgctgctgccccatagagcctctcggaacttgttcctactccattcttcctttcgggacctttttgtttcttgctctaatgcttcaaccatggtcatgttgatgtctttcagctcgtcacactgttttctgaccctagcgactgccatcttcaacttctctttcaccactctcgtctttttgagctccgctttcaaaacttgcacttcttcactttcctcgggaattt

SEQ ID NO: 80868 - DNA, 429 bp, Glycine max
  unsure (1)..(429): unsure at all n locations
ctaagctcgactctnngtgaggaacccttactcaagctatttttaatgtttactcanaccataaaaatttcatcacactcatagcanatcagaaataaatggcgtgaatggtttatcattacagttacaacaaatcaaacacaagtggtgcacaaatcaaacatgaatggtgcgaatggttnttctttgcaactactatccacaaagtgagatagaggttagggattaaacaaatcaaagcacaaaagtaataatgttatttgtagtgtgagaaaataacaattgaagattgctaaggcgcggaaaanattcaattacacttctccaaaaattgagataaagcttcaagattaagaaaatacaagtgaaaaattaaaagtaataatgttatctgacgtgtgagaaatcacatctgaagattggaaatgt

SEQ ID NO: 80869 - DNA, 238 bp, Glycine max
  unsure (1)..(238): unsure at all n locations
tttttattagtgaatnngancagcactcatagaatgacctatgtttatatatattctaggacgctagctgttaatatgtagccaacttttaaccttcatcatttccaccatctcatcttataatcaactcaacagagttggaaaaaaattggtttctatgccaccatattgactaaattacacaaagccaaacaaatatctaacgctctttgtcatttcttctagttgtcacccgtag

SEQ ID NO: 80870 - DNA, 268 bp, Glycine max
  unsure (1)..(268): unsure at all n locations
ccgaagcggaatacgcgctgctttccttatactatatgagttgacatgatataaccatgcttctattaggtacctagtttatggtatctttcgcgcgcncttatcgatgaatgtgcagtctttagagtaagccgcatatatacacctgtatatacacatcttatgcccttcttacttcgctacttaattgaggcttgaatatactagatcgttgctatgagtgttcagatttcgccacangtagcgccctgttacggatatcttctta

SEQ ID NO: 80871 - DNA, 241 bp, Glycine max
  unsure (1)..(241): unsure at all n locations
agcttagtttgtatttngnnggaagcaaactcaagtttttccggtgtgtattgccaacaaagtcataactattgggttgttatttacaaatatttgaaagcatattactttattagtacgatagatattcttatgaagttcattttcttgattggcatgataaatattcttattaaaaaaactggattcaaaaactactacaaaatatacatttaacatcggttataagaaaaactgatgt

SEQ ID NO: 80872 - DNA, 498 bp, Glycine max
  unsure (1)..(498): unsure at all n locations
gtcctgcattattacatttcttattccaacaccaaaagcatcacattcaatttcaaaagccttatcaaaattaggcaaacaaagcanaggtgcattggccaacttatctttcaataaattaaaagctttctcatacacatcagtccacttgaacaccacattattttttacaagttcatttaaaggtgcagcaagtgaactaaagttcttcacaaattttctataanaacttgctaaaccattaaaacttcttacctcattagcattcttaggtacataccattccctaattgcctctnaccttttttcatccacacttattccttttgagctaatgacaaaacccaagaatacaatagaatcaagggcaaaagaacactttttaagattagcatacaanttattttctatcaaaacatntaaaacaacatgtaaatgatcaatatgttcctctaatggtttgctatagatgaccatatcatcaaaatacaccacaac

SEQ ID NO: 80873 - DNA, 242 bp, Glycine max
agctttggtgttgaggacctatataacaacaccagggttttaatttaaggagtttttttggagaggagaataattctaggattttagaattccagtttttactgttcatgcgcactgttcacataaaataaaattcgttttctgcaatttcgtttctgcttcaatctataatttcattttctactgattaatggaaggctaagtctctagcgttgtgttctcttgaggatcaagcacaactt

SEQ ID NO: 80874 - DNA, 407 bp, Glycine max
  unsure (1)..(407): unsure at all n locations
tagtggcatctaaataatcatgttcgttgtggctgatcaaccacatgagtctgatttgcatacaagagcatatccgcctagatcaagaacatatgcatgtctctcgtccgtaaggggaaagtatagtccaatgtgcagtgtgctttttaatgacgagtatctcaggatatctctttataatgcgaatcaataaaatattgggtagaatgagtggcaattattacattcgacaactgtaccactagcaattcttattattgacccggactctatgtttgcttatgaatcatgattgtacaatatctactgctgtaatcacagaacacaatcatattaaatagctatcgttcacgaaacatcaatatgngctgttgggacatctatatgctgctgattactacgtctat

SEQ ID NO: 80875 - DNA, 245 bp, Glycine max
agctttttttttaaagctctaccaccgaataaacccattatatacccatttccttcattgttttccattccttgcttgcaatcttactatttgcctcaaatgaaacaccattagataaccatcatctgaacaaatcctgtatcttcggaatttgattgtcactaattgtgtgcggaaaaatgtcttgcagacaagggcacacactacctactaacctttaacaacaaggtgaaccaaaaacccac

SEQ ID NO: 80876 - DNA, 379 bp, Glycine max
  unsure (1)..(379): unsure at all n locations
cactcagnnggccgctgattattaatttatgtattacatggatatattccattttcaatgccgttcttccttccatctctgagcatactactatttgatttggagagctattacttatttacttatgcaattattttttgcagatggaggccttggtgagcactagccagtacattagaagacacttattcaagtgggagaaaagttcacttcattgtcttcggcagaaatttaacagctgagaaacaacaacaaanagttccatatcatcaattgttattttcttttgtaaatttcttattgaccactagataataaactacacgcatatgcatttatatatgtgtgagaggagaacaaaaagagcggtacgatatga

SEQ ID NO: 80877 - DNA, 214 bp, Glycine max
tgcttgtttaatttgataatattcaatttcatagtatattagagtaattgagaaaattttaacctttcacttttttcttgttattacatcgtatctagtagttttcaagtacattaatttatacttgtgatgtttcttttgctcatgaacagtatggcttgcagaagacaatgttgctaaaagatcatatgttataaaccaggtaagtgtggaa

SEQ ID NO: 80878 - DNA, 526 bp, Glycine max
  unsure (1)..(526): unsure at all n locations
tctgganatctctcctttctcatgtgaactttaacccattctccgggttgaannaacaaccttttgcgtcccttgtttgcttgtctatcataactctcattcctcttttcaatttgggccttgactctttcatggagctttttcacatagtccgctttggcttgtccttctttatgcttaaaaactgaaatattaggcattggaaacaaatcatgaggagttagtggattgaaaccataaacaacctcaaaaggagaacaactagtagtgctatacacaaccctattataaagcaaattcaatgtgaggtaagcaaacttcccaattnttaagattttttttcanaacgatccttagcaagatactcaaagtcctattcacgacctccatttgtccatccgtttaagggtgacaagtagtagaaaatagtaacttagtacccaactntccncacaagatcctccataaatggcttangaactnggagtccctatcactaacaatgcttcttgggtaatcatggagt

SEQ ID NO: 80879 - DNA, 242 bp, Glycine max
agcttttattgacttttctttttagagaagagattttaggtcattggcacaaaagagtttatggcgccagaggcacaaataccatatttctatactctaaatctctaattcaggttaccagtgtttgacaaaagagtttttgaaataattttaaaactaatgatataaaaaaattaatatttcttgtggaactaaatttgcttgtaaattcacatgaaattttgtcctaattttcctaccac

SEQ ID NO: 80880 - DNA, 508 bp, Glycine max
  unsure (1)..(508): unsure at all n locations
acccaaatagtttctaacactcaaactagaactgaaaattctactangttgtatttgaagntntatactgacaataatcccataaataagtggttgccaagaaaaaaacaatggtcagtgtacattcgaatntcttattatttgctgcaggcagtaagcatttttatagatatggatgagtcgggtgctcgttccaacgagtggatctacaaatagaatgcattgctgaattgaaatcttatttagtcaatggattccagattccagtgaagaanaagtccatagcgcgcatgcaggaccaccactttttgtgaatttcgttaanttggaattggtatacttggatcttacaacatctaccagaagcttctctaacgttctgttgcaacttagcatcaggcctaggcaatatattttgggtcgtccttctttnttttcctttgtcgatgtaaatganngtatatagaaaaacatcatattaaattctacgaactctcttcattagaga

SEQ ID NO: 80881 - DNA, 238 bp, Glycine max
ttctttttcaaagattttatgatttatctttctatggatatgtggtaagttataaaattaaaaaaaaaattccaagaaattggggataagaagcaatgatgtctccataaccatgaaccatgaaattgggatacaacacctcttttattatgagattaaaactctccttgaatcataagctttaataaaaaaatataactttttttctttttagagattctttaatttagttgataaa

SEQ ID NO: 80882 - DNA, 539 bp, Glycine max
  unsure (1)..(539): unsure at all n locations
ctaagcttccgccatgganttgggttaatggatcanagcccncttttgtntatagataatatcgcngatcagcgtatatatctgaaggtcggtgggagacaaatttagtctcgcacaatgtcctagaaatgatatggaacgaaaacaaaaaatggaagcaattntgtatgcatcagttattgcatctaccatgaaagctgaatttgtagcatattttgaggttataattcaagctaattggttgcggaactttatttcanggcttgaaattgtcgacaatattgctagaaccactgaaatgtattgtgataacttcgtaacactttnnttctgagaacgacaagtactntaagagtgctaagcatatganattgaagtactctgtcgtgaatgaagaagttcataaacagagtgtcaatagaacatattattacaaactntatgatagtagaacctttggcaaagggattaccgcccaagacatttatagaacatgttgaaagtatgagcattattcgtattcgactggtattacgtgt

SEQ ID NO: 80883 - DNA, 240 bp, Glycine max
atcttttcttcaatagcttggattgacctttctgatcccaataatttgagagcaataggttgatcaggaccaaaaacttcaccagatgcaagctgacacaataaataaactcggattttagagtggaacgatgacaacaaagccttagcccaccaagtgagatcggctaaatggatcacatgacaccattcaactcagttaaaaaccaaagtttcaatctgacaactgatataataaaag

SEQ ID NO: 80884 - DNA, 504 bp, Glycine max
  unsure (1)..(504): unsure at all n locations
caggtgaatggccatgatctatggatatgtaacttctgtaaccgggtaacaacctattgaagaatttttccaaagtaataaatctggttgttgatgcaccaagccatagtcttgtatcttctctntaaatntatccaccatagggagctccctagaaaccactctcttctccaatgtaacccccaactccaccttccatcttccctaacatccacatctaccccacagcatcatatttctcttcagaattcanaaaattatgtcttactttgctgccaaagtatcctcacctccccatatattatgccaaaagataattntctttccacactagattattatcatacaacgatccttccttatcttttccacaaatgctaaccaagtccctccaccatagtgaatccaaattagatgagctactcaccttagnatangatgaaacaccatatctntacctcannaatgaacactatggagcatgcaccttatgaagctatctca

SEQ ID NO: 80885 - DNA, 241 bp, Glycine max
ttcttactttaatttatggatatctgtggagtatctgtcactttcatctgagtgaaggcagtaccaacaacagttccagagggtatatcagccagtgaaaccgcactcaaaaatataaatgcatctgttacatcctcacgtggaaggttgcatggtaaaattgttttatcaggtaagtaggaaaatctttcattgagtggacagcaatgacaatgtcaccatttatgagtgcctcgtctaa

SEQ ID NO: 80886 - DNA, 434 bp, Glycine max
  unsure (1)..(434): unsure at all n locations
gagagaagttgaactttgagttgcgtctcacaagactcgatctcattcatcaaagttagaacaagtgttacacatgcttctatttataaactaggtagctntcttgagaaaacttccttgagaagcttctctgagaaaacttccttgagaagctagagcttagctacacacaccctctcataactaagctcacctccttgagaagcttgcttaagaagattcctaaagaagccagagcttagctacacacacctgtctaatagctaagctcaactccttgagatgagaagctagagcttatctacacactccctataattgcttagctcacgcctatgccaaatacatgaaaatacataaataaagtctntctgctaagacttctctaaagttctaaatacactgtaacaccctatctactagatgaccatatc

SEQ ID NO: 80887 - DNA, 242 bp, Glycine max
ttttcttgcaagctttatggactagcagttgcagaataagtagttaatcaaaatgagcaaagagattacctgtaactggcacccaaaatgatcttggaacattttacatgcattttctattttacccatatgtagtggaagataaggagatgcccacactgtgacgtaaatagaatccaagggagtttcttcaatatctaatctcactagaccagctatgtgaattgaatgaccagcctacc

SEQ ID NO: 80888 - DNA, 523 bp, Glycine max
  unsure (1)..(523): unsure at all n locations
ctaagcttgagcacaatccaactcaccatgaaccttgacccgagaagagtatttttgtccttgttcttggaagagaacaaaagacacaaaaaaagatcggaagaaaacaaanaacgagcgagagaggaaaacccccgatcaagatcagaagataatgaaagaattatacagaagggtctttagaccaaacaaatatccaaaatagtcacaaccaaataaggaaaataaaggagaccatgacttgaagtggtcctttccctttgattgcaaccacaatcctgggtgctggcaactttctcacctcacactaaacaaaaatagatagggagaaggccaaaacattcagagccaaatttctcaccanaacaccattcccgacaaagtcctattgatccatgatcgcacatgtaatctttggtttgaaggaaatgatttgcaaatcaaatcatgacatatctatagttcgaaattaggataaaacacttacttgtgtgagaatgatacacttcaagtgattctcttc

SEQ ID NO: 80889 - DNA, 234 bp, Glycine max
agcttttaggattatggggtacccatcacatgtggtactaggtggcggtcgggcgatggtgcacaacaagttttccacatccaaaatgcgcgcataaacccaccatcccctgttgcccacctccatctgagctcacgtactcccacgtagcccatatcctcgtttctctcaacaccgggtcccaatcaatcctcccaagcttccacaacatccaagcaaaacaacattcaaata

SEQ ID NO: 80890 - DNA, 226 bp, Glycine max
atgcgtgcttcacccacgagtttggagtcgtccgtagtgattgcttacagcaatgctccattctccatcctttttcggagccccatgaattgcgtgaccgttcatgcgtccttgacccacgagatgggagccgcaacgtagtgattgcatattgctatactccactctcaatcctgtgacggagccccatgaattgagttaacgatcatatcgtcctccacccacg

SEQ ID NO: 80891 - DNA, 242 bp, Glycine max
agcttttgaaatcctttacaagcaaagatccacaagggatgtaccctcccttgttctctttgaacaaccaagtggatgtaccctccacttgaactgatgcacaagagatgtaccctctcttgttctcagtattacaacccaagtagatgtaccctctacttgtatcacaaagaatgtaccctccaatgtgttaagacaaagaattcttaggcggttagtcccttgaatctttgtaaggggaa

SEQ ID NO: 80892 - DNA, 516 bp, Glycine max
  unsure (1)..(516): unsure at all n locations
gctatatgaatgataacttaancttatttctgagattataatacatcataatggtggaaaccataagatatagaacataagtaagactcccactaaactaaggtaccatcaggaattacatccatatgagtagtgtgctcatganaaaaactctaagtgtcagacctttagtaagtgcatcagctagcatggaatgagtccctatatgttctatagaaatctgtattttttgagttctttatntaacaaccaaatactntatgacaacaagattttacttggttgaatcctaaataagatcgctaagatgttgtcccaataaacactcgatgacttcttaatgttggcaacaacaactaagctagttacaataatttaaaagtcatanattctagtatgatgtctcatagcanagatattaacttcaccaatgtggctaaatgtggatccttgtgtggagtgattggtataaaatattcataaatcgatgtagataccaatgactctaacttctag

SEQ ID NO: 80893 - DNA, 237 bp, Glycine max
ttcttatcctaaatgacacttcttgtaccaccaagtccctaactcaatcacgtttaaagtcctgttgagtgagtacaaagtgacttgcagtagtttggtgagtaattaagcactcctctatctgtcaaattttaaaatcatatacatatccaatatgaatttaatgttaattttaggatgtgccgagtaccatgtactcatgtatgaaatttgcagaattcacccatctgaatttgg

SEQ ID NO: 80894 - DNA, 506 bp, Glycine max
  unsure (1)..(506): unsure at all n locations
agattctcatcatgcanagctggcattaactagttcagtttaggccaattatgagtgtagagcagttcattatgaaggtggcctggcctggagcccgaccttcttttgtgggggataatgaaagttntacagcccaggcacctcaacaacatgagctagaaccagaaaacgatcactcatttgaagccatcatcccctgagctgttgattnttcaaaaagaaaattagagacgagatccaatgaggctgctcatcctggaccagtgctagtaccagctgatgtaccatttccagggatggatccatcttcacctcagcatgcaatagactcttccactcctatcttagagatacttgagggacataccacaccagtcctggctctggacacttctcctccagctacttcagtattgcatctgacagataaggaggatgtacaggcacaggaatnntgattcctgatgatactntttgctntntggattatanntatatataatttt

SEQ ID NO: 80895 - DNA, 241 bp, Glycine max
  unsure (1)..(241): unsure at all n locations
agcttatttttgcnanttttaagaagagaaatgcatatgtgtctgtttccttcagtggactgatggaggttttgaacagagtgaccaatcttataactgctttctttatttaacagagttggtttacacttttcctgaagctatattcatcgttttcttattaccacttcttttctttgtttaaaatatagtattctttccatacgaatcatactaaaaatagtaaactacattgatacca

SEQ ID NO: 80896 - DNA, 532 bp, Glycine max
  unsure (1)..(532): unsure at all n locations
ctaagctgccattagatcttgttcctagaatacctacgtgtattcatttgtttgtatgaactctagaactgggcaaatattgtgccttttctgagatatgtaataaggtttatgcactcgattaacaaacatgtttatctgttgatcccttttgctttcattttcatggtaatgagtttcttgataactcttttgaatatcaaaagctttgatagcttttgcaacaaatttctcaaaaactacactacaatacggaaaaagcatgacctcactctnttaagtctttttctatcgcataaggagatctagtaaagtgtctcttgcaggtggaaaaacatattctcctttcttttcaaagtcatccaaagatttcgcctcatcaataaaagcccncaccatcaaaatttgaattggtgtgcatagttggtatgaacttgaanaggattagtgcaaccttcacaagttactcttcaaacttagcccttcttcatccattagcttatgaatcatgtcgctgagacacaaacaacta

SEQ ID NO: 80897 - DNA, 242 bp, Glycine max
agcttatctgattatggggcacccgtcatatgtggtactaggtggcaatcgggcgatgacgcaaatcaactctctcatttccacaagtcaagcacaagcataccatccccagttgcccacctttaacttgagctcacgcactcctacgtagcccttatcctcgttcctctcagcaccgggtccccatcaatccctccaagctttcacaatatccaaaaaattcgatttcatttaccatgaaa

SEQ ID NO: 80898 - DNA, 409 bp, Glycine max
  unsure (1)..(409): unsure at all n locations
atagccgaaccaatataanacttgtgtttgctttcttcttccctacgctctttacttttccgctgtgcactatttatttccgctgtacttttgtctaagatattgtttctgttctttactttctcataacttagtagtaaagcctaattgaatctagtaacattatgaaggataaattnttaattagtcaagacacgttcataattaattcaacccccccttcttaattattccgaggccacttgttccaacatatcggacttgattgtctctatatagcgaatgcggctgatcgatgccgtacccgaatcaaataaacatgaaaatgcagtaactatgaagtgatcctaggtcgtttcccaacgagcagtgacaagccaaatgttcataatatacttgcagtaacagt

SEQ ID NO: 80899 - DNA, 238 bp, Glycine max
ttcttttagccaaatggacttaccttgaattaattcctttgatagcccctttgagcctattttcccctttctttgttttgaagctcattacaagccttaagtgaaaaaccatgatatcaccttacccttaaggaattttggagctttggaattgttttgggaataagctgggaataagtgtgggggggtatgtttcattggaagatatgatttttggccatgcttaatgttttatttt

SEQ ID NO: 80900 - DNA, 241 bp, Glycine max
agctttatccttaattattgtcttacccttgggtgaacccttgtaggggagagtaagttacttagtcaattcttatttataagacatagtcaataaattttttatcacttattctaagacttcattttatctcttgtgtattaattattttttattaagataccatgcattgtccttttctctctcttataaaaatcagagaagatgagtatgtcccaataaagttatggataaatttaaa

SEQ ID NO: 80901 - DNA, 425 bp, Glycine max
tctacttatgtggcagggcgggcttccttcatcttcttgtctcttacgctgaacttgaccatgggtcttccttcccgcgatgcttcttttcatgtccgcctgagtgggcttatagcctaaaccatacttcccacgatttccttgggtatttatcacgctagttatgccgccgatgttttttcctaaacccatcctgtgttcataaccgttccccaacataactcgggccatcattatcgctgcatcggacagacaaggctgcccaaagagggagtccacggaggaaatgctgaccacctcagaagactggaaagcagtttctaacgattcttctgcggcttccacataaggcatggaggatgggcagcttaccaagatatcttcctcgtctgacatgatgaccaagtgccctttcactacgaatt

SEQ ID NO: 80902 - DNA, 240 bp, Glycine max
tgcttttttcagtcgtctgtaaggatgattgggtgttagaaaacggcgatgcctactgtagactatttttcttgcatgttttagttgtatgtagcttgtgttttcttcacagatgggacatgcatgatgacccttaacactgtaactggtgagattcccatatactggaaagtcattaatggtacaaaaaagcgttgcacgcatttcaaacgtctccttgcgaaacgcatcaaacactac

SEQ ID NO: 80903 - DNA, 461 bp, Glycine max
  unsure (1)..(461): unsure at all n locations
tgctgggacaaagataagaagcatattccccatattccctgtgcacaagaatccccatgcacaaccacccgtacatataacaaaatgaaggcaaaggtgttaaagtaaattatgcaacttcaaacaattgaatgtttgctaaatgattatgagaaataatcatnttttaagttccttcaaaatcaagaaaaaaatacaaaatttaattagaatctaccaagagtgttaagtactatcatccattcacatattgttatatgtaataagtttatagacttatataatatntatcttagaagtcatacctaacattactcttgatgagttaactatatataaaaactctataataatatacatgagaattacactatagaactaaatagttatttcactaatataaactatagagaatagaatcaactttatcctgaaactagtattctctctttcaaagtggt

SEQ ID NO: 80904 - DNA, 239 bp, Glycine max
ttcttgttcgagcagttgagcaagaccgaagaaaatatgtgggccatcaccgactagtacaaggaaaagttaagcctagcagcgactcatgagcaaaggctagaggatgagtacaacaaggtatcaatcctgcaagcgaaaaggaaagcaagggaaagggtgatcgattcattgcacagagaagcaatgatgtggatggaccagttcgtctgggagtcaagaacttccctaactgctag

SEQ ID NO: 80905 - DNA, 369 bp, Glycine max
  unsure (1)..(369): unsure at all n locations
ttctctncgactttggcatcaacaaatagccaaagtgcgtatagagacataaaatcatacattcatgcataatcatccaagcaaggaagacaataatgcatacataaactaagcaagtatgataataattcattcataaactataatgtcagataatttagagggtcatccaagataacttaattaaaacaactaaattagaaagtaacatactaataagcgtttcataacatagccaaatacacggctagaaatcaaaatactaataataatagtaatgtctaaactgacggtggtggtggaggtaaatcaaggcagtcacgaatgatggtgacatcttcttcaacctttgcaatcctcgagttcatc

SEQ ID NO: 80906 - DNA, 266 bp, Glycine max
  unsure (1)..(266): unsure at all n locations
gggaccctntagagangaantgtttgtttgnaagtttttatttaatttgatnagaaaaatttttntttgtgatatgaaagaaaannnaatttataagttggaaaaaaatttttttgtgccanttgtttggttgtttagaatagtttttattgatnttttaaatttggggcttgactgtttnatgaagattttttaaatagtatgatttggattgtanttacttatgcttaaaaactgaaatattaggcattggcaacaaatcaaga

SEQ ID NO: 80907 - DNA, 495 bp, Glycine max
  unsure (1)..(495): unsure at all n locations
ctccttgttcaatctctcatcaacttcatccataactttcccttccatatacagttgccacacccagttcatgagaggcacgtgaaactccccatcctgataagtccttcttccagaagcaatttcaagagccacaaccccaaaactataaatgtctgattccttgctagcccgaccttcgttgatgtattctggggcaaggtacccatatgtccccaccacccctattctctgagtcctcaaccttggatccaccaactntgccatcccaaaatcaccaagctnggtgctaaaatctgtgtccaatagcacattagccgatataatatccctatgaagaacactntgctctgcatcctcatgaagataacgaagtgccaaagccacgcctaacgctaccttgtacctggtagaanaatngagaagagaagagatcattgataacaatagtggaaaagggtntaattaaactaccttttaatgacaataaataat

SEQ ID NO: 80908 - DNA, 242 bp, Glycine max
ttttttttcaagcttttaattgaatttgcaatgttccaattgatttcaaaatggtgtaatcgattacaagatattggtaatcgattactagtgtatctgaacgttgaaattcaaaatcaattgtgaagagtcatatcctttcataaaaagctttgtgtaatcgattacatgattatggtaatcgattaccagtgacaagttttgaataaaaatcaagagatataactcttccaatggctttc

SEQ ID NO: 80909 - DNA, 140 bp, Glycine max
atatgaccgagagttcatccatgccagagaaccacacacatgcgatgacgcgagtcagatgtagaaacacataatgtccagacactgaatgtatcatgtgagacctattatgagctaatttatttcaaggtgttcccatg

SEQ ID NO: 80910 - DNA, 242 bp, Glycine max
  unsure (1)..(242): unsure at all n locations
ttgtctagctttngagccaaaatcctgactcaccataaaccttgactcagggtgagaatgtcaatccttaccctcggaagcaaaaaaagaagagaaggaaaatttccaatcaaaggaaaaaagagaggaaaggaaattcccaatcaaagagtgggagaaagcaaaaagaaaagaaagaaaattcccaatcaaagaatgggagaaagaaaaaaggagagaaggagaagaaggaaagaaagctc

SEQ ID NO: 80911 - DNA, 340 bp, Glycine max
  unsure (1)..(340): unsure at all n locations
tagctttaggcgtaatcttaagtttaataaggtccttcaatgtttatatttatccttggagccgcagcggaagataaaggagaaaaggtgagaggaggcgccacccactacagaataagccatggaatgagaagatttaccaccaagaaagagtcttggatatgcttcttatagaggaagctttaatggatgaatacaatgatagagagagagtatcgtggaatgaacgagaataatgacagagactgaacttctgagtgtgtctcacacgttcctcattcatcaaagatgcgacatcgtgtgcacatgtttctatctatagcctangtcactaactaat

SEQ ID NO: 80912 - DNA, 126 bp, Glycine max
cacgcccagggaaggccaagaaccccgggggaccagccaaagcgcgccacactacgcacccaccggcaaacaaaacggagcgggaccaacgaaagcacgcacacgcggacctgcgaccacccaccg

SEQ ID NO: 80913 - DNA, 237 bp, Glycine max
agctttttgaagaacctaattgagggttttctctagacaatattaccctgcctcgctcatggacaattagataatactagggtaaatgataacagcaaaattatgaatcttattaagcttgtgaatctcgatatggaaaatttcacatcattattacggtatcaaatagcaagaaagtcacccacaatgggtgactgaagtgggatgcaaagtcagcagttcagggattcaaccaca

SEQ ID NO: 80914 - DNA, 269 bp, Glycine max
  unsure (1)..(269): unsure at all n locations
tgaagacanagatcctgctgcacatgcgtggaatgatgtatgtgtcatcgctcttttatgcgcttcattctattaattggcacgtgcgtggtttttcctgatatgtgaaacacgggaactcctataattctgtttggaagggaccgtgctttttgcgtggatctggcatttgtcggtacgatttcagaatacgaggtgaatagctatcggtcgactgactgataatatatctccagtgttcgatgacgttttgttcctatgatttatac

SEQ ID NO: 80915 - DNA, 243 bp, Glycine max
agcttttatccttaaggacttaccttgaattaattcctttgatagcccttttgagccttgtttccctttccttgttttgaagctcactacaagccttaagtgaaaaaccatgatattaccatatccttaaggaattttggagctttggaattgttttgggaataagtgtggggggtttttgtttcattggacaacttgttttgttggctatgcttcatgatgtattttgggccatacttgatg

SEQ ID NO: 80916 - DNA, 448 bp, Glycine max
  unsure (1)..(448): unsure at all n locations
catactgtatatacccttctattatcttctcaatatgggccttgactttctcatgcaactttttgacatattttggtttaacctacccagacttatctttaattgagaaatgttaggtaaaggcgacaaattcaaaggagtcaaaggattaaaactgttaacaatttcaaagggtgacatctgagtagtactatatatagtaaattcaacatgttgtaaacactcttcccaagtcctaagagttttcttaatgacagctctaagaagcgtagaaagaagtttattgactacctcagtttgcctatcaatttngggatgacatttagttgagaataacaatttatgtctaatcttacccacaaagtcttgcaaaatgactaagaaaattgaatctaatcactacatactctaggaaccatgcatctgcacctttgagacnatagaacat

SEQ ID NO: 80917 - DNA, 242 bp, Glycine max
ttgcttgcaagcttatggcaaagtggagcagccaacagcagagaagcatgatgcagcggacaatgagtttcacaatttcgaacctttcttccccattccaacctgcttcaccaagctcttttttaatggtggccctgccgcaacggaccaccaaggacaatgagtttcttgagttggaattgtcagggcaaacccgaatgcaatttagatgattcgtgaccttgtcaggacccaccatttga

SEQ ID NO: 80918 - DNA, 508 bp, Glycine max
  unsure (1)..(508): unsure at all n locations
agaaagatcacaaggaggatcatgattatggtatgaagagaaagagaataagagcaaggtgatgaaatgggcattgccagggttgcaatttcaacaacatactaaggcacttgaagcaagtactgaagatgcttccggttctggttcttcttctttntgttgtacttctgatttgggccaagggatttcagtttcttcgtcttgggattntagccatgcaaggtttggcttttggctctattatgattagattaaggacaaagcttagatgtagttccttaggtgcttttggtgcacagtattgtgattagattaaggataaaacttctccaatcaaaattagagttntacttcagtaatcctctctgtgtaaaggtcaacattgattcttgaggaacttcaattctgactgtagaatagcactaaacacacctatggatgcgctcactnntcttgattngtgtgtcgttggtattatttggnntttgtggtgctgagtgtgctagta

SEQ ID NO: 80919 - DNA, 238 bp, Glycine max
agcttctggtgggacatcttgacttgctttccaatctgacattccccacagattctgccttcttctattttcagattgggaatgcctctaacagcacctttgtcaatgattttcttcatgcctcttaagtgcagatgtccaaatctttgatgccatatgttgacttcatcttctttggaggatagacacgtggaggagtaactggtttcttgaggtgtccataggtaacagttgtcct

SEQ ID NO: 80920 - DNA, 517 bp, Glycine max
  unsure (1)..(517): unsure at all n locations
ctaagctctcgcgatcaagatgttcaactgcacagctnggtaattttcttttttattttttttaattngattntctttttcttcttctttggtttggtaaaagtgtgttttagtttcattanccttttttttatgtttggggtttttgggttttatgaataattagaagcttaaaaactcttagaagccttcggcgctgaagtggggatagttgtttggagctgagaagggtggaaaatgtttgaagaatttgaggtcgagattntaactnttaactttntaaagtttttntttctttctgcggattcccagaattacaatganttatagagtttagacaaaattagcctaataactagcattngcaaaaggttattattatactaaagaagacttcannatngttatgtgattntctttntctggttntatatgataacattcttgatgagtatttgagaaaagaatnntatcaacgtntgtcttttgtatgagatgaaattctagtaatggatat

SEQ ID NO: 80921 - DNA, 241 bp, Glycine max
agcttttttggaagttttctcaagaaagtttctcaaggaagctacctagtctataaatagaaacatgtgtaacacttgttgtaactttgatgaatgagagtcttgtgagacataactcaaagttcaacttctctccctttttcttccttcaatttcgtgctcccccctctctctttctctccctctttcttttcctccattgaagcctcctctccaagcttcttatccaaggctcatcttg

SEQ ID NO: 80922 - DNA, 511 bp, Glycine max
  unsure (1)..(511): unsure at all n locations
aagctgtcaaaatggtaacggtgaaggcctgatctatggtttgtaacttctgtaaccgtgtgacaacctatngaagatattttccaaagtaataaatctggttgttgatgcaccaagccatagtcttgtatcttctctttaaatatatccaccatagggagctccctagaaaccactctcttctccaatgtaacccccaactccacctttcatctttcctaacatccacatctaccccacagcatcatatttctcttcagaattcaaaaaattatgtcttactttgctgccaaagtattctcacctccccatgtattatgccaaaagttaaatttctctccacactaaattattatcatacaacgatcctttcttatctgtttcacaaatgctaaccaagtccctcaccatagtgaatccaaactagatgagctactcacctttaattaggatgagacaccatatctctacctcaacattgacactatggagcatcaccttatgagctatc

SEQ ID NO: 80923 - DNA, 241 bp, Glycine max
agcttgttgggttcagttttaattaagcgcttggggcatccccatggactgagcgaaaaggctcgggtcattaaaagactacgcatcttttaaggcataaagcgaggatcgaaacaacgaatcaccaatcccacattctttagaagattgcgacgaaaaatatacagaggacaggaatccctaagggaaaccacaaaaaataaaacatgcagtgacttccttaactgccccaagtcttaag

SEQ ID NO: 80924 - DNA, 513 bp, Glycine max
  unsure (1)..(513): unsure at all n locations
actagcttattactgttaagtgtgcacgaatgctccagatgattttatctttccttatgttcatgcgntccctaatgatagcatactgtacagacatgagtttcaacaaatgcacaaatgctccaggtgtggggtttcaaggtacaaagtgaacgatgatgacgaatgtattagtgacaaaaactcaaagaagggccccccaacaaaggtgttgtgctttcttccgatcattccaatgtttaagcgtctatttgctaatggagacgatgcataagaccttatgttcgacaactggcaagtagtataaaacggtaagtgaatactgagtatcaaactctcngtgaacatagtntacttggtaaagttgtggttcaataaatgagtgtctcgcgatgaaagtttggtgtgtggtatggaaaaatatgtaaacaaaactattctcaagcaatacgtgagcatggtgttggtgtgtaagaagataacaacatgtaggctcctactggtgactatgta

SEQ ID NO: 80925 - DNA, 241 bp, Glycine max
agctttaatattattgttttcagcatcctcttctgaagctaccatgtgaaaacattaacacactgcacaagaatcataaatggaagccatgtgctagcttcacgagtgctaagtattgtttttttttgcactttcattgttgcacattgattgaacaacacactgcattaaacaagcttcatgtaaaatgccaaaatggtgcagttttattcaacattttccagcactttaactgcattct

SEQ ID NO: 80926 - DNA, 452 bp, Glycine max
  unsure (1)..(452): unsure at all n locations
ctctgatcatattnatctggcgtgcaatacacctcttaccttgttttcataaaaaacttgatntcattaagatttctatcgtgcaatgcttagtacacatgtgcactccacgaggatgattcgtgctcaaaaagctatgtacctttgttccctcgtatgtttgaattgtctaatcatgtaaattttagttttgtattgagacctgacaaaatggagcacattctctgcaagaaccgtagtttacaaataatgtaatgctactaaaaaaagaacaatattattgttccctctctctctccaccctaagttgcacgtgcatatacaacaagctctgtgagagaacatatattttacaaaggctttgaattccacaacagaatttttgaagctatatataagatgaagacacttagagagactactgatcttaagaatcacataatatcaaaagc

SEQ ID NO: 80927 - DNA, 235 bp, Glycine max
agcttttcgtatcattttggtgctttctggggcttgctgggttttaccgccgtttcatccgtggttacacttcaatcgcagcacctctggtccacctcaccacattggaccactttgaatggacaccccaagcacaaacgacttttgaccagcttaagcacgctctcttcgaagctcccgttttagccttgtcggactttcagtttcctttcaccattgataaaaacgcctctag

SEQ ID NO: 80928 - DNA, 452 bp, Glycine max
  unsure (1)..(452): unsure at all n locations
ctcagctatgccggaaatgtattatgatatggagatgcccgaaganactctattttctatttaaccatgcattaggtaccatggttcaattatttgttttgttgttgtgaaacgggtttatgatcccaacatggttggctcgtggtgcctaacacatgaaactaagaatgtagtgtgaagtttcacgcttcccccttttttgtttntgttttgtagaggaaaacgcaaggatgagcaaacatgaaaacaaatggtatgcaattttgcagatcaaaaagtttgttgaacgcatatgcatgatgatgccatgactcatgcaaaatgtgaggctggaatatgataacggacaaatgcaggatatgtccattatgatgttatgaagagatgctttatgcgatgcatgatatgaatgcatttacggacacgagagcccgganaattatctcttctta

SEQ ID NO: 80929 - DNA, 242 bp, Glycine max
ttttcatgcaagcttttatgattatggggtacccatcacatgtggtactaggtggcggtcgggcgatggtgcacaacaaggtttccacatccaaaatgcgcgcataaacccaccatcccctgttgcccacctccatctgagctcacgtactcccacgtagcccatatcctcgtttctctcaacaccgggtcccaatcaatcctcccaagctttcacaacatccaagcaaaacaacattcaaa

SEQ ID NO: 80930 - DNA, 242 bp, Glycine max
ttttcttttaagcttttttttacactttctaaatgcaatgctaaagatgagcagatcaagaaacaaacaaaaattgtacaagaagcagtagcaagtaatattcaattattcatgcaatggtgtgtgtatttgtttctcatttcttatttattattcttagagtaattttaccaggttgttattaaagattcatttgaaggatgggagaaagcagaagctaaaatactatctatgaagcaaca

SEQ ID NO: 80931 - DNA, 90 bp, Glycine max
tatatatgcaccactctttgaacacatatacttgaacgccgttgtgagactccacaaaacgatttgcgctgcagctgttcacctatttca

SEQ ID NO: 80932 - DNA, 167 bp, Glycine max
  unsure (1)..(167): unsure at all n locations
atactctaattcacgaggggtacttgacacgggatggtatgctccgctctattaaatcactataagttggtggatggtcttcttctctttgctcatgacttgntcttcatgttgaccaagggggagagattcaaaatatagttatgggaagtttctatttttttaac

SEQ ID NO: 80933 - DNA, 171 bp, Glycine max
  unsure (1)..(171): unsure at all n locations
gatgtacctaagcaggcaagctcctggcagtcaatagataaaaggaacaaataccataaagcaaggaggcttgtgtggtggctggccagctgtgaactttgaatgatatatgggatatgggctctggtaatcgattaccaagggtgggtnatcgattacaaggcctaaaat

SEQ ID NO: 80934 - DNA, 410 bp, Glycine max
  unsure (1)..(410): unsure at all n locations
agctnttctggttccatttagtgagtttagtcttaaatttgctgatcaaaggctcccataccacctgatttgaggatctgaccccaatggggatgcccaagtagtggaaaggaatccccatctgcctacagttcagaaagtgagcagcttcttgagaccagttaacataatctccaaaaattccgaattgactcttagcatagttgattttcagaccagaggccatctcaaagcctctaagcattgccttcaaaacaataacattttccaaggaagcttgaccaatgaaaacaatatcatcagcgtattggagaatattaataggctctttttgntttccaaccaagtagctacggtacagattttttacaatggcctgtctcatcattcaaatgagaccttcccccact

SEQ ID NO: 80935 - DNA, 361 bp, Glycine max
  unsure (1)..(361): unsure at all n locations
tatttcagggtcttcatgacaaatgcctttctgatccaagcttcgtttccaaactataagtttcacaatggtcctttgatgaagcaaggaagaatctggatcaatcccaattctcattttaaaggccttttgtttcatgaatttcacttgcggatagtaaggtaagtccaatttttcaacatgattgtataaggttgtctcaagttgtgtggtctgatgtttgatgttcatcatgttaaaggggtggaaatngaatttattagattcccatagatggcaccaatatagtggttgaggtgcttaaggttggcattgattgatctctagtatgacttcactacntacaaaatagtgtttacat

SEQ ID NO: 80936 - DNA, 278 bp, Glycine max
  unsure (1)..(278): unsure at all n locations
tgcagcttcttatccaaggctatcttgggggtatagcactttcttccatggcttattccctattggatggcgcctnctctcacctcttctcctttgtcttccgctgcatctccatgggggaaaatcaccattaaaggacctcattgaagctcaaagatccagccctcatagaagccccacatgcaagcttccatcaagaggtatctcagcacaatatcttatataactgcttcttaagccacaattgattaaaaaatacccttctaacttaaattacc

SEQ ID NO: 80937 - DNA, 328 bp, Glycine max
  unsure (1)..(328): unsure at all n locations
tcgattaccagcggtagtaacgtttaattcaattttaaagcttgtatcgattacacaattgtggtaatcgattaccagcagttagtaaacgttttaattcaaattttaaaagctgtaatcgattacacaattgctgtaatcgattaccagacaggaatttcagaaaaataatttcaagagtcacaacttttcaaaggctttactcatgaccaccaatggtctatatatatgtgacttaaacacgaaattgcttagagattnttcagaactacaaagtggttattcctctcaaaagcaanttcattttatcctcttaaagaattccttg

SEQ ID NO: 80938 - DNA, 429 bp, Glycine max
  unsure (1)..(429): unsure at all n locations
agcttcttatccaaggctcatcttggtggttaagcttcttcttccatggcttattccctagtggataacgcctcctctcacctcttctcctttgtcttccgctgcatctccatggnggaaaatcaccattaaaggacctcattgaagctcaaagatccagcctccatagaagcccctcaagcaagcttccatcacatcgtctaattgtgtttttcaaaagatttgttatctatttttacaaaagtttcttcttcagacgaaaacttagtttgattgcgaaaaggtttttaaaatagtctaaaatcacaattcaaccccctttcttgtgatatttgcccttacattttccttatcatgtttttttaacttagcanagttttgtatagactagaacaagctctttgggcttgggtatgaaaactagntcat

SEQ ID NO: 80939 - DNA, 355 bp, Glycine max
  unsure (1)..(355): unsure at all n locations
atatttttgctattatattattattttatctctttttgaattccaacgtggttacggcacgaccgaacggtcgaaatttattttaaccaaagtttacggatcatacaattcanacgttcggcggaaatttattttatttttaagttaagcgagaaatgacttgagtaaaatggcttaagcacgtcaacagggggtataaaaagtacatgagatgagaataaaaatacacgaaacacaatgtggaccaccacgggtacatataatgaatcgaaaagctcggntcaaggtacttacccgttgaagatcgaagaacgatgaagaacgaatgaagaacgttgaagaacggntgaaacct

SEQ ID NO: 80940 - DNA, 288 bp, Glycine max
ttatatagccattatagaaaaagagactatcttatgcactatactatcacaaaatactgctgtcttgatgcgtagaatatgtatgctcagggcaagcataccatacgcacaataacagtggacctaagttcaaatatcatacccaagggacgtagcatgctcccgtagtaatttaattcataatagataaacaatttgggtgtaatctatagctgagaaatgtgttcaactactttgtcaaaaaacaatactctagatcaatcatagatagtgcaatgaacttataag

SEQ ID NO: 80941 - DNA, 187 bp, Glycine max
tggccataggaaagggtttcataaaaaaggattgatgaatgacactctttttggagaatactatataaagccagaccaaggggctgtttatgaagcagtattacatttaacccaatttgactgtgaacaggtagcatgtagtgacggaagtttaaaccacagctacatgtgttatgtcggataaaaa

SEQ ID NO: 80942 - DNA, 366 bp, Glycine max
  unsure (1)..(366): unsure at all n locations
cacctgcggctgcagctatccattttctccanaataatgttatgtgacctatgagacacaacaaggtaaattcttgagtggaaaaatagatactttagaagatactcatattcatgattggtactcgacacggtatggtatgctctgctctattaattcattataagttggtgaatgtttttcttctctttgctcatgatttgttntttatgttgacaaagggggagagatagataagatagtaaggggaattatctatntttttaacaagttatatatatatatatatgaaatcttcagctttttcatataagaaatcattgtaaaatcaagggggacaatgtgaatcatgcaggttttgatgat

SEQ ID NO: 80943 - DNA, 238 bp, Glycine max
  unsure (1)..(238): unsure at all n locations
gcatctatcatacttctctccatattactgagtccttcataaaaatattggagaagaagctactccgaaatctgatggtgggggcaactggcatatagttntttaaatctctcccagtactcatacaggctctctccactgagttgtctaatacctgagatatccttcctgatggctgtggtcctggaaagcagggaaatntttttctaagaatactctcttaagggcatctcaactt

SEQ ID NO: 80944 - DNA, 443 bp, Glycine max
  unsure (1)..(443): unsure at all n locations
agcttggagaggatgcttcaatttaggatattaaagagggagagaaatagagatggnggagcacgaaattgaaggaagaaaaagggagagaagttgaactttgagttgtgtctcacaagactctcattcatcaaagttaaaacaagtattacacatgcttctatttatagacttggtagctttcttgagaaaactttcttgagaagcttctttgagaaaacttccttgagaagctagagcttagttacacatacccctctcataactaagctcacctccttgagaagcttccttaagaagattcctaaagaagctatagcttagctacacacacctatctaatagctaagttcaccttcttgagatgagaagctagagcttagctgcataccccctataatagctaagctcacccctatgcccaaaaacattgaaatacaaaa

SEQ ID NO: 80945 - DNA, 324 bp, Glycine max
  unsure (1)..(324): unsure at all n locations
tgttttgaaaagcatgtattgacaaatgatgaaactttctgagaacattttaaaacattgtgaaaacattttagaaaatggtttctttagacatgaaggctttcttttcanagaaaacaaattgtgtgtgcctaaatgttctactagaaanttgcttgtttgtgaagcacatgaaggaggtttaatggtgcactttggggtccaaaagactctagaaacattacaagaaacattttattggcctcatatganaaaggatgtgcagaaantttgtgaacatcgcattgtatgtaaaaaggcaaagtctaacgaaagcctcatgga

SEQ ID NO: 80946 - DNA, 367 bp, Glycine max
  unsure (1)..(367): unsure at all n locations
agctntaattaaggaatacaactccttattatatgtagaatagctaagagcaaccccattcaatttctcactaaaatatgcaatgggatgcccctcttgaatcaacacaacccttatgcctaccctaaatgcatcacattcaagctcaaaggatttagcaaaattaggcaaagcatgaacaggagcattagttaacttttctttcaaagaagtaaaagccttctcctattgatcatcccatttaaaagcatcatttttcttaacaatttcatttacaggtgcagccaaagtgctaaaatctctaacaaacctcatatagaaacttgntaagccatgaaagctccttacctcacttatactnttgggg

SEQ ID NO: 80947 - DNA, 395 bp, Glycine max
  unsure (1)..(395): unsure at all n locations
tcatcaacgatccaaggaaaagaaaggaagaagcttnttggagggtcttgacttggggaggctatggccggagatgaaagccaccgatgaaatgtccccgcgccacctcaaacgcctccagcgcctcctctccatgacggnggagtattccccgaggaacatcctcggcggccgctggagagaatatcacggcagcaacgactggaaagggatgttagaccctctagacgagaatctccggcgagaggtcgttcgctacggcgaattcgtccaagccgcgtatcaagccttccattcagaccccgccatgtcaacggaggagccgccacatncacaacacgtggcacttccagatagatcataccgaatgaccaaagcctctatgcaacatcatc

SEQ ID NO: 80948 - DNA, 365 bp, Glycine max
  unsure (1)..(365): unsure at all n locations
agcttcttatccaaggcaattcttggtggtgtagctccttcttccttggcttattccctagtggatggtgcctcccctctcctcttctcctttgccttccgctgcatctccatggtgaaaaatcaccattgaaggacctcattgaagctcaaagatccagcctccatagaagctccacaagcaagcttccatcagctttcctctntctactcccgtctgttcctcttctcaatattttttattttcaacttttaattccctcgcgttcattcctttccctccatatacctcaacccaaaccccttccttcccttctctccatgtcatcccctcacgtctgttcctattccccgcgttacacaccc

SEQ ID NO: 80949 - DNA, 202 bp, Glycine max
atcctcagttggttcttcctatgggatacttgatgtaaatactttcttatctatctaatgatgttttatgtgttcactgtgctatcagtacttaattctagtgtgtctttgccttgatcatgcaactgcatgcttagttagggtcactcaacattgggaaatggtttgatccttataacctgataggacaaggctagcttat

SEQ ID NO: 80950 - DNA, 312 bp, Glycine max
  unsure (1)..(312): unsure at all n locations
aaaaaaaaggtcactttaattgttaagaagaaagggttaaaaaattaatggccttgattaaaagaagttttccaaattaatgaaaaccaaagtcaagagggattccactcaggaatttaatctcacacatctatctaagaaatattataagcttgtaagcacaaatcagaagtaggtcgctctaacagagagggctgaagctgaaacacanatttctcactcaaagatcttgcatatagtggttgntcagtgacatctaagggtttnnttaaacaatttttcaaataagcacttgtggtaaattgatgttag

SEQ ID NO: 80951 - DNA, 320 bp, Glycine max
  unsure (1)..(320): unsure at all n locations
tacacaagccttttgacccaaacaacttacccttgcaagagaactgtatactttgcttcatatataatgangactgaatttgacatatagtgaacactgtacttaaataattatctcttgataccttgcttagattctaggagagcatatggttcaaggcaaaatttacccaaatttgggagagtaaagtcagttagaatgcaaagaanaaggtaaagcatcaacacacataacacatatatttgtatgttaaataaaagagaggagaaaagaacaaacattgtgctgttcaataaggtcataacaatcaagaggaaaga

SEQ ID NO: 80952 - DNA, 425 bp, Glycine max
  unsure (1)..(425): unsure at all n locations
gtcacctgcggctgcagctaagctttttatttgtgatataattattagagcttataatggatgaatttaacaaacattaatcaccctggttataaatggttctattaattcatatgaccacctaatttcagcttcaccaagaagtgcctttagcctttgctcgaaccgtaaaaatatcacccaatacatataccaaccaatgaacttatgattaaggataataatgcacaaatttgaggatgaatgtcacaacaaaccattttataacaacacttanatatatagattgcgattgtcattataaaaaaatgtatatctacataaattggtttttattaggttgcatctgaacanaacacttanttatgtatattgaagatacatgaataagcaattagcgccttacctcttgacgctctataaat

SEQ ID NO: 80953 - DNA, 273 bp, Glycine max
gattcatcattttcagcatgaccatgatgttggtgatgagtcctatgactgattctcctgtataaaatatcagtttcaaacatgaattcaaaactaaaaaaaagagtaaaatgtgtttttatccctacaaatatctcaaaatttgaatttagtctttacaaaaaataatatatttttagtctctacatttatcacaattaatgtggttttagtcattcatcaagactaagaaatcttattggtaaaatgtagagactaaaatcgtattatatt

SEQ ID NO: 80954 - DNA, 227 bp, Glycine max
cggacggcattttgagaaccaacttcttggagattgtgtgccggataaaattaacccgagacatgttttgttgaatgaagatttggtgcgcattttttagcagtctctttgcatttacttttcgagatacgaactataaagaaaaggcttatcattgatcctatgagtgtacaagaggtggaattcctctttttataccaagtagtcgtattggctcatcacgcact

SEQ ID NO: 80955 - DNA, 382 bp, Glycine max
accccacttggacttcaaaatagcagaatttggaatatgataaaaaagaaagatcccacaaataatatttatagtttatagttattccaaccaactggggaaatttagattcatcataaatagattagtaggctaattttgcatatctgaccttgcagagtatataacagaatttgggccgatgtacttatacatgaaaaatgggtaggaagaaactaaagatatggaaagcaacatcacctgataaaggtatgtgattgactcaacggaagatcttctccaatggcaacaaggatttgccattcaacaagatcctgaccaacaatcatttctgtaacatgatgatcaacctgtattaacatccccccatggtatacttcta

SEQ ID NO: 80956 - DNA, 148 bp, Glycine max
tcgatatatacgcgaccaatcggcattcgagtcaaaagataatgttcgtcgaattagcgcagagcggttagtttcaattacgagcggctcgatatatatcggacacaattggacatccgagttaatgattttgtcgtttgacctttct

SEQ ID NO: 80957 - DNA, 177 bp, Glycine max
  unsure (1)..(177): unsure at all n locations
gcttgtaccgccattgacaactggcgggaataattgatttcgncattggcttctgcgggactcagcctaaaccgccagtacgaacggcgggacaggctgagtaggagagagagaggctgtaccgctgatagttgtggcgggacgaggagagatggagccatgccgccattcctcctg

SEQ ID NO: 80958 - DNA, 423 bp, Glycine max
  unsure (1)..(423): unsure at all n locations
cacaccacatcacatgccttgtgaactccttagattaccctcgcattgtggtcactgaaaccccgtgcgatgaaaggcgtgatgctttcgtctgatggcacttctctcatggggtagccaagctgtcttatggcgaggacgggattataattaatacaaccccttgttcccatcaagagaacatttggacatccttcgcatgaagatagaatcctgattcttccttccttctagcgagggaaccaattaacagacgccactccatgctagccaaaagttggtccaatttgcctttcctttttcgacgcatgagcggtgaccttgtagcggatagacgggcctaccttcttggagaaanggtgtgaaactagnccacatagagagcagtgcacaacaaaaattcttgcgtcgttcttttacatc

SEQ ID NO: 80959 - DNA, 252 bp, Glycine max
  unsure (1)..(252): unsure at all n locations
gctctttaataggttttatcttatggagaatttcgttctttcttttgagtcacagctaaagggttttattcattcaaggacggtggtttggtgaaatgtgagatctatggtgaagtccaagtaaatccccggatctcaggttatcctgatntaaccctttcatttacaaaaccttccatcctcaatgatgngagagttcatccctgtgatcgcttacagacttgggagtaatctcatatttctatgcttagc

SEQ ID NO: 80960 - DNA, 219 bp, Glycine max
atacatttctgtttaacaggagccttatcatggtgactctaataatcattggctgccatggagtctacgattacaatttctttcttaggggtgtgacacattgtactggctctaattgaggcccttaaagtcatttgttgttggggtctcagccactgacaaagatatgatgttgtgcagcattatcgaagatatggtttggacacctactacacaaag

SEQ ID NO: 80961 - DNA, 462 bp, Glycine max
  unsure (1)..(462): unsure at all n locations
caagtcaccagcggccgcaagctataagacaaaatgccaagcatattcatatgcatgtgaattaggacgcatcaacaagaatcaagccaaggctattgtgcacgcaatcaatgatgtaaaacacgccaaatgattataatgatggatggctcaaattctcacaaaggtaaaatcatcactttcaaatcgagctttcaaaactatcatgacatgtagagaagaatcaaggatttcaagtcacaaaatgtcaggaacttttaatttcaaaacaattacccatttcttgaacatatcctataattcaaagaanaacatgcaaagtcgtacgcgcacacaaaattgaccctaaatattaaactaaaaatccgacgaaactaacatcattaacaaattaacacaactaacaaattaacataacccaacaaacctagcaaaccaatgaacactcccctccatacttaa

SEQ ID NO: 80962 - DNA, 154 bp, Glycine max
tgttgggaacttataaaaccaaaaatagaatgttcaaaacaagactacttctcaaattgaccaaaatatgttatgaactaaaaacatgcatgaatagacctcaaattcaaagatagctaagaatgacggaatcatgaacaatgtatctgaactt

SEQ ID NO: 80963 - DNA, 390 bp, Glycine max
  unsure (1)..(390): unsure at all n locations
ttcagaaaaccaatagatggtagaatacaactcttactaaacctgacatcttcgttagactataaatttaagtatataatatttgaatttttctgcactctgcttgatttctatcctctacggcgcataaatgaaacttacttcctccatttgacctctcctattcctttctgaatgatgaaacgatcatattttctattaaaaatgcgtgataagagactaaattgatcaatacaagataaaataaaattagatttgaattttaaatgtacacaagctatgataaattaataaccagactaatttataacactgatcaactaaatttatatttcttatcctaccggaactgactatntatcctntttaaatcaaacaaacaattgctgt

SEQ ID NO: 80964 - DNA, 332 bp, Glycine max
  unsure (1)..(332): unsure at all n locations
aaattgttgattctttattataatagataccgcgggtgaggacaatgtaaaaaacacaccccagcacatattgcataaaattctcacatatganacttcataggataaccatggtataagtccagctctcagggttacgttttggtgatgtaatatcatgcggaccagggttcacctttgatggttgagtattagcctttgctagttgtgttccctcccaacaacaaaattaacaacattgatactggaaggttgcactggttgctccttctccttctaactgctatgcagnatgcagcagggtgtgctttctacattgttattctttgatc

SEQ ID NO: 80965 - DNA, 418 bp, Glycine max
  unsure (1)..(418): unsure at all n locations
tggaacaacagcgaccgcagctgcagcttggaaatcaactttttttttgactcaatgttcatcggcccgtagatttcagacactcgtatttgcaaatggaactctgagaaaaatcaagcgacaatacttttaactccgatgtaccactgagtcctggaatttatcgagacgcatgtattggataactagagtcttgagcatattcgaacttccataaaatttgactcgaatgtgccagtgttgcctgtatgagatcgagacgctcatatttgataacgatagctatgacaaaattctcacgacaatgacggttaactgcggtgcccaatagagtcctgaatgatatcgagatgctcatatntgaatactatcgctctgagcatatccaaccaccataactttcgactcggatgtcgat

SEQ ID NO: 80966 - DNA, 330 bp, Glycine max
  unsure (1)..(330): unsure at all n locations
agttaaagagtcaagaatcaagattcaaggttcaagatcccaagaatcaaaatcaagattcaagactgaagattcaagaatcaagagaagacttaatcaagataagtatgaaaaggttntctcaaaaattgagtagcacatggatttttctcanaacatgtttaccaaagagtttttactctctggtaatcgattactagaatgctataatcgattaccagtagcaaaatggttttgaaaaagttttcaaattgaatntacaacgttccaataatttcaaaaggctgtatcgatacaatgtttgataatcgataccatgcctttgacgtg

SEQ ID NO: 80967 - DNA, 438 bp, Glycine max
  unsure (1)..(438): unsure at all n locations
agctngcttgtggngcttctatgtatgctgtatctntgagcttcaatgagggcctttaatggtaattttccaccatggagatgcagcggaagacaaaggagaagaggtgagaggaggcgccatccactanggaatacgccatggaagaaggagcttcatcaccaagatgagccttggataagaagcttggagaggatgcttcaatggtggaaaagaaagagggagagaaagagagaggggggagcacgaaattgaaggaagaaaaagggagagaagttgaactttgagttgtgtctcacaagactctcattcatcaaagttacaacaagtgttacacatgcttctatttatagactaagtagctttcttgagaagctttcttgagaaaacttccttgagaagcctttttgagaaaacttccttgagaagttagagctt

SEQ ID NO: 80968 - DNA, 427 bp, Glycine max
  unsure (1)..(427): unsure at all n locations
tttttttacccaaataaaaaaatgaatataataatttattttcagaaagttatttggtttgtttagtcaaggactctgggcatagaaaagataattaaataggaaaattattcaaatcttaattaagtctagtccaacaaaaatttatcagcgggtttatttagcaattattaagctcaaactcaaatgtcagataaatacttggaatttgcacaccacatctactcagttatggagcccatcaccgatatatagtcaaaccaataagtccttaattcaccgccaagaccatttgcatcatatttaaatcttcgccactttgatattataattacagaacggntgattatcaatagtatcttgacaaaacaacanatggctacatcacaacttcgcattgcctcacaagccatataagctctataca

SEQ ID NO: 80969 - DNA, 274 bp, Glycine max
agaccctcgaaattgaatgttgaagctcttcagcaaattcaaacaacaataacttttaactcggatgtctgattgagttccgtaatacatcgagacgctcaaaattgaatgttgaagctctcagcaaattcaaacgacaataacttttttcctcagatgtctgattgagacccgtaatatatcgagacgatcgaaattgaattctgaagctctgagctaattcaaacgacaataatgatttgctcggatgtctgattgagtcccgaaatacatc

SEQ ID NO: 80970 - DNA, 355 bp, Glycine max
  unsure (1)..(355): unsure at all n locations
agcttagctattaagaatggagtagaagtagtcngaatatgtttttgggaagttgcaagtgtcacgaattggaacaatgtttctcacatgttttgtatacacaaattcatgtcggagacagtatccaacagtaatagaagagctgtgccgtcattttttctctgcccgatcttatgaagtccaccaccaacttctatctacggaggaggagaatttactatagtatataaaggtgtgctcctcttaaaggatattttgattatttgtaccattctcttctttacttatatgcttctcttatctcttctttgttcttctttgttctatagttgttcgatctatatcctctctctta

SEQ ID NO: 80971 - DNA, 153 bp, Glycine max
tgaaactgctagcgctactggcgaatagcgcctgtagtggagttgctagtagcactagcgacgtggggttggagtactctttaccaatggcgagttcacttctctaatatatggaccgccctatcacccaatgtgcttacgctacaccctcct

SEQ ID NO: 80972 - DNA, 445 bp, Glycine max
  unsure (1)..(445): unsure at all n locations
agcttncacttcatnccagccaaacaacatttcaaccacaccagctatcacaggccagccaaacagaagccaaggcagaaacttttgccaaacacccacccnaatcacaggtttttctcacttaaaagaccccagaaacaattccttcgatccaattcgntaaccggtggatcgactccaaaattttactggaagtctatagtacataagcctacattgtgaccgttgggatctactagcaaacatccagaactcattctgcactagactttccacagccaaccacacacaagcattnttctgcacaaagccaaaatcctgctgcacctattttgacagcaaaattctgcataagtgcagatttcgaaaatcacacttcctctcatccaatcttgcccaaatcaattcctacaagtgccaaatcatgtatcaatcatgtctaacc

SEQ ID NO: 80973 - DNA, 146 bp, Glycine max
atcaaacttttcaattcatttatgtacccttagtagtggtcctcatttgcttttacgtgctttcatttacatttccattactttccgtaccccctttgacgggcttaagcatttattaactcattcttcttaacctaacatcaaaa

SEQ ID NO: 80974 - DNA, 307 bp, Glycine max
  unsure (1)..(307): unsure at all n locations
attaccggactcaatcagacctccgagccaaaccgtattggcggtnggattaagtcaaaacctcaaaaatccatttccaaccgcttcatatattaccgggcttcatccaaccatttggggaaaaaagtattggtcgctggaanttgctganagctacaacatttcattttgagcgtctctatgtttacgggacttaatcagacatccgagtaaaagttattgttggttgaatttgctgagagccttaaccttcaatttcgagcgtctcgatttttaccggacctcatcagacatccgagtaaaacat

SEQ ID NO: 80975 - DNA, 325 bp, Glycine max
  unsure (1)..(325): unsure at all n locations
attttcgtgctccttctcctaccttcaggctcttatccatggattcctatggtggtgagcttcttcttgactcatcttctccttgaagtggtgtctctaatcaactntcttccttattcatttcgctaccattaaacttcaagaagaaaagcactccattgttgaagaagatccaaggcctacaagttccacatggagctacattagtattgccctttctcctacgtatccttagatgcgatgaggaacttagacctacgtagttctctaagtctgaatgtttggtgtgctacattcgatttatcttatctttacatatttgatt

SEQ ID NO: 80976 - DNA, 421 bp, Glycine max
catgcaagctagcacacttgacagctcatcttcttttggattctcctcgcgcttttcactgaaggttgtgcttagcgaattcctcgccacgccacgccctagcttagcccaagagagaaaaattaatgttgtcatactacagacgccagcactaacccttcggcccaagctgtaaccgctggatcaccggcgaattctactggaagtctatatccacaagcctccttgtgactgggggatattaggtaaatctaaacatatttcgcctagggtttgcgcggccaccctcacacaagcatgtttctgcacataccacaatcctgtgcatctatttgagaggatattttgcataagtccatttcttaacaactcactctccttttccaatgttgccaataattgctacagggccactatgtat

SEQ ID NO: 80977 - DNA, 205 bp, Glycine max
gcgcatgtaaaagagataattttcgggctctcgtgtccgtaaatgcattcatatcatgcatcgcataagcatctcttcataacatcataatgggcatatcctgcatttgccgttatcatattccggcctcacatcttgcatgagtcatggcatcatcatgcatatgcgttcaacacactttttgatctgcaaaatggcataccat

SEQ ID NO: 80978 - DNA, 355 bp, Glycine max
cagatccaagaaggtcagtcaaaacgcctcatttcattgcctatgcttcgtgtattcctcctccaccacaccacaccacagcacaacacaacactaataacaactactaatacaatctctctctctctctctctagatcgcttcttcactgcgtcccgcgtataataataagtaacccaatgtttattttatatataggtatcattatcaatttcattttgtcatccttaatcccaagaaggtatgggagataataagccagagcttaatttatttattctactattctctatcttttctctaatgtttggatattcaaaaaattcattatctctctagtctctctttattttct

SEQ ID NO: 80979 - DNA, 361 bp, Glycine max
  unsure (1)..(361): unsure at all n locations
atgggtggaatggatgaatgcatgatggaatgcatattgacacagatgcaatttatgaatgcgggggtccggcgaatatgtccccttcttagatacgacgtctaggggtagcanaatgccccaacgcacgtttttaagaaggcgacacggaccctccgttggtttgttatagtagggatcaagacagaacccgtatgcaatgcctatgcataagacacaatgcgggaatgtacacagtatgacaatatttacctgacataagcataagggtatatgcatggcagtgtgataaaatggcacgcagcgtgtntgctcgtgccntattataggcctatatggagagaactactacgctttagca

SEQ ID NO: 80980 - DNA, 394 bp, Glycine max
  unsure (1)..(394): unsure at all n locations
agctttcattcatttatgacccngatggtccacattgngctcgttctttttattctcgtttagttacttttcatacccccctcttgacgtgcttaagccattttacttaagtcatttctcgcttaacttaaaaataaaagaaatttccaccgaatgtttgaattgtattatccattaacttcggttaaaatcaatttcgaccgttcggtcatgccgtaaccacgttggaaatcataaagaggtaataaatattataataatcaaaaaaatatctttatagtgaaataaagcggataatcaatcggacgttttctctttgggatatctcattcttaatcgaatcaaataataacttaagtgagactaaggcttaaatcaactcttctagtcaagc

SEQ ID NO: 80981 - DNA, 259 bp, Glycine max
tgattatatattattattttacctatttttggtttccaacgtggttactgcatgcccgaacgatcgggtttcattttaacagaaattaacggatattacaaatcaaatgatcggtgtgaatttattatatgttttgattacgcgacaaaatgacttacgtaaatgactagagcacgtctaaatggggtacggaaagtagatgacacgaggattaaagtacgcgaaacagatggcgaccaccgagggtacatataatgaa

SEQ ID NO: 80982 - DNA, 441 bp, Glycine max
tgcttattgcgtacccgctcttggcgctctttaaattctcaagacaaatctcttttatgtctagctatatttgatcaccattagttctccgaatgtacaacactttacaaatgtggctcggtcccctctttcattttcgcagacaaaaaaatcaaacgctggcacaacatggatgaagttcttagaaaatcaatatcacagaacacatggatgaaatcacaattaaaaagcacaactacctatctttcagagacctttggttaaattggcttggctccttatgtggcggggggtctgcccatccttgtaccagctcattatattcctgactatcatgaacactttatactacctctctaaaattactgactgacgtgttcacttatatcataaatctacgatcttcactccatacaactctattatatcatcaatgatctc

SEQ ID NO: 80983 - DNA, 360 bp, Glycine max
  unsure (1)..(360): unsure at all n locations
agatttataacttttagaaaaacttaaaaccaatttgaaaaagtcaaaaaccttttgaagagttacatctttttatttattcagaaacaatcactggtaatcgattaccaaataagtgaaatcgattacacaaagtttttatgtgaaaggatgtgactcttcacatttgaatttgaatttcaacgtttaaaggcactggtaatcgattaccaaaacattgtaatcgattacagctttttgaaatcaatnggaacgttgtaaattcatttgaaaactttntcaaatccatnttgctactggtaatcgattacaacaatctggtaatcgattaccagagagtaaaaactctttggtaaacat

SEQ ID NO: 80984 - DNA, 454 bp, Glycine max
  unsure (1)..(454): unsure at all n locations
agctntagggatatcatgaaattatatgttatggatttattatcaacattaatagaaaaacaaatcactccaatacatgtagacagattcaaatacgagaacatattaaacttcaaaacaaattaactgtcaacctattattgacaatattaagaataaaaaagatatagatgctataaatagcatgtaccaactccaacgaggattgaccaacttatacttttgacaataggaaagggagattacaagataggccaaggaacccaattcacgcattatgccttctgcacacaatttcagacttcagttgctttcacaaattactcagggagtgatagcaaactctctctgtacacaccacggcgtactaaaatactacaatagtccacgtagtgccaacgtgcgcgatgttcaagcaaatcaccnttctttataagtttcactattgtcttat

SEQ ID NO: 80985 - DNA, 436 bp, Glycine max
gaatgcacccctttaatgttctgagtgttgtgatacctaactatttccaaacctttaaattcacgttctatggcatttggaaccttaaaaaattaaaaaataattcctctgtcatagaatgggccaaccgtctgtttactgcaatccatgaattgccccttggccatataaatagacattgtgcctttttgcttcggttaattttaaaacaaattaattttagagcctcattgaaaataaaatttcaataactatctactgcaacaattaatttttttatgggttaaaaattttaaatcaactatttttccattaatttaaatttacaggccttttaaacccctgttatttagttttttataaacgatttttttctcttggccattttttttttgttgcccccattgaggcaaaagtttttaaatatgaatttttc

SEQ ID NO: 80986 - DNA, 201 bp, Glycine max
actcacaagcagctgaagacagagccctgtactctgcttctgaagatgatctggacacagatgcttgcttttagcacgccatgacactaaagattcgcctatgaagaacaatatccagaatggatttctagaaccatacagcctgccaatcacatgtgataacctataagttgatttctgagctctgctaagaaatacctg

SEQ ID NO: 80987 - DNA, 449 bp, Glycine max
  unsure (1)..(449): unsure at all n locations
acctgcggcatgcacgctctccctatttgctatttatggttgttaagcgaagtagaaagggntcagtcttcttggcacttctctctctctcgaaattgctgaggaaaattatttccgtgaagaatatccaagccgaggcacttctgtaacgtttccgtgagtaattacgtgaagattctcgaccggtcttcaacattcatcggtcgttcttcgttttcttcagtcttcaacgggtaagtacttcgaaccgagcttttcaattcattctatgtacccgcggtggtccacattttgtttcatgtatttttattctcgttttcattatctttttatacccccttttgacgtgcttaagccatgtacttaagtcatttctcgcctaatctacaaataaaataaatccccaccgatcatttgaatagtatcatcccgtaatttctgttaaatga

SEQ ID NO: 80988 - DNA, 438 bp, Glycine max
  unsure (1)..(438): unsure at all n locations
tatgatgaactatgacaatgccataatatgctttttgcctcctcctgagttacaaagctcctcgggagattatctgctccaaccttaaaaagataaagatcatcccacacaaagtatttgaagttcttgagaaacttctttttctactgtcaacgaaactcttcctgaattctaggaccttgtgtggtcacctcatcaatgggtgagttcacttccctttttatgtcttttcttattttattaacaatacataaataattatatcgttcatactcgcactaccattagaataaatctttgaacaaccagctaagacactttcatatancgaacaatcaataatttctataagaagatcgttatttctacccacgctatatatgacacgtatgaagactaatttgagttacattataacttaattgatatatcaataac

SEQ ID NO: 80989 - DNA, 192 bp, Glycine max
cacactcaatttctaaagatttttgaaagtttggcaatgcaagtatgggggcattagttagcttttgcttaagaacattgaaagcttcttcttgtttctctccctatatgaaaccaacatctttcttgagcacttcattgagaggtgctgccaatgtgctaaaatccttcacaaatcgtctataaaacttgc

SEQ ID NO: 80990 - DNA, 442 bp, Glycine max
agcttgagatgaggaagtgtagaagggtgatacttcttggctttattcgttgaccacagagtggtacctggagatatgtcgcgggggtcaggagaccttggggacgtcaggtggggtgctattgcccaaaaccaagcttgaccaatcccgaaccaacccgggcatagtcagtcagtgagaacctgtgatgtacttaaacaggcgagctcctggcagtcaacagataaaaggaacaaagaccacaaagcaaggaggcttgtgtggtggctggccagctatgaactttgattgatatatgggttatggcctctggtaatcaattatcaagggtgggcaatcgattacaaggcttaaaaatgaagacaagaggctaagatggtctctggtaatccattaccaaggtgtgtaatcgattaccaggcttgaaaacgacgtcaggaag

SEQ ID NO: 80991 - DNA, 391 bp, Glycine max
  unsure (1)..(391): unsure at all n locations
caattcacattttacctgacctncaaatgcttctcatattcacgggccgtattcttcaatattctatattacattgtataaccatttccttttacattttatatatcattcaattttttcatattagtaatttctaaattctaatatattttctactctataaatataaatactaataaatattcacaacaacaaacttcatgatctaaaattagttttcaactaatctattaaaaataaggtggtgaacaaagtaacatttattagttttcacatagttgtagaaatatatccacttaactttactatacaatatattttattatatctccatgttcacacataaatgagaacaaatttaattacttaagaaatttatatgataattatt

SEQ ID NO: 80992 - DNA, 313 bp, Glycine max
agctaccatgagaagattcctttagaagcttgagctaagctacacataccggtctaatagctaagctcacctgcttgagatcagaagctagaaattatctacacaccccctataatagcgaagctcacccccatgacaaaaaacatgaagatacaaaagaaatccttcgacaaagactactcaaaatgccctgaaatacaaggcttaaaccctatactactagaatggcccaaatacaaggcccaaacgaaggaaaaacctatgcgaatatttacaaagataagagggctcatacttagcccatgggctcgaa

SEQ ID NO: 80993 - DNA, 340 bp, Glycine max
  unsure (1)..(340): unsure at all n locations
tttttattattatattattattttacctctttttggtttccaccgtggttacgacatgaccgaacggtcgaatttcattttaacagaaattaacggatattacaaatcacatgatcggtggaaatttattttattttttgattaggcgagaaaatgactaaagtaaatgactgaagcacgtcaaaagggggtgcagaaagtaaatgatatgaaaataaaagcacgtgaaacaagtggngaccaccaagggtacatagaatgaattgaaaagttcgatttcaggaacttatcgtgttgagaccgaagaacgacgaagaacgaacgacgaacgatgaagaac

SEQ ID NO: 80994 - DNA, 398 bp, Glycine max
  unsure (1)..(398): unsure at all n locations
agctttgtattttttggtcttcgccagngatatgatcgatgtgggtcttgaaaaaggcaaatttgatcatcctactaggacgactgagaaaactggggcaaataaagagggtgaggatgagggagaaacccatgctgtgactgccattcctgtacggccaagtttcccaccaacccaacaatatctttactcagccaataacaaaccttctccttacccaccacccaggtatccacanaggccatccctaaatctaccacaaagtctgtctaccgcacttccaatgacgaacaccacctttagcacaaaccaaaaacaccaaccaagaagtgaattttgagcgagaaacctgtagaatcaccccaattcagtgcctatgctgactgtccctattactg

SEQ ID NO: 80995 - DNA, 428 bp, Glycine max
  unsure (1)..(428): unsure at all n locations
agcttcatgcttaactatgtattaaaattctatccgaggcgcttctgtaacggttcagtaaccgttccatgggtgatttcgcaaagattttcaactgttcttcgacgttcttcgtccgtcttcggtcttcaacccggaagttcccgaaatcgaacttttcaattcattctatgtacccttagtggtcctcatttgtttcatgtgcctttatnttcatttcacttactttccgtacccccttttgacgtgctttagtcattttacttaagtcattttctcgcctaataaaaaaataaaataaatttccaccgatcatttgatttgtaatatccgttaatttatgttaaaatgaaatccgaccattcgatcatgccgtaaccacgttgggaaccaaaaagaggtaaaataataatataatnaataaaaaa

SEQ ID NO: 80996 - DNA, 389 bp, Glycine max
gtgagagtaggctagggttcttaaaaagaagctaagactaagagcatgcgttacatttaatgcgttcaattcaaggatatgtgctttcagggtcaacgaccattcttgaataggctccttcacctgcaaagtgaaaaagagagctcaacaacttgaacaacataatagtgaaagagaatacacagagagaggggcatgagtttgacacagaacggatgcacgtgcgtcgcacatgtataaggttggtcaacataacagactcaattttcttgtgaccaagtacacaaaattgatagtttacatatgacaaacactattttatgcccctttatctctatatttttgcaagaaacaaatttttatggaaaatctggtgatcaataaatatt

SEQ ID NO: 80997 - DNA, 407 bp, Glycine max
  unsure (1)..(407): unsure at all n locations
aacctttgctatgactgccattcctaacacggtcacaatttcctgtcagcccaacaatgtcattactcagccaataacagttcctctcacccaataatccacaaaggccatccccaatcatccacaaagcctgcccgctgcacatccagtgccaaaacaccaaccaaaaaggaatnttgtagcataaagcctgtaggattcaccccaaattctagtgtcatatgccaacttgctcttatatctacttgataatgcaatggaagccataacccctgccagggttcctcaacctccattnttccgaggatacgactcgaacgcaacatgtgcatatcatggaggagttctgggacattccatggagcactgtatgacctcgaagtgtaaggtgcanagtctaattgatg

SEQ ID NO: 80998 - DNA, 418 bp, Glycine max
agcagctgcagcttggctatcaacaaaaactttctttgtgccgcggacacggactttaaatgctaaagtgagaccaagctctggcaattaaacgacaatgacttttactctgatgtctgattgagtcccggattatatagagacgctcgaaagtgaatgttggaactctgaacatattcaaacgacgatagactttttctgggatgtcagatagagtcccataatatattgagacgctcgaaaatgaatgttgtatctcccagcaaactcaaacgacagtagcatttgcctaggatgtcggatcgacacccgtatccatagagactctcgaatatgaatgtcgaagctctaatcatagtcaaacgataataccttttattcggttgtccgattggtcacgtacttatcatgatgctac

SEQ ID NO: 80999 - DNA, 252 bp, Glycine max
cacttgtgaaactttgatgaataagactctggtgagacaaacttcaaagtttaacttctcttcctcttttcttccttcaatttcgggctctcccctctctctttctctctctctttcttttcctccattgaagaaccctctccaagcttcttatccaaggcactctcttggtggaaagctctttcttccatggcttattccttagtggatggtgcctcctctcacctcttctccttggtctttcgctgcatc

SEQ ID NO: 81000 - DNA, 362 bp, Glycine max
  unsure (1)..(362): unsure at all n locations
gctaacgatgataaaacgaatgcgattgctttttaacctgaggattaagctccgtatcacaagaatggagatccaagaggccgccgctganatcacgaggagaatagtcttcgtcgccgtaaccgttggcgtttttcttaatggcgtaactccgaggaggcgtggccggatcaaaacaatactcattgaagctcctctgcgcgttgctccgatacattcttccaccttcgccaccgtacaaattgtagtcctgcaagtcaaaatcacgaaaagggatcgaaattcacaactgcaaagaggagaccagtggttgttgcgaacaattaatgcaatgaatcattattcaatgtggagagcgaagt

SEQ ID NO: 81001 - DNA, 380 bp, Glycine max
  unsure (1)..(380): unsure at all n locations
tggatgatacacatacccttgttaaaggtgacattgtatctatttcacataattgacttatgctcaacaaattgtgctacaatacttaacaagtaatacattatttgtaggaggatagggagaaatgcatactttacctacaccagttatcagatcttcttgattccttccaaaagtgaccaccccaccagacatagggctagggattggaacatagaattttgcatgtcatgtgtcatgagcaaccactgtccangttccatgattggtgggttctttctaccatcaaggagatctatcaccaggaattattttttcctaggaaccannnatttttgggtcctttttctggtagcatatgggtgtagtaagcgctggac

SEQ ID NO: 81002 - DNA, 440 bp, Glycine max
  unsure (1)..(440): unsure at all n locations
gctgagatgcacaatacaattatttatttaatcccagatataggaaaattaagtctagtccatgagacccaaggactacatagtttctatctgcaagctcacggactagccatgtgaatccttaaactattggngtntgtgaaggaaaccactaactaaaggagaggactctttcagttcacttactcaaataaataagccctaactcacactcgngcctcccctcctttaatgcttccttgcgtcgtcctccttcaccctttacgtaatcgttgaagatagttgtaatgcctctgattattgatgtcttgacgactcacactctatcactcttcaaatggtggcatttccctccacttctcattggtcagtatcctccaccggtcagaatccttcgtaggtagtcatttttgagacatcgacaactagttctgacacta

SEQ ID NO: 81003 - DNA, 458 bp, Glycine max
  unsure (1)..(458): unsure at all n locations
ctgcagctatagcgaggacctgcgttaatgatgacaatatcagtgtaatcagattacacaatctgcagccataaataaccagttccaactcccaacaagcacagacaaaattaagagcaaaacttgccagctcaccactagaagccaccagcgtccaccgtcacccatgcttgaagccacaacaccagcagctccaaatgaccataaggccatccataaaagcacaacaagcataaatgcatatgctactctcataacttcaggaatattccataccatcttgacagccttttgcagaaccaacattgtaaatggaagtctacagaagaaaaaataaagagccatagataatcattnttacaacgcacttaattatacagaaagcaaaaagacaagcatgaagaaatcagactacaataataagtaaaaatgtanaatgacagctaatggcttcaaaa

SEQ ID NO: 81004 - DNA, 332 bp, Glycine max
atcatctcagagaatcaagaacacgtcgcgagttcaagaatcaagaagacttcaagactcaagaagagagcctacaatcaagaatcaagaatcaagattcaagatctcaagagtcaagatcaagattcaagactcaagactcaagaatgaagaaaagacccaatcaagataagtattataaagttcttttcaaaactctgaatagcacatgagtttttgacaaaacccttaccaaagagtgtttactctctggtaatcgagtaccatattgtgtatcgagtaccagaacacaataagtttgaaatggtctcaaactgatttacccattccaa

SEQ ID NO: 81005 - DNA, 410 bp, Glycine max
  unsure (1)..(410): unsure at all n locations
atatgcatgtgaattaggacgcatcaacaagaatcaagccgaggctattgtgcaagcaatcaatggggcaaaacacaccaaatgattataatgatggatggctcaaattctcacaaaggtaaaatcatcacttttcaaatgagctttcaaaactatcatgacatgtagagaagaattaaggatttcaagtcacaaaatgtcaagaactnttattttcaaaacaattacccatttcttgaacatatcctataattcaaagaanaacatgcaaagtcgtacgtgcacacaaaattgacccaaaatattaaactgaaaatccgacgaaactaacaacattaacaaattaacccaactaacatattaacaaagccaacaaaactatcaaaaccaagaacactcccccccatact

SEQ ID NO: 81006 - DNA, 256 bp, Glycine max
  unsure (1)..(256): unsure at all n locations
aaattctatgacggtgaatttgatctgagcttgaacattcaattntgagcgtctcaatatattacggcacttaatcagacatacgagtaaaaagttattgtcgattgattttgctcagagcttcaacattcaatttcgagcgtctggatatattacgggactcaattatgcatgcgagtaaaaagttattgccgtttgaattagttgacagattcaacattcaatttcgagcatctctataaactacgggactcaa

SEQ ID NO: 81007 - DNA, 444 bp, Glycine max
  unsure (1)..(444): unsure at all n locations
agcttctggtgggacatcttgacttgctttcttatctgacattcaccacagattctgccttcttctatnttcagattgggaatgcctctaacagcacctttgtcaatgattttcttcatgcctcttaagtgcagatgtccaaatctttgatgccatattctgacttcatcttctctggagaatagacatgtggaggagtaactggtttcttgaggtgtccataggtaacagttgtcctttgatctgctgcccttcattaggacttcactcttctcatttgtcaccaagcattctgactttgtgaagtttacattgaatccttcatcacacagctgactgatgctgatcaagtttgcagtcagtcccttcaccagcagtactttgtccagactaggaagtccatcatggactagctntcccattccagtgatctttcctttagag

SEQ ID NO: 81008 - DNA, 366 bp, Glycine max
  unsure (1)..(366): unsure at all n locations
tcttcaccatgaagttatttggtggctaagcttggcgagctagggtctaggaaaaccaaggcaaagacccttttgccccctgtttttagtattttttgcattcttgatcataacactgaatgatcctctgtttcgcattgtaattggcgttcaacattgtaagtcgactagcaaggatcaaaagatcaacgaacgatagtccccaaacgaaattagggtatgatagcgtccacttcactcccactcgcaaccagtctcactcccactcatggccagtctcactcttggtggccactcttgaaaggcaatgcgtgctttgttgccgttatgcctattnttttgcgttatcattaagaatagagatat

SEQ ID NO: 81009 - DNA, 434 bp, Glycine max
  unsure (1)..(434): unsure at all n locations
agcttccactatcggcacacatgttctattcttttgaatatgttttttcttaataagaacactcaaaacaacaaatagtatcttagttcaatcactttgattttgcttcataatggtttgtcatcattaaaacattcagttcctggagggactttgtttcaacaagtgcacatccacattntatcctcaatgggttgaaatttcaattttataatagttgttgatttgatgtaattagatttagtaaacttaaatgatttaatgaataattaaataactcatagtaatgttattgattactacataattntgatattaagtaattaaatgccttttatcantttcatttgataatcaaatattaattttgaataatttttttattaagtagtaacatgcccaaccatgtttagtatacaaatttgaatggttat

SEQ ID NO: 81010 - DNA, 325 bp, Glycine max
caacccaacaatgtcattactcaaccaataacaaaccttgtccttacccaccgcccagttatccacaaaggcaatccctaaatcaaccacaaagtctgtctaccgcacttccaatgatgaacaccacctttagcacaaaccaaaaacaccaaccaagaaatgaattttgcagcgagaaagcatgtagaattcaccccaattccagtgtcctatgctgacttgctcccatatctatttgataattcaatggtagccataaccccaaccaagggtcatcacacctcatttctccgagaatacgactcgacgcaacgtgtgcttggca

SEQ ID NO: 81011 - DNA, 270 bp, Glycine max
ctcttccatccctctttgttgcttcccctttctgcgcctcagtggaattacttgattcttggacgtcattctctacaatttcaataacatcttgagatcaaaacaacacctccatttgtgcacaccagcgatcccaattcttgccatcacaagaattggaagatttttgggaattttggtgttgcctgccatttttgttcttactatgttaattcaccctatttgcacaacttgcttgaattatggatgcagaaccatggctctgggata

SEQ ID NO: 81012 - DNA, 428 bp, Glycine max
  unsure (1)..(428): unsure at all n locations
agctntcaagaacaatgcaattgtttagattcttgatttaatctattaaagtgttcttgatcacttctaggaactctttcaagaacgatataattgattacaatcaccgagtaatcgattaaagtaaaaactcatgaaaaccatatatggtctcaactgaattgtgaaatcaattatgaataactggtaatcgattaaaccagaatgaggatctttctacgagcctctcaaaagacttgtgtaatcgattacggatagcctagtaaatcgataaaatggagacttcatgcactaaagaagtttctaactctagatacaatcttctgtctctacatgatgatgcatgatttacacactgatagactaagactaagatgcaacaatcaatacaaatggtactcactgagttaggcatgtaaaagacaaac

SEQ ID NO: 81013 - DNA, 288 bp, Glycine max
agaccccagtacaattcctccgttccaattcgttaaccgttggatcgactccaaaattttactggaagtctctagtgcataaccctaattttggacggtgggatctgctacaaacattcagaactcactttggactggtcttttccaaccacgaaagggtatcattttttacacttggcaaaaattgtgtgccaatttatacaaaaatctgcacaaaaacagattcaaaaccacaccttccctcatcatcttgccaataaatctacaagtcaatatgtataacatgtt

SEQ ID NO: 81014 - DNA, 437 bp, Glycine max
  unsure (1)..(437): unsure at all n locations
agcttggaaaaggcttgtttcaccttctctcttaaccaatatggtggcttaatgagccttcccttaacgccacacttcctaggctaagcgccaggaaaaatctagaagaagatgaacgtacaggttcgctaagtgcacccgttcatctctctaagtgcaccgctttagttcatccgctaagtgagaaaggcgcgctaagccaaaaatcactaacgtgtgctaagcggtccatacgtgcgctaagtgcacgagcacgaacaaggccacctatttaagcctgaaatcagattttgtgaagagagtttggactgggattcaaagctttgcatgtctagggtttctagacagagaaaggtccaagttccagagagttttgagagattctgttgtgtgaagatctgcagagaccagagctngaagcaggagccggtttgaga

SEQ ID NO: 81015 - DNA, 58 bp, Glycine max
aaaagtttggcaacacttaaagaaggaatgttaaccacttaactataaagttgacatg

SEQ ID NO: 81016 - DNA, 430 bp, Glycine max
  unsure (1)..(430): unsure at all n locations
agctngtcatgcagaatctatctggaagcttggtggnttacaagtatattataatatgcctaaattaaaactagattttcatgtaatgtcataactttacattaattaatatttacgaatgtangtgacttgtggaactattggtctttctacagcaacagtaaaacttgttaatattgatggtagcacacatgttgcttgttctattggtataggagcagtggattcaacttacaaggccattaatctcgttgtgaaggtttgtaatttacaaacatttttcactattaagtccttttcattttaagagctttatcgaacatatttcaacctatataaacatttagcccctattgtgatatgatatcttatctatcctacaataatctaagagtttaatttctatggactacaagtntaaaaattcata

SEQ ID NO: 81017 - DNA, 384 bp, Glycine max
  unsure (1)..(384): unsure at all n locations
tattcactcaaagattcaaatccataaatccatagttgccgctaagttttttcaagtgacattcttgttaattttacttgacatggacaggaagacgtttttataagtaacttgtgagtaattgatatcagttaaaaaatacagcatatcctatcagttaaagcttttcagcattatctgaaggagatttcagaaaatgactgagatttcaactctggaagccaaaaactctatttcccacacctactgcanacaatggagactgaaaattaatgcctcattgcatttgtaaacgaaaaacaaaaaagctaagtcatcatttacaatgaaactgcactttctttatacctactttagcagccttgacacaggtataatcacttc

SEQ ID NO: 81018 - DNA, 212 bp, Glycine max
aatatactggagctagcggtcatatctgtcgttagtgcacgatcacgaacatggccacctatttaagcctgaaatcaaacttcgtgaagagagcttggactgggattacaagcgttgcatgtctagggtttctcaacacagaaaggtccacgctccacagagtttttacagactctgttgtgtgaagatcttgcaagacccgagcttgtatc

SEQ ID NO: 81019 - DNA, 324 bp, Glycine max
aacctatgctgtgaatgccattcctatacggccaagtttcccaccaacccaacaatgtcattactcagtcaataacaaacctcctccttacccaccacccagttattcacaaaggccatccctaaatcaaccacaaagcctgtctaccgcacttccaatgacgaagaccacctttagcacaaaccataaaaacaccaacaaaaaggatatttgcagcaaaaagcctgtagggttcaccccaaattccgttgtcatatgctaaacttgatcccatatccactcaataattcaatggtagccactaacccaaccaaggttcctcaa

SEQ ID NO: 81020 - DNA, 445 bp, Glycine max
  unsure (1)..(445): unsure at all n locations
agctnttcttacttgcggattgctttacgttggttgttatatgcaataatcaaatgtaataaataaaataattttctctttcaatgtacgattcatatggtagttaattttgtagttttgtacttcctactttatcaagggattttcatgcataattcatattggcattgaattataatgttattttgtgtgttctgttggagatccaaaaggttccttaagattcgttctagctcattgtcatgaactagagatgcagttggttgattttcaaaattggtagccaagttgttatctttgttcttttaaactccctcgaagcacaccatcttgattccaaaaggaaacatacatgtaaaaacttgcacttttttcttaatatattgtcacaactcacaattaacagatctacacttaagtagacatatacaccagtaaatgcaat

SEQ ID NO: 81021 - DNA, 260 bp, Glycine max
  unsure (1)..(260): unsure at all n locations
ttttattatccttttgggtgtacatttctagggtggtttccctctgcttatgtagggagacaggagatgatactatccagcaagataacaaaataacttcacacgataccaacattggtcttttgattaggtgaggcacaaattgtatattataatcacggaatacatgcagcatttgaaaagccatagcatgtgcttgccattattnttggtggttctatcatgtcatctgtgcacgatgttggatatgtgagtcataa

SEQ ID NO: 81022 - DNA, 427 bp, Glycine max
agcttgctttttgaatttcaagcatctcgttatattattgtactcaatcggacatccgagtaaaaagttattgtcgtttgaatttgatacaagcttctgttttcaatttcgagcgtctcgatatattccaggactcaatccggcatccgagtaaaacgttattgtcgtttgaatttgctaggagcttctgttttcaatttcgagcgtatcgatatattaggggactcaatcggacatccgagtaaaaagttattgtcgtttgaatttgatattggattccgttttccatttcgagcatgtcgatatattacaagacataatcggagtaccgagtaagaagttattgttggttgcaataggtacgagcttccgctttcaatttgagtatctcgatatattaccggaatcaatcggacatccgagaaag

SEQ ID NO: 81023 - DNA, 247 bp, Glycine max
  unsure (1)..(247): unsure at all n locations
gtttggcagatgatattgtgttgcgggaaggaatcccgaatggattaactcaccattcttcactngccaatttgttatgacatttgttgttggatcaccctatatgtcttgcttcccagggtaatctatatcttttctgagggcataagcatgaaaccaattcaaagaaaaggacattaactttgacctcttcgacaaactcccataacctgtcttggatttgcttcctggttgcacccttgaatgt

SEQ ID NO: 81024 - DNA, 453 bp, Glycine max
  unsure (1)..(453): unsure at all n locations
agctngaaccaaacaacttcatgaagatgtaaactctttttgtcataaagcatgttgatttttttaaatgagttttcaaaatacaagaggggtaaacttaaactttcaacaagtttaaaaacataaaccaccttttgatatttcaaatcacttaaaaaaagataaatcaagactttcaacatcatttaaaacatcataactgtttcacactaggattntaaactacacacctaaaagttgtttaacaaatatctcaaaatgtttctccaaaaatataggaaaggtaggtcattcctatgggatataaccttcgtccagggttcataactctactcaccctaattatcattgtgtttctcacactataggatcctactcaaaaacatgattctcccttcttatctcaattcctactaaggcatncatcctcacaccaaactgacataccaactt

SEQ ID NO: 81025 - DNA, 135 bp, Glycine max
  unsure (1)..(135): unsure at all n locations
aaacctttctctccaaatgtcgcaccttgacccgccaatgagggttgtatgacccactgttattttctttttgctcattatttctttcttttattggtaaattattcaaatgttttcatagncattttccttctt

SEQ ID NO: 81026 - DNA, 411 bp, Glycine max
  unsure (1)..(411): unsure at all n locations
agctngagttcctaggcctagattcttatttgtgcactcattttaacctctacgctctgtccttatacatataaatcagccccacagtccatagctcacaaaaccatgctcatatgtcgttgagggcattcaccgagcacttggtgggcacatgtttaggcatgaatatcaagataatgggggcaatgtggcatgccccattacttcagactgcaccctaggcctaaggccatcccttacaacccctcaattcaacaaaaacaagcaacaattcaatgataaatccctcacgttttttagcaaatacatgcaacttagagcaccaaaatacatcaatggaaagctagagagcccaagaatgaggtacttacttgttggagatgaataatagcgcannaatggaataaaaac

SEQ ID NO: 81027 - DNA, 340 bp, Glycine max
  unsure (1)..(340): unsure at all n locations
attctattccacataggaagtacaatcgttgaaattgaaaaagataataaaattgtatcaccttttgcaggctggtgaacttatagcaaggcttgatctggatgatccttcagctgtaagaaaggcagaacccttcactgggagcttcccagtcctgggacctcctaccgcaatttctggtaaagttcatcagaaatgcgctgcaagcttaaatgctgcacggatgattcttgctgggtatgagcacaatattgatgaagtgagtaaattcctcgcctcgattcattaacacntgtantttacagcattcataaagtggtgagtcatccattacagatag

SEQ ID NO: 81028 - DNA, 440 bp, Glycine max
  unsure (1)..(440): unsure at all n locations
agcttggaagcatataattatattcttattcngaggngggatgttagattaatatgtgttgttagactttttcttttttttctttgttntgatcggcaaaagtagatatatatattaatgaaagcagtacaagtggtactgatatacaaacagcctagcatcaacgagagcagacctatggttagctaatacaatatacagaataagtattagagaaccaaagatctggctattagctaagtaaccacccaccatcaaaactgtacattttatatactattcccccgagtacaaaaaacctccctaatactactagaccatgagtgatatgggatatcaaatcctttnttntaaaccaggtccagcagaagagtaatgcatcctccatcaatctatgaccattaaagctttcatctangaatacaatttattcctatgat

SEQ ID NO: 81029 - DNA, 320 bp, Glycine max
  unsure (1)..(320): unsure at all n locations
caccctgtctgtataaaggactttacaacctttgtgtgttgccctcgctggaaagagagattctttccttcctatcatctccaccctcgttctttcaaaccacaattccagagaatccacctctgcccaaaattatcttgtgaccataactcccattttacacactcaaattaagtgattcttgagcctaaattgaatntcaaaacgagacctttcacctcgttntggaatcacctcatttggagccctgtagcttccgttattgccatttctatatttctgtgcagccaccacttaacctacggtttaccattccattc

SEQ ID NO: 81030 - DNA, 429 bp, Glycine max
  unsure (1)..(429): unsure at all n locations
agcttaacanaaggcatgcgaagtgggtgttattcctagagcatttcccttatgttatcaaacataaaaagggaaaaggtaatattgtagccgatgctctttctcggcgtcatgcattactttctatgcttgaaacaaaattgattggtcttgaatgtttgaaaagcatgtatgataatgatgaaacttttggagaaatttttaaaaattgtgaaaaattttcagaaaatggtttctttagacatgaaggctttcttttcaaagaaaacaaattgtgtgtgcctaaatgttctactagaaattntcttgtttgtgaagcacatgaaggaggtttaatggggcattttggggtccaaaagactctagatacattacaagaacatttttatcggcctcatatgaaaaaggatgtgtagaattttgtgaaca

SEQ ID NO: 81031 - DNA, 373 bp, Glycine max
  unsure (1)..(373): unsure at all n locations
tgttcttggctgatagggtggtgggtaacgaaaagggatgatattggctaagtatttatattgttgagcttgggggaaaattggccatgtaggaacgacagtcacaacatgggttcctcattcctttttattctctccatttgccctaggcttcctattcatcanagcaggataatcaaatttgtctcttctcagacccacttcaatcctttcactggcaaaaactaaatctgcaaaagcttgaagccatgtaacccatcatcttctcatagtagaacattggtaacgngctactatcattggtatcatctccctctcatcattgggggactacttgagctggcagatccctctacctttgggcgtattcttt

SEQ ID NO: 81032 - DNA, 413 bp, Glycine max
  unsure (1)..(413): unsure at all n locations
agcttcacaaggaggtgagcttatgttttatgatgggtgtgtgtagctaagctctatcttctaaaggaagttttctcaaagaagcttctcaaggaatttttctcaagaaagcttcttaaggaagctacctagtctataaatagaagcatgtataacacttattgtaactntgatgaatgagagtcttgtgagacacaactcanagttcaacttctctccctttttcttccttcaatttcgtgctcccccatctctctntctctccctctntcttttcctccattgaagcatcctctccaagcttcttatccaaggctcatcttggtggtgaagctccttcttccatggcttattccttagtggatggcgcctcctctcacctcttggcctctgtcttccgctgcatctccatg

SEQ ID NO: 81033 - DNA, 335 bp, Glycine max
  unsure (1)..(335): unsure at all n locations
cgcgcttttcaatctatcaggtgtcttttctttggaattattttacatacacaacaactttgcttctaatgtttgatctaaccacaacttagccatgtcataacttctattttcaaatattattcctcattgtggatgtgcataattatatagtgattatggaagtcttcaattatatagtaactattttctgaatctatttgtgcaggcatgaattcagacttaagcatgatgattggatgaacacggtaaaacctaatcttcattctggtggttcagcacaattgcatgaaaaatttgaggtatttgatgcagagattgaanactctaaatct

SEQ ID NO: 81034 - DNA, 229 bp, Glycine max
  unsure (1)..(229): unsure at all n locations
actactaaataacaacanaacgtatgaacctattattgtttattncaagtgctccaaacattcaatactatgcagaaccaacacgtatgccatgagactacaagcaattcctctggacccggatctttaatagtgccttctacgtatgaaatatttgacctcaaatttccactttgtttacttgtttaaaaaaattcatttaaagctttatatataaaataanaaatta

SEQ ID NO: 81035 - DNA, 435 bp, Glycine max
  unsure (1)..(435): unsure at all n locations
agcttgcctaattaacctgaaatggagagttaatgattattaaacacacaaaatgaaaatactaagtatttattacctatacttaacataaaatacttataacactacaaaataaccataaattgggagagtttgatacaacttatacaagttttatacacaaaatttagtcattttcatcgactaacaaaacccaatccaattaaagtttagagggagaggtgagcatttgtttgctacactctattgccacatcatatagtcacactttgtgcatgtccttcacgctttacatgcctcatgacacctaagcacacttttgtggacaagtggcctcagatatcttaagaaggggggcttgaattaagatatcacaaactattccccaattaaaaattctactttgattntaacccaaaacccaagattcctttt

SEQ ID NO: 81036 - DNA, 354 bp, Glycine max
agtttatattagttaagagttattgaactaatgagtgaaatacacttctaaaagatgagaaaataaaatacttacaatatttaattgagagaataaatatgctatttattttaagttatataaatacataaattaataaataatatttattcgaagagaatcgactggcaggttaatttggccaagtataccttaaaaaaaaatacaaaactaagaataaatttacgacattgtcgccatcatttttgttactcaaatgtcattttctgtcggaattggcttatctgctgttgaaatttcaacggcaccaatctttaccgtccaaaaatggtttttacacattaaactataaaa

SEQ ID NO: 81037 - DNA, 428 bp, Glycine max
  unsure (1)..(428): unsure at all n locations
agcttgccgctagagctgacccatcaactgttcttgctctnttaggctggtgattcctaggctcttaaccttgacttgatagaacctctttttaagtgaaggcttttgacttgatcccattgtttactaaagtgaaacaaaatctagcgcgaatcaaaactccgacgtctatcatgggtggaatggatgaatgcatgaagaaatgcatatgatacagatgtaatttatgaatacatgggcccgggaaattgtctccttcttagatacaacgtcttggggtagcaaagtgcccgacgtatgtatttaagaaggtggtacggaccctccgttggtttgacaaagagaggggaccaaaacagaatacatgcttgatgcatatgcgataggcgcaacacgggagtgtacaatatgacaatattcaccaaata

SEQ ID NO: 81038 - DNA, 436 bp, Glycine max
  unsure (1)..(436): unsure at all n locations
agcttgccttgatcacaaactccattntactgtaccatagaatctgtgcttcatgagaattccatttaggcttcagatgattggtttactgacaactaattgccagtttattacatgtcgtatgtgcatgcgagccattgaagagcagctaataaaatagcttgcaagtgaggcattcttganaacagaaggaagtaataattgacttaaatgttcattcatagaatgaaataggcaatcccatgaaccatcaaatccgaagatagccccctcgctcctgctctcctattcttaatgatctcctgagcaatgacttcctgttcagtgaccagcttcttgccatagctctcttatttcgccaggcagccgctatacgggtataaagggcccggaaaatgaccagaagtagacaagaaataacatagccacacacagt

SEQ ID NO: 81039 - DNA, 186 bp, Glycine max
ccaacttctactggttcaagatggtgcacttcctctaaatctcactgatgctgccatgcaagtacacgctgtgcaccaatgatattttttcagcgattgaagcttcccaagtgaatcaaaggaacagaccctttagctgtgctccgcaaggtgatttctgaacaaacctttggagttgatacaatc

SEQ ID NO: 81040 - DNA, 438 bp, Glycine max
  unsure (1)..(438): unsure at all n locations
agcttatgttgcanacatctacaatagacttcctcatcctgagcagcanaatcagccacaacagaacaattatgaccttagatggtcgaatccttcacaacagcagcaacaacagccttattttcaaaatgttggtggcccaagcagaccatacgttcctccaccaatccagcaacaacaacaacaacaacaatagccccagaaacaacaaacagttaaggctcctccgcaaccttcccttgaagaacttttgaggcaaatgactatgcaaaacatgtagtttcaacaagagactagagcctccattcagagcttaacaaattagatgggacaattggctacacagttaaatcaataacaatcccagaattctgatagaataccttctcaatctgtccagaatctcaagaatgtgagtgccattacatttgagatcgg

SEQ ID NO: 81041 - DNA, 163 bp, Glycine max
gcttacgttccagacctcgacaagacctttctgatttctgtgctgcgagagcaacaccttcatcacgaccatgaccttactcagaggacctcttcacagaattattctcaacagagcttcttatggaagcgtcctagcctatacatagcagcctgtgtaacac

SEQ ID NO: 81042 - DNA, 97 bp, Glycine max
cgaatatctcagtacttctctttgcaaaggcccttcaattccaacaatacatgaatgagaggcacttgttacatgtgacacccgctgccctagcaaa

SEQ ID NO: 81043 - DNA, 460 bp, Glycine max
agtctaacagcacgcctgcaagcatgcatgcttattgggcatggtgagttttatttttgagaagaacttattcacagggtgtgttgatgtccttctaagcaagaagggtatagatgaggcacactaagctgggaaaagaattagcagcattccttctgaagctggagattatgcctatactagggtatgctgtttatagcccttctaagaccctttcttttttttaatgaaatgattaacaatagatattatttgtctggaaggctgcaatggcacttgcagacctctaccaatagattgaatagaacataaaaatggttctgcttgtgaaattatttgtcacgtgtctctatgtgctatgctactacttatgatcgatatcgatgattgctgtgttatgtgttctttttgttacactaagaaagcttccgtaaattcatgattttattgtatatagaga

SEQ ID NO: 81044 - DNA, 456 bp, Glycine max
  unsure (1)..(456): unsure at all n locations
ttggtttgggtgggaaggaataagggttgctccattcgagcctgatgaagacaaacatcgttgggcttcccaaggaaccacaccagaggaggtggaataagtaggactgacagatacaagtcacttggtaattcattccaggtatgataattccctctcttcctatataaataatgtagcttccatagagatccttccaaatggtgttactcgctcggaactattcagtaatnattacatcatcaactgcttttccgttcccaaaacaataagttctagtggaacagaacanacgatgtcgagtcaagagcatgttcttttctatatacaagaaaaaatggcggatgtaagaatccacaactaatctaatcatgtctttcngtcgaacatacttttacacatcgttcaacgaagtttacataacatccttagttgaatcagatgcatgatcattat

SEQ ID NO: 81045 - DNA, 219 bp, Glycine max
gagaagggagggaagaggaaaaaaggaaagagcagatagggagaagaagaggggagaagggggaaaaagagaagcaagcagaaaagaagaagggaggaaaaaggggggaaggataaaaaaaaggagggggaggaagggggagagaaaaaagggcgaaccggggggaaaaggaggacagacaaatggagagaggcgagggaagggtgaaaacacaaaaaa

SEQ ID NO: 81046 - DNA, 323 bp, Glycine max
  unsure (1)..(323): unsure at all n locations
acttttttattttttggtagttttttaattacaattttacttaatatctatattttttcatctacttagggcattttttaatataaatatgaaattaaggtgatatacttataatataaattacttgctaatgtacttaaggctctcctttcagaattcaatgttgattntaagttatcaatttgtacctcaccaccttctatatcacttatcacaagttcattcaatcacttatcacttgtcagaatgaattntgagaattttaataatgtcacttgaaagaaaatctctttagtttattatacaaaaagtataattaaaag

SEQ ID NO: 81047 - DNA, 403 bp, Glycine max
agcttctatgagacaacttacctgatatattagagcttacctacacacacccctctaataactaagctcacctccttgagaagcttccttgaaaagattcctaaagaagctagagcttagctacacacacctctctaatagctaagctcacctccttgagatgagaagctaaagcttagctacataccccctataatagctaagctcacccccgtgacacaatacatgaaaatacaaaaaagtccctactacaaagactactcaaaatgcctcgaaatacaagggtgaaaccctattctactaagataaccaaaatgcaaggcccaaacgaaggaaaaacctattatgatatctacaacgactagcaggctcatacttagcccatgggctcgaaatctaccct

SEQ ID NO: 81048 - DNA, 230 bp, Glycine max
gacctagatcccccttttttatgtataaaaacagtgtccaatgggatgggaatgaatctaacaggtagggattgaaccatatacatcttaaagccgactgttggtgttataaccccgcatgtgtcgcattttccttgtgacatactttcttaaacttatggttgcctttagaaaagcccttaaatgtggataaaacttattcctaccttcgttgccatcatcttgtggtg

SEQ ID NO: 81049 - DNA, 339 bp, Glycine max
agcttgaaggttacaactcatattatattgttttgcacgggctttcttgaactaacaaagaacttagaggtaaaaattttactcaccagcgtcctttgataatggctaacgaattaatcacgtgatattttttaaaattgatcaaaaccatagtaaactgtattgttacattcttcgaaacaactcttttcacttttgagtccttaaactcaggtacttatgcattatattgttgaaagcctaaatggtatcactatcaggcaaaagagaatttttattatgactgaatggtatacattttgcgcgaatcttacaatcatgactattcggttgacaatg

SEQ ID NO: 81050 - DNA, 431 bp, Glycine max
  unsure (1)..(431): unsure at all n locations
agcttgaaattgaacaacggaagctctcgagataatcgagnggtcataaattttcacacagatgtccgattcggggaaataatatatcgagactcactatattgaacaacggaagctctggagaaatctgaatggtcataacatttcactcggatgttcgatccggggacataatttatcgagacgctcgaaattgaacaaccgaagctctcgacaaattagaatggtcgtaacttatcacgcgaatgttcgattcggggacataactcatctagacgctcgaaattgaacaacggaagctctcgagatatatgaatggtcataaggtttcacacggatgtccgattcgggaacataatatatcaagacaatcgaaattgaacaacggaagctctcgagaacatcaatggtcctaacgttcacaccgatgt

SEQ ID NO: 81051 - DNA, 202 bp, Glycine max
caaccctttgtgtgttgccctcgctggaaagagcgattcttttcttccaatcatctccacccttgttctttcaaaccacaattccagaaaatccacctctgcccaaaaatatctcgtgaaaggtctcgttttgaaattcaatttatgctcacgaatcacttaatttgagtgtggtaaatgggaattttgtcaccagataatt

SEQ ID NO: 81052 - DNA, 193 bp, Glycine max
tctttagttttgatctgatatgtcttctccagctcgcataaacactgtttttctgtgattgaataatattgtgcctgactctgtatatatttggcaccttaggctaggtcacctcaattctcaagctctaaagcttgtgcttaatcattgtaatttcaaaattcctgttaaagatgaactgtccttctgttct

SEQ ID NO: 81053 - DNA, 429 bp, Glycine max
agcttatttcttatatatagcccacaattatattaatactttctcaaatcaagaaatcctaatatttttaaagtcagaatgtattaatgacaaccaacccttttgccgttgcagaaaatctaaaccaaaaggaaccaactataggtcatcttttcagtccttctatgtgcactcccccaacattttattcaattaaatgtttgaagcttagagaaataaaaatgtaaaaatctttaatcaaacaattcttaattttttatgtaaaaatgttgtattaatgagaactaaactttttctgcctttgccagagaatctaaaccacacagcaccaactataaaccatctgttcagtcaatgggcattgtctataacttatatttatgtctgattcttggagcccaaaacatttaattgactggtatatattaa

SEQ ID NO: 81054 - DNA, 213 bp, Glycine max
tgaattcaactattattatttatttatttcgcgttaaacgatttgcaggaaagacaaccttcgtgaagaggcatctcactggtgaattcgagaagaaatatgaacgtgagattctttctctattattctattattaataatcttttatttgggtttatcctcattctttgtcgcatatgcttaatctgaatcagcgaccattggtgtggaggg

SEQ ID NO: 81055 - DNA, 395 bp, Glycine max
  unsure (1)..(395): unsure at all n locations
tgttagtcgctcatgcaaactccctaagattctttttgaatccaagggtagcctctgttatataaattcttttgggatcagcccatttcacccatttcatcaagctttagcgggatcgacaaatccatggcatcatgatcttaaatcaggaaaatttcacttggtcatataccaaagtgtaacaatacatttccatccttcaatggtgcacgtggttggtctcaaagccttatatttccttgttgtgtagaataatcgaagtttntaaacaaaacaaagggacgaacnctaagatcaatattccagtttgataattaaatgtcaaatggctccactaccgtcatccataatngtcaagtgattaaatcaaacaaacatacactctaagggagtct

SEQ ID NO: 81056 - DNA, 312 bp, Glycine max
  unsure (1)..(312): unsure at all n locations
aatgggggccatgtggcatgccccattgcttaaaaaacaacacaggcctaaggccttctcacaccaatcctcaactcaacaaatcaagcatcaaagcaacccaaaactgcctcacaaatataagcacattctcacaatttagagcatcaaaagataaagaaaacacatcaatgggaagctaaaaactcaaggattgaatacttacttngtggagtgagtagaaacacaaaaaatgaaagcaaaatgcaaccaatagtggcttacgggagcaaaaaccgacagccttcgtgaatcctctctttttgaatgggg

SEQ ID NO: 81057 - DNA, 275 bp, Glycine max
tgtggttcaccaataactatcatgaggcaggaacatagcctaactactcatgatgtatgctagaacccaatacccatgaaaatcaagtgagaaagatgtctacccaacctgaaattgcgagggcccacacgtagagatgcgctatacgactccgaaaatgccttcctttcgcgagttgtagcatacatggtgaccgaaggttagagctttgttgggcaacaatggtggatgagagaaaagaagaagaaggttgcgtgagagagagggagtgagct

SEQ ID NO: 81058 - DNA, 204 bp, Glycine max
gctcacccctacaggaacttcccaggtaagagaatggagtatccatttgactacgattgagagaagatgctgcctccctacaccaggactccgatttgcccgaacacccaggattgctcttattgcagtttatcttaagaccagagaccaattcaaagcttttcaggatacactttagaatcctccccgtatctttttcatatg

SEQ ID NO: 81059 - DNA, 358 bp, Glycine max
  unsure (1)..(358): unsure at all n locations
ccgcagcttacgaatagatgtttgacagcggatcatacagtcatatgccatggacaagagttatcacagaaactatagttctttcacacagngacatccttatatattagtctatgataataacgggacaaacataacaagaggacaaagaaaggcgcttatctagttctcctattaccccactctttcttttttgctttgttttttgtactgtttatcgcagaaatagagtcaaaacacacatgagagagacaaataagaggtttcaatgcttgctatctctgttatttaccctctaatgagatcttgctgacaacaactattttttacaaatatgtgctttttgacttgagacccc

SEQ ID NO: 81060 - DNA, 119 bp, Glycine max
attatgatattttatttttacttgctgtgttaattacaaaacaaacaacccccccccccaattcgttatcggtttattacaatctattatgaatgtttggttgaccattgctcgttggg

SEQ ID NO: 81061 - DNA, 355 bp, Glycine max
cttttttaagcccactaccaaggcccaattctcaaatagtcactaaaacatgtaaagcacataggtctattccattttattagttagttcattaaaaacataaatttagacttaatttctattgtagtgttaatcaaacacttcacttatattgtgaaaaaacatagtgttacacattttgtaagtcttatttaattatattgacaaattagtcctagataatataataattatagacaatttaaaaccttaaatacttaagcatttagatgaattagtgtgacaaatgaaaccttaaaacaattaaaccttattttgatcatcccaaaagtgctatatgtgaacaaatgaaaac

SEQ ID NO: 81062 - DNA, 434 bp, Glycine max
gggtctaaaatcaatttggaaccaattcacccctcttcttgatttatgattcaacttgccatttctaacattgaacatttcaacaacataataaaacaaaatagtcaattataaattccataatatttaaataaccaagtctagtaatgcatcactactagataataacttacaaatgtgatagtagtggtaaagctttcccaatgagggtttgatgttgctggagaataaatgttcgatatttttagaggtaagtgataactattaattataagtatatcttgggttaaattatataggaaattgaattttcctctcataattcttccttttttagcgataagtgtaaataacatcattatgttttgatagaaatattaaatgagaattatatgcttagtgagaaataagcacaaaaagattatacgaaactg

SEQ ID NO: 81063 - DNA, 352 bp, Glycine max
agccttgatttcctttgttccgtatacctttcttttctcatgtgcacccaaacccaatctccgggttcgaagacaaccttctctctccctttgttggcttgtttagcatagcttttatttttcctctcaatatgatctttgactctctcatgaagcttcttcacatagtccgcctttgcttgaccttctttatgcttaaaaacagaaacattaggcataggcaaaagatcaagaggagttagtgggttaaaaccataaacaacttcaaaaggagaacaattagtggtgctatgaacagctctattgtaagcaaattcaacatggggtaaacaagcttcccacagttttaagt

SEQ ID NO: 81064 - DNA, 182 bp, Glycine max
cataatcggtcagtgagaaccttatgatcgccctaaacaagcgagctcctggcagttcccagactaaaggaacaaagaccaccaagcaaggaggctctgtggggctggccatctgcgaattttgtgtgatatgtggattatggcctctggtaatctattaccaacggtgggtaatcgattac

SEQ ID NO: 81065 - DNA, 432 bp, Glycine max
  unsure (1)..(432): unsure at all n locations
agctngtagaatggctagacatgatacatgtcatgacttggtttggntcaaggataaaagggatgccccacattatttccatgacacacatgcaaaaatgatgatttggaaactttatgcaaaactggtcatgcatgcacctatgtggacgctcaagtgtcaaatttttatggtcatgtgatgctagggctcatgattcatttcctctatnttaaatcaacccaatgtttccaaaatatgttcttttatcaatttgtgcattcatccgagtccatttcgggcgtccggtgaaatttcacagcattcacccttcatgtgtagacacatcttccaaaaattggttttgatcaatgacatttctccaaagaaaaagttgaaatcatctcttttcaaaagcatgtcggttttcaacatacaacttattttcttttt

SEQ ID NO: 81066 - DNA, 374 bp, Glycine max
  unsure (1)..(374): unsure at all n locations
gtaaactcatcactttcaaattgagcttctcaaactactatgatatgtagaggagaatcaaggatttcaagtcacaaaatgtcaacaacttttattttcaaaacaattacccatttcttgaacatatcctataattcaaagaanaacatgcaaagtcgtacatgcacacaaaattgacccaaaatattaaactaaaaatcttacgaaactaacaacattaacaaattaacacaactaacagattaaccaaaccaacagaactagcaaaaccaaagaacactcctcctcctcccatacttaaacaacacagttgtctcaatgtagcacaattaaaagattaaaaacaattaaatcatcaaatagaatcggacaag

SEQ ID NO: 81067 - DNA, 428 bp, Glycine max
  unsure (1)..(428): unsure at all n locations
agcttgtgatgataggtactaaattataactttcatgantttntgcctacaatatgattaatgagctatgatgtagaaattattaaaaactgttatgtnttgaggtttaagaccaagtgagtgtgtgatcacttggcaatgaatgttgcatgattatgattttgagctttacattagggattangtctaggggtatttgcccttcaacaaagtatatatattgtagagtatgattgatgttgaataggtgtagtgtgctctatcgtgatagaaatgtgaagtacgatatcgagagtggtgtatgctagtgaaccacatgtggcatttacgtaggttatgcataaggcttaatgtttgtgtttgtggcttatgaacggatggagtattcactccttttttaccattttatgaatcttatgccatgtgtg

SEQ ID NO: 81068 - DNA, 440 bp, Glycine max
tctatctatgaactatacaaaatacacaaatcttctattgttctcaaaataattttaactcatcgtgcctcaaagtgatcaactttgttgggttaccatagtggatcccatcacaatactcgttgcacattaactcgtcgcccttaaagggtcttacaatccattgattgtatgattcatagctcacaactcaatgcacacaacatctcaatacacatgtgatctcacaatttaacacatagtcaacttgtcacttacacacaattcatcacactttcataatcctaatacatcatgttatcaagcctcatgcatcatatacatatcacacattaataatattaatatgtattttcttatgactaacatatcattaaaagagcattcaaatcatattgtgccatggagttgactatcaataccacaactactcattgtac

SEQ ID NO: 81069 - DNA, 378 bp, Glycine max
  unsure (1)..(378): unsure at all n locations
agcttgagtgcttaacttgctantactttttagnttttgccttatcagcagtaaggttgtcttgaatatgcttctcccacgtacacctctaaggctntagttctttaaagatatgcaatacgcgtgtagtgaaatgctgatggatcggcaagtgcaccaattcgtcccaagtagtaaagttaatatcgaagtccgagtgtcgaatccacagggactttgtttatacctaggtagatgattagttaattaataaaaagatttagaaaggttgtagaaaacagtaaattaaattgcttgaaattaaatcaaccaggaaaattattaaacatgacattaaattactaattaatctaagacagataagatgagaatatccat

SEQ ID NO: 81070 - DNA, 99 bp, Glycine max
cattcaacatcggagcgtgcctgattatagaaatatattgtctgcatgtgcatgattgtagaaagacacaatatatctacctagctgaagcacttggac

SEQ ID NO: 81071 - DNA, 51 bp, Glycine max
  unsure (1)..(51): unsure at all n locations
cgacctcagagncgaccagcaggctgcaagcttgaactataagtgacgacg

SEQ ID NO: 81072 - DNA, 256 bp, Glycine max
  unsure (1)..(256): unsure at all n locations
aaaatcattcataattcataatatattggtatggtttcacttagccttgtgcaattttgcttagaaagatgagatttttcaaaatgggctattctaagcttgtttcgctcagcgaaatgggaattttctggaatctagaaacccattcagatttacacaacaaaatgtagaatcttctacgtagggttcacaccattttcaactaanatcttctacctaggcttcaggcatcctaatgtacacaatccattcaaca

SEQ ID NO: 81073 - DNA, 301 bp, Glycine max
  unsure (1)..(301): unsure at all n locations
agcttcatcggatgatgccaatcgaaccattcctaaatgacatcatccaattgttattcagggatgaattgaataaacaatggccggtgtcggtcgttatatggccccgactgatatctttcagcctacattgcgcaatttcttttacaaacgttggccgataatgttttttttttaaggtagaggaagttttttgttttggtgttgccttaaaaatttaaaacgtaagtctcgaaggtttttccgtgctaacttttanataaggattatttttacctgatattggaatgctgatcttatc

SEQ ID NO: 81074 - DNA, 343 bp, Glycine max
  unsure (1)..(343): unsure at all n locations
aaagaacaaattcttgaacactggttcgatctgaatggggcaaacatacccccagccttagtgtttacatggccacaatgctttatgtctgagtgtccacatggatgtgtgcatgatcnagtttgcatgaatttctaataatcatcatcatatgcgtgtcatggaaatgacttggggcattcccttattcctaagcaaccaatgaaacaaatagcccgacctacatcatgtcttgccatttgtaggcctttngagccaaacctcaacgttttggccataaccttgacatatgatggaaattgccataccttaccattggaagagagaacagacgatctttcaa

SEQ ID NO: 81075 - DNA, 418 bp, Glycine max
  unsure (1)..(418): unsure at all n locations
agcttgtgcatccaataccctgatgaggatgttccatatgttcttaatactggactgattcatttgcttccaatagttcatggccttgcatgtgaagacccgcacaaacatttgaaagaatttcacattgtctgctccaccatgaaacccncagatgtccaagaggatcacatatttctgaagggctttcctcattcattagagggagtggcaaaggactgactgtattaccttgctccaaggtccatcacgagctgggatgaccttaagagagtattcttagaaaaaattttccctgcttccaggaccacagccatcaggaaggatatcttatgtattagacaactcagtggagagagcctgtatgagtactgtgagagatttaaacactatgtgctagttgccccaccttagattt

SEQ ID NO: 81076 - DNA, 437 bp, Glycine max
  unsure (1)..(437): unsure at all n locations
taaaatgcggaaattacagatcaaatcatacctccagccattgctatgaagagattcttgattcggttcttccaagctctctcttcctctctctagatggtgtataagactgaattcgaagggatgagttcagggaccaaattcatgtgcttatataggcattctaccatcaagaaagcatttaccagtcattaccactcattattggctgttacaattcattagtggtcattaccacccattaacagccattataattggcttccacaactgaccagcgttacagattttcaaaatgctatgaccaaattattacattctcccacttggtccacacactttgacttaatgctcaatcttctaaagaaaataatatacanatcatagcgatagttcctcttataccgagtaatatcatccatgtattacaatatact

SEQ ID NO: 81077 - DNA, 406 bp, Glycine max
  unsure (1)..(406): unsure at all n locations
agctngcttgtgaagattctatggaggctgtatcttttatctccaatgaggtccttcaatggtgatttttcaccatggagatgcagcggaaggcacaggagaataggagaggggaggcaccatccactagggaataacccaaggaagaaggatgctctccaccaagaattgtcttggataagaagcttgaagaggatgctttaatggaagaaaagaatagagaaggggggagcacgaaattgaggaaaaaagagggaagaagggaactttgaaggatctcataatactttattcatcaagtacaacaagtgttcacatgcttctaatatagactaagancttccttgagaagcttcttgaaaaacttcttgagagctctttgaaaaaacttcctggaactagagct

SEQ ID NO: 81078 - DNA, 238 bp, Glycine max
  unsure (1)..(238): unsure at all n locations
atgccttgcgaactccttggagtaccttcgcattgnggtcactgaaaccccgtgtaatgaaaggcgtgatgcttttgactaatggcgctcctctcacagggtagccaagctgtcttatggtgagaacgggattataattaatacacccccttgttccataagggaacattggacatcttccatgaagaagaatcctaatctccttcctttacgagggaaccaaaaagacgccccccat

SEQ ID NO: 81079 - DNA, 394 bp, Glycine max
agcttatgctgcaaatattacaatagacttcctcaacctcagcagcaaaatcaaccacagcagaacaattatgacctctccatcaacagatacaaccctggatggaggaatcaccctaacctcagatggtccagccctcagcaacaacaacagcagcctgctccttccttccaaaatgctgctggcccaagcagaccatacattcctccaccaatccaacaacaacaacaaccccaaaaacagccaacagttgaggcccctccacaaacttccctcgaagaacttgtgaggcaaatgactatgcagaacatgcagttttagcaagagaccagagtctcaatttagagcttaaccaatcagatgggacaattggctacccaactgaatcaacaac

SEQ ID NO: 81080 - DNA, 349 bp, Glycine max
aagtaaaatgtctttccattataccttggatgcaactgtgatcgtatgcccatatcatctctaacttgacaggcattgaagccatccttcatcttgtcctgaatgttaaggagagtgccacacacactatcacaaacatttttctccacatgcataacatcaatacaatgtctaacattaagatcagatcagtaccaaagatcacaaaaaatggacctcttcttccatatgcaactcttacttttatccttctttcgggccctccaagacattattcacgtgtcaacccgcgatatactgctcatcagtaacggatcggacaatatatgctctgattcattaaaacctt

SEQ ID NO: 81081 - DNA, 412 bp, Glycine max
  unsure (1)..(412): unsure at all n locations
agcttggacactgaactgcatttttggattgttgacagcacctttatgtagaagatgtgacttctcaaaatcaaaatccacgctttcatgtctgatctccttgagcattgctgttacatctttcattgttggtctttcttctggggatggattcacacagaggagagccacacctagcacttgaagcatctcagggatttgtgttccacactgcagtgttagtttctggtctagaattgatgcaaattctgttttcttctctctgatttccctgataacccaagggacaacgtgcgaaccttctggaatcctgctatctattggctccatccccgttaagacttcaatgagaaccacaccataactgtacacatcactcttctctgtgatccttaaactgtatncatattct

SEQ ID NO: 81082 - DNA, 356 bp, Glycine max
  unsure (1)..(356): unsure at all n locations
tcgactttttacaccaagaggcaaccatgtggatggatcggtttgctcttaccttgaaccggagtcaagaacttccccgattgttagccaaggccaaggcgatggcagacacctactccgcccccgaagagattcatgggcttctcggctattgtcagcatatgatagacttaatggcccacataattagaaatcgntaggaaacttgtatggtctctcagaccttgactagatatgacttcctttttgaaatacaatgagttggtcccatgtttctactccaaaaagcttgtgcaaatcaaatcactcctacatctcatctctagcatgcattttctttcttacccactcctcac

SEQ ID NO: 81083 - DNA, 241 bp, Glycine max
  unsure (1)..(241): unsure at all n locations
agcttgttgttgtgtgtccatgttacaanattattgnttggttntgttctttgcgtaagaagcctgatgttaacatcaaagctacaattaacaggttatgtttaaaattataattcatttattgtataacaattgtaggatatgtaaacagaattttgatgttatatacgtttaagcttttttttaactactgcaatgaagacactaactctctagttggaaggtaaatcgtattatccct

SEQ ID NO: 81084 - DNA, 309 bp, Glycine max
tgtatacgggactaatcaacattcgagtaaaagttattggccgtttgaatttgcttgagagctctaacattcaatttccagcgtctcgatgtattacgggactcaatcagacatccgaaaaaatagttattgtcgtttgaatttgctctgagcttcagaattcaatttcgatcatctcgatatattacgggactcaatcagacatctgagtaaaaaagttattgtcgtttgaatatgctgagaggttcaacatccaattttgagcgtctcgatgtataccggactcaatcacacactcgagaaaaaagt

SEQ ID NO: 81085 - DNA, 427 bp, Glycine max
cctgcagctgaagcttacatacagcaggtttataattgtttataaatcttatctatggagtcttttatttcggaccaccgaaacaagcctatgttgtttacaagacaaacttaaagctaaaatgaccttatggaccttaacacccgagacttgaatgcaaagtgttccttatgttccttatcatataataatactgtaatgagtattattatgttatgcatttcatatcatttgttctggtgagtagaaattagctcgactcttgatggtgagcaccaattcttactcatgtcattatctaagtgcgtgaataagacaaccctcaaggctatttagttggtcataacaattaacccaatatattcaccggttaagacactgatttccaaatcatgttatcccctttttgtaaattaattgccttaaa

SEQ ID NO: 81086 - DNA, 272 bp, Glycine max
aatttttattctgtctccaaaaatggatggggcacacattgctgcttccccttcccattgtgtccatcatttgtattcaattgaactttacttttctgtcatacaagaagaatggatagaaaggaatatagaagtaaaagtacatctgagggaggaaaaggaatgcttctgagaagtatagaacataaaaagaacattgtgcctaggtggcccacataaacaaggctgctcacaatcagtgatagatactttttgaaacagcatgaacagaa

SEQ ID NO: 81087 - DNA, 410 bp, Glycine max
agcttacacaaacattcattagtctaacattcactcaacaaatagtcatcatccgtccataattccaatcaatcatgctcagtatgatgcatgcacctgacctcaactctcaaatgcaatgtggtaccatccccaaggaaatagcctaagcgtgtccacatgacactctcacttaggaaaactaggcagtaagtgtcgaggtcaccttatcatgcacaggcaactcccccccatggtcattagcctgagtctcaagggagttccaaaccgagtgatgttagtcgattaatacgactaacttttatgtaaaaaaactgtgtaattggattcactccttcatttacagtcttttgtaagatgaaagacttttgtaaattaaggaataggacttagatccactttgtgaatta

SEQ ID NO: 81088 - DNA, 409 bp, Glycine max
tgcatttgtataccaccacaatctccatatatgctatacccataaaaatagagtaaactgcctatcgaaggaatctgaattatatatattaccattccccaccacatatcccttgataatacctattgaaatgaccatcctcatcaaaccattcaaaccctctacaatgactatgaataggaacggggacaaacggctccatgtctaggcctattagatatagaatacctagcagactaccatttgccaagatcaatattgagctagagcataaacattcgtcgagccactaacaccactctatgagagatgcgcatctgtgaagcatgtacaatataaaatcccagagaccacaatatagccttctatagtccacttacaaactaacaactgttgtcttccctaacct

SEQ ID NO: 81089 - DNA, 342 bp, Glycine max
tcccataccacctgatttgaggatctgaccccaatggggatgcccaagtagtggaaaggaatccccatctgcctacagctcagaaagtgagcagcttcttgagaccagttaacataatctccaaaaattccgaattgactcttagcatatttgactttcagaccagaggccatcctatagactctaagcattgccttgaaaccaataacattttccaaggaatgcttgaccaatgaaaacactatcatcttcgtatagcagaatattcatatgcttcttttgtttgtcaccagccgctacagtcagatttttacaatggctgtttatcattcaatgatacct

SEQ ID NO: 81090 - DNA, 324 bp, Glycine max
  unsure (1)..(324): unsure at all n locations
gctttcttgagaagctttcttaagaaaacttccttgagaagctntcttaagaaaacttccttgagaagtttctntgagaaaacttccttgagaagctagagtttagctacacacacccatctaaaaactaagctcacctccttgagaagcttccttgagaagctagagcttagctacacacacccatctaaaaactaagctcacctccttgagaagctttcttgagaagctagagcttagctacacacccctataatagctaagctcacccncatgacaaaaaaacatgaanatacaaaaaaaattctactacaaagactactc

SEQ ID NO: 81091 - DNA, 352 bp, Glycine max
  unsure (1)..(352): unsure at all n locations
catgcaagcttgacttcatatttgttgatgagaggttgccatacattccagcttctagagctcgaccccattggaattccaaggtacgaaaaaggaaactgcagctgtccacagttgagaaaaagagctgcctccctacaccaagctttagatatgcccatgcaaccataatggcttttagcatatgtgatcttgaggccagatgccatctcaaagattctcaggatagatttcataactctaacattagcagtagttgcagaaccaaaaaacaaagtatcatctgcatattgcagaatattnttttttttttggtcagcaaaattataatttgtattaataattgcgagta

SEQ ID NO: 81092 - DNA, 240 bp, Glycine max
  unsure (1)..(240): unsure at all n locations
cattgaaaagttatctttttataacattgatgttattntcgtgaccttcactgaatctcaatcacattggcatgagcggaatttcaaaatgatgtctccttttagtagaatctgaaacacccctcagccctttatgttntgacagaggtatttgactctgaatgttgtcattaaccttgtttctaaaatctatattaacattccttcaatttggcatatagaaccttgtgtttggagtga

SEQ ID NO: 81093 - DNA, 364 bp, Glycine max
  unsure (1)..(364): unsure at all n locations
acccatcacatgtggtactangtggcggtcgggtgatggtgcacaacaagtttttccacatccacaaatcgcgcataaacccaccatcccctgttgcccacctccaactgagctcacgtactcccacgtagcccatatcctcgtttctctcaacaccgggtccccatcaatcctcccaagcttccccaacatccaggtaattcaacatccaaaacatcacaaactaacaaaccaagcaaaacagggcaaaggcagaaaactctgcccaaaactcaaaccaaaatcaccgctttttctcacttaaagaccccagtaacctttntctctagtacataagtctacgttttgaccgttgggatctact

SEQ ID NO: 81094 - DNA, 206 bp, Glycine max
  unsure (1)..(206): unsure at all n locations
catagaacacaagagcatgattgattagagaaatatatttatatgcataagcatgtttgttagaaagacacaatatttctacctactgctatcacttttacttactttgcattntatagttttagcataaaagttagtttaaattctatttgaaattatcaatcatacatgttgtctcaacgatgcttcatttctgaacttaattc

SEQ ID NO: 81095 - DNA, 338 bp, Glycine max
tttcattctcttctgcctttgccaaaaagaattcgccaaggactaaccgactgaattctttttgtgtctctcttctcccttttgcaaaagaacaaaggactaaccgcctgaattcttttgtgtctcccttctaccttgtcaaagaattcaaaacgacatagtttgagaattcttttgattcttcccattcccttatacaaaagttttcaaaggactaaccgcctgaggattcttttgtatccccattcacaaagtttcgaaggtttaaccacctgagaactttgtcttaacacattggagggtacatcctttgtggacaagtagagggtatatctact

SEQ ID NO: 81096 - DNA, 362 bp, Glycine max
aaaaacttggcaatgagaggtgaaagaggaaagccttctggatgcatccttccgccaagttccacacccacatgtattactaggcataacaaccctcttcttcccaccgcccagttatccataaaggcaatccctaaatcaaccacaaagtctgtctaccgcacttccaatgacgaacaccacctttagcacataccaataacaacaaccaagaaatgaattttgctacgagaatgcctgttgaattcacgccaattccagtgtcctatgctgacattgctccatatctactcgataattcaatggtagccataacccttaccaatggtcatcaacctgcatttctccgagaatacgactcg

SEQ ID NO: 81097 - DNA, 424 bp, Glycine max
  unsure (1)..(424): unsure at all n locations
gctngatgtgagagagcatggaagagcatttcttctacntttagttgtttaccacagagtggtacctggagatatgtcgcggaggtcaagagaccttggggacgtcaggaggggtgctattgcccaaaactaaacttggctaatcccgacccaactcgggcataatcagtcagtgaggacctacgacgtacctaagcaggcgagctcctggctgtcaaccaataaaagaacaaagtccacgaatcaaggaagcttgtgtggcggctggccaactatgtatcttgggtggcatctggaaattaacctctggtaatcgattaccattcgtgggtaatcgattacaggggctaaaaatggagacaggatgttatatggcttctggtgatcgactaccaattgtgtgtaatcgattacacagggtgat

SEQ ID NO: 81098 - DNA, 397 bp, Glycine max
gagcgtcactaacgcacactcatggcttagcgcgagggaagactctggaaagaagatgaacctgtaccaaggtcccttaaccgcaccacttcatctcactaagcgcaccgcttcagtccatctgctaagcgagaaaagcacccgctaagccaaaattcactaatgtgcgctaagcggtccataattgcgctaagtgcatgagcacgaacaaggccacctatttaagcctaaaataaaattttagagggggagtttggactgggattcatagctttgcatgtctagagtttctagagagagaaaggtccaagttccaaagagttttgagagatttcgtgtgtcaagatctgcagagactagagcttgaagcaggagccagtttgagagcctaagatga

SEQ ID NO: 81099 - DNA, 305 bp, Glycine max
  unsure (1)..(305): unsure at all n locations
ttctcacgtttattggtgctaaacccaatattaagtcttcttcccttcatgtcttgtttatcacaactttagccgaatctcctatcttcatcatagttgaatctcctgtcttattctccaatgacacactttcatggcctgtatctctttttttcatatgttctagtgcttcagcttcagaatgcatagtgggtaactccactagcanttctgagtttaattcctggatttcacatatggctgtagaggaggttaggtctattgtgagaannatcacttagtgcagacctaatggtagtgtcatg

SEQ ID NO: 81100 - DNA, 395 bp, Glycine max
  unsure (1)..(395): unsure at all n locations
cttttacatgttctatcttcctgagtgacatttgtattggttgcatcttantccatatcatatcttttgtgcctcatgcctcatcataagtaagtgagaagaaaaatttcccagttagaaaagtttcttcagaagataaaactctatgttttaatcgattacaaccttatcgtaatcgattacacaagttgtcttaatcttgtagagttatgtctcgcatcggtttaatcgattacaaccttatcataatcaattacacaattgtttttgtgacaatgactgatttattcaggagcctctgctttaatcgattatcgtgtgatataatcgattaattctctttctataagtgtttcagaagtgaacaaaaatactttaatcaattacttttagta

SEQ ID NO: 81101 - DNA, 377 bp, Glycine max
cttctggttatgccatagaaaaatcttactctaaatccccatgcacgaatgcagttttaacatctaactgctccaagtgaagattctatgcagctacaatactcaaaataactctgatggtagttatctttacaactggagagaagatctctgtaatcaattccttgtttctgctgaaaccctttcaccacaagtctcgccttgcatcttcttctaccatcatattcttcctttagcctatagacctacttattttgtaagctttctttccttctagcaatttaatagaagaccacgtcttattcttttgaagggatgtcatctcatctttcatttctagcttccactcaatagagtcattcccctgcatagcctca

SEQ ID NO: 81102 - DNA, 300 bp, Glycine max
taatgtcaaataggtttaaatttatgaaaattgctttttattatggtttaaggttagttttgaggcttttatgctgaagtagagtacgattggataatgaattaagtttcaagtagagtacggtttctttgatgcaccttttgtattaacctttgctagagcaggacacatagaattttgatcaggatatgcaatttcccgaagtttacttttttagatatgcaatttcccgaagttcacatagaataaacttaccacaaacatcaagttcttcaaatcttttagatatgggtttcatct

SEQ ID NO: 81103 - DNA, 447 bp, Glycine max
  unsure (1)..(447): unsure at all n locations
actagaagtttaaacgtttatatcattctttagaanattgaatntaaattttaaagcctgtaattgattacaacttgtgtgtaattgattaccaacatgagaattcaaatttcaagtctgaagagtcacaactcttcagaaattaactgtgtaatcgattacaacagttatgtaatcgattaccaataaggaatnttcgaaaataactcccaagagtcacaactgttcaaattttttttgaatggtcatcaatggcctataaatcaattaccagacatgaaaattcaaatttcaagtctgaagagtcacaactctntagaaactaattgtgtaatcgattacaacaattatgtaatcgattaccagtaagggaatttcgaaaataactcccaagagtcacaactattcaagaagttttgaatggcatcaatggctataatagggact

SEQ ID NO: 81104 - DNA, 255 bp, Glycine max
gaagtttcattcgacgacgacaatgaagaaaaacaattccttgatgaatttgaatacgaaattgcctactattttgttacatttctaacagcgtttctattatgaatctacttcagccagaaacaatttgcatttctaactcaattaatttcaactggcaagaaatgaaggaacaaggtgtacaagaggacagattggtgcttttgaagggtgttagtggtgctttcaagcctggtgttctcacagctttgatgg

SEQ ID NO: 81105 - DNA, 445 bp, Glycine max
attcggtctgacgagggatcgagggtttttttttttatgctacaacatagaacacacgagcatgattgactagagaaatatatttctatgcatcagctcgtttgttagaaagacctaacatttctacctactgctgtcattttatttaccttgcattttatagtttttatcatacaagtttagtttaaattgtgttcgaaattatcacttatacatgttctctcaacaatgcttcgattttgaacttaattcaggctaacattagttccatctgttcgatactcagagtcatccgttttaatttttaaatacttgacaatccggcgcgttttccaataaaccctcattgaaattttcttgagacataaatgcacaaaaagtaactgcaatggggagcaagcaatgccaaaaaatcaaaatgatataccatagctaatatttgaac

SEQ ID NO: 81106 - DNA, 462 bp, Glycine max
gtgaatgatgtagttattattttctgcctagtgattcttctttttaccttcgggtacaacacaatgtgtgatgactaattgcctttatttttttcgtcactaacggaaatatgtttatggcttatggtgaatttatatgttcatttctccttttatattggaccccttgcattgtactatgaaactcttgtattgttaatgtgatctttatatgcgttacatgcaaaagtcgtattgaaaaataacatttacaatgacttgcaggtttaaaactgcaagactgcaacaatgctgacgtcgtaatactgatatatatagaaattaaaatcactacatatctctcaaattcatgcggattcaagtacattcgactttaatatatcatatcatacatatagccatccatttaatgaatatactgtcacagcttaccttcaatggtgaacctatatctctttaatg

SEQ ID NO: 81107 - DNA, 368 bp, Glycine max
taactaactaacactgatatatagagtgactacttggaaggaaggatgagtcttgattaagcccatcttatatacctaattaaactaattatacaaaacaaagcccaaactcccagcccaattattcaattgcaacggatctgacttccaagcttaatttgaccctcgaaatggcaaaataaacaaaagcttatttttgacaaaattgaagttattttttgtagctttccatggattactcacactatttggagatttgtagtgtcttctacgccctacacaaggcaaattggtcaagtaagcataaaatctgaaaattagctaaaattctcaattaagctcaatcatttgccaaagaccataactga

SEQ ID NO: 81108 - DNA, 425 bp, Glycine max
tatgttaatgggtcttaagaggaaagctcactaacacactcttatatttacttattaaacatgctgatgaaaacatatttttctcaattaaaataaatcccttttattttcctacaacaataacccaaactaatatttatttatttatttatttatctgcaatatataatatattgtgagaaaattacattagcactccctcaaatattgacttattacacagacaccccattcataaaattgcatttcttttgcacccccttcgtgtctttgttaacttatgctacttaaaagtgaaaggtcaaaattaaccttttcacttaaccagcactcaacacacactttgtttattgtttatgaaatttgaaaacaacacatgtgctctactaagtgttgatagccaggaggagcatgttgctcatgtt

SEQ ID NO: 81109 - DNA, 328 bp, Glycine max
  unsure (1)..(328): unsure at all n locations
ctggaacacaagnntaaatacactaaatntagtcaaagnagaacgaggaagatcaaatattaatgtcacaaaaagaaaggattgatatgtaccaccaatttcaatgcccttatgaacaaaaggaacagaaccacgcacaatgatgatattttttgtagttactattttttctaaagagccaactttcaccttttgaggaccctgcacagttgcacaaaaatatagaatatttattttcatttgatatgcacttataacaattgaataatcttgttgcaactcctctcctcatgcctattaatacaaaatatgtagacacctagttttg

SEQ ID NO: 81110 - DNA, 460 bp, Glycine max
cgcttgtgggcttatgtaccatacgtcgccgaaatgttctattcatacttaaatcatggccccccctcatgctcaaatcgtcgtaaccctcaactaccacccacgaactcagacacaatgcttataggggtagttcatgaatattgtgtgactcccacgacaaaagacgtgcatatatagaccgagaggggagaccccaggggcattttcctgatcctagtgagaggcgcataaacaccttagagtaccactgacttactcattggaatcccttttgtaggtaccttctcccatctcaacaccagagatcagaaattccattgaaaagaagaggatgagacagctcaacaagaagatatataatatcatttttctctacaaaatatataattacacttcttttacctaattacctacacttatttcttttatcaaattgtattgagatatccatgatttc

SEQ ID NO: 81111 - DNA, 263 bp, Glycine max
  unsure (1)..(263): unsure at all n locations
ttgctacctgtnttgcagtcccttcttctgcagagaatgggatgttcaaagtcttaacatagtgttattgcaagcataatgatgccagctttttttgcctttcttgatgaaaatattgacttanaaaattatcctgctttatgtggaagagactgatgctgctattcttgccctaatagaaaactactgccgagaagcangggtcaggaatcttcataagcacatagaanaaaattaccgaaaggtctgttaatttgtttttt

SEQ ID NO: 81112 - DNA, 465 bp, Glycine max
cactcagctactgtagttgcaatggatgcatagagtgcttgtctttatttctaagcgaaattgaagaatgcggggatgtttaatggatctagctcttcaaaacgacacataaaaccttcatcatcacctgttatgtcttgtgtggatgcatgtctgacaaggacttggttccataagtctctccacctagtagatatgaggctggtttctagtgctgattcatttggcagaaaagaaactatgcagcttataacttcatctggcaaattgctaaacagatcctccattggagagtctctaattaatgtatctatagtggatgagaatggatcttgaaagagaagggtatgtggtcttatatataactataacatctgaagactctgaattgatgtggctatcacagctatgaaataatgggatatttgtttcttaaccttcatcagaggaaagaagtagactctt

SEQ ID NO: 81113 - DNA, 216 bp, Glycine max
  unsure (1)..(216): unsure at all n locations
gaatgtatgatttgagtgggatgcagtcttgttcttcatcccactaataatctcaagtagcagaacacgaaagcaccgtgtacctctgttttgcctgagacaattgttagtcgatgaatacgactagcttttgtgtataacacctgtngtaactgaatcaaacttccccaatttatggttggtttgtagtattataaatactttctgttaagtata

SEQ ID NO: 81114 - DNA, 419 bp, Glycine max
  unsure (1)..(419): unsure at all n locations
actatagctgcactaaatttttgctgtggtaatcacttgcttatgcaatgcagtagaagggggtaaagacaatatattactacaattatatgaaattgagtaggtaatactaagaatagaatattagtagcatgaccgaaaataaaatagccgctgtgtcaaataacataacaattgtctcaaatacagggaaaaaaatactccaacgccatcattagccgttttgacttattgttgtctttaaaaaaaatgttgcccatttctttcgaattgtggtgatgatgccgatgtccaacggtgtgtcattagcaaaccactgcaagtattcataattgtaagttagtactgcaaatataaaaattcagntccaattgtactgaagtttatgcataccatggaccaatcactctttatgtcgc

SEQ ID NO: 81115 - DNA, 415 bp, Glycine max
  unsure (1)..(415): unsure at all n locations
gcatgcctactccctatataaaacaccacatgaagagatctggtctttcangtgaacaccctgacgcgggtcttgaaggcctaccaaaggaatacaagccagtgatcaaaagtagggcgaactactttcgattggagagtaaaggcactgctgctcgaacatgaggcacgcattaaaaagtttcagaagcgcttagctgattcaccttcgattattgttgctcaaggttacacttcatctataaattcttacaattcatcctcgaataatttcaatccacaaaatcaatccaattattctggaaatcatggtggcttcaatcgtggcgatggctacagttatggaggcgatgattctgatagcggcggtggctacagttgtggaggtaatgactntgatcgtggtggaggtcatc

SEQ ID NO: 81116 - DNA, 309 bp, Glycine max
acttggattaaattcttcacgtgaaaattacgaacgacaaacatggtgagtttgctactacaaatgatcttgagtcacgaaaaagaaagataactcttgaatttttttcaatataatgctaatatacattattttgttaatagatgagtgggatagttttgtgagtgagagtaagatatatattgtgtgtattgatgatctaaacaacttttcagtgcaagaaacaatttagttaaaaacaatgtacccgtgtaccatgtgaggtctttcttttccataagaagatggcttcattttctttatctatct

SEQ ID NO: 81117 - DNA, 375 bp, Glycine max
tgcagcacttatcccggacccttaagaagcttgaaactaatctatgtattcctgggcgaagattctgtctttatgctgagggagccccatggaagcttcttatgaaggacttgaccactctagctcagacttggagggttgttttctactccaacctcgcccttacctctcacaccttcgatcttaatatggacaacgtgaggttggtttacgagctcatgatgaagatggacatggacgtatgctcgatcgtttctggacagatctctcagatggcctagtccaactcctctaggcttggctttcttgcactgatcagagcatcgtgcatagccagaggagttgtctctgactcactcaccttcgagtccctca

SEQ ID NO: 81118 - DNA, 431 bp, Glycine max
  unsure (1)..(431): unsure at all n locations
caccgcggctgcagcttattcagacaagaaattaagatattcagatggatgancattacagtctctagagtcttaggaagggtatattaaataggaagggaattcctaattgaaataaccaaagggttggcccagaaatttaaggtaaaaagtctttttcaagaaatttactctctggtaatcgattaccagaggatgtaatcgattatcagtggccaaaaatgatttacaacagctattaaaatttgaattcaaaatttgcactgtgtaatcgattacacatatatggttctcgattaccagcagttattgaactttttaattcaaattttaaaggttgtaatggattacacacatactgtaatcgattaccagaggagattttcagaaaatattctcagcagtcacatcttttcatttggttcttgaat

SEQ ID NO: 81119 - DNA, 442 bp, Glycine max
  unsure (1)..(442): unsure at all n locations
gtatgttgtatgactcttnccaattactttatcctggtcgagggcccattggtttgctagccatgctttacaatatgtgaaggtgtattcgaacctcctgtttacgaatgcgatgaatgtatgaatcggttagtactcattntcttcaaccattgcaaggatattttgcctacaaggtgtgaatccatcttattgcgagcatgcgaaatggttggcatgacgcatgtgtgaggcccttctatcattataatttcgcaaacttttagattttttcttttggacgctctaagtttccactggcacccttcagctgggtaacataagacccatgtttccttcacacacctcttggctatgaacgttacatggctcttaatgtgccatattnntaccgcgtgtttatgtcctccaattgacagaatccctgaccaacatacaactc

SEQ ID NO: 81120 - DNA, 283 bp, Glycine max
cacaaatggtttttacatggccatcaaaggtctatttatatgtgacttggaacaccaatttgtttaaaagttttctgaacaaaaaagtcatatcctctcaaaaagcaaaatcaatttatcctcttaagaattccttggccgatacacttgcaattcaataaggaattaattgagtgctcaattgtacaatctatcgctttcaagagagatttcttcttctcttctttctatttctcaaaagggattaaaagaccgagggtctcttggtgtaaagaaatatgaa

SEQ ID NO: 81121 - DNA, 366 bp, Glycine max
ctcacgtagccaatctctttttcgtcattctccattgaagctccacacaaagctgcaacctttggtgctcatttctgcccctaatcgtgaaaagagagcatttttggggtcgtgaagtgcgttgctaccaaagggacttaaaaaattcaggtttgggaggacttctttctctcttaaatctcgtgggtatggggttttgggagatatgatgggtgggtttgttaaatttctgctgagtaatgattatctgtgaatgaacatcgtgaaagctagatgagatggccatgatcggatgaaacacacatacccattctgttttaggcgtttgagatgatgtttatatgctgaaattgcctatggaaactg

SEQ ID NO: 81122 - DNA, 305 bp, Glycine max
  unsure (1)..(305): unsure at all n locations
ggagacttccctgcgaagctgagaaanggtcctgtacgatgccgcgctcagagtcggtggatgaatcgataacttccagactctgcggtaaaccttgatcacatacctctagaatgtgacaacacaggtgcgatcaatataactaaaaatcattgcatgcattctatgactaaacacatataaataagacatcattatcttagagaacatattttaaaaggtgataggcgcattgagttattaaacagagagcatcgactagcagaaaaattcattaaaccacttgttaaaaaaggttcttcatt

SEQ ID NO: 81123 - DNA, 237 bp, Glycine max
  unsure (1)..(237): unsure at all n locations
gagacatgttaaataaatctcgtgattcaagaatggcttgtaccttagggtgcattctctgcttaaacatatcaatactttatttatgagatcttcattttgaaaaattttccctaaagatgcaagatgatttactatgtgtgtgaacctcttttacatgtcttgtatactttcattngcattcatcctaaatagttcatattcatgagttaatgtgtttatcctagatcttttaac

SEQ ID NO: 81124 - DNA, 435 bp, Glycine max
  unsure (1)..(435): unsure at all n locations
ccgctgcaaatgtacaatctcaattggtatattcctgctttatgttctaattaaattttttttaatgtgctaaccaaagtttatcttacatggcaccatttggatttgtccaggagaangtggtggctggcatttatcatttgaatgttatggctaaagatgcatataggtcatatatattagcatataattcacactccatgaaagatatattcaatgttcaccgccttgatttacaggtagagccttctcattacattattgttattttcatgatttgctgaactgtttgaatattcatgcccatcaaatagaacatacactatgtgaactgccccttgagggtgtgcacgcatagacaccgacataccttccctgacatagtaaataagctgcctctagaagttctactagtttatgntcattctaatctca

SEQ ID NO: 81125 - DNA, 156 bp, Glycine max
  unsure (1)..(156): unsure at all n locations
cttcaccaaggaccttgacttgggtctctttgacccttttaaggacgcgaagaatggtgttttgcttgacaaagacgatattgctgctaaagaggagtaaggcgatgatgccattggttagggtgccncttcgttattttcttcttttctccattg

SEQ ID NO: 81126 - DNA, 460 bp, Glycine max
  unsure (1)..(460): unsure at all n locations
ctgtttggagcttcaatggagaatgagggagaaagaagtgtttcgtgggaagagagagagctgtctgaaaaaagtgtgggggctgagtgaagagagagaaaagctttttgtgtttaaaataaaaggggtttctctttttctattattatattcaaactctgccacgtgtccctatttgagtggagcaaaagggcccactgtccctttttactgtgacccacactcagccacaaaagtgagaaaaatctgacctttgaaacgctaaaatcctgcctcgatttgcatgccgtntctctggttccagtttctcgcgtttctctgcgtccgtcggggccagtttttgaaagtaatcaatatatatatcaaaacgctcagaataaaaccccgagcgtggttcagaggttggtttcgtttaattttaagttgcacgccaaacgatgattttaaactatattattaa

SEQ ID NO: 81127 - DNA, 381 bp, Glycine max
  unsure (1)..(381): unsure at all n locations
tactcagcttgctatgaatcaaaaatcggcatctgcacctgttgcaagagtctatggtctttgttcttctgcagatcagcatacagatcttttgccttctttgtagcaatctggagtcaatgagcaacctaaagcttatgctgcaaacatttataatagacctcctcagcagcaaaaccaacaatagctgaataattatgacctttcaagcaacagatataatccagggtggaggaatcatccaaatctgagatggacaagacctctacaacaacaacagcctgtccctcctttctagaatgttgctggtccaagcaagccatatgttcctccctccatgcagncatagcagcaacagtcacgacaaagacaacaagcagc

SEQ ID NO: 81128 - DNA, 447 bp, Glycine max
  unsure (1)..(447): unsure at all n locations
tccttcanatgaatcaatgactgctgatgttactcttctttgtatgaacccattaacaagcatagcttttggcatacttgggttataatagaaatgtgcatgaatatgttatatcccactcagtacacataagcaaataaaaataatctcaaacaaacctctgttagtctttaatttctagttataggaaagaagagtttttaaagaatggaggaaaatttgtagtagcttcgaacaactcattcatattctcaagcaatcatgtagttcgataaattcaaacagatttgtttctctatttctctttgatgcatattcacaaacatatggtgctcacaacctatctcaactccaaacccatccaattccacacccaccaacatatcataatcattgaaacaaaatatatganatagaaaacgaaacatatatcaataaaatcaagcg

SEQ ID NO: 81129 - DNA, 340 bp, Glycine max
  unsure (1)..(340): unsure at all n locations
agcttatattccacagngntttactctttttttttctnctctatcaaaacatncctatgtctttcgctaccttcaccatagctgatttgcagtttggatgatgttgatttggacacttaagattgagagactaagattggtcaaacttttgtttagagattaaaaaaaaattcagttacaaaatatataattaactctttaaatgaacatcaattccttcctttccacatgcatgcatcattaatgctacaaaatagcaaaaccaccatattataataataataataataataataataataattagtatataagacttgaaaatcaacatgtcccactc

SEQ ID NO: 81130 - DNA, 430 bp, Glycine max
cttgccaacccatggaagctcctaatatctctattatttgttgttggggctattcctggatggccttgatttattcaaggtccacttggaccccatttctaccaactacaaaccctaagaagactatattatctacacaaagaggacacttatatatatttgcatagagggtgtttttcctatggactgacaaaacttgcctgagatgtcctaagtgatcatctaagctcctactgtacactataatatcatcaaaataaacaactacaaatctacctatgaaatcccttaagacatgatgcataagcctcatataggtgcttggtgcattactgagcccaaaaggcatcactaactattcatacacaccacacttgttcttaaaagcggtttcacttatcacccttttcattctgattggtgaacccac

SEQ ID NO: 81131 - DNA, 338 bp, Glycine max
  unsure (1)..(338): unsure at all n locations
tcatggntaaacttatgacgcaagttctcatattatatgagcttattggataatcgcttactttagctgtttacccaagtgcatcttgagtttattagaaatataaaagcattcatatgccttcacttgatggtttaagcttttgggtttattttgtcagtggcatggacacatggtactagaggctttatgacctagtggtcctgtataaagtacttaatctatatgctactcttatgcagatctcttggcagaccacgaagattttctgagcaatttttgatagaagaacaacataaacttaatcaataccgggaatctggtagatcacattatgc

SEQ ID NO: 81132 - DNA, 449 bp, Glycine max
  unsure (1)..(449): unsure at all n locations
tggtcttatccttattatggaatattcagcacctatatattgttgagatacaagcgtgtaacggaatgcaaagatctaacaaactcctaacagctntatcagcacgtgctttaatgggtaagaagcatgcatgcatgcatgtgtaactcgtgaatgtgtgagttgactcgggagtgtatgtgtgagataactcgtgaatgcatgagtagctaactaacataatcctgtaagtatctaggcttagttatagcacgtgcgggtctcgtgggcacaacagaagcatcttcatgagtgttatcttcttcttcgtgaacctggttgctaacagattcttttgtagactgtatttaattatgaccttaaggtcactattgaaagattcatgtcgataaagcgtatctttaattattgtctcttaagatactgctgatagatgatctcgaataata

SEQ ID NO: 81133 - DNA, 321 bp, Glycine max
caccattccagcgctggggaaacactggctaatatggcccggccacaccctatccgcctgaaatcttgacggcacgttcctccttcccggcattccgggttcataccctaatccatacttgtatggatttcccttgatatcgaccacgttggcattcccgaggcagtcccttgccaaacccattccgggctcaaatccattcccgagcataacgtgcgccaccattatggccgctttggagagagagggtagcgacaaacttggttccacagaggcgcagctcagcacttcaaaggaatggaaagctgtttccaatgattc

SEQ ID NO: 81134 - DNA, 323 bp, Glycine max
aacacaaccatggagtgaaatatgcatttgtgatcagtgtcaaaataaaatgcaaccatctacaataccaatcaagagaataagaatagattattacagctaaccaatcaacaagcctgtcagggtagccatgcttgagattgcttgtccacataaaatatttcaattaactcccacgcagctttcaaagatgtaggctcttcacctctctatattatgtgtaatgtgttaaaaagcaagtgagtaacttcttcgtatcataattcccacaaagcagatctcagctcagctaaacacggttaaacatgttagaaccgtaaaca

SEQ ID NO: 81135 - DNA, 415 bp, Glycine max
  unsure (1)..(415): unsure at all n locations
gcaagcttaatcactggtcatacatgtgaactatgacggcaactccgtatctttgtccccagactgacccangtctcgaatagcccccagatgcaccacatgaacataggttgaactcttactagcaaaaagagtacaacccactaggtggagaaggtcagcacgtgccgttacaatccaacgtcaggcctggcatctactctcatacatgtcacggagccatgatagtcgcacataagcccccatgagcacatacggtctcagctcgagcctcctggctagatacctctaaaagctcggtcatcagcaacactacctcgtgcacgacctgaggctcagacctgtgtaatgcccctgtgatatgaagatggaggagacacgccacatcgcccagtgtgatagtcaactctcccac

SEQ ID NO: 81136 - DNA, 372 bp, Glycine max
  unsure (1)..(372): unsure at all n locations
ttgctggctgatttatgcgaggaaagatcatttaatatgttttatgaaaaattatctcccatatcttctattatattttcttgggcacaacccaaggacattnctaaagtatctatacatagtgaacctngtgccctgcattnttaattcattcaactttgtcttttatttctttttgtgtttgtgggatttaaggaagagagaaattggaaaatcgatttttatggcctcaggaattatacatggagttacatgctttggatagatttgcacaagattatcagcataagcgtgaagaggatgataattcaggtgcagctcanagtggtaatngaagagtactacctatgacataatctgcaaattttgttt

SEQ ID NO: 81137 - DNA, 248 bp, Glycine max
ctaaacatcactcagaaacatgaagaaagatattctcactctcatattgtggcacaaagggagtgcatgaatatcacctggttccattttaagaattccaaaatttcacaatatttacttttacaataaatggtgatgctaatgaaaaacaccagttaattaagtcaatactgtgccctatcttgactttcctaaaaactatttatgcccactattatcatttcacatctggtctaagggatttcact

SEQ ID NO: 81138 - DNA, 429 bp, Glycine max
  unsure (1)..(429): unsure at all n locations
ctaagctgaaccaattggtgagagtggaccttaactgtgagtgattactactgtgagaaataatcttgcataaatctttgaatttaaaatgaaaggttaaccagacatgtgaagcctgatgtcataccagcctttgacaaaagctacctggatgaaatatatcttgacccttttagctgatgatattgcaaaatttgaaccctgaacttaaataaatatctcctgataccttgcttaaattctaagagagcatatggttcaaggaaaatttaccccaaattngggggagtggaactaattgggatgcaaagaaagagagaaagcatgagcacacacaacatataagttgtatgttaaaanaaaaagaataaagtgtgttgatgtaacaaggtcaaaagctaatgaaagtaaaaagctagtgagcaagct

SEQ ID NO: 81139 - DNA, 237 bp, Glycine max
gccaaaaagaatgaaaggtattcttatccagcccacaagaaaaggaaggaagtggtacttgaacctggtgatgatcctggacatttgagggcaaatggtttccaagaaggagggaatgatgatcttgaaattggccaaatacaagctaaaagcctaaatggagaagggcgaaccccccaatggagaatgatgaagccccccaatggagaaggatgaaggcccacagacagagacact

SEQ ID NO: 81140 - DNA, 296 bp, Glycine max
caccacgaataccttaagcctataatttttgcaagaaagaaaaaccctaatcacccatttacaaactcctccaccagcaaaacgattccacattttccatttccccctctttatcacgacatcaaaaaaaatctaagcgaagaagagaaacaagaaaggccacaaaacaaacttataagttaaagcaagaccttaatataacaatgctattcatcatatcataatcatcataataacaaaacacaagttgtgcgatagttatccatagcgagccaataaaggcacgggagtctaaa

SEQ ID NO: 81141 - DNA, 209 bp, Glycine max
  unsure (1)..(209): unsure at all n locations
tgatagtcaccgctttacgagcacggatcaccagcatcgcttcgaaaccatcaaggggtggtcgcttctcctggagcgactcgtccagctcatggacgacgagtatactgattttcaagaggaaatatggcgccttctgtgggcaccactggttacttccatggcccagattgatccataaatacttctcgagttntatgccaattctt

SEQ ID NO: 81142 - DNA, 244 bp, Glycine max
cccctaggcggctgaacaagcagcgtcttttcagaataacggacgagatttgtcacagctctcgatacactgaaaagccatggagaaccctgcttaccaacagctatgtaccttccgttaaaagcttatgcggccaagcttaaatttctttattaagcttggtctggtttgaatataacaagaaatctctctgtctgtcatccactgtatcttgctggtacttttctaacgcgatcagacaggc

SEQ ID NO: 81143 - DNA, 319 bp, Glycine max
gagcggctcgatatattatgcgccttaatcggacctccgagtgaaaagttatgaccatttgaataactcaagagcttccattgttcaatttcgagcgtgtcgatatcttatgtgcctgaatctgacctccgcgtgaaaagttatgaccatttgaatttctcgagagcttccgttgttcaatttcgagcgtctcgatatcttatgcgcctgaatcggacctccgagtgaaaagttatgaccatttgaataactcaagagcttccattgttcaattacgagcgtctcgatatattatgcgcctgaatcggacctccgagtg

SEQ ID NO: 81144 - DNA, 415 bp, Glycine max
  unsure (1)..(415): unsure at all n locations
agcttgaagctgatgtatcctaaagctttttatatgtcaaatgctaaaatctatcccccatggttcttttttatctctgttaaaagtgtcatccgtcttttaaaaattattgaatcataaatttttttctaactttacccttaattaatatttatgagtgagagaagattgataaaatcataataatatttttaatattttaaggaagggtaattcagtcaaaggaacttgttttgcttataatcgaggctatctaatgacattcttatttcttgtgcaataaccttaaaatctagataatgaacggaaatcaaatccttgatgattgaagaaatattgttatatttgtataattcattnttggtgatgtgcttttgttccattgtaccatcaaatgtgaatcacataaactttt

SEQ ID NO: 81145 - DNA, 440 bp, Glycine max
  unsure (1)..(440): unsure at all n locations
cacatgaaactcaagctgacatnccttnttctttaattaaaccctactttattgttataaatattgatatttatatgacatatatgttncaaacaatccaaaccttcactatgcatcaagcacacaaaagtacgaaaatagccactgaccctttcgcagccaagtcaacaatgtagcaccggttggtcacaacgaacttgttcataaccagcgtcttccttgcaacgaccattaccatacatcagcactaaaccaagcttaaatggtacccgcgacatgtcttcaacactacaccaagcttaacctaagttagtaatgtagtgaccaacgtaccgtggacaaagccctgatcttcacgaagtgccactccttgattcaaataactgcgacccgggaagagtcttcttagttgtctggtttaatggaagaacaaatgacta

SEQ ID NO: 81146 - DNA, 338 bp, Glycine max
  unsure (1)..(338): unsure at all n locations
tatagaggatctacccacttgaaagtgtcaacaacagactcagtacaatgcattaaattagtacgacataaatttgatcaacaatgaattagtatatatagctacaccttattcaatccaagaatggaaaaagggaatcagtggttaagaatgaacatgggtcaagcttgagtcaggttttttgaagccaaaccgaatgaaaatggttaggttgagtgtgttaaatgtgactgtctcaacccaacctaatcacaatngggttgtgccaaagtcaggtcattagattagatattcggggaaaaatggaagaaaaaaaaacacaaaaataggggtagagt

SEQ ID NO: 81147 - DNA, 451 bp, Glycine max
  unsure (1)..(451): unsure at all n locations
gagtgaaacaatgtgactctctacatttaaatttgttanttaacgtcaaggacactgttgaggtgattaccaaaacattgtaatcgattatagccttttgaaaatatttggaacgtcgaaattcagttgaaaactcgttcaaactctgttcagcttactggtgatacgagttacgagcacatattggtgtatctgatttctcagagaagtaaaaagctctcttgtaaagatattgtcaaaaactcgtgtgctatataacgtttgaaaaaacctgtttgatacttatattgattgagtcttttcttcattctcgaatcttgattcttgaatcttgatctagattcttgagagcttggncttgattttgattctaatcttgatcttagattttagatctcgatctgtatctgatcttgttgagagctttttatagcttgatattgatttgaac

SEQ ID NO: 81148 - DNA, 403 bp, Glycine max
agcttgactctgaaataagccaagcgcgtatttttgctctcgtacaaaaccacaaccctatgcccgaatggcatcgacagaccacccgagcgcgaaagctgttaaaaaaaacgtacatacactagcaaccactcccaagacattgattaaaaagtatcaaccagtcacggagcatgacacacgaatagatcatacatattaaaaaccctctaggcatataacataatacagaatatgtcaatcataccatgcaaataacagagatactacagtgatcaaatggcatgatcatatacaccaatactcggcttacgaaccaaatatgaatataatggaaagctactatcagagactcataacttaactctacgaacaaagactagtttgaacactacatgggaac

SEQ ID NO: 81149 - DNA, 343 bp, Glycine max
tttgttagtattgtcatcttgcattttaataggttatacgggtagaatgatatatggtttttgcattctactaatgatgagttattgtgactgatagtaaaagattacgtgtattatatgtatagtgcaattactaatcatgagttattatgtagagctctgtattatatgtatagtgcacgtaggtgttgtatgtcagtgttgaaatttatgatatattcgtcagatggacgaagatcaatggatgtatgacactataatgtctgaagaagttgatgtgaatgatcaaaatgaaccagaatgtgatgtgaatttgattgttccgatgcggtcaatacttctc

SEQ ID NO: 81150 - DNA, 335 bp, Glycine max
acaaatctatggtgcctctccactgttgatgatcatggaaggctaaacactacacttatccaaggatccactccaatacaggctgattttcgaggtcaggttcaacattgcacattcctgttaatgctcatctatgtatccaatcatatattctatctacatgattattaatctgctacagattgacaacaaaattcggttatggaatcatgtgggccatgtgaagattaatcacagcatagtaggatgagattcacacctacattgcgatctcagtgaatttaaggattaattcaattgaactatctgtcattacatcagattgtactttcaca

SEQ ID NO: 81151 - DNA, 347 bp, Glycine max
  unsure (1)..(347): unsure at all n locations
ggacataatctgcctacctaagagtaaaggtgggttaaggatcaaaaatttgattaaattcaacgaagctttgcttgctaaatgggggtgggagttggcaaataatcaaaatcagttgtgggccacaattctattgtgtagatatggtggttggagggatttgatttctcataagaactgcagtttagactctccttggtggaaagacctcaaggttatcttcaagcagcagcaaagcaacacaatttgtaaaaatagctttattttgcccatangtaaggacggtccatggaatacaaaccaagtacttattggctttgacacaaaaaaacactcatttgaaatat

SEQ ID NO: 81152 - DNA, 332 bp, Glycine max
tttaatgtctctagaggttacttcctcgttgacatcttttgtcttgaatggaattgccatgacaaggtttgtgttactgtctttgatatttggtagttgatattgtgttgtgggaggtaattccgactggattaactcaccatccttcacttgccaatttgttatgacatttgttgttggattacctatgatgtcttgtttccaagggtagtctatatcctttctgatggcataagcatgaaaccaatcaaagaaaaggacattaattttgactctttcgacaaattcgtagaacttgtctttggattgtttctgtttgacccctgtaatgt

SEQ ID NO: 81153 - DNA, 385 bp, Glycine max
  unsure (1)..(385): unsure at all n locations
tccttaccctcggaagcaaaaaagaacgaaggaaaatttccaatcaaagaaaaaaaagaaggaaaatttccaatcaaagagaaagcaaaaaaaagagagaaggaaaatttccaatcaaaggaaaaaagagaggaaaggaaattcccaatcaaagagtgggagaaagcaaaaagaaaagaaagaaaattcccaatcaaagaatgggagaaagttnaaaaaaaaaaagaagacgaagaagaagaaggaaagaaagctcctgatcaaggatcgaaagaaaaaaagaagaaatgtgcagaaaggtctttggaccggacaatatctgtacaatacagaattgtcaccaaatgaacaaaaaaaggggaaggaaaccacgacctgaaagtgg

SEQ ID NO: 81154 - DNA, 399 bp, Glycine max
catgaaataaggggttcaacgagtgaggcctttcagtttcaaacgatgacgaggaccaccataacgcaagtagcttaacagtccagcacgatagcgatgacgacgatcactacgacgcgagtagcttcagaagagtcattttcgggggtgaatagcttgaacaaggtagagtgagtcacaagaatcattttcgggggttgttgtacgatgccttttcgagtttttgtaaacccgtggactcggagcagactcgcgagtttaccaaacctcgtccgagtctacgcaaaatcggacgagtttactccggtttcgattctgctttcgatttaactcgccaacccttagtagaatcgtaatattgtacgattttacgatttaaatcgcgagataacaaccatg

SEQ ID NO: 81155 - DNA, 470 bp, Glycine max
actaagcttccagcggttctaatatattggggccatagatctatcttattctaacaatagccgagaagtttgtggatcatcatatgctaacaatagccgagaaatctatggatctcctcaggggcagagtaggtgtccgccatcgccttggccttggctagcaatcaaagaagttcttgactctcgttcaaggtaagagcaaatcggtccatccacattgttgcttcttgatgtaacgagtcgatcacccttcctctagcctccttttccgcgtacacttgggcatactcgtccgccactctatgctcgtgggccatggctagatttagttcttcttggtacctgctgatgatggctaacatgttggtctctgtctcgcataaccactgagacaggtttcttttggaccttgagcaaaccttcaactcatctttcaagatcaaactgtctactcgtgattgatccctttc

SEQ ID NO: 81156 - DNA, 352 bp, Glycine max
  unsure (1)..(352): unsure at all n locations
tcccggaatatatcgagacgctcgaaatttaaaaccggagcccggagcaaattcgaacgacaataaccattcactcggaagtcccgatgaggtccggaatatatcgagacgcctcgaatttaaaaccgaagctcgtagcaaattcgaacgacaataacaattcactcggaagtccgattgagtcccgtaatatattgagacgctcgaaattttaaagcgaagctcgtagcaaattcgaacgacaataacatttcactcggaagtgcgattgagtcccgtaatatatcgagacgctcgaaatttaaaacccgagctactagcanattcgaacgacaataacatttcactcgga

SEQ ID NO: 81157 - DNA, 412 bp, Glycine max
  unsure (1)..(412): unsure at all n locations
cgagcgtctcgattatacggactcttcttacttccgagtgaaatggtattgtcggtagaattagctaccaacctctgttttaaatttccagcgtctcgatatatttcgggacctcatccgacctccgagagaaaagttattgtcgctagaatagctgcgagcttggngtttaaaatttgagtgtctcgatatattacgggactcaatcagacttcctagtgaaaagttatggttgatcgaatttgctacgagcttcgatttggaatttcgagcgtctcgatatattacgggactcaataggacttccgagtgaaatgttattgtcgttcgaatttgctacgagcttcnngtttaaaatttgagcgtcaccatatattacgggactcaatcngacttccgagtgaaatgtatt

SEQ ID NO: 81158 - DNA, 238 bp, Glycine max
ttaaaaaaatggttttaattcttctggaaaggccccaaaaaaaaatatatatcaaaagggccttcctgggcctactcctttgcctcaatggtcaacaatcatacttttgtggaagaatacacctattttttttttaattggcaggatgaattcatgggggttgaatcccaaaaagcttcctttggcttgaatgatagcttttaagttggaaaaaccgatcgttcatattaaccaaaaa

SEQ ID NO: 81159 - DNA, 457 bp, Glycine max
  unsure (1)..(457): unsure at all n locations
aatctaattcacgttatgataatcttcattgctttattcatgtctcacaagcatcacatccccaagagtcataagggtaactactctgattcttgtggaggaaatatcttggtcatacgcataacagaaatagaccttggtccgatgatttatacataaaggacatgaaaaatagacaataccatctttaacttatatattttgatcgattaatatcttacatagggaatagaaagaaaaaatagacgactttttcctggaaatccgcataggaaaaatacacacttccctttttntctatcaaaacaatcacaatcccttcccttcccacatttcaccacattgaacatggatcccaattcattgcattcacacagatatgaatcattaccattggatgagaatcggacaggcaaatattaaatgagatttatatctatatatgagccactgatct

SEQ ID NO: 81160 - DNA, 241 bp, Glycine max
  unsure (1)..(241): unsure at all n locations
ctacgatcttcgaatgtaaatatcgagcgtctcgatatattacgggactcaatccgacttccgagtgaaatgtgattgacgttcaaatttgctacgagcttcggttgtaaatttctagcgtctggatatattacgggactcaatcggacttccgagagaaatgctattgtcgatcaaattggctatgagcttcaattntagatttctagcgtctagatatattacgggactccatcggact

SEQ ID NO: 81161 - DNA, 352 bp, Glycine max
ttgagacccgcgatatatggccgctcgaatataccgagctcatacaattcgacgacataactttcttcggagttgatgagcccaaacatatcgagatgctcaaaagataaaacagaagctcgttgttaagtcgaacgacaatatcgtatgactcggatgtccgattgagccccgtattatatagagacgctcgagatttaaaaccgatgctcgcagcctattctaacgacaataactcttcactcgaaagtccgattgagtcctgttaactatcgagaggctccaaatttagaacctgagctcgtacaatatctaactacaataacctttaattcggaagtgctattgagtc

SEQ ID NO: 81162 - DNA, 421 bp, Glycine max
  unsure (1)..(421): unsure at all n locations
agcttgctagttattctntctcttcaagcccttattgtctgtgaacatcatataaccccacaaaaatgtacattaagataatcacgagctgctattttcagactattatattcagaagaaataagccagatcttaccattctctcctggtttgagacgaccacctgtgagtttgcagaatgtgtttccaatttgcagaagaagtatatgaggatgattgtgctcttgtacctgctaatttaaaatcataaagatgagataggaaaatgagcacaatcttgaagggaattagatagtctttctctatgaaagtagtgccatagatgagaattaacaagaacacagtgagaaaccaatatatgtataagttattgaaaaagtaaaaatggtagtgacctaaatgagtttagagcagaattgat

SEQ ID NO: 81163 - DNA, 353 bp, Glycine max
tcacagtcttctcagtgacaacagaataccaggcaacaaaccacactgaaattacatatgctggaatatgaatagcacgatgtagagaaaagccttatctgaagcaatgagcctgtatcaaagtgacgaagaatacaccaatgtttgaggatcctcgatccttacctcgttagcagcttataaagggtgagtgagaaaatagtaaaaaaacttattgtcatattatacagagatgaaagaatgagactttaattccatccaaactgttgtgcggtgcgagaaatgccatagacctaaccaaggcaaatgataggcaatcacaatagatgcacccaactttctcagttcactta

SEQ ID NO: 81164 - DNA, 359 bp, Glycine max
ctggactaagtctctgctagctcttctgacgctggtttctatagcaattaaaagcctatttgatccaaggccaactacacaaaggcaggattacttattaaagatgatagtatgatgcactaccagattgccattaatcatcctacagacttttcacatgagattgagctttaagcaaaagattaagcttacaggttggatggtctaccatgaaaggttctcaaactcaagctattgttctagtttgaaataatgagaaccctctacatatacaattatcctgaatcgggtgttgtataaaccttgagtatgatgcttacttaaaaactctttcacatggttaacctaacacaagtttt

SEQ ID NO: 81165 - DNA, 305 bp, Glycine max
gagcattttgttttcagaccgacaatccgattagccagggattctaactggttgacgtaagttgtcacagatcctttgtgtgtgagtttgaagaggatcccgatggtgtcctcgtaaggtgaaggtgagaatcgtgcctcgagtgcttctaaaaaaccagcccaagtggtcagctagtggtttcgggtcatacactataaccacgctaacgctgggccctccatgtaaaggaggcaatcgtgaggcgctcgcatttcggtggtgagtgggtggcaaaaaaattatgtatttttaaaaaccccccc

SEQ ID NO: 81166 - DNA, 345 bp, Glycine max
  unsure (1)..(345): unsure at all n locations
cgaagctcacggaaaagttggaagaagtactcacttattatatctnttcatgcccaactcccttgagaggcatttgtattgattgcatcttgatcgacgcatcttagtatatttgatatatggtgtgcattacgcatcatcatggttagtatgaagaaattcttctaacttagataaatttctctagaggcaaaaactctctattttaatcgattatagagttggcataatcgattaaacaagttgtctgaagcttatagagttaactctcatattgatttaatcaatttcaatagagattcgaacaattacactattgtttgagacaatgattgatctttcaag

SEQ ID NO: 81167 - DNA, 177 bp, Glycine max
tttaatccttaccgggggaatttattaaagaccattattccactgaagttttttcttaatggcctaaaacctaacctaagtggtcccttccccggtttatatgaaaaaataaaatattttgaaataaatgatcaatctccaagctggcctacatcttgaaatttttttttgtgggcc

SEQ ID NO: 81168 - DNA, 451 bp, Glycine max
gtgaacgaattagcatgggaaaacatgtctctgtattgtatggtaaatctgctccccaaattcctgataaatgtaaagatccatgtacattcagcataccttgtattatagggaatagtaagttcgacaatgccatgctagatttatgagcttctgctagtgttatgcctctgtctatttttaattctctatttctaggtcccttgcagtcaactgatgtgataattcatttagctaatagaagtgtagcctatcctattggtttcatagaagatgtcttagttagagttggtgaactgattttccctggtgatttttatattttgaatatggaatactggatttctcaaggatcaggtcccatcattctaggcaggccctttatgaaaactgctagaactaaaatagatgtatatgcaggcacactatccatggagtttggtgatataac

SEQ ID NO: 81169 - DNA, 411 bp, Glycine max
ttaagtcacctgcagctgcagctttatttcctttaagatttattgtttttttgagaaacaatgtggaaaacaaattaagatcgtgagatcagatagaggtgggaagtactatgatagatacacagaagatggaccagcaccaagttcattttcgaaatttcttcaagaacatgggattgttgcccaatatactatgtctggttctccagatcagaattgtgtggcagaatgaagaaatcgaaccttattagacatggtgagaagcatgaggagtaatgtaaagcttcctcaatttttatggattgatgctcttaagatggttgcgtatatattaaactgagttccaaccaaggcaatctcaaagacaccttttgagttattcaagggttggaaaccaaagtgtgacatata

SEQ ID NO: 81170 - DNA, 422 bp, Glycine max
  unsure (1)..(422): unsure at all n locations
tgacatctattgatatatcatacaaccagtttgagggccttcttcctaaaactgnagccttcaacaatgctaaaattgaagcattgagaaataataaaggcttgtgtggaaatgtcactggcttggagcgttgcccaacatcaagtgggaaatctcataatcatatgagaaagaaagtcataacagtaattttacccattactttgggcattctaataatggcattatttgtttttggagtctcgtattatttatgccaagcttcaacgaaaaaagaagagcaggctacaaatttacaaactccaaacatatttgcaatatggagttttgatggcaaaatgatattcgagaatattattgaagccacagaaaactttgacagcaagcatctcattgtggttggagggcaaggatgtgtttac

SEQ ID NO: 81171 - DNA, 317 bp, Glycine max
  unsure (1)..(317): unsure at all n locations
agctntagtgtgttcttcgagcttctctgtattaccaaagcatgcaagaaaactntaagcatcataaaccgcaacagatcggaataataaaaaacgcaggagatggggagggtaaacgaagcgcatcaacgtcagagcaacaaagaaaacacccccatcctcatcaaaatcatagctttagtgtgtttgtccaccttctctgccaaacaaagaacacaggaagcgaattggaaaaaaacaaaaagaaaaaacttataagacgggtgggcaaatgaagaaatgtggggttaaaaatcgcatcttttgatgtaccaaaa

SEQ ID NO: 81172 - DNA, 392 bp, Glycine max
  unsure (1)..(392): unsure at all n locations
gggagccatgcattgtgattcttagagcaattcgccatcttctaccctntttcggagccccatgaatggcgttttcgttcatgcgtccttcacccacgagtttggagtcgtccgtagagattgcttagtgcaattctccattctccatcctttttcggagccccatgaattgcgttntcgttcatgcgtccttgacccacgagtttggagtcgtccgtagtgattgcttagtgcaattctccattctcaatccttttacggagccccatgaattgcgttttcgttcattcgtcctccacccacgagtttggagccatgtgtagtgattgcttagtgcaattctccatcctcaacctttctctgagccccatgaattgcgttttcgttcatgc

SEQ ID NO: 81173 - DNA, 226 bp, Glycine max
  unsure (1)..(226): unsure at all n locations
ctctatttgggtcttaaccctcttatgcaacttctttacaaactctgacctaaattccccttctttatgtataaaaagaagtgtcaagtgggaggggaatgaggtctaagggtgttaaaggattgaacccatagacaacctcaaaaggggattgcttggtggttctatgaacccccctattgtacgcanattctacatgaggaagatactcatcccaagacttatg

SEQ ID NO: 81174 - DNA, 419 bp, Glycine max
  unsure (1)..(419): unsure at all n locations
tgagatgaggaagtgtngaagggtgatacttcctgcttttactgttgtccacagagtggtacctggagatatgtcgcggtggtcaagagacctctgtgacgtcatgtggggtgctattgcccaaaaccaagcttgaccaatcccgacccaacccgggcatagtcggtcagtgagaacctgtgatgtacctaaacaggcgagctcctggcagtcaacagataaaaggaaaacaagaccacaaagcaaggaggcttgtggtggctggccagctgtgaattttgtgtaatatgtggatggtggcctctggtaatcgattaccaagggtgggtaatcgattacaaggcttaaaattgaggacaggaggctaagatggtctctggtaatcgattaccaaggcgtgtaatcgattaccacgcttg

SEQ ID NO: 81175 - DNA, 423 bp, Glycine max
  unsure (1)..(423): unsure at all n locations
gacacctgcggcatgcaagcttctataatgggacaactagtgattcttgtgacggtacatgcaatgtatgtagagctggacaaaaataaggggtgggtaaaaccttataaatcacactacattgaacatttgtatatgatattaacaatgacatctattttgtaacctagaatatctaataaaagacacatttaatagcatgtgcaagcaacttatcttaaccaggagcaaggtcacgaaccaaaccaatacacccaaatgcacatagaggagcatggtataatggacctttgaggaaataagttgatagggaattgatcaaataataagcagttaaaacaacttcaccacanaattataaaatgatattttcatgtaacaataaatgagcacagactttgaagtttgtattgataagcagtt

SEQ ID NO: 81176 - DNA, 275 bp, Glycine max
aaaactgtgggactgttcccttcatcttaaactcactcaaaggggacacaatattatcatattccaacagttttatattatgtcatataaaattaactatatgtatgtcgagtgcaatcagagctataagctgctgagtatgaagttcgtacatctaaataccgtgtatcataattcctattggtgatattactattttcttagggcgagggtctgcctgaggtgggaaagatgcagaaatatgactaaatccgcaacagatcatctgattgctg

SEQ ID NO: 81177 - DNA, 221 bp, Glycine max
tgctcctctgtctacaacaacacacctttgggcttggagcaacaatccgtatcatttgaacaacctgaagattatgctgcaaacattctacaatattacctctctaagggctgagcagcaaaatctggcacaacaaaacaattatgacctcttcggcaacaagtacaaccccgggcggaggaatcatcccggccttagatggacgaatgcttcacaacatc

SEQ ID NO: 81178 - DNA, 144 bp, Glycine max
tttacacacaaagccgacaagacacaaggacaatgcataacagcggggtcaccctaatggctgaaactcaacactttgcaagagtgaacggcgccaatccctgtgagccgccatcccctactttgggtgcatcgatgaaacacg

SEQ ID NO: 81179 - DNA, 347 bp, Glycine max
tttgtttaaaaacaaaccctgtttggtaaatagtttttaaaagaagccccctagggtaaatttgccatgacttgcgtccagcgagttacatttagtgacttgcgtccagtgggttgtgctagtgacttgggtctagtgacatgtgtccaacgagttacatctagtgacttgcgtccagctagttatgtctaatgactttcatctagctagttgcgtctagtgacctgggtctagtgacttgtgtctgatgacaatcatccagtccaaaaattaattttgatgtggatgcaattaactgagacaaaatttgtgcttaatttaagtaaaagcaatgcatgttcacattc

SEQ ID NO: 81180 - DNA, 359 bp, Glycine max
  unsure (1)..(359): unsure at all n locations
tagagggataattatatttaacctatttttatctaatattaatttaagaataaatatttgatttacccttttcattgtgttaatttttagtttaagtttccataaattaattttaatttttttcctagttcctctattggtgacatgacactctttgcatatatgacatgtagtaatcatcttgttaatgatgtgacatgataatatcatcatgaagtaattaaagtgataacaaggcatgatatcaatatcatttctattagacgagttaaaaatttgaaggatgaaagaatctttttttttttttgcgttggactaaaatacctaaaattatacattacatnggacaaaaatatatg

SEQ ID NO: 81181 - DNA, 377 bp, Glycine max
  unsure (1)..(377): unsure at all n locations
tctgggctgnactgaacaacatgaattgtcattggtcaacattacaatttttcttttaaaaaaacatatgagcatttaagaaagccatctgattcctttaaaaagtaattcacacccataagattatttttttttactgaatcacactgataagatttaattntcaattattccttcttactttcatatgcctttttattatacatagagagaagaaatcttattataccggcataacttcgataattatttcatcatttctataaatctagaatgtgatttttattattctaattatcgaagtatatctatatattatcgatattatcttgcctaaattgaatattaataaaaaaaagcaatgagatgatttatat

SEQ ID NO: 81182 - DNA, 293 bp, Glycine max
ctgacagaacaatctgtgctggagtctgaagacgaattccattctcatcctttcttgggcagggattatctgtgaagttcacttccagagatgaactattgaatttaagttggcgatcaagttccctaggttctctgctttgcacaacagaggctttactactacttgcaggccacgtggatattttgacagcattttcctcccctgacccagactttgaagtggtattggctgccattacatcaacagtttgacatttggatacagcggccttgacaagaccattggtgggg

SEQ ID NO: 81183 - DNA, 397 bp, Glycine max
  unsure (1)..(397): unsure at all n locations
agcttcacctgtatgacgccgatcgncatttttttctcgacgtcatgccaatttcgntcagggattgaattgagaactcgttatgcgacatctgtcgtgaagtaacgaccgatatttttcagccgacattgcacaattctttgtagaaaagctcgctggtcgataatggtctttttacggcagaagaagttatcttgttgtggtgttgcataaaaacagtacgatgtacttcggctagggttttcgtgcgagttcaaccgacattttgtttcggccaggaaaacattaacccacctctgagaaaaaatatttgctaaccgtcttcatgcgtatttcattcaacgattgaatagacactcatagccgacaacggtcggaaatagtccgactgattttt

SEQ ID NO: 81184 - DNA, 377 bp, Glycine max
actcacgctcaacctataggagactgaccattccaagcgttgtttattatcttcgacaatgcctacaagattgacttgcctagtgagtataatgtaagtgccactctcaatgtgtctgatctatctctttttgatgcatatggaggagccttggattcgaggacaaatccttttcaagaaggagggagtgatgaggacataaccaagggcaaggaccatgaagcacttgaaggtcccatgaccagaggcagacttaaacaagcccaacacgtcatatagacaaggctggtcatttgtatagctgccattgatgatgattgaaggcccaagtggagaaagatgaatgcccagaggcagaggcactaccaagactacta

SEQ ID NO: 81185 - DNA, 367 bp, Glycine max
  unsure (1)..(367): unsure at all n locations
taatattcacgccaggttctgcgcatgttattaacttatttattacatggatatatattccattttataaacaaaggtcttgcttccatctctgagcattaattctactggttgatatggagagtacttatttacttatttatttttgcaaaaaaagaagggtgcttcgtacatcggaagacagttattcaataataaggcagtgcagtgcagtttgagaaaatgttcacttcatggccttcggcggaatnttaacagctgaaacaataacatcacaagtttccgatcatcagctntttcttcttttttttttttgaatttcttatcgacaactagaaaatatagtaccagcctatacatttatata

SEQ ID NO: 81186 - DNA, 468 bp, Glycine max
aaaactcacgctgtagggataatgagctgcctctttaggtccacatttgttatttccaaccgaccttcacataggtaaaattggcattgatgcacagtgcaagattgctaagaagagtccatggagtcgttgtccatgctactaaagatgcattatcctgatcacccacgactggaaacgtgataaatactttaggatcagatacatcctgtgccaacaacatggaatttcagaagtagatacaattgctacaacatataatagggttctgtttggaaaaaaaaactccacacattagttatagatgaagaataaatatgaattaaaatcaacttatgcacttgaacctctatagaagtaccctcatctaacttctctaagacctaatatgcataagttaattttagctgacgacagaaactcaaatcattttcccttctcattattacttaatgaagaagctcattc

SEQ ID NO: 81187 - DNA, 276 bp, Glycine max
catggctcactccctagaggatggagccgcctactacctctactcacctgtcgaccgctgcagcccgagggcggaagatcaccattaaatgacctcattgaagctcagagatccacccaccgtagagacccagaggccctatatgacaagtctgcataatattaaacaatgcagttaagactgtcactgactatttatgtgcaagagtatctcctacaaaaaacattttcctatgatcctatcaagccctgtgaagaataaataaattcacacgtt

SEQ ID NO: 81188 - DNA, 420 bp, Glycine max
  unsure (1)..(420): unsure at all n locations
gcccactattatctgtgatcatgtatcatttccatacaggggggggccacttgagctgcctgattcctctcaactttgggacgtgattctcatgaatagatatcacagctccttcattatcacatgtttctcgtatgctagcagtttctattctcaaaactattattataaatttgtacttgatacctgactgtgttgactatttggcaaagtgctaccggattcgcactaatttgtatacaatcggttagaaccgagtatattacactatgggaacttgtgttatttggaagctattttaccaaataggtgcctggtgcgtaaagataagngtgaatattaacaagtggttatactatctgtgcaatatgaatgaaagatacaggagtgaatcaccctatcatagcatgcatctacatg

SEQ ID NO: 81189 - DNA, 393 bp, Glycine max
tgcaggatacagaaattattctttatgaaatttatcaaattggagtgctagcctatatttatatctaaggaggcaagaaaatgaggaattaaaaatatattccttgctttaattggacaaccctagttatatcggtgtcatagatctgaaagcaaatatacaaagatattctagatctctagtcaccatttctctacatcaattatgtgcatgaactaacatttagcagcatatgcatgtcaataaatcatgtctctgttcaatttgcgagctgatagatagtattcatctacgatatagatcatgacccagcttacgtagcacagactaaagtgcacgactttcaaaaattagtatagagcttgtctgtatattattcaacatcgtgcatta

SEQ ID NO: 81190 - DNA, 283 bp, Glycine max
  unsure (1)..(283): unsure at all n locations
ggcacatataagacatcgngtagagtaatgaatgcagaaatttgaactgttcctaagtgggtagcattgacaagatgcccatttggtagcttaacactgatgggattaatttgacaatatcaatgaaaatttgttagacaagaagaaacatgatctgtggctcctgaatctaagatccaggaggtagagttggctttttcgtaagacagaactatacctgctggatcattattggtacaagacgaaatagaggcaacctgtggcttaatgtgatgctgatttt

SEQ ID NO: 81191 - DNA, 363 bp, Glycine max
attacgataagttgagaaattgctaaggatagtctactctcttcctccaggcacgctaagcccaagctacttatctttagataagaaaataatgataaattattggaaaaatgatgattgtgctgaattgatactgatagactttcgtcgcgtatagaaaaatttgaattgaaaaattctttcttcaacaaaaagatcccttcccaattcctccatctctctttcacaaaaaaagatcttctcaccgcaaactttcgttccttatcatatcgaagaatggtagttgagttctgttcaaaacatttactggatgaccactaattgggtgatctaactctctaggtgtgagccaaacaaaattaa

SEQ ID NO: 81192 - DNA, 410 bp, Glycine max
agctttctattcattctatgtacccatgtgttgtccacattgagtttcgggtatctttattctcatttcatttactttttataccccctgttgacgtgcttaagccattttacttaagtcatttctcgcttaacttaaaaataaaataaatttccaccgaacgtttgaattgtatgatccgtaaactttggttaagataaattccgaccgttcggtcgtgccgtaaccacgttgaaaatcaaaaaaagagataaaaaataatataataataaaaaaaacatcttttagtaaaataaagcggaaaatcaatcggacgttttctctttgggatttctcattcttaatcgaattgactaataactaaggtgaaactaaggctaaaatcaactcgcctagtcaagctcgtccat

SEQ ID NO: 81193 - DNA, 443 bp, Glycine max
  unsure (1)..(443): unsure at all n locations
cgcctaccaacttctcatagtanaacactagcaaggtgtcttctatcatggtaatcatctccctttcgaccatgggaggggccacttgtgctgccaggtctctccaccactgagcgtactctttaaaggtctcactttccttcttaaccatgttctgcagctgagtgcgatcgggagccatatcggaattatactgatattgcctaaggaaggcagaaattagatccttccaagtacggacgcgggaagctttcagattagtgtaccaaatgaccgcgactccagccaagctatcttggaaaaagtgcattaacaacttttcatccctagaatatgcccgcatcttgcgacaatacatcctgagatgggtcttaagacaagtcgtccctttgtactcttcgaaaacaagtaccttgaaatttgggggatgacgacatccgata

SEQ ID NO: 81194 - DNA, 230 bp, Glycine max
cacgagatttactctctaggcatccactaccagatgatgtaaccgaataccagtggcgcaagatgatttacagcagctatcaaaacgagaattcggcatttgcactgagcaatcgattaccagcaggtattgaaagttttaattcaaattttaagcttgtaatcgattacacacatactgtaatcgagtaccagacgagattctcacaacatattctccacaacaacatc

SEQ ID NO: 81195 - DNA, 386 bp, Glycine max
  unsure (1)..(386): unsure at all n locations
acaaccacagtgattcgctgccatttgagcacatctcttgatacactggaactctccaaaatctatacgtggactctcttttacagtgacggttattatttcaagctttgaagaagatgactaccacttactatttcttacggagcactatcacttattagatgcaaccactacaagccactcgaatattacgaatcatggaaaatatcatgtgatctctattaacataaagctaacttaattcatctgtttcttttatacttaaagctagctgaaattcatgagctggctaatattcatgataagtgccanatttcaattatttgtttgggatataatggtagcacttatctctcaattgtaatagttttcttatagactaccct

SEQ ID NO: 81196 - DNA, 302 bp, Glycine max
aaagcaccggtaagacatctgcagtagacgggtgcatgccaatgcagtgaccttcattaaaaagacacaacctacttggtttcctttgacacaaagggaccaacacatcaactccttgttcactaccaccaccagttgtaacagttcctgaaactaatgttactggagtttcactatcagcattcagatgttttacatctatttgactacagcattttccacctaacaaacctaacctaccacaaacagtcaaaagatttgctgcttggcaacaaacactggcagcaagtgctggtaacata

SEQ ID NO: 81197 - DNA, 289 bp, Glycine max
accaaaaaagaactaaatctagccgcgacccacgagaatagagtggcggacgagtatgcccaagtgtatgcagaaaaggaggctagaggaagggtgatcgactcactacatcaagaggcaacaatgtggatggaccaattttcccttaccttgaacgggagtcaagaacttcctcgattgctagccaaggccaaagcaatggcggacacctactccgcccccgaggagatccacggacttctcggctattgtcagcatatgatagatttaatggcccatatattataaa

SEQ ID NO: 81198 - DNA, 273 bp, Glycine max
ctgaccacgacgtgatgaaatttgtcctgaacatccattgaaaccagctgagagctggtccatcgaggtaaaaagaggccactggtagtcaaagaattgcgatactttgaagatccatcctagaggatcgtggccgtcaaagcggggcacgtcaagcttgacgggtggctgtgggtgtggaaaaagttgggaagacgcttgtgaggcagaggtaaggtgggagagacgctcgcaccatgcttcgaacttatttgccaagtcggagtgtctctc

SEQ ID NO: 81199 - DNA, 389 bp, Glycine max
  unsure (1)..(389): unsure at all n locations
caaaaagtattccctatgaaatatatctcgattgagtccatcaactataggggattaacatcactaagaacaagaaatcacaaaccaccataatatctatgcaattaaggcanaacaccatactacaagcatacatagaattataggttcctataacaagtatataacatacatataagaataaagaattaaatagtcactaaggatgtattaaggaatcacaaacttcaacaactacattcaggactacacacaaaacagagggagttaagtagtcatgcgtttacacatcaagagagaaataagcattattaataacatacacatagggagataagggctccttaaggcatatccatcaatatcaagactacctacatcacctaacc

SEQ ID NO: 81200 - DNA, 332 bp, Glycine max
gcaagcttctatggaggctggatcttgagctttttgagatccttcaatgtttattttacaccatggagattcagcggaaggctaatgagaataggagaggggagacaccatccactatggaataagcccaggaagaatgagcttcaccaccaagaattgccttggataaaaagcttgaagaggatgctcttatggaggaaaagaaagagggaaggggggagcacgagattgaatgaatgaaacatggagagaagtggaactttgaagtgtatctcataagagtgtcagtgcataaagtacaaccagtgttcacatgcttctattatagacta

SEQ ID NO: 81201 - DNA, 456 bp, Glycine max
  unsure (1)..(456): unsure at all n locations
tcacaccatctttcataatagaacacttgttatgtgccattatcatcattatcatctctctttctgccatagggggcactacctgagttgccaggtctcacaacctctgagcatactctttgaatgactcattgtctttcttggataggttttacaactacatnttgtctagcgccatgtcagagtttgtattggtatttcctactgaaagcatccatcagatccttccaagtgcgaatccaagagggttccaggttagtataccagataatagccaccccagccaggctttccaaaaaaaaaaaaatgcatcagcagcttctcgtccttcgcataagccctcatccttctgtaatacatccttaggtgattcttagggcaagcggtccctttgtatttatcanaatctggcaccttgaacttcgggggaatagtcacatcgggtaccaaacatag

SEQ ID NO: 81202 - DNA, 237 bp, Glycine max
  unsure (1)..(237): unsure at all n locations
ccaccgcacacctaagagaccccaccgtcggtcgtccagtcgttcatgctgctggaacaccaccaacccctccgaactgaagctagggtgtccaagctagtggccgaaacaatgatctctccctcgtgctttttgattcccttcaatatttcacgtttctaactgaacaaaaatangggttaagttggtgcgtgcgatgaagatcgaggaattacacgatggagagtgtagtacgga

SEQ ID NO: 81203 - DNA, 396 bp, Glycine max
  unsure (1)..(396): unsure at all n locations
aacaaagnacttgcgacacctactatatgtggacttaaccaacgctgttattggtatgctgcgactatctttcaacaccttattcacacattctgagaggttggttgtcatgtgaccatatcttcatccaaatgtattcgaagccatgctccatttttcctttgaaatgctatcaatccatgttactatggctggactcaattgacgaaatttttctaagttttgatcaaacacatgcttgcaaggagtgtacgctgcgacaatctttcaacaccttattcacacattctgagaggttggttgtcatgtgaccatatcttcatccaaatgtatcgtaagccatgctccatttntcctttgaaatgctatcaatccatgttactatggctggactca

SEQ ID NO: 81204 - DNA, 415 bp, Glycine max
  unsure (1)..(415): unsure at all n locations
agcttttcgattattctatgnacccgtattgttccacattgngtctcgggaatttttattctcgttttgtttactttttatacccccctgttgacgtgcttaagccattntacttaagtcatttctcgcttaacttaaaaataaaataaatttccaccgaacgtttgaattgtattatccattaacttcggttaaaataaattccgaccgttcggtcgtgccgtaaccacgttggaaatcaaaaagaggtaaaaaataatataataatcaaaaagacatcttttagtaaaataaagcggaaaatcaatcggacgttttctctttgggatttctcattcttaatcgaattgattaataactaaagtgaaactaaaggctaaaatcaattcgcctagtcaagctcgtccataaaaat

SEQ ID NO: 81205 - DNA, 416 bp, Glycine max
  unsure (1)..(416): unsure at all n locations
tccattgttgagttnttgcttcccttttcacgctttgtttcattccctacaagtaagtgcactgtgccttggttatttggctctccattgttgtgttctggtgctttagttgctcatattatgcgaaattcgtgaagcaattcacatatgaaaccatacttgttttcgctaaattaaggggttgtaagggatggccttatgcctatgttgcattctggagtaatggggcatgccacattgcccccattctcttgctattcatgcctaaacatgtgcccaccaagtgctcggtatagggacaacatgtagaggttaaaatgagtgcctgaatgcgattctaggcctatgaacccaagctgttgatttcaatacaagaaagcgtaaaaatgagggcattatgataggaatttcccttt

SEQ ID NO: 81206 - DNA, 364 bp, Glycine max
cttcttgtctccaacgcgaactttgaccattgttcttccttcccgcgatgcttctttccatgtccgcctgagtgggcttataacctaaaccatacttcccacgatttccttgggtatttatcaagctagttatgccgccgctgttttttcctaaacccatcccgggttcataaccgttccccaacataactcgggccatcattaccgctgcatcggacagacaaggctgcccaaagagggagtccatggaggaaatgctgaccacctcaaaagactggagagcagtttctaacgattcttctgcggcttccacataaggcatggaggatgggcagcttaccaagatatcttcctcgcctgacac

SEQ ID NO: 81207 - DNA, 429 bp, Glycine max
  unsure (1)..(429): unsure at all n locations
tatnntgatgcaaatactgtctgtaaaggctattgttcttagtttagaaggttattggagtggcatcaattccatgtaccttggtacctggctcaaaatctttagaagcctctccgatttgagacattcttgttccaacattcttaaattttgcttctaccatagactgaaaatttgatctgaacccttgcatttttagctctaaatattcattcttgttgcacttgagaagtttctgatctggctgttgaagatgatgattaggattttcaaggttaagagccaaagacttgtcctcatcttgagttgattgtgagcatcctttgatcatgtctgaaataaagctcatgaatgagctatccagtttaacataggatntagaacatgtttcttgagtttgctttnttgaatttttacttccaattatca

SEQ ID NO: 81208 - DNA, 431 bp, Glycine max
  unsure (1)..(431): unsure at all n locations
acccatcacatgtggtactatgtggcggtcgggcgatggtgcacaacaagttttccacatccacaatgcgcgcataaacccaccatcccctgtagcccacctccaactgagctcacgtactcccacgtagcccatattctcgtttctctcaacaccgggtccccatcaatcctcccaagcttccccaacatcaaagtaatgcaacattcaaacagcacaaactatcacagccaagataacagagcaaaggcagaaaactctgccaaaacaccaaccaaaatcacagctnttctcacttaaagaccccagtaacaattccttcgttccaattcgttaaccggtggatcgactccaaatttntactggaagtctctagtacataagcctacgttgtgaccggtgggatctactatgcaaaatccagaactcat

SEQ ID NO: 81209 - DNA, 333 bp, Glycine max
  unsure (1)..(333): unsure at all n locations
ccccgcgacatatcttcaggtaccactctgtggtgaacaataaaagcaggaagtttcacccttcaacactgtctcatctcaagcttgtaggattatggggtacccatcacatgtggtactatgtggcggtcgggcgatggtacacaacatagtttccacatcgacaatgcgcgcataaacccaccatcccctggtgtccacctncaactgagctcacgtactcccacgtagctcatatactcgnttctctcaacaccgggtccccatcaatcctcccagcgttccaacatccaagcaaaacaacattcagacagcacaagctatcacagccca

SEQ ID NO: 81210 - DNA, 461 bp, Glycine max
ttgaagttgggttcatagttagctcaagtttcttttctttcattcatcaaatactatataaaagagttccataagctcaacatatatgtgataaaaaacatcatacacaattttttataaactgacacacacccacactaacattgtatcttataacatagtttggaattagggtagtacgagaaaactagctcccatgcgaatggggtaaaagggaaaaaagtaatataatcataaagcaaataatagagcatcaccttgccctcagaagcttgattcccaatctcctcattttcctcaactagggttgtacacttagccatcaacatctcccccatcttgctttggggagtaacagttacagcagcaatgttatcttgcaactcctctaccgttttatccttttcttcaactaaattctatggtcatatgaaaaactctggatatacacttgaatgaat

SEQ ID NO: 81211 - DNA, 345 bp, Glycine max
  unsure (1)..(345): unsure at all n locations
cattttcaaacgcttctcttctcttctcatggctttctgctaacatcaccaaacacagatctgaaacaaacaaaagaggtaagcttcatctttcatcttctgctttgcgccaccacccttttctactccaaagcttcaactttacttgaccacttttcctttatatgtgatgatctgaggttaaaagggtatgaaagctgtgaaaaatgagaattgggcattttttttttttgtgatttttaagatttttgatggtttgtgggttcattaaagcagggaagtcaaaggggtttaccaacttcagctgacttgntaatgtcgtcgttcttgctggttaggggcatc

SEQ ID NO: 81212 - DNA, 317 bp, Glycine max
  unsure (1)..(317): unsure at all n locations
gccaaagagggtgtcaatagcttccgaaaaagcttgacccatgccggtgccggtgtctctgagtatcagacaattggaagataaaaaatttggattttgcaaattgagctgagaatgaaagaatgaatgaatgagagagattctgtcaactttgaacaatcaaccaacctttgccttttggcttcttccttccttccaagaactttcttctcccggtgtaagcaccaacaaacaaaaaacaaacaatactttgaattgaattgaaagtanggtgttttgggtcggttntgaccaaattcaaagaattaacctactca

SEQ ID NO: 81213 - DNA, 452 bp, Glycine max
  unsure (1)..(452): unsure at all n locations
taactctatcatgctatcttggtggtgaagctcttcttttatgtcttattccctagnggatggcgcctcctcttccctcttttnctttgtcttccgctgcatcttcatggtggaaaaccaccattaaaggacctcattgaagctcanagatccagcctccatagaagctccacaagcaagcttccatcaagtggtaatcagagcacaagagcttcaagtaggtgttccttaaacctccattaattntttttctttaccttctcttccattgttgtttcttcatttttctccatgtatctcctcacatgtcttgttctaaatgttgttaacatgattctttagagtttccaccgattaaacttgctatagaagttagatttgattttctatggttcanatttcttgttcttgttcttgaaccatgaattgtgttgagtttaaggtcctttgag

SEQ ID NO: 81214 - DNA, 325 bp, Glycine max
  unsure (1)..(325): unsure at all n locations
gacatgcatgtatgtataaatacctctaatcacaagtagttaagcagagtttgccacttcagaatgacacccatttgaaagaaaggaaaagtgttaaggaataaataaacaatccaagacaacaattatctatataagcaaaagtgacagagattaattaatcctgaaaattaagatatttctccatgttcacatgtatcttattctatggcatatactaaagtaactattctgttatgattcatgctccgctaagtaaactttanaagcatcttatctattntaaattcaaattcaacaacacaagctaactagaatttaaatt

SEQ ID NO: 81215 - DNA, 430 bp, Glycine max
  unsure (1)..(430): unsure at all n locations
gcttctcacatctgactctctaattaccatgtggtatcttctcctgatgctnctncccaaatcatcttgaccaatgaaatccccttccctcttatgtgccttggtcgcctatcctcgacccttcaaaacaatatttcatataataaggtcgtcctcacttgtacgtcatctaattcgatcacatgagatggatcatggatatgtttatggaattgagacacatgaaatacattgtgaaggttagaaagagacgagggtatgcaattttgagaatttggaaaggaccgataaaacgagatatgagttttcgggatttcaatgcttgaccaaccctaattcttggagtgactctcaagaatacataatcaccaatcttgaattctggggcttccctcatctnngtctgatagctnttctgcctactctgaga

SEQ ID NO: 81216 - DNA, 384 bp, Glycine max
  unsure (1)..(384): unsure at all n locations
tcatccttaccctcgggagaagaaaagaaaagaagggaaatttcccatccaagaagaagccaaaaagaagagaaaggaaattcccaattcaagagtgggagaaagcaaaagaaaagatagaatattcccaatcaaagaatgggagaaagaaaaaaaagagaanagaaggaaagaaagctcctgatcaaggatcgaaagataacagaagaaatgtgcagagaggtctttggaccggacaatatccgaacaatacagaattgtcaccaaatgaacgaaaaaagaagaaaagagaaccacaacctaaaatagtcttctccctttgattaccgaccaaaatcccgtgcgctagcgactttttttctcgccccgcactaaacaaaaaca

SEQ ID NO: 81217 - DNA, 422 bp, Glycine max
ctgcaagctgaagcaggagtagaactgtttccttatcatgggctgattatgtttacaatttaatgatcctttgctgccctgcaatgagacacacacagatgcacaaactcacgcacatagagacaaacacacgcggacacaaacacaaacaccaacactcacgcgccttaaaattcacacacacccagagagagagtcgcacacacacataaagagacagacaaatacacggacacactgagccacagacacacacagagacgccacgcaaagacacacacactgaggcatagacacacacatacacaaacacactcacacacatagacagacagacagacacacccacacactcacatagatagactgacacactcacactcttgtagagacatacagacactcacacacagatagagaga

SEQ ID NO: 81218 - DNA, 385 bp, Glycine max
agcttgacgcttataagttgatccgcaattagcttgcggatcaagttgatctgcacttgatgcttgcggatcaagttgatccgcatgctgcttgcggatcaagttgatccgcgttaggcttgcggatcaacttaatccgcgcgaagcgtgcctgaatcctaccaaatgcggatcaactgaaacctaaggggatcatctacatccctaccctatgactactgtgctcaagtataacgcaaacgcggatcagccaaatgcatacgcggatcaactatcctaagcactacacaaaaaccccacaatggaaacgcaaacgacatcgagggagaagagtgcataactcgacaatgtcgacacgctgaaggagaagaagaagaagacaaag

SEQ ID NO: 81219 - DNA, 409 bp, Glycine max
  unsure (1)..(409): unsure at all n locations
agcttgtagaatggctagacatgatacatgtcattgactggtttggttcaaggataaaagggatgccccacattatttccatgacacaaatgcaaaaatgatgatttggaaattntatgcaaaactggttatgcatgcacctatgcggacactcaaatgtcaaatttttatggtcatgtgatgctagggctcaggattcatttcctctattttaaatcaacccaatgtttccaaaatatgttcttttatcaatttgtgcattcatccgagtccatttcgggcgttcggggaaatntcatagcattcacccttcaggtgtacacattttttccaaaaactagttatgatncagtgaattttttcaaagaaaagttggaagtcatctctttttcaaagcatgttgggtttt

SEQ ID NO: 81220 - DNA, 445 bp, Glycine max
tagcgcatatccttgcggcagatgttcagctcagcttgtctctttcccgctaagctaattctgcagaagctaaaatattgcaacttccgctaagtggctccacatgtcgctaagcggtagtgtttttttttttttttttttacaaaggccacctaagcggaccatgtctcgctaagcggccagagtctttttcaatattattttttttcagtttttaaaacttgaataacttgtgccctgatgagatgtttggttcctttatatgcagatggcctctaagaaacgtaagagtagtgattctaggccacaggatcagaatgataacaggagatttcaatcaaaggaagcctggaaccgatatatcgataatattttagaccaaaggatcctttcgtaaaggaatgtgaaactttatcattctgagtgcaacgagtttaaagtacaa

SEQ ID NO: 81221 - DNA, 375 bp, Glycine max
  unsure (1)..(375): unsure at all n locations
agacccgagaaatacctagaanatagttcaagggaaggtttcacaactattcttcttttgcaatgaatgaaacaagttgaaatctttaataaagaggtatacatcatagagttttcccaagtctaacatccaccaactctgagaaagaactcaagtaagatgaagaaatattatgatctctagtgactatgatcacatcactaatggatgcatttagttagggatgtcaatgaagaacttcttcaacaatgatggttaaaattatatgttaagaaagatcaagctaatagtgaaatatccccaaaatgaatatgcaaaagtctcatcactagaagggaggacanataanaaanattgagataacttataaaggaa

SEQ ID NO: 81222 - DNA, 451 bp, Glycine max
  unsure (1)..(451): unsure at all n locations
actctatagaaactcagctatgaagagtcaccttatggaggtcaacccttattattgccaagtgccagtcactgaggaggcatcttgaaaacaaatgactgaactatacgagtccaagttaaaggaggcaaatggactagaacatttgatggtaaagccttaaaggctttagatggagtgtgctcatagtcaaaatgcgtccagatggatgcttcaatagatatggtttcctttaccactcgttcagtgaaaaagactttagagaagggagaaagcggtgtangattaccgtggatgaaggacagagggaaacactaggcatccatcaatggctcccttgtagtttcccttctgaacctatcaaggtgtaataaagatggaggtggacgtggttgtgggattggtgcaaacttgtagagtggcatgaggggactgtcgttagtggactcac

SEQ ID NO: 81223 - DNA, 302 bp, Glycine max
acaaaccacaaacccttgcgacaagtataaatttctggttcaaagccagctgggttaccaagttaaccaatgcatcccattttgcttcaaggttcttagtttcagatgatgcagctgagtttgtagctacctcatgcactcctctaatgactatagcatcatttctggcgctaaactgctgggagttggaagccatcttctcaattaaatatctggcttcagcaagagtcatgtctccaagggctccaccactagcagcatctatcatacttctctccatattactgagtccttcataaaaa

SEQ ID NO: 81224 - DNA, 463 bp, Glycine max
  unsure (1)..(463): unsure at all n locations
ngaccaatcccgacccaacccgggcatagtcggtctgtgtgatcctgtgatgtacctaagcaggcgagctcctggcagtcaacagataaaaggaaaacaagaccacaaagcaaggaggcttgtggtggctggccagctgtgaattttgtgtaatatgtgagatatggcctctggtaatcgattaccaagggtgggtaatcgattacaaggcttaaaaatgaagacaggaggctaagatggtctctggtaatcgattaccacggngtgtaatcgattaccaggcttgaaaacgaggtcaggaagctaaggaagcctctggtaatcgattaccaagtggtgtaatcgattaccaggcttaaaaagggaactgggagttgatggaagcctctggtaatcgattaccagcctgtgtaatcgattacacagaggaatgggtcactggtaatcgattaccaggcatgtg

SEQ ID NO: 81225 - DNA, 416 bp, Glycine max
  unsure (1)..(416): unsure at all n locations
agcttggttcttgtcatgaaaagaaggctttctatgagtgagggctttcaagnttcaaacaatgacgacgagtagctcagcagtccagcacgacaacgatgacgacgaccactacgatgcgagtagcttaacgagagtcattttcgggggttagtagcttgaacaacgcagagtgagtgagtagagagtcgcgagagtcattctcgggagttattttacgatgccgattaagattttcgtaaactcgtggactcggagtagactcgtgagtctacccaaactcatcaatcggacgagtctactctagtttcgattctacttccgatataaatcgtcaacccttagtagaattggaaaatcgtacaattntacgatttaaatcacgagtttaataacaatgagttttagaactcttc

SEQ ID NO: 81226 - DNA, 446 bp, Glycine max
  unsure (1)..(446): unsure at all n locations
ngtcaaacacatcctcaccattttcatttgctgtttatctttctccaacccaccagagaattatattacttttcttcataacagcattctcagggaaatgtaagagagacaacaagcaacgttttccaacatgatcaagtttgttacaatttacctcaatcatttccaactcctcacgttgtaggctcgaaaggaagtttcttgatgactgagaatcctctatattagtactttggatttcaccagcaggcagcaacttttgagttgattctcttattctcttgcgaatgtgtccctcctcttctgtcaacttatttaatgttttgttgcgaagatagccatccaggactggtaatgtgtcaaggaggtcttctctatttttcttcactaaggaaaacaggtcctttattctattcactcgacttcaatcattcaaatcactgttg

SEQ ID NO: 81227 - DNA, 169 bp, Glycine max
caccatgagggtgcaggggcatccaaccctaaggtagcccacccaatcttattttttttaatatactcatgtcatgcaaaaatggagttgactgtcattttgcactcaatatatgcctataggtcactcgtcatttgaaagttaggaatatgaagcctttctattattt

SEQ ID NO: 81228 - DNA, 456 bp, Glycine max
  unsure (1)..(456): unsure at all n locations
gtaatttcgtgcaataagaaatgaagggatttgtcttcttattattntcttcacaaaggccaataagctatggtgtaagctctcattgacaaggctntgtgacacttgaatgacccccttggcagccaattgtaacctaccaagccataccacagatgggtagnttttctttttgcaaaactaccgaaaaatgaaagggtagattttgccaaaaatgagtattattgcttcttatcaaaactagtaaatcttttcttaaccgcctaagttattatgctaatatcccaaggaagacatgtacccaaagtgatcctcacacaaagaacactctcacacaaagttaaattacactattgcttagtgcacgatgcaatattgctactgatggaatattttcactgaggcaattttttttgaatttctgcccactaactaaatacaatatcttcactaaat

SEQ ID NO: 81229 - DNA, 319 bp, Glycine max
  unsure (1)..(319): unsure at all n locations
cacacacacacacatactcgttcacagnctaccacacagactcacgggaaaacatgtacacacacagaaacacgcacacacacagacacacacgcatacacaatcacacacagccgcagacacagacactcacacacacacacacactctgactgatagacacacacacagacgcacacacgcaggcagacggaatgaaacacacacacagaaacacacggagacacacagagacacgactctaaagacacacacacacagaaacacacacacacactctctcatacacaatgacacgcacacagagagaaacacacac

SEQ ID NO: 81230 - DNA, 457 bp, Glycine max
  unsure (1)..(457): unsure at all n locations
cttgaagatatggaagattccaagctaggaggtaataatcctacagntgattgaattccagggtcctattcacataaagctaaagctcaatttcacaactaatatttataaatctagttgaggcgagaaatacttataagcaatatatcgtattgtggataatcataaactcacaaacttcggagaggggagatgtttgctacctttcctgggatcaaacccgttagtggatttgcacttagagaactatcataaataagaaacaccttggcatgcattagcttcttgtttcaagaagttagtacattgtaactaacgaaatttccctcaacagttacaaaagatacatagattgaatagaatatcatgtacttgatatacatatatttcactcaagagacgcttatatactatatacatcttgtaacgcacttatcttaacacacaatatattatt

SEQ ID NO: 81231 - DNA, 377 bp, Glycine max
tctacattcaatcctactagaggtttctcctacgcaagcacaaggactccccaaccatagttgatgtctagccttccacctccgcctttgatggctacttattctctctctcaccgtttcatgtgaattcttcattttccttccatcctagcttttttcatgatggaatttgatgcgttattatgcactattaagcattgaggtgttgttttggactaatgcattacttaattgctaaatcttggatttatttcttgtgtttactttcacacttgaacccttggatttggtattctttattttttagttggtgtttggtgcttttttgttcgtgatgatgctattagtatttgatttctgtattaaattgctgcaat

SEQ ID NO: 81232 - DNA, 296 bp, Glycine max
tcacttcccaatagaatatcagcattagttgcaaactcattttttaaaggcaaaatatggttgaactctaacaacccattttagaccattttgttggaaaagttccataaaactccattgggtgggcacttgggtgtagctaagacatcccataagctgcaacaaaatttcttttggaccaacatgcgtcatgatgttaaactctatgttacaaatgtaaaactttccaatagatgaaacatgaaacaaaatgaccagctcgtctactctaacccatcccaattcccattcacaat

SEQ ID NO: 81233 - DNA, 346 bp, Glycine max
ttcacccaatttttggttacaaaataaatggaatggatatgttgtcaaattttgggggggtaccatttaagaattcctttctcttttgccaggaaaagagaagtgatttccggcgtctctttttttttagttttttaaaaataaaataaatttgattatgatataaaataatacataattttttgttatgaaaatggtggagtaaaaaaattattttttagttagtataaatatttttatataatttatttatttcttccctctcttttttacttatccaagatttttttttaacttctttgcatactatttttatccgcctaaacaacaaaattttcttaacaac

SEQ ID NO: 81234 - DNA, 455 bp, Glycine max
  unsure (1)..(455): unsure at all n locations
tctttggtatcaatgctgaggtatgatatagcatgtatatatatatatattnccttcaagtcagattaagcatcttctgcttgtagttgactttctgacttttctcatgtccttcctttccctaaaaggtaaaatgaggtgtatctggatatgttcacatgtgtttaataagacttgatgtggccaaataataggcgttgaaataaaatggattaaatactcaaatcgagcctccaaggatatatatataacatcattctagtcctccaaatattttgtacaccaatttggtccttcatagctctaaattagtgttgatttgggggttaaattggtgtccaaagatataccaatacatcaagtgaattaattgatgttcatgtgttaaacaatcagggaccaacatgatatctaaaaatcattgaagaatcaactctatgtcccatgtatataga

SEQ ID NO: 81235 - DNA, 313 bp, Glycine max
taagaggggggggtgaaaagaaatccaacccttcccaataaaagacttttatcgttatcaaataaaaaccttaatatgacctttaataatgttcaacgaacatttgatatgatgtacgcacttggataaggagttaagggaaaaaagtgcgactcagattatactggtcggcacacccttggcctcttcgatctaagcaacccgttggagttcactagttgcaattctttacagtttaacacacaggacgtcttctctggttagatcttgacacaagaacccttgtcgtatcctttagataagagaaaaagaa

SEQ ID NO: 81236 - DNA, 318 bp, Glycine max
  unsure (1)..(318): unsure at all n locations
acttggggaaacagaatcaagagatgagtatagcaacttctttgacaaaattgtctttccttgaaatcctagttcatggtggagacagaaagtcgagaacaaaagaaagtgatacaagaacccaggccaacacagcagccaaaattctgaagctgatgatcttcatgagaaattgagaatggtttcagcaagaagcagtgtaagatgcaagagtactaataattttgaagagttggatcagggttatatatgaaaaggcatgagcatgctttatgcacgtggttcaccagnacttgcattatagtattatatatcata

SEQ ID NO: 81237 - DNA, 407 bp, Glycine max
  unsure (1)..(407): unsure at all n locations
tcaacgcccggctctagactttggaaccagcaanatttacctgttcaacctagaaccctactcataaatcaccctaatattctcctatattcaacatccatctcaatataaaggagagatttcattttctattccaagtgtccaatttcttttttagcaagcttttccttgtccttttccttatacatctaaanaaccttttattccatctttttaaatgagatgtgaattcagacatgttattagactagaaagggttattttgaattctctctcaatgctcctttgtaaactttatgaaatcgttatgcatcaactaagcaacttcaaatctaaaaggccgatgatcactactagaaaataggctttctacatcngttatcggcgcctntctacatcggttatca

SEQ ID NO: 81238 - DNA, 372 bp, Glycine max
  unsure (1)..(372): unsure at all n locations
agcttaattgtatttatatataanatttcttctttttaatttcttaccccctcccactttatgatcctggtctttctgagtggatctgatcattatgcagcttcaccatttacacagattgaggatgcctgcttcacttcactatattatatgctatatgtgatgccttcttacctgttgcagttttgctaacgccttggctggactagctgctaatgatatacttcagagaactaatgcaagattggaatctcttcattctgagggagtgcacgtacgacaaaatattacagaaattgggggcgaaatttattcttatcgtcataaaagtgagtaaaatggtgctgcttttcttttcagagactatctgaa

SEQ ID NO: 81239 - DNA, 359 bp, Glycine max
tgtaacagtgtgatttatgagcgtatctcctatgtgatctctttttcatagttataaggaggtggaagggtccaaaaagagttagattttttctttggaaaggggcaaaagattctcttgttaccaatgctatgacaataagggggatgcttgataatgcatgatagcctttatgtttgggtagtcctaaagatattgatcatgtttttcatttatgtgagcttgggaaaaaagtatggctcatggattacccttaacaatcatttggatgctgcttaattggatttcagatcatggcttttgagaaattcaaatcccttaattattggtgttattctagataatttccgccggatcac

SEQ ID NO: 81240 - DNA, 354 bp, Glycine max
  unsure (1)..(354): unsure at all n locations
agcttggccttttaacctgngtctctncttctttctcggcggacatggttgccgagagagatcacaaagcgacgaacgagaagaaagaacaaacaacccaaaaaagaaacacaaaagggggcgaagaataaatagatgaagggaaacaacaaacaacgacgcaatgaaggaagaaaaatagaaatgagtggagtgattatatagttaaagatgcgagcatgttgtgggggtcaaagggagaccgaaatctcaaccgtttgatctcgtagtttgaaagaggaagcgcgcaaatcgtgatcgactcagagaagagaacaatgcttatcntgaatttttgctattatatttatttat

SEQ ID NO: 81241 - DNA, 467 bp, Glycine max
  unsure (1)..(467): unsure at all n locations
gacactatgaaactccgctactctttcctgaatgcctcatgatcataatacttatagtttgactacctanaaagagtatcacatttatgactcatttagttcatcanattataacacaaataataacataaagttgaagacaaaataaaaatatttacatagtttaatcttcttcctattattattattaaaaatattattattgctctcattattattgtcaatattaaggatatccttattattatggtcatctttcattattaatggtaaaaaaatcatttataagttaaatgatatcatagtaatataagttaaaacaaaataaaaaaaagcattatgacttatagaacttaccttttctccaataaaattggttccattaaatgctgaaaggagtaaaaaacacaaaacaaaacgatcttcaactaggtgcattaataaacaaaatattcaaatgacctatc

SEQ ID NO: 81242 - DNA, 370 bp, Glycine max
gatttagacatttcgaattgactacttcaaaccagttttataaatggaagaaagatcaaatcatatctaagacaaacaacaccttattaattttttaattttacattttaagaatacgaaaagtggatgtaagttttttagctcaaaatttctatattcactcgtaatggattttactataaccaacaagaacctttatctatttatttttccgtttagatttaattcatcatttgatctatatagatacaaaaaatttatcttttaattcttatagagctattttagttcttacgctatcatttttaatctcttaattcttacacatataagtttcaatcatttatctctacaataaagactaaaaaat

SEQ ID NO: 81243 - DNA, 387 bp, Glycine max
  unsure (1)..(387): unsure at all n locations
aattttgagagtagaataagttctagatagtgcttttgttatctttgcagattntatcttttatgtttggcttcagttagtaaatttatatttcaaataaatctgatggcagattagatttttttaggaatttcaaattggttgtgagcctatacatagatattctcattttatgaatttcaatggctatattccttcaattttaatatcttcattttctctgtaagttccaatatttctatatttttattttacaaaatatttccaacagaaataaaatttagagatgccatacctgataccacaggtttctatgtttaagtatctgagatcacaattacacaaaaggtttgaaaaattaatgatgtcaagatacaagccaagtga

SEQ ID NO: 81244 - DNA, 414 bp, Glycine max
  unsure (1)..(414): unsure at all n locations
agcttacgcttattctattaanaaaaatttttataatcatgnntcacaantgaaataatcagggttacttaagtgattattttataatttttaatagataaatgactaaattataagttaaaaataaagttaaagaaccaaatgagtaatttaatcaaataattgtgatgtttgaaaacactcacaagacttatatattttaattttgataattcattaagatataatggataatattaattcttctcacttttgcattaaaacattctcactaaatatttcatcttctctttttcacataaaaagcaaaaactcgctagatagagagagaggactntaaattgtgtntgataaaatttactgtgaagctattaaaatatttataaaatcataaatcatttaacaagcttaaca

SEQ ID NO: 81245 - DNA, 460 bp, Glycine max
  unsure (1)..(460): unsure at all n locations
ttactggtctccttagtggtgtttaactggncatactattttttactgngtgtgngtnttcttccttagttgggataacagtgagaatctgctaactctcactgattttgtcgtttttattacatgttgcttttatatgtggataaggtcacttttcccccaatgttttcacttttaataacaaaaatttaaagcaatactttgaaggacctttggtttggttcattcttttccctaaattttgtttgcatgttaaattaactctcgatggttcaatttcagggcatccatggatattgttctacaccgagcgcacattaaagatgttgccctttaaatcaaaattgaagctccaaaatgcagctgcttctgcacctgaatctgggttaggaggaaacaagatagatgatgatggttcccttgatgaggattattcaagcccattttcatcctctgaaag

SEQ ID NO: 81246 - DNA, 289 bp, Glycine max
atttcattgacttggcgattggtaccgaaagttcacaaaaatttgtttaggatttgaaattatatattttgttccatccccatcccatctaaagttcaactggaacctcttctgtgtttttttctctccttgggggctttcttacattatcatctttaggctatgtttagatatctaatgctgagtggaatgaaatgaattgagatggaatggaataaagttattattttattgtttgtagaattttgtttgatgtaattaaaaaaaaaagaactagttccacctcata

SEQ ID NO: 81247 - DNA, 211 bp, Glycine max
gacactataaaactcacgctgttattgaagaggagtctagttgaggacctttaaggtccctgtaaacttttgagactaaagtaggtggaagcttcataagaatcagatgtgacccacatgattaccttcagaaaaactcacaccagcttttgcaagtcacaggtaatttggctgctggtggttgattatgacattgcattctaataaatgc

SEQ ID NO: 81248 - DNA, 356 bp, Glycine max
  unsure (1)..(356): unsure at all n locations
gaatccatcttgggcctttttcccacaactctcgtaaatgggagagaaatgttcctttaaagcatacaagtccctaatattatcaaatcctaaaatttgggctcctacggagcaaaacaatgtgtgcctcctagagagggcattaactaccacatttgntgttccctttttgtatttgataacatatggaaattgctctagggactctacccattctgcatgcctcttgattaacttgctttgccctctaatgtacttaagtgattgatgatcactgtgaatgacaaattccttggaaacaaggtaatgcntcccaagttggagggctcttattaaggcataaagctctctatcat

SEQ ID NO: 81249 - DNA, 378 bp, Glycine max
  unsure (1)..(378): unsure at all n locations
tncttaagaagattcgtaaagaagctagagcttatctacttatacctctctaatagctaagctcacctccttgagatgagaagctagagcttatctacacaccccctataatagctaagctcacccccatgacaaaaaacatgaaaataaaaaaaagtccttattacaaagacaactcaaaatgccccgaaatacaaggctaaaaccctatactactagaatggccaaaatacaaggccttgacgaaggaaaaacctattctaatatttacaaagataagcgggctcatacttagcccatgggctcgaaatctaccctaaggctcatgagaaccctaggggctttccttggatctctagcccaatctacttggagtct

SEQ ID NO: 81250 - DNA, 400 bp, Glycine max
  unsure (1)..(400): unsure at all n locations
agctttacattgaacataaacatcgtgattcttgagcgggttcactcaacaactagtcatgaaacccaaaacagaaaccaatatctgatgtactgccatatatccattatccacaaaaataaagctcactctatcaagccaatgccccccaaaattgaaaaggacccaaaagataaactttttttttcaaaagaaccaattacttgcagtgaatgtcatgaaaatattttgaacccaatttcaaattcaaataagaggcacaaaatgccatagcacgccaaagaacacaaaaatcacacaagataaccaaatagtgcattgtgtagagacaactaattccatatcccanatacagtagacaatgcaatgaatgcatcaacaatttatttacaagcatatg

SEQ ID NO: 81251 - DNA, 400 bp, Glycine max
  unsure (1)..(400): unsure at all n locations
actcagcttatagtcaatggacaccggctganaccatttctcttttattcctccttagtggatgtagcggaggaggagaccttcttacttcaccctacttcttttacgccatgaattacggagttttctttcttctgtctctttctttacttttattgcacttgtccaaattttattgattgctttgattgctcttgatctcatgattgcgctacatcgaggacaatgtcgtgtttaagtgtgaggggggagaagattgatctttaattttgttgcgtattctagtttaattctattaggttttctagtttaagtttgataggttctaggctaaatttgtatataggtatatgtctgtgacaacattgcatgtacctctgtgaatgttgggatatgtaca

SEQ ID NO: 81252 - DNA, 433 bp, Glycine max
atccttagagtcacctgcggcagcaagcttaatcttatacttggccttcgttttttgtctttgagtttggcggccatgatcaacaaagtactttcgacacctactatatgttgacttaaccaacgctggtattggtatgctgcgacaatctttcaacaccttattcacacattctgagagggttggtgtcatgtgaccatatcttcatccaaatgtatcgtaagccatgctccatttttcctttgaaatgctatcaatccatgttactatggctggactcaattgacgaaatttttctaagttttgatcaaacacatgcttgcaaggagtgtacgctgcgacaatctttcaacaccttattcacacattctgagagggtggtgtcatgtgaccatatcttcatcccaatgtatcgtaagccatgcctccattt

SEQ ID NO: 81253 - DNA, 457 bp, Glycine max
  unsure (1)..(457): unsure at all n locations
gtggccaggagggtttggttctatatataaggtagttatttctttttaacaagtcacaaattcaatgaaaatttgcacttgcatgtaacttgctctntatcaaaatattatccattatgttatctcgactctgaattatcttttgtgcagccttgcaaaggtaattgctactgaagttggtgctaacttcatcaacatttctatgtcaagtatcacatctaaagttaaatttctctctctctctaagtgtatattgatttcaccttaattagtttgttgtgcatatcaactcattttcttgtctcttcttgcttaagtggtttggtgagagtgagaaatatgtgaaaactggtttggtgagggtgagaaatatgtgaaaagctgattggtgagggtgagaaactaacacgggtgtaanaataactatcatagtttcttagacatactacgacgattc

SEQ ID NO: 81254 - DNA, 279 bp, Glycine max
attatcataatatatgattgtctcaagtaaccacaataatagtatgtaatctcattaaatttagaaatattagattaaaattcaattattggctcttttctatttacaaaatttattattcagtactattatatagttcatcgtactaacaatattaatctctctgtttcatgtcactactattactgtttcatgtcctacatattattactattgactattaagatttattataatattctgtactgtctaaacgatataaattcatactttctaaac

SEQ ID NO: 81255 - DNA, 167 bp, Glycine max
aactgcctttacatgtcaccccgttgaaaatagacgatgacgtgtattttccattttgcatttgagagatggtcatgcaacatggtagacacatttactcgagtcccagttttcgctaatcttcagcattgacttgtctagtgaatagaaggtgtattgtggttttt

SEQ ID NO: 81256 - DNA, 189 bp, Glycine max
  unsure (1)..(189): unsure at all n locations
gctactgtatgttgcacctgctgtacctgtggaaacataaattgataccgaaggggcgtatatcctccttctatattagatctgaggaagtaagagatacgaaccctttntctataatatttttctcacacaaggtaaaccatactcaacaagcgctatggagatataacttaaaaactgtcatttcta

SEQ ID NO: 81257 - DNA, 81 bp, Glycine max
atgctactcatgtcagagcaacatgactcaactaccacttcttggattatatgactggcagtaccagctagttctacttat

SEQ ID NO: 81258 - DNA, 204 bp, Glycine max
  unsure (1)..(204): unsure at all n locations
cgacactgcaaaacgcggcactctgttctctacaacactcttctatcaattagctacactactatctaacttcacgactctacctaacaatagccacaatatatacttcacactgcatccgtgagatatcacctaatgtgatctccacacacacacacacacctattatatgtgtgccancaacatcgtctcacatcacagaca

SEQ ID NO: 81259 - DNA, 219 bp, Glycine max
aattattactcctctactatcgactgtactccttaagattagaagtgctatcttaatgctaatcgaggcttttaacgcatctgtgcatctgctgcgaattacttagtctttgtcctacctggcaaacttttagctcttctgatagaatgtactgcgcttctgactaggttaaatctttaccttaaatcgtgcttgagtggtgaatatgccgcccataac

SEQ ID NO: 81260 - DNA, 227 bp, Glycine max
acatctaagcatgacacctgactatctgaacattcacaactctcactacagcaacgccacaatatatacttcacactgcatccgtgagatctcactaatgcatctccacgacacacacacactattcaagtgtgcgacacatctctcacatcacaacaccaacacacatggcctccacttctgaactgagcatattaactcgttacaaacaactctcactacacata

SEQ ID NO: 81261 - DNA, 259 bp, Glycine max
  unsure (1)..(259): unsure at all n locations
agtatctttatctaggagtgtctctaatctgaggtcagaccctgctgtaagcttacacttgggtgctcctgaaaggatttctctatattcactgtttaaccatcgaatccttgcaatattgtgctactcattcacctaataatatctgactaatgattcaacaactcactgttgatactatngcctgactcgatgctttttttgcaccctacacttcatcttctttgcaccttaaccaatacctttctctctatatcct

SEQ ID NO: 81262 - DNA, 86 bp, Glycine max
caatgttcctgttgtttggctactccaactgtgtatattctaatatctaacctattgacatcattcatgtgtttatttgctttctg

SEQ ID NO: 81263 - DNA, 217 bp, Glycine max
  unsure (1)..(217): unsure at all n locations
tgaacatatcggctgctttgactctgtagaatggtttgctaatgaaatgatcagtgctcataccacattattatatgaaccacaagattgtctttgagctagacgatcttgcttgttactgtgtgggtatgataaaagctacaatattacttgtggacactcttcttgagcaactttggacttgaatggactgaactgtaagtngatgctcgctaat

SEQ ID NO: 81264 - DNA, 323 bp, Glycine max
ctgctttgacctgtagaatgtttgctatgaaatgatcagtgctcatcgccattagttaatatgagccacaagattgtctctgagctagaggatcttgcctgtttactatgtgggtacgttataagacctacaaatattaactctgtggagcaactcttactctgatatcaaaccattgtggacttcgaatgtgactaacttaagtgatgctgctaatattcaacatgggggtacatgtcgaccattatgcagagctatttgtcatgtatcaaggtgactttatatactcagcaacttgcagccctactgttgtctattcttac

SEQ ID NO: 81265 - DNA, 89 bp, Glycine max
  unsure (1)..(89): unsure at all n locations
gacacaagattacacttatgattattatatcatacgttgcgtcatgtgcacaatgctatctgaccttacatcanggatgtctacttgta

SEQ ID NO: 81266 - DNA, 287 bp, Glycine max
  unsure (1)..(287): unsure at all n locations
acctccactctgcttctacctcttatcccttatctacaacactaaggtctctggtagctactactagacgacgcactntctanggtngaacatctacatggctcacacaactgcatagatcatatcaagcngtactgaagctcatattcgaatcacatcaaacttattaacatgctaacttcaaactatgtctccactaatggaaacattgaatcccagcttatcagcacaacttgcatagtaggtgaactatatattgacgcagtttgaccaccatacagggtcca

SEQ ID NO: 81267 - DNA, 106 bp, Glycine max
tcttatgactttacaaaggtttgtggagagtacctatccactatgaaaatcatcttcctgtcttaattatctgccatctcctcttctgggaggagaaacctatact

SEQ ID NO: 81268 - DNA, 244 bp, Glycine max
  unsure (1)..(244): unsure at all n locations
gcgaaatgacaacatggatgttttactactaattatgacatgctcacatcaaccgacacaagattacacttatgattattaatcataccttgcgtcatgtgccaatgctattgaccttacatncaggatgtctactctgtatgctattattttaatactaagaactctgtacccattatgttacaagctacaaaccacatctcattacaaagaagtgctccntgcgattgtgcacactactcta

SEQ ID NO: 81269 - DNA, 81 bp, Glycine max
atgtgccctcagagacatctttcagcgctgcaacaccttattgctcctgcctatggaagggtcgcggcatagcgcgtaaag

SEQ ID NO: 81270 - DNA, 211 bp, Glycine max
tcactctgaatctgactatctacctcactctttattaagtgatcatattcgagcgaaggactgccactcatactgcacttgtgttagatcgaaattggtcaagaaaatatgtgagtcttaactaaactatagccgccaactcctgctatttttctataatatgtccaatgtcatttgcattttaacttctctgcgctgcgatcccttctca

SEQ ID NO: 81271 - DNA, 151 bp, Glycine max
  unsure (1)..(151): unsure at all n locations
gtccggcctgtattgctggtctgagtttggaatctgactttgaactctgagaagtttccccctttatactctctgagtcttagacanactggtatcctcctatcagtcctggggatggttgcccctttgagtcctgcaactgaaaaaagct

SEQ ID NO: 81272 - DNA, 93 bp, Glycine max
  unsure (1)..(93): unsure at all n locations
tacagtatacacacacacaacttngctanggagcagtgctgcactcactaatgcttgacccacagtctgctgactagttactcacatgagaca

SEQ ID NO: 81273 - DNA, 141 bp, Glycine max
ctcttcgaaggatccaaactcacaattcggcttttattatacactctcttctcctaatcacaagaaagaagactgactcgaatagactctttgtctacatcaatcagttagatccccagatagctagtctacacttctgtg

SEQ ID NO: 81274 - DNA, 221 bp, Glycine max
taaactcactacattttagatcttaacaaaactttattgctataactctaattttggcgtactttataatacataagactaattgttcctcttgtcatactgattctagaaatacatgcactcctggaaccacaatactttgactgtggaaggcacttgcatgctgatgtatctcagactgatgcaactcttttctaataactagtgctaattttcactct

SEQ ID NO: 81275 - DNA, 228 bp, Glycine max
  unsure (1)..(228): unsure at all n locations
tgggcgacaacctctgaggcagaaactttaaggaagatggctcacattgtaactactctcttagtaacggtctgagaaaaaactgttttccactagagcangactgcccagttccttcttggggacactaaaaaacaatgaacatggtctgcgataaagatagacgtggcgtatctagatgaatactcaaaccagccaggtggatcagatgtctatacaataaaaggc

SEQ ID NO: 81276 - DNA, 107 bp, Glycine max
ctctgcgaaattcgcggtgaatgcaggtaaatccggtttatcagcgatgtttatccctattatgagacatagaagcgcggctcgctcttttagctacgcgttcacgc

SEQ ID NO: 81277 - DNA, 206 bp, Glycine max
ttcaaatctccgccacttatggtctatgcttcagcttttgtactgaccatacaatttcacaagctctcttacacttacttcatctgcatctgatcaagatataggccatgcacacctcaaaatctttcttctctttaagataaacacgcctgtggagatctaccaagggtgctgggtaactgaagatacaatcgactctcacgtct

SEQ ID NO: 81278 - DNA, 327 bp, Glycine max
  unsure (1)..(327): unsure at all n locations
tcgttgctngacacatcatctctctctcttctctcatagactcatctcattatcaccttatgacgatatccgtgttataactctcatatgtgctaagctgcttgaatgcaagccactcatatagatagactgctctaacacaataacgacaacatatgtgtgtgaactaccctatgatccatatgtgtttatgaccttgctacattatcctgattagcataaattgccacaacatcatggagagtacgagtacaaagtagttagcaagatattatcatagcacttccattctaagtttactagtaatacattttattcacaattttt

SEQ ID NO: 81279 - DNA, 372 bp, Glycine max
  unsure (1)..(372): unsure at all n locations
tctattggcgaactctattattcactcagngctcgtatcttctaatgagatgtattaacatatcgttgtagacactatcctcttctcttctctatatacttatctcattatcaccttatgacgctattcgtgttataccttcattgtgataagctgattgaatgcaactcctcatctagatatactgcattaacaacaataacgacaacatatagtgtgtgaactaccctaggatccatatgcttttataaatctgcttacattatcctgagctagcatcaaaatgccacaaacatacaatggtagagtacagaagtacagaagcactgtagcatagataatcatagatagcactctgacattctaattttt

SEQ ID NO: 81280 - DNA, 152 bp, Glycine max
gcgctgaagatctgggcatgctattgggtcgcttaattctcctctggcattgaactatcgggttattctctgtgcaggtactccttcattgcgtgtgactactccacaacatctgctctatgcaacgaatgccgagttatggatctaaactg

SEQ ID NO: 81281 - DNA, 246 bp, Glycine max
agcttttatttaagctgaaccattttatcaataaacacaagttgagttttattcagaaaattagagtttatctcttttatcttagtgagagtgattctcctaaattcttgagtgattcaagaacaccttggctgtatcaaaggactttcacaacctttgtgtgttgccctcgctggaaagagtgattctttccttcctttcatcatcacccttgttctttcaaaccacaattccagaaaatccacc

SEQ ID NO: 81282 - DNA, 200 bp, Glycine max
tctttcccgaggaaaaacctgcacaagggaaatattagcgtttatagcgcgaacaatattatacgtaagtttgcaacactagccggagttattgtataatgaggggagggtttataaacgtttaaaaccaataatatgacgacgcctgacggacaagaatttcaatttaataaagctttgttttaattcagatgaataaa

SEQ ID NO: 81283 - DNA, 245 bp, Glycine max
agcttttagtctattcaaacgacaataactttttactccgatgtctgattgagtcccttcatatatcgagacgctcgaaattgaatgttgaagctctgagccaattcaaacgacaataactttttactcggatgtctgattgagtcccgtaatatatcgagacgctcgaaattgaatgttgaagctctgatccaattcaaacgacaatacctttttacttggatgtctgattgagtcccgtaata

SEQ ID NO: 81284 - DNA, 239 bp, Glycine max
  unsure (1)..(239): unsure at all n locations
agcatattatcatttttatggcgcgggagggtccattgatcaataaccaatgactaggtacattaagcacctgaatcggaaatccaaatgaaaaggtataaccatgagaatatgtgaaaggattccgcttgcaaaattgaaaaagctccgtaataggggggcctgaattggaactncccgtgaaaactaatgaccaattgaaatttttgggaaattaaggagttaagtttaaaacggtt

SEQ ID NO: 81285 - DNA, 243 bp, Glycine max
agcttgttttttatccatctaaattccaaatctctctatgtacttgacctcttaggttgttcttctctcaaggaattcacggtgacatcagaggaaatgatagatttgatgttatctcacactgctatatgtacattgtcatcaccaattgatcacttattgtctttagaagtgttagacctaagtggaactaatgttgagatcttgcctgcaaacataaaaaacctttcaatgatgagaaag

SEQ ID NO: 81286 - DNA, 242 bp, Glycine max
agctttttttctttttaaaagaatgaagctttgataccacttgttagacaagtggcttcagttatcttaagaaggggggttgaattaagatacacaagctatcccccaattaaaatttaacttcttttttattaacaatgcagcccttattatgaattattctaagaacaatgcaaaaacaaacttctttaaagcaaaatataaacaataataaataacagaagtttaagggaagagagaat

SEQ ID NO: 81287 - DNA, 276 bp, Glycine max
cggggatcctattagacacctgcagccatgcaagtttgtgttgaaaaagcgaaaacacggtgggaatagcagagcccattttaaaaccacacaagccaaacgtccatcggtccatatatttgggcttgtaataaaattcaaactgacccgaccaactggattttaaaaaaaaatctcaactcaaactaagtaactaacctaccgaagttggattggtttgtcaaattgagtgtattctttaatttttactatttatgacactgtcattgtctcttt

SEQ ID NO: 81288 - DNA, 221 bp, Glycine max
agtttttttatcctgaaagaattatgttgttgaaatgttgccttggatgtttttttatgatcgtatgggcaaattgtaatatttaccccgtcacaatttttggggttttttttacttttggatgggagaacgtggtggaaacttaatttttcgtaaaaaaaatttgtagtggaaaccaaaccgggttttttctttttggataaaaggaaacgttgtttttt

SEQ ID NO: 81289 - DNA, 239 bp, Glycine max
agctttttaggtcgggttccactcccctgaaagatacaaagtgtccgaggtattcaatgcgtcgctgcccaaaaatgcactcggatgccttcagatgaaggcactctgttgaagggtctgaagaaagcgttcatggtggtccaggtgagtctggaaattgcggctatatattaggatatcatcgaacaaaaccaatacgaattttctgatgaacgactgaaataaatcattcatggtgg

SEQ ID NO: 81290 - DNA, 136 bp, Glycine max
acactggagtgtgacagcggaccgctgagtgactggtgcatctgtggctgtgatacttattctgcctcttctactgaagtgatatgtacttattgtgtacaaacttttgcgtatggaactttattagttctacaag

SEQ ID NO: 81291 - DNA, 242 bp, Glycine max
atttttttaaagcatatatattggtctctatacatccaagggtaatcataacaaaaatttgactttagtgcaacttaatcaaaaggaaaatcataacaaaaatctccccatcttttattctcctttgtgcttcaaattcaacatgaatgtacattaatgacgaggatgaaaagcattatatataaccattttcatcaaccaaaaagattattaccaaaaaggttgtacggagagaggttaag

SEQ ID NO: 81292 - DNA, 241 bp, Glycine max
attttatgcttcggatggtagctgaattgctgtcatccaccctctatcttcgagcggggatcatattccactcccaatgcccagtttatcgataaaggaagcctacaattttcttaacccccaattttactctccatattttttcttacaattttagtctcctattttaaaaaatttacaatgttgttcgagttcttaatttttcattaggggtgaatatatggatctaagttcgcggatt

SEQ ID NO: 81293 - DNA, 238 bp, Glycine max
  unsure (1)..(238): unsure at all n locations
taatcttttttgganaatgggggnacccattacatgtggtactaggtggcggtcgggcgatggtgcacaacaagtttttcacattcacaatgcgcgcataaacccaccatcccctgttgcccacctccaactgagctcatgtactcccacgtagcccatatcctcgtttctctcaacaccgggtccccatcaatcctctcaagcttccccaacatccaagcaaaacaacatttaaacc

SEQ ID NO: 81294 - DNA, 80 bp, Glycine max
cctctacagacatatagtacatcggatgttctcatctattgagcgatgactattgctatcctgtgcatgatggttggctt

SEQ ID NO: 81295 - DNA, 242 bp, Glycine max
agcttgatgtttgagctgacccatttgctgccctagctcttgcaaaccgacaacttctaggcttttgattttgacatgataaaatcttttcttaaaagagggtacttgattcgatcccatgtttttgctagaatgaaaaactctgttgatcaatacttcagcaccctatcatggaggaaatataaatgaatgcatgagggaatgtttatggtatgcatgacacaaatgcattttacagacac

SEQ ID NO: 81296 - DNA, 245 bp, Glycine max
agcttttatttatgctgaaccattttatcaataaacacaagttgagttttattcagaaaattactcttatcttagtgagagtgattctcctaagttcttgattgattcaagaacaccctggctatatcaaaggactttcacaacctttgtgtgtttccctcgccgaaaagagtgattttttccttcctttcatcttcaaccttgttctttcaaaccacaattccagaaaatctacctctgcccaa

SEQ ID NO: 81297 - DNA, 238 bp, Glycine max
agctttttttttttgatgaactttaatttcaaacaaatttactcattttgaacaaggaataattctcaattacgaaaccagaatatgatcttgcttaactagcttaattcacgattgagtgattattgaattagcattttaaaagattattttaacataaaaagttttgtgaatattaaagattacgtaggaatattatgatttatcatatttctttataaaactcttcattcaaacc

SEQ ID NO: 81298 - DNA, 238 bp, Glycine max
  unsure (1)..(238): unsure at all n locations
agcaagacattatattgnagnaaagacccactaacctataattaaaataacttaatgccattaacctatggaattaaaacaaacttaatggctgagtgtaactgaaatggtggcatccaaaagtcacccccaacagccaacaagtcagccaccatttggtctcccaaaaggctgatgcctaaggtgccaattgggcccttattacaactggaactaaagctaactaaagcccttttaa

SEQ ID NO: 81299 - DNA, 96 bp, Glycine max
ggcgcaggcacattcatccagcctaccctcctggcaccatactagctccgacatctgtttaacgtcatactcagtccaatcagacactacgcagtt

SEQ ID NO: 81300 - DNA, 243 bp, Glycine max
attttgttttttagcttgagttgtaaaagccaaaagtgataatgacttatacttataacttgttgaagttggtggaacttggtggttaaccaaaagctagtctcaatggtagagatgactagtattttaatctgacttggggtttgaatttgattttgtctgaaaaactcttttaattttgcaaaatctatttctatcgtctaaatctgttttgcgaaaatctgttatctacgttgcacaaat

SEQ ID NO: 81301 - DNA, 242 bp, Glycine max
agttttttctttctggaatcatttatcctatctccgacaaccaatgggtgagtcccatccaggtagtcccgaagaagaccggcctcacagtgataaaaaataagaaggagttgattcctacttgggtgcagaatagttggagagtctgcattgactataggaggctgaaccaggttaccaaaaaggaccattttcccctgccattcattgaccagatgcttgaacgcctggtaggtaaatct

SEQ ID NO: 81302 - DNA, 239 bp, Glycine max
  unsure (1)..(239): unsure at all n locations
agcttttatagtgctgntaaatttcctttttggattctgtgcatttgggacatgcaaaatgcgcatccaaacacacttttggagtccatgtttttccacattcaggctcaacttaagttgatattacttaagttgatattaaaagcatgaaaaagaatatttcagatgcatgtttggaaagcatagttcacaacttcacgagaagagagtattcaaatgaaaaaggtttagttagatag

SEQ ID NO: 81303 - DNA, 239 bp, Glycine max
agctttttttttatttacattggtgtttgtatttatgggaggaggttatatgccatttttgctttaagagtaatgtcccactggtaaaactaactttccaaatgtttgccttcgcaggaatggccccgaggaagcttgcctcaaagaggtccaggaaggacaaggcggccgaaggaactagttccgccccggagtacgacagtcaccgctttaggagcattgtgcaccagcagcgcttc

SEQ ID NO: 81304 - DNA, 238 bp, Glycine max
  unsure (1)..(238): unsure at all n locations
agttttttcttcctgncnggnnacagaaagatgcagattcatccaaacaaggtattattgttgaagatgaagacctagagttcgttcctggccaatttaattactgttattttgatgattaattaactgttttcaagtttaactacctctgctatgaatgccaaattaaaattgctatcataatctaaattccaagtttgcaccatgctcagtattcttattcttattcccagatttg

SEQ ID NO: 81305 - DNA, 224 bp, Glycine max
agaatcaagatgcaatagacactgccatagttggaatgttggctgatcccaaagaggatagtcattgatatattattcactgcacttcttttgatgacatatatttattagctggaagcctctaactataatctgcagatcatcataattgttctggtatttaagtttgggtattaattttgttgtctaacttactgctataaaggctcggcttggtatccaag

SEQ ID NO: 81306 - DNA, 237 bp, Glycine max
  unsure (1)..(237): unsure at all n locations
agcttgtttaattnntacagaattgaagagggtgtgcctgtttatagggggaggtaccaatggttggtagggaggctaatatacctatcccatactagaccagacattgcatttgccataagtatggtaagtcagtgcatgcactctcttatagaagaacaccttaatgatgtcgattggattttatggtacttgaaatccactccaagcaaacaccttttgtttaggaaaaaatga

SEQ ID NO: 81307 - DNA, 243 bp, Glycine max
agctttttgaatattggcctcaacaagctttttattcacagaaggaaattcaataaataggcttcctatttttaatggagaggggttaccactactggaaaacacaaatgcaaatcgtcattgaggcaattgacttaaacatttgggaagccatagaaataagaccttatgtacccactgtggtggctggaaatacaacaatagaaaagcctagggaaaattggagtgaggaagaaaaaaaac

SEQ ID NO: 81308 - DNA, 285 bp, Glycine max
atattattgtccaagaacgtctttaatatactgtttatgtactataagacataagtgtctgtatgtctagcctagttgtgtacagaggggagattgatggacaacataatcttatatggatgacatgactatgcggacgactagctaatacgtgcctgcggcgtttagctcttaagcagagaatgatctgaataaccctacgtctggaaggagaagcatcaatatgtaaagacaccttacgcagattatttgctgacttattgctaatcgtggtggcctggcctt

SEQ ID NO: 81309 - DNA, 242 bp, Glycine max
  unsure (1)..(242): unsure at all n locations
agcnngtttttactttttccccgcnnnttatgatgacaaacctgaaatcaagaaacacatacacattctttttcctagccgatcactcacgtaattctccatattctccccctttgtttttgagtttaagcttcacttgaaattaaattaattaattatatgaattcttgatttaatccctattttctctccccctttggcatcaacaaaaagccaaagtgcgtaaaacatacatgatttta

SEQ ID NO: 81310 - DNA, 241 bp, Glycine max
agcttgtttgtagagttaagtgactactatggagggaggcataggtcccatactatacttcactcccaaagaagagaaatagataaaaggtctcaagaggtttgcattagtgatgcaatcctaccccacaagggcattggatagaagactccaagtagattgggccaaagatgcaagagaaggccttagggttcttatgagccttagggtagatttcaggcccatgggctaagtacgaacc

SEQ ID NO: 81311 - DNA, 121 bp, Glycine max
atagttctctccaaatgattcatatgttataacactagcactctactgcatgacatgtcaatatgtactccttacttatagcagtgttattcacctttggcttgtttaacacactctcttc

SEQ ID NO: 81312 - DNA, 241 bp, Glycine max
  unsure (1)..(241): unsure at all n locations
agnaaagtttttcttaccttcttggatttgtagtcaccctcttctcatatatatatatatatatatatatatacacattaccaagttgtttcaagaataattctactgcacaatatttttttcctgcaattgtagtaacgacatttttactattggaactcaacaaatctttgtatttggtggtcagtaggctaaattactcgatatccagataatcttgtaagaataattaagatagtat

SEQ ID NO: 81313 - DNA, 227 bp, Glycine max
  unsure (1)..(227): unsure at all n locations
agcttatatatgtgggttggtttgtgctcgcgcgcttancacatatctgaatcgcttaccgcgcataagtggattatggcttatcacgcttctctcgcttaacagatgagctgaagctgtgcacttggtgacttggagtggtgcgcctatggaacctgacacctaatttcctcccggatccttcttcgggcttaacccctaagggccctgctgaaaaaaggctcgct

SEQ ID NO: 81314 - DNA, 212 bp, Glycine max
  unsure (1)..(212): unsure at all n locations
agctttttaattgatgaanncttcaattgacgatcaaaatttctttttgaacatccacttgcaaccctctagtaaatcccaagtatgggtcttctgaaagggaacccatttctttaattctaaggcatggccccctcttaaaatccaaaacaaaaggtggttccctaaaaaatggcgggtcaaaaggaatggattttttcaataaccggaat

SEQ ID NO: 81315 - DNA, 241 bp, Glycine max
agcttttaacaagagtcttcacaaataactatcatgaagcagaaaactaacaaaactacccatcatatctcccaaaaccctatacccacgaaaatcaaaggagaaagaagtccacccaaacctgaaatttcgaagtcccactcgtagacacgcacttcacgaccccgaaaatgctctcctttcacgatttggggcagaaatgatggccaaaggttgaagctttgtttggagcttcaatgga

SEQ ID NO: 81316 - DNA, 238 bp, Glycine max
agcttttccctttttctgcttctagagctcttttccctaaataggcactatggctactctggaattttgtgccctggccattctgtacaagtgtgtagaagctaacatagaaggtgtaccctaattctacacaagacaggctttaaataggctctgaattcaaaacgttgcgcttagcgccaccctcacgcttagcgtgagtaaggggaattgggcttagcgccagtctcgcgcttac

SEQ ID NO: 81317 - DNA, 236 bp, Glycine max
agctttttattgagtctctgggttggggattagttcctcaaggtctgtctccttcactattgcacaccacacaattacccctttactttcttcttttgttttgcacactaattgtatagacatacctttcggttcttgttggttaaaggtagagctttgttgtgtggaagttttttacagggtataccatatcatcaacacttgggtattggaagtatttgtatttgtgataaaat

SEQ ID NO: 81318 - DNA, 234 bp, Glycine max
agcttttatcaaattcaaacgacaataaatttttactcggatgtctcactgagtaccgtaatatattgagacgctcgaaaatgattaccgaagccctgagcaaattcaaacgacaataacttttttactcggttgtctgattgagtgccgtaatatatcgagacgctcggacttgaatgccgaagctctgagcaaattcaaacgacaataactttttactcggatgtcggattg

SEQ ID NO: 81319 - DNA, 237 bp, Glycine max
agcttttatagaaataaatccaaataatgaaatacagggatcatcaaagatttggtcttgccatgccacacatggatccttccatactcatgttcaaacaattcccaagagactaatattcttttcaaaacttatttacgattattaatttaactgattaatcagagctgagaatcttactctgttaaaagaccaaagcaaatgcaattttctatgactaatctattaaactgataa

SEQ ID NO: 81320 - DNA, 53 bp, Glycine max
agcttgtttaaccattatatgtggggaccccctatgggaaatgggaaaaagaa

SEQ ID NO: 81321 - DNA, 241 bp, Glycine max
  unsure (1)..(241): unsure at all n locations
agcttgtaattttgtctagttttctttacgttgcttattaagacaccagatctagtttggtcatcacgttgtctaattttctttacattgcaaatttcactgcttgcacaatttggactatttcttgggtggtttgtcaagttgacctcttataatattgngtcccacaggccaatcaatctgcatctaggcatgatggtggtagtgatgtatgctttgggagatttcctaacacgttata

SEQ ID NO: 81322 - DNA, 241 bp, Glycine max
  unsure (1)..(241): unsure at all n locations
agcnaattattaatatgaacaancacaaaccaagatatttcaatcatcacacatgctatgaataattttaaaactaagaaatatagactatatagcatatctaatggggaagaacataactaaacatttcaagatggcaaacatgcaattataaatcccaaatgtaatacaaattccttgtgaaaagtgacattcaaaaagacaaaacaccaacagtgtttacatgtttattgccgtgttg

SEQ ID NO: 81323 - DNA, 240 bp, Glycine max
  unsure (1)..(240): unsure at all n locations
agctaatatgtttattctncgnaggaggaagagaatgatagatagagagataaattgtcatggaaaattgaaggaagaaagggagagaagttgaacttgaagggtgtctcacaagactctcattcatcaaagttgtgataagtgttagacatgtttctattcatttcatgtgaatctaagaggaatattccaaggatttgccaaaggcccattaccatatttcaagaatatgccaaaggc

SEQ ID NO: 81324 - DNA, 239 bp, Glycine max
agctattatacgcatgtgatcttttggcatcatcaaaacatcggctagatcctttgtctacacatccaccgtagataaacaggaccacaacatttgatttctctgaccagatgcacaatcaagtgaatcatgatgtcaaaaaaagcagggggaaaatacatctccaactgacacagtataattgcggcctcattttccaactcatcaaacatgactggatcaatgactttgctacatat

SEQ ID NO: 81325 - DNA, 127 bp, Glycine max
cctaccgtgtccctaacatttctattcttcccccaacacacctaaatagtctcgccttttacacctcaactaatcaatcttcaacatatctatcagtacttcttatgaatagcacagacacattcaa

SEQ ID NO: 81326 - DNA, 154 bp, Glycine max
  unsure (1)..(154): unsure at all n locations
agttagtatttgattaancacactccgcggttttttagatcacttctctcacaaaaaactgcatccctcttaccattctcttaccgggtattcacacccggcgcacacaagataacttgatgagagagaccgaaagaaaggggcaaaaaaaaaa

SEQ ID NO: 81327 - DNA, 241 bp, Glycine max
  unsure (1)..(241): unsure at all n locations
agctagtggtttgagncnagacgccagacactgatctatctcaaaactcacaaaactagccatctgaagatgaacatgcctatacaccacgaaactcatatgtgagacatacacaccccactataaaaaaataagtgacatttaaaaacaatcgctaatcatacccgggtggtgcacaaaattcgcgagtggggagtaaatggaaggccatgagacaaggcttggtgtgaagcgaaaggat

SEQ ID NO: 81328 - DNA, 217 bp, Glycine max
  unsure (1)..(217): unsure at all n locations
cagcaggcgcagcagaaagaagagttctagatagaaaacanagcaanggcaaacgggataaaaaaaaagcccccacaaagaacgccaagagcccaacgaagaaagcggcagggacaaccccagcggccaaagacagaaaaaacgcaggaggagacaaacaaaacatgaaagagaaacacaaccccgcagcagaccaagcgcgaaaacacccccgaaa

SEQ ID NO: 81329 - DNA, 239 bp, Glycine max
agctttttctttgagatgaataaggctgccatatagatagagagaacgctttctcaagaatatgatattaggatattaatttgttattcttgtgagtgtatgaagaaactagaattggtttccatatggtatatgatggacttgttctggggacagtactaaaaaggagaagggtttgaggaagaagacataaataggaaatttaacactctcaagaatcaagagttttcttgaagtac

SEQ ID NO: 81330 - DNA, 241 bp, Glycine max
agtttttttataaagaaaagcttgtagtgtagtattgaaaatacaattttttagtcatagactcatgtagttactaacccttatgtaaatgcagccattaacaggatatggggtttctaaagtccttgaatctgaacaccaagattataagaaaggtgacttagtatggggaatcactaaatgggaagaattcagcttcatcccctcatctctaatacatttcaaaattgagcacactgat

SEQ ID NO: 81331 - DNA, 239 bp, Glycine max
ttattttgttaccaaatgttgtagtaattggctctcatactctgcttgacaatcggaaggagaaggtactgtctcattattagatcgtagtgatctcatgattggaggaatgtttttactgctgtatttactgactgcatgattatgtttccagacccaacctggtggccttctgtttaccaagtttgggagcaatcaaacagcactacttgatcttgcttttccggtataaaaaccac

SEQ ID NO: 81332 - DNA, 237 bp, Glycine max
  unsure (1)..(237): unsure at all n locations
atcttttataaaacatcgangtcgagtgtatactatttttcttccatgtacgtagcttatgtcttcttcacagataaggcatgcacgatgacccttaacactgtagccactcaaattcccatatgctggaaagtcattcattgtacaaaaagcattgcacacaaatcaaaagtcttattttgaaacccatcaaacactaaaaccccctcgtcctataactttgtcaagtcttcaatc

SEQ ID NO: 81333 - DNA, 240 bp, Glycine max
agcttatgttgatgaaccaagcaattttgatgataccaaaagcccaagtgattgattcaagacttcaagatcaagcattaagaattcaatccaagattcaagattcaagagaagaaatcaagaagcaacaaatcaatgttggatcaagtggcctcagaataataagacggggggtggaactagttatgaacgggtcttggataataaaaaggggcattttattaaggccaataggttcaa

SEQ ID NO: 81334 - DNA, 180 bp, Glycine max
agcttttttttcttgttattgattgtcactttttggatggaaggatggactgatacaaattcgcattgatataggaaggggtaacagattgttggatctaaatatgagaaatgccatgcgtcataccttaatttcgtccgaagattattatttgatgatatacaacctttgattggccgc

SEQ ID NO: 81335 - DNA, 241 bp, Glycine max
  unsure (1)..(241): unsure at all n locations
agctntatgttactttttcaatgtcatcctagtttccaccagatggttagtgtttgtgcatgctcactgatattgcaagatcactgtaatattgatttcccagtcttgtttgcaacagattactttgtcatttttctctttatttttcctcatttgttctttcatgataatatgggcaagggggagccattgactgggttgggtggattaagccaggaccattgcaatattatgcctgatg

SEQ ID NO: 81336 - DNA, 241 bp, Glycine max
agcttcaactttataccacttccagggtgctggaactacttcacatggatttgatggggcctatgcaggttgaaagccttggaggaaagaggtatgcctatgttgttgtggatgatttctccagatttacctgggtcaactttatcagagagaaatcagaaacctttgaagtattcaaagagttgagtctaagacttcaaagagaaaaggattgtgtcatcaagagaatcaggagtgacca

SEQ ID NO: 81337 - DNA, 243 bp, Glycine max
agctttttttttataaaatttcagttatttttgggattaaattgttagcacttatcctttaattgtaataattttcttataaactacccttaaatctagttggttatatatattgtacatttactaatatttttgtttaaatatgaaagattcattcatgattctgtaggttttgatggttgtttgttaaatctagaaataaagccaaaaggaagggcaaaatgatcttttcatgaaggtttc

SEQ ID NO: 81338 - DNA, 237 bp, Glycine max
  unsure (1)..(237): unsure at all n locations
agctttttttgttgggncactcattttaattcactattatgattaggaagctaattaaattatggacaagtatgtgcaagggattctttttgttgtctagtttgaacatgtgttagtaaattgattagttctctttgttttgtgatcttctaataatgggtgataccattttcaaaactagacacataagtctttctatggtgataatgtttatgaaattccattgaggtatgatta

SEQ ID NO: 81339 - DNA, 241 bp, Glycine max
  unsure (1)..(241): unsure at all n locations
atttttatatatgtttgnatggcttgaaacaagcaccgaggcagtggtacaagaagtttaatgagtttatgagcaactcaggattcaaaagatgtgacatggaccattgctgctatgttaaaaaatatactaatagttatgttatccttgttgtgtatgttgatgacatgttgattgcaggatctagtatggcagaaattaacaggttgaagcagcagttggcagaaaactttgaaatgaa

SEQ ID NO: 81340 - DNA, 239 bp, Glycine max
agctttttctttacgagtcagtttagtcaaaggtaaagctaacttggagaaaccttctatgaatctccggtaatatcctactaagcccagaaaactcctaatctcaaaaacagatttaggactctcccactcaagaacgacttctatcttagagggatctacagctatacccccttgagatatcacgtgccccaggaaactaactttctctaaccaaaactcacacttggacatgcagc

SEQ ID NO: 81341 - DNA, 239 bp, Glycine max
  unsure (1)..(239): unsure at all n locations
agcttttgcttttgttnaagcccatttttcttaatgatgcctatgaaatgtgcagaaatatttgcgcggaatatgccaagaccttttatctaggtacgtagctacaaagcaaatccactattttcttaatttgtgttactgctatttggctgacacaacccattaattctaaattaacaagaaacttgcttatgacagaagaaagacagaaagctatatgtgcaatttatggtaaatta

SEQ ID NO: 81342 - DNA, 239 bp, Glycine max
attttattatttttaaagcaggatccgttttttaaagttccacttatttacttttcacttttatatattttgggtctttgctcttggtcttttttggatactttgagtatattgtgtttaaaatcttcttttcaatgctttgaagttttcaatatggagaagttaacaaaaatgactgctcaaggagatcgacttatttgtttctctcaatgaggacaggttacgggtcaatcaagcct

SEQ ID NO: 81343 - DNA, 238 bp, Glycine max
tagctttttccttaggttgttccatgttgctgctcccttatctttaacaatggtgatgaaccacattagcgattttggcgagtatccttcattctttcactgccacatcatgtcgtgcaggcttctgtggaatgatttggtggattttgacgatggatcaaagattcctctgttcttggagggatttaccatcgacatcaccagatctaatagggttctgattctcaaaggagttcta

SEQ ID NO: 81344 - DNA, 235 bp, Glycine max
agttttcaattcactctatgtacccgtggtggtccacattttgtttcatgtatttttattctcgttttcatttactttttatacccccttttgacgtgcttaagccatttatttaagtcatttctcgcttaatctaaaaataaaataaatttccaccgatcgtttggattgtatcatccgttaattttggttaaagtgaattccgaccgttcggtcgtgccgtaaccacgttgga

SEQ ID NO: 81345 - DNA, 243 bp, Glycine max
agcttttttttacacagcatacaaactacaagaattggatggcaaagtatttccaagaacatggaacgccacccacctgaatttctactttagttgacctaatgcaaaactagatgttattcttttttttcctactcaagtcttttttcccaaaagagaaaaaatatgggttttagcttgagaggttttcatgaggtacatctaagataacaaagggaatttgtactcaatcaaatacatttg

SEQ ID NO: 81346 - DNA, 244 bp, Glycine max
agcttgtttgtggggcttctatggaggctggatctttaagctttaatgaggtcctttaatggtgattttccaccatggagatgcagcggaagacaaaggagaagaggtgagaggaggcgccatccactagggaataagccatggaagaaggagcttcaccaccaagaggagccttggataagaagcttggagagggtgcttcaatggaggaaaagaaagagggagagaaagagagaggggggaa

SEQ ID NO: 81347 - DNA, 242 bp, Glycine max
  unsure (1)..(242): unsure at all n locations
agcttttcttatattnnagnaatgacccactaacctagaattaaaataacttaatgccattaacctagggaattaaaaaaaaacttaatggctgagtgtaactgaaattgtggcaaccaaaagtcacccccaacagccaataagtcagccaccatttggtctcccaaaaggctgatgcctaggttgccaattgggcccttattacaacttgaactaaacctaactaaagcccttttagttga

SEQ ID NO: 81348 - DNA, 241 bp, Glycine max
agctttttgtcggctcaccgatcaagtcggtgagcgcggcctcgatgttcatgtgcacatcctccctgtcagctctccaattgaactctccattctcaatgcgcctctctatttcatccaatccttggagaatagagtctctgtcaatctcgcttatcaaaccctaacaaacaaagaataatattaagtattcatgttcgaattagtagactgaatgctttcgaggttaccgaacctggtg

SEQ ID NO: 81349 - DNA, 169 bp, Glycine max
cttcacagcccgagtgagcattcgatccttactcgaaagagaaccgcacttttttcaaacactcagttaagactttgcagatacacttaatgcagacctaatcttattgataacaaccgtctaaaccttcacttatattctctctcctcgaactatctcttctacctat

SEQ ID NO: 81350 - DNA, 241 bp, Glycine max
  unsure (1)..(241): unsure at all n locations
agcttgtaattggatggnnctttagatagcaataatgatcatgtctcttttgcactatctaattttaagtgctttgtcacccattggtgtggagagtgatgcacgtatctcttttgcactaatttttggggatggaaaaggaaagatcactggatttcttaatcggcatggttctttaatttgaggaggatattagattaatgagacagaattttaagaagagaataatataattaaaaga

SEQ ID NO: 81351 - DNA, 240 bp, Glycine max
agctagttcaaatcaaatcactcctacattttatctctagcatgcattgcatgttgggctcgtcctttgtcacgggaagccggaaggtccatatcaccttcttaattgtacacatggggcactactcccccaaatgcgctggtaaaaagagataattttccgggctctcgtgtccgtaaaatgcattcatatcatgcatcgcataagcatctcttcataacatcataatggacatatcct

SEQ ID NO: 81352 - DNA, 159 bp, Glycine max
atgaacgacggtcatatgacatttttataagtcctgacgagtttccttgcgtctatacatgctttccagttgatggcatcgacgactatgctgatgctacagacatagctcaaatatcgagtcagatgaactatctcggtatctacatcacttatgcgt

SEQ ID NO: 81353 - DNA, 241 bp, Glycine max
agcttttgcttgatgcttcaactggtgggaagacctctctcaagcctccaagggaggctatagagatcaccgagaacatggatgtcaatgctaatgagtttcaaagtgatagagccatggttccatcaaagagacttcttaaattcaacacccaagaaggtctcttagcccaacaaaagttgctcggtaggaaaattgaaaaggttacactacaaattaccaatcttcctcagcagcccaa

SEQ ID NO: 81354 - DNA, 240 bp, Glycine max
atttatttatattcaatttcgagcgtctcaatatattacgggactcaatcagacatccgagcaaaacgttattgtcgtttggattagttcagagcttcagaattcaatttcgatcgtctcgatatattacgggtctcaatcagacatctgaggaaaaaagttattgccgtttgaatttgctgagagcttcaacattcaattttgagcgtctcgatgtattacgggacttaatcagacatt

SEQ ID NO: 81355 - DNA, 241 bp, Glycine max
agtttgtgatcagaccaagagcatgtaatcattaagcattgaaagaagcattgaacacacaaaacacaattaattagatatgaaaagtaattacatcaactgttcattagaaatccccaactagggtttttagccagccatacaagaaaccctaatacaagtgagacagaaaatacagagcaattgttgcttacacaggaaaggggatcccttctcctcttcttggcacctcacaatcact

SEQ ID NO: 81356 - DNA, 236 bp, Glycine max
agtttgttaattcatggaagctcctaatatctcccacactttttggggtgggccattattggatggccttgattttctcagggtccacttggaccccatttctaccaactacaaaacctaagaaaactatattatctacacaaaaggtacacttctctatatttgcatagagggtgtttttcctaaggactgaaagaacttgtctgagatgtcctaagtgatcatctaggcttcta

SEQ ID NO: 81357 - DNA, 70 bp, Glycine max
actctcatactgactgcaccctatagtcttgtaacacggtcctcaactcaataaaagtctcagacccttc

SEQ ID NO: 81358 - DNA, 240 bp, Glycine max
ttagctttttaaacccaaggtccagccttggaatacaagaaactgaaggtccaaccttggtaagcgctcctacagaaacccaaggtacacccttggtaagctctctcctttagaactacaacaaagatagtcaaaggtataggttccacaaggtaaaaggacataccactagactagttggcaagaccttcaactaggagaaaatcaaactaactcctcacaagcattaggggagaagct

SEQ ID NO: 81359 - DNA, 238 bp, Glycine max
tagtttgtccaagtgagctggttgcttaatgttgaaggtatcatctcacccatgcaagctagttgcttagggctgaagaaatttcatggcccaggcgaacgagatgctagcctgggcgagtttaggtctagaaaattctaggatatgaccattttacccctttccttatggctttttgtttttggatctgacaatcaactaccaaaccctgagtgaccctttggacttgtgctgcaac

SEQ ID NO: 81360 - DNA, 242 bp, Glycine max
agctagttttttttttgcatacaagccgatgaccaatcgttaatgctacaatttggagatatatcaactcaaaatggagataggagaaaatctactcgggcacatcaaacctattcactattcgagatatatttcttgaactatccaacacgtaacatacttatccttttacatataaattacattattaaatataaaacactatcatttaatttttgctaacatagactattgaattatta

SEQ ID NO: 81361 - DNA, 239 bp, Glycine max
  unsure (1)..(239): unsure at all n locations
agcttgtctttaagaaactnggattagcccaggccaacagttaacgtcaatttggcgactgggaaatgatcagcctaccccaagaaaaagttccccacttttttaggggtggaatttgagaaaaaaattccattggccattggcattggaaaaaagtgtaataaactctctaaagaccctaatgggaaggcacatttgggtatgcccacataactatctatgtttttaaatcggtttac

SEQ ID NO: 81362 - DNA, 178 bp, Glycine max
  unsure (1)..(178): unsure at all n locations
agcaattattcttttcaccccacaaagagaggggatccatanagggaacacccccctatgccctatcataaggattgaaacatgatctccataaccagaaattattctcttcacttacatccacacccatcctgacgcataaaaaaaacttccgggttaccccataagcaacctctca

SEQ ID NO: 81363 - DNA, 241 bp, Glycine max
agcttttcgtttcatcctatgcacccatggtggtccacattgtgtttcccgcattattattctcgcaatgtttactttttataccccctcttgacgtgcttaatccattttacttaagccatttctcgcttaacttaaaaataaaatacatttccaccgaacgtttgaattgtattatccgttaacttccgataaaatgaattccgaccgatcggtcgcgccgaaaccacgttggaaatca

SEQ ID NO: 81364 - DNA, 233 bp, Glycine max
agcaatttgtttattgtagcacagaaccactaacctataattaaaagaacttattgccattaacctagggaattaaaaaaaacttaatggttgagtgtaactgaaattgtggcaaccaaaagtcacccccaacagccaacaagtcagccaccatttggtcttccaaaaggctgatgcctaagttgccaattgggcccttattacaacttgaactaaacctaactaaagccctt

SEQ ID NO: 81365 - DNA, 65 bp, Glycine max
tggcagcccatgtaaccacactcaactacccaggcttctttattgcacacaacatctggaagtat

SEQ ID NO: 81366 - DNA, 240 bp, Glycine max
agttagttatttgatccacatcaaactccttgttcaatctctcatcaacaacatccagaaccttcccttccatatacagttgccacacccagttcatgagaggcacgtgaaactccccatcctgataagtccttcttccagaagcaatttcaagagccacaaccccaaaactataaatgtctgattccttgctagcccgaccttcgttgatgtattctggggcaaggtacccatatgtcc

SEQ ID NO: 81367 - DNA, 231 bp, Glycine max
  unsure (1)..(231): unsure at all n locations
agtttgtcttttaaaacaactctggcnggaaggaatgacgaatcccaaaaatttctttggtgggacaaagaaatattacaagccttttcaaaatacacaatttcacaataaaaaaaacaagcttctataaatttaaaaaatattttatgagaagccatcctattttttattggagaaaaaattattttttaaaatattcaaataaaaaaaatttccttattagaataattg

SEQ ID NO: 81368 - DNA, 240 bp, Glycine max
  unsure (1)..(240): unsure at all n locations
agcttgcntctacaatctccccttttttgatggtgacaaccctgaaatcaagaaacacatacacattctttttcctagttgatcactcacttttctccatattctccccctttgtttttgagtttaagcttcacttgaaattaagttatttaattatatgagttcttgatttaatccctattttctctccccctttggcatcatcaaaaagccaaagtacgtaagatatataaaaccata

SEQ ID NO: 81369 - DNA, 239 bp, Glycine max
  unsure (1)..(239): unsure at all n locations
atttattctttccgcactnggaaggatctgantactgccttccttaggcaatatcagtacaattctgatatggctcccgatcggactcagttgcagaacatggttaaaaaggaaagcgcgccctttaaggagtacgctcagcgttggagagacctcgcagcccaagtggcccctcccatggtcgaaagggaaaatgattaccatgatggtagacaccttgccggtgttttactacgaga

SEQ ID NO: 81370 - DNA, 236 bp, Glycine max
atctttgtctgcaaagatcccaggctcataattaaactcttcaaaattctccgagctaaattttttccgaaatctacggtagaagtcagcatactggggaaatagttttgggatatagctcttgactccaataaccccttgcatattggagatagtggatgcattcaaggaatgaacaaggcttgtaaaggaaccagtagtaatccatacattaccttcccccataatattcattc

SEQ ID NO: 81371 - DNA, 80 bp, Glycine max
taattcagtgcctttcgcatgcatcaaagagccctagttcttcacaacgtgcttctcacacaagagacccacaaccaact

SEQ ID NO: 81372 - DNA, 238 bp, Glycine max
  unsure (1)..(238): unsure at all n locations
attttttatccatnagaagaaaatgagcatgtgattggaagcatgactaaaaatgttagtcaatttgtcagattgattgtgaaggaatgcattaaccgtatcccggtgaaagtgtgatccttaaattttgagagaaataactatcatttattactgatttttgcgtgaatgtctgaagtttggactgaatgcatggaattgaggatgatgaaggccatgtttgattctgatagccact

SEQ ID NO: 81373 - DNA, 239 bp, Glycine max
ttatcttgttagagcccgggtagtcaaagagaagttcaagtccatagccatcaaagtctgaagagagtatgatgaactaagggacgtcaatatggccaccgatgaagccttggaatgagaaaccaagaaggcctgaaaggaagaacacgaccaaaacaagttttgaggggctttatagggcagcaatagtgagctcaagctccgaagaggtgaaaggaatcatcacgggtcaaaggcat

SEQ ID NO: 81374 - DNA, 242 bp, Glycine max
  unsure (1)..(242): unsure at all n locations
agcttttcttcgttttttggngggttgtctcatagaatggcattatcactggatgacatgttctcaattagctcagttgcttcttctggggtcttcagttttatctttccccctgcataagcatctaacatttgcttggtttgtggtctcagcccatctataaacatatttcaattggattggctctgaaaaccccatgaatgggagttcttcttaacaagcctctgaatctcttcaatgct

SEQ ID NO: 81375 - DNA, 232 bp, Glycine max
  unsure (1)..(232): unsure at all n locations
agctagtaatcagagnacactgaagggaaaacaggaataaaacatacacagttcttggcactgctgaaccacagggtaccaattacagtccaagcccaaagaaatggatagagaagcaacacaaggattgaaaggacaactactcttccacagaaacgagcatatctctgctgccacccaaaatctctagaagcatacaaaaggggaaggggcataaaaacccaattgaatt

SEQ ID NO: 81376 - DNA, 244 bp, Glycine max
agctttttattcattatgcctaggtgttaccactccctactaatctacaagctagcgattacgtggagcggtcaaggttattagatctcgttacaatgtgatatcatgtcgcaaacaaaggcttcatgaatgcctttttggagaagtggcaccatgagacatcttccttccacttgcctgtagaagagatgaccatcactctaaatgatgtgtcttgttagttgcacctacctatgataggtag

SEQ ID NO: 81377 - DNA, 128 bp, Glycine max
atgtgctggtcttgagagacactcattggttctatgcaatcacagtgtgtgagcatgttttaaaaaacaatatgcagtctgtgccacatatctatgaattgcacaacgcaatttctcctagatgtggt

SEQ ID NO: 81378 - DNA, 243 bp, Glycine max
agcttttgcttgttgttgctgccccacagagccccttggaacttgttccgaccgtgctcttccctacgagccctcttggtctcttgttccaaggccttggtggttgctatatttatatctctcagttcggcattctcttttcggattttaagagctgctgatttgaacctttctttgactgtttgggcttgctcgagttctatcctaagggcctatacctcttcgtcttcctccggtgcctca

SEQ ID NO: 81379 - DNA, 204 bp, Glycine max
ttatgtttttttcctgtcaaattatgtttatcatcaagtttgaaggtattaatactataaattattaaagaaacatgtccttattattttaaaatagaaaatctcaatgaagaacgtggaatcgaggtaaagatccatgtggtcacacctgaaacttcaataacaacattaacagtttgttcttggcttccaaatatgatcaca

SEQ ID NO: 81380 - DNA, 180 bp, Glycine max
agttttttctacgccacaatgctggcaaagatccaacggccaatcggggaaaagggcttaaggaacctccaaaccaattttgggaagaacccacgggttacccaagggttgggcactctttttaccgaaagattttgttaccctcctataaaagcctatttaaaggggttccctaaaaaa

SEQ ID NO: 81381 - DNA, 244 bp, Glycine max
atctttttttttaaccggaccaaacccgaatggggaaagcacccgcccacaggcaccgatttctaaggggggttctacctcctcaactaatacagtcctaaactcgagggccaaaaaaaggcaatttgaatctaacttattatacattttattaaaaccaaacgcaaaccttcatatggaataaacctcaacatcataaatacatgcccaacccctcttaaattcaaaaaaacaaacaaggttt

SEQ ID NO: 81382 - DNA, 106 bp, Glycine max
ttgttaccctgtgtctcttaccactggcatttacttatgactagatacaaaacatgtatctattgcaaaatgtttgtaattcttctcaatgtttaaattgtaatta

SEQ ID NO: 81383 - DNA, 241 bp, Glycine max
agttacttcatactatcatcgaaggcaactatgcgcttattcctggcccttaatctcggatccggatactccacaattttcagaagcagcacaaattcaaaatcgccagcttcaaatacccacagaaagagattatgggtgggagtttgaaaaaaaaacgattttagggtcaatcgggggaaataatctcaagaaacgcaactggctttggcccatgagaaaaacagggttggccctttgc

SEQ ID NO: 81384 - DNA, 241 bp, Glycine max
agctttttcttcaaagatccgaggctcgtaattaaactcttcaaaattctccgagctaaattttttccgaaatctacggtagaagtcagcatactggggaaatagttttgggatatagctcttgactccaataaccccttgcatattggagatagaggatgcattcaaggaatgaacagggcttggaaaggaaccagaagtaatccatacattaccttcccccataatattcattgttttt

SEQ ID NO: 81385 - DNA, 108 bp, Glycine max
tctactcggagactctgcaaaagatctaaaatatttctcgagaaagagatccagaaaggatctaatgacagaacatccaataagagagaccgcgcaacaagcagtgcc

SEQ ID NO: 81386 - DNA, 238 bp, Glycine max
  unsure (1)..(238): unsure at all n locations
agcttgttgtactttnacataacaacctaaaaagtcatatcaatgatgatttttaactagttgatggtgtaaagttttttacattgacagtcatagaaatgaaacctattttaaaatgttgtttaatgaatcaattagacaaaatgcaaatcctgaatgagacaaaaccttagctgtggggtcatgaaagattacataattctgtgtaaacaactcatcaacttacagcaggagagga

SEQ ID NO: 81387 - DNA, 214 bp, Glycine max
  unsure (1)..(214): unsure at all n locations
tagcttgtttgnggggctnctatggaggctggatctttgagcttcaatgaagtcctttaatggtgattttccaccatggaaatgcagcggaagacaaaggagaagaggtgagaggaggcgcctccactagggaataacccatggaaaaaggagcttcaccactaagataacccttggataaaaagcttgaaagattccttcaatggaggaaaag

SEQ ID NO: 81388 - DNA, 241 bp, Glycine max
ttgtttttttgcgaagagggcataagtgaggagcacgattaggaccacgatgatggcgtggatcaagaatgctagatcaaggatggcgacggcgcggaacttggactcgtacatatcgcactgtgtggagccctcgacgccgatggtgacgtcgaggatgcggtggcagaccctcgcgggatgaaggcgtcggcgtagagggagaggccgctctggatagcccatagcccgcggaggcata

SEQ ID NO: 81389 - DNA, 371 bp, Glycine max
  unsure (1)..(371): unsure at all n locations
cttttatggtcaactagcttctacacatctggctctacattcccacgtagtcgattctgtggcccaacattcacgctagcttctaccaaatcgaactaccttcctatatgctgttcattcaaatattatanactacccttgaaccgcacttaattgcatatatgcgccaatttttttaaaaaaattagcttgcttaagcaaaatgaaaattatccttaatctgggaaaaaaagccctaatacgtgcatccaaaaccggttaaaaacaatttaaagcaggtggccaatgcttagaacctcttcaaggaagtaaataataaaaagcattactaacattataaatcggcctttattactggtgggaactaaaaa

SEQ ID NO: 81390 - DNA, 411 bp, Glycine max
  unsure (1)..(411): unsure at all n locations
tgaagctacattatacagtgtaaagganattttaaacttttataacatgaataacatcatacttttttaaaacatcttttcgaccatttattgaataagtcttctaaataatttattgagcttatatcaaaacccatggagactttttggtcaatatcgacctattcccacttacatgatatgaaatatgatagcccaagagatggatatttttaagaaattgtggaaattaaatattcttcccaaagctgctatgtttttgtggggattaattattgatagattactttcaaaagacaacttgtggaagaggaatattatttgtgatgaggatgatcctgaattgtgatcctcaaagcttgggattttcaaatgtggctttgctcatagaagtgtgaaaagaatgttaca

SEQ ID NO: 81391 - DNA, 345 bp, Glycine max
ctaagcttcagacactagaacacaatcaaacaaaaaccaacttagacattgttaatcaaaacactaccttttcggaagatccacaagaatcttgagcagctgaagccgatgaacctaacgacaaaatcgaatcactgaatcaattaatcaacaattaaacacccaaaatcacactctccaaaattcaatattcaataaaaaaccccgctttacccttagtcctcttttaaaaacatttgaataagacaacgaacgaccatgtaaacacccgaaaccacactccaatttagattattaaattcccaataagagaaaaaaacttgaacaccacgattcccccccccc

SEQ ID NO: 81392 - DNA, 231 bp, Glycine max
atgacaccttttgatagaggatactcctttgtctcacttggttagaaaataattgaaagtaaggctgattaactgaattctttaggggatacccacactttgtagcttataactgcatatttagtgtacatgtttactacctgtcatataccagagccagattttctaggattgaacatccacataaaacatagacttattcaccatctctacattctcagcacaattggg

SEQ ID NO: 81393 - DNA, 270 bp, Glycine max
aagtgatcaaaaacactttaatcgattatattgaggaagtaatcaattacattgttcttgaaaaggttccaagtctttgggaaaaaatctttaattcgattgaaatgataatataattgattacctcattgaaataattgattaccttgtagaatatatcgattacaggccattataatggttttctctataaatagtcaccttgtggtttttgttacaacaactccacgaacttctaatagatctttgaatgagctagaatcatgtgcc

SEQ ID NO: 81394 - DNA, 344 bp, Glycine max
  unsure (1)..(344): unsure at all n locations
tgagcttctcgctaagcgcaacacttcatggtgctaaagcgcgagggaagactctggaagaaaatgagttgtacaggttcgctaagtgcactgcttcatctcactaagcgcattgctttagttcatccgctaagcgacaaaggcacgccgctaagccgaaattcactaatgtgtgctaagcggtccataattacgctaagcgcacgagcacgaacaaagccacctatttaagcctaaaatcagattttagagagaggagtttggactgtgantcaaagctttgcatgtctagagtttctagagagagaaagggccatgttccagagaagtttgagagattttgc

SEQ ID NO: 81395 - DNA, 346 bp, Glycine max
agcctggcaatttactctccacttacttttttttttgacgaagaaataagccactattttatacttaggatccccctcgccaattgacccccttttagtaaattggcatacctccctctgatcataccatttggtaaagaaattccaattgaaaagatcaagtgcttgaattaaacctgaattctttaagcgggtataccccatcagctctggtagctttaagaacttgcgatatcttagttgtacaatgaatctctacctgaccaaaataccaagaggccacgaattttctagtgattgaatcatccatcatcaaaacatagaactttcttcgacaattctctac

SEQ ID NO: 81396 - DNA, 259 bp, Glycine max
gacaaagctcaagggcatcaagaagagttccgacgcccgatcaatcagaacacttcagattcagaaaaagtgagaaccttcagattcagaggaaagtgattcagaatcaaaataagatcaaggacagctttcagaatcagatcagattcagaatccgagaaggttatcacgaaaagcatgaaaggtttttcaaaacggagacacatggattttccaaacatgttatcaagagtttacttctgaaatcgataccaatatt

SEQ ID NO: 81397 - DNA, 222 bp, Glycine max
  unsure (1)..(222): unsure at all n locations
gcgcagccaccatcttttatagtagagtattgatatttgtctaccatcacgaatatcgnctctctttttgcacatgttctgtcgctgcatcctatccggaaccaatatagaatagtactgatacctgcctaaccaagggcaccattaggttcttacaagtatggacttgggaagggtctcaagttagtgtaccatgtaactacctcccccctgtagactttc

SEQ ID NO: 81398 - DNA, 232 bp, Glycine max
tttgtgtttttttttatgtctaattccattatttatatgttttattttcatacaatctttttttatcaatctttttatcatatgttttgaatatctaatttgtatttatttatatgctttatattctgtttcttatattctattgattgatttgctctattttgttattactctattctgtttatgtacttctctttatcttatatggtgttttttatattttttttctttt

SEQ ID NO: 81399 - DNA, 395 bp, Glycine max
  unsure (1)..(395): unsure at all n locations
ctgatgaagnactgaaccttgggtctattcgactaattttaatcccttcacccctggcccactcacaaaattatnttccctttgattttaccgggtcaactntaaaggaaaccgtgggaatntatatttcagtgagctttggttacaaacaatttaaaaatatgaaaatagatgtgttagactatcagctatgacagactcgtgtaatttctagagcatatatatatatatatatataatgcacaaaacatatctacaggcgggttttctttctttattttcatacaatttgcagtaatttgaagtgagtttgcattcaaactcagtacggcttaaagacgtttcattgctcagtnaaattacatacataaacattataatggaaattacaaaat

SEQ ID NO: 81400 - DNA, 288 bp, Glycine max
  unsure (1)..(288): unsure at all n locations
aacaaacacacactaaactaataggttttaaaaacattgtaagtcggggtgctgatggaaaagccatcatagcaatactaggccatagaaatgctacccaaaggacttcaatcagagaagcacatatagcagaatctctgccaagaggatctcatcaaacgccttgagtcagagctctctggtgactntgaggtacacaaaactggctacgataatttccaaaagggttattgtgaatttttgtgggtgcttctattattgatccagcgatgaataacttaanttgtg

SEQ ID NO: 81401 - DNA, 232 bp, Glycine max
acaaagcgcgcataaacccaccatccctggagcccaccccactgagccgcggacgccccgtagccatatcctcggtctgcaacaccggggcccaacaacctctagagctccacaacatcaagcaacaacagcaacagccaagcatacagccaagcaaacaagcaaggcgaaactctgccacacacaaccaagacagcttcgaggcaagcccagtacacacttccaccactga

SEQ ID NO: 81402 - DNA, 366 bp, Glycine max
gctggtttaataattatatccatacgcccgttatgggaatacgcgactttttagcggagttttcataataaaaaagtaaaggacgcgaaaatttcttatagaacttcttcattttaaaataagatatggtattttcaaaaaattcaatgcattaatctatcttcatttaatacacttaaatgaaaaattaaaaagcattaaatactcaccatactagagaaatcagagattaaatttaataaaaaaatattattttgacaaaattaataaaaacttcaaaaataatattagtaacaaatggtgggaggattagtacctttgtatcgtatgacgacttagaaattagacaactctttctattcatat

SEQ ID NO: 81403 - DNA, 395 bp, Glycine max
  unsure (1)..(395): unsure at all n locations
actagctggacactaacttggatacaacaacacttaattttgtgattatgatagnncggctctaatggagttccatgaccttgataggcttgtntttgcttttagaaccagctaataaaattggtaatatacttgctaatttacctttgtagtttaaggacctggtttggatagaggagacccctcatcatttattctctatcattctatatgactgaaggcctttggccattgttccttcttgaacgaaatctctataataaaaaaaaaagtcatatcaaataagatatatgtgagaaaaaccttcctaaagaaagaacaaacaactttttgttagtgtttgtttttttttttttgttgaacttaatgcttcgtttaaatcgcagggcacgtat

SEQ ID NO: 81404 - DNA, 99 bp, Glycine max
tcttaggttactattgggctactagagtgagcctttataatctgctacaggtagttcagctacatcgattatctttcttatggctataatgaaaacgta

SEQ ID NO: 81405 - DNA, 432 bp, Glycine max
  unsure (1)..(432): unsure at all n locations
gcagtggagaanactgatgtaaggcttatttttntattgatgagtgtgaaaaaaccgcatgctcaattatgtatgatgggtggacaaataaaaaaagacgttcaatttggaattttttgttgaacaatccaaaagggactgtacttctttattcattggatacctcaaacatatcaaaaatagatgacaaagtgttaatgatgttggatgatgtagtgaattctgttggagaggagaatgtaatccaggtgataactgataatgctgcaaattacaaagcatctagagattgttgatgcaaaaatgagagcatttgtattggaccctatgtgttgatttgatatttaaagattttgagaaacatttgaaggttcatcatactactataaagaacggaagaaagatcgccacctacatntatggtagaacaat

SEQ ID NO: 81406 - DNA, 320 bp, Glycine max
accgacatatacaagtaaacttaactgtatgaccggctactatactacgaattacatgctaagaggtatttcctcttgccgatttactccgtccctgggattcataacacaacaatatctgaaggctcaaaaccactattggcccacttgctataactgctagaagtggcgctacaaaaatgttttgatcctcaaaactctggagtggaatacagaattgtcaaatattgattgagacctaccccacacacacgaaacatagccatcacacagtccgtagggccgtttctaaattctctagccgcattgaccggcctttg

SEQ ID NO: 81407 - DNA, 83 bp, Glycine max
aaacccatatttttcccctaatactttaaagatcgacgctatttttttaatggaaccaacactgcttcagactaggacaaatg

SEQ ID NO: 81408 - DNA, 362 bp, Glycine max
  unsure (1)..(362): unsure at all n locations
tatcttatatggctataataaaatcaattntagtggtctctacaattgtagacaagtcacacttataagcaatccatacatanaataataataagaaagctaaggaactcattttatatttttttcctgattntcctcaccacccgttntttttcttcttctacagcacttttgatacgaattaaatactttttaagagtatntataatgcacagctgttgntcattntagttggttattaataatttatgagttntataatttcaagtattttaaacaaaaaattactctaatgataagattattaaaatacatacttagatcactctgtgagtctatgatatttgaaatatattattata

SEQ ID NO: 81409 - DNA, 378 bp, Glycine max
tgggttaagatagcttaatttaacaatccaatatgcggtgtgtttatcccgggatttccttaacagcttcaaagttttaggatgtatagttcttttgatgtagttgtaatactccggctttttgtaaaataaataaataaaagtttattttaaaagtaatagagtttttagaaattaaataaatgagagaaaatggtttttgttaattaaaataagggcttcataatgtgtgaaaataaatagagtaaaatgatgttttaaaaaataaacggatgttttaattggttatctatttaatgaaagtaaaacataatctttttctcaattaattcatgtagaaaaatatttagaatatataaactcattggaccctaccca

SEQ ID NO: 81410 - DNA, 260 bp, Glycine max
  unsure (1)..(260): unsure at all n locations
taacaccaaatgtatggaattgatattcaggatatacttagaaacataaatattttctcacacataattaacacattaaagtaaaagatccattaatacatcatagtcccctttgtactnnttcaataagaataatatatggcttctttattaatcagtggcaaactacacctatnaaaattataccagacatgcagaaatccaattatgaagttatattaccagataatgtctgcagatgtanactatgccttaacaca

SEQ ID NO: 81411 - DNA, 446 bp, Glycine max
  unsure (1)..(446): unsure at all n locations
ttctatttgtgaccacggaagctgtcatttcanacttggtttctgttttctgcacattntgngacaaggatagtacccctatattcaactatcccaaaactttcaagattattcttgtactttaattttggtgcatctttggttaattttggtttttcctttagaaggatgacaatttcttattactttgagcattgtttgtagtatttagagggaaaagagcttgaggaattgggaacagatgaagagggaaatgaaacaacacctacaaagtcaatccctcacatgttttacaaaactcttactgctgcctcaaataccagcactcatagggggttctttgttacagtgtcacttaattncaaaccgccagccatgtacaatataagtttgcttgatttttaaaataactaccttaaaattcatacaaaaggatgatttctgat

SEQ ID NO: 81412 - DNA, 374 bp, Glycine max
  unsure (1)..(374): unsure at all n locations
tattaactattcctaaccaaaaatacctattacccctccaaattaccattatttggaaaaagttggttccaattaacaccaagtttaatcaccaaaagtagtcgttttcactgactaacaatttcttggagtggtcaccaacttcacccatttagacacgtaattaacagacaccaaaatgtactcattacctacaaatgaagggaaaagacccatgaaatcaataccctagaaatcaaaaacttaaacttccataatgttttgaagaggcatttcattcctctaggaaattcctnctattctttggcattgatcacacttcaagacatggtgatgggcatctttgaagagtggtggccagaaaaatcctgact

SEQ ID NO: 81413 - DNA, 369 bp, Glycine max
acatgaaaattatgagccaaccacgaatggaagatgtgtaatgaacctcccaaattgtcttaaagaagtctatcttgcaagaatttcttttctttatgtagacaacttcagtctcaactcagcttcatagtctgacggctctgattcaaaaaatcttggactatgttaactcatctctacaactgtggaattttatcagcaagtgcattgagtcatacaagtagtataaaacggtaagaaccgagtatcgtatcacagggagtgtgcttcattcaggaaaccattgattcataagtagacatttggtgaacatcatgaaatagaaactaaaacaggatatatgtgtgattctagaactaccacaattac

SEQ ID NO: 81414 - DNA, 231 bp, Glycine max
  unsure (1)..(231): unsure at all n locations
aaacaaaacattttctttcaatactttggaatacaacctctagatggcataagtggtcatgccatgtggaactatataccaatatcatcataaaaaacactaacacatatntcctttaaagcatggttggaaaatatggttcatcaaacactgaaaagaagtcggagcattgggtaaaccaaatggcattattgtgcanatatttgactatgataggcaaatatgccttat

SEQ ID NO: 81415 - DNA, 306 bp, Glycine max
ctccattaaaaattgaaccatgagtacataattatatactacattgcaactgcataaacatgttatttgttattaaccaatttcagacctagatgacccctttccttaattttgagaaaactaccttaatataatctacttctgtaattaactaaagagtggagagaatctatcctagagtcaccatttctccttttaagcagctcttgatgtcaaaagcccaggctcgctaaaatatattatgacattttgtattgtttcttcttcgaaaattatgtggccactctggtataagttagatggttc

SEQ ID NO: 81416 - DNA, 283 bp, Glycine max
  unsure (1)..(283): unsure at all n locations
taggcaaagaataggatcacggactttttatcggtntgacccagcaggcattactggctcctcactctctcccctccctagctttaaggactcacataggagcacattaagaccttattgagttatcctttacttttcttgccacagtatgaaatgagctcattaaaagaccatttctccttttgacagacaacagagatcttatactgactaaactgtgcaagtagaaataataacactcaaggaataagcaagtcctctgatagctaaagcttaatgtctt

SEQ ID NO: 81417 - DNA, 445 bp, Glycine max
  unsure (1)..(445): unsure at all n locations
agcttgaaagagggattntcagatctgatttctgtggctctgnnnaaagctgnagaagntaattgctcccctnttggccgctcagtgtgaaaaatgcctctactttcatcttctgaanaattgaacatgacatgnataatttataaaaaattggcctccgaaagctaattggatccacagaataatcttatcatgacatatacataccatctaattcatgcttgacaaattntgccttttgagatttaatgcttctaatttggacatgccgatgcaagttcaccacattgggcctttttttaacatttgtagttagtccagccttcattntcttggtaggttgaggagaagacactgtggatttctctctagtcttttggcatganaatttctcatcccaaaattcaacaggatcgtcgctaatctcgacatggctgctgtcctt

SEQ ID NO: 81418 - DNA, 432 bp, Glycine max
  unsure (1)..(432): unsure at all n locations
ttcaccttntggtccttctcatagttggggcattataaattatgctctattntcatcgcccactccaagtaagcctccggatcattctttcctttaaatggaggaatgttgagtttaataccatcaattcggttntgtctaggaacaccatcattccctcttctcctcctttcttcttcattatgatctctattctccatttgattcaacctctcatggagcgcatcatctcgttgtttcattaacctctccaaatgttacatcaaagcttgcatttggaattgcgaaagccccactccatcattaggattagtacctgacatcttaaacaaaacaaatatacgcaacaagacaattatagttgttgtttgaatacctcacccactcaagtgtatcacacaattatggcttttctctaatgaaacactctta

SEQ ID NO: 81419 - DNA, 168 bp, Glycine max
atactgaattccacgaagaaatatggcgccggcggtgggcatcactggttactctcatggccaagtttgatccagatatagtccttgagttttatgccaatgcttggccaacagaggagggcgtgcgtgacatgagatcctgggtaaggggtcagtggatcccgtttg

SEQ ID NO: 81420 - DNA, 358 bp, Glycine max
tatgcacccgagaggcctatggttttcgtctcaaaccccgcatgctacttttataccccgtctggacgagcttaaaccattttacttaagtcatttctcccttaacttaaagataaaagtagattccaccgaacgtttgagttatagtatcccgtgactgtggttagaatcaattccgaccggtcggtcgtgccgtaaccactttggaaatcaaacagaggcaaaaaataatataataatcaaaagacatcttttagtaaaataaagcggaaaatcaatcggacgttttctcttcgggatttctcattcttaatcgaattgattaataaccaaggtgaaactaatgctaaaatcaact

SEQ ID NO: 81421 - DNA, 442 bp, Glycine max
  unsure (1)..(442): unsure at all n locations
agctnnttcttggggctctcttcattngattccagcattntnctagagcacttcattgagaggtgcttgccatgtgctaaaatccctcacanatcgtctatataaacttgctaagccatgaaaactcctcacctcggtcacggacttangtgtaggccattcttgaatagccctaaccttctcctcatcaacttgcactccntttgaactcacaacanaaccaagaaacacaacatggttagtacaaaagatgcatttttcaagattggcatacaattgttcttctctaagcacagtcaaggcagatnttaaatgatcaatatgcaaatcaagtgaagtgctatagataagaatatcatcaaagtacaccacaacgaacttttcaatgaactctctcaagatataggtcattaatctcatgaaagtgctaggagccgtagtt

SEQ ID NO: 81422 - DNA, 354 bp, Glycine max
ttgaataccaaaacatcgcatctccattactgctcttatgaaaattatttggaacagttttatattcagtttggaaacttcttctcaaaactcattttgctactagtaatttgattacaacaatatggtaaccgattaccagagagtaaaaactctttggtcaagggtttgtcaaaataccaagtgcctttcaatgttctcgaaaaacctactatacttatcttgatcgagtcctttcctttattttgaatcttaatgctgaagcttgagcttggatcttgagaccttgatcttgatcttcgatctaggcgtttctttgagcttgaatcttctgattatgaatcttgattgtct

SEQ ID NO: 81423 - DNA, 387 bp, Glycine max
  unsure (1)..(387): unsure at all n locations
agcttggctaaagacaactactgtgctttttcactgatctcgcgcctagcancgtggctntgatattgaggccctatcaaattcttctatcgtgctaagcgcgcctaaagctacacttagcccactaatgagctaagctcaactgtcacttttagcacttcatgactaagcctcattttcacttgaaattgcacatatttcatcattaaantcaatggacatattctagagacagctttatccataaaacanaatttatttacaaaaatcactacaaaataaccataaattggggaactatacaagttttggaaaatattgtatatataaaagttagtcgtataagacgactaacacctctattctcctaaatgtgtataagttatg

SEQ ID NO: 81424 - DNA, 231 bp, Glycine max
aagctctgttgagaaactttttcgacaagctatccttgagatagattccttcggagtatgctttgtgcttaaactacacacaacctctgttatagctaagcccacctcctcgagatgagaagcttgtgcttagctacacaccccttgatatagctgagttcacccctatgcgcgagaacatgaaaataaaatgagtctctacttcaaagacggcttaaaatgccccgaaat

SEQ ID NO: 81425 - DNA, 331 bp, Glycine max
  unsure (1)..(331): unsure at all n locations
atttttgggccctgtatttaagggctcataatgtaggcaggtaccctaaaaatgtagaatttttcaggcctttgtatttagggcacctagaatagcttttgtattangggtaagtttgtaatttcacatgaattaagtgaatatttgatgtgtgttggaaaataaactttaattgaattgcgagaatcccaatccaattaaattttagagggggaggtgagcatttgcttgctacaccccattggcacatcatatagtcacactttgtgcatgttcttcatgctntacatgtctcatgaaacctacaaacacttagtggagaactttgact

SEQ ID NO: 81426 - DNA, 342 bp, Glycine max
acaaaatacatgaaaatacaaaaaaaagtccctactacaaagactactcaaaatgccctgaaatacaaggctaaaaccctatactactagaatggtcaaaatacaaggcccaaaagaaagaaaaacctattctaatatttacaaagataagcgggctcatacttagcccatgggctcgaaatctaccctaaggctcatgagaaccctatggcctttccttggatctctagcccaatctacttggagtcttctatccaatgcccttgcggggttggattgcatcattccctccaccctggaaaggatttgacctcaaatcccgaggttcttcatactctgggc

SEQ ID NO: 81427 - DNA, 243 bp, Glycine max
cttattttatatacacaagggtgggattaggggaaatccatttcgaagccccatggttttctagggagtgataatggcccactaaaatgctatggcctacaaactaaaattgagaaaagcaattaccttattaacctcacccctctccctctctactatgtatgtctctcaccctgttatatcaaggaaacatctttgaactcgtaaaaataaccaccaactattgtgggcttgtgacccaca

SEQ ID NO: 81428 - DNA, 458 bp, Glycine max
  unsure (1)..(458): unsure at all n locations
cacctgcggcatgcaagcttgntgtgaaggtctttttcatattatattgcacanatctctctctcagaaccctcttcatgtcttgccaattattaatcaacggccatctcatcctctcaacatcactcctcacttgattccaccgcactaaagcatatccctcaaactccatggaggccaatttgatctttttctcttcattgtagttgtagcaagcaaagactttctcaaccttcatctcccactcaagatacacttccgaatcacaagtccctttaaaagtagggatcttcaccttcactccctcaatcccttcctctctttgtccacctncatatcttctatgatttcttctctccctatacctctcattcctccatcctccctcatcctcttcataccgatcatcttctccatgagaagaaatagatggtcttacatctcttcttcacactata

SEQ ID NO: 81429 - DNA, 391 bp, Glycine max
  unsure (1)..(391): unsure at all n locations
gagggtgcgcagcccaccatcttttcatatttgattttctataatgcgnctaccatcacgattatcgtctccctttttgcacatgtcctgtagttgcatcctatccggaaccatatcagaatagtactgatactgcctaacgaaggcaaccattaggtccttccaagtatggacttgggaaggttccaagttagtgtaccatgtaacaactaccccagtaagactttcttggaagaaatgtattagcagttcctcatcttggcgtatgcccttatcttccgacaatacatctttggatggttcttggggcaagtagtccctttgtacttgtcaaagtccagcaccttgaacttgggaggggtgatgatattgggtactaagaacaactctt

SEQ ID NO: 81430 - DNA, 269 bp, Glycine max
  unsure (1)..(269): unsure at all n locations
ttttttatttttncacccaagaggggagttgattaattacctctcactccccccctaaaaaagcttgtgagaaagttgttattcaggcctaaacctttttattttttaaaacttacaagttctatttttgttcatccactaattatcctgatcattgttatgttacaggaagagtagaaaagaagcactttctgatatcctatcataatattttataagtcaaagacacattcttgatgttgtggcaagggcataaatccaacatttgg

SEQ ID NO: 81431 - DNA, 372 bp, Glycine max
agcttctttgagaagcttacttgagaagctatagtttagctacacacccccctctataagctaagctcacctcctttgagaaagtagagcttaagctacacacacccctctaatgctaagcttaaaatacatgaaaatacaaaaagtccctactataaagactactcataatgccctgaaatacaaaggctaaaccatatactactacaatggcccaaatgaaagggcagaaagaaaaaaacctattctatatttacaagaagaatggacccaccttggccatgggctagaaatctgcctgaagttataagaccctaggcctttttagtcgtctagcccaacctctggagtctctagcaataccctggggag

SEQ ID NO: 81432 - DNA, 181 bp, Glycine max
tttggcttgggttctagagagaatcaccaacggccggccttgagtttgatgaacctatgaaactcagcaaggggggacctttgggtctatgagcctttggagaatctaccagtgacgtgtccgacctggattttggtgagattcaccaagggcagatgttagtcgtcttatacgactaact

SEQ ID NO: 81433 - DNA, 272 bp, Glycine max
  unsure (1)..(272): unsure at all n locations
cagggggttttttttttttactttttcttgatngatttttttattgtttttttttttttttttttttttttatatacgaaaatgagngtcangnnnnannnnnnnnnnnttttttttttnngccacttttttttttttttttttatctgggcgatggggnangtttgngtttcattttttttttttttttttatcttttatggttgcttttggaggattaattatggtagttttttgttttatttaatttttttttttttagttttttgttt

SEQ ID NO: 81434 - DNA, 205 bp, Glycine max
ttaaccactaactgcctaacaatttttccaatagggaaaactaacataatcaaatctaactaactctggacacgtcagccagctcctaactaccttcctaagctagctcacgtgtgtttcggcagagatagcaacatctctaatgatttcctgacattcctcaagctcttcctctagttacttcgataaggttccaaatatacag

SEQ ID NO: 81435 - DNA, 377 bp, Glycine max
  unsure (1)..(377): unsure at all n locations
gaggggggggnggattttgatattccaaaccggctccccactaaaaaactatttcacttttattcaaggtatgaattcccttaatgacaatcttcggaaatattaattcaaataagacaacttgaatatggaatatataatcaatactatataaaggagattaagggaagagagaatgcacactcagttttatactggttcggccacacccttgtgcctacgttcagtccccaagcaacccgcttgagagttccactatcttgtaaattccttttacaagttctaaacacacaaggacaatccttcctttgtgtttagaaatcctttacaacaagagactcacagtctcttaattccttaaagaatgagaagaaaaa

SEQ ID NO: 81436 - DNA, 262 bp, Glycine max
  unsure (1)..(262): unsure at all n locations
agtcagtatgacagaatttgtgagtgcggaagatgatgtanatcttcgcatgtcaacgggcttgtcggacgcgattgacgaaagtcgcataagacgacgttagtctctgcgtcttatcaggcttttcgtcttacagacatcaaacagtttatacggataaccactcgggtatttccgcccgtcagcgtaactcaaaagtcagtatgacagatcttgcgagcgcggaagatgacgtaaatctccgcgtgtcaacgggcttgtc

SEQ ID NO: 81437 - DNA, 322 bp, Glycine max
  unsure (1)..(322): unsure at all n locations
caaagagaatcgagtacatcactgcttcgtctactgcccaacatatttaaggatggtgatggccttgttacttccaatntcaccttgacaaagatgtcatggaccatgttgaaaatctaaattgattcaaccccatattctgcgtaaaattcgcaatacttcgactgtacatcattcgcatgcatccatgcttttcattgggtgcattgctcactgcattctttccttgaaaaataatatacaataaagtataaatgaacttcatcattgttatcaaaaaaacaaaaaaaaaaacatgctttacggcgtcctcaccgaactt

SEQ ID NO: 81438 - DNA, 389 bp, Glycine max
  unsure (1)..(389): unsure at all n locations
tgcagaagcgtctcgggataatagngacttcttatgtacaagttagttgcaggccctaattccatcttcttacacctctcaattacttgattagtttccttaatacaaatacttgatttgtttcatcttttaccagtcttgattatgattcttaaatctaaagatttattttccccctctccgcattgcttagaaattatttcatgcctcagaattgagtatcaagatttaatgtgaattttgttagatctctatgtattttgttctgattgggggtgtcaatttaattgcagaggggacacgcctttttgcagcgaagagtgtagacaagagcaaatggagagagacgaatcccaggagaagataataaccttctttttcatgaggct

SEQ ID NO: 81439 - DNA, 264 bp, Glycine max
atcttctctcaattgcaatcaaaaggacattccattctcttaccttagaatttctgtagggcgcagctctaaaaataggtctgtgtggcaccccattattagcaaatgcgaggctaaacttacaaaatggaagcaaagaaatctatcaatggggggtagaataaccctcattaattcactcttaacagccttacccatttatttgctatccttcttccagcatcctaagctcgtggtgcagaagattacatctatacaaaggaa

SEQ ID NO: 81440 - DNA, 383 bp, Glycine max
  unsure (1)..(383): unsure at all n locations
ctcagcttgggtcgggtacattcttcgatacccctttatactttcatgtaacggncagaaggagacatccaccgtatgaanacaggcccacacattttgatctcccccactacatgaacaataaaatgcaccattatgtcaaaaaatgatggaggaaaatacatctccattggacaaaggacaatggcagcctcttcctccaactcatccaatcttgctgggtcaatgacttcgctacatatagcattaaaaacaaaacacagtcgtgttatggcaacccgaactttgacaggcaagattccccgaatcgctaccaggtatacatgttgcattactacatgacaatcatgagatttcatcccaacccaattccaatcattgac

SEQ ID NO: 81441 - DNA, 345 bp, Glycine max
tgagaaataattttgaaataaatatttgatgcacaactaacctggtagaaaattggctaaaaagtatcccaaattattataaagtgatatggatatatttagagcttttctgtgaaaatactctcgcacgacaacataggaataataattatgaaaatagattcttgtaattttggttggcttgagaaaatatatgacttattattaaggctaaggaaacttgctattaaattttataaaattcagagctggctaaatatatctttttaaaattaaaaatagcatttaacaggaatttcagtgtttaaaatataatggaaaaacattcctgtatgagtttgggga

SEQ ID NO: 81442 - DNA, 393 bp, Glycine max
  unsure (1)..(393): unsure at all n locations
ctacgctttatacaagctgaaccatgtatcaaaaactattttttgttttatctacacacacagagcacatctcttttatcttagngatagcgactctcctaaattcttgagtgagtcatgaacaccttggctgtattataagactcttacaaccgttgtgtgatggcctcgctggaaagagggaatctatcctttctttcatcaacacccttgttctttcaaaccacaatttcagaaaatccacctctgcccagaattatcttgtggccataacttccatttacgcactcaaattaagcgattcttgagcccacatttgatattcaaacgagacctctcacctcagtttggaatcaccttatttggagcccctgtagctcagatattggcatt

SEQ ID NO: 81443 - DNA, 218 bp, Glycine max
atcaaataacgaacgctagatgaatttatagagagagagagttttagagagagaaaggatgaagacacggcattgttggtgctaaatgacaggtgagggttcgatcccgtattctggcaacgctccgacgtagccacttcgttacttccgcgttcagcgtcaagagtcatcgtttcgtcgtcgaccgtcgccgtcgacccctagggcaacgccatccg

SEQ ID NO: 81444 - DNA, 363 bp, Glycine max
tatcatgagtatatggcttacatagatcctatttctttttgttaagtgtctcacatgtggatataggattgcttgacgaattgcgcaacgaagagctttggttatcgggtcacgaaccacctatttgcctcaaccaaaaaatgttaagaaattctaaaggtcatctaatatcgtcttgtatacaccaaaatggatgtgagataatcaagtctgccaaaaaattattgcatgtgtcgtaacccacgttattcaaaaaataaaatgtccttttcgtgttgaaagctaagtcaacaacattaaaaaccaaatggtgtattgtttggaattctatactaattcattgttaacttaaaattcctttta

SEQ ID NO: 81445 - DNA, 236 bp, Glycine max
  unsure (1)..(236): unsure at all n locations
ggtgctattgcccaanatacaatccttgtccaatcccgaccaacccggccatagatgggcagtgagaacctgtgatgttcctaaacaggctagctcctggaagtcaacagactatatgaactaagaccaccaagctagaaggcttgtggggcctgccagctatgaacttgattgatgtgagagatatgggctctgcttacagattaccaatggtgggtcattgattacaatgctta

SEQ ID NO: 81446 - DNA, 355 bp, Glycine max
  unsure (1)..(355): unsure at all n locations
atttttcttcataattttaaaagaatcatattataacggcctatagtgtataccctaactcacttaatgatattctcaatttttttgtctaaatcttttcaattttatcgcatcatattgctaaatacttttgtctctatgcctgtataggaacactggggtgtacattaaccatttnttgttttagaaattgcacaaggtacgcaactgcntttaagtggtatcaataattgaattattaattgacaattgtgacctagtgagtcagggacacatatatggcttgcaacanagtgaaagctaaagccaatggttagtttgcgcatgaacaatcaatctgcctttagacgtatct

SEQ ID NO: 81447 - DNA, 288 bp, Glycine max
  unsure (1)..(288): unsure at all n locations
aagagcatgcttagagggaactttatattataaacttatcaccaaagacangaagaccattgtatggcagataaaagataggatggtaagggattgcaatgctcatgcttggttttcaaaagtgcatcatagaattgatcagcctggtagggagaacactaatgcaaggatagagattatgcatgtagtgattgggaaaaacatttgaagttgtcgaaagacatatgcagtcaactaaaattaattgagttagagatgaaaagctggaacacccataaagcccctcct

SEQ ID NO: 81448 - DNA, 228 bp, Glycine max
ccacccggggaccattggtgggacttggaaaaggaaagctaagaaaacccttaaaggtccactctttcttctttaatcctcaattcgagctccgcctctctctttctttcttcataaagcatctctcagcttctattcaaggaatctggggggaactcttcttcttggcttatgctagggatgggcctccctatctctttccttgccttcgttgatctcatgggaaaa

SEQ ID NO: 81449 - DNA, 182 bp, Glycine max
ttgttacccgctccccctgttcatagggttaatcctattaaaaatgtgtgcatgtgcttttcctatgcggaagtgttaattacttttgaaaaaacatgtctgttaaatctttcaacgtcaatcaaatttccaatttttggcccactctttatgttacaatacaaaataatcagttactcgtt

SEQ ID NO: 81450 - DNA, 241 bp, Glycine max
  unsure (1)..(241): unsure at all n locations
agttatgttgtataattttgtattatctaacaaacgccttaaccttggaatgatcagaagatctattacaccttggttagggggcctttctttttggccttnatcacttgctgaaactattattcattcttcacttttgtccatgataccccaccnctggggcatttatggtagatttttaactcatgtctgtgcaatatgcaatcattatagtatttatgtattttttatactacatacc

SEQ ID NO: 81451 - DNA, 292 bp, Glycine max
aggcccgtcatatatcgagacgctcgaaattgaatggtgaagctctgagcctaattaagcgacaataactttttactcggatgtctgattgaagcccttaatatatcgagacgctcgaaattgaatggtgaacctctgagccaattcaaacgacaataactttttactcggatgtttgattgagtcctgtcatatatcgagacgctcgaaattgaatgttgaagctctgagccaattcaaacgacaataactcttactccgatgtctgattgagccccgcatatatcgagac

SEQ ID NO: 81452 - DNA, 412 bp, Glycine max
  unsure (1)..(412): unsure at all n locations
acattcaatttgagccgtctcgaaattttggactattcattacatccgagntaaaatttattgtcgtttggattggctcagagattcaacattccatttcgagcgtctcaatatattacgggactcattcagacattcgagtaaaaagttattgtcgtttgaattagcttagagcttcaacaatcaatttcgagcgtctcgttatatcacgggactcaatcagacattcgagtaaaaagttattgtcgtttgaattggctcagagctctcacattcaatttcgagcgtctcaatatattacgggcctcaatcagacatccgagtaaaaagatatcgtcgtttgaattggctcagagcttcaacattcaatttctagcgtctcgatatgtgacgagactcaattagacatccg

SEQ ID NO: 81453 - DNA, 260 bp, Glycine max
atgcaagctttcctatagagatccaggattgttattcttctgaaggaaccagttccgctccctaatatgacagacgtccgccttatgagcgctgagcaccaacagcgctttgaggccatttatggatggacatttctccggagcgatgccgtcaactcatggacaatgagtataccgacttccaggaggagataaattttcggcagtgggcatcgctggttacacccatggccaagttcgacccagacatagtccttgag

SEQ ID NO: 81454 - DNA, 273 bp, Glycine max
  unsure (1)..(273): unsure at all n locations
gcttaaggaaatgatgaaaagaaagcacgttattttataaaagccncgaaggcccttgctgatgagacaacaccgctcttggtttaaataaaaagggttttccctttctccattattatattcacgctctgccacatgtccctatttgattggagcaaaaagggcccactatctctttttgactgtgacccatacttagtcacaaaagtgagaaaaatctgacctttgaaacgctaccatcccgcctcggcttgcgcgccggttctctgattc

SEQ ID NO: 81455 - DNA, 306 bp, Glycine max
gtaaatcgactcggaatacgaaaagcaaaggaaagtccctaaagaacaaacccaaaatataaagcagaaagtattagtaatgtggaattgtgggaggaagaaacaaaagcaataatagatcagcatttgatatcccaagtatgtaccggatagaatagggtggaaatgcgtctatccctgtaaaaattccaggatatgtgggcccaaacagtgcatatacagcaacaaatgtagctaaagtcgatggtcccctagaagataaaaaacaatcaatagtgttttacacaagtatatactataattaca

SEQ ID NO: 81456 - DNA, 303 bp, Glycine max
  unsure (1)..(303): unsure at all n locations
ttttgctaaacaatggccctctaattctatctggatttgctaaatgcttttatgtttaaaaattccctctgccttattcttttcagtattttgacgatggtgctctntctctttgaaatttggatgaaagaaaatggtgaaaatcaaaggcatgcaaatcaaattcttaacttttcagtattttctgctttatgctntttaagtatttctatcctgtcacactttaaatactcggccttatttanggcatgacaaataaacgggtaccccataatatcaatctacctttacnaaaaataccta

SEQ ID NO: 81457 - DNA, 408 bp, Glycine max
  unsure (1)..(408): unsure at all n locations
tactaagctggacgccgccatcgncggacttttgggtagtcacttatatcncggngacgctgaatccctgtacttgcatgtggagctctggccccaccggcgaggtggtgctatatggattctgcaactcggcgtttggctctgccaccatgatctccaccttctcaccagtcatgcacgcattgctggtaatcccgtttatgcgaccgacgtcactatctgcataatctaatcttttagatgagacatactgcacttaccttctgccataacaagagtcggactagctgccatttctttcttaatatgcacaatatacacctcctcgtgtatatgcacacttacagagtgcggtatgattgcagccacaaggttttgaaataaccccttccctgtcatcttttacca

SEQ ID NO: 81458 - DNA, 347 bp, Glycine max
  unsure (1)..(347): unsure at all n locations
catgcaagctngnagtatggactcttctttatctttgaancgcanaaacagaacatgcagaataataactncttctgctttattgcgataataagatttgtcagtattgacttcccattgggtaacctgcagaagactggttcctttcaaatgagttcctgttgtgataaatatataaccttaagctacttggatgtatgaagtctccaaaactttcagatcagggctttcttttatggtatcgtcatgaacggttctgtttcggcaaattattataaataaaatacaactgtcttgcagctttctccgttatccaattcatatgaatgaatatatctctgattacg

SEQ ID NO: 81459 - DNA, 361 bp, Glycine max
  unsure (1)..(361): unsure at all n locations
ctaccctttatgtgaaaggaggngactctttacatttgaatnngtttttttacgnncanagacactggtaattgattaccaaaacattataatccactacagccttttgaaaacaattggaacggtgtaaattcatttgaaaactttttcaaatccattttgctactggtaatcgattacaataatctggttatcgattaccagaagagaaaaactcttctggaaacatgttttgagaaaaataccatgtgcctactcagtgttttgaaaaaaccttttcatacttatcttgattaagccttaacttgatttttgaaagcttgatccttgaatcttgaattttgaaataaactttcttctg

SEQ ID NO: 81460 - DNA, 90 bp, Glycine max
  unsure (1)..(90): unsure at all n locations
tttaggtcctgaatgtacaaccttcacactgttgctcgttcccctattcaagaatgaggaggatcttcataggacttcatccanctgatg

SEQ ID NO: 81461 - DNA, 390 bp, Glycine max
ctgaaaaatgcttggagatgtggagaattttctatgttttcttcaacaaccataagaggagtatgtggctctaagaaatgaagagtcatcctcaaatgaaaggaatgttggtggcataaactcctcaactatccatgtgcctgatacattttctatgactaggttcgatcaattaatgagtcttgtgcatgaaaaggaagcagtcccaccaatgaaatcagaactagatgcttatcttgaggagaacaaaacttatatctctaataatgaaaactccacttttagtgccttggagtggtggaggaataatagcttcaaatataaagaccttatcaagatggcaagagattactagttgtctaatgtaaccggtgttcagaatctacattt

SEQ ID NO: 81462 - DNA, 298 bp, Glycine max
  unsure (1)..(298): unsure at all n locations
atcatggcnagctagcttctctgaccacatgttagtgcttcttgctggctcaagaccaaagaatattggacttctcgtggtgcgtagctcacactctgtatcacggaatatggccacaatacctttttcaacctttaacttcgtaacttctccttctagctgcaaaccttgaaatattataacatctagacatttgcctgtcagttcgcacaccacttctttncttttcttttcctcctgatttaattctactcaatggcttgataatgttaaatccttcctttatgttatgctctat

SEQ ID NO: 81463 - DNA, 231 bp, Glycine max
  unsure (1)..(231): unsure at all n locations
ccccccccccccaganaaaggccctggcttggccccccccgcccccccccccccccccccacccccccccccccccccccccccccccccccccccccccccctcccccccccccccccccccacccccccaccgcccccccccccccccctccccccccccccccccccccccgccccccccccccccccccccccctccccccccccccccccccccccctcccccccc

SEQ ID NO: 81464 - DNA, 188 bp, Glycine max
  unsure (1)..(188): unsure at all n locations
atccacatggttgcctcttggtgtaaagagtcgatcacccttcctctaggctctttntccgcatatacttgggcatactcgtccgcgaccctatgctcgtgggctgaggctagacctaactcttcttggactcggcatgatagctaacatgtggtctccgctcgcataacgctgagacagctcttttg

SEQ ID NO: 81465 - DNA, 52 bp, Glycine max
gggtttttttttttttccacccccggggggtttttgaattacctcccccctc

SEQ ID NO: 81466 - DNA, 98 bp, Glycine max
aagtgaatcacttgtttcctgaagagcccttgtatatctttgccccatttttattaggaggtgacgcccttgggttctgccactaaggggcttttgag

SEQ ID NO: 81467 - DNA, 240 bp, Glycine max
  unsure (1)..(240): unsure at all n locations
tgaaactacctttatgaaagaagacctttttttttttgaattcacancaaagcactggaatgattaccatatcttgaatgataccccatttgaaatcattgaacgtgctaatcgttgaaactttgaaacaaacttgcactggaatctattcagaaaatggtatcgattccagagagtaaactctggtacttaaaaatttgagaaactctttgaaaaaaaatggcaatgttgtttttgaaa

SEQ ID NO: 81468 - DNA, 202 bp, Glycine max
caaggaaggcggttctataatttctgcccaaaagaaaaaatagattagctagaagttatcaacacttgggaaactaaggattcttctacaaatcatgataaaatcacccccatctttatatcttcttaaagcagatacccacgtcagctcaaggttaaaaccaagacggtctgggacctcttctacactagctcaacggcca

SEQ ID NO: 81469 - DNA, 285 bp, Glycine max
tcacacatacatccaccatgccgtgtgggccaccttctactgagctcacgtacttccacgaagcctttactccgctcctttcaacaccgggtccccatcaagccctccaagcttgcacaactatgcaagccaattaaacatccaaacattatgaactatccaaaaccaagaatatagggcagaggcagaaaagtccgcccaaaacacattccaataccaacagcttgacttactcagataccccaagaacattcttttcgtccgaaacggtaccgttggatcgac

SEQ ID NO: 81470 - DNA, 426 bp, Glycine max
  unsure (1)..(426): unsure at all n locations
ctgcaagctggagnnngtttttttcctattctaggctcctttttggatctctgtagtacctctggtactatccttaattaaatatcctaatataatgatacttttgggctggtcaaaaaaaaaaaagagtaccagaggtactaaattaaaaatactggattgcccatcgcagtggttccacagcagtctaaaatggagtctggattggaaccatagccgagctaccccatccaagggcagaactacagttagtcaaaatattactgttgtatgagccctgctatattagttatatgcagagttgacatttgtaatattaccttaccacangaagcgcatgtctataactataagggaatgattatttgaccaaagttgttttagaggcatagcattgccttgaaaatngaaagtattcttttatat

SEQ ID NO: 81471 - DNA, 333 bp, Glycine max
actcccattatgtctctgtcatgtgattttcaagaaatatggaccccttatgagttgcataattgctgatgtcataatggagagcatccatcgtccatgtactgggagcactcacataagcttcttttgggaagggaatggaaaagacaacgtgtaaaggggaagtctctatttgtgtttcacgtttggaaatgctgctactggctagtgtgtgttttatgttattgtttttggggagttgcttaacctgcgtcttaatttatgtattaacctccagactctaacgtttgcttctgttctgaagttaaattaacgaatcaaattgttgtccct

SEQ ID NO: 81472 - DNA, 423 bp, Glycine max
  unsure (1)..(423): unsure at all n locations
agcttaggatgctattgtttcttattgcttcatatgaaagacaagagaatctgtatgggtgatcttgtcaaaaaaacatanaccacattactcttgcaacaagtggagaattctgaatcatggcaagctgagttactaagttgaccaaggcatcaagttttccttcaagctttttattttcagtagatgaagataaatttgtggccacctcatggactcctctaagaaaaatagcattaattcttgcactaaattgttgggagttggaagccatcttcttaatcaaattcctagcctcagcagaggtcatatcaccaagagctccaccactggcagcatcaatcatactcctctccatgttgctaagtccctcatagaaatattgaagaacgagttgctcagacatcttgtggtaaggacagc

SEQ ID NO: 81473 - DNA, 352 bp, Glycine max
  unsure (1)..(352): unsure at all n locations
gcggcatgcaagcttgacataaacttattactanttttgttcatngnaacaaggtgggcaagcgtggtcttacccaacccgcccatgcccacgatagaaagtattgatagcttttcatcagtgtcagaagtgatccagtccgagatcaattttgtgtcatcatctcctgccataatatcactttctaccaccgaagatgttgatggcaatttctctaacactttactacccgatcctgatccaaccccaacaccactagttcttgtcaaacctagataaccactttggctttcaagatcatccaagtctttaaggatntgtgccatccttgactaaatctcttgccaaagag

SEQ ID NO: 81474 - DNA, 276 bp, Glycine max
gattataaggtaaccacattccttgcatatatttgagtccaccaatctttggtagatcgtatttgacttttgacctaatcatgcttaatctgaggccaacaaacttattggccttaattaacggggactttaagtgcctacttaatcacccttcaattaaacaaactggcttttccctatttagagcataacactatatgtccacacaaacatataatagttgctaggattggaattccaaggtggcccattcaagagttatttatgagaatatga

SEQ ID NO: 81475 - DNA, 275 bp, Glycine max
ttgtatgctcaagcggtatgatgtgtccaacaacgatactatgccatatatccttttgctccattccataccatcacagcaacgcttgataaacttgaacttgcagataaaaggtgggagcaagataaaattccatacacaacacactgaagcctcaacctgctactaacaagcgtaaatcatggcgggaacatccttttcttgggtggtcaactgatcaacatgatcttggccttggaaccataactggatagttgcatcccaagtgctacatt

SEQ ID NO: 81476 - DNA, 243 bp, Glycine max
  unsure (1)..(243): unsure at all n locations
tagatatcttaagaaggggggggggaaacaagagaatggatactattcttcgagttagagaactatgttgcgttttacttaaggtatgaattcccttaatgacgatcctcttacatattaattccaatgaagcatcttggactatgaatatgttgcggtgtcattaacggagattaagggaagagaaaacgcanactcaggtnttactggagcggccacacccttgtgcctacgtgagtcccc

SEQ ID NO: 81477 - DNA, 331 bp, Glycine max
  unsure (1)..(331): unsure at all n locations
ggccttaatctagctctagcgcggttggagacgacgtaagcgtccgatttcagagatttcgatacctgatggacaaccatgcctcctgatttccctgggaaatagtgagaggaggaacgccccgacatttacgcatcgaacataatgtaaacctttacggacttaaaagctctatagacgtgcctacgctttagagtnttttctgtgtgtgaagctgtgtgtctattggtttcgaaggagaacacaaggatctttgttctctgtcctgcgctctatccattctcagtcattagcatgattacttctttacctgaaacggctgatcccggga

SEQ ID NO: 81478 - DNA, 431 bp, Glycine max
  unsure (1)..(431): unsure at all n locations
ctgcaagctangcacttcttaacaaaaatactatttactctgcatttcttgaacacacattcctgcaactcagtcacaagcaatggctcaaaatcatgtccttctaaattcataccatcccaaattcatcaaaattgagagaaaaataacacaccatgacaaactaaacaacgaaaatgacgagaaaaaatagaataatggaaatgaagatacttacacgcttgagtttggagacttccttattgatcttgttaaattctttgcggagattctacaactcgaattgacctgaaaaggaatgtataataatagatagcattaatgtgagattcaattggtgacattcgtagagagagagagtacgcttttgccattctttntcgagattgatgacctcatcgaccacttggacgctagcgaaacaacaacat

SEQ ID NO: 81479 - DNA, 430 bp, Glycine max
gcatttgctactggtaatcgagtacaatattctattattcgtttaccagagagtaaaaactctttggtgaacaggttttgagaaaaattcatgtgctactcagtttttgaaaaaactttttaatacttatcttgattaagtcttctcttgattcttgaatcttaagtcttgaatcttgatcttgattcttggaacttgaatcttgaaactcgattcttgattcttgaactcaactttcctcttgatccttgaagcgtacttgattcaatcttgaactcattctttgattcttaagatcatcatctttgttatcatgaagtgttcatcatctttgttatcatcagaactctttgaatcaatcttgattcatcatgaagcttgcttctacataagggcatatgctatgcaagctcgcacttagcgcgatatc

SEQ ID NO: 81480 - DNA, 156 bp, Glycine max
ctagcctgagaggctaggacaatagagccaccagtccctctaaaagagcccccatatcctttagttccatcaaagaagactaaggagcactacttcaagtgtttattggagatattcaagggggttgagataaccatgccatttggggaagcctta

SEQ ID NO: 81481 - DNA, 438 bp, Glycine max
gctcacgaatagttcgaagaaggagttcaattatttttggcttttacatgcccaactcctttgattgacatttgtattgattattatcttaatagccgcatcttagtatatttgatatctcttttgcattatgcatcattattgttagtatgaagaaaattttctggttagaaaaagttctttacaggcagaaactctttggtgtaatcgattacaacaagttgcctaaaacttaacgagttaagtctcgtatcggtttaatcgattacagcacaattttaatcgattagactgttgtttgagacaatgattgattcttcaagagtctttgctttaatctactaccacgcggattaatcgactacttctctcttgtttaagttgttcagaggtgaacaagaaccacttgattgattactcaggtcatctattgattac

SEQ ID NO: 81482 - DNA, 399 bp, Glycine max
  unsure (1)..(399): unsure at all n locations
agcttgtaatgtagaggctatgaataaatctattatataatntatgaacattcgcagaaaaaataatattggtggcacaatttatctgattaaactccttacagtacctaatgcaaaacattaagcttgatccacggtcggcggacttaattgaaatattgggttaacttaagctatgctaccaagacaattatgtttgtattgataagattatttattatataaccaaataattatttacaaaaaatattatttagtaaagtgtgaattgcatttcctttacgcaaccaacttgggctatgccagggtgactgattaacgactaatgagtataggcatgccaaaagtcaaatggaaaatgacgtatacaatacgccgttgctatgtcatttttatttg

SEQ ID NO: 81483 - DNA, 289 bp, Glycine max
gaatttgttgaagatatggaataaaaaagagtgtggcagtctacaacaaaagcaaaaagaatttgaagagatgagtgagcttgaccagaaaagggagagacagattaaatgatgaagaggtgcgttcacgggaagatttacatgacctttttggagggctaccttttgttttgaatcatttgcaaaacaaaaggctaggagtaagtggttcttaaagggagaccataatcctaaatcttttcattccatggtcaatggaaagggaggaaaaattttgattaaagggctt

SEQ ID NO: 81484 - DNA, 282 bp, Glycine max
agcttatatgaacgaaatcgcctgcatctattctctcatatgcatgctgtattatgatgcggcggctagaatcaagcctcagctatagagcaagcaatcaatggcgcaaaacacaccaaatgattatgatgatggacggcttacattctcacagctgtaaaagcctcactgtccaagagagctctctaagctatcatgatctgtagagaggactcctagatttcaagtcacaggatgtcaataacttgtatttgccctacacttacacatatatggaacata

SEQ ID NO: 81485 - DNA, 169 bp, Glycine max
accagtgggagaaagcgtatacaaaagacttacaactgcctttccaatgatgggatagagtataaagagattaagatcgggaacaatgttcccgatctcaaataccaatagtctgcaacaggtcttttgaccggacaatgtgtgaacactacttatttgtcaccaaatg

SEQ ID NO: 81486 - DNA, 353 bp, Glycine max
agcttgtatgactaccatggtatcaaaatatattctctaagttcaccagaaacactctcatcaggaatgtgatgaagctggaatgcaaagttcaccactaatgcttcatctggactgcagttcagcattgatgtggtgacaatggaagtccttgatgccactgctcgaagtttgagtcaagctcagcatttataatttcattgatgtcttaaaaggtaacctgtggatgtgcagctggagttgctgcagcatttacagagctccagtttgtggcgtattgtttgctctggaagagggtacatcttaattggtatggatttttatttcttgatcaaagaatctgtttgcttaaa

SEQ ID NO: 81487 - DNA, 451 bp, Glycine max
  unsure (1)..(451): unsure at all n locations
tctcacccaattntctataaatagggggagaagtgaagtttattttggttcagccccttaggcacttctctctcttatgaatttgcttaagaaaattgtttccgtgaagaaaatccaagccgaggcacttccgtatcgtttccgtaacgctttcgtgagtgatttcgcgaaggttttcgacgttcttcattcgctctacatcgatcttcagccttcaacgggtaagtacctcataccaagcttttcaattcattctatgtacccgtggcggtccacattttgtttcatgtatttttattctcgatttcatttactttatatacccccttttgatgtgcttaagccatttatttaagtcatttctcgcttaatctaaaaataaaataaatttccaccgatcgtttgaattgtatcatacgtttattccggttaacatgaattccgaccgttc

SEQ ID NO: 81488 - DNA, 332 bp, Glycine max
  unsure (1)..(332): unsure at all n locations
agcttgtatggntcaccccacaatacgtattcctatgctatacccgatcccatatcgactcgataatacaatggtcgccccacccctcaccaacgttcagcggccgacatttctgcgagaatgcgacccgaacacgacgcgtgctggtcgcgaataaaccccggggcgttccatggaacattgtggggctctgaagtgtatggtagcgaggtctaaatgatgctggttgacatgtgaggagaatcgggcggaaatcctgacgttgactacagatgccgcacatggagccatttagaacgctgctgttgnaagtgtgtaatgaatctccagga

SEQ ID NO: 81489 - DNA, 364 bp, Glycine max
ttggcatagcacccacctgactccttttgtttgtcgacccccgcgacatagctgtaggtaccactctgtggtcaacgaatagaaaacagaactatcacccttccacactgcctcattctaaacgatgtatgaccatggtgtacccatcacacgctgcactaggaggcagactgcgatggtgcaaaacactacttcacatacacgaatcacctataaaccctccatcccctgctgcccacctcaacagagctcacggactcacacatagcccatatcctctgtactgtcaacgccgggtcctccagatatcctcccgatcttacccaacgtcaaaattgttctcaacccatgaatcaataactta

SEQ ID NO: 81490 - DNA, 426 bp, Glycine max
  unsure (1)..(426): unsure at all n locations
acctgcngctgcagcttgccaaaatcatatttttttgttcataccccccacacttattcccagcttattcccaaaacaattccaaagctccaaaattccttaagggtaaggtgatatcatggtttttcacttaaggcttgtaatgagcttcaaaacaaagaaaggggaaaataggctcaaaagggctatcaaagaaattaattcaaggtaagtccatttggctagaagtttataagaacgaaattgcctaaatcatttccaaatatgcatgtgaattaggaagcatcaacaaaaatcaagccaatgctattgtgcaagcaatcaatggggcaaaacacaccaaaagattatgatgatggatggctcgaattctcacaaaggtaaacttatcactttcacatcgagctgtcaaaactatcatgacat

SEQ ID NO: 81491 - DNA, 452 bp, Glycine max
ctatgaaactcagcttaagttaatatcttcggtttgatttcacgcgacatctatattggcatgctcaatgagactagagtaagtgaattgataggtcaattcgaagttagagtcgagttgcaccgacttatataattatgctctagtatgattatgagagatatgaagccacaatagaagaaaacatgtagcaaaaagataaatgaaggaatgactctaggtatgctaatgttgataatgccgacaacatagtccattcgacaaagctaacgtccatttctgtggctgtgtctactattgataccacaatggtggcaacagatacacctgttgtaatgactgtgtcattcattaaggaacatattgatttgggcatccatgatataatgtaccaagtctccaaacaactggttgatattgctaagcccatggtacacaatgaatatcataat

SEQ ID NO: 81492 - DNA, 391 bp, Glycine max
agcttcttatacaaggctcatcttgtttgtttatctgcttgaccatggctcaatgcctagtggatgactccttctctcatatcttgtcctttttcttacgctgcatctccatggcggaaaatcatcatcaaaggatctcattgaaccttaaagatccagcctccatataagccccaccagcacgctttcataaaggatggctttttaaaaatattgcaaaaggcaagtcaataactttaccatacaccacactttattattggatgataagtgtcaaaaatcttatactgttagtgtattttaattaacctcaatttatatacacatattaatttagatcatttatattatagattggttatgccacttacatgtactatagcatcttaca

SEQ ID NO: 81493 - DNA, 407 bp, Glycine max
tctgctattaactacgagcgtcgagatctatttctgtatttttttatacattcgaataaaaagatattgcattctgaaactgcttacagcttccgttctcattgtttagcggctcgacatattatgggactcagctggacatccgtgtaaaaagtaatcgtcgcgcgattttccaaatagcatctggactgaaattcgagcgtctcgatatcttacgggacagattcggacatccgatgaaaacgttattggcgtccgatcctgttcggagcgtctgaagctaatatccagcgtctagagatattacgggaatctatcggacgcctgagtgggctgacattgtctgtcgatttttctcgtaccttgagacatctatttggagcgtgtctatatacgtcgggacacaa

SEQ ID NO: 81494 - DNA, 254 bp, Glycine max
gtgcaaaaaaaatgcttgtgtatggatggctgggacagggtagtacatatggggttctggacatttgctagcagatcccaacggtcaaaatgtagacttatgtactagagacttccagaaaagtttcgagtcgatccaacgattaatgaactataacgaaggaaatgttactggggtatttgtatgtgaaaagctgtgattttgagttgggtattgggcagagttttccgccttcgctctgttttgcttgggtt

SEQ ID NO: 81495 - DNA, 372 bp, Glycine max
  unsure (1)..(372): unsure at all n locations
gcacacccttaaaaaaaatctttgaatgttaactaatcgctctcctacttttaaagtcagtattactaagaaaaggaagaacaaagacaaagaggatagcactgaatttatgagacgaatcttaccagcaaaagatataaagaccttgtatttccaaagggtcaacttagaaaatatatctaaaactgattatcaagtagcttctaacctatggttttcacaaataggaactcctaaataaacaaaaagaatgaccaacaatttacaattcaaaagatgagctgaccttntccactcaataccaataacccgcaagttgctttcgaaaaagataagtgtcaagttgaaaattatttcaaaataccttaactt

SEQ ID NO: 81496 - DNA, 346 bp, Glycine max
  unsure (1)..(346): unsure at all n locations
atatgatcatcctacttatacgactgagaacactggggcgaatcaagagggtgaggatgatggagaaacccatgctgtgactgccattcctgtacgaccaatttcccaccgacccaacaatatctttactcatgcaataacaaactttctccttacccaccacccagatatccacaaaggccatccctaaatcaaccacaaagcctgtctaccgcacttaccatgacgaagaccacctttagcacaaaccacaataacacccacccagaagttaatnttgcagcgagaaagcctgtagaattcaccccaattgcagtgtcctatgctgacttgctcccatatctac

SEQ ID NO: 81497 - DNA, 374 bp, Glycine max
acaagacaaggaactcacggatggataacactgaccggcggccagacgccgagcggttaatcgccaaaactgacatcttgctatctgcaatacgaaaagcctgataccaagccaagacagacagcgtcttctgcgcccttcaccgagcacggacgacaaggccattgacacgccgagatatacgacatctttggcgctcacaagatctgtcatactgacttttgagttacgctgactggcggagatacccgagcggttatctcgataaacactctttttagctggctggaagacgaaaagcctgatatcacgcagaaaattaactacgtttttgcggccctaagtaatcggggccgacaagccgttgacacgcg

SEQ ID NO: 81498 - DNA, 377 bp, Glycine max
  unsure (1)..(377): unsure at all n locations
ctgtacangcgcaggtgctttactgatggaaggatgngattgctatgtctgacctcagagtgacggcactctgattatactgactctgcacaagttggccatgccatgagtgggaaccttgggactgggcttggagaagctgagtaacgcaatggccgtctgatgagccagaatcggcacggaggctatcgtctctgctgaaagagcgtattctggatgatcatttgcctaactatactcttataaggaatgctgaggaagagactcaggcgcttgatgtactagattgactactgctgctataggtacattggaggaggaacatatggctcgcttggaccagcatcattctggataggagggacaggctgttgttg

SEQ ID NO: 81499 - DNA, 283 bp, Glycine max
tacaacccaaaagagcagggatagacataccaaatagaatggcgcccagcccgacctgcagagaaggacattttcctagtctccctgaaaacgcgggcaaaaaccaccggtatcatgtcaaagcacagcaccacaagcggcgggagccaccgagtcaaggcaagggccaggataatgaaaaatcagagaaccctgcaaagggtgggtccaccttccaaaagcatagcgggcgggactagcaccatatggagctgataccagatgagagagcccgcttcgactt

SEQ ID NO: 81500 - DNA, 125 bp, Glycine max
gtacacgaacttgattttttataagctcgatcacatggcaagctacaggcaacatcttcttctagtgaatactctaaccaacgaacagttctagccgaataagcttgagatcgatgatgatgatc

SEQ ID NO: 81501 - DNA, 254 bp, Glycine max
  unsure (1)..(254): unsure at all n locations
aaatcaccgaatgatgtcttatatctcaagacgaggatgtnaatcatgactcatcgagaagaaagatgtactcaccacatgcagactttacaaggtgaggattgagaaggattttacaagctgcgttcgtctcctagatgcgcttacaaacagagctagcttagcgcatcctactgtaccacaggattcactctctggccactgaaacgaccttcttgtaggcgattactactgcatgacatggacttcaaaac

SEQ ID NO: 81502 - DNA, 430 bp, Glycine max
  unsure (1)..(430): unsure at all n locations
gacttgagatagatgaacaccaccttatgtcgtcgtcagccacggcgctacaggagcacaacanggctggatatgcatgaatcccgtgagtaccgtatttgataagggaggaaaacaattttgtgtgaaaatatacaaccctcgtcgttctttctcttagtgactcttaagatgatcttatcgatacaaaacacactntaagagtcatctgaaggaattactctgcatttcttcaagagattcaggtttatcgagattcatttattcttcatcacgagttgataatcaaaggaagagcttaaagatgttgtgatttgcacatcaaggtgtattccaatctaatttttatttctttctagattctaatcctggntagggttataaagggtgtgtgtgagttgataaagtttcaactcttgatccttctctt

SEQ ID NO: 81503 - DNA, 424 bp, Glycine max
  unsure (1)..(424): unsure at all n locations
agctngcctcatagaggtccaagaatgatttttctgncgaagggactagttccgctcctgagtatgacagtcaccgctttaggagcgctgtacaccagtagcgcttcgaggccatcaagggatggtcgtttcgacgggagcgacgcgtccaactcagggacgacgagtatactgatttccaggaggagatagggcaccggcggtggacatcactggttacccccatggccaagttcgatccagaaatagtccttgagttttatgccaatgcttggccaacagaggagggcgtgcgtgacatgaggtcctgngtaaggggtcagtggatcccgtttgatgccgacgctatcggccagctcctangatatccgttggtgttggaagaaggccaagagtgtgagtatggccagaggatgaaccggtc

SEQ ID NO: 81504 - DNA, 441 bp, Glycine max
  unsure (1)..(441): unsure at all n locations
cctagaggagacgaaccattccaagtgttggagaagttctttacaatgcctacaagattgacttgcctagtgagtataatgtaagtgccactttcaatgtgtctgatctatctctttttgatgcagatggaggagccttggatttgaggacaaatccttttcaaggagggagtgatgaggacataaccaagggcaaggaccatgaagcacttgaaggtcccatgaccagaggcagacttaaacaagcccaacacatcatagagacaaggctggtcatttgtatagctgtcattgatgatgattgaaggcccaagtggagaaagatgaaggcccagaggcagaggcactaccaagactactaattgttgctgaaggcccaaactaacttgaaggcccaagttaaataagtttttagttattaattattnttattggtaattt

SEQ ID NO: 81505 - DNA, 378 bp, Glycine max
  unsure (1)..(378): unsure at all n locations
agcttgtagaaaccaaagagacagatatatattataanatccaactcggagaaaccatagaaagaaataattttttttgaatagattcttctactgctttgagttgctttcttattataacaaaatttcacttctttcacatttgtgcatttgctgtcacatgaaggcttgtctgtttggccttattgtgaaatattatggagtacactcgttgacaagcaatttgtgtgtctgctactctgctgtcatataaaaacactaaaaagaatttggcaaaacaccatgaagagttaaaagatatgtctagctttctacatcggttcaggccaaaactgatgtagaattctacacattctacatcgggtattaaaatgaccg

SEQ ID NO: 81506 - DNA, 425 bp, Glycine max
  unsure (1)..(425): unsure at all n locations
ggattntgtgatagtgatnttgccggagatgttgtttatataaaaagtactaccggatttgtattttttatgggtgattgtgtttttacatggagttctaagaagcaaggcattgtgacactttctacttgtgaagccgagtatgtagctgcaacttcttgcacatgtcatgccatttggctaagaagattgttggaggaacttcagttgttgcaaaaggaaagcacaaagatctatgttgataatagatctgcacaagagcttgccaagaatccggtgttccatgaacgaagtaagcatatagatacaaggtatcatttcattagagagtgcattaccaagaaagaagtagaattgactcatgtgaaaactcaagatcaagttgcggatattttcaccaagcctctcaaattgaagattttcga

SEQ ID NO: 81507 - DNA, 368 bp, Glycine max
  unsure (1)..(368): unsure at all n locations
acctgcaggctgcagctgtactgcgtagacatatggtancttatttacgactcgtaagacttcaattgggcaaaattggatgaaggtaagagtggtcttcgaaatctgcactttacgcataattttgctgctgaaatgtgcagcataatttttgtatatgtgcagaaaaatgcttgtgtatggctggttgcggaaagggtagtacatatggggttctgaacgtttactaccagatcccaacggtcaaaatgtagatttatgtactatagactttcagtaaaagtttcgagtcgatccatcggttaacatactgatacgaacagaatgttactgnggtatttgaatgagaaaagctgtgcgatatggtt

SEQ ID NO: 81508 - DNA, 438 bp, Glycine max
ggagtagaaacatgggaccaactcattatatttatttttgaagtcatatctagtcaagggctgagagaccatacaaggttcctaacgatttctaattatgtgggccattaagtctatcatatgctgacaatagccgagaagcccatgaatctcttcgggggtggagtaggagtctgccatcgccttggccttggctaacaagcggagaagttcttgactcccgttcaaggtaagagcaaaccggtccatccacatggttgcctcttggtgtaaagagtcgatcacccttcctctagcctctttttccgcgtagacttgagcatactcgtccgcgattctatgctacggggcgcatggctagacccaactcttgttggtacttagcgatgatagctagcatgttggtctctgtatcgcataaacgctgagacaaacttc

SEQ ID NO: 81509 - DNA, 393 bp, Glycine max
  unsure (1)..(393): unsure at all n locations
agctngcggactataccttcgaccgatctctgtcgtgtttctgtctaggcccagattcaaggcgggctgcagcaccggctccgcttccctaactgtactggaggcggttgccgtggcttaatcctctatggttttctggagttttaacatgacctccgagatggaagccatttgatcttttaaagccgatagatcggccttcatctgttcctgcacgccctcttcattatccatttttctggatcgagtgttataggggttccttggtgttttcttaattatgatgaaattcctaaagaaataaacaacggtgagtatgccaccaaaacatgagtatgcaaatggatgatcggagcacttggatccaccccaagggttttagataatgtaatg

SEQ ID NO: 81510 - DNA, 405 bp, Glycine max
  unsure (1)..(405): unsure at all n locations
aacctttcaaaataaaataatattataatttttcaacccaacgcgcaatcactttnttttcctacaaagaactacgtaagtttaatttcctcattgcacctagggatatgtaggagcgagggaaaatccctcattgaccaaagaaataaaaatgactaacaaaataaataaaagtccccttttgtttctaaaaataaaatttgatttcctttactaaaaaaatataacaaaatataattcatgtttttaagggaagataaatgattaaaagtgactttatttttagtgcacacgattaaaggctatcattgtcatgacggacacgtcgggtgctaacaccttccccgtgagtaaacgactctcgaatcctttttttcaaatngtagaccatntcttatccttttt

SEQ ID NO: 81511 - DNA, 365 bp, Glycine max
acgtggtttacttcaaaccccttgaactaattcacattggtttattcgggccctctaaaactatgaagttagggggaaatactattggctaataaatagccggatgattaacttcaagcttcacatgaactttaataaaataaaaataaaaaaaacttgaagcttcttgatgcttttcgcaaactcgccaaggtgattcaaaatgaaaaaggtctcaacattgtttcacttataagtgatcatggaggtgaatttcacaatgagtcttttgaaaaactttgtgaagaaaatggatttcaccataatatttcttgcccaagaacacctcaacaaagtggagttgtaagaggaaaatttattccttg

SEQ ID NO: 81512 - DNA, 419 bp, Glycine max
  unsure (1)..(419): unsure at all n locations
tgttcttttcctgttgaaatgaacaagattttttaattctttgttgcacaaaacatacctgaatttgagaacattganttgttgcacttagccgtgagcattatcatgctcttaactctgtacaaaacagtgttttttcattatgagcatgtagaaaacaaaactcatagctagccaacgtattataataatcctttcattggagagtgatgaatgcaaagaaaaagaaataaaaaagctcactagtagttgaaactgagccactttgtttctttattccattgctcccattgatcatgttttgcatccattaaaaaatctgtaaagagagacatcactttgtgatgtaagctccattggagcttgcacgcccatgatcttcttcatcaaaggatatctgtgcttcttggaagatgaat

SEQ ID NO: 81513 - DNA, 404 bp, Glycine max
  unsure (1)..(404): unsure at all n locations
agcttccgaataaatggacgacgctaccgctgtttctgccaagctatactgagagaagggtgtcaataactagtcatctttcgagtgcgcgcccatcttacgacagtacattcttgagatggtactntgggacaagtcgcccctatatactttgacaagagacaacactattgacttcgggagaataacaacctcggctacttatcaaggattcgatatgtctgcgatcggatactccccctatccttacacggacctaattctttcctgacagagacctaacttgctccgaccatctaatggtgtgggcggcccttacgaggacaaaactattggtggtgctgcgaagctgagtggatgcaacgtgcctgatgcctgacctccagggatcggtggatataact

SEQ ID NO: 81514 - DNA, 263 bp, Glycine max
cgcagctaagccaacttaggcatttttcacggaggcaaagcggattggctaagccaaggcgagacggagaccgctggtgtaaaaccacccagatatggctgccccacgatgggtactctgcacctgacgcgcactgaggaggccatgaaccgaggtggcaacacgagcgcacacataagactcgtggaaaacaccgttcagaggagtgtatgtatgagcatgtaaggcaaggacttcctcgctcaatgtgaatcaatgacata

SEQ ID NO: 81515 - DNA, 331 bp, Glycine max
  unsure (1)..(331): unsure at all n locations
cactganaacattcatcctcctttttatttgctgaacccagggggntaagaaaagaagtcctgcaggtgaacgaaggaccttcgggatggaaaaaagagatacttgagtacttgaaacacgagacactctcagcagacaaggggaaagctagaaagttaaaagcgcaagctgccaagtataccttagtggccggtgaactatataagagagggttcttctttgtcgcaacctacccttcaaagggaggaaggcgcgcggagatcccaccaacgtttatttgaggaaaacggcgagaaaaccggataggtgtagtctacgaactctaattgc

SEQ ID NO: 81516 - DNA, 329 bp, Glycine max
tatgcaatctaaacacataaatccctctatttgtttaagtccagccagcgactggcaaatgttgttacattggtgtcgctggtctcaaagaagctaggtgtgaagtctagtgtggatgatggcaattactacctttatgatcaccctgttactgatgacgattgattacattaaagcctacaactcctacatgtaagaatcgtagttgctatcaattataggactattatcaccttatgattgtcatgagaattgctcatgacgcctgcataactattattacaccgtttcatagtgggcctctcaggataaaatgcattctaattttt

SEQ ID NO: 81517 - DNA, 428 bp, Glycine max
  unsure (1)..(428): unsure at all n locations
agctntcactcggatgtccgattaggtgtatcatatatcgagacgctcgaaattgaacaacggaagctctcgagaaattgaaatgatcataacttttcactcagatgtccgattcagacgcataatatatcgagacgctcgaaattgaactacggaagctctcgagaaatttaaatgattataaattctcactcggatgtccaattgaggaacatcagatatcgagacgctcgaaattaaacaacggaacctctcaggaaattcaaatggtcataacttttcaaacggatgtccgattcaagcacatcacatatggagacgtccgaaattgaaccacggaagatctcgagaaaatcaaatggccataacttatcactcggatgtccgattcaagcgcatgatatatcgagacgctcaaaattgaacac

SEQ ID NO: 81518 - DNA, 424 bp, Glycine max
agcttcacgaatgcaatatgtactccatctattgtaataggagacaggggacaaccatccttaaaaaacatctatattatctcagaaaaatggtatagttgagttatttaacaaatcaattaatttttacaacactaaaaggtctcttaagtaaatgttgtatacctacacaaagagattcccattaacaaatccaattgtaataaggtgttgttgtgtcgtagatggtgtcgtactcttaagcggaaagaaagtctaactttggagcatagataagaaaaccaagacaacattattatgactagcaatgacataacccatgtaagaaatggtcatccacttgtcatcaatacatgctattgggctagggttgacatacaaagagtctaacaatttaaccagtctgtcttgtgtgcaaaacaac

SEQ ID NO: 81519 - DNA, 389 bp, Glycine max
  unsure (1)..(389): unsure at all n locations
ttaaaccagtattttttatcctaccaaaccattgtttgttcttcacaaatcagaagacttgttggtttgattgcacaatgactaacactctatcgtcttactgacagataaacaaatncaacacttagttttttctctcaagaagaacaaagtgttttgagggcttttctaaaatttacaagaatttacacagagagctctttatgcaaggaatgaaataatgagtgcttcaaatcatgtcatgtctntaaagcttatagtatttataggcctccttcaatcaaatatttgttctttttcctctctctaagcttaggtctgaagaaaatgatcattgggacatttaatgcacgtacttcttcatgttgagaaaccactcttcatcattg

SEQ ID NO: 81520 - DNA, 296 bp, Glycine max
  unsure (1)..(296): unsure at all n locations
agctngtcgatcgctactgtgcaccggtttgttaacactgcggtctctgcatgctatcacgcttttcgtcttacagacatcccccctgaaggtgtgctctgatcaccactcgtgtatcttcgctcgcctacgtgactcatatgttagtatgacacacgtcgtgagcgtggtatatgacgttaactttcgcgtgataacagtcctgtcgctccggactgccgaaaggcgcttaggacaaccacaagactgtgcgtgctatcatgctattcgtcttacatacttcttagtagaatgtt

SEQ ID NO: 81521 - DNA, 197 bp, Glycine max
tctacaaaggccatctccagattctttcttgccaagacaactacgcaggccgcagccaacataaaaggtcttaccaagcactaagggaaagtgggcatcatcacagataaacataacaacaaagacctgctgcgaagataccatgtcccatcctgacgaaaaccaaccgaatcctccatataccctgtgacaaagcg

SEQ ID NO: 81522 - DNA, 384 bp, Glycine max
  unsure (1)..(384): unsure at all n locations
tgctatgcaccctgaatgggccaacattgttttgtattcttacataggcacgagagaggcttggtgtgtcttttgtcaatcagacgcaggcgggcccatctactcgcagataccaacgtggtcacttgcgcatgatcatcgaagacataacgtctatcgaccgacactatagcaacccatttttgctgccatactgggacaatctgtntcaatggcacataaaggacgtcaaggccacacactctttgcttctccagataacttcatgcttataacgagctgagacaccttatagttatctacaccttgatcattcctagccgaaaagtctaatgacacgcggagacctatgattgttaaccgtcacattcattacgcacaggc

SEQ ID NO: 81523 - DNA, 422 bp, Glycine max
agcttcaagatattcttaatagggtgtactattattccaaccatggtccttcaccccgaataaattatatgtggctgaatgtgtgcatgtgtatgtctcataataataaaatatatctgtgtaaattaatttagattttactttgtaaaattcagttgtgtgaatcaattaaaattgtccttaatccttattactaatagaattttttaaattttacacgagtatattttataatagaacaaattattatattttaacatatatttataattggatattttttacattcttactttgataaaaaaagcatatcataaattaaatattaatttatatggttcttatctattatgactagtttaagattctataattaatttaatgaatttaagaatctattgaatataaaaataacaataata

SEQ ID NO: 81524 - DNA, 444 bp, Glycine max
  unsure (1)..(444): unsure at all n locations
attattntgaaactatcaaatattagacatttgtatctatttaaaatttctaaatgagaagaaattttaaaataaaatcaatataatttaataaattcaaaggaacgaattgataagttttaaatcaatttgattttttgttatggaacagggtaaaagtggaacttgaagtgaatttaccgagatgcccatgcgttcatggttttccttctaacgcaactggcaaagaggggtttacagcttattcgcacgttccacgcgtctagcctccattcctcgcttattctgtgtgtcaactagaagcttcgcattgtcactattcatgcttaattataattttatttttttacaagacgattaatattattattgcttattagtagccataacattcttttttttaattttntttcattcttctttggtcacacttagatttgtagc

SEQ ID NO: 81525 - DNA, 375 bp, Glycine max
  unsure (1)..(375): unsure at all n locations
agcttggctaatttagtanctgtccttgtttgtctattgactaaaggacaatcgatatagcatgtgacataatctacttcgtatcctccattattattatttggagaatattactcccaatctttctaatttttgacaaaatttatctttgactttatatttatgacaaatgttagctctaatcttttatacaattaacggaaaaacaacaaaaattgtaaaatgaggagtcttttgaaaattcggaggaacatttgttgaatctatttggtggagagatagaattcattaaaaattaaaatattatagataaaaaatccattaaaccttaattctatctcatacatagttattggaatgtctgatagaattaat

SEQ ID NO: 81526 - DNA, 445 bp, Glycine max
  unsure (1)..(445): unsure at all n locations
ttcagtgctcaggtggactagtggaagnttcatctttttattttggaaaagaaatgactgtcatatagggctggtttcttaaagattcaaccaaaaaatctaacgtagaagaattcagtgattattctttagagatttttaaaaaagtgtaaattacattatttgttgtgttgcaaaattaatttatttgttaataatgatgaaattattttaaaaaacaattgatttttacgagaactgattcaaagtaacgtatgatttgaataagcttgaaaatcttctccagcttctaattatttttgaaaagcgaaacatgaaaaattgaaaaaatatgtttttttttaaattaacttttcatagaaaatgtaacaagattaaggctaaaataaaaagattaggacacagacaaataaaaagttcatgcatatntatatagactaaaaac

SEQ ID NO: 81527 - DNA, 292 bp, Glycine max
  unsure (1)..(292): unsure at all n locations
cagaaactgggactagtgggtgtatgccaaacaacttgacaattccacccaccggcatattcatcatgaaaactgtgatgtcctaacaggcaagcttctggcatcacagatataaggacatggaccacaaaaccaggaggctggtgggtggctggcgcanctatgaaccttgattgatatatgagatatggcctctggtaatcgattaccaanggtgggtaatcgattacaaggcttaaaaatgaagacaggaggctaagatagtctctggtaatcgattaccaggcttgaa

SEQ ID NO: 81528 - DNA, 441 bp, Glycine max
  unsure (1)..(441): unsure at all n locations
ggtacgatctagtaaaaaatggcttcttttcttgtttctaaaaatctcggggccaataatcctaccttattagcaatgtgaaacacatcatctgagtattctttgattgtctcgctttgaatccctcattgaattcaacacttgcatgctttgaatccttttatctccaacacattcttccttcacgtatcccaacttgctcttgtggttttgagtcatgattatggaaaaattgatttttgagacacaagcaaagagacatgtncttgcttttgccttcttgatttgcttctttatgagtttttatttgggccacggtgaaattttctacaatggaggaacattataatcttcttccatgacttcccagagatctaaatagcctctaggtaggattccatttcaacaaccataaggtcataactttctccatcaatgata

SEQ ID NO: 81529 - DNA, 293 bp, Glycine max
  unsure (1)..(293): unsure at all n locations
gaacatcacacgattagtgacaccagatatacgattaaagatttttttgtgcatgccggtagagctttttgtaaaggagaaatctatgtctgtcaccattcagggaaatacctcatccgcntttctccaactactcgcgcccggaaggaacatgccaaatagccgagatcacaagacaaattccggtgctgactgaaaagcttgcttctacaaagataaaactgaagaccccggaataagcaactgagctgattgacaacatgtcagcgagtgatcatgccattctatgagag

SEQ ID NO: 81530 - DNA, 418 bp, Glycine max
  unsure (1)..(418): unsure at all n locations
agctnntaacttaaaaggttaaaatatgttgctttattttttattcatatcttcatagacagaaaggtaacatgttatggaaattaatagaatgttggaaagccaccttaattgcaatcacccctagccttccttaattgcgactcttagagttggttgtcaatgtggggctatctatgaaccagagaaaggctaagtgaagcattgtgtagtgtgcatccattgagacatcgactcttgggggttatgatcccacttgaactagagataaggcctaaatagtgcttatagaacttgggcagtccttaccttagaagctagtttttatggagttgagttacgccctaagcccaagttctaattggatatcagattttatcttagattcattagtgagcagcatgcttttccacactct

SEQ ID NO: 81531 - DNA, 445 bp, Glycine max
  unsure (1)..(445): unsure at all n locations
caacaacgtttatggaaaccatcttttcttgttatatattttttgntgaagaccatcaatgacctcaattttcttgatcattaacgagtttttctcattgagagctttgactaagttcctcctttcttctaaactagccttgaactttatctccaacttagtataccttgttctccaatggcgaatagtagcagcaggcccatagagttaaacctcagtagaatccaaactattgttggacccaacatagtccatcatctcttagtcaaccttcgtaagcaagttatctatggtaataaactcaaaccccttgatatcaacattcagtagcgaggaagatcatgagtaacaatcacatgatcaacctgacatagaggacttggatgatattggatcaccatacctncacttcgcttttagacaaagtatttngaggaacactctc

SEQ ID NO: 81532 - DNA, 299 bp, Glycine max
  unsure (1)..(299): unsure at all n locations
gctttattgntgaccacagagtggtacctggagatatgtcgcggaggtcaggagaccttggggacgtcacgtggggtgctattgcccaataccaagcttgaccaatcccgacccaccccgggcatattcggtcagtgagaacctgtgatgtacctaagcatgcgagctcctggcagtcttcagataaaaggaacaaagaccacaaagcaaggaggcttgtggaggctggccacctatgaatattgtgtgatatgtggattatggcctctggtaatcgattaccaaaggtgggtaatcta

SEQ ID NO: 81533 - DNA, 401 bp, Glycine max
  unsure (1)..(401): unsure at all n locations
gagaataaaacaatccanaatcaatttttctctttatgtaacgaagaattctttttgcggcttttagatgaggagaggcaggagcctccataaagcgacacacaactcccaccgcatatagaatatcgggccttgtattggttagataccttaaactccccacaagactcttgaagatcgcggagtctaccttctctccttcatcaaactttgataacttcaagccaccttccataggtgtgttcacgggattgcaatccagcatattaaatctcttcaacacttcttttgtgtacctttcttgtgagacaaagataccattcttcgattgcttcacttccattcccgagttatatgacatgagtcccatatctgtcatatcaacatgacgagacatggac

SEQ ID NO: 81534 - DNA, 402 bp, Glycine max
agcttgtatactagcttgtacaccacttgtttctcttctatcggagagcgcctaatattataacatgcctaatactcctgaactaaccaatgatcattcacacgccactgcggattcttatatttacacccaaccaacagatgtgagtgctgattctgcaggtggataacttttactcccaaaagcgggatcctgtataactagtgaggatgctcttcccaatcgcacctcgtctgcaatgcgtcagcaagatgacttgcgtgatgcaatgttgatactatgtgaggaattacatagactgattactcctggtttcgacactgacaaacgtgctacttatggagccttacagctgagcatgaggtagagctcctcacccatcgtgtgggacaacacagatgt

SEQ ID NO: 81535 - DNA, 403 bp, Glycine max
ctgtgtcaaaaggcttctctgagagactatatacgaatgtcaccacaccctcatttgaactaactcaacctccttatgaactactactgacgaaattatcgcaacagaatatctatcatcatccagagagacttaattctgtgtagatcacatatctcccggtggagcgaaccctaccacccacatagaaatgccttatgtcacacaaagctgactactacacagagggctgagcatgacgcatataccttgcaaagtcccacaaggcaggatcgcataatgcacactccccacatcacctgtgccgacaaatactcaccctctcatatgcgttacgtacacctaccctcggtgctccattgcagtgcttccaacgccaaaacttcatcagtcgtcattcatg

SEQ ID NO: 81536 - DNA, 304 bp, Glycine max
agcttgttgagaatctctccactgctgtgatactattgtataagaggggagcagaacgatccgtgggagcattatgttgtggttactgatcttggcagtataacattcaacatatttcttatattcaaagttatatagcgacgaagaccatctactgtatttttaccattgctcttctgttaccctttgctagcatataaaccaaactctacatattctgattctctgccatagatgcccacttagagatttctgatcggcagataacctttttgtgtaccttgaacctacatatgataaatct

SEQ ID NO: 81537 - DNA, 387 bp, Glycine max
agctgtgatatgaacaacaagtcttctttgtctataaagcggcattcctcttgcttgcgcaaaaaccatgctatctctctctccttgatgacgcccaaccctctccaaacttcaaatcttcataactttctcatttattatccaaatcacttcaatacaaagctcatagtgtttattgttcaattctctacaaagcccgccgatcaaaatttgctgaaacaagctacaatggcagaatcctcaaagaagagaaagggatcctgcttcaccaccaccactgcaggccaacgccgacacggcacatacgatgacccaccaacatcagatcctccttccttttcatcttccaagacattaactttgtttcctttcaatgaccagcgctag

SEQ ID NO: 81538 - DNA, 384 bp, Glycine max
  unsure (1)..(384): unsure at all n locations
agctngcttgtggagcatatatggatgttttatctntgagctacactgacggccttcaatggtgatttatgaccacgtagatgcacctggatggcttatgagatataagatataggaggcgccttccgctatggaatcagccatggacgaaagaccttcgccacctatatgatccttggatgataatctagcatagatgctgttatggatgaataaagcgagggctatactgacagaggtgtgtgctcgacccttaatgaatatgagatggggagaagtgtaactgtgaaatgtgtctgataacactactattcatcgtagttacttcttgagatgcacatgcttctattcatgactatgatcttccctgagatctttcttgat

SEQ ID NO: 81539 - DNA, 232 bp, Glycine max
  unsure (1)..(232): unsure at all n locations
caacatcatttcttgcactgaatctgtgggagactagaagcatcgattcaaacaaattactgactctctcttgggtcatatggcacatgtctccaccattggccacgtcgaccatactcctgattgtgtagctaatgacctcgtagaaatattgcacattgagatgctcanaaattaggcggtgacgatagcttgcacacaagactcttgaatctgtctcatgacacataca

SEQ ID NO: 81540 - DNA, 425 bp, Glycine max
  unsure (1)..(425): unsure at all n locations
agcttccatcaaaatctaccttattatatatcttagagatcttgnttcatctgttcttgcgattccaccttttctcatatcattttgcatgtttttgttttctgtcttgaatggtatagaggtgagggtcgattctttgaggatcctaacgagggtttgataatcgattttgaccgagaagtaagtcaaacaataaacgaagaagaggaagaggacgtcctttcaccaaagttggagaggttgatcgctcaggaagaacacgatatgaagcctcaccaagaggaaaccgaactgataaacttatagaccggagagggaaagatagaagtgaaagtaggaaccagtatgatcgcacctatcccgcaaggtttgataacccttcttgagaatatcaagacatcttcgcatggtcgtaccaagacatg

SEQ ID NO: 81541 - DNA, 243 bp, Glycine max
  unsure (1)..(243): unsure at all n locations
gcagctgangaaactggtgcattggtattctcttttcctcgcaggacacgaatcagaagagagtacctgttacaaaggcttgtggttagcgcttctatgctaaccatcttattgagggttgacctttcaagcagaaacctggagcaattaatcatcactgtagactatacggaagagaagtacaaaacacctcctgaaccatcccagcaaaatcgacaaccgcccaacaattatgaccttttc

SEQ ID NO: 81542 - DNA, 285 bp, Glycine max
tctccctcaatcttctaactatatggggagaaggttgtttatttggttcaggcccgtatgcacggctctctctcttcctatagctgaagacaatgcgttcctggaagaaagactcaatccgaggagcgttcgccacggtccacgcgagtaatctcgctaagattctcgacaactgaccacaactcatcgtctggctcatcgtctctggaggcttatacgggtactggcctactaccgcgctcatccaattcatcctatgttccacgggagggccacagcttgaat

SEQ ID NO: 81543 - DNA, 424 bp, Glycine max
  unsure (1)..(424): unsure at all n locations
agcttgcctgtccatgcagcttattgtttgtccgggttatgnnggggaacggntacgaacccggaatgagtttaggcaaagacaacggcggcataactagcctgataaatgccaaaggaaatcgggggaaatatggcttaggctataaacccactcaggcggatataaagagaagcatcgcggggagaaagagcggtggtcaaagctcgcggttgagacaagaaagtgaaggaggcccgccctgccacataagtagaagctttataagcgcgggtctgggagacgaacgtcaagtggtcgcgatatacgaagatgatgttccgagtacattggatttggtacgaccatgccctcctcgatttcagttgggaaattggcgagtggaggaacacccccgcatttacgcaacgagcataatgtaaac

SEQ ID NO: 81544 - DNA, 436 bp, Glycine max
  unsure (1)..(436): unsure at all n locations
taatatgattagaatgggctaagttagatatctttgctaagcacatcatgtntactcgctaagcacagtgcacttgcgctaagccctattctttgcggccaattcactagtttaattaagctaagcgcgacccattcgggctaagcgaaattccttgcagcctggatagcgctaagctagcaacccctcgctaagtgcatgcccccctgtatgcaggatgcagtatattcgctaagctgaccatgagtgtggcttagcaagagttgcaggttttcttatttgcacaattcgcttagcgcactcctttgcgctaagcgcagttaaaaaaaaaattgaatttcaaatgggcccatgtctacccgccaagagaggaggcggaaagccaaacacctctctttgctagcggnatatctcgctaagcgagtgacttgaaaca

SEQ ID NO: 81545 - DNA, 412 bp, Glycine max
  unsure (1)..(412): unsure at all n locations
agctntgaacaaacaaaatggcatcatgctgcttatgtgaaataacatcacaaaatacccatattacccttcacttacccttgtctcaattttggtgtgatgttgatcatcactcaaaatgactctttatttatcctctgattcgcaggatgacaagatgaaaatggatgcatgcttatgatttggatgtttaagtgcaacaattaaacaggtgttatcgtgttcaatttttacttaaatgctcacgacaccccattgattgagcgaaatggctccagattcagtgggcaaaatggacagtgtatattgttagaatttacacaggattataagactttgaaaatccgaatgagtccttggagaacanacatgtattgagccttctagttgccccaggtactatgcataatat

SEQ ID NO: 81546 - DNA, 439 bp, Glycine max
  unsure (1)..(439): unsure at all n locations
tgtctcagcgtttatgcaagacagagaccaacatgttagttatcatcgccaagtacgaagaagagttaggtctagccacggcccacgagcatagaatcgcggatgagtatgctcaagtatatgcggaaaaagaggctagaggaagggtgatcgactctttacaccaagaggcaaccatgtggatggatcggtttgctcttaccttgaacgggagtcaagaacttccccgattgttagccaaggccaaggcaatggcagacacctactccgcccccgaagagattcatgggcttctcggctattgtcagcatatgatagacttaatggcccacataattagaaatcgttaggaaacttgtatggtctctcagaccttgactagatatgacttcctttntgaaataaaatgagttggtcccaggtttctactccaaaaaac

SEQ ID NO: 81547 - DNA, 386 bp, Glycine max
  unsure (1)..(386): unsure at all n locations
ttgtctccttctttaactccaggccccactcggacttccaatatagcagattttgaatatgataaaaagaaagatccaccaattaatatttaaggtttggaggtattcccacccactggggaaatttagaatcatcataaatagattagtaggctaattttgcatatctgaccttgcagagtatataacaaaatttgggccgatgtacttatacatgaaaaaagggtaggaagaaacttaagatatgaaaagaaacatcacatgataagggtacttgtgattgactcaatggaagagcttctccaatggcaacaagggattgccattcaacaagatcctgaccaacaatcatntctgtaacaggatgatcaacctgtattaacatt

SEQ ID NO: 81548 - DNA, 423 bp, Glycine max
  unsure (1)..(423): unsure at all n locations
aactaaccttataccccttactgatgatngtaaaaagcttntaatggatttttttattattatagtgcaacgactatcgacaatgttcctttggaaaatgatcaagtgaaggtcggtattaatgaagtttgagatgttgatgctcgcactcctgtacccactcaagaggttcaattagtggagtaggcatttaacacctttcttgcttgngcgacacatcttgtgaaacctttttcagaacaggtatttcatttagtttttttaataattattaataaaggatttgttacaaatcaagttttgagtgtcattcgcttaatgtttattaaatgtgttggataaacaggtagttgcgggattggcgaaacctgtacatatgttggatcctgactattgatccctttcctgatgacattgacaatc

SEQ ID NO: 81549 - DNA, 417 bp, Glycine max
  unsure (1)..(417): unsure at all n locations
gcttacatcagaatggcccttggactntgttatgcaccaaccacgttccaaaggtgtacgaatgccatcttttctaacatggtagaaaaatccatagaggtatttgtcacaacctacccttcggcgggagggcgacgtgagactcgcgggatgcgtgttccacgaaaggaatacgcgcggagtcgccaccaacgtttatttgaggaaaacgtcggaaaaaacggaaaagacgcgatctacgaacttttaagtgaaaggttcgggagttgtatttacgcacggngaaggtattagcaccccacacgtccgtcccaagggacggtagcctntaatcgaatgtgcaaacatgatcttgattnttacggtccctcttatgtccttatatcctctatacccttcttatattttttccttttt

SEQ ID NO: 81550 - DNA, 198 bp, Glycine max
agcttatagtttgctcgcatagtaccctcatttttttctattcatttgcatgcaaaatatatatatatatatatatatatatacttgggctagatctgcaatatatctggattaggagaaaaataatttctttaaaaaaaagaggtactttagaatacgccatttgtgagcatgaatgaagatgatgatgttgttgtt

SEQ ID NO: 81551 - DNA, 432 bp, Glycine max
cctaaaacacgtatccgcgacctgaccgatgcgatctttgatttctctatctggcgtgtgaggaatgcttcctttcctgcgagcagaaacacttgagtgtttcagcctttgcttttcatgtagccttggaaaaatgccattaccttctccttctatgctctaaaaccatttccaaagtgccaatcttgttctccatcacccagagccacgcagtgccaccacaaaccgccattgttctccgttgaaacccctcaccgagaggaacccttcaaccgaagcagaatcttccaacttggctcgcagtttatgtggagaacgaaaccctaatttgaactttcattaaccttgatgtaaaaaggcgtatacactcgtttcttgttactttcatcttaccattgcatcattctgagtttggaaaccgccattgcatgt

SEQ ID NO: 81552 - DNA, 298 bp, Glycine max
attgctacgatcgcatacacgaagacattggtgagtgatagagtgactgatacatccaagactcttggttttagatggatacccaacggattaatctattactactgtctcatctagtggatagaggtgatcatgaccactgatatcgactactcagggcatatactcgattgcatcgatatagagttatattcagatgctgggattaactctttagtcgaagacttatataatctaatcgattacttcgttgaattaagacataatgctatagaattgatcgatgaccagcagcaat

SEQ ID NO: 81553 - DNA, 339 bp, Glycine max
  unsure (1)..(339): unsure at all n locations
gccttaaaactccgctgtagatagagatgcctcgatgtggactttgttctctctcctctaangactctggcatcatttctggcactcaacggccgcgagttggaagccatctctgtagttcaactttaggtgttcatcacgagctatgtctacaacggctccaccactggtctcatatatcatacttctatacatattactgactccttcatatacatattggacaacattctgctccgacatccgatggcgagggcaactggcacatcgtatgtctaatcgtccccagaactcacacaagctctcaccactgagtagtctaatacctgagatacattt

SEQ ID NO: 81554 - DNA, 376 bp, Glycine max
acatctggagacccttcgtatagcgagacatctgtgagtgtctgaacacatgacatctgattttgcccatgaacaatcatacttgagcggttcctaggataagcatctgcttcaagatcaattcaagactgcttcgacgcacaaagccttggtgcaagattcactatagcatcggccatgctctagaacaaagagtctcaaagtcacgcaaggctctggtaatccattacctcgacgtggtgtcgattaccacgatggaagaccggataaagacctagtgaacagggctctgtatatgcttcatgaacatgctatcgataccgtatatgtgtctcgattaccaacacggaactcttgacttcgatactacgtctga

SEQ ID NO: 81555 - DNA, 344 bp, Glycine max
  unsure (1)..(344): unsure at all n locations
agcttctgtcacaaacttcagagcttgtantttactgtacgagatcctacaggcgagtaagtactactcgatcaagaaattagcgaagatgctataggatccttgcctcgtgtctcatcgcatcacgcgactctacctggcatccgcctctcatgtcattggggtgagcccttgcatcaaacttatggttagaaatctgctcgttccgaacgatgagcgtgactcctcctgtcgtcccagtaattataggatgcgggttgaacatgatacgatctcccacttgatcggactagcggaatgttctgccctggcgctcatgacaacatttgcataaaaagttattg

SEQ ID NO: 81556 - DNA, 434 bp, Glycine max
ccgctcttccatacatgatacattcgcctcacttacgtgtaattattttatttatgtgaccagatacgatgcagctatcaacatatacacgatagggccatgccgacttatgaacattgccaaaaagtgcaacaagctccagctctttctgcatgtttcaacatgccaaaacgcagaagtggatgtagtcttaaaaacttatattcctgtgctaagcatgatctacatcgcataacaacacgacaaataccttgcttgtaacgagcatcctatgacagtggactaatgcaaagtaggatcatggtgagaccatttaacattggagagtgcataacacgagaattatatctatgtgacgtctcaccaacaatacctctccacatctgacattgaaggagagattaatctggtatcgactacacaggtgacataga

SEQ ID NO: 81557 - DNA, 417 bp, Glycine max
agcttatcgtaatcattcacacaagtgtttattgtcgtctgagagattctagatttggtgtaatcgattacatacctaacttgagacaacgactggattttcatgagtctatgcttgaatcgattatcatataatcgcaagcgattacttctttgctaaaagtgtgcctacaagtgatcaagaatactttattcgacctcatcaagaatctagtcgattacattgttcttgaaagattttcttattatgggaataacactctaattgattgaaatgataatataatcgattacttcttcaagataatcgattacattgcctattcaatcaagtacaggcagtgataactgggctgtctataaataaccagcttgtgttctcactttcaactactgtgtgcgaagagattaagtgata

SEQ ID NO: 81558 - DNA, 396 bp, Glycine max
tgtgctgcaaacatgtacaatagacctcctcaaactcagttgcttattcaaccacaacagaacaattatgacctctccagccacatatacaatgccggagggaggaatcaccctaatctcatatggtctagccctcagccacaacaacaacagtctgctccttccttacaaaatgctgctggtccaagtagaccatacgtttctcctccagagcggcaacaacaacagcgatatgagcatcaacagagacaacaatccactactgaggcccctcctcaaccttcattggaagaggtagtgaggcaaatgacaatatagaacatgccggttcaccaagagactagagccatgaacgacccgcctcgtcgctacggtatccacactctaatatgcgat

SEQ ID NO: 81559 - DNA, 367 bp, Glycine max
agcttccgaagaaagagaagaggtacttgttttattagctaagcctgaaagagcccgagtgatcaaagagaagttcaagtccatagccatcaaagactgaagagaagatgattattctatggacgtcaatatgggcaccgctgaagccttggaacgagaaaccaagaaggccctaaaggaagaacacgtgccacctaagtgtcgaggggctatataaggcatcagtaaaaaactcacgctccgaataggtgaaaggaatcatcatggggcaaaggcatgatctggaatgaccagctataggctagccttatgtcgacaagaaatttgtcccagcagataaagcgagactgaaaggaagatgtgggcc

SEQ ID NO: 81560 - DNA, 229 bp, Glycine max
taaatatatagaaacggagcaaaatctgctgcatacattgtagggaggacatcttaaacacatttaattgaaaaatatctacaacccatcttctgttaggatatcgcatgacaactacattacctggcattggccgacctataatgtgacccgaatgtgccacgtagatgtggcaggaaagggaaccctcaaaaagcgttctctatgcagacacgtggcacttccttat

SEQ ID NO: 81561 - DNA, 344 bp, Glycine max
agcttgtgcattcgatatgacagtgtgatttttgatatgtgctcgagacagaactgatacgtgtgctgatcagcatacaagctatggcatgttaacatgcttaggataggattaggggtctcatataggctctaacacgatggggctgactgagccccattattatcgtatatggctatgagcgcactatgcgtgtcttgctgcactgagcaaggacatcacttactgacgaacatacggatacactaataaactcgatgaccttgccatggtttgctaagcgagacctccctttatgatgaatgattggatgtttatgatctacctcatcgccactgtgagca

SEQ ID NO: 81562 - DNA, 359 bp, Glycine max
gacctatgaaactccgctgtccctcatgccttcagaggaggagttttcttgttctcgaacttcacgatgctcacgtgatttactcgtacatgcactcaatgaagcatcactatagtctcttgcaccataaagtacatattttctgattagacaccaaactaaaatactatcagagaactgatcctacatattaatatgattgacaacaatcataatatgagccaaacatagcgcactcatcgacgcttgcttgttgaatgtaatccaccgtatcaataacaattgtctgattccacgattgaaccgttaccggcgggtatcttagaccttaatgcattggcatatataggaacccacca

SEQ ID NO: 81563 - DNA, 385 bp, Glycine max
acctgcggcatgcaagcttgttgaaattgccatgttggatgagtttatatacccattctggtttagggttttttgagatgatgtttgtgatgcttatatgctgaaattacttttggaaaactggtagagatgaaagggagagttaacctatggttaaaaaagtgaaatggtgaggttataatggaaaaagagagagggtttgatagttggaaggctttgtctgaattctgcggttaatggaggtttaagtgaactaatactaacttgaaatgtcatttaggactctggagaaaaccttgactgtgcctttaagaaaaaccaatgaccataatgatctaagagccctttcttgggcgaatttggtgttgaagaacaaattttattt

SEQ ID NO: 81564 - DNA, 431 bp, Glycine max
aactcagcttttaaccgggataggctgaaagcctcgggggcttttctttgtagcatctctggggaagaggatcaccaaaggtttgggtttgcttatgctcttatcagccaaatgcatgcatacatcttgctcccccttccttgtgccacaaacctcaaacaggcctttgtccatcaatccttgtaacaatttttctgccatagagcatgcctccacgtcatgtgatgcaccaggatgcatcatacaagaatcccctagtgcccattcaagcaaattatccctgcatcacacatcgcctccaatatgaacctcttcgaggtcaacacatcctccatccactttgggccccgagggttatactcctccaccgcattaactgtcggtcccccatgactagcaagaagatttgtcctcacaattgggttatcctc

SEQ ID NO: 81565 - DNA, 424 bp, Glycine max
tgcagcttgatgaatggtcttaacgaaaattttcttagtgggtctaaaaagaggcaaatctaatcatcacgctttgataaatgccaaaaaaaaaaaactatggcaaatgaagagggtgagaatgagggaaaagcccatgctgtggctgccattcctatacagccaagttttccaccaacccaacaatgtcattactcagccaataacaaatcttcttcttacccaccgcccagttatccacaaaggcaatccctaaatcaaccacaaagtctgtctaccgcacttccaatgacaaacatcacctttagcacaaaccaaaaacactaaccaagaaatgaatttcgcagcgagaaagcctgtagaattcacccaaatttcagtggcctatgctgacttgctcccatatatacttgataatttaatg

SEQ ID NO: 81566 - DNA, 437 bp, Glycine max
  unsure (1)..(437): unsure at all n locations
tatttgaagatgcctagattgtaaagatttttcttatttattaaagaaatcaagaagagtcaagagaagactcatgatatgccagaacctcaagataagcatcaagataagtataaaaagactttttcaaagaatagattgaaaaacacaatttgtccaaaagaatttttcaaagaaaaatcttttactagagtttctactctctagtaattgattaccataaggaagtaatcgattaccagaagcccaaaacaattttataactgttttacaaagtagtaatcgattaccatgggcatgtaatcgattaccaatgtttttgaacgttgaatctcaaatttaaagagtcacaacctgtgataaaacattntcaatcttgtgtgatcgattacacaacatttgtaatcgggtacctgtgtttctaaacattgggtttc

SEQ ID NO: 81567 - DNA, 410 bp, Glycine max
  unsure (1)..(410): unsure at all n locations
agcttaaagtatgcccgagtcattcatccctatgatatgttgnngaagtattggcgatcagaattgccattccttggattatatggttgaaccaagctcatgcttttacaataaaggttatcaagtcaagctgaaatatggaagtaaccgttttgcaaaaatggggcaaaagatgaatcgagtcacatcactgtttcatctactgccaaacatatttaggattgtggatgtccttgttacttccagattcactttgacaaagatgtcatggaccatgttgaaaatctaaactgattcaaccccatatcctgtgttaagattcgcaatactttaactgtacaccattcgcatacatccatgcttttcattggttgcattgctcattgcattctttctttgaaaaaaaataa

SEQ ID NO: 81568 - DNA, 411 bp, Glycine max
  unsure (1)..(411): unsure at all n locations
gcaagcttcctgctggtcatttgctgcgagagttttcanttggagagataggtctaccaagaggtgctattattaaaacgaaaatggcatactagctaccccaataacacaaacatcaaaggacatttagagcgaactcatgcgcatactttcttttgaacattcactcgcaccagatattcatgtaactaaaaaaaatgcacccacgcacaagcaatgcaccttgagtactaaacactataggacttccaggtgaattgctagctacatcacatgcactatctttgcttaaattacatacatgcatactcaaagcattttggctaccagaaattgcatacctgcacattctggtattgctaacacctatacatatacagacattgtgatgaatcttgacttcctacacaa

SEQ ID NO: 81569 - DNA, 267 bp, Glycine max
actggagaaaggctgatagatccgaaactccccttctccgggaagacgactcttgaataggcccaccaccataagaggccgaggcttgtagctggtgggcagatggagatcaatgatgggatatggaaagtagagctcgagaatctgtgccctatgtgaggcttgagatctcaaggttatattctaatgaccgaggttgaaaaagtgccacacatgacctctattgtatgctaagtgtacacacatatgggggaaatctgattcact

SEQ ID NO: 81570 - DNA, 299 bp, Glycine max
cttaacgaggtcaggcgcctgtgagctatacttgcatgagtccctacaagcaaaaggatagagaaactgtttatgcacaatctatctaggagcttgcttacacccaaaccttattggctatacctgatgatgcatgatgtatcgtaatctagcttggtaaatagtatattcaactgatcttatttgaacataccagagctatttacaaagcttctaatatcatgcacctgatccttagtagtttaatcatagtatagcttctaactgagatagatgtaagcatgactctctatttgtct

SEQ ID NO: 81571 - DNA, 428 bp, Glycine max
  unsure (1)..(428): unsure at all n locations
agcttctaaggaagttntctttaaaatgtttctcaaggaagctacctagtctataaatagaagcatgagtaacacttgttgtaactttgatgaatgaaagtctaatgaaatacacttcaaagttccacttctctccctcttttattccttcaatttcctgctccccccttctctctttcttttcctccattaaagaatcctcttcaagcttcttatccaaggcaattcttggtggtgaagctccttcttccttggcttattccctagtggatggtgcctcccctctcctcttctcctttgccttccgctgcatctccatggtgaaaaatcaccattgaaggacctcattgaagctcaaaagatccatcctccattgaagctccacaagcaagcttccatcaatatcaccttcttaaatgcatacatgg

SEQ ID NO: 81572 - DNA, 426 bp, Glycine max
  unsure (1)..(426): unsure at all n locations
atttctatacataagttagtcgtatgaagttattaacatggcttagcctnctcaaaggaagaagtccatcacattggccatgtcatcatcttcctgagctccatcttcatctcctggggcctctgcgggccctacccttacctgaaaactgggtctgtctccaggctatgcaactgtggccccgaactgcttgggagtaggccatgggtaaggactgggatcctagtgctgctgatacagggtatactggtagaagctctcattcaactgcacctgacccctatggttagccgcttgttggtcatccaaatgctgcatatagagttccatcctctgcatgtgagctgagatggactctanagatgatggttgctggagaggtggtggtggtgcatctgcggctagcttgtgctgctgttccttcct

SEQ ID NO: 81573 - DNA, 447 bp, Glycine max
  unsure (1)..(447): unsure at all n locations
tcttttggaccttgaacaagcaatcaattcctctttcagtactatgctatgtgctcgcgactggtccctttcttcccttcgcaacttgagttcactattgctaccccatagagctccgcgaaatttgttccggccatattcttccttgcgagccctcttggtctctcgttcaagggctcttgcggtgattgcattctcttcccgtaacccggcacactccttccgaacgtgtgtagcagccaacttgaacttctccttggcgagttttgcctttcctaactcgcttttgagagtttggacttcctcgtcctcttgcggtgcttcaaaattctcttcgctgacgactcttaacttggcgagccaatctaaacctcgtatgcgaactntcagccattcgtggtacccaccaatgatgccattacgaatgcctctaagctcttgatcttt

SEQ ID NO: 81574 - DNA, 326 bp, Glycine max
ctgcaggctgagggggagtgtgctaatcacaacactcatgggctaagcgcgagggtgactctagaagatgatgagttgtacacgttcgctaagcgcaccatattcgttcatccgctaagagagataggctcgcactaagccgaaattcactaatgtgtgctaagcggtccataattgggctgagtgcacgagcacgagcgacgcctcctatttaagtctgaaatcagattctagagagggagtttggactgggattcagaactctgaatgacgagagtttctaaagagagagaaggccaggctccatatagtcttgagagattttg

SEQ ID NO: 81575 - DNA, 365 bp, Glycine max
acaagggcggatgagtgtcttaaaaacattaaatatattatttacagtatgttgactaaatactgatagtttgagctaactaagatacaagcccaattatcccttggagaaccttctcttatatgagaagcataatagtccttattggagtaccccccctctagttaccctgttaggagagacccttacttttgattgagcaacactttttgacaggtatatccttactaaccctatttgaggagctagttatttctcttaaaatattccatttaaacctttatgttgtatatgttaaggcatatacaattgaccgtgtcccctttcatatttgatagtaaacaattaatctattagtcttatta

SEQ ID NO: 81576 - DNA, 420 bp, Glycine max
agcttgtcctcagatcgcctttgctgttttatacttataccaaatagcattattgtaacaacatatttaaaaccataacttaatccgcagatccgtcttgtaagactaagtttaaattctgcttcattcaagttctaagtcaacaatacattttccaatgctaaagttacctaactatgcacacaaatgggtgatcagaccaagagcatacggaatttaagcactgaaagaagcattgaacacaagaaacatagtcaattagatatttaattaattacataagctgttctctagaaatccccaacaagggtgtttaaccaaccattatagaagaaaccctaacaataatgagcttacaaaacctatgtatctctgcaaaagttgcttgccttgctgcctccagagctcttttcccaaaat

SEQ ID NO: 81577 - DNA, 401 bp, Glycine max
  unsure (1)..(401): unsure at all n locations
nctacttatgaggcagggcgggctcacttcactttcttgtctttactctagcttgaccactgttcttccttaccgcgatgcttactttcatgtccgcctgagtgggcttatagcctaaaccatacttcccacgatttccttgggtatttatcaggctagttatgccgccgttgtctttgcctaaacccatcccgagttcataaccgttccccaacataactcgggccatcattaccgctgcatcggacagacaaggctgcccaaagagggagtccacggaggaaatgttgaccacctcaaaagactggaaagcagtttctaacgattcttctgcggcttccacataacgcatggaggatgggcagcttaccaagatgtcttcctcgcctgacacgatgacc

SEQ ID NO: 81578 - DNA, 430 bp, Glycine max
  unsure (1)..(430): unsure at all n locations
acctgcccgcatgcaagctganccttgaatattganacctgaactcttctttcctctngaatcttgaagagggcttcatcttttactcttgagtcttgaatagttcttgattctatcttgaacaatatgaactcattctttgattgacctttgagctttttgtcatcacctttgacatcatcttttggtatcatcattgttatcatcaaaacaatctttgaatcattcttgattcaccatgaagctctgcttctacagaggctatcctatgcaagctaggggccaggaaactcaatgaaaagacccttttgcctcctccttttggataatccttcatttgtgcagtaactggtgtcaaccaacagtttggctagcgagaataaaagatctatgatgatagtccccggtgaaattatggatgacaaggtct

SEQ ID NO: 81579 - DNA, 396 bp, Glycine max
ccgttcttcgacgttcttattcgtcttcatgttcttttatcttcaacgggtaaggacctcgaaccaagcttttcgattcattctatgcacccgtagtggtccacattgtgtttcgtgcatttttattctcgttttgtttactttttataccccctgttgacgtgcttaagccattttacttaagtcatttctcgcttaacttaaaaataaaataaatttccaccgaacgtttgaattgtattatccattaacttcggttaaaataagttccgaccgttcggtcgtgccgtaaccacgttggaaatcatagagaggtaaaaaagtaatataaataatcaaaaaaaacatcttttagtaaaataaagcggaagatcaatcggacgttttctctttggg

SEQ ID NO: 81580 - DNA, 388 bp, Glycine max
agcttggatatacactgataccattgcttgtaacatcaatagcattgcgaggccatcgaaggatggtcattcctccgacagagacagaggcagctaaaggatgatgaattttctgattcccttggaggaggcaaagccatacgactggaatcaccacacttgtgatgtatccttcattaattctttcaattattcttttatttccctcgtgattcgacattatctatttccaattattatgtccattgtgacccaagacgcagaatgaccattatttaactccacacgccatctgacatgattgcgtctggatggcaaaaatgatagcggaatgaccataattggtcttcgcatgtcacatgacctcacggtctgtatgacacagatt

SEQ ID NO: 81581 - DNA, 386 bp, Glycine max
actcacgctgatacggacaacggtgtctatcatcctgacctctgatgtcttgtgacatgcgggggtaccgtatggttattcccacactccgtcgcccaagggcagacgagcacgctgatgcccaaaaactaacagcgtgctcctatcctgacgctattcagggacagcgatataggcgtgtggcggagatcactaagagtcatccacactctttcaacaaccgacgcgagcggactcaactgtattatgatgaagttgggcattccatcatgatcattttcagcgatcgaggaaattactctagtcatccccaacatgcgagacccgcaacgcacaagataattctctgttaggcggggggcgatcttattcgatggcatggagaa

SEQ ID NO: 81582 - DNA, 347 bp, Glycine max
  unsure (1)..(347): unsure at all n locations
ntgagagattggcggagattaagctataacatcaccacttatatgtggtaggaaacacggagatgcttcacatgatgaacaacggtctgtcgtgaacatatatccgcctccactgcgcgcaaagcggaacacttagtcgtgtgagcactagaccctgctggattcaccacgtcatatacaatgtgcctcacataccgtccgaaaataccggtgatgccacagctgtgaatattgcatgatccacgatgtcgaacactatgaactggcatactgcccggagatactggacgtattaattagttgctacttgaacacatatagcgcagtcgtatgagatggcacatcta

SEQ ID NO: 81583 - DNA, 427 bp, Glycine max
  unsure (1)..(427): unsure at all n locations
tgcagcttngagaatggctagacataatacatgttggttgttggtttggntcaaggataaaagggatgccccacattatttccatgacacaaatgcaaagatgatgatttggaaattttatgcaaaactggtcatgcatgcacctatgcggacactcaagtgtcaaacttttatggtcatgtgatgctaaggctcaagattcatttcctctattttaaatcaacccaatgtttccaaaatatgttcttttatcaatttgggcattcatccgagtccatttcgggcgttcggggaaatttcacagcattcacccttcaggtgtagacacaattttcaaaattggttatgacacatgattctttcaaaaaaaagttggaagcctcttcttttaaaacctgttggcttttcagctaaacaactatttttt

SEQ ID NO: 81584 - DNA, 349 bp, Glycine max
aatggttgagaactgagcctgaagaggaagccatcctgatagcatgagatgagtctgtgagtgattgtgaggctctagaggtggaggagacatccgcactacttgtatgtcttcaatccatcaattttctcttctctttgttgaaaggaagccttcctagatatggagagctatatcatctggtggatcttccttgtaacgactttatgtatatacctttttatctattcaatgatgtttggtgtgatccctgtgctatcactacgccattttattatgctcttgccttgatcacctacatgcatgcctctgtaggatcattcacagtggacactggtctgaatcttag

SEQ ID NO: 81585 - DNA, 310 bp, Glycine max
  unsure (1)..(310): unsure at all n locations
actgtgctaccccgagagccctcgaattactccggacgtgttattccctacgataccattggtgtatagttcaacagccttcgnggcagctatatatacgtctatcattacggaattctccattctaatcttaagagctgctgatttgaagtctangatagactgtctgggctttctcgagttctgaccttagggcttgcacctcttagtgctactcggtgcttcaagttccacccctttagtgagtctcaaactcgggagccaatccagaccttgcatgcgggctttcaaccccctatggtacccaccg

SEQ ID NO: 81586 - DNA, 344 bp, Glycine max
accgatctcatccggcagatggtgcgtgaagctgcatagaacaatctctgaaacaagctggcgagttgttctttctcccaagaaaacaatgctgatgcggcaattctagttccaatgcaaactctaatctgattgcatctagaccatgtagcatctctactctggtgagatactgaataatctagcaaacatatgcttcaacatcgcaatatctacccacttctgttcccagaattatggtgacaaaactacctaatcttgggcacacacaaccttaaatccacagggcctaaccctaatcaaaatccactgcctcaggggtctcctaagtctgtatacatgat

SEQ ID NO: 81587 - DNA, 185 bp, Glycine max
  unsure (1)..(185): unsure at all n locations
accccccacacacgggacaaagcgaaaaaaaaaaaacaatcccaccaaagaagggagaatgaaacgagaaaagaagggagaacgtcccgacacaaaaaacaaagcaaaagggcccggaccgacaaaaccgaacaaacaaagngccccaagaataaaagaagaagggacccgaccaaaaggccccc

SEQ ID NO: 81588 - DNA, 344 bp, Glycine max
tattaaaacgacttgatcattggaagggaccagaccatgtgacctgttttatctggaaacggagtcgtgaatacatcatgactaacgtcaggcatatgagattgagtgtcacatatacatgcttaagtcctgcttatgactcccatgaagagacacttagtcatatatttcgcaatcgccaccatgctctgttggtgtgtcaatcctttattacaaggaatgatggtgctgaactctattccatacacgattcgaagatatggctgcacactaattgagctagacaccacctattccatgatggtgatcgatcattgtcgactgaaggatgctatatcttacgc

SEQ ID NO: 81589 - DNA, 281 bp, Glycine max
atattagctgacgacagaacaaatcttcgttctcgtcagaacgttaaactctcttagagctagggatggtgaagagtcatcttgcggttacttctaggggctccccaccatattcctcacctcacgtcccccaagaaaggccttgcgtgacatgctgcaatgggaaaaagtgctccccctcataagcggaacttggagggatgctactccacataatgcgcgggctatcctggtacctcgcactagatcctggagtctagatccgctttggacacattatg

SEQ ID NO: 81590 - DNA, 380 bp, Glycine max
ctgcagctgttcagcgttatgcagatgtgattctctgctactatcatcgcgagaccaaaagagtaggtctacccggctcacgagcattgatcgtggacgatatgcccagttacccggaaaaagagctagaggaaggtgatcgacttttacaccaaaaggcaccatgtgatggatcggtttgtcttaccttgaacggagtcatgaactttccgattgtagccagggcaaggcgatggcaacacctactccgccccgaaaaattatgggctttccgctattgcagcatatgatagacttaaggcccaataatagaaatcgtaggaaacttgatggctctcaaccttgacagatcaactttttgaaataaaagagtggcccat

SEQ ID NO: 81591 - DNA, 396 bp, Glycine max
  unsure (1)..(396): unsure at all n locations
tcgaggtacttacccgttgaagatcgaagaactattattaacgaatgaagaacgtcgaagaacggtcgaaaccttcgcgaaattcctcacggaaaacgttacggaaacgtttcggaagcgcctcggcttatattttcttcacggaaacatattttccaagcaaattcgaaagagagagaagtgcctaaggggctgaacctttttcttcttcacttcttcccctatttatagcaaaataggggagaagcttgccgcccagctcgcccaggcgagcagggttgcttcctccagaagcaacagccttatggaggaatcttctggagggcccaagtgggcctggttgctatntgcaacctcattntactaagtacaccccctctgcttttttggtgattc

SEQ ID NO: 81592 - DNA, 393 bp, Glycine max
tgcaagcttataaaaaggacagagactctgtgttttatcgacccgcaaacaggcatccgatgagatgtagaataagcttaccagcgctcttatgatgcagactccaaattgggagctcctattagaactgatgagtgatgcctctaactgtgcacttggagcgtttaagtgacatggaggtggttgactatcccatgtcactacttatgcatcacgcactttagagtgcacccatgttagacttcaccaccgctgagaatgagctattagctattagttttgctgtcgagaaaatgaacattcatgtgcttttgtctcagatgactatttttactgaccgagctcacttaagatactggtaggagaaccctgatgctgaaccttgattgattt

SEQ ID NO: 81593 - DNA, 374 bp, Glycine max
cgctcgtggagatgctgtggaggccggatccatgagctttttgaggcccttcgctggagatgtatcaccatggatatgcctcgaaaagccattgacaatacgagacgtgaggctccatgacctatggaatacttctttgaagacggatcttcaccaacaggaatcgtcttagattagaagctcgctgacgatgctttactggacgaaaagaattagacaatgggggagcccgacatcgcttgaatacatatgtatagacactgagatctggagcgtatcatataaaactcacattcatcaatgttacaacaagcgttacgcatgctattatatatatactaggtagctacattgagaagctttcttaagagaac

SEQ ID NO: 81594 - DNA, 226 bp, Glycine max
ataaacctgtcttttcttcttacctaaaacacagagaagagaaagggacacttttgtgattactagagaaagtaaaatatggaaagagaaaaccctccgcaaagcgaagagacctctaattatttaatctaagaagagagagcggcaccttcaagtggaaattctctaatatataagacgagttgccagagaacatcagctacaaagaagacagacttttactttc

SEQ ID NO: 81595 - DNA, 438 bp, Glycine max
cgcgggtctgagagacaaaggacaagtgtttgtatttgccaagatgatgtcccgagtacttgggatttggtacgaccatgccctcctgatttccggctgggaaattggcgagtggaagaacgccccagcatttacgcaacgagcataagtgagacctttacggttataaaagctctatagttgggcctaggctttagagattttacttttgttaaggctgtgtgtctttcgcttttgaatttataatacaaggatctttcttcatctgttcctggtctctacccattctcattcatttgcatgtttacttctttttctgaaacgacagatccgatgacgagtcccccgaaggtactaatacctgggacccgcctatcgacttcgagcgagaaatgaatcatacggcagatgaaggaaatgacgatgtgggacttcccc

SEQ ID NO: 81596 - DNA, 328 bp, Glycine max
  unsure (1)..(328): unsure at all n locations
cgaaagangagctgtcttctatctaaaggcccgcacgagcggaggttgagccacgtaaacatgcgagacagatgcttgaatgctcaaactctctctattcagaatcactagcaacaaaatactcaaaatgctcaaaatgatcaggatgcacactatacctaactaatctatgaaaggctctatctatttcaggatcaaagggctggaaatcacctggattacccctagtcatgcactatatgcagcaaagaatgtgttctcaaacaagcaccaggggaggggtaaaactacaactgtactcaaatgacatccaaatgagcctaaattt

SEQ ID NO: 81597 - DNA, 420 bp, Glycine max
  unsure (1)..(420): unsure at all n locations
ttgcatgtctagagtttctagagagagaaagggccaatanctatatagttttgagagatattgctgtgtgatgatctgcagagaccaaagctggatgcaggagccagtttgagagcttgagatgagtctgtgagtgattgtgagatcctagaggtgaaggagacatcctcaccacttgtatatttgcaatctttcatcctgttcttctctgtgtctgaaagaaggcttcctggattggaaagctaaatcctctattggatcttccctgtaggtacctaatgtaaatatatttctatctatctaatgatgttatgtgtgttctctatgctatcttattttcactccagtatgcctttaccttgatcacgtagatgcatgctatgttacggtcattcaacagtggaaactagtttgactcta

SEQ ID NO: 81598 - DNA, 227 bp, Glycine max
aggaaagatacagcgggtcaacacccacttctagatgtgggaaacatgccaaaaaacgaatgatagcgggcgaaacgaaaaatccaagctcgggaacagcagcaacgtttgaggaaggcataaagaccacggcatgttggctcacacgaccacagactattcaacacaaacgggaaagaagagggagctcaacatttaggactaagaattgcgtgaggggaaaaaaa

SEQ ID NO: 81599 - DNA, 374 bp, Glycine max
cacaggtctactatgtgtcggtcaggcgatggtgcacgacaagtgaatccacatacacgatgcgcgcatatacgcaccatactctgatgtccacctacaacagagcatacatactcacacgctgaccatgttcttacacctctcaacaccgcgaacccataaatgcctcctagcctccacatcatacaatcaaaacggcattcgaacagcacatgctctctcatactacccaaacgcgccgaatgcagaatactttgctcactcaccgaccaatatcactctgatctacctaatagaccccactaacaccacctaagatctaattagccaaccgacggatcgactcctaaaatttactgatgattatactgcat

SEQ ID NO: 81600 - DNA, 313 bp, Glycine max
catgcaagctggtgcatatgcaacacaatattgttgtcatattatttcatatacaactgagatcgatcataatagcattggtgaaggaccacacccaccgaaaatatttaactttcggaacgaagaaacgagctttcatgactctgtaaagaaggcatacaaatcctacaatggtcaatgatgaagtgcttatgtggtcaaagataaactcatgcatctaaaaaaaagaatcaataaatggagcgaggactagggtgggagacagcaaacacaaatcgacaagatggtggtcaatataactttttttgatgta

SEQ ID NO: 81601 - DNA, 458 bp, Glycine max
cactatagacaactcacgcttgaactagcatgctatgttacgagcactacacttattgttatcctctctgcaacctacacatatgatggtaataatagactaatgacatatcaaatgctcatcacattgggcacgaacaatccaatgatgtaaaatatagcattgcctatggaacacgatgacatgccacacttaagatatactgaggccaacagtatgtgatccctctgcacctagatgaggctcacttagaagctcatgacctttttaaatgatataagtagagtcagatatacattaatcaacgttccaataaactaattgcaaatgactaacagaatattgcatgcaatatggccaggtctcacaattatggttatcgatgtaggcaaagatacttcatgtgtaaccataacctgtgtgtgactgaagcacttgcatcctccactgaattcttt

SEQ ID NO: 81602 - DNA, 279 bp, Glycine max
  unsure (1)..(279): unsure at all n locations
gcatgcaagctngaacgtgatgcgagagagtatttttgtatatttgccangcaacgctgcccagctacagacgagaaacatggccggccgcgcctcctagggcggacaccttatatgttttgggaaagatcgacccaccaggggacatagaggcgctaacctgccaagggacattccatgcgatggaaatacccccacgcctacacagtctatagggaagtcgcgggagccacctcagtgggagagagccacatcaccaaccaccaaaaccatgaggaa

SEQ ID NO: 81603 - DNA, 398 bp, Glycine max
  unsure (1)..(398): unsure at all n locations
actcagcttgcgaangcttgagaaataggagacctttattgttatagctattctttacaagagtatacgttgggaaccagactacacacctactatcacaatgaggcagaaagaggtttcaatctggacaatgtgttgatgcagttcaaggatacccnctaatcaattcaacgagcatctaaaagaacggaagtccgagttggtgcgctgtgagaagcaaagcttcctggtgaatcaaatgagatccagaggccgtgtagatgataacaatgatgatgacaaaggtgatgacgtacagctcagagatcaatctgagaacaactcaggggaatcacagatcaatcaaagaacaactcatgtgaatcaagaacaaatcacgagtccaagagaagaatcaa

SEQ ID NO: 81604 - DNA, 393 bp, Glycine max
  unsure (1)..(393): unsure at all n locations
acttatgtggcagggcgggctttctttattttcttgtttccaacgcgagctctgaccactgtccttcctttccgcgatgcttcttttcatgtccgcctgagtgggcttatagcctaaaccatacttcccaccatttccttgggtttttatcaagctagttatgccgccattgtctttgcctaaacccatcccgggttcataaccggtccccaacataactcgggccattattaccggcgcatcggacagacaaagttgcccaaagagggagtccacggaggaaatgctgaccacctcaaaagactggaaagcgngttctaacgattcttctgcggcttccacataaggcatggaggatgggcagcttaccaagatatctttctcccctgacac

SEQ ID NO: 81605 - DNA, 347 bp, Glycine max
catttgtggacacccactacgcgggcgattgactatagctgtaaacacccttattgttgataagactgaagacatcggtgaaaccaaaaaacatgcagctaactctgaaagagcacaatggccatagctgtacgaccatcaaccaaaatacactgaaagaagggcataccgttctttcaaaagaggaagtgatactgaaatgccacatctaatgaagcttctggaacggaccagtatattcatcggcacacattaaaggatgaacacgccgctcggatactttttggcgtcaccctgatgtaatgaagaaacccatgcatgtaattcggggattctgatagaaagta

SEQ ID NO: 81606 - DNA, 348 bp, Glycine max
aatgattccatatttgagtctactggtccgacgtctagagctgtttcgagactcatgcgtacacttctagtcgattcgtgattcaacagaggatgacttctatgattccgaaatgagagtcagaagacttcgccagagatgtcttgttaagagatctctcacaaaccctacatagcacaattcttgtcttacggaagagtttgctcaaaaccttctaagataccagagcatttactctctgggactcatatacgctaattcggataggaatctcttccacgtggcttactattgttggtttccacggtgtactcctccccacctccatcttatctgctcgcttatcct

SEQ ID NO: 81607 - DNA, 228 bp, Glycine max
tgtttgaggcgaggcgggtgaaatcccttaacatctagacaacatctgctcgtagagtactgacagctggacccgcagctgaagatgatgagcatgtggatcatgctactgacaaggctcatgagcattctcatgaggaacttactaatgatgcatgtgccgatgcccaacgtttttcatgtggcagactctatttgcgtaggagaggttcttatatcttgagatata

SEQ ID NO: 81608 - DNA, 336 bp, Glycine max
  unsure (1)..(336): unsure at all n locations
tgacaacctgcgagagttatctttgttgtttatcaaacctctcagaagggngataccgagtcgtgaangccactctagaactgcctgcgccttaataacatccatagcaacttcttcgcctgagactatatgtaccaagtactccagctgcagtgcaccaggagagcatttatacaccttagcaaacaaagcgcttgttttgaacagtatcaacactaccggtagatggcataagagttgatgccatgtggaacgataaacccgaatataactcgaaaactgtaacacatatttacttaaagcatggtggaaaatatggttcatcaaacaccgaaa

SEQ ID NO: 81609 - DNA, 211 bp, Glycine max
tgatgatggcagaaactaccctctgcaccaacgacgaattcatatgacggatgtagcataagagtcgcactacaatgatgcctttgtatgactatcctgggatgccaaccgcttcacaagaatgcatcgtcgacagcaaccatatactgtgcgctaagaaggggattacatgcatgcgatgatgactgaatactatcatttagagaatgtg

SEQ ID NO: 81610 - DNA, 410 bp, Glycine max
caaccctaactgagcatcccgaggaaaaactcgattttgtttatacgaccgctcgagatgctgctatcactgatggactgcacaggtgaacccgcttacaggtaaggtataagtttatcagcattgctgttagaacgaacatgtgtatcttgaggtataaaattagatgataattgataatgaagtcttcgtgaacgattacaactgcaagattgccatattgagatcttgaaagacgtgacttgacatgtgtgatagtgaagattgaatcttttgagacattatgaaatgttctattgtgaacatgagatatggtcgagaaccattgtgtggataatacttgaccagacaacacttgtgctgcaatctatgaattatacaatgaccccactaccgtgcatatagagaac

SEQ ID NO: 81611 - DNA, 269 bp, Glycine max
  unsure (1)..(269): unsure at all n locations
agctntacctatacctaattgagcactctcttgttgtataannccaaagactacttgtgctgttgaagtaattgaccaccccgcatatggaacaaaatatataagtggatgttatttcttgcctgaacctggctatatcaccctatctactacttttccctaatggttttagtttgagatattaatggtggtggaaaataatggcttagcctacacgtgaataatcctctaacgtcctattcagtgttaaacccccctaagtaattata

SEQ ID NO: 81612 - DNA, 433 bp, Glycine max
  unsure (1)..(433): unsure at all n locations
tctggtccttgtgtagaagcaagcttcttgttgatgatttaagttcattcaagtaggtgtgatgatgacaaaaagtccaagagaatgatttcaagattgagtcaacacgttcaagatcaagattaaatcaagattaatttcaagattcaagatatgacatcaagaagaatcaagattcaagagaagatgatttcacaagggaagtattgaaaagaatttttcaaaaacaaaacattgcacagttttgttttacaagaaaagttggttctcaaaattttctaagttaccagagatttttactctctggtaatcgattaccaattntctgtagtcgattaccagtggcacagtttgatttcaaaagcttttaactgaatttgcaacgttccaattgatttttaaatggtgtaatcgataccaggatatctgaacg

SEQ ID NO: 81613 - DNA, 340 bp, Glycine max
tgcaagctaacattaaataagactcactgtcttaaacatcttagaggcatattcttcataaacaagcctctgaaacgacctatcaatttattcttgataaagttagtgtctcaataattggaaagcacgcacaactttttttacgaagagttaccttgactaaattggtcctctaagccttgtcgtcatatgtgatgatatttacaaagcctatagagaatttctttggaggattctgatcagaagaggaagatatgtagcttggttttccaaaacatttgggtggcttgtagttgagaaaaaccagagatgtcaatttagccttcatgatgcaagctat

SEQ ID NO: 81614 - DNA, 436 bp, Glycine max
  unsure (1)..(436): unsure at all n locations
tgggacctggttgaaaattcagaggtggaggatgattgcttgttttctccagatctgtttaaaagtgttagtttgcctacatatccactggaaaatnttgaaggtcgtgcgttctgctttttacctttaccaatcagtactggtcttcctgctcatgtaaatgcatactttgaattatcatcaaatcgcagggatatctggtttggttctgatatggctggaggtggaagaaagcgctcagactggaatatttacctcctcgaaaatgttgttgcccctgcatatggtcatttgcttgagaagatagcatcagagattggcccttgcaatttgttcttctcgttatggccaacatcattagggttagaaccttgggcatcagcagtacggaaactctagtcaattgntgctgaattaatctccgtgtttatatact

SEQ ID NO: 81615 - DNA, 160 bp, Glycine max
attagagagatccgatgctggactgaacgataatccagccaggtccatcaccggaccacatagtcctacctagcgaaaagacaaaccttgtccttacgcaacgcctcatgatcgacgatggccatccttaaatacacgccagagggcgaatactggactc

SEQ ID NO: 81616 - DNA, 372 bp, Glycine max
cccttaagaggccacaatgagaagtattctttataagctagagcttaactacacgtacctgtgtattaactaacctcacctccttgagaagcttcttatataagccagagcttagcgacacacatccctctgatagctaagatcacctccttgagataagaagctagagcttatctacacacccactatcctagctgagctcacccctctgccaagatacacgatatatacagtggagttactgctacagagactactcataatgtccttaacacagggctaacaccctatactgatttaatgactcgaggacattgcccagaagaatgaataacctattcttttatcactaagaggagtggacccaagctt

SEQ ID NO: 81617 - DNA, 397 bp, Glycine max
agcttatggtgctcaagcctactgttctttgtgagtgaatctataatagatcaaaaaacatagatgctagtgactcatgaacaatatcagcttgtaatgtatcataatgtaaacaacatgaatgttaattacttacatgcgcaagcgtactccagctacgctcacatcccgatgaactacaactctaacttataacttgcagtaacttgatttcattgctacagtcagaccaaatcgttctccaacagcaactgatcgtgaacgataactacaaaaccatgatctgcactagacgtatcaatacattggaagaggtcatccaccacttcattatcattgtcgatgtgtggattggcgtaaaaaactcccgatgtagataataacccgctgcatgcaa

SEQ ID NO: 81618 - DNA, 433 bp, Glycine max
tacacggacgacattctcagccggagggacttcttgtttgcttgaggctagctactccagagaggtctccacagagttcactcgatccaccctcggtagtggtggatcaatcttcttctctgcagctagcagaccctcctacaccagtgcctgagatgccagcctacccttgcactgcattactggagattctagaagaccctgccacaccagtcttgggactgactagcactcctacagccactcttgtgctacattttacagatgaggaacgcacttaggatcaggatacccaccacgatgaccagtcatagcgagggtaaattctcggtgctgcttatgtagtgaggttatgattattatacttatgtctttagcacactgggatgtgatatgagggtacctttgactgtggatagtactatgcatgtct

SEQ ID NO: 81619 - DNA, 280 bp, Glycine max
ccttaaacagcttatattgctctaaaatgatgtgagtagcattgcatcgtctcacatgacattcttacctcaacatgtatcgtatcaacttaggctacactactggctctaatcatcatgctccactgcatgttgccaatgtcgtcagactactattgaagaaagagaatgtcataaatgaggtgatgagggcaacttgcacacatatatatacacacccctccatactcatacatgcgctctacagtagtagactgatgcactgaacagtcactttcga

SEQ ID NO: 81620 - DNA, 451 bp, Glycine max
  unsure (1)..(451): unsure at all n locations
gaagtttgatgatatcttttgtgatgacaaanagctcaaaggtcgagaacacttcataataacaaagatgatgatctcaagaatcaaagaatgagttcaagatgttcaagattgaatcaagaacacttcaacgttcaaagagaaaatttgatttcaagaatcaagaatcaagtttcaagattcaagttccaagaatcaagatcaagattcaagactcaagattcaagaatcaagagaagacttaatcaagataagtatgaaaaagttttttcaaaaactgagtagcacatggattnttcttaaaatctttttaccaaagagtttttactctctggtaattgattaccagtagcaaaatggttgtcaaaaagttttcaactgaatntacaacgttccaattgatttcaaaaagctgtaatcgattacaatgttttggtaatcgattaccagt

SEQ ID NO: 81621 - DNA, 336 bp, Glycine max
  unsure (1)..(336): unsure at all n locations
acatccacaatgtgcgcataaacccaccatccnctggtgcccacctacatctgagctcacgtactctcacgtagcccatatcctcgtttctctcaacaccgggtccccatcaatcctgccaagcttccacaacatccaagcagaacaacattcaaacagcacaagctatcacagccaagcaaaacagggcataggcagaagactctgctcaacacaccaaccaaaatcacagctcttctcacttaaagaccccagtaacaattccttcgatccaatgtcgtaaccgttggatcgacgtccaaactttactggaagtctatagtacataagcataca

SEQ ID NO: 81622 - DNA, 391 bp, Glycine max
catagataagctcacctccttgatatgagaaactagagcttatctgctacctccctatgctagctgagagtagccccatgacaaatcacacgagcgagccctctaggactccttataacggcactagcgggaattgcgttatctacaccggaccaggcacactctcttcgaacgtgtgtagtacccaacttgaacttctccttggcgagtattgcctttcctaactcgactttgagagcttggacttcctggtcctctatcggtgcttcaaaatactcttcgctgacgacttttaacttggcgagccaatctaaaccttgtatgcgaactatcagccattcgtggggcccaccaatgatgccattacgaatgcctctaagctcttgatctt

SEQ ID NO: 81623 - DNA, 394 bp, Glycine max
cacaacaagtgggtcacatgcacctatcgcgcataaacgcaccatcctctgttgcccaccttcatgtgagctcacatgctctcacgtcgactataacctagtttctctcaacaccggctccgcaacaaatctctcaagcttccacatcatgcaaaccaaacatcatgctaacagcacgagctatctcaatcgagctatacacctcacaagcagagactctgctcaacacatcaaccagaagcacagttattctcacttggagaccccaataacactttcttaaaaccgagtgcctaacccatggaacgacctcaaagtttactgaagttatagtgcatagcctccatggaacgttgggaccactaacaacagccaaatcattctggctactctt

SEQ ID NO: 81624 - DNA, 446 bp, Glycine max
  unsure (1)..(446): unsure at all n locations
aaagtgtacatgctccccttctctaatcatgtctcanagtgcagagccaanatccttangcctcaaggtaattggaacatcaatgtctgttatctcacttntcacgagccttgcagaattggcaagttctgctcctccaatgctaacattaccaactcagatctcataatcaagtgcattgaggcctaggtcaaactcattacttgtgtccaacatcanatgaagaatagcaactatctcttcacaagaaaacctctntaactgaatttcatgtggctatggctgtaaaagcatctcctaactgaattttgatgtttagtgtctctagtgttggagaatcttcatgtcatcatcaatttagcagactaatctgagcatatatataagttcctaaactctcataatttgatttataacttataagttgtgacgaataacttgacata

SEQ ID NO: 81625 - DNA, 481 bp, Glycine max
  unsure (1)..(481): unsure at all n locations
gtgcgcagggtaatttccagttctatgcacaatggaattgagatgnctatcatgggagaattgactttcttgcttggacttcaagtcaagcaactgaatcatggaaccttcctatgtcaaacaaagtactgtgcagaattaattaagaaattcagcatggaaaagtgcaaagaaacatcaacaccaaagacaacatccacctatcttgacttggatgaaaaggtaaattagtagatgagtcanagtaagaggtttgatttgtagaaacaaatgactttgatgttttgattatgatcatgatgatttgatgcaaatgcgcttttcaagtttaaattctagacaatgattcacgaatacaagacacaaacattaagatgatcactagtacattagaagcagattcctaattgatatagcataaggttcggccaagtaatgcatgttaaatagtgtctttcaagagatatactctctggtaatc

SEQ ID NO: 81626 - DNA, 346 bp, Glycine max
gtgctcgcgactggtcccttgtgtgcctttccaactagagttcattattgctaccccatatggctcctcgagatttgatcctgccatactcttccttgcgagccctcttggtctctacgacaacggctcttgcagtaattgaattctctttcccgaacccggcacactccttccgaacgtgtgtagtaaccaacttgtacttctccttaggagacttgccttatataactcgctaaaagagctcggactctctctgcctcttgcagtgcttcaaaattctcttcgctgacgacttttaacttggcgagcccaactaaacctcgtatgcgaactttcatacattctt

SEQ ID NO: 81627 - DNA, 376 bp, Glycine max
ctaatagctaagctcacctcctcgagatgagaaactagagcttatcttctccctccctataatagctgagctcacccgcatgacacataacatgaaaatacttggctaaaagtccttattaccaagactactgcaaatggcgcgaaatacaaggctacaagcctatactactagaatggccaaaatacaacgcctcaacaaaggaaagacctattctgatatttaccaagataagggggctcatacttagcccatgggctcgaaatctaccctaaggctcatgagaaccctagggcctttccttggatctctagcccaatgtacttggagtcttctagccactgcctttgcgggataggattgcatcactatctat

SEQ ID NO: 81628 - DNA, 451 bp, Glycine max
  unsure (1)..(451): unsure at all n locations
cagctatgctacatacatttataatagacctncacagttgctttaaccacaacagcnaaatacttgtgaggcttctagcaacagatacaatccacgttggacgaatcatccaaatctgagatggacaagccctccacaacaacaacagcctatcccttcttttcagaatgccgctggtccaagcaagccatatgtntctcctccaatgcagcaacaacaatagcaacaacaacaacaaagacaacaagcaactgaggcccctccttaaccttccttagaagagttagtgaggcaaatgaccattcagaatatgcatttcagcaagagacaagagccttcactcatagtcagacatatcagatggcgcacatggctactcagatgaatcaagctgagtcccaaaattctgacatattgccttacaaactgtgcagaatccgataaatgtgag

SEQ ID NO: 81629 - DNA, 327 bp, Glycine max
  unsure (1)..(327): unsure at all n locations
tttttttgcgtaancacacgggcgcattttgtaattaagtcacaaccttagccatcatttcggccctggaattgatccatacctggacaccatttctccaagaaatctctcgaaaagaattttaaccaaatttctggccaaacctctgtactaaatatgaaatccctcctatcaataacccttctaagacttagaactgcttgatactcacttgcaatcattagtctctgcccgaataagctttgaaagcattgacctttccatatcaaaccttagctgatctttgctaaactcccctgttgagatacgatcctgaataagacagct

SEQ ID NO: 81630 - DNA, 386 bp, Glycine max
  unsure (1)..(386): unsure at all n locations
cggcagggccaaaggttctatcaaatggccataaccacatcctgtgccacctcactgactacgtctccacgtagcatatctcgttctctaacaccgggccccataatccntcaagctccacaacatcagcaaacaacattcaacagacaagtatacacccaacaacaatcgaggcaaaactctgctaacacataacccaaatccacgctttctacgtaaagacacagtaacaatttcttcatccaattcgtaaccgtcggatcgactccaaatttactggaagctatagtgataagcctacatttgaccgttggatctatagcaacatccaaattcatctgactagacttcacagcaacccaccaagattttcctgacttggcaaa

SEQ ID NO: 81631 - DNA, 405 bp, Glycine max
  unsure (1)..(405): unsure at all n locations
tcatcatgatggatgtttataaaaaatataatccccaagttctcatgagagttctttctatggtgtgttactagtatccaaaacattggggtgctacatacaaagtattcaaaaaacacgcatagtcctagctaactatagtcacaatatcgcgtcatctattccaaattcacatgatctattagttacaacaatcccttatcatgtcatgtatttcaaattcacattatctactagttacaacaatgttatcatatcatgtattctaaatattcatgatctactagttacaacaaccttatcatgtgatgtattctgaatatacattatcaactggttagctcacttgtatgtatcatgtgttntgaagtgtcaaatatataataatataaattatttaagatg

SEQ ID NO: 81632 - DNA, 473 bp, Glycine max
  unsure (1)..(473): unsure at all n locations
gtaggttgctcattgactctagattgctgcagagtgtgatacatatctgtatagtgatctgcagaagaacatagaccatagactcttgcaacaggtgcaaatgcagatttctgattcatggcaagctgagttactaggttgaccaaggcatcaagatttctggtggtgaggacagcttgcacacaatttcttgaatctttctcagtactcgcacaagctctctccactaagttgcctgatacctaaaatgtcttttctgatggcagcggtcctagatgcagggaagaatttctccaagaacaccctcttaaggtcatcccagctganaatggacccgggagcaaggtagtatagccaatcttttgccactccctctagagaatgaggaaaagcctttagaaagatatgatcttcttggacatcacggggcttcatggtggaacaaacaatatggaacttcttaagatgcttat

SEQ ID NO: 81633 - DNA, 480 bp, Glycine max
  unsure (1)..(480): unsure at all n locations
tctcagcttgatcatcctgaaccaacccaggccttgtcaggccgtgagtttcttttgtctaactaaacaggcgaacttctaaccgtccacagattaaagggacacaaaccaccaagccaggaggcttgtgtggtggctggccagctgtgaaacttgattgatatatgggatgtggcctctggtaattgattaccaagggtgggtaaccgattacaaggctgaaaaaatgaagacagaaggctaagaaggcttctggtaatcgattaccaaggggtgtaaacgattaccaggcttataatgggactggaagattgtgaaggcctctggtaatcgattaccagcctgtgtaatcgattacacagaggaacacgccactggtaatcgattaccaggtatgtgtaatcgattacacagtgcctttntaagggttacatgtcctgaagctgtgtaattcgagtttggcctctggcaatctattac

SEQ ID NO: 81634 - DNA, 54 bp, Glycine max
cttctccacttcactgtacctgattgagccaaggaccgctctgttgtgccaatt

SEQ ID NO: 81635 - DNA, 424 bp, Glycine max
  unsure (1)..(424): unsure at all n locations
tatatataaaggagcttggtcaattcttctatacttggagtgataacatgcaatcctcttgaacccttacctctcactctcttgtcatgtcgagacttcagaaccccaacaagttntgccttttccatgtactcggaacaaaactcaatagtttcttctgtaatgtacctttcaacaatagatgcttcaggacggtgtagattctctgtataaccctttaaaatcttcatgtatcgctcaaccnggtacatacatcgcanataaataggaccacaacanttaatttccctcactagatgaataattaagtgaaccatgatgttgaataatgaagaagganaatacatctccaacaaacacaagataatagcacgcctcgtttccaactcatctaactngagatgatcaatgactntgctacata

SEQ ID NO: 81636 - DNA, 467 bp, Glycine max
  unsure (1)..(467): unsure at all n locations
tggagtccagagacagaatagaagctatggagttgggatagatgaaaactcatatgaatattctttcctacaacattagagggctgggcagtggcagtcacaacatatatatacagaagggcagtagataaaaatacaaaaacattcaacactaacaattaacaagttctgagagttaaaatcacagtaaatacttcaaagatatcagtccaatgaaagaaagatcatgtagagaggcatgaagatatcagtccaatgaaagaaaggtcatgtagagaggcatagcataagttacaaatataccagtaatgcatacaacaacaatttcaaattatattttgaatcaaagatataaatacctgagttcgaggcttcagcacaattgtctttctagcaatgatcgcaggaccagattgaatttcanaacagcaatgaccacaggatcaacaatggctaagatcgctccc

SEQ ID NO: 81637 - DNA, 397 bp, Glycine max
cgactgacaactgctatgcctgttagagctggaatcctcactgcgaggattgacggcatgttcagcgccattggaaacaggtggagcctgtcattgtcaacacagtgcttgaatgtacaaatggttcaagctggaaaccgctagtcatgaggagagcacttacaccatcgtgctaataccaagcatggcccacatttgacggcgaaaacatctgatcgctcatattgaactgacgagtgcttaatttcccactctttaactatattgaccatggagagcttcttacacaaatgtgattcttcaacatcatactgatgaagattatgtgcaattgtatgagggtggacttagtataactggaaccactggggttatggcattaggagaacacacaata

SEQ ID NO: 81638 - DNA, 311 bp, Glycine max
  unsure (1)..(311): unsure at all n locations
tctgattcagctgggaaatggcgagtggaggaacgccnccgcatttacgcaacaagcataatgtaaacctttacgggtttaanagctctatagttgggcctaggctntagaagtttcattttgttaagggctttgtgtcttttgtttttgaatntataatacaaggatctttcttcatctggttctggtctctacccattctcattcatttgcatgtntacttctttctctgaaacggcagaatcgatgacgagtcccccgaagtactaatacctgggactcgtctatcaacttcgagcaagaaatgaacc

SEQ ID NO: 81639 - DNA, 454 bp, Glycine max
  unsure (1)..(454): unsure at all n locations
ctcagctatgcgctatttcctacgaacgttacttgccaattatttctattactaagacaaatgcacccatatacaatcaaggtagcttcgttacctagagtatttacatgtactttcgaagtgtagtgtgttatttacatcatacacgccatcttgtcaaaatttacacacatgcatactcaaagcatttcggggtaccaaaaattgcacatgcgctcatcttgagatttctaatatatatacatatacaaacttcatgatgaatcttgactacctacgcaataaggtgctacatttcatgctctctgtattttttcaagtttttgctacctaaagccatatgcaaattcaagcatatcttcctttgctgactaaaatcgtattcaaattagaagggatatattntttggaatatgttgccttcacataacatgcaacacatctatatatatat

SEQ ID NO: 81640 - DNA, 382 bp, Glycine max
  unsure (1)..(382): unsure at all n locations
cttcacaagacactttaccattgattaaccgttgggatctttgagaaaatatctggcgtgtgctagtagcttccgttcccgagagcatgtcttatctaagcatttcagccattgctttcttgtggcttaggaaaaatgccattatttgttctttctttcttgcanatacattgctaaagttgcaagtactttatccatcacccacatgcagcattagccaccactaaccatcatgggtctacattgatgacccacaccgagaggaacccttcaaccgaagcagagttgccactcggctgccgctctgtagagacgaaaccctatctgattttcgtttcttcaggaacctggtctatgttgatttgtaggcatctgcttgatt

SEQ ID NO: 81641 - DNA, 475 bp, Glycine max
  unsure (1)..(475): unsure at all n locations
tgtctcagcgtttatgcgagacggagaccaacatgctttctttatctccaagtaccaagaagagttaggtctagccacggcccacgagcataggatcgcggacgagtatgctcaagtatacgcggaaaaagaggctagaggaagggtgatcgactctttacaccaagaggcaaccatgtggatggatcggtttgctcttaccttgaatgggagtcaagaacttccccgcttgatagccaaggccaaggcgatggtggacacctactccgtccacgaagagattcatgggcttctcggctattgtcagcatatgatagacttaatggcccacataattagaaatcgttaggaaacttgtgtggtctctcagaccttgactagatacaactntttgaaataaaatgagatggtcccatgtttctactccaaaaagctcgtgcacatcagatcactcctacatttcatctctagcatg

SEQ ID NO: 81642 - DNA, 341 bp, Glycine max
  unsure (1)..(341): unsure at all n locations
gacattcagccaaagggtcatactnttagaatataattntagtttcattacatgaagtccaataattctcaataccaaatgtcatgagacatgctactgcaacaaattatcagacaacttgcatgcatcatttatgacactcaaccacttaatcaatcaattttctaaaaccttaaatcattatctatgactcccaacatgggtctgagcaccatcaacacacaatacacatgagaaagacnagaacccgcctaccttgaagtagaattcgaaattgctgagacatagaactgtagcacacttgtttctatccaatgaatctatgcacacatgagtcatgt

SEQ ID NO: 81643 - DNA, 402 bp, Glycine max
  unsure (1)..(402): unsure at all n locations
tctctgttatcttagcgagagtgattctcctacattctcgagtgactcaagaacaccttggctgtatcaaaggactctcacaacctttgtgtgttgccctcactggaaagagtgattctttccttcctttcatgatcacccttgttctttcaaaccacaattccagagaatccacctctggccagaattatctcgtggccataactcccattatacgcactccaattaagtgattcttgagcctaaattgaatttcaaaacgagacctttcacctcgttntggaatcacctcatttggagccctatagcttcagatattgccattgctatatttntgtccagccaccacttaacctacgttntaccatcccattcattcatnttatgccaagaaccacctta

SEQ ID NO: 81644 - DNA, 413 bp, Glycine max
  unsure (1)..(413): unsure at all n locations
ttttttctctccaccatactcacgatccactttatacccttacattntttcaaagngacaacaatattatattatttattgtaatanaatctctcctttaatattatgctatttactctattgctattttcaatcaaatatttgatatttctccaagagtttaaaattaatattatccttaccaatatcttnnttttgtgtttttttctttttgcaaaatagatatataaatcatataaacataacagttatgtcgttntatatttataattaactaactttctagcttatagttttatcaaatattttcttaatagtaaacagtttgtcaattattatgttattgatcaacatgttaagaagatatcattataattaaacaacttgtgcaactttgccggttagtcacctaa

SEQ ID NO: 81645 - DNA, 404 bp, Glycine max
  unsure (1)..(404): unsure at all n locations
acaatggtgacaaggtggagaattcttatttttacccttacttttactttggtcatttacagtacttccacctttatattgcttggctggtaaagcaccatcaaccacacaatcttgtctcataagccttcgctgctcctgngcttgcaaggcatgtaacactcttgccaaagtgatcttggacagatcctttgtgttctccaacgagggtattgatgctctatatttctaaggcattgcaaccataattttttctataattctagaatcaaccaatttagtgcccattaatctaaccttattagcaatgccaagcaatctgcccaagtattctntaattgtctaagactctntcatcctttggagctcacatttcctcatcaagttcagcactcgcatgtctc

SEQ ID NO: 81646 - DNA, 201 bp, Glycine max
cggagtacgacagtcaccgctttatgagcgttgtacaccagcagcgcttcgaagccatcaacggatggtcgtttctccgggagcgacgcgtccatctcagggacgacgagtatactgattttcaggaggaaatatggcgccggcggtgggcaccactggttacttctatggtcagagttgatccagaaatagttcttgaat

SEQ ID NO: 81647 - DNA, 466 bp, Glycine max
  unsure (1)..(466): unsure at all n locations
gtggagaggatgcttctatggaggaaaaganagagggattcaatgatagtagggggagcacganattgaaggaagaaataaaaagggagagaagctgaactttgagttatgtctcacaagactctcattcatcaaagttaaaacaagtgttacacatgcttctatttatagactaagtagcttccttgagaaactttcttaagaaaacttccttgagaagcttctttgagaaaacttccttgagaagctagagcttagctacacacacccttataaaaactaagctcacctccttgagaagcttccttgagaagctagagcttagctacacacacccatctaaaagctaagctcacctccttgacaaaatacatgagaatacagaaaaagtccctactacaaagactactcacaatgccctgaaatacaaagctaagaccctatactactagaatggccaaaatac

SEQ ID NO: 81648 - DNA, 405 bp, Glycine max
  unsure (1)..(405): unsure at all n locations
caagtatgtgctccttagacctacattaattatttctataccttctcttccattgatatttctttatgtatttttctccatgtatctactcacatgtcttgtgctaaatgtttgtaacatgattctttagagtttccaccgattaaacttgctatagaagctacatttgattttctatggctcacatgtcttgttcttgttctagaaccatgaatagtgttgagtgtacgttcctttaagctnttgctttgtagttttcgtggctgacacctacaccatagaattcttacataaatattaaagtagaagaagacctcanaaatctagagtgaacttgtcacctattatagttctgtcatataagtcatgtctagtcatgatactcgtcacataagaattcttatg

SEQ ID NO: 81649 - DNA, 369 bp, Glycine max
  unsure (1)..(369): unsure at all n locations
gtgagccagaatcctgactcaccatanaccttacccttttatcattttaaggaaagaaggaaaggaaatttcccatcacagagaaagcaatatatgaaggaaaggaaattcccaatcaaagagaaagcctaaaaggaaggaaaggaaattcccaatcaaagagtgggagaaagagaaaaaaagatacgaaaggaaattcccaatcaaagagtgggagaaagaaaaaagaaaagaaagaaaattcctaaccaaagaatgggagaaagtaaaaaagaaggaaaccatgacctanaagtggtcttctccctttgattaccaaccaaaatcctgtgcgctagcgactttgtgccccacactaaacaaaaacag

SEQ ID NO: 81650 - DNA, 357 bp, Glycine max
cgtgggatatccttaacaccactcatgaaggaacctcccaggcgcagatgttcagactgcagctattggccacaaaatgagaacatctgaagatgactgaggaagaatgtattcatgccttccacatgaacattctcgataataccaatgcatgcactgccttgagagagagaatgacacatgaaaagctggtgagaaagattctcagatccttgcctcaaagattgcgcatgatagacactgccatagaggatgccccagacaattgcatcttgagagtagatgaactcatcggtttccttcagacctccgagctaggactctcggatatggctgacaagaagagtacaacttggc

SEQ ID NO: 81651 - DNA, 335 bp, Glycine max
  unsure (1)..(335): unsure at all n locations
taaactgggttggttcttggtaaggtgaaattattcgatgagaattggcttacgtcaactctcttcactttcactagttnttctgtgcatgacaaaagtgtagtggtgttagatatcttgtcccgttgaatatgtagaggctggatgtagaggattcaaactctatcccgttggagtggttgctcttttanaggactntccttttgctgcccacaggatgatgctcttatatacattgacagtatatatatttattgttgtggtgtaattcaagagaattataaagtgataatttatctacccgtaaattanacaggattatatttataacatgc

SEQ ID NO: 81652 - DNA, 374 bp, Glycine max
gcgtgtcctgcgagagacaccagtattgtgatctgtgaaagagcatctaaactgttattaacacagaagatcattctctcaaaacctattacaactaattaaacctgtattaaccgctgatgtataattgcatgacgaaggttaactcctctcttttgtacaacgagacctttgttttatgaacaccgtgcacattgctgaacacattatacccaggaatataggatggacctacctctatgaagtgtattgagacaacattccgttacattataatatggcgcgagttcgtaagatctatgacacgattaattgaagtatatcagttacatgtgctataaccaatgaactttcacattctcctccactctcat

SEQ ID NO: 81653 - DNA, 167 bp, Glycine max
tttggagatatatgggagtctactagtatgcctatggattattggaagacatgtgaagcatctaacttgctgttatggagtacctcccatctgttaggttatgtgatcttggatgtggtctgaatgtggtaaactgtaaatgatggaagtacctaggtaatgtaaat

SEQ ID NO: 81654 - DNA, 436 bp, Glycine max
  unsure (1)..(436): unsure at all n locations
tactaagctggaggngttgttggacccttgctgngggaacgaggaattggcttctttgagtacgagagctcagatgaatgtgggcaactgctgatggtgggttcatgttccatttgtggaagtgggagagttgatttgcgccatcgaccgatcgtcacctagtaccacatatgacgggtaccccataatccaacaagcttgatgtgagaaaacgcggaagagtcagacattctactattgtttgacaccacatagcggtacctgtagatatgtctcgggggtcaggagaccttgaggacgtcccgtggggtgctattgcccaaaaccaaacttgaccaatccctacccaacccgggcatagtcagtcagtgagaacctgtgacgttcctaaacatgcgagctcctggcagtcaaccaatacaagaatagatttcac

SEQ ID NO: 81655 - DNA, 451 bp, Glycine max
  unsure (1)..(451): unsure at all n locations
aatctgcgcacaatagaaaataacatataaatggttggtccacgggacaactaggaaatacagtgattacatatgccagaggaaatacttgagttagagtnatatatggatccacttgctgaaacttacacagatcatgtttcctttcaacagttacttctgctactcttggtgagaaaaccacagagatagtccctgacgtatttattagtgcaagtgaaccatgctggacgtactaatatgctaaaatgtcatactatatattgctgcgatgttcttttatggcatagcctctgatgagcatcaaaacagtgtgtcgtgtaactatgataatgacgagagcacggaatgatggagagttgagcaccacagatatggaatgcataaggagacaccatctgcatgaagcagcacatgacaatcagtgtgcctcttctctcgttaagcatat

SEQ ID NO: 81656 - DNA, 310 bp, Glycine max
  unsure (1)..(310): unsure at all n locations
ctattgctctcaatactggctgacaaacaagcagcaatactactctattattcaatcaacaataattgcgtctagcattgttcatgcaacaatagtcaattcaagaaagaaagacaagagcttataattaacccaccaaacatcaattgatagtaaattggtctacatacatgaccaaaatacatatatanggattagagcaatatctataatcgtttcagatctttggctactgacactcttcatgccatctcttgcatttattgcttanaaaggagagagtagagaaacacaaagtggcgttgaggat

SEQ ID NO: 81657 - DNA, 385 bp, Glycine max
  unsure (1)..(385): unsure at all n locations
acacatgaaactcagcttaggctgtcaattgcttagattgttgcacagaagttatttgtttgttggcggtcggcanaggaacataaaccacacagtctggcgacaagtgcagatctttgattgatggccagttgggttaccaagttaaccaacgcatctagtttaccttcaagcttcttagtcgtagctgatgaagatgaattcgcggctacttcatgcactcctctaatgacaataccatcattgttggcactaaattgttgggagttggaagccatcttatcaatcaaatttctgacctcaacaggagtcatatcaccaagggctccaccaatagcagcatctatcgtacttctatacatgatactgagtccttcataaaaat

SEQ ID NO: 81658 - DNA, 316 bp, Glycine max
ttcatagtccgcgataaaacgacgggtatacccaattagacccatataccctgtgacatactttgtggttgggaacgtaatgcactacagaaccgcctggacgctggagggatccttagccaagataatattgttgagatactcaacggaggtttgactgctactgcgctcactgcaactaaccttgatctgatgctgcacacacaaagaaatgacagcttccacaatgttgaggtgggaacgccaagttgtggcggtcgaccaagatgtcgtcggagaacacatacacgcatgatgtgtacaagggatgaaatac

SEQ ID NO: 81659 - DNA, 463 bp, Glycine max
  unsure (1)..(463): unsure at all n locations
tgcatcacatggagtgcanggtaattcgcccaggcgatctgnatcnncttcatgcgagtntcttgctcaggggtgacgttacattttagcccaagccagttggatgctagcctatgcaaatttacggtcagaaagcttaacgaaaagaccattttgccctttcttttggctttgnttctagatctaacaaacaagcatcaaaacctatagaatcattgatgaatctttcatatttaaacaaaaatattattaaatgttcaatatatattaacaactcgatttaagggtagtttataagaaagctatcacaatcaaaggataagtgctaacaatctaatcccaaaaaatcattgaaatctgatgatataaacactcacattcccttctggattgatgatatagacactaacgatataaatactcgcattcccttctggattgataattgactgtgcgggaatat

SEQ ID NO: 81660 - DNA, 256 bp, Glycine max
  unsure (1)..(256): unsure at all n locations
tgtntggctcttgaacaatatgagtccaagctgagtcttgattttttacaagagctaaggaacgagatactcttctctagaacatgcaggatatggcgaagaaactgaaagatctttaagaggattagaagaagctgaatgaactatctgattctcgaaacgatgatagatatgatctatagagtgtagaagcaagcttcatggtgagtcaagatagatgtcaaccagtatcgacgattacaaagacgcatgacga

SEQ ID NO: 81661 - DNA, 471 bp, Glycine max
  unsure (1)..(471): unsure at all n locations
acacacctctctaatagctgagctcacctcctcgagatgagaagctagagcttagctacacacccctataatagttaagctcaccctcacgcgcaatatacatgaaaatataaacaaagtccctactacaaagactacatanaatgccctgaaatacaaggctaataccctatactactagaatggccaacatacaaggcccaaaagaaggaataacctattctaatatntacaaagaatagtgggctcatacgtagctcatgggcccaacatctatcccttggatccctggcctaatttacttggagtcttctctatccaagagcccttgtggtgtaggatcgcatcacacctgtcacaagggatggcattctataatcgagtatgtgcaacgagacttcagaattattacttttccctcttatatttgtatattttggggcaacaggggactgccgtgctctacgtatc

SEQ ID NO: 81662 - DNA, 434 bp, Glycine max
  unsure (1)..(434): unsure at all n locations
acactatgaaactcagcttgctgtacaggactatcttatgagaaatcttttttttaagaagagacttatcacttggattatgctgattntgacactcgtgtataatgcattaaggcgtagcaaacacacaagtctacaaagggtgcagagaagagttctaatttattaaaaatcatacatacacacatatgttgtccacacatgtgatgcacatagatcgaaatactctataacctttatagatgattattcacaatatatgtatctctacttacttcattctaagaatgaagctttagataccttctcagagcttacagctgaagctgagaaacaatgtcggaaacacatctatattgtgagatcagataaagatggggaagtctctggtngatacacataggatggacaacaccaggctcattgtgaaaatc

SEQ ID NO: 81663 - DNA, 423 bp, Glycine max
gacctatgaaactcagcttgctcaagtggaatagagcgactgtcggctttattgtttatcgctctccttaaccattaaaggttgtgcttcttcttgtgggtagatgtcctcgctagattgttactcttttgctgcttcaatttcgagatcccccctctctctttctctatctctttcttttgctccattgaagcatcctctctaagcttattatccaaggcactctcttgagggtgaagctccttcttctatggctgattccctagtggatggcgcctcctgatcacctcatgtgctttatcttccgatgcatctccatggcggaaaatcaccattgaaggacctcattgaagctcgaagatctagcctccatagaagcttctcaagcaagcttccatcaagtggtattagagcaaacagttt

SEQ ID NO: 81664 - DNA, 152 bp, Glycine max
  unsure (1)..(152): unsure at all n locations
acatttgttactccttttccttgtattttgtgtcaggtcactaattgcaagcatgagttccacctgtagtgcattcttgaatggtacgctttaatattntttcatgtgtgtctttcacaaaacaaatatatttagtgttatttttacctcta

SEQ ID NO: 81665 - DNA, 486 bp, Glycine max
  unsure (1)..(486): unsure at all n locations
tgcaagtgtaaacatctacaagaattagatcaatgcgatccttttttaactctccacccacaataaggcaccactactcagtactcatccaccacaaaacaactttcttcaccaatttcaggaccagatgatgagcttaattgtattgtgtatgtggtggtccaaaaagtagttgtgagttggtttctgatttatagaataagcaaagagaaagagtgggtggtgtctcagttatgtcactgtgaagtttgtttcacttcacattcacttggtgtgacatgatgaaacgtagatgagtacgcaatgcgtgtgaaattattactgaagtagctagctttcagtagtgtagtatttattatgtgaacgtgaaacattcttctactgcgctctntatcttgtctcttcaaagttgcgtttagcacaagtgcgcacacgtacgtctatactttattattataaatatactttcngagtttaattaatcat

SEQ ID NO: 81666 - DNA, 337 bp, Glycine max
  unsure (1)..(337): unsure at all n locations
aatgctcaacatcacaatctgcaatctataagaatgctcaacgaanaagtctctctcttgaactttaatatgacggatatgagtgaggcaagatatatgatagggatagaaatattctgaaatacatcagaaggagtggttagcctgtctcatanagcatatatcaatcaagtactacagagatttaagatggaaaagtgcttaacatcacctctttcgatgtctataagagacatacttagtctcacacaatgtcctagaaatgatctggaacaaaaacaaatggaagtaatatcgtatgcatcggctgttgggagtattatgcatgctcaaatct

SEQ ID NO: 81667 - DNA, 421 bp, Glycine max
ccattccagagaaagaaacataattgccaataaagaattggtattgcgaaagacgcaactattgctgagacaccgcgtctagtgcttagattatgttcatgatgcatatttcagagaaccacccctagtttgaggttttgttgagactaacaaggttgaagggttctcattcttcttcattattttcttgttggactatgagaccacaagcttgaactagtctactctatctttgttaaggtcctctgaattgtcaacagatatgtcttcaacaagattacccaaagagttggggacaattagcatatcttttttaagcgcataatggaaggtactgagatctcacacaaaaggttgagattgttgttcactcaattgagtgtccttcacctctatgccaacctttgtctccacttcaaca

SEQ ID NO: 81668 - DNA, 453 bp, Glycine max
gcatagatgctatacacacatggagctacacaatgagttttcttctattatagatgacgaaaaggtgcataaattacgacctaccgtcgagcacaaaccataatactatagtcattttatccgtaacttgaaaatgaagaaaatatccgctcggacgctagagttggattctccgtgtacgaacgatatcatgaacccttgccattcaaggcgtgacagacagctggatcgatagaattgtgacgtttgaaaatctattctaagcgaaaatcatctttaagagggtgattattttgaactaagacatcgagatccattgtgaaaccacatattgcgtcgtctagtggaatatgactgctgcgagcctactcgcttctttagataacacgtgcaatgatcatacacacaatgcagctgatgctgtcatgtcatagaccatagtctcgaaataca

SEQ ID NO: 81669 - DNA, 314 bp, Glycine max
  unsure (1)..(314): unsure at all n locations
atatacaactactcattcaggtgtgatgacttggaagaatatgttctgatagattctagtcatcgaagagttttacctgatgagctggttagatctctctactaaaggttacngaatacggtaaggaagcttgtaacgctagataccatagtaagtcaagttggaagaaagaaacacgaattgattgtttgacggaccttgtacattaacttctattgtagactacactctaagtaattaattctcatacatggttcaagatgagtgtacctacactggttaatatgtgtacgtcataggcattgcacatatta

SEQ ID NO: 81670 - DNA, 488 bp, Glycine max
  unsure (1)..(488): unsure at all n locations
ntgcggatgtggtcttcgccagtgaaaggatcgatgtgggttttatatgatgcaaatttgatcatcctactaggacgactgagagaactgtggcacatgcagagggtgagaaagagggagaaacccatgttgtgactgtcattcctatacgggcaagtttcccaccatacccaacaatgtcattactcaatcaataacaaaccttctccttacccactacccagttatccacaaaggccatccctaaatcaaccacaaagcctgtctaccgcacttccaatgacgaagaccacctttagcacaaaccataaaaacaccaactgaaaggaattttgcagcataaagcctgtagggttcaccccacattccgttgtcatatgctaaacttgatcccatatgcactcaataattcaatggtagccataaccccaaccaaggttcctcaacctccatttttctgaagatacgactcgaacgcaacgtgtgct

SEQ ID NO: 81671 - DNA, 357 bp, Glycine max
  unsure (1)..(357): unsure at all n locations
taatgctctntgactaanagtaagcatgactacctttgattggatagatcaccaagtttaatcttatagtgatttccttgtctcttagtagacaagagtaaagagttgtccttgttttggatgatacacatatccttgttaaagttaaaggtgacattgtatccactatcatacaattgacttatgctcaacaaattatgcttcaatcctttaacaagtaaaacattattgatagaaggataataaggaatacaaaccttacctacacctattattagacctttctgagttcctctgaaagtgaccatcccaccagacatagggcttanggattgaacatagactnttcactatcat

SEQ ID NO: 81672 - DNA, 453 bp, Glycine max
gccctaataagagatctcatacttttctcacttttgtaagatgcgactcttataaagcttaaccaatctatttccatccgtatataatgctttgaatatatagttgtcattttaatcttcatataatttatatttgttttgtataaagactttttttttattgacctattagttaattaacctttttgtttattaccagccagttaacttatttaaatacgagtcttttcaagatttatgaactaaataatataaataaaataaaaatttatctaaatgatacaaggcaacaattatttatatgcatgatataatttactgttcagaggtgagaaatcagttttttattttttttctttgttaagaaatcgattattagaaatcaatttcttaatgtgttatatttttttcgaatccttttttttaaacacaactgagaatgtgtttttttca

SEQ ID NO: 81673 - DNA, 349 bp, Glycine max
ctaagctgacgaacgttgacggaaatagaaccacaaaattttgtgtctcccatccagagaagagctaattgcaataagaatggtttgcgaagaagcactatggtgaacaccggttagtgctagatatgttcatgatgcatatataaagaacacccctagttgaggttagtgagactaacagggtgaacgggctcaatcctcttcattttttcttgggagacatgagacccaagcttgaactagtctacttactttgtaaggcctctgattgcaacagatatgtttcacaagatacccaaaagttgggacattacatatctttttagcgctatggaggactgagattcac

SEQ ID NO: 81674 - DNA, 362 bp, Glycine max
  unsure (1)..(362): unsure at all n locations
gaagctaggcttctttgcatgttgatttcatggttaaaatctcgtgtctgcagccatgactagaactgcacaatatgttggttttatggaagattaaagggtaaaaatgagttctttgggtattaaagcatacgattagccttaaatttcacttatataagagtttcctagtaaaagttatgaataaaacangttttaggatattttattagataaaatctggcacgacgatgaactaactagtatatctgtatggactggttctcctacaattttgacctcacatatgagttngttaggtgtgaaaatgtatggtagcatataacatctgaataactgattctcggaatacctagaacact

SEQ ID NO: 81675 - DNA, 392 bp, Glycine max
  unsure (1)..(392): unsure at all n locations
gaaacataattgcaaataagaaattggtattgcgaactaagcctctattggcgagacacgcgcgtctagtgcttagattatgatcatgaagcatatgtcaaacaaccactcntaagtagaggttcctgtgacaccaacacggttgaagggtgctcattcttcttcatttttctcttggtggactatgagaccacagactaggactaagcgactctatctttgataatgtcctgtgaattgtcaacagatacgtctgtcacatgattacaccagaaagtggagacaattagcatatcttttttaagcgcataatggaaggtactgagatctcacacaacaggtggagattgtcgtcactcaattgggtgaactcacctctatgccacctttgt

SEQ ID NO: 81676 - DNA, 369 bp, Glycine max
acacataaaactcaagctgggtcaaccatgaccactatgcgccgagaattatttttttaacacaatcaccaaatagcatgtggaccgcttcaagggagattgagcgctcttagctatcaaaacttaaaagaaaaaatgcctgtgacaccaccataatgaggccatacttacatcatagagctcaaaatacagcagtacgcggagtagtatcatataaatacattgattagacgtgttgaataatatgcacaatgagagtgtgtacatgctatttatatagcctgtgaaacccctctataagacccaatgcaccccacgtggtgtaagctccattggagcttgctcgcctaagatcttcttgatcaatgg

SEQ ID NO: 81677 - DNA, 426 bp, Glycine max
  unsure (1)..(426): unsure at all n locations
ntcaagatatcattaatgatgctgataaagggcttttctgtacaagacgatggaaggcgctatacaatactagagagggtgatgcggctgacagaagcagcttttcgcatggaagatgtcatcgatgaatataacatctcctgcgaggataaacaacctgatgatcctcgatgtgcagatttactatgtgaggctgatgccttcatcaaaactcaaatccttctgcttctaagtgcatataacattcatgatgttaaatcgcttgttcgagctgaaagagatgtgttccagagccattttcctttagaaccaatactagctagttctagaggaaatcacgatgtcacctggcagaaacttctaatggatcctctctgtatcgaggaagatgatggtgcggagctggatggacctagatatactctg

SEQ ID NO: 81678 - DNA, 337 bp, Glycine max
  unsure (1)..(337): unsure at all n locations
ngtccgatcgcaacgcacctgctgcagtcatgggaacttcatatggctngactggctcagaggccacaatcaatctaccagggacgcgatggacgatcgcattaacaggcttaccataagtctagcaatggaccagtatgtggtttataagcgaaacgtccgcgcatcctagagccttctgcaatccagagacacttggcgcactgaatatagatgctatgtcagtgcccatgccaanggccaggtggtcaccaacactggggactgcacggctaaccatggtcactatttgaggctcgttctcactgtgtgcgctgacctcacatgctttctcatc

SEQ ID NO: 81679 - DNA, 103 bp, Glycine max
ctcaatacctcctcgaggagagcgagctctctactttcctcaatggccggcggcgcgccttccgtggacaatactattggcagtattgtgaagatgggccgac

SEQ ID NO: 81680 - DNA, 459 bp, Glycine max
  unsure (1)..(459): unsure at all n locations
ctaaaaaaatagagacattagacatcagttaccttggntttccttgaacagcatcattaatttcatctgtagtacgcctctctggaaaggtagacaaaattacatatttctccttttcaggcgattcatctaccctcttgtacagatcatattggtatggatgagtcatcctacatcacaagatattaagttacaataccatacttcataactactgctggtagaagatagagaatgtctttgtatgttgagcatattanacaattaaatatctagtctggtcattacaagtacgaaggagctcctgacacactctaatcatggaatgatgcttagtttctacattgtaatccatcaccagacacctcttgacagaagaaagaaatgcaattgtaatgtctctatagaccacccgaagaactgaataatttactgactcgtttatgacatatgaacatg

SEQ ID NO: 81681 - DNA, 418 bp, Glycine max
cgcgaacgcacaacagagccttgcttttatagactcttcatgtctggtcaagaagaccatttagaagagttatcacttgtacaaaaactgataaccaatctgaacaagtcaaaacctttttgaagagtgacatcctgagatttattcagaaccagtcactggtgatcgatcaccacataagtgtaatcgattacacaaagcttttatgtgaaaggatgcgactctgcacattagaatttgaacttcatcgttcaaaggcactggtaatcgattaccaaatcattgtgaggcgatacaacttgttgaaagctatgggaaccgtgtaaattcaatatgaaaactgtttcaaaacaagtttgctactggtaatcgatgacaactatctcgtaatcgattacaagagagtacaaactctttg

SEQ ID NO: 81682 - DNA, 385 bp, Glycine max
  unsure (1)..(385): unsure at all n locations
ttgatgctgtcagtggtggatcccttggagacatgacccctgctgaagccaggaatgtaattgagaagatggctttccactcccagcaattcaatgccaaaaatgatgccattgcccttagaggagtgcatgaagtagccacgaattcatgttcatcatgtgagactaagaagcttgaaggaaactagatgccttggtacactggtaaacaactggcatgaataaaaatctgccctgcggcaactctgtggttatgctacttgcaaccanacacagacctttgccttttgtgcaacattgaagcatagaacagctgaagctatgctgaaacatctcaacgagctcgtcacctcacagctaatcagcacacatatactatgactct

SEQ ID NO: 81683 - DNA, 471 bp, Glycine max
accttgatactcagctatgcgaaataagtttttgccctaataagagatctcatactttttcttttagtaagaatcgactcttataaagcttaaccaatctatttccatccgtatataatgctttgaatatataggtgtcattttaatcttcatataatttatatttgttttgtataaagactttttttttattgacctattagttaattaacctttttgtttattaccagtcagttaacttatttaaatacgagtcttttcaagatttatgaactaaataatataaataaaatagaaattcatctaaatgatacaaggcaacaattatttatatgcatgatataatttactgttcagaggtgagaaatcagttttttattctttttctttgttaagaaatcgattattagaaatcaatttcttaatgtgtgatatttctttcgaatcctcttttttaacacaactgaaaat

SEQ ID NO: 81684 - DNA, 431 bp, Glycine max
  unsure (1)..(431): unsure at all n locations
acgcatcaacaagaatcaagccaaggctattgtgcaagcaatcaatgcggcaaaacacaccaaatgattataatgatggatggctcaaattctcacaaaggtaaaatcatcactttcaaatagagctttcaaaactatcatgacatgtagagaagaatcaatgatttcaagtcacaaaatgacaagaacttatattttcaaaacaattacccatttcttgaacatatcctataattcaaagaaaaacatgcaaagtcgtacgtgcacacgattatgacccanaatattaaactgaacatccgacgaaacttacaacattaacaaattatcacatctaacaaattaacaaaaccaacaaaacttgcagaaccaaagaacactcccgccctccatacttatacaacacattgtcctcaatgtagcacaattaa

SEQ ID NO: 81685 - DNA, 478 bp, Glycine max
tctcgcctattatgctataaatagggggagaagcgaatataatagggttcagccccttaggcacttctctctctctcgaaattgctgaggaaaattatttccgtgaagaaaatctaagccgaggcgcttccgtaacgtttccgtaacgtttctgtgagtaattacgcgaagattctcgaccgttcttcaagattcatcgatcgttcttcgttttcttcagtcttcaacgggtaagtacctcaaaccgagcttttcaattcattctatgtacccgtggtggtccacatattgtttcatgtatttatattctcgtatgcatttgctttgtatacccccttttgacgtgcttaagccatttatttaagtcatttctcgcttaatctaaaaataaaataaatttccaccgatcgtttgaattgtatcatccggtaatgttggttaaaatgaattccgaccgttcggtcgtgccgtaaccacg

SEQ ID NO: 81686 - DNA, 326 bp, Glycine max
  unsure (1)..(326): unsure at all n locations
ctctgtggtatgctctgggatctgcgccaaccatatgctttaaagctataacctanatctgcataaggcaggctctaaatatgctctaaattcgtgacgttgcgcttagcgccaccctcgtgcttagcgcaggtaagtggattcaggcttagcgtcagtcgtgcgctgagcctggctgaacgcacctgctgcgcttatcgtgccgccttgatactgatgccgtgccagattcttcttcgtgctaagtgcactgaagctacgcttagcggaggatgtgcgcttagcccactgatgagctaagctcaactgtcacttttggcacttca

SEQ ID NO: 81687 - DNA, 357 bp, Glycine max
ggaatcataagcggcaatgaagccaacaagaagactaccacctttagaggttatcttgaaccctgtaaaaggtgggaatggtttcccttgataggcacaaaggggacttctgtttgatggatccgggtgcatcacaagacatggaaacatttttaatgttggagaagctattacaacagctgatacaccaaggccggttctaaatcattgaagggaacaagggagaacaacacgtgtgtatgcagttagcggacaaagagagcctcactaaacccaagcctttggtgatacacttcaccagggatgtggcctcccagaaaccctgaggttctcgacctgtctcgggtagcaaacctg

SEQ ID NO: 81688 - DNA, 357 bp, Glycine max
tatactgaatgataatcattgcgcgaagtgatggcgttttttttttattctgcagatcacaatcacactaacactgtacttaagaatcacagacgcacatgcaaacatgtgatgtattgcgccagacataacagctgtcgcctctgctcttgcctctttcattgaggggtagggaggatcactgagaacttgctaccgtaatgagtgctgtacacaggctcatcctctcaagaatctttcgctgcaattcgggagatcctcagaacaaaaccactcttacgagactggtccatgaatatcttattaagcgtttgagactgttcctgctagaaccgagagtttaccatgtccagccac

SEQ ID NO: 81689 - DNA, 283 bp, Glycine max
tgagtgtgcggtggttttttacaagagacccatgaaaacgattcattcacagacccaatccctgacttacccacactaagctatctataagggctgacttactatacctttgagatcttttctcaggctggcccgacccctcttcttaaagctctggaactctgccggcactgtgaccaacaaaggccggtgccaacgtagaatcgagtttattgccacgtgaagctacgacgtactgacttgacgctgtgtagagactgaacagcccaggacatgccttcac

SEQ ID NO: 81690 - DNA, 78 bp, Glycine max
tatcatggaggaaagattaatgaatgcatgagggaatggtgatgggatgcatgacgcatatgcttcttacatacacaa

SEQ ID NO: 81691 - DNA, 452 bp, Glycine max
ttgaatgctctattcaatggtgttgacgagaagatctgttgtcttatctacacatgcgccgcggccaaagatgcttgggagatccttgaaaccactcgtgaacgaacctccttagtgaacatgtgcacatcgcaactctcggctgcaggattctcaaatctgactatgaaagagggagaatgtattcgtgactttcacatgaacattcttgaaattgccaatgcttgcactgtcttgcgagagagaatgacatatgaacagctggtgagatagatcctcagatccttgcctaagagatttgacatgaaaggcactgccatagaggaggcacactacatttgccacatgagagaagatgaactcattgtttcccttcttacctttgagctaggactctcggacttggctgaatagaagagcatgaacttggctgtcttgttctatgatgaacg

SEQ ID NO: 81692 - DNA, 299 bp, Glycine max
ttgttgctagagaaatgattatttggactcaccaggttcactagagcagacttggctgtaactctttcagacagcttcggattaattccattttgcattatcacagagatatgaagcacatgatcaaatctttcacagtttgtattatagtacagagattagcttcacatgactggatgttctttgtaatataaccaacgatttttattagacatatgtttcacagttgtaattaaaaaaagcaacatgtcattatctattacaagaatctgatgacacaattgtgagagacttatctg

SEQ ID NO: 81693 - DNA, 272 bp, Glycine max
  unsure (1)..(272): unsure at all n locations
tggagattctcttttcgtaaagttacggacacttacggatttcgcaacgatactcgttttctttccgtaatgttacggaaccttgcggattacataatcatccactttctttactgtacggaatgttacggaaccttactaattgtgcaacgatgcttcctttngatttcagtgtgtcacggaaccttacggattgtgcatcaataccttcttttgatttccggcatgtcccggaacttacaaattgccaatgatgggtgccagcacctcac

SEQ ID NO: 81694 - DNA, 393 bp, Glycine max
  unsure (1)..(393): unsure at all n locations
cgtttccaaaacattgaggagcacaagaagntgtcacaaaatcattaccaaagagttttactctctggtgattaattaccaaaaggtagtaattgattaccagtgttttaaaatgttaagatttcaaatttcaagagttacaactgtgtttaaacattntcaacttgtgtaatcgattacacaatacttgtaatcgattaccagtgtttctaaacattgtaattttcaaaattcaaaatgaagagtcacatctgttgatgtgcaatcgattacaccttaatggtagtcgatttccaatgattgattntgaagaatacatttccaagagtcacaattcttcaagtgacttgtttctgaagattctttcataagtcagaacttttctaagtgact

SEQ ID NO: 81695 - DNA, 387 bp, Glycine max
  unsure (1)..(387): unsure at all n locations
atcgacccccttcaatatacacagacatgaatgtngcattagagcatgcttatgcgcatacttcttcacgaacgttcacttgcacaagacattcttataactaataaaaatgcgcccatatacagtcaaggcaccttcgttacctagattatctacatgtactgacaaggagtatctgttacgtacatcacacacatatcctatgctgaattcacatacatgcatactctaagcagcttggctatcagaaatagcatacgtgcacatgttggtatttctgagacctatacatacacacacttcatgatgaatcttgactatctacacaataaggtgctacatggcatgctattgttttcaagtgtcatactacctaaagccgcatgc

SEQ ID NO: 81696 - DNA, 371 bp, Glycine max
tagtagatatgttgtgtttgaagataatgacggctggaaatgggggaggagcctttgagaagcacaaactgatttgcttaagtgggaagacaccatcatagatgacagtggcgaagacgctcagacacggagtccatcatgacgcggaagaacatgcagaacaagttgagtatgagagggtataagactgcatactagttagagtaattgacacacaattaagtgctcacgggaggaatcgacgagaaccactttggatgaaagaaaatggtgatgctgataaatgctaggctctactggtggcacaagggtatgcataacaatatggcatagactatactgaggtgtttgcacatgtggctagatgagat

SEQ ID NO: 81697 - DNA, 481 bp, Glycine max
  unsure (1)..(481): unsure at all n locations
tcgcacttgataagggagaacacatgaacagcgctaggcaacgactgntatggtgctccgaacaaaggtggagtatggaggattgccttgagggtccgcacttangcaatcatgaaactgagctccaaactcgaaagtggaggacacatgaacatccctaaacaagaacattcacgtggctctaaaaaaggaagagaatggaggattgccttgaggttcctctcttacgcaatcatggaatacaactccaatactcgaaaatggagaacacatgaacagccctaagcaataacattcatgtggctccggaaaaggacgagaatggaggaatgccttgaggttcctctcttacgcaatcatggaatacagctccagactcgaaaaatggaggacacgtgaatgacaacgcaattcactcacgcggctccggaaaaggatgagaatggatgattgccttgagggtcctctcttagacaatcat

SEQ ID NO: 81698 - DNA, 369 bp, Glycine max
  unsure (1)..(369): unsure at all n locations
ctcaccaccagatttctgagcaacttcttcttcaatatttctatgacggacttaccaacatggagaggagtatgaatgatgctgctagtggcggagctcttggtgatatgacccctgctgaggctaggaatntgattgagaagatggctctcaacttccaacaattcagtgcaagagatgatgctattattcttagaggagtccatgaggtggccatggattcatcttcatctactgaacataaaaagcttgaaggaaaacttgatgccttggtcaacctagtaactcagcttgccatgaattagaaatctacacctggtgcatgagtctgtggtctatgttcttctctacaacaatctggagtcaatg

SEQ ID NO: 81699 - DNA, 457 bp, Glycine max
cgcttgtggagcttctatggaggctggatctttgagctttattattttctttaatggcgattctccaccatggagatgcagcggaagacaaaggagaacaggtgagaggcggcaccatccactagggaataagccatggaagaaggagcttcaccaccaagatgagccttggataagaagctcggagaggatgcttcaatggaggaaaagaaagagggagagaaagagagaggggggagcacgaaattgaaggaagagaaagggagagaagttgaactctgagttgtgactcacaagactctcattcatgacagttacaacaagtgtcacacatgcttctatgtatagactaggtagcttccttgagaagttttctttagaatacttccttgagaagctactttgagaaaacatgcttgagaagctagctacacacactctctcataactaagctca

SEQ ID NO: 81700 - DNA, 162 bp, Glycine max
  unsure (1)..(162): unsure at all n locations
tatgtctgacagtcaagcaatatgtcttgtgaaaaatgatctataccctgtgccatcatgcttctcgaatctgcatgacatgccgagggtatggtntattagagtctaccaacgattaaaacaatacatattcatgcgtataacatgcttcggacacattct

SEQ ID NO: 81701 - DNA, 472 bp, Glycine max
actcagcttgttgagaaacttcctgagaagctgagaatggcttactttattgtgtatgaacgaagctcacctgcttgagaagcagtgcttaagaagctagagcttagctacacacggccctctgataactaagctcacctccttgagaagagaagcttgagcttagcgacacacccctatactaagctcacccgatgacataaagcatgaaaatactacaaaggatccggctactaagacgactctagatgccgtgaaatacgaggctcaaaccctatgctactagaatggacatgacacaaggtgcgctagaagaaagcatcctgttctactatatactaagaagagtggacccaaccttggcacatgggctcaaagatcgaccctagggaaccctagagccttcttgatcaagtgtagcccaatgctgtgggagcctcttgatcatggctctggtaactggtgctatcct

SEQ ID NO: 81702 - DNA, 281 bp, Glycine max
  unsure (1)..(281): unsure at all n locations
atctagctcctttctctctcgatgcttgcccaagatggcggacaatgcaagaccattcctcanactattgaacaaatcactgagtgaccttgtctaggatgaccagtgtggaaaaatcgttacagaacttaagaatttctttggaactcctccaactctaacttatccttcaccaatagctaaaatactactctatctatctatttcagatatacgtattacttccatatggatggaccaagacagtaatagacaactggcgatctactatcctagtatag

SEQ ID NO: 81703 - DNA, 417 bp, Glycine max
  unsure (1)..(417): unsure at all n locations
gattacgtatcatattctcaacaaaaaagatttacttaacagactacattctgcaaaaatattttccaaatttgatatgaaatctggattttggaaaattcatatccaagaatcagaaaggtacaaaacagccttcactgtacctttcgggcaatacaagtggaatgtaatgtcattcggtctgaagaatgccccttcagaattccaaaaaatcatgaatgacattttcaatccttattcaaagttcgtcattgtctacatagatgatgttctaatcttttctcaaaacattgatcaacatttcanacacctacagaccttcatccatatcatcaaacaaaatggtctggtagtttccaaataaaaaatcaatctttatcaaactcgaagtaggttccttggtcataatatatatca

SEQ ID NO: 81704 - DNA, 70 bp, Glycine max
acagtggaggatcaatcggacgttatctctatgggagatctcattcttaatcgaattgattaataactaa

SEQ ID NO: 81705 - DNA, 368 bp, Glycine max
gagagcgtcaggcaacaagataatgacgatgaccatagctattctaccaacgctgccaagactgtaacgtgatagtttatcgaccaaaatgacattgctgaatactcagagccttcgtcataagagcgactggacaccattcttagtcaataacaaatgccttacacacaccctgaggttttgcagatacctccttcaccctcgccactatgcacaagagatggtggagatgactctgcattggcacataatgcatacgaaccatatgcatgatatagcattatatgcgtcggagattcatttactgcctctgtcacatgaacatcctccatcgatatgtcttgaactacaggttatgatagagcatg

SEQ ID NO: 81706 - DNA, 417 bp, Glycine max
  unsure (1)..(417): unsure at all n locations
tatggaacaaaatatagtgcgaagtagctaactcagcataacttaagacactagcacacacagactnttaaaaatattgatctaaaatgtaggaactgtccaaaaaataaaaagggcaagtgttacaaccaaattattgtcagtaatttatgaataattaacaacagatacagtgatgtgttattgtaccactgcttcgatatcaacatagtactgtcctagagctgtctgtagaattactagttcaatattcttagcatctataatgctcatacagattgctagtttcttgatcaagtcattaatggcttctttggacttgagaatctcactatcatatgccatcttcagctcctctagacttgcaagtgcttgcttcagagttctatcaagatgtgatacttgagcccttaaata

SEQ ID NO: 81707 - DNA, 368 bp, Glycine max
ttcttaacataatagagtgacctcccagactaaacttgcaaaaatatttgccagatttgatatgaaagtctggatatatggaaatattcatatacaaagaatcagtaaaggtacacaaacacgccttcggctgaacctattcgggcaatacaagtggaatgttattgccttctgtctgaagaatgccccttcagaattccaaacaatcatgaatgacattttcaatccttattcacagtgcgtcattgtctacatagatgatgttctaatcttttctcaaaacattgatcaacatttcacacacctacagaccttcatccatatcatcaaacaatatggtctggtagttgccggataaaagatcaatc

SEQ ID NO: 81708 - DNA, 197 bp, Glycine max
  unsure (1)..(197): unsure at all n locations
atatatgagactcgagacacgaatgtgctangagctnttcagaacaaacaggtcttatcctcttatagagcaaaatcattatatcctcttacaaattccttggccaaattacttgtgattcaataaggaattatctgagtggtcaaattgatcaatctatctctttcaagagagatttcttcatgtcttcttcttca

SEQ ID NO: 81709 - DNA, 235 bp, Glycine max
cagtcaccgctgtacgagcattgtgcaccagcagcgcttggaagccatcaagggatggtcgtttctccgggagcgacgcgttcagctcagggacgacaagtatactgatttccacgaagaaatacgtcgcccgcgagggacaccactgggtactcccatggccaagtttgatccagacatagtccttgagttttatgccaatgcttggccaacagaggagggcgtgcgtgacatg

SEQ ID NO: 81710 - DNA, 377 bp, Glycine max
  unsure (1)..(377): unsure at all n locations
tatctttcggtgcattccatggctaagaaatcactattgaaggaccttattgaagctcaaagattcagcctctatagaagcttcataagcaagcttccaacaagtggtatcaaagcacaagagcttcaagtangtgctccttaaacctgcactaattgtcagctttactatctcctccattggcggttcttcgttactctccatgtatctcttcccatgtcttgagctgaatgttgctaacataattgtttagaagttccaccgattaagcttactatagaagctagatgtgattgtctatggttcaaattccttgttcttgttcttgaaccatgaatagtgtcgagtttaagttccttcgagtattatattgtcaa

SEQ ID NO: 81711 - DNA, 431 bp, Glycine max
tggtcgagacaggctatcgttgttgatgttagcgagatgaagatgggaaggaacgatctgattgatgagctttatggagagaactatctcgtatacggagtggcacactatatccatatgcttggcacgctcgagagcaactggatatgtgggaaagaaatatatcagttttggtatcacctatacaagcacggggagcatagtagacatgtagatcgcgcaccacatgagtgagccacattatctcagttgctacattcgccatatcccgatatctagattcacaattggaacgagcgatagtacgctgctttgtaccactccgggacacatgattacctcccaagaatatctaataatcataggtggagcgacgagtctcaacacaacgagcctaattggcatgatattaaccaagaacaagaagagag

SEQ ID NO: 81712 - DNA, 360 bp, Glycine max
agcagcctctgcatgcacaccaaagaagagatcatattgagggtgaaatatttatattgcatatagaaagcctatcccctgcaaccgtaaactgagcatcgttactatatgaggacatcgatagctgatatcaactcttcacgctataacatccatgctttgtgtgtcaccaaatcctagaatcatcctgcatctcctctaacaacaggatatgcatcatctggtcagaaacttgttgtggcaccaatgctgttgtgaaataatatcccaagctctagtattgtggaccaccagatcttcgacattgagttgggaaagtgagacgtgaggagcatctgctatactggtgttatttattcc

SEQ ID NO: 81713 - DNA, 142 bp, Glycine max
atgcgtgtacacaacgtcatggcaagagattcagagacagagaaatgacgaaccgtgcgcctatataagcttttcacccgtggaacctccaatagagaccacacatttgtggtggcactacacggatggaccagaatattct

SEQ ID NO: 81714 - DNA, 124 bp, Glycine max
tctaggagagcattcattcatagatatacctttactctttcattcattcacataccatacttgcatatcctgttcctgtgcgtgagctttattaagatccaatgctggagctactgatgaatcc

SEQ ID NO: 81715 - DNA, 351 bp, Glycine max
  unsure (1)..(351): unsure at all n locations
tgagaggcnttagcctcacatttgacacgcgcgcgtgctactctttgtttccatggcaatacgagacatcttgccatatactaccaggtgaacgataacgtcgctgtgctttctcttccatgctacttttagcaaagtctttgatcctgacatgtttgatgagcaggaaaatgatgactctatcatactgtgccacctgtagaagtaatatacctctgttctctttgacatcacgattcacttgaatgcgcatctggacacagaaacctaatgatgcggtctgattatatactgtggattgactctgctgagcgctacatgatgatcttactcgggtcttcaaaggatcta

SEQ ID NO: 81716 - DNA, 268 bp, Glycine max
  unsure (1)..(268): unsure at all n locations
cagagagggaccngaagacatgtctcgtgggacatgagacctcgcggacaaccaggggcgtgcaatagtccagaacgaagctagaccaatcccaacccaacccccgcatagacagtctatgagaacactagacgcacctgagctgacgagccaatagctggcaacagatgcaacgaaaaccacacctcagagcaaggatgactgtggccgccagccatctgtgaatgttgcgctacatgtggatcgtggcctgtcgtgagcgagaacg

SEQ ID NO: 81717 - DNA, 283 bp, Glycine max
caacagcagcctgcgtcgtactaccaaaatggtgctggcccaagcagaccatacatgcctacacctatccaacgccagcagcaaacctcgaagctaccaagcattgaggccccatcataaccttccctctaagaacttgtgaagcaaatgactatgcataacatgcactatcagtaagagaccatagccttcattcacagcttaatcaatcagatgggacaattggctactcaattgaatcaacatcatgtccagaattctgacatgttgccttcataatctg

SEQ ID NO: 81718 - DNA, 417 bp, Glycine max
tgactacgatacagatggacgagcacaaggtcgagggttattctatcttgccactaagagagtctccgggctacatgtagagaagttccaccactagctacgcatggttggtggatataagatgcatactttgcatcccacatggagagtcgttccaaaagctctgaagaatcggattagggatgaccttgtgggatgtctattagaacataggagctatactaattggttgatctaagatgagaagatagttgtcattcactaactcttacatggccatttggtgagtgattgaacatataatagtctagaagggtcccacaccaagaagaaggtcattccatcggtggccacactatggaggcgcactaagtgatccctgacagggaggggcatgatgatcacactctctataat

SEQ ID NO: 81719 - DNA, 100 bp, Glycine max
acggctccaacgtgaacaacacacgctctcgaaacaaggcactgtcatgacccttcacacacaacctctaaagaaagccacacagatataactcctaaca

SEQ ID NO: 81720 - DNA, 312 bp, Glycine max
acatatgcacttagactatgaacgaacgctggagttgctgcacatgatgtccaacgttatgtcaaagaataagatctggctgcacaatgtacacagcaagataagatggcacatgaagaattgaagttgcacgatccacgatgtcagatacaatgtcctgacatcctgcccgagaatactggagttgctgtacaatgcaagataaacgtcaagtgcataactgaaactgcacgatccaccatgtcggcacgatgtactgacatccggacaagaatactggacatatacatcgtgtgtattcttaacagatta

SEQ ID NO: 81721 - DNA, 448 bp, Glycine max
  unsure (1)..(448): unsure at all n locations
actcagctctttaattaccacgtaatccgaaccatcttttttattactttatngnngacaacccactgtcgcttgagaacacaagctatgcatatgacataatttagctcccatatttcttcaatgactccaaagtaaagcattgaagctagacggggattgtcatcatttacactagcaaagtgttgagatacaacccttagactaaccccattattttgcattgcactcttgttgtcttgtgatttcgtgtagaacgaatacttgaagatatcgtatccttgccaagtaataacaccctgttatgcccttccaaccccatggtcttagacatgttaggattactatcctttactgaaccttcatcatgtactatgtatggcaaaacttcattactcttatttagcatgtactaatgagcttggtgcacatctcctagacttcgaga

SEQ ID NO: 81722 - DNA, 206 bp, Glycine max
  unsure (1)..(206): unsure at all n locations
tacgaaacgagcataatgtaaacctatacggtntaaaagctctatacgtgggcctctgctctagagattgtcctttcgttaaggcttagtgtctcttgctttcgaatttataatacaacgatctttcttgatctgttcctgggctctacccagtctcaatcatttgcatgtgtacatcttattcttgaaacggcagatcctatgac

SEQ ID NO: 81723 - DNA, 214 bp, Glycine max
gcttcgcgctaagtgcatctctgttcatgcgctaagcttttttcttgtgcgcttagtgcctcaccctcgcttatgggctgatttaagccgcaaagctagactacggtaagctcaactaacagcgactctatctgaatacaggtaagctttagcctgatcgcttagcgacaacttatcattggctaagcggaacctattgacgtcaatctctttt

SEQ ID NO: 81724 - DNA, 241 bp, Glycine max
ctctgtcctgaagacatgttgaggggtccttgttttgcttatataaagcttgtaatggtctccggagagccacacaaagaaaccggcactgttaacttatgtgaatggaaagtgagcttgttgtttaggctccaattactagctgttataggtgactattggtacctctggtacctgtgatatatcatttgttttgctgagtgaaaacaagggccttatctatgagcttctagagtcacct

SEQ ID NO: 81725 - DNA, 477 bp, Glycine max
  unsure (1)..(477): unsure at all n locations
gctcattgactccacattgctacacagaaggacatttatctgtatggtgatctgcagaagaacatagaccacagactcttgcgataggcgtagatttttgattcatggcaagctgggttactaggttgaccaaggcatcaagttttcccttgagctttatattttcagtcgatgaagatgaatctgtggccacctcatggactcctctaagaacaatagcatcatttcttgcactgaattgttgggagttggaagccatcttctcaatcatattcctagcttcagtagaggtcatatcaccaagagctccaccactggcagcatcaatcatactcctctgcatgttgctaagtccctcatagaaatattgaagaacgagttgctcaaaaatctggcggagagggcagctngcacantaattcttgaatctttcccagcattcatacaagctctctccactaagttgcctgatgcctg

SEQ ID NO: 81726 - DNA, 157 bp, Glycine max
actattttgaatttcctgcatatcaggaggtatagcgcgggacagcgctttgtactgcggaggccactttatgctgcactaatggaaagaatttcgcgcggggacacctttactttaccttactatgatgcggtgaactggagtgtcttgctgggtt

SEQ ID NO: 81727 - DNA, 520 bp, Glycine max
  unsure (1)..(520): unsure at all n locations
cttctggaactaagatgtattcctatttttttatatttcaatattatcggcgnttagcttttaattcgcatagctagagtcgtgttgtttcttcttagtcgtatgtatgctgctagaagatcgagtacgtaatttccactttagctgttgtttcctactttactagttgtttcaatatcgcgtaattnttctacttgcacccttcctcaatatacaaggggcgcctccagattaatggctcaataatcaatatagaatgtatatttgccatgcacgttgtaaaanatgactttacaatcataactacacattttggccacatttacaactaattcatacatgatctttatgtaatcaaatgagaaattntgtaaatagataagaataacaagtgtagtctcgatcttatgctctaatgacgaatagaagacacgtgcatagtatatttggttacaattcttactctcattatantttgaactctaactaacttttgtatatggaagatgtctttttttat

SEQ ID NO: 81728 - DNA, 468 bp, Glycine max
  unsure (1)..(468): unsure at all n locations
tatcatntcagnggttaatttatacattttcgttttctcttctttcccttggcgaatcangagaatgagttccttcaagatgtatttaatttcaaaccaaagagaagatatcttaataacaatgaacatcggatgtctagtggtgagaagggtggtttctatgactgattgtgtttcactgtcatttttgttactgaatgttctcttatctgtcggctactctctcatgttatatacttttttttcctgtttcttgccattgtgtgctgatctgcagcattctccttcttgcagagaatgtttaagtctccaaattcagttcagaacaaggctaggacccaattacttaataagcaacggttgttatctgaggttgtgttccttgccatataaagatcattaagtcttattttcctgtntaaaatgcttcggtaatggttaagaatggggtacttngaatactatatg

SEQ ID NO: 81729 - DNA, 431 bp, Glycine max
tgctagtgaagagagaggggagggcgaatttcatgtgatgtactattcaacaaatatagagtctctgtgcatgccaggactctgttctactactctgtatgtgtgaattggggtctatatctttttatgagctgctgcaatcatatgcttctctagactatgttgaatgtcggaataatactggaacacaccaacacgttgttaatataatatgatgcaagcatctttgtaactttgaacacggttaagaaacaacaaacttaagtggagagatcattaaactatcatacatgggtattatattgcgactatctagacttatgatgagatatgatggtgaaactctaccgagactgcacctgtcacgctatggtgtaagcatgtatttactatatggagatcttctatcaccagatgtgagctctgttatg

SEQ ID NO: 81730 - DNA, 459 bp, Glycine max
  unsure (1)..(459): unsure at all n locations
gcttgtataatcttatatagaagtatgagattatgtttctgagntggaatttgatgcaatccttccatggagggggcccatcaccagagtcatggttaagagactccaggaagattgggccagggatgcaagagaatgccttanggttctcatgagccttanggtagctnttgggcccatgggttaagtatgtgcccacttatctttgttcatattagattatggggttcattattttttgggccttgatttanggcaccacagtgtagggagggtaccncataagtntanggtaccctagtaatgtaggaattttcagcccttggtatttanggctcacacgactagttttgtatcagggatagttttgtaatatcacatgcattaagtgcactatttgatgtgtgtgttgggagaagaaattaatngaattgggagaagccaatctaattaaaattt

SEQ ID NO: 81731 - DNA, 451 bp, Glycine max
  unsure (1)..(451): unsure at all n locations
cgacaggtgctactactggtggagacacatgaatttggttgttatacctcaangtgatggcactcacattgttcggattctgcatagtttgtgaaagcaacttgtcagaattttgggactaagcttggttcaactgagtagccatctgccccatctgatttgtcagactctgaatgaaggctcttgtctcttgctgaaattgcatattctggttggtcatttgcctcactaactcttctaaggaaggttgaggaggagcctcagttgcttgttgtctttgttgtgactgctgctgtattggaggaggaacatatggcttgcttggaccagcaacattctgganaagagggacatgctattgttgttgtggaggacttgcccatctcagatttggatgatttctctaacctagatagtatctgttgcttgaaagatcataattattctactg

SEQ ID NO: 81732 - DNA, 467 bp, Glycine max
  unsure (1)..(467): unsure at all n locations
gctnggagcgctatccgcagactcaacagaagtatgtttgtgaatanatcanaccatgtgcatgaatcgtacacgcagtgggttattgataggaccaagagctctggcctaccctaccacttacctagatacctatcgtccaccatcccagcatcatgcttgcctatcccctttgacactaaggaagagtttcatgaacaattaaccaaagagaggcaagaaaaagaaacttggaagaggagatgccaggagctcgagcgagagaatgagactctgaatgggaagatagcccaacagagccgtgagctctttatccagaaccagagggtgattgagaaggacgacttgcttcgccgganagacgctntgctccaccaagatgctagaaggaagaggagggttatgggattgttctcccgtgcacattcagaattcgaggatccatctactccggggagttgagtctg

SEQ ID NO: 81733 - DNA, 422 bp, Glycine max
  unsure (1)..(422): unsure at all n locations
gagctctgaccactgttcttgcgttccgcgatgcttcttttcatgtccgcctgagtgggcttgtatcctaaaccatacttcccacgattcccttgggtttttatcagactagttatgtcgccattgtctntgactaaacccatcccgggttcataaccgttccccaacataactcgggccatcattaccgccgcctcggacagacaaggttgcccaaagggggagtccacggaggaaatgctgaccacctcaaaagactggaaagcggtttctaacgattcttctgcggcttccacataaggcatggaggatgggcagcttaccaagatatcttcctcgcctgacacgatgaccaagtgcccctccactacgaatttcagcttttggtggagtgtagaaggtacaacacccactgagtggat

SEQ ID NO: 81734 - DNA, 302 bp, Glycine max
gtatgagcactgaaccatactatgttataaaatgggactacaatattattacatcgaagaggtgaccagattctgggtatactaggcgagtcatgtatactaaatattgcaatcgactggttgatacttattatataaataatcctgcggagagaagaaaggcctttgttggagacgatatcatgatctgagatcatatctttatagattgagagtcgctaatcatatgatatatgtcatactattagcgattatattttgcctctagtgctgctgtggtaatgtgcgtacatgcgtcatgc

SEQ ID NO: 81735 - DNA, 352 bp, Glycine max
tactaagtaactcatggatggaatgatgtcttttaatggagaacaatattataggcgactattgataaatgacctttgtatgctggcccattcttttcaaaaactagatcaacaaatagagcagataaattcgggtataccatatgtattgccttgtttaacattaactctagacagtttctagtgtagatcatttttggaggtgatctactttgcatcattattcacatgccattagatcaatttaagaggtgtcgctgtattagacaccttttgcatcgaaattttcccttctaagttttacttcctctgtagcagccccttcaccttctataacaatgatccactgctt

SEQ ID NO: 81736 - DNA, 54 bp, Glycine max
  unsure (1)..(54): unsure at all n locations
ctttttattttcttcnnnnttttctctcggctcctaaaagcacatctatcagat

SEQ ID NO: 81737 - DNA, 260 bp, Glycine max
tgtctgctgtcttctgttatacttctagaactgatcttctagattgcttgagtggaaaggggttgtatgaactgttgtgttctatagattggcactgtgctgaatgtaagtgactggtaatgtgtaactatggcaaagagactgcctctaggaatactctctatctatttctaagctaccagtcttctgataccatcttttctctgctgcataacaaactgacttgtggggggatattactcagtttgtgttggcagaat

SEQ ID NO: 81738 - DNA, 377 bp, Glycine max
  unsure (1)..(377): unsure at all n locations
atcttctgactagatctatcttctttattgatgttgatctctacttgaccatttatgactgctttgctacttgatatttgtatacaacacttgacatctgatcacatgagttgtctacacagcttgcactgcactctctactcttattaaccagtgtgctaataactctcttaagacatcagtgctatcaatacttgtgcttccactttgatgttacagacatctatgctcatctgacagtcnaactctanacatcagcttgagatcttgcctactgctatctgaatctcttaatctttactaaaccttactcaagttttacagcgagcagtgctgtatcttatactcacttctctaccatccttggatatgtctca

SEQ ID NO: 81739 - DNA, 132 bp, Glycine max
gtatatatattgaagactgacaggaggctattgctgagacacttcctacttcgcgtgcgcaagacacacatgaccgttagggagatgatgatctcaggttagctcgtcaatgacatatagaacttgtcattg

SEQ ID NO: 81740 - DNA, 61 bp, Glycine max
  unsure (1)..(61): unsure at all n locations
taattttncttctcaacgcgctaacttcagggactttatctcgacaccgtcactcttctat

SEQ ID NO: 81741 - DNA, 82 bp, Glycine max
ctaacaccttatattctgtctacagtgaatctataaaacagaggtataaaatgtcaaagcttctatcctgagcttttttaat

SEQ ID NO: 81742 - DNA, 101 bp, Glycine max
caattacattcattgtgttagagaaatagtacgatgactttaacctcagctttcaccaaggtttcacttagtggcagtccgaactggtagaaaatacggat

SEQ ID NO: 81743 - DNA, 149 bp, Glycine max
tctcaaccttgtatgacccatattgaactaagaagtgagatgccacctactttatactgtaagtgtgtttccatatcacccaccacacatactgctaattgatcaactatgtaggagcccacacacgcactctaacaagaaaaaattta

SEQ ID NO: 81744 - DNA, 193 bp, Glycine max
  unsure (1)..(193): unsure at all n locations
gtagcattccacttgttactgcaatgactcatattagtttttgctacttggtatgattttttttttgcagacctaaaactctaaatgctaaaagtcgatacatacgtcatatgtaatgaacaacgattacatatatctacgtgggcaatatctgcttatatgtataccaatatgcacanatgtatctttatta

SEQ ID NO: 81745 - DNA, 112 bp, Glycine max
acacagtatcctattttatattatgtaagacacacatccagtctagcaacaaatgtataaatagaaaatgactattcttaccttctctgcagacataatcatcttatctcat

SEQ ID NO: 81746 - DNA, 269 bp, Glycine max
aatctatgatgtgtgtgaacttcacacaagtcttgataccttcttctacttctttcgtcacacatatttcttgatagcctgagaactttgtacattacaggattgtcactcattaatccttatgcactacactcttaacttcgtgcatatcaatgaagttgttgcgacttttaccagagttgcttttatctctcagaaacactaatactaatcttactttcgtaggcaagtctattaacgacatctaaacaagaagctctggcctattt

SEQ ID NO: 81747 - DNA, 210 bp, Glycine max
tggactatatgactgaacataatactttcttctctattagccctttctttcttcttctctgaactcacttacagtatatgactcttctgtatcatgtgcgccaccttctgtgtgtctataagactagctctaccaacactctagtcacactcatcataggagattatgcataggagggcagactcttctaatatgcgttcatatatatca

SEQ ID NO: 81748 - DNA, 207 bp, Glycine max
ctttactgaacagatcctctctatacagattaagtattctgtagagcttgtactgcatcacatccaccttaatcatacaataagttggcatcggtgactgacgtcaacacacacaatgttacttcacaagcgagtgtgagcataggtaacgcgattgcttatatgcagtttggctatgaagcgatatcttctaccctgttggtgctg

SEQ ID NO: 81749 - DNA, 293 bp, Glycine max
ctctgtatctgtcctgactgtcctctgttgattccttctaggatactgaaacttctagattgacttgatgttggatatggggtgtatgatttttgtgctccagagttggctctggctgttgtatgtgtgcaaaggttcagctagaataaaaaaacataggtgatatatgaaagaaattgttttttgtattacagccattttatcctatctgcttctggtacctatctttcctgctgcctacaaactgtctgggtaggatgtatattcgtgggtgttggtagaaacactgaaag

SEQ ID NO: 81750 - DNA, 319 bp, Glycine max
tttttttaagtcctgagcctcggtatactagtaatcacattttttaagtttcttaggtctctctgagtgaagcccctttccctccataggattgttagaatattaccccttgattccttcttctctgcaagtccttaatcagccttccactttagtctttatcactaaatcttcaccaattactcaaggacttggggaaatatcttcatcttcttctttaaaagtagataatctatcttcacctaatttcctttaactagttctatttgctatcgttttattgctcttttataaaaaactttataatacaaaaaaaatt

SEQ ID NO: 81751 - DNA, 342 bp, Glycine max
gttgctgtgaacgccatcttatgaatcagctccactgtaagataagtgcagctcaataactcgaggatctgcattatttttctagctcgcacgaggatatactataagcgtctggtataaagtataataacgttctgatttttatagaagtttagaatcatttgcacttaacttacaatagttcgcctctgatgatacgcttattgcaaacacaacttgtcgcaatacgttaatcagattacgtctcctatctacatgctaatgatacaaatagtcggggtctgaattacagacgtaaacctctttagggatctctccccaactcatacttaaatcgactct

SEQ ID NO: 81752 - DNA, 61 bp, Glycine max
tgtacgtgacatttggataaatcctctcaaaatttcacgcacaatcaccttccgttagacc

SEQ ID NO: 81753 - DNA, 270 bp, Glycine max
ttctcacgtatcaactatacaaagcatcaaggctctctatatctgctcaggatgctaaaccatctgtatatctctcaaattggacaatgcatgcatgatcaacatctacacttaactgttccaaggttttcttagtgtcacagcatattctgtcaagcaaaagtttgagtctcaccaataaaaaaaaataaatatttgaatcacaaatgcttcattgtcacaggatgagttctcttactcttgagaacaaagggaatgcgcatttgcaga

SEQ ID NO: 81754 - DNA, 162 bp, Glycine max
acggtcctaaaagcaaatctatcgagataatttcttttttagtccacgaaccagattatggctattatcgacatgaagctatccccaaaaagtataggtctatagaactatacttataggggagtaacatacactaacaacaactgctgagtattaattatg

SEQ ID NO: 81755 - DNA, 131 bp, Glycine max
tttttagacactggtctctcagaagcaagatatcgtgcaaaaggaaaggaagacttatgtctgcaccaccagaatcacacctcccgtcagctatacaacgtcctcagacctcacaccaaatggaacgatca

SEQ ID NO: 81756 - DNA, 61 bp, Glycine max
actgcttggctgcacacgcacacccgcgagcgacttatcacgatctgacaaagatacaaca

SEQ ID NO: 81757 - DNA, 177 bp, Glycine max
  unsure (1)..(177): unsure at all n locations
gacggtctgtttggaacataagtttttatttattgctggcatacaccaatatgagtgctatatttaatgtcatattaattgggcgaactctcaccactatactcttattgctctatagacaatgtnntttatcttttatatgtatacattacagtcaagtgatgttatgctcttgtt

SEQ ID NO: 81758 - DNA, 71 bp, Glycine max
gtcgcagatccgacgacgaagaggcctgtctgaggtccagcgtacgaggttggaaagaaaaggcctagaag

SEQ ID NO: 81759 - DNA, 207 bp, Glycine max
caaacacccctgcctgttggatctttcgaagacgaatacgatccacatctgttcttcgatgtcggaactgcgatacatactccttttgatcgatgacgactctatgcacatctctttattcgtggacgactacgtgctcatctttctatttgctgcaacttcaatgcagatggcacctacagcaacaatgtgccacaagctgcaata

SEQ ID NO: 81760 - DNA, 143 bp, Glycine max
tttaatcataaaatgtgttggttctaaaacataaatgttgttatccattacaggcataagtttattagcctcttttaatgataatgtctaatgtcataacaatgtactttatacaaagtaatgtgtcgcgtacatagaaaatt

SEQ ID NO: 81761 - DNA, 270 bp, Glycine max
atactgaagactcccaactgtaatgagcttggaaagaagaaggccatagaaagaatactatgtcatttaatacgtccctattctgctctaattgaattgacttaacctagtcacccccttatatctagtaaataacactccctcactttctagaatactcttattcccacgacaaccctatactaagactctagaagaagatttttagcctccgacgtatctttcgccttcgtttttttcaaccttttttcccccccctcaaccccccgt

SEQ ID NO: 81762 - DNA, 286 bp, Glycine max
  unsure (1)..(286): unsure at all n locations
ctactttagtcgtattgactcacagttacttacataccacatttattatgatccctcggtcanacgcttactactattatctagacagggtatggttgttgctatctatgcactagtattccttcatacatggtgatatgtattgagcatctctacaacaaatggttataagacacctttaacttattgttatcctgctataaaaacaccccatgatgtcgagattaactgttatttctgaaacagcctctatctttattattgtgtcttaaaaaaaacattatac

SEQ ID NO: 81763 - DNA, 315 bp, Glycine max
tcgacgtcgacgtcggatgcaagttacgctcacttatgtttgctaccgagtcctaataacttatcatcatgcctagggctattgttacgctcattaatattattcgacccttgaggtagattgtatatttgcacaaaaaataatccgcttgtgaacgttttgaaaatacgcgctcgcctgacaaagaaattaacattttaaaaaaatactttgatttcttatttacacacagctaattacacttgttgcaacattagccccaagtttttgtaggtaaacaaaaagttctataaaagcactgtctcagaatagcct

SEQ ID NO: 81764 - DNA, 343 bp, Glycine max
  unsure (1)..(343): unsure at all n locations
cgagtcactgcaagactatattgcaagagttctacactttantttggcaccagacgagctgtagcttatacataacatccacaacattgactttaagcagttatcaccattcccaaggcatggaactatgaaaatgagtttctaattcatatataatctcatgagttgangctcacttctaggaattgaagtaccaatcaatacacttaacaccaatttctaacaatgttagaaatagtagaatcatgctaaataaacaaccatctacatgccactaatataagttgttgattagcttcgtataggtcatatgctaaatcataaaagcattatcgtcatatta

SEQ ID NO: 81765 - DNA, 426 bp, Glycine max
tgtgctcatatgagagcattctaatatgaacacgtaatacactgaatagtaaatatgctatagtcgataaatacctcgtctgtggcaatactttagcacccactaaatgcatccgtttgattatatcggcacgctatgtgagtatgtaccaactaactgcatgcacggaggtaccaccaactgttgttaaagaatgtaaaataaatataaacgtattgacagactccagtgttactaaatgctgtacggatccaatgttgacgtaaaataatgaacagaataataagttattctttgtaataagatagacatttattgggatatcgttctatataaatatcttttatattaatagatacgaagatggttttctttcatgcttgtgtgggcatgcgatcttgtagttaatgatatataaattgtaac

SEQ ID NO: 81766 - DNA, 203 bp, Glycine max
  unsure (1)..(203): unsure at all n locations
tcatactcaacttatactgaagaataagtcagccaatgcaacttattcaacataccatctgaaatcatataagaaacagcaagctctcccaattgccaatatacttaancgaaactcgcttcaattccacacaatacaacacaactgcagacaaacctcccctctccactaacaactgctatgtccattaaataaacatatat

SEQ ID NO: 81767 - DNA, 244 bp, Glycine max
ttaaccccttcgatctatatgcgggtgtgcgcacactgctctttttatgactacagcctctcttgtacacgcactgatatagtgaagctatctttattctcttcttaacacataaagactcaacaagtcgcgtctcacactgtgtcacaaggacatgcgcgcctctctcttctatctgcgaaacagtgactgcattcactatgttccgtttctcagtacagctctctcaatccctttttttatt

SEQ ID NO: 81768 - DNA, 53 bp, Glycine max
gtctctctgaacgattacctagaacacactctgtctggaagaactctaccttc

SEQ ID NO: 81769 - DNA, 310 bp, Glycine max
  unsure (1)..(310): unsure at all n locations
aaccacaatacgttttactagaccatactgtttatcaagctactggcgtgactatacactcaactattgctatttccagcaccaccaacttttgcaaccaattgtgctattggcaaattgtatgcaattaaacactgctctcattgccangatctaagctatattcatctgtaacagacactcacccaccaattagtcaacctattatgattagtgaaggaagatagaatgacacttctccagctataataactgcactgtgactaattacacaatgcccaccaatacaaagtgtgcttgttgtttctca

SEQ ID NO: 81770 - DNA, 97 bp, Glycine max
tgctcatcttggctctacacacttgccttaacaacttcgatcttgaactattattcttagtagccacatctgtatctatgccatgtgcacaactcta

SEQ ID NO: 81771 - DNA, 132 bp, Glycine max
ctcagatgctctacctcatatcttgttacacctcatgtttctcttttctcattctaagctgatatgttactatttaagtcacataatgttaacaattatcatgtcaattgttgctgacaaatgatagtagct

SEQ ID NO: 81772 - DNA, 230 bp, Glycine max
atatgatatcaatctcgtcgaactcttcacaccaccggaatctatacatgtggacataatacatgtctacataaaagtatcttcttgctctctcaagactccaaagcacaattatttctcacatgatctgccattatgccatactatgatggctcttttcaattctaagctttaggacttcaaccatgacggcccgatgacacgaattcttgacaatctgctttgactac

SEQ ID NO: 81773 - DNA, 281 bp, Glycine max
  unsure (1)..(281): unsure at all n locations
gtatggagaaaaagacctgctttttatgttgaagncaaacacagctcactctaatacaattacttaataggttgttactacggacacacttattatgccggcaatgcagttattgtatctaccctaccactataattcataaaaaaatccacggagattataaaatcaccgccccctgaaaagatattaaacttaaacaaacggtttgattatatcaaaaaagatcctaccaagtagttttcaagtagccaactaatgtaaatgtttggccactccaaaaa

SEQ ID NO: 81774 - DNA, 253 bp, Glycine max
tcaattgcacagcgactacctgtttctgtataataactcgtaacgaaggccaactgtagagatccgtctaccagatggcctgaaacagtgtctatcggtccgtcgcaaacaagtcaaattttactttgggatgaacaatgtactaagtattcttgtgttacaggtgaagcggcccataaagaactgttgacaattgctagggtgaaacataatctacgaatagtaaatctagtataaatgtaagaggcacttt

SEQ ID NO: 81775 - DNA, 268 bp, Glycine max
acagagctattcatccccattttccagctgagacactaataccatacaatgcaataatctcttagactcagtaatgactaagacatctgcaacgcctgctcatttaataactcgaactacatatgtctgcagtgtcaagatgatatctttatgttgacagcacggactatgaagaacaaaattatttaaagtgttgatgtggctgctgtggcataagcaatgaatccaccgacaactatacttgtaaatgattaatatctaacacatg

SEQ ID NO: 81776 - DNA, 64 bp, Glycine max
gcttgtcgctctaagcctgatccatacgagagaaaaggctctgatctgagctctaagctgtact

SEQ ID NO: 81777 - DNA, 185 bp, Glycine max
tactaagggaataattagtgttaagatatttcccatcaacaaaatactgtgcttctcttcacaaaaaaaggagcactctcactatatctaatactatgtgcacaatggaaaatctctgaatgcaaacctttatcacaagtggctttactgccaaagcacgatacttaaaatagtgtcacgatctt

SEQ ID NO: 81778 - DNA, 151 bp, Glycine max
  unsure (1)..(151): unsure at all n locations
tgtgcactcatgagtacgctcacgagctatctgtcttacgcgtccatatcttagctccactcagaatacatcatatacaacacaacacaacagcaagcgaacttgcaaccaacanaccagtttcaacaaactcgacattctgtcatcgtac

SEQ ID NO: 81779 - DNA, 202 bp, Glycine max
actagccttttttagctagccaaacattctggggagtcccgaatcgaagaatgatatagcgcttatcacttctaactgatacttagctgatatcgggagtagactgtgactatgggctactaagctagatccggccaaagaaggaggcttaaactgagatccaagtgaactaatctaaaaaaaaggttggataaagaatata

SEQ ID NO: 81780 - DNA, 99 bp, Glycine max
attaaaatgatactctcatgcactctctagtgacgtactcataattctacttatatgctgtcatcatctctctgtatgatatcagtttctagtcaactc

SEQ ID NO: 81781 - DNA, 236 bp, Glycine max
gacaattttcatatacacagttgctccagctgcatattcaaggtcgcaatagttgattgatttttaacccacttgaatatctatcatcatctcccacgctgcattcatcttctgctcgaacaacactatatttctaatgatttctacagctattatgatggctctttttaataaatctcgttagtgacttttacccacttaaacactatactatcctctagagctaatgtcatgta

SEQ ID NO: 81782 - DNA, 149 bp, Glycine max
ctacaccgtaaaaaaatataaagagggagcacctgcaaatacacttactgtacagacatctaacactcaaacacgtacactgcggccgatcaaactatcttgtggacattctagaggagagccattcggaccgcttacatgctcactcg

SEQ ID NO: 81783 - DNA, 157 bp, Glycine max
ctacgttggatccctgttctggccacatctgtcgtctgaaactagcatgataacacctacccacatcttgataccactagggctacctattgtactctctggttatttcgatccagtgcagttacgactatccgtctcgtacatgtttgtaattgtg

SEQ ID NO: 81784 - DNA, 306 bp, Glycine max
tacacaattcggcaaatgatgagcaccttatggcagttggtttctgtggtgctttgaaaaaatcactctatgctgctttctttccgagattggatacgctaccaggcgggcatcagccctatagcttacacgtaaaagtggtccactaagcacgacgaaccccaaaaatactggcgaaaagaggcgtccctcaatggttaaacaatttggcaacctacctaaagtctacgttgaaaaaagaaaataaaaagaatggctgtctccgctatcttaagataggtaatacccacttcctctcactttttt

SEQ ID NO: 81785 - DNA, 249 bp, Glycine max
atcattcaagattatgaacgcggaccaatcaaccacgtaacacactttaacaaaccaaatgcttgctttgctaaagatcaaaaagactcggtactaggaatttataaagtccattaataatggttggctttactagcatatattcatagtagaagtcctattggtaaaccattgattaaagaagtacgcataaaataataatattctggtagataaaacctacactattcacctgttttccaatcgggt

SEQ ID NO: 81786 - DNA, 336 bp, Glycine max
  unsure (1)..(336): unsure at all n locations
ctttgcatagcccttttcataatctcttggatcatcatcatcgtgataaacctcatttgatgtgttatctaggaccatcaagtttagtctatcaggtacacggtgcacttgagtagaatttctagaaggctcatgcacttggttcatagggtgttgagatagctctaagatggttcattaacttgatcttgaactatagttgactcttgaaccacanatngtggaggtgatgacctttgtggaactctagaacataaagaanagtatctcagttccatctcatagcctaagttgttcattgttaattgagttcatcaactcaattctttccatgac

SEQ ID NO: 81787 - DNA, 252 bp, Glycine max
ggaaaaaaaaaaaacccccgcgcgggaggaaaaaagagaggagcaataaaagagggagaaagaagggagacggaaagagaaaaaaagagaggataaaaaaaaaaaggaaaaagaagaagaaaggaaaaaaaaaaaaaaatagtcaagaaaaagcgaataaaaaaaagaggaaaaaaaaaaaaaaaagaggaagaggaaaaaaaaaagaaaaaaaagaaaagaaaaaaaaaaataaaaaagggaggggggagg

SEQ ID NO: 81788 - DNA, 386 bp, Glycine max
  unsure (1)..(386): unsure at all n locations
gacaaagcancagggcttgcactaaattattgggacgtggaagccatcctctcaatcagattcctagcctcgacaggagtcatattaccaagagcttccccactggcagcatcaatcatactcctcttcatgttgctaagtccctcatagaaatattgaaggagttgctcacatatctggtggtgaggacagcttgcacacaatttcttgaatctttcccagtactcatacaagctctctccactaagttgcctgatgcctaaaatggtctttctgatggcagagagcctagatgtagggaagaatntcttcaagaacaccctcttaaggtcatcccagctggtaatggatctgggagcaaaggagtacaaccaatcttttgcact

SEQ ID NO: 81789 - DNA, 386 bp, Glycine max
gagaaaacggccgattgtttttttcgctttatttccgctccaggcattttttgattattatattattattttacctctttttttatttccaacttggttacggcacaaccgaacggtcggaattcattttaaccaaaattaacggatgatacaattcaaatgatcggtggaaatttattctatttttagattaagcgataaatgacttatataaatggcttaagcacgtcaaaagggggtataaaaagcatatgagaacgagaataaaaatacatgaaacaaaatgtggaccaccacgggtacatagaatgaattgaatagctcggcttgaggtacttacccgttgaagactgagaatacaaagaacgaactacgaatgttgaaga

SEQ ID NO: 81790 - DNA, 337 bp, Glycine max
  unsure (1)..(337): unsure at all n locations
ttaccgaggcagcttcatgtaactttctctagaagcctcattaagaggccttctcccgaagcttcctcgtggcttctttgagaagctttctcaagaagcttctttgagaagctagatccttatctatccccacccctcttttaacttaattaacctccttaaaaataattacggatgaaaataacgcaacaaataatcaaacatcaaacataantactaataatctatatatatatatatatatatcagggtgttatagatctatacacctgcttgatcaaccatcatcatatatcatccttaggaagtgatggggaacaagtatatctctaccact

SEQ ID NO: 81791 - DNA, 348 bp, Glycine max
  unsure (1)..(348): unsure at all n locations
cgtatggcccaaagattcatcgcccgacccttaccatttgaaatgaaatagcgtccatcttcctcaggatcaattaatgtgatgcccctcaaggggcccattagaacccctgctggcgtgcctttagcttcatagaactccagtccaaatctaggaaaaccgagttttcaatgaatacttacacatttgggggaaggtcaacaatctctcttcagataagtaattgtgcataaggatgacccgcnngaactctacattatctctcactatacaacttcagtcaaatatattattaattcgacgaggatatgcttctatgtaaagggcaccttccatgttaaataaggt

SEQ ID NO: 81792 - DNA, 457 bp, Glycine max
  unsure (1)..(457): unsure at all n locations
ggttacgacaagtattctttatcctaccaatctcattgtttctgtaacacaaatcanaagaatngntggcttgatttgctcaatgaataacaccatattgtcttacaaacgaataaataggctcaacacttagtcttttatctcaagaaaaataaagtttcaacacttagtcttttgagagtgtttctatactttacaataatttacacgtagagcantttataggaagaanttgaataataagtgcttcaattagtacttaatgtcttcaaagcttatggtagtataggcatatcatccttcaatcaagtatttggtgtccctaaatgaacacattttctctcttaagcttgtgtctaaagaatgtgatcattgaggcattaaatgcatatactttntcatgctgagaaaccactcttcatcgtnggcaagttgaacactatagcaggacaccact

SEQ ID NO: 81793 - DNA, 425 bp, Glycine max
  unsure (1)..(425): unsure at all n locations
ctacgctaagggctacatagagtgtcatagagtgtttgtaatgtggtagtacttgagcagcactatttccttggtttgatatctgttggcaacttgcccctggacaagttgcgagttagtgtagcatcgcagcttcttgaccctgatttctcttgctagttntagacctgcaatgagtgcctcatactcggcctaattatttaaggctttgaagttaagctagagggctcactctagagtaacatcattaaggccttcgaggatgattcgtaccccgcatcctttcatgttggacgcactgtcaatgtagaggctccaccagtctagggtggtttggtcgtttccagaanaatttccatgaactgcgtcttcatggggctgtagggttcatactggagatcaaactctaagagttctactgacat

SEQ ID NO: 81794 - DNA, 434 bp, Glycine max
  unsure (1)..(434): unsure at all n locations
ntgatttnccttgggccgattatctntcttttctcatgtgttcccaaacccaatcttcgggttcgaagacaaccttctntctccctttgttggcttggttagcatagcttttatttctcctctcaattttatttttgactctctcattaagcttcttcacataagccgcctttgcttgaccttctttatgcttaaaaacagaaacattatgcataggcaaaagatcaagaggagttagtgggtaaaaccataaactacttcaaaaggagaacaattagtggtgctatgaacaactctattgtaagaaaactcaacatggggtaaacaagcgtcccaagtttttaagttcttcctcaaaattgtcctaagcaaagttcccaatgtcctatggccataccctaatttcgtccggggattattacttgatgacatgc

SEQ ID NO: 81795 - DNA, 459 bp, Glycine max
  unsure (1)..(459): unsure at all n locations
cgccttggagacatgaagaaccaacttaagggcttttatntatttttttatataaaaagntntttttttaatgtttgtaaaggttagaattgctctcaaaatactttgattaatttgatagaaaaggctatgtgctaagattgtctatccatttataagacaatngagtattggtcattatacaatcaaataaacaaatctttntattggtgttagactagccatggcttagtaggataaaaaaaaaatattgatcggaacaagtttggtatagagcttgagttaaggaactaaaagtgagagtcataaatacttataagtagttgaagntagtagtacttagtggtttgtcaagaactgaatgtagtctcagtggtttagatgaaccaatataattccatgtgtcttatcttggttatnttctcttttgngtttannnatgactatggntcgaatttg

SEQ ID NO: 81796 - DNA, 199 bp, Glycine max
aactacagtaatcgagtaaatcgatatgagactcaactcttttagctttaaacaacttggggtaatggattatgatgaggcgggaatcgattaaaataaagagtttttgtctgagatgaaacttttctaacttaaaaactcttcttctaacaaaccatgatgatgcatgatgcaatatagatatcaaatttactaagat

SEQ ID NO: 81797 - DNA, 405 bp, Glycine max
  unsure (1)..(405): unsure at all n locations
atgtgaatgattttgtggaccatttgctgtccattcaggccacagatttccagaatgatcaaacattcgtgaagagtttgatcatggtaagatctatcttcatattggttctacctatgtatgtatattggtgatctcttangttattntntatcaagtgttagtaatatattctctcgtactcattntttaacactattctttattagttaaaattcggatagattttaatactagttaagggtgaaaaccatcaaataataagtggcacacacttattttcttataccaatctgtgtcggagtaatctgatcggccaactttatcaaaagaaatcttctttaatttgaaaacttgtgtgtgtccgaagtaataccaatattttgatagattgattattagtta

SEQ ID NO: 81798 - DNA, 200 bp, Glycine max
aaaggcacgacacaaccaaaggtgctttctagatattgtacttctcttttcaacacaccttatcttattgatataaatccacacgagttcaactagtatggaaatatgatatctcatttcgggaatgacaccatcttattcattgaaactcatataggcttcataaataacagagggtattggggatacatctgtttgtc

SEQ ID NO: 81799 - DNA, 344 bp, Glycine max
  unsure (1)..(344): unsure at all n locations
acacccaaactagcttaaccgatcgttctacaggcgtagtttttgtgattcttccantcttttgttcggactctcagccagtaatgatagctgtcgatgattccattactggttctcctaagctttctgtgcttgctagacaccgcatcacatgccctgtgaacttcttagagaaccctcccattgtgggtactgtaactccgtgcgacgaaaggcgtgatgcctttgtctgatggcactcctttcatggggtagccaagctgtcttacggcgacgaccggatgtatatttatacatccccttgttcatcaagggaactnttggacattctttgcatgaagata

SEQ ID NO: 81800 - DNA, 446 bp, Glycine max
  unsure (1)..(446): unsure at all n locations
agaggatgcttcaatggagganaagattatggagtatatatggagggggagcacgaaattgaaggaagaaaaaaggagagaagttgaactctgagttgtgtctcacaagactctcattcatcagagttacaacaagtgttacacatgcttctatttatagactaggtagcttccttgagaagctttcttgagataacttccttgagaagcttctttgagaaaacttccttgagaagctagagcttagctacacacacccctctcataactaagctcacctcctcgagaaagcttcttaagaagattccttaagaagctagagcttaactacacatacctttctaatagctaaactcaccttcttgagatgagaagctagagcttagctacacaccctctataatagctaagctcaccccatgacaaaaacatgaaaataacaaaaa

SEQ ID NO: 81801 - DNA, 422 bp, Glycine max
  unsure (1)..(422): unsure at all n locations
ctcagctgctatctagcgatacgcatttattgaactggcgttgctggacactattcaacttatcagcatgttatatgctaaatactcttatacatgttcttgaatggagaaagaagaagaagggagaaatgtcgcggttcaacctcctctactatccaaaacaaacaactaatattggcttataaaaaaaaaaaaagatatcatgatgcaaaatccctttgatgataaaataactcttacttttgctttcattatgtacttttactggaacatgtaaaagnttctaatttaattcgtatttttagtatgctgacttttctgaaatgtggttactctatttacgtatgagagtangtagactttgttgggtcttttctttcttactacaacctaaccttattctctcggcgtcccctttcttt

SEQ ID NO: 81802 - DNA, 207 bp, Glycine max
aagagcacattaccctcaaaaatttgaatcctcaacatgataaaaagactattattttaagcatggtggtgccatgaaacttgagaacctgagccacccatgattaaaatgagctggagattgggaaaatggatatagaaatgagataaaaacaaaatggtgccttcaaatttgaaagaggtggtggtggggatgtgactgataatg

SEQ ID NO: 81803 - DNA, 404 bp, Glycine max
  unsure (1)..(404): unsure at all n locations
tactgactcaccataaaccttgacccagtgttagaatgtcaattcttatcncttgaagcaaaaaagaaggggagagggaaaattttcaatcaaagacgaagcataaaaggagagaaggaaaatttccaatcaaaggaaaaaaagagaggaaagggaattcccaatcaaagagtgggagaaagcaaatagaaaagaacgaaaattcccaatcaaagaatgggagaaagacaaaagagaagaagaaagggaagaaagttcccgatcaaaaaaaaataatatgcagaaaggtctttggaccggacaatatctgaacaatacagaattgtcaccanatgaataataaaaanggaagggaaccatgacctataatggtcttcccctttagtgccaggcaaatcttgtgc

SEQ ID NO: 81804 - DNA, 410 bp, Glycine max
  unsure (1)..(410): unsure at all n locations
ttaacctcatcgtctctcacagncntaagatttgggagtttattcnatccttgngnncggactctcagccacttatgatagctgccgatgatcccattactgcttcccctaagctctctgtcctttcttcacaccgcatcacatgccttgtgaactccttagagtaccctcgcattggggttactgaaaccccgtgcgatgaaaagcgtgatgcttttgtctgatggcactcctctcatggggtagccaagctgtcttatggcgaggacgggattataattaatacaaccccttgttccatcaagggaacatttggacatcctttgcatgaagatagaatcctgattcttccttccttctagcgagggaaaaanataacagacgcccctncatgctagccaagagttggt

SEQ ID NO: 81805 - DNA, 446 bp, Glycine max
  unsure (1)..(446): unsure at all n locations
cgccttggcttctttaggaatcttcttaaggaagtctttaaggtggttagctcagcnangaaaggggtgtctggagctaagctctagcttttcaagggagttntctcaagaaagcttttcaaagaagctacctagtttataaataaaagcatgtgtaacgcttgtggtaactttgatgaatgagagtcttgtgagacacaactcaaagttcaacttctctccctttttcttccttcaatttcgtgctcccccttctctctttctcttcctctttcttttcctccattgaagcatcctctccaagcttcttatccaaggctcatcttagtggtgaagctccttcttccatggcttattccctagtggatggcgcctcctctcacctcttctcctttgtcttctgctgcatctccatgattaaaaatcaccattaaaggacctcactg

SEQ ID NO: 81806 - DNA, 411 bp, Glycine max
  unsure (1)..(411): unsure at all n locations
gggacggggagcgtcngagtcttcaacatttctctaagtaatacattatgtgcaaccagcaaaaggtactaattctctgtggtctcctctaataccttattagattntactgttcacaaatgcaatataattgtgatcccttctatgcttatgttatggntctaaattacaatccacaactntacttgtgatcacaatattgttgcaaagctgcatgcaacggcatctacacaaatacgatgtgaattgcaatcacaatactacaatgaatataataatttagatntcaatcttctattctaaccggcaaatgtcaatgattaaatgggtgtgaccaaatgagggattagaagagactaacacttaaaatgaatgcaaatttatattcttataataaaagatgttacaaaa

SEQ ID NO: 81807 - DNA, 351 bp, Glycine max
  unsure (1)..(351): unsure at all n locations
ctctanattacattgatgttggatttatgggaggagtgtgtatgtcatttctggtntaagagtagagtcccactggtaaaactaactttccaaatgtttgccttcgcaggaaatggccccgaggaagcttgcctcaaagaggtccaggaaggacaaggcagccgaaggaactagttccgctccggagtatgatagtcaccgctttaagagtgctgtacaccagcagcgcttcgaggccatcaagggatggtcgtttctccgggagcgacgcgtccagctcagggacgacgagtatactgatttccaggaggatataaggcgcccgcggtgggcatcactggttactcccat

SEQ ID NO: 81808 - DNA, 385 bp, Glycine max
  unsure (1)..(385): unsure at all n locations
gagttncaatcaataattatcaatcatcaatcatctttgaatcatctatttttcaatcttttttcaacatcatctctcaatcatctttcaatcaatctttcaatatctttctacagaattttctgattcatttctcttcacctttcaaaaattttttgatcagcactttctcttccaagaaaagttctttgttcaaaacttgtgctattcatatttttcattctcttctcccattgccaaaagaacgaagggactaaccgcctgaattctttgtgtctctcttctcccttacaaaagattcaaaggattaaccgcctgagaattattntcattcttcccttcccgttaagcaaaagaattcaaaggactaactggttgagatatc

SEQ ID NO: 81809 - DNA, 385 bp, Glycine max
  unsure (1)..(385): unsure at all n locations
actacgcttccctttgaacaaactcctatccttataaattattttggcttttccccaactcttgtaatgggagagaatatgtcatctaaagcatacaagtccctaatgttatcaaatcctaaaatttgagctcctagggagcaaaacaatgtgtgtctcctacagagggcatcagctaccacattcngttttccctttgtgtatgtgataacatacagaaattcctctaggtactatacccattttgcatgcctttngtttaacttactttgccctctaatgaacttaagtgattgatgatcactatgaatgacaaattcctaggaaacatggtaatggtcccaagttcggagtgctcttattaaggcataaagctctttatcat

SEQ ID NO: 81810 - DNA, 372 bp, Glycine max
  unsure (1)..(372): unsure at all n locations
caacacaggtataacaatggagtagcaagatataagtatcagagtattaaatacaataagccaaactcataatcaagaaataatcaaaccagaattcaaataacataaaatgtccacaaccaccaaatatccaagactgaaatttaaaaacacaagataaataagccaagtacttagcataataatggtaattctaagaaactaaaagccaaaatacacggcttataaaagataaataatcagaatctaaaagctaagaagacggaggagggtggtggagatcgaaactctgacgaatgtatccgacatcctcttcaagctgtgtaagacgaatgtncataccggcanagcgtgaatctaacgagtcaaagc

SEQ ID NO: 81811 - DNA, 459 bp, Glycine max
  unsure (1)..(459): unsure at all n locations
ttcgagcgtctcgatatattacgggactttatcggacttcttagtataaagnnannggnncgccgactttgctactagcttcggttataacactccagcgncacgatatattacgggacttaatcatacttccgaatgaaatgttattgctcgtcgaatctgctacgagcttctgtattaaagatcgagcgtctcgatatattacgggactcaataggacttccgagtgaaatgttattgtcgctcgactttgctacgagcttcggtgttaatattctagcgtctcgatatattacgggactcaatcagactttcgagtgaaatgttattgtcgttcgaatttgctactagcattggttataatattcgagcgcttcgatatattaccggactcaataggacttcccagtgaaatgttattgtcgctcgaatttctaccaccttcggtttaaaattgag

SEQ ID NO: 81812 - DNA, 311 bp, Glycine max
  unsure (1)..(311): unsure at all n locations
agtcaccgctttaagagcgctgtacacaatagcgcttcgaggccatcaaggggatggtcgttncgacgggagcgacgcgtccaactcagggacgacgaatatactgatttccaggaggagatagggcaccggcggtggacatcactggttacccccatggccaagttcgatccagaaatagttcttgagttttatgccaatgcttggccaacagaggagggcgtgcgtgacatgaggtcctgggtaaggggtcagtggatcccgtntgatgccgacgctatcggccagctcctatgatatccggtggtgtt

SEQ ID NO: 81813 - DNA, 365 bp, Glycine max
  unsure (1)..(365): unsure at all n locations
cataggactcgctataatgctaaaattctggataaagcgtcgataatatgatgccagactcatgaaagatctcacctccgaaactggtgtagggctcggccaagtcttgatagcatccaccttttgtttgatcaacggatactccatctttagacaccacatatccaagaaacaccacactctcaaccaagaaatcacacttttccctcttcccatagagattttgtgctcttaaggtctcaaatatctgtttcaaatgagtgatatgctcctctatagattngctatacaccaatatgtcatcaagatatacaacaacaaacctacccacaatatgcttgagtacttctgtcatgagcctcata

SEQ ID NO: 81814 - DNA, 325 bp, Glycine max
ggcaagagcggggggggacccaaagaagaggtcaccccccccccacccccaaacgtgcaaacacgagagaaggtgcgccagaagaagaagacccccgccgcgccccccgcgtagaaagaaggggacctccaagacgagaggaggaggagcgcctaaacccaggcacttaaggagggcaggacggagcacttcatcaacagccataacagaacaagcaccacgaccagtggcgcgatctacagcacacaaatacacaatatcagcccaggcgtgagcacttcgaatcaaacaggcaagccgagctatggaaccggaaaaagaaaag

SEQ ID NO: 81815 - DNA, 402 bp, Glycine max
  unsure (1)..(402): unsure at all n locations
ctgacatcncaaacaaacaaatcanacgtaacaagacaattatagttgctgttggaatacctcacccactcaagtgtatcacacaagtatggctgttctctaatgaaacactcttgccttttaccactctaattccccttgagttcttaggcaattcaagagattatggccacaacaaagaacaattcaccaatatgtgtaaggtaaggctagagagaacaggaataggttaaccaagataaacgctaacaatgtttttatgcacacatgatagaaataaaattcagaatttatgaattcaagtaacaatccttcatgcaaccaatatattaccttaaagaggttgtttttttaagttcttcagcatgaaccttcagcccaatttttttttttaattttgtt

SEQ ID NO: 81816 - DNA, 364 bp, Glycine max
  unsure (1)..(364): unsure at all n locations
cttanacgagaggatcgcactagagagcataattagagtttctatcatctaattcttctcacagagaatatgaggggtatgaagaagatgacggaggaagcacgaacgagaggtataagtgttctaacctacccttcgaggggagggcgaggcgaaacgtaaaagtgtgccttctcatgaagaaaacgcctggagttgccaacaatgtntattcgaggaaaacgtttgaaataccaaaaagacgatagtctaccgattttgaagatgagggttcaggagttgttacacacggtgaatgtattagcaccccacacgccaatcacaagggacagaatactctatttgattgcgcaaaacatgactt

SEQ ID NO: 81817 - DNA, 456 bp, Glycine max
  unsure (1)..(456): unsure at all n locations
tctaatgtataattacctaaaatatataaattatgaaatttttagtgttgttataattaatattaaaaaaataatcactgtgctcgagtaattgatttggtttaatgtcagcgctagttgatagtatagtagcatccaaaaccagggtggaatttagaatgaattcctattcctattattgtacctttgaaacgtaagaaaatcgagtttctattggtcaatgataataatatcaatatgcaaaatatcgttaagactctatctaatgaaaataaattgccagttcgaaaaccatttgaagttttgctttcgttcaaagcctctctctttctgtcttccatttttaactctaaaaaacattacctccgaaaatgcatggaatcatatatggntctatggctttctcctcctactacttttactngttctatggcattagctcacaattttatctta

SEQ ID NO: 81818 - DNA, 386 bp, Glycine max
  unsure (1)..(386): unsure at all n locations
tgtcattgcaattccttctcactctcctgttcttcttntgcggggctttaagtgtttaacatatctgaaaacagaataaagggaagggcctgaccccttcccatttgcaaaaacaaagcactaccataaacactactgaaacatgcatgtttgtatgctaaaccgtatctaaactaaacctaaatgcatctttgacaacactcgtagcatttgtcttttggcggtttaagacatatatattatattgattagggcccggtggaattaaactcgtcctttcttcatgccatgcaagtaaatatacatggcacgttctgatattatgttttaaaacacatactgagtcttttttctttacataactatattcatattttaatattggt

SEQ ID NO: 81819 - DNA, 426 bp, Glycine max
  unsure (1)..(426): unsure at all n locations
tcttatccaaggcaatncttgtgggagaatctcattctttcttggctnatnccctagaggatggaggctcccctctcctcttctcctttgccttccgctgaatctccatggtgtaaaatcaacattgaaggatctcattgaagctcaaagatccacgcctcatagaagcttcacaagcaagcttccatcaagtggtaatcagagcacaagagctncaagtatgtgctccttaaacctccattaattttttctttaccttctcttccattgttatttctttatttttttttctccatgtatctcctcacatgtctggtgctaaatggtgttaacatgattctttagagtttccaccgattaaacttgctatagaagactacatttgatttctatggntcaaatatctggttcttggtcttgaaccat

SEQ ID NO: 81820 - DNA, 285 bp, Glycine max
tattggagagcaacactgggagaaacgacagaattctttaatataagctagtgcggatgagtgatatttgatgcccccttggtctatttcattgtgtacgaaacactggaattgcctggtgtgggacttgggaataatgaaagattgctttggtaaattaccaggtgacctttatttgattgttgagagggctgggagtctttcgttctagcgaaagggtaaacctttcttggcttacaataagagaccaagtatttattacatgttttgaattttttaatctca

SEQ ID NO: 81821 - DNA, 395 bp, Glycine max
  unsure (1)..(395): unsure at all n locations
agactgcatacatagntctatcatattcatagnngaagcaagtgctcttgtttcttacctgtaggtctgtgtaaggaagaggaaaacatttgttctagttaattctggttcaatgtatggctttggctcaatgggatttggcagcctcggattcctggatagaagggtatctgataaagtattgaaacctacaatcttggataccttgagagctcaccatgtttcccaaattagcacaggcttataccacactatggtgatcactagcaggggacatatatttggctntggagacaatgaaagagcacaacttggtcatgacacattaacaaggctgcctctgagcccactcacaatttcattanacatacatatgaagatggagaaaacacctg

SEQ ID NO: 81822 - DNA, 377 bp, Glycine max
  unsure (1)..(377): unsure at all n locations
aaccangcattaggtaccatgctcttattatttgtttttaagtgaaacgggtttatgatcccaacatggttggctcgtggtgcctaacacatggaactaagaatgtagtgtgaagtttcacgcttcccccttttttgtttttgttttgtagaggaaaacgcatggatgagcaaacatgaaaacaaatggtatgctattttgcagatcaaaaagtttgttgaacgcatatgcatgatgatgccatgactcatgcaaaatgtgaggctggaatatgataacggacaaatgcaggatatgtccattatgatgttatgaagagatgcttatgcgatgcatgatatgaatgcattttacggacacgagagcccggaaaatta

SEQ ID NO: 81823 - DNA, 445 bp, Glycine max
  unsure (1)..(445): unsure at all n locations
ttagtaatgtcccactaacctagaantattaaactttttgtcatatcctaaggaagnaaaaaaaacttaatggctgagtgtaactgtaattgtggcaaccaaaagtcacccccaacagccaacaagtcagtcaccatttggtctcctaaaaggctgatgcctagattgccaattgggcccttattacaacttgaactaaacctactaaagccctcttagttgatttacccaaaacatatttttggtcagccaactttacaaggattgggccattatttatacaaactaaacactctaaaattgagacaaagtggtgccatatagtcctcctccatttgggccatgatacaactcacaaccttggacttttctccttcagacttgngcttgtattcaaatagtatggacaacacttgttgaagagcttctttggttttctgctcta

SEQ ID NO: 81824 - DNA, 396 bp, Glycine max
  unsure (1)..(396): unsure at all n locations
atctacagaagaacatagtatacagactcttgcaacaggagtagatntctaattcatggcaagctgagttactatgttgaccaaggcatcatgttntccttcaaaatctgtattttcagtagatgaagatgaatctgtggccacctcatggactcctctaaggacaatagcatcatttcttgcaatgaattgttgggagttggaagccatcttctctatcaaatccctagcttcagcaggggtcatatcaccaagagctccaccactagcagcatcaatcatactcctctccatgttgctaagtccctcatagaaatattgaagaaggagttgctcanaaatctggtggtgagggcagcttgcacgcaatttcttgaatctttcccagactcatac

SEQ ID NO: 81825 - DNA, 417 bp, Glycine max
  unsure (1)..(417): unsure at all n locations
gagtnngaagagacatgnagctagatctctttttttgctattgcagngaccttngggtgtcatttcctgcttaaacatcttagtactttgttaatgagatcctcattaggaaatatctttcctaatgatgcaagatgattaactatacgcgtgaatctcttttgcataaaatgttcatattcatgtgttanggtgtntattctacatctctntacatcaagtgttccttcatggattacttgtaatgtatcccacatttcttttgcattcttacaattttatactctanagtattcatccatgcctaatgtagagggaattactgttttggcctttaagatatattgtacctttcttctctcctcttcatcctaatggtccctggngtgttctatagttgcattttctaataccatt

SEQ ID NO: 81826 - DNA, 460 bp, Glycine max
  unsure (1)..(460): unsure at all n locations
ctcggatgtccganncaagcgcatattatatcgattcgttcganancgaacaanggaagctcgtgagtctttcaaatgatcataacttttcactaggatgtcccgatcacgcgcataatatatcgagatgttcgaaattgaacaacggaatcttttgagcaattcaaatggtcaaagctttcactcggatgttcgattcaggcgcataatatatcgagaagttcgaaattgaacaatggaagctcttgagcaattcaaatgatcataacttttaactcggatgtccgattcacgcgcataatatatcgagacattcttaattgaacaatggaagctcttgagaaatncaaatggtcattactattcactcggaggtccgattcagtctcatatatatcgagaccctctaattaaacaatggaagctctcgatataacatatggtcatatcttttcactcc

SEQ ID NO: 81827 - DNA, 473 bp, Glycine max
  unsure (1)..(473): unsure at all n locations
actcagcttttatccaggctcatcttnggggngaagctccttcttttctggcttattccctagaggatggcgcctcctctcacctcttctcctttatcttccactgcatctccatggtggaaaataaccattaaaggacctcattgaagctcaaagattcagcctccatagaagccccacaaccaagcttccatcaagtggtaatctgagcacaagagcttcaagtaggtgctccttaaacctccattaattttttttctttaccttctcttccattgttgtttcttcatttttctccatgtatctcctcacatgtcttgatctaaatggttttaacatgattctttagagtttccaccgattaaacttgctatagaaactagatttgattntctatggttcanaattcttgttcttgttcttgaaccatgaatngtgttgaagttaagttcctttngagtttgtcttgtatt

SEQ ID NO: 81828 - DNA, 463 bp, Glycine max
  unsure (1)..(463): unsure at all n locations
tgnctagccatcacttctttttgatcttgttctcacactttcaagagtgcttaaccctgttaagctctgatgccaattaaagtgatataaatactacaaaagaggggttggattgtggttttacaaacattttaagtcctttatccatgtttcttatataagttcaaaataagatagctcacaatgaagaattgttatgagcatataacgaaaatgtaagcagtttgagaaaaacaagttctttcacaactcacagctcttgtgtaaaaaagggttgtttatntgaaaaggcttaaataaacttaatttagttttatgtgtatttgcgaaagggttgtatattttaaatatttacaaaacaagtaaacaaatctggtcataattagtgcaaggagaaggatgaagaacaatgaataatggattttatactatatcacctcaacctagagctacatccaggact

SEQ ID NO: 81829 - DNA, 331 bp, Glycine max
aactgtcaaagactttataaaaactttattactgtaaaattatagacacttgtatgataacgctataacttatggattctctagaatcaggatcgatccatccctgtatcattatttgactacaagcatttagaaatcgaacatgaacaatactaaattatatcgatccaatctatatcgatacagagattacaagactctttatatgaaacatgaataataccatagtatatgataatcgaaattacttgatgagagaacctttgataattcactggaatggtacccagtgaatgtacagtataatgtcatgacttaattaagaactatc

SEQ ID NO: 81830 - DNA, 442 bp, Glycine max
  unsure (1)..(442): unsure at all n locations
cgtcgcattcctcgcaagagacttctgtcgtttatggtggaggatgctncgggagcgtgggttcttcttcgacccaatgaagaagccatggatgctggagatgcagaaatgtgtgtaatgtgagaatctttgaaatataaagaggaagaagaagaagctctttcgcgccataatttcgattcgcgccacgctcgcgccagcgccattttattnttattttttataattttgggtcactagatggaaaaagacaagacctatataggctagagcccaacccaagaacatcattaaaaataactaaatgtcgatccgtaagccattttgttttaaaatttagttttataacatttaaggattttatattatttctttcattaccaaacaaattaaattcaaagaaacattataanagtatctagatttaaatatacganatata

SEQ ID NO: 81831 - DNA, 401 bp, Glycine max
  unsure (1)..(401): unsure at all n locations
gttggtatnttcgcaaccttccgaatagcttacgcattttgacgatgttgttcgcttcggcccgagaattggcaatcatgtcatctacgtagacctctatttccttatgcatcatgtcatggaacaacgccaccatggcacgctgatagagtggcccaacatttntcagcccgaaggccatcactttatagcagaacgttccccatagggtgacgataagggtcttctctacatcttcgggtgccatctttaattgattataccctgagaaaccgtccataaacgagaaaagggcaaacttagctgtattatctaccaatatatcaatgtgtggcagaggaaaattgtctttatgactggctcagtttaagtcccgatagtctacacacattcgcaccttg

SEQ ID NO: 81832 - DNA, 384 bp, Glycine max
  unsure (1)..(384): unsure at all n locations
cgagggacttacccgtngaagatcgaagaacgattttaacgatttgttatcgtcgaagaacgggtgatattcttgcgaaattcctcacggaaaacgttacggaaacgtttcggaagcacctcggcttatattttcttcacggaaacaatntgtgcaagcacattcgaaagagagagaagtgcctaaggagctgaaccccttccttcttgccttcctcccctatttatagcaaaataggggaggtggttgccgcccagctcggccaggcgagcatgggtgcttcctccagatgcaaccgccttctggaggaatattccgaatggcccaagcgggcctgtgtgctatttgccccccattttactaagacaccccttttgtgatttt

SEQ ID NO: 81833 - DNA, 433 bp, Glycine max
aactacgctttcgcaagctacggtttatcaggactatccatgttttaagtctccacagaggccattgcctccattgtccagtaatatgatcagccgatgaggtgcttcacctttggggacttccatctatcacctatggtagaaagaattgaagagatccaaggatgccctctagggggaaggaaaccatacctcttctcagggttctatccctcattagctagaatttccaagatagtccaaatctcggcgcaggaagcaagtcgaaaatggggtggttggaataccgagaaaatatttggaggcaaaagcaagaatcttggcaggtaaaggcgagtgggccctgttcatagatattctagcactggtgatcttcggaggagtcctctttccgaatgtggatgggttggtgtaccctccatccaccacacct

SEQ ID NO: 81834 - DNA, 470 bp, Glycine max
  unsure (1)..(470): unsure at all n locations
acttgctatgttctggagaagccccacnattttgacacttttaaagttttttgtangaaagaggccccttgtacttatcgtattccggtaccttgaactgtggggggatgacaacgtcagtcaccgaacataactctgccatgtcagcgaacgggtaatcaccaaacccttcgatgacccttaatctcttctcgatgagatccagcttctcccttccttccatgaccacaggtagcctccccactgagaaatgcagaggttgcagtgggcgatgctaaggagcccccgcggcattgggttagagcataccactacacgtcggtccctcagtggcgaacatagggtatggttcaaagtcaacctgagcatgatcttgagactctttacngggcacccctacacgctggtagtgctggccttcaaagggaacatgaacggtgtggttagcattctcgttggcatgtgcatgg

SEQ ID NO: 81835 - DNA, 364 bp, Glycine max
  unsure (1)..(364): unsure at all n locations
taaaagcngcaatgcttatttttccacccacatgctgcagatgctgcanaatttctgccttaaataagctgcagtgcttatttttctaaaagttgcagtgcttgtacataacttcacattaattgaatctgctatgcaaatgctgcagaatttctgcccttaaccaaataggattttccacccagataccatcaatcaacatccccctcaaggcatttctcctcctgctatagttaataattntgtgaaagtatgaggtattactggccctctttttgatccatntgtttcttgacttctgtctcacaatagattcatgaagagtagncgtttcccaaacttcagaacanattttcttcagatc

SEQ ID NO: 81836 - DNA, 424 bp, Glycine max
  unsure (1)..(424): unsure at all n locations
actaagcttatacaataatatagaacctaagcctattgtccattctatcagatttttgngnggccgcgttctctagcatgagggtcttcatagtcatccacctattcatctgctcccccgaacacaagttcaagatcatcacaagatccatacacaacaacacacaggaagtgtgttatcacattcctagctaattgagaaacgagacaattaaatatacatattatataaatgagataccacttgcttaaacatagatcacgtaacttcaccacttcgtcattcaaaagtcactgtttaatcatcaatcacattacacaagaatcccacactttgatcaagatataataacacatcaattaacaagcatatgccacaattatgctaagactcaatcctatatgcaatgtggtaccatgtcagt

SEQ ID NO: 81837 - DNA, 184 bp, Glycine max
gatactcagcttcaaatcgaaactaaccgttcgaaatttttaatttttattaaaagcgaagaacgttcgcgaaattgatcacagaaatgtcacagaagcgttacggaagcgcctcggccttgattttctccttctttcttcttttcctcactaattttaagtgaaatctgattgccaaaggtgt

SEQ ID NO: 81838 - DNA, 334 bp, Glycine max
  unsure (1)..(334): unsure at all n locations
tatanggttacagacttcttggaattgatacattcctacaatttgggggcatttcatataccctcattgaatgggcaacaatattttatatcattcatagacgaatactctaaatatacatacttgtttcttatacatgaaaagtcacaatctttggatatgttcaaaacatttaaagttgaagttgaaaatcaactcaacaaaagaataaagtgtgtcaaatctgaccgtggtggtgaatattatggcagatattgttggacaagtggcctcagaacggcgggttgaataagattttgttgatatttctaattgcaatctccctctcctaata

SEQ ID NO: 81839 - DNA, 452 bp, Glycine max
  unsure (1)..(452): unsure at all n locations
ggacctataaaactcagcttctatggggctggactctttcttattgaagcctttttgatgattntccaccatggagatgcagcggaagataaaggagaagtggtgagaagaggcgccatccactagggaataagccatggaagaaggagcttcaccaccaagagagttccttgcataagaagcttagagaggaagtttcaatggaggaaaagaaagatagagagaaagagagaggggggagcacgaaattgaaggaggaaaagagggagagaagttgaactttgaagtgtgtctcacaagactctcattcatcaaaattacaacaagtgttacacatgcttctatttatagcctaggtagcttccttgagaaacttctttgggaagcttccttgagaaacttccttgagaagctataacttagctacacacanctcctctataactaagctc

SEQ ID NO: 81840 - DNA, 393 bp, Glycine max
  unsure (1)..(393): unsure at all n locations
agcttnataacaatatactggccttcattttactgtctttgggctnggcggccacgatcaacaaagtactttcgacacctactatatgttgatttgaccaacgctgttatcggtatgttacgacaatccttcaataccttatttatacattctgagaggttcgttatcatgtggccatatcgacgtccttctctatcataagccatggtccatttttcctttgaaatgcgatcaatccatgtngctatggctggactcagttgacgaaatttttctaaattntgatcaaaaatatgctggcaaggagtgtagcctgcatgatattagttagcaacaataatttgaagtatacatganacttaaattaacatgaccatgataaatgaaatctta

SEQ ID NO: 81841 - DNA, 341 bp, Glycine max
  unsure (1)..(341): unsure at all n locations
gaaaagcacgtcagggtacatatttcatcttggtacagatgcagtatcatggtccctaaacaaacaatcaatagttacactttcaacaacagaagtagaatatattgcaacaaccagttgtgccacacaagtagtacgacttagaaaaaaattagaagagatgcctcactagcagaatgctcctacaaaaatattttgtgacaagtaagtgattgcattgagcaaaaatctagtcttccacgagagatttgattgagcatttgtagnttaatatttttatattcttcttagctcaattgacatctctttgacccttatttttttatcttaacttagttttt

SEQ ID NO: 81842 - DNA, 404 bp, Glycine max
  unsure (1)..(404): unsure at all n locations
gcttgcgattggtcttgccaggatatgatctatgtgggtccgacaagaggcaaatttaatcatcctgcttcgacgaatgagaaaactggggcaaatgaagatggtgaggatgaaagagaaatccatgctgcgattaccattcctacatggaaacttcccaccaacccaacaatgtcattactcagccaataacaacccatctccttacccaccacccagntatccacagaggccatccctaaatcaaaccacanaacccacctaccacacaaccaatgctaaacaccactcttggcatgaaccgcagcaccaacccaaagggaattntgcagcaaaaagcctgtatgatccaccccaaattcggtgtcatatgctgacttgctctatatctactcgatattcac

SEQ ID NO: 81843 - DNA, 410 bp, Glycine max
  unsure (1)..(410): unsure at all n locations
ttggtcttcgctggcaaatgatcgaagtgggtctaaaaagaggcaaatctgatcatcatgctttgataaatgcaaaaaaaaaaattggggcaagtgaagagggtgagaataagggacaaacccatgctgtgactgccattcctatacagccaagtttcccaccaacccaacaatgtcattactcagccaataacaaaccttctccttacccaccacccagttatccataaaggccatccctaaatcaaccacaaagcctgtctaccgcactttcaatgatgaacaccacctttagcacaaaccataacaccaaccaagaaatgaattntgcagcgaaaaagcctgtagaattcaccccaattccggtgtcctatgctgactngctcccatatctactntataattcaatg

SEQ ID NO: 81844 - DNA, 376 bp, Glycine max
cttcagatatacaaaatggtggatattatttaagcaaataataaccatttggtccaaagtacatgtcaaatggaatagttaaatatatgaaaatccgtaagcttagtatctcaccttctttccacccttcataaaatctctccaactggatacctgatgatgaagtgtgttaatgcacacatcttcctttatgtgtgtgggtgggtgtgtgtgtatattcttttctttggaaagaaatataatactgcatgcaaacaaaattcactattttttttctctttgaggctagtagacacttcaaacaatgtatcttactcatcatttagattattttctaaacagctgatgaaaagcatgagaaatttaaactgcttca

SEQ ID NO: 81845 - DNA, 295 bp, Glycine max
  unsure (1)..(295): unsure at all n locations
tcaccaccaagagagtgccttgatataaagcttagagaggtttcttcaatgatggaagaaaatgagagagagagatatagagagagtgtggcctggaaattgaaggagaatagggaaagaagttaaactttcgaagtgtgtctcataagtttttcattcctcaaagttgaactttgtgaatntcatttacatttcatgtgaatcctaaaggaatattccaagaatatgccaaaggcatcttatcatatttcctttagatgccacaagcatggaatgtgtggctctaacacatggg

SEQ ID NO: 81846 - DNA, 489 bp, Glycine max
  unsure (1)..(489): unsure at all n locations
tccctgcttganacaatcttgatgggcttaccatcaacagtgatggtttcattgtctagtattttcacatctgttttaaaggttcctagcatagaatcatattacagcaggttcgaagcctttaggaatatatgcaaagcagaaggtataggattagaacactaccactccccattcagtgaaactaactattctttctgtgccaacaaaacaaaattagccaagccattattacatgttatgaatctaacattttctagatatatatcgagcttatgtaaaaaaaaaaaaaaagatgtatattgagctgattgagattccctaatgaagaagacgaagaaagtaagagctagtatatatctataataaagtataatccatacaagcaggaaggtaactctcatgatcattcaatcagatgggaatggattcatatataacgtactcgaatagcaataaaatacacatcagaaaaatatatagtagtct

SEQ ID NO: 81847 - DNA, 363 bp, Glycine max
  unsure (1)..(363): unsure at all n locations
ctcagcttatgatgttgaatcaagatggattcaaggagttttgatgatttctaagatgtttaccaatatcccaagagaatgagttcaagagtgtatcaagaacacttcatgaatcaagagagaatgagttccagattggatcaagaacacttctagaatcaagaggaagtttgatntcaagattcaagaatcaagtttcaagattcaagtttcaagaatcaagaataatcaagttgaagattcacgaatcaagataagactcaatcaagatgagtactataaagtttttcaaaacattgggtagcacatgaatttttcacagaaccttttaccaatgatgttntgactctctgggtatcgcat

SEQ ID NO: 81848 - DNA, 414 bp, Glycine max
  unsure (1)..(414): unsure at all n locations
agcttctagccanatggacttaccttgtattaatttctttgatagccctgttgagccttgtttccctttccttgttttgaagctcactacaagccttaagtgaaaaaccatgatattaccatatccttaaggaattttggagctttggaattgttttgggaataagtgtggggggtctttggttcattggacaacttgtnttgttgcctatgcttcatgatgtattntgggccatacttgatatacattgtatattggttaaatgttggacatgctgaatgaaatgttgtttctcacaggcaaaaaaaaaataaaaaatcgaaataaataaaaaaaaataagaaaagcattaagttgagtgaataagatcttaaatggcacaagaatgatgaaactcttgggtctactcttcat

SEQ ID NO: 81849 - DNA, 475 bp, Glycine max
  unsure (1)..(475): unsure at all n locations
tnctttacacaaagagaagagaaaaatgaaggattgaagatatccaagtggtgaggatgtctccttcacctctagaacctcacaatcactcacagactcatctcatgctctcaagatgacttcctcttcaagctcgattctctaaaggtcttcgcacaacaaaatctcaaaactctctggaacttggacctttctctctctagaaatatctaagcatgcaaaagcttcaagaaaaggccaaacccccctctaaaatctgatttcaggcttaaataggtggctttgtttgtgcttgcgcgcttaatacaactctgaaccgcttagcgcgcattagtgaattntggcttagcatgcgctnttctcactcaacagatggactgaagcggtgtgcttagcgggatgacccttcactcagtgaacatgcacaattcatccttcttccagattcttcctcacgctcagtcgtggagtggtg

SEQ ID NO: 81850 - DNA, 366 bp, Glycine max
  unsure (1)..(366): unsure at all n locations
tacttataaaaacatataaggtaagcttttaagagagttggtcgttcacatggtataaaagtctcttgatccagctgcaaagagtttcatccttggtgccctctcattaaggtctgtgatataagttaagcttttaagagagttagctttcactttgcctggaagctattaaactcagacctaccaattaacctgattggtgagggtagcagctaacaggggggctagtggtattgatggggtacttaacacaaccattgattttgctgtantgatgcacacaaacggtactctttatattttgagaaatacgaactcttatattaaggatattctatacagttgatgtataagttgatgtcttat

SEQ ID NO: 81851 - DNA, 273 bp, Glycine max
tgttatcttccaatttggtctttgtttactaatccctacgtacttctcttggaactttaaaaaaaaaagtggacactatgttacctatggctttttcctgatgacacccgatttggataattttcctgcattcctcttgctgtgatttatattcaacctgatgggcttggattggaaaatatcgtatcctgattgtggcttgcaatccgcgatatgtttggtctacctaacatatgtttaagatttttggtaatataaaaatgtagtacttta

SEQ ID NO: 81852 - DNA, 319 bp, Glycine max
  unsure (1)..(319): unsure at all n locations
cttctagagtttgagtcattacatgcagncctcttgaacccttaccgtccactctttcatcataccgagactcgggatgcccaacaggtttagccttttctatgtactctgaacatgaatcccgctggttggtttgcaccaaccaagcggatatgactggaaggcttcttgccagttcattggctctttacagtcgcatctttcactatcgtatggttcggatcttactcccaagatcttcataccttgcacaggtttctgaagaagatcttatagtcatgtgagcctttcatatcaaccgacgaagtgattgggcaca

SEQ ID NO: 81853 - DNA, 421 bp, Glycine max
  unsure (1)..(421): unsure at all n locations
agtctggtacatatgttataccctaacttccatgatacgcacttcttcgtcatcttcaaagacatatacttcttcagtctaccaacccatgccccattgcaccagaaatcacgaccttcatgatgtgtgatggtaatacgtggagtgtctcctacaccactcatgttttctcccgaacctactctctntgtcaccacctctgcatatgatctcacccgaggagctctattggtttctatgccattaatgatagcttctctgggcttccctccattccctgactttgtatttttctcaaggtgcgtaactgacctancacaccttggaagattgacgaacagcttgtgatcgtctatgaagatgttgtccagctgcgtctccaggagcattacntccgaaacacccttgaactcacgaaccc

SEQ ID NO: 81854 - DNA, 291 bp, Glycine max
cgctccagagcatgatattcaccgctttatgagtgctgtacaccagcagcgcttcgaggccatcaagggatgggcgtttcttcgggagcgacccgtcagcgtacggacgacaaggatactgattttcaagaggaattatggcgccggcggtgggcatcactggttactcccatggacaagtttgatccatatatagtccttgaagtttatgcccatgttaggccaacagaggagggcgtgcgtgacatgagatcctgggtacggtgtcataagatcccgattgatgccgac

SEQ ID NO: 81855 - DNA, 353 bp, Glycine max
  unsure (1)..(353): unsure at all n locations
ttctcttacccaccacccagttatccacaaaggccatccctaaatcaaccacaaagtctgtctaccgcacttccaatgacgaagaccacctttagcacaaacctgtntagtagtattttgtgtttattttttgtggccccctcaaataggaattttgcagcataaagcctgtagggttcacacccaaattccgttgtcatatgctaaacttgatcccatatctacttgataattcaaatggtagccataaccctagccaagggtcatcaacctccatttctccgagaatacgactcgaacgcaacgtgtgcttgtcacggagaagccccggggcgttccattgagcatggtag

SEQ ID NO: 81856 - DNA, 482 bp, Glycine max
  unsure (1)..(482): unsure at all n locations
agcttgtaggattatggggtactttcttatgtgtgactaggtggcggtcgagcaatggtgcatgacaattctccacatccacaaatcacgtatgaacccaccatcccctgttgcccacctccaattgagctcacgtactcccacgtagcccttatcctcgttcctctcaacgccgggtccccatcaatcctctcaagctcccacaacatccaagaaattcaacatcccatcatcacaaactaacaaaaccaagcaaaacagggcgaaggcagaatactctgcccagaacacaaaccagaaatcacagcttttcacatacaaatactccagtaacatattcttctgtccaattcgttaaccgttggatcgactcgaanatttactggaagctctagtacatagtctacantngaccgttgggattactagaaaacgtcagaactcattatgtactactctttcacagccagcaatacataaca

SEQ ID NO: 81857 - DNA, 460 bp, Glycine max
  unsure (1)..(460): unsure at all n locations
tgatggtacgctaagcctcacatctcatgtcttgtgcatattgcagaaaatattgtggtgcagaaagcgctaagcacaacctgttgcgctaagcctcagatgctcactagactttacaacttcaagttgggcttatcgtgaggttaggctaagcgcttggattttaaaatcaaacgtcatgtgggcacgctaagcgcagctctgtgctaagcgcaccatacgaatatcagtttntaaaaaccaaaggctgaggcacttgggtgtacccaaataccattagcttctacctttgttaaccttgagtaattgtgcatttctggtgcgtgtttgtactacttgtctgcatcttctttgcttcatttcaatcacaatccaagtaagtgggtacatttccattnttttatttttcatccttccaacattaggatagatgaattctcgttttctaagtgtatattgt

SEQ ID NO: 81858 - DNA, 335 bp, Glycine max
  unsure (1)..(335): unsure at all n locations
agcttgtcagaagtctataccgctgatttaatgtaattagagcctatagatttcctttctcttttgntttctgaaatctacctcattaaataaacaaagagatcttgtttcatctgttcttgcagttccaccttttctcatatcattttgcatgtttttgtttctttggtcttgtttggtatagatatgagggtcgattctttgaggatcctaacaacgagggtttgacaatcgattttgatagagatataagccaaacgataaacgaggaagaggaagaggacgtcctgtcaccagatgtggagaggttggtcgctcatgaagaacgtgaaatg

SEQ ID NO: 81859 - DNA, 386 bp, Glycine max
  unsure (1)..(386): unsure at all n locations
aagatgttgagaaaaagcccaaagaatgatttcaagattaaatcaagaacaaattccagaatcaagagaagtttgatttccagattcaagaacagatgaattcaagtttcaagagaagaaatcaagaagacttcacaagggaagtattgaaaagacttttttaaaaaaacaacatagcacagttttgttgttcaaacagttnttctcanaattntctaagttaccagagtgtttactctctggtaatcgattaccagtttcctgtaatcgattaccagtggcaaagtttgatttcaaaagcttttagctgaatntacaatgttccaattgatttcaaaatggtgtaattgattacaagatattgggtatcgaatactagtgcatct

SEQ ID NO: 81860 - DNA, 355 bp, Glycine max
  unsure (1)..(355): unsure at all n locations
acaaaccaacactatttgttggaggtttgctcactgattaaagtatgatcatctaacagaccagcatatcactcaacacttntagtcttttctctcaaggtatacaaagtgttttaagagctgagtatctttataagaatttacataaagctttacaagaaagaatgaatgaataatccgcatagattgctcttcttgtttcttcaaagcttcttctatatatagccttcatctccaaggattcgttgtctcacaagggttggattcttcactctaatatttgtctgaagtcttaagctggntggagaaattaatgcttgcattaaatgcacatcccttcttcatgcacagctat

SEQ ID NO: 81861 - DNA, 431 bp, Glycine max
  unsure (1)..(431): unsure at all n locations
tgcaatggtgtttttaacggctaatgaaaatttatcaataataatcaaaggtctaaaaccactacctatgatcaaacccccattaatcaatacaaaagtgttgtttgcagcagctagaacaaaacagaaaacaatacaaagtaaagcaaactacaacaagcacaaaccagtacccnctaacatataatggaagaattgcataaccatttcctacctgtatttggcaaatcatatataccacatccattcctacatgtatgggcagaaattcaatttcacctacacctcacctgataggtcactactcggtatactgatatgcacatctgatatacaccacacctgatatgcatctaaactggagcaccaataacacatatattgatgagaagcttcagttatttccctcaagcacatcaagccaaataatc

SEQ ID NO: 81862 - DNA, 486 bp, Glycine max
  unsure (1)..(486): unsure at all n locations
atcaattattatacattaaagtagagatgatttacaaagtatcatatcattattttgaggactagatggcgacgtgcacatccatttttaacagtttgtgacaaaattggaataaagtacataattcgaaaattttaagaactatttcacacattntaaaagtaacaagatccagacacgagtcaatttattttttgcatgcatgacattttaagaaaattaatatataattaatacttttttatgagaaaaaaatgtaattgtattaagcataaaagagataataatcagtaagtacaacaaatgcaatacataagcgtctaaagatcgatagcaagaggataaggaagtagaaagttnttcatttaaattaagtgaaaagaaaactttattatgatagaaaaaacatattattcaaaatatttttaaaaatgatactcgaatcacatgaganantcttagaaaatgttgggtaaatgactatac

SEQ ID NO: 81863 - DNA, 268 bp, Glycine max
taacatgatgactaacatatacactctcaaatgatttacaaggaagaattacttttgagaagactctattgaagaatatcctaaagatgatgatatagtgctccgatatggcctctttccgataaaactgaagatcttgttactgcatgtgaacttgctcatgggttgaatgaattgaattgaagctgatacaacggcaggaacatgaacacagtggctgaatttaatatatgaacccatagtatatcttatgtctttttaacaaaaa

SEQ ID NO: 81864 - DNA, 474 bp, Glycine max
  unsure (1)..(474): unsure at all n locations
cagaggaggcaacttactaatctacatgtcttcttttttaagaaaatgtaaattatnttaaattgtcaatcaaacacaagtcatacttaattaagatgactcttaaatatttataattgaatgacaatgtatattttttttatccataggaattgaagataatgttaaaatatatttattaaaaatataaaaatgagtataaaaattcattacactattagatcatacaatatttattaaaaaaataaaaatttaatataaaaaatattaacattttcttcaataaataatggtagaggaatcagtaagttgttaattgaatgatattgaacttgatcctcctaaatatgatcttgagtttaagttttatgtatgaaacanaatataattggatgaagaaatatcactaaagatgtttaatcagatnttcaaccaatattagttatctattaaaacanagatttgatatatctc

SEQ ID NO: 81865 - DNA, 413 bp, Glycine max
  unsure (1)..(413): unsure at all n locations
agtctagaatctagataggtattttaacactaagtgatttaataattcctatggatcatatatattatatgtcacttaaaaaaaataacaaaatattaattacttttcaacaatatcttccatgttattatgggaattaatttaattaataatttttttaacaatctgcatattattttaaaagataaatanttttttttacaatagtcgcattcagggatttaacatataaacatgatgataagatggattgatgtcgaacaaaataatatgagatggaagaaagaattaatcttagatgaataaacatacaattcccatgactacatnctacacacnaaatcaaaagagaatgatagggagaaaaaattgaaaactcttagttggaaattatattcaataatatgaaatta

SEQ ID NO: 81866 - DNA, 401 bp, Glycine max
  unsure (1)..(401): unsure at all n locations
tcttctccattcattggctgtgacacattttgntctccttctagataagttattctttttatcattttcgatttgttgtgcattggtttatttgaatcattgttttggttggtggttgtttgaatcatttcccagttggttgtcgcacaatgtgaaaatgacattttttttaacaaaatgtcatacggattggcaatccttataaatcatacggatcagtaatccttatgggtcatacgaattatccgtatgacattttttttaattctaaatttatttttctgatntattttttaatttgctttgtaatgtaattttttatattagcaatagttttagcaattttataagtattggtttggtgatattactttatagtggtataaaaacaataccaaaaa

SEQ ID NO: 81867 - DNA, 366 bp, Glycine max
  unsure (1)..(366): unsure at all n locations
tatgaaacaatgcaatggaaagttgtacaatgacattctttccttattctgtgattatgattctgatttaaacttttttttctggaaaacactgattgactatccttttgaaagaggtgataattcatgcaaccttatcctatcttttgcaaatctctccgggaactccctcagagtgtatgntttgtttgatttagtcacttgaccattttggagtgatggccatggagccgtttgacgtttaatcaatccatatatattccagggtttgtcccttttttttgtttaaaaacatcgacgggtgagaactttagatctgcccctatgttcactcgaggctcatgcatgatgtgatgcaatcctact

SEQ ID NO: 81868 - DNA, 210 bp, Glycine max
cgatgttctattgtgtcccgttgtatatggagatgctcgtaattgaatacagaagctctcaacaaattcaaacgacaataactcttgactccggtgtccgaatgtgtcctgcgtctatcgcggatgccggaattgaaaacttggggtgtgacaacaaataaatgtccagtacctttttccccggtggccgagtggatgtccgtatatatc

SEQ ID NO: 81869 - DNA, 376 bp, Glycine max
  unsure (1)..(376): unsure at all n locations
tgcaagcttacatagccctaatcttaattttatttctaacaatacataaagccataaaaatctaaagctacagttaaagtcttctaccctagagttaagacatganaaagagaaaaagaatcaaggaacttacttggatggtgtatggttgatgcttcaaagttgaaaatgcacacagaaagtgcaaatgaaaaatgtgcaaatttttggagagagagaatgcagatgcgatgtttctgtaatctggcaaatgtgagtgtaactgttgttacactctcttaagcagttnttcgatactttcgcttagcggatcattgcgctaagcgagcaagagagacgtttggtttctcaaccaggctcgcttagtgaacacatg

SEQ ID NO: 81870 - DNA, 481 bp, Glycine max
  unsure (1)..(481): unsure at all n locations
tactcagctttgggctatcctctctactgaagaattgttgtgttactggtgaggcagtggatttgttggaagacaacaaatcaacaattgatttggctaagaaccctgtgtcacatggcaggagcaagcatatagacaccaaatgtcatttcctcatagatcaagtgagcaaggggaagatcagacttcaacactgttgaactgagaaacagctcgctgacattatgactaagtccttgaagaatgaaatgcttaagggagtgagagagtctttgaatgttggtagttctgtaatcggtttgaatcaatgggaggtgttagaagtgattctaaccaatagataggattagttaaataaagtcaattggacagattaccattcctagctatcagatggattntagttatttgatatgctataaataccaaccttgtgctagagtgtaatacaacagaaaaaataagagtatgntttctctca

SEQ ID NO: 81871 - DNA, 448 bp, Glycine max
  unsure (1)..(448): unsure at all n locations
tgtgcatatcgtcactgtgaatgactagtctttcactagcagcaaacccgccaatcccactggagtttggttgaccatgcatgttttacggcaaagacccccttaataaatgtttaaaagcaccccatctatgaaaaagagttttaagaataccccacataaggaaacttgcctactaaattcacatggataacaatgtatggttgattcgaaaaaatgatctgacatagtagatggaagacccatgtggtctgagaaaacaaaaaagagtttagaagagacaggtggcaagcagctataaagctgagaactgcagtccatacttacctcacgcatcgcctcctttcttgccagatagacgaancaacccacaaataaatcaatctctttattccaattcaaactaccctcttcacacacactcactcagattcttatattctacaaa

SEQ ID NO: 81872 - DNA, 444 bp, Glycine max
  unsure (1)..(444): unsure at all n locations
tctcggctcatgccgggaacgcctctatctcaacacccgtgcagcctaaggcacccacccagagggaagntccccaagttccaactccgaacacgcctcgactggccggtaattccaacacgacaaggaacttctctccgaggccgttgccggaattcaccccgctcccaatgacgtacgaagatcttctaccatccctcatcgccaatcatttggccgtggtaactcccggaagggtcctcgaaccccctttcccgaggtggtatgaccctaatgcaacttgcaagtaccatgggggtgccccggtgcattccatcgaaaaatgcttggcccttaaatacaaggtccaacatctaatggatgcacgatggctgactttccaagaggatcngcccaatgtgaggaccaatacgctcgccaatcatggaggggggagcagtaatg

SEQ ID NO: 81873 - DNA, 418 bp, Glycine max
  unsure (1)..(418): unsure at all n locations
agcttncatcactctctctcttccttctttattccgctgccatttatctttgaagaagcaaaggaatccattgatgaagaagatcctaggcctacaagctccaatggagcttgcatcactcgccatgacgatagagtgggcggtaagggttcaaaaggattgcatgttatcactccaagtctaaaagatttgttacaagctcacttgtatgtgttgaacaacagtaatgaagctttgccatacatacttcagcatgaaggtttagtcaaacaaagtcaaccaaaaatgtcaaagaactgggtcttgaaaatgcataacaagactntctctgattggttaaagatacaatcattggtgatgaaaatgcttctgaaacattaagaaaagcagctgatgggcctaaaagaaatgtataact

SEQ ID NO: 81874 - DNA, 453 bp, Glycine max
  unsure (1)..(453): unsure at all n locations
aagaagttctaagagattcaatgcttgtataggattgtaagagattgattggaaaagtattcaagattgttgttggaaagattgattgaaaatgcaaaacaaagccttgcttttatagactcttcatgtctggtcaagaaggccattcagaagagttataacttttaaaaaaacttaaaacccatttgaaaaggtcaaaacctctttgaagagttacatctttagatttttcagaagcanacactggtaatcgattaccaaataagtgtaatcgattacacatagcttntgagtgaaaggatgtgactcttcacatttaaatttgaatttcaacgttcatggtcattggtaatcgattaccanaacattgtaatcgattacagccttttgaaaatatttggaacgttgtaattcagtttgaaacttttcanactcatttgtactggtatcgat

SEQ ID NO: 81875 - DNA, 404 bp, Glycine max
  unsure (1)..(404): unsure at all n locations
agcttctcccncaattntctataaataggttgagaagngaagtagaanagggttcagccccttatgcacttctctctctttcgaatttgcttagaaaaattgtttccgtgaagaaaatccaagccgaggcgcttccgtaacgtttccgtgagtgatttcgcgaaggttttcgaccgttcttcgacgctcttcattcgttcttcatcgttcttcagtcttcaacgggtaagtacctcaaaccaagcttttcaattcattttatgtacccgtggtagtccacacttggtttcatgtatttntattctcgtttcatttattttttatacccccttttgacgtgcttaagtcattntatttaagtcatttctcgcttaaactaanaataaaataaatttccaccgatc

SEQ ID NO: 81876 - DNA, 423 bp, Glycine max
  unsure (1)..(423): unsure at all n locations
tgagtggagagaagttcatcatatgctaattcaagagtttcatgggtggttatatttagctcttcatcttatcagaatctgattcttctgatgtcgtgtctgccatcggataaaagttggcttcttcttcctcttttgtcttcacatcgaacgatgtgtcatcaaagttttcccttatgctcattagtaatttcttgtccttttggttgaagtacttttcttgtgatttgacctatcaagatctggacattttaactngaagtgtcctgggttcttaaactcatagcatatgatgaagcttctatccatgtgctttctttctctatngtggttcttggatcctttctaatctgatcccactcatttcttccatatgttccttatcttccttgagatgaaagcanactgatcatcttcatctaa

SEQ ID NO: 81877 - DNA, 422 bp, Glycine max
  unsure (1)..(422): unsure at all n locations
ttatcatataacacattttgagtgttattcagaaaattagagtatatctcttttatcttagtgagagtgattctcctaaattcttgagtgattcaagaacaccctggctgtatcaaaagactttcacaacctttgtgtgttggcactcgtggaaagagtgattctttccttactttcatcttcacccttgttctttcaaaccacaattccagataatccacctctgcccagaattatctcgtggcataactcccattttacgcactcanattaagtgattctngagcctaaattgactcttaaaacgagacccttcacctcgtttggaatcatctcatgtggagccctgtagcttcagttattgccatttctatattcttgtccaaccacctcttacctacgatttaccatcccattcattc

SEQ ID NO: 81878 - DNA, 399 bp, Glycine max
  unsure (1)..(399): unsure at all n locations
actccatcattaggattagtaccagacatctctgacaaacaaatcaaacgttacaagacaattatagttgctgtttgaatacctcacccactcaagtgtgtcacacaattatggcttttctctaatgaaacactcttgccttttaccactctaatcccccttgagttcttaggcaattcaagagattatggccacaacaaagaacaattcaccaatatgtgtnaggtaaggctagagagacaatgaacaggttaaccaataaaaaggctaacaatgtttttaggcacaaatgaaggaaatagaattcagaatttatgaattcaagtaacaatccttcatgcaaccaatatattacgctaaagagaattttttttaanagtcttcaagcatgaaccattc

SEQ ID NO: 81879 - DNA, 378 bp, Glycine max
  unsure (1)..(378): unsure at all n locations
cctatgtntgtcccatatatataaaacagtcccacaatcctaattattacataatatcacacctccatatgatcattgggggcatttcatctgatgcacattggntgtggccgcatctgtttatgaccataatgattgcctagaagacatgggtggctaatgtgtgcatgccccaattgcttcaagatacaacacaagcctaatgcctttccctacaaacccttaacttaacaaaacaagcatggatttagacgtgaattgctacacgaatttctctaaatatgagctatgttaagcacccaaacacatcaatggagagccaaataccaaaagaaattgttcttacttgtggggagtgattaaagcgtgaatagataa

SEQ ID NO: 81880 - DNA, 392 bp, Glycine max
  unsure (1)..(392): unsure at all n locations
agacaagagtggtgaaagagaatctgatgacggtattcactatggtcaggaaagagtgtgatgagttaaaagatatcaacatgaccatggttgaagcgttagagtgggaaacaaaaagggccttgaaggaagaatggagcaggaacaagttttgaagggctatgtggggcagcagtaatgagctcaagcttagaaaggtcgagagggacaaatcaaggatggaaaacatggtgttagaggataagttaaagtcttgtaagaggtcgaagataattttgatggagtagttgagaanaatagaagagaatatgttgataatcatcgatcaatataaggagaaggtaaaccttgctactagtcatgggcatatgctggaagatgaacaaacaaag

SEQ ID NO: 81881 - DNA, 381 bp, Glycine max
  unsure (1)..(381): unsure at all n locations
ttaagtcaccgcggctgcagctgcattggaatgcgaaacccctctcttcattatgagtagtaccngacatctgaaacaaacaaatcaaacgtcacaagacaattatagttgctgttagaatacctcacccactctcaagtgtatcacacaattatggcttttctctaatgaaacactctngccttttaccactctaattccccttgagttcttaggcaattcaagagattatggccacaacaaagaacaattcaccaatatgtgtaacgtaaggctagagagacaaggaaaaggtttaccaagaaaaatgctaacactgtgtttcgcacaaatgaaggagataatattcacaattatgaattcaagtacaatccttcatgc

SEQ ID NO: 81882 - DNA, 343 bp, Glycine max
  unsure (1)..(343): unsure at all n locations
tagcttgacttgccncttgttatttttgatgtgctcatgtgcactgataatgacaaattccttgggataaaagtagtgttgccatgttctcaaagccccttctaatgcataccactccttatcataagttgaataattaagggtacgaccacttaacttttcactaaaataagcaattggatgggcttcttgtaataacacaacctccatcccaacattagaagcatcacactcaatttccaaaaatttttatagttctgcaacacaaatatggtggcattatttaacttttgctttataacattgaaagcttcttcatgtttctctccccatttgaaaccaa

SEQ ID NO: 81883 - DNA, 297 bp, Glycine max
gtgaagattatgttacaagtgctctcgatatggtccgaccatgccctcctgatttacaactgggaaatcggcgggcggaggaacgccccggcttttacgctacaagcattatgtatacccttaccgatttaaaagctctatagttgggcctaggcttcaaagtgtacatttttgtaaagctctgtgtctcttggatatgatgataaaacaaggagctattcttatctgttcctagtctgtacccattctgattcatttgcatgtgtacatcttttttctagacagcagattctatga

SEQ ID NO: 81884 - DNA, 483 bp, Glycine max
  unsure (1)..(483): unsure at all n locations
atcttaagtcacctgaggcatgcaagcttgtaggatatggngcactcgtcatatgtggtactatgtggcgatcgggcgttggagcanatcaactctcccacatccacaaatcatacaggaacccaccatccccaggtgcccaccttcaactgagctcacgtactcccacgtagcccttatcctcgttcctctcagcaccgggtccccatcaacccctccaagcttgcataatatcccagcaatccaaatacaactatcatgaactaccctaaaccaagaaaacagggcagaggcagataactctgcccaaaacacattcacatattacaactttccttactcanataccncaataacattctcttctttccgattcgttaaccgttggatcgacttgaaattatactggaggttcctagtacataagtctacattttgaccgttgggatctgctagataatgtccagaatccactatgtacta

SEQ ID NO: 81885 - DNA, 415 bp, Glycine max
  unsure (1)..(415): unsure at all n locations
aactgcctggactgacccataactgcttaactctttttattggtgaatcctangctcttgaccttgacttgatagaacctctttttaagtgaaggcacctgactcgatcccatgttttactaaagtgaaacaaaacccagtgcgaatcaaaactccgacatctatcatgggtggaatggatgaatgcatgaagaaatgcatatgacacagatgcaatttatgaatatgggagcccgggaaattgtccccttcttagatacaacatttgggcagcatggcgcccgacgtatgtatttaagaaggcaacacggacccttcgtcggtttgacaaagtgaggggatcaagacccgatccatgcatgatgcatatgtgaaaggcaccacacagagatgtatatagtacgacaatatccac

SEQ ID NO: 81886 - DNA, 356 bp, Glycine max
  unsure (1)..(356): unsure at all n locations
tcatgatgaatcaagagtgtattaatgataacatagatgatgtctaatagctcanaagtcaagaacacttcatgattacaaagataatgatctccagaatcaaagaatgagttcaagattgaatcaagaacacttcaaggttcaaaaggaaatttgatttcaagaatcaagaatcaagtttcaagattcaagttccaagaatcaaaatcaagattcaagaatcaagagaaggctcaatcaagataagtattaaaaagttttttaaaaactgagtagcacatgaatatttctcaaaccttttatcaaagagtttttactctctggtaatcgattaccagattattgtaatcaattac

SEQ ID NO: 81887 - DNA, 317 bp, Glycine max
aagtcacctgcggcatgcagcttctagccaatggacgactttgtatttatttctttgatagcccttatgagcgttgtttcccttttcttgttttgaagctcactacatgccttaagagaaaaaccatgatattaccatatccttaaagaattgtggagctctggaattgatgtgggaataagtgagggggggttttgtttcataggacaacttagtttgttgactatgctttatgatgtattgtgggccatacttgatgtgcattgtctattggttgaatgtcggacatgctgaatgaaatgttggtttctgatgca

SEQ ID NO: 81888 - DNA, 374 bp, Glycine max
ggatttgccctggactcaactatggattactttccttagcacccttatgttcaatatgtttcgataaataaacatatgtttttctttttgtatgtgcatgagagattcaatgctagttgtcacacaaatgtattaacaaaagtacctatcacataatagagtggctatgcaattcagaatgcatcaagaaattttagattgtgtggctacattctttggaaccaaaggcattgcatggaaaaattactacatacccatatctaacgggaatttctatttacctgctcgccttttttgagggagatgtcaccacatgttatgcacgatggtggaagatgcaatttgtatatcatcatgatttgcaaaaatatact

SEQ ID NO: 81889 - DNA, 402 bp, Glycine max
  unsure (1)..(402): unsure at all n locations
gcgtatcccaccatcttttcatagtagagtatcgataatgtgtctaccatcacgatcatcgtctccctttccatcattgggggtaccacctgtgccgccagatccctccaccttttgggcgtgttctttgaaagatccgtccccctttttggcaaatttctgtagntgcatcctatccggaaccatatcaaaattgtactgatactgcctaacaaaggcaaccattaggtccttccaagaatggactcgggaagattccaagttagtgtaccangtaacagctaccccagtaagactttcttggaaggaatgtattagcaattcctcatcttttgcgtattcccccatcttctgacaatacatctttagatgggtcttgggacaagtagtccccttgtactt

SEQ ID NO: 81890 - DNA, 332 bp, Glycine max
agcatatgcgcatatatctttacgaacgttctcgtgcacaagacattctattaacttagacaatgcacccatatacaaacaatgcagctttgatacctattattatatacatcgtactatacataagtgtatattgttaccttacatcacacacatcttcttggctaaatttacatacatgcatactcaaagcattttgggatatcaataaatgcacatgtgcacatcttgtgatttctaatacctattcatacacaagctttatgaatgaatcctgactattaacacaacatagtgctacattccatgctctatcaagtatctgctactat

SEQ ID NO: 81891 - DNA, 427 bp, Glycine max
  unsure (1)..(427): unsure at all n locations
ccttgttcttctgcagaatacaaaagtgtgctatatcttttcattctcttctacctttgccaaaaagaattcaacaaggactaatcgcctgaattctttttgtgtctctcttctcccttttccaaaagaacaaaggactaatcacctgaattcttttgtgtcttccttctcccttttcaaagaattcaaaaggacacagtctgagaattcttttgattcttccctttccctctaaaaaaagatttcaaaggactaaccgcctgagatatcttttgtttcccctttacaaagattcattggactaaccgcctgagaactntgtcttaacacattggagggtacatcctttgtggacaagtagagggtacatctacttgngtcggtgaactgagaacaagagaggtacatctcttgtcgattagtcaag

SEQ ID NO: 81892 - DNA, 374 bp, Glycine max
ggagatgcagctgaagacaaatgagaagaagttagaggtggcgtcatccattacggaataagccatggaagaatgagcttcaccaccaatatgagcctcttgataataagcttggataggatgcttcaatggatgaaaagaaagacggagagaaatagagaggggggagaaagaaattgtacgaagataaacggagagattcgaactttgatttggtctccacgactctcatcataaatttacattagtgtacacatctttatttataactcgtagcttcttagaacttcttgagaaacttccttagaacttcttgagaaactttcttaaatctgatctagcttccatccctctatactatctcccttctttaa

SEQ ID NO: 81893 - DNA, 430 bp, Glycine max
  unsure (1)..(430): unsure at all n locations
tatgtcacttttggagacaacaataggaaagaattgtgggagaaggaaatattggaaattagcacaatactcaaataaaaaaaatgttntatatgttgatgaacttaagcacaatctttngagcataagtcaactatgtgacaaaggcttcaaaattgcattcaacaagaatagttgtctcatttgtgaagcaaaaactagtgaggttggtcacataggtagaaaaataggtaatatctacatgcttaatattgaacatgcatcatttcatgagcttagttgcttggaaaataagattgatgatttttgactattgcttcgtagggatgcacatgtaaacatgcaccacctcaattgtctagttaaaaaggacttagtaattggtattctaaaacttaagttgagaaaaagtaattgtgtgaagcttgtc

SEQ ID NO: 81894 - DNA, 363 bp, Glycine max
  unsure (1)..(363): unsure at all n locations
ttaccttccacacaatatcattaccctataggtcatattcataacatcaattcactgagcgttgcattaacccttatttanttaaatgagttcatatgttgnttgggcttttgtatattacaatgaccaaatgattacaagtgagtgtggatccacttccgttgtctatgatgacacaaggtcaatttgctttcatcaagacatgacacttaaggccctaatgcatgtcatccagtgtaagattacaccacattngcatgccaaagaagtatgtgacatctattatcaattcacaacattgatggatatatngaatatatggcgtggaaactngaagacgataaggacatatatacanatgtt

SEQ ID NO: 81895 - DNA, 385 bp, Glycine max
gattacattcttccctttctaaacaaattctttattcttctgacatcatcaaaatcttcatgaattacaaaataaacttatagtcatgttggaaaaaatatgtaaaagaatacaatgttatggtcactaagaaacctttaaaaaataatcaaaacatgtctaattttttgtaatacaatgttatggtctttgcaacccgagaagatgttttgcagtgggctcgaacggttgcccatgaaaacggttttgttgcagtaattatgaggtctgatacatatactggtagcagaggaagaacttcatttatgttaattgggtgtaaaggagcggtagtacaagtgtaggaagaaagaatttgtagaagaacacatcactataaaatgtg

SEQ ID NO: 81896 - DNA, 415 bp, Glycine max
  unsure (1)..(415): unsure at all n locations
catatgatattataggtcaatgtagtagcatcaaaactttagttggacttggtccaagaatctttgtggaactgagaatcagtttggtagtacacaatgtcaccatagtcactaacgaagtgatcctgacttatgctgtgtagcaagtacttgataagatgaagtggcaatggccctgatttctgaggctcacgataatactttcctagcactgccttagctgctttagtctattgtggaacaacaaanagaaaaagaaagagaaaatttaaaaaagaaaggaacaattcaggaccatagaagaaaattgatgtatgcatttttgagaatattgaatgtgaaaatggagaaattattatatgtatggtaggagatgatgacatgtttgtcatcatggtcaatcttcacttaacat

SEQ ID NO: 81897 - DNA, 481 bp, Glycine max
  unsure (1)..(481): unsure at all n locations
atgtgatgaacactgggtaatggttatgcatgattagcttaatcagtctaagagaaatgatgtattggatttaagtcctaaaccaacctctcacaagtaaattggaaccaaatgggtgtttctaaacaaacttgatgaatccggcatcctactaatgaattaagcaagattggttgcaaaaggatagaatcaagaagaaggaatcgactatgatgaaacctacgctccagctgtaaggttagaagctataagattgctacttgcatttgcatgtattatgaatttcaaactgtntcatatggatgtaaaaagtgtcttcctcaatgggcgcattgaagaagaagtgtatgtataccaaccaccaggttttttgattatgaacatcctagctatgtctacanattgaataaggccctacatgtgttgaagctagcactaaggtcatggtatgatagattaagtagtttttaaatgaacaatc

SEQ ID NO: 81898 - DNA, 357 bp, Glycine max
  unsure (1)..(357): unsure at all n locations
actcagctgtaagtatgtctcgatcattatttacaaagttgtcatttacacaatcgtttttagacaatgagtggtttattcaggagtctctactttaatcgattaccatgtgatataatcgattacttctctttctatgagtgtgtcaaaagtaaacaactaaactttaatcgattactttgagtatctaatgaattaccttgttcttgaattgtttccaggttttgggaagaacactttaatccattaaaaagaatatctaatcaattacttcattgaattaattgattaccttgtagattaatcaatcacaggtgttataactgtnttctctataaaaaacagcttgtgttctct

SEQ ID NO: 81899 - DNA, 423 bp, Glycine max
  unsure (1)..(423): unsure at all n locations
agcttgtcaatattcagttgangagattattctctgattcttatactacattggtgtttaactgttcgagtatgaatgccatatccaatgtcagaaatcattataattctatctatttgcgtaccatcttaagtatttatatacatcggggttagtatttctcggttcatatgtgtggatcatacaacatggtggcttattaaacctctacacattgatagttttttctgagtaaactattgataattattaactttttcctgctttggggaagtataaacccacagagaatatggagccaaactctgattggagatgagaaatcacagtttatttgcgtaacaccaaagtagttattgattgcgcttgtcatatattgatgagtcctactgtggntgcatatacttgttagcatgcccattg

SEQ ID NO: 81900 - DNA, 428 bp, Glycine max
  unsure (1)..(428): unsure at all n locations
acacgtaactatatctgtgtttattttccaacatcaatctcttttatatttaaaatattatactaacattcctcttagatgtttacattagtagtcctttaattaaatgttttaaaatcttataccacaggtgaatggaaaaattaaaaaaatagaaagtatttgtgtaattacacaaaacttgaaaaagtgtcattggaataatctttaaatttttttatgagacatgtaatttatttatgattcctgttaaaaaaaatcaattgatngattactacacattttaccaaaaaatagggtactgaaaattggattatttacttataaaatggaaaatgggaatattgaagtaacttgagacatttataaaaataatataaattctttattttatacacattaagaagagctctatttttattgaattt

SEQ ID NO: 81901 - DNA, 407 bp, Glycine max
  unsure (1)..(407): unsure at all n locations
ctctcagtcacctgcggctgcagcttttttggaccttgacaagcaacttactcctctttcataaccatgctatgtgctcgcgactggtccctctcttcccttcgcagcttgagttcactattgctaccccatagagctccgcgaaatttattccggccatactctttcttgcgagccctcttggtctcttcttcaagggctctggcggnaattgtattctcttcctggtacccggcgcactccttccgaatgtgtgttgcggcaaacttgaacttctccttggcaagtttcgcctttcctatactcgctttgagagcttggacttcttcgtcctcttccggtgcttcaaaactctcttcgctgacgactnttaacttggcgagccaatcctaacctcgtatatgaac

SEQ ID NO: 81902 - DNA, 291 bp, Glycine max
  unsure (1)..(291): unsure at all n locations
cttgcgtagccgctcttggtgctcagaaaatcccaaaaattaattcctcttattactagctattntgaattctttagttcctgaatgtacaactctcaaattgttggtcgttcccctctctgttttatgcaaaaactgaaatcaatatcaaacaaaacatgcatacaattgtcatcgttattgctacttgaaccataaggaataacatctaaagaagtactttaaaacatttatttattttttttggtattttttgaattacaattntacttcaatatctaaatttttaat

SEQ ID NO: 81903 - DNA, 446 bp, Glycine max
  unsure (1)..(446): unsure at all n locations
gtagatttgtgcttgaccaaccttgtattatgcatttgaggagctgaggaggaggcttaccacctctctcatcatgcagccactagattgggagcttccatttgagctcatgtgtgatgcctccaattatgcacttacggttgttttgtctcaaagagttgatagactatcacatgtcattgcttatgcctcacgcactctggatgcaacccaagtcaactacaccaccactgaaaataagcttttaactattggttttgcattagataaattcagatcttatttgctttgctcccacattactgtctatattgaccatccagccttgaggtacctgctgaagaagcctgatgctaaacccaaattgattaggtggatgcttcttcttcangagtttggtattgagatcagagacaagagtgttgcagaaaacatggtggctgatc

SEQ ID NO: 81904 - DNA, 112 bp, Glycine max
gggcagcagcaggaagaaggaaatttttttttctaaatggcggacctatgaaaatgagaagatcgaatcggccaaaggtctgactctcaaggtgtgggcactctagagaatt

SEQ ID NO: 81905 - DNA, 474 bp, Glycine max
  unsure (1)..(474): unsure at all n locations
agcttgagggtgnngttaatttatgataataggcttccacaanacaggttggcgcaacaattttttgtatatgtgaatataatgcatctggtagttggtcaagataatattaaaaaatatgcattatgagatttttaaatcatgatatattgggtgcttttacctaaagttgaatatttgtattctctattaaaaatctactttgtttctttgaatatcatatatgatgatgtgatcactaactaatgcttcatatgcttctaaaactgctgaaatattggttaagcttttcaaggagatggttntatatgttggagcaaaaaatgttgttcacattgtgactgataatgctgcaaattatgttgctgtggtaggtattggaaaagagttccaaaatatatggtctcttgtgtgtcactacatgattgatgtgcagacttggaaattgagaagtagtggattgttacatgctaa

SEQ ID NO: 81906 - DNA, 420 bp, Glycine max
  unsure (1)..(420): unsure at all n locations
caactattgataaaagccattggtcataaaggtggctttattaaacgcatctctacttccatatgatctttatcacattatgactgagaagcattttaacctttcatatctggtgctacaatacatgatntctcatgaagatgttagacactatatgatccattgttggacaacccaaacatctcttaatgttttgatgaaaacaaaaatataaatgtgtgttaaccaattttgtacatgtaagtcaacaggattgctgactggaaggaataccangatagactngttcattagtgaataccttgtctactggaagcaggaaagactcgtccatccacacatcaactangatatgaaacatatttgaattatcagtcattccatttatatgatttattaaaatgacatatatgcaatcta

SEQ ID NO: 81907 - DNA, 447 bp, Glycine max
  unsure (1)..(447): unsure at all n locations
ttttcctagttttagatggatntatcaacaactattgaataaagccattggtcataaaggtggctttattagacgcatctctacttccatatgatctttatcacattatgactgagatgcattttaaccttccatatctggtgctacaatacatgatttctcatgaagatgttagacactagatgatccattgttggacaacccaaacatctcttatggttntgatgaaaacaaaaatataaatttgtgttaaccaatttgttacatgtatgtcaacacgattgctgactggaaggaataccaagaaagacttgttattagtgaataccttgtctactggaagcatgaagtactcgtccatccaaacatcaactaggatatgaaaacttatttgaaattatcagnttattccactctatatgattttatttaaaatgaacatatatg

SEQ ID NO: 81908 - DNA, 445 bp, Glycine max
  unsure (1)..(445): unsure at all n locations
tcaacaatcacattcatggctacacacaanagaaaggagtttaatagtcatattgttacacatcaagagagacacactcatccaaggcatatatagttcaaaaggtttgcacaacacaaatccacacatcaagagagagataaccttattgccaatatacacacaagaagataagggctcattaaggcattatcaatcaatattaagactacctgtgcggcgtccctaaataatgactggtttaatagtaataaatcaaatcgcagaaaccatggaattttntttttttgcactgttattcatttcacggtaattaaattcagaaggaaatatatcactataaagtcctgaatggctagttacaactctattcggaatcatttctttctaatcactcataacctctaaacttatttactaattcaaaatataccagtcatcattt

SEQ ID NO: 81909 - DNA, 410 bp, Glycine max
gcttgtatggttaaagtctcacgaatgtcacgtgctcatgcatttattgttagtctttgctatacgagacatcttgccaaacaaagtcaggttcacgataactcgcctgtgctttatcttccatgctatatgtagcaaagtgattgatccagtaatgtttgatgagttggaaaatgatgccacaattatactgtgccagttggagatgtattttccccctgctttctttgacatcatgattcacttgattgtgcatctggacaaagaaatcaaatgttgtggtcctgtttatctacggtggatgtaccccggtgagcgatacatgaagatctataagggtatacaaagaatctatatcgtccggaagcatctattgttagagggtacatgcagaagagccattgaatttg

SEQ ID NO: 81910 - DNA, 427 bp, Glycine max
  unsure (1)..(427): unsure at all n locations
atactcacctattctatccaaggagatcctcattttgtgtgtgatgctttattgcttgtttatccttacaaggagaagggcaaagtcccaaacaagtacaggcacccacccactctttctactcttatgttatctcttttttttcttttcttttttcttattggttattgtcttgagtttattttgaatgacctcattgatgtttcttgtgatttgcangaagcagcatcagcacgtagatagaggagattttcaccatgtggcactcctactggattggatgctagagaccaatttgatcttcaacttgtaggttatggtggaaactccatttattatcttttcagaatggtctttgtcaacctactctactcacacgtgtacttctaattgcatgctttaggtggcagaatgctttcaatactca

SEQ ID NO: 81911 - DNA, 418 bp, Glycine max
tataggatatacccgacatcgcatgagatacaaaattaggcatacgttcttttgcaacacgtctaagtaaaaaaaaggtatggtttcaattgaacatcttaccaaagtggtatatcctcttgtataaatattggttgatcctaaataatctctgttaggtagtttggattgcggttccctattcgaagtggctcttggagttgtcctcctcgcaagagcatcatcctcttctcccctctgggataaaattattacggtactatgcttactacatatatagggtccattcataggggagtccgacttatatgctctgccactaagatgggggtgttgatttgattaacactgtaaaatatacaaataaactaaaaatatcggtatatctaatgatataaacccaatttgctacgatgtt

SEQ ID NO: 81912 - DNA, 358 bp, Glycine max
  unsure (1)..(358): unsure at all n locations
agcttgtaatcgattacacacattctgtattcgattactagaggagatattcataaaatattctcaacagtcacatcttctcatttggttcttgaatggccatcaaacgctnaccaanatgggacccgagacacgaatttgcgaagagtttttcagaacaacaatgtgttattctctcataaacacaatcgctttatactcttaagaattccttggccaattcaattgcaattcattaaggaatcatttgagtgctaagattgcaaaatctatctctttcaagagagattcattctgcttctcttctaaatcactaacgaataagagaccaagggtctcttgttgtaaagaattctaa

SEQ ID NO: 81913 - DNA, 471 bp, Glycine max
  unsure (1)..(471): unsure at all n locations
tgagtngactgctaagcaaggagactcctagatctcttatgtctaatccgcatgtgtcctccaccataggaatgagaagggtacctgcaaaagggactccaacgctcaagtaaatatgtgagtgagtcaaaatgggatggaaaagtgaaggtagaacttgatatttataatgttggacgggagccttgggtccttgattgtcagggctgttacaataacgtaacaactcttacagataattcatgggtggatactagataagcggatacctacattaatttgataaggtgataatatcattatcattaaaattcatatatatcttcccaaccagttgattgctaaacgagtaatggttgtgctctcgtactatggctgacgangatgactgacatgttatatttntaagctatgtcatcaaccacgtcatttgtggatcccgggacatataaatctcatcttccttcttct

SEQ ID NO: 81914 - DNA, 446 bp, Glycine max
cagcttataaaaacaataatgcctcaattatttctataattgcatgtgaattaggacgcatcatcaaaatcaagccatgcttttgtgcgagctaactatggggctaaacacaccaaatgattatgatgatggatggctcaaattctcacaaaggtaaactcatcactttcatatttgagctttcaaaactatcatgacatgtatagaagaatcaaggatttcaagtcacaaaatgtcaagaacttatattttcaaaacaattacccatttcttgaacatatcctataattcatagaaaaacatgctaattcgtacgtgcacacaaaattgaccctaaatgttaaactgaatatccgacaaaactaacaacattaacaatattacacaacttacaaattaacaaaaccatcaaaactagcataaccaaataacactctcccccatac

SEQ ID NO: 81915 - DNA, 365 bp, Glycine max
tataaaactcacctcgaaagactgcaacacaaatgattggatctgtatatatatgagatgcctatggatccataaatacagagacatatacggagaattttgtatcacatataccacatattttcatattcaatccgatataggacaaagaatataattactgctcaaacgatagatactgtgtggcgctcaaatgatgactttctacaatgaaaggcccaataaatctacaagaactctttttcagctatatgaacactagtgatccacggagtctcacttcgtcaactaatcctatgaatggccaacctttgttagaagctcttataacgactgtcttcttggatgaagtgtgaaagctattt

SEQ ID NO: 81916 - DNA, 408 bp, Glycine max
  unsure (1)..(408): unsure at all n locations
gctttgatccgcctctatantttccactatcccatcctccctccagataatgagcttctggtgaagggtagatggcacagctccaactccatgaatccactcccttcctaatagcaagttaaaattagccttagactgtatcaccaggaatagaggtggtcgaactatactgcctacagcaacatctacttgaatggctgcgcaagaatagccagttttaccctcataattcgaaagcacaatgttgtgggcagatagatcagtgtcatgtttcccgatcttgtagagcatagatcgaggcattaagttgacagccgctcctccatcaatgagcactttgttgattccaacattctcaactcttgctctgatgaaaagaaggttgagatgaactttcatctgaaaatc

SEQ ID NO: 81917 - DNA, 421 bp, Glycine max
gacgcatgcaagcttatgtgtaacaatatctatacctgctattgtccctgtctacatatagattaagaagaatccagttcaggttatatttatgaagttgacagatatgcgtcagtactacctaattagtagtgctagctagtactaaccttttctgttctctttcgattgagataagctaacttaatgttatagatgaagctcttgcttccttgcatcatgctggggccatatcattaattaggtctgcaccaaattcacttgatgatgcagaagttgacggattcaagttgtgcttgatgaaaagatttctagatctcagatatgatgtgccatcatgacttgaagtgcatgcctccttgtgctttatgttttcggctgtatggtgcatgaataacatgatatgagaatctagctggaa

SEQ ID NO: 81918 - DNA, 302 bp, Glycine max
taaacccctctttttattgtcatttactgtttataccacaacaaaattaactgttttatatattgggctcatagatttatgtctggacggttggtgctatatgctgacacacacaaaactattatagtgaataatgaatataggcattacagaaggatgctagtatggatcatggcggcagttggtcaaacataaagggcttttagatttatgggacgcttaattggtccgacgtggcatttacgatttatttaccttatttttagcttaacacaatattgccgcgaagactataagtttct

SEQ ID NO: 81919 - DNA, 464 bp, Glycine max
  unsure (1)..(464): unsure at all n locations
ttctgattatggtaagaatatttctagtaaattacactaattattcttgagatcgaaagttgtctgacacctcttatttttttacacgtatggtattaataaactatatataaattaaatntactttttttaatttactcttaatcaaagttgtataacatacaaaaatactagttttaaaaatttatgggattatatatagaaatactcataattaattaattagtatatccagtgatttaagaattggatctgtcctaccgatttaaccgacaatctatagcttggtcatgatattcttaaagtggtactaatcactacaccaagttatcaagttagattatttatgaaaaaagcttttatatataaattatatacatcggccattatggttcgatcattaacccaataaattaatgatccannattttttaaccgattgattattgaaactataaatatat

SEQ ID NO: 81920 - DNA, 409 bp, Glycine max
gcagcttgctaaatttagtctacatttcttttatttaatacataatcgttagtggagggttttctccacgctttctaattcaaccccagcatatttgatacaagctactttaaccttcactctcctttatagaaagaaagaaagaagcaccttccttaaagaatataaacatatgagatattccttagtcttctactaaaaatgtatagatgcacttcacaagatgagcaaattagactcacatctcttaagctaatttctaattatatgtaacacaactctgtttcttattcttgcacatatcccctccttagtctttcacatacacttaactaacacccccttatatagtatactagagaaatgttgatcatccccttcatctcttacaaaatttctactcctttat

SEQ ID NO: 81921 - DNA, 381 bp, Glycine max
gattctgattttgagccactatgtgtggtgcaacattgtggagtgcttacgtttccgtagcctatgtgatcgcttgtgaaagcagtgtagtatgatgtacaaaactatttgtacagtgacatggagtcacatggtaaaactaaaagtgatatgtagcaaaaactcatgtcatttattttagtctaatttgcttgaaaatagcaatgattacgactggaattaggtaactttgaaattacatgcggggaagataacgagatttctacaattgattatgttattaaaaataaaaataaaagttaattatctcatctagcacacttgtaatcttgtatcactttctttttcttgcttattttctcaatacccaccgactaaaat

SEQ ID NO: 81922 - DNA, 459 bp, Glycine max
  unsure (1)..(459): unsure at all n locations
gtcacctgaggctgcagcttctattccatttctccaaagttaatctcttgtatttaacctatggcagaagaatttgatccattttaccttcctaactcttctcctataagtgcctatatagaagtttatgcaaattaggcctaagaatggttaaattacaacttagtcaatcatacacgcaggtagatagctcctttttcattccaattttggagtatcgtgctgattgatattttgcaaactccaaacatgtcattggagctttattttcatttatgtggaccacttgtaatgctttaaagaactctgcttcaatggttcctaaagaagctgacctatttagtcaatttcaaatcactgctttattataagcacgaaaatatcgagggagtgcttagccaaagttttattggcttgtctcanatagagaatataaaatgcanagacagtctactttct

SEQ ID NO: 81923 - DNA, 280 bp, Glycine max
  unsure (1)..(280): unsure at all n locations
gaaaaatgtaaacagctccattatcgtcacccaaaattgtcaagtgattaaacaaaacatatgctctgatggaatccccgaagagatttgcacaatataatagaatgaggttgcatgaattctcacgtcctccacaaagagatagtcaatctgtgtttttcatataaaaaaagcaaataaaatcaaatcaaaatcaaaatcacaaaataataggatagagtgtcaagagcattacacaattntcatgattcagaaccttttgcattactagcatttcaaa

SEQ ID NO: 81924 - DNA, 452 bp, Glycine max
aggctctggaagagaagacttatggtgaagcctatataggtgttgtgatagaataattaggatgaattcaagagaggctgttcaaaagtaatacccaggtggagcctccagaggctatgagattattgggtgtaaggagcaagtggatacttctagaaagaaagaataccatgattggtcttagtggaaaacctataagttaggtatcgccataaccaaggttgggatgaactaatataagttccttggtgtgttgtttccttgtttagtgcatcttgtatatccttgctgctatatgcttagaggttcgtttagaaaaacaatattttgaatagctaactcttatttttatcacattttttatgaacaatatttcatttaaaacgacactactttatgcaacaaatttgttttaacatatttgagatttaaagtagtttgaacagtaaata

SEQ ID NO: 81925 - DNA, 468 bp, Glycine max
  unsure (1)..(468): unsure at all n locations
ggctgcagctttcccatttgtataatgggggagaagaaagaagaaaagggttcagccttcttggcacttcttcctctnttcaaattgctgaggaaaattgtttccgttaagaaaatacaagccgaggcgcttccgtaacgtttccgtgagtagttacgcgaagattctcgaccgttcttcaagattcatcgntcgttattcgtttttctttagtcttcaacgggtaagtatctcaaaccgagcttttcaattcattctatgtacccgtggtggtccacattttgtttcatgtanttttattctcgntntcatttggcttttacacccccttttgacgtgcttaagccatttatttaaatcatttctcgcctactctaanaataaaataaatttccaccgatcgtttgaattgatcatccgttaatttcgttaaaatgaattcgaccattcgtcgtgccgtatcacgtg

SEQ ID NO: 81926 - DNA, 227 bp, Glycine max
agcaaattgatgagtagtagtaacaacaatggcattcaaatgccaacaccacctctcactcccaaaaccatttctagatttgactccaacccttaccctaccacttttgtccaagctgacacctctactttcaagcaagtagtccaaatgctagctggctcatcagacagcataaaacaagcatcacaagatccaccaccatcatccagaaacttcaacatacccca

SEQ ID NO: 81927 - DNA, 395 bp, Glycine max
atgcaagcttggtaaaagccatgaagtgaattcatggatgatcctaccattgaagacattgatgaggtggagaagtctatacccaaggaagacaatggtgtggatgattttgaaccagttcagctagctattcagaatctgaatactgatgtttagaatgacgttggcgtccaacaacctggatatgaggtagatattcctactaatgataatgatgaagaggagcatgacatgtcacaagatgaaaatcttggtgatactaccaaaccaccttaagttcaactcaggagggccaacagggagagacaaccttctaggaggttctctactaatgactatgtgatcctaacagatgatggagaacctggatgctctagagaggccatgtaaaataa

SEQ ID NO: 81928 - DNA, 433 bp, Glycine max
  unsure (1)..(433): unsure at all n locations
gcaatgcttagatagcatatgcatacctctttatgtgtttgaattcccttctgattctatctcgagccagcacatagtcaacttcttcttgttcctcttcttcgaatttttcttcatcaagaggccaattaaaagcttgtgtttcagcatgtttatcttcagtcttcacctcaaaatttaatttttcagaattagtttcgttactctgatagtgctggactgaaccatgctaggcttggtcttgtaggctatctcaacttcattgaagacaacatcacgactcactaaacacctcttaaaaccagtctccaaacagcacagcttataccctttcactcctttangatatcctagaanaatacacttgacagctctaggttccaatttatcttgctngatgtgagcatagacaacacagccaaatacccttagc

SEQ ID NO: 81929 - DNA, 430 bp, Glycine max
  unsure (1)..(430): unsure at all n locations
atatattaaaacattcacgtaaatattaaaaacattaatataattatattaaaacattaaacataatcatattaaaacatatatatatatatatatatataataaataaaaaatttatatacttatattggtttacacgaanaacatgtatacctatattctaaacatatttcaactaagtcacgaacatcaaggaaatgcctaattacaatgtgaataaagctttagttaatttcttcaaatgactntattcaattcaattatccaataaccactgcacatatgaatttcatgatgagtagtcacgtacgcggaacaaaatataaagtttgtgaaataaaagtgtcaatatgtgtacgtgtatacaatgcggcatcaaaaattttaagaaaagaaaaaaaagaaatcaacaagattggaaagcaatata

SEQ ID NO: 81930 - DNA, 479 bp, Glycine max
  unsure (1)..(479): unsure at all n locations
actcagcttcttgagaagaatccttgagaagctagagcttagctactttcacctctctcataactaagctaacctccttgagaagcttcctaaagaagattcctaaagaagctagagcttagctacacatacctctctaatagctaagctcacctctttgagatgagaagctagaacttagctacacaccccctataatagctaagctcacccccatgacaaaaaattatgaaaatacaaaaaaatgtccttactacaaagactactcanaatgccccgaaatacaaggctaaaaccctatactactagaatggccaaaatacaaggctcaaaagaagggaaaacctattctcaatattacaaagaagagtggatgccaccttaacccatggactcaaaatctaccctaggttcatgagaaccctatggccttcttagtagctctagcccagcctctntgagtcttctatccataccct

SEQ ID NO: 81931 - DNA, 442 bp, Glycine max
  unsure (1)..(442): unsure at all n locations
agcttgtaaaattcaccccaattctggtgtcatatgctgacttgctccatatctgcttgataatataatggtagccataaccgcagccaaagttccttaacctctattttttcaatcatacgactcgaacacaacatgttcttatcatggaggagttctggggcattccatcgagcattgtagggccctgaagtataaagtgcaaagtctagttgatgtgggatgcttgaaattcaaggagaatcgcttgtgaattctgacgttggcaagcaacactatacatagggcaattngaaggttggtgttagatgtctccagcgactcaataggagtttcaagtttatgccgctattgtaaaccacagttacaatgctaataatatggataaatttggcatccttgttttcattctttactatacatctttcttattaactccatt

SEQ ID NO: 81932 - DNA, 439 bp, Glycine max
  unsure (1)..(439): unsure at all n locations
tcaagaataagatggcctcagcaaactccttattttcagaatggtattctatcaatagacctccaatctttaatggagagggttaccactactggaaaacccgaatgcatatttttatagatgcaatagacctaaatatttgtgaagccatataaatagggccttatatacccaccacagtagaaagagttacaatagatggtagttcatcaagtgaaagcattacaatagaataacctagagatagatgatctgaagaggataaaaaatgagttcaatacaatttaaaagccaaaaacatcataacatctgccctgngaatggagtgaatattcannggttcaaattgtaagagtgctaangaaatgtgggacactcttctattaacacatgaangaactacagatgttaaaagatctangtataatgccctactcat

SEQ ID NO: 81933 - DNA, 108 bp, Glycine max
tggcccaaaaccatcttgagcatcccgactaacccgggcataatcaagcagtgagaacctgtgatgtacctaaacaggcgaacttctggcagtcaacccattaaagaa

SEQ ID NO: 81934 - DNA, 377 bp, Glycine max
  unsure (1)..(377): unsure at all n locations
tgccacccagctcacccaggcgagcaaggtgcttcctccagaacaacagccttctggaggaatcttctggagggtccacgtgggcttggttgctatttgcacccncatttttactaaatacaccccccttgcttttttttggtgattctttctttgtaaagttacggaaacttacggatttcgcaacgatacttgttttctttccgtaacgttacggaaccttgaggattacataatcatccccttttttgacttacggaatgttacggaacctcactaattgtacaacgatgcttccttttgatttccggngtgtcacggaaccttacggattgtgcatcaataccttcttttgatatacggcatgtacctgaact

SEQ ID NO: 81935 - DNA, 409 bp, Glycine max
  unsure (1)..(409): unsure at all n locations
tcaatgacaatgcttacaaagttgagctgcccggtgagtataatgttagttccaccttcaatgtctctgatttatctctttttgatgcagatggagaatccgatttgaggacaaatccttctcaagagggagagaatgatgaggacatgaccaagagcaagggcaaggatccacttgaaggacttggaggacctattgatgaggacatgaccaagagcaagggcaaggatccacttgaaggacttggaggacctatgacaagggctagagcaaggaaagccaatgaagctcttcaacaagtgctgtccatactatttgaatacaagcccaagtttcaaggagaaaagtccaaggttgtgagttgtatcatggcccaaatggaggactnatatgacaccacttatttcaa

SEQ ID NO: 81936 - DNA, 388 bp, Glycine max
ggccacccagctcgcccaggcgagcaaggttgcttcctccataagcaacagccttctggaggaatcttctggagggaccaagtgggtctggttgctatttgcgcccccttttttactaaatgcacccccctttctatttttttggtaattctttttccgtaacgttacgaaacttcatgaatttcgtaccgatgcttattttccttccgtaaggttatgaatccttatggattatgtatttactcttttttagctttcgaagaagttacggaaacttacggattgcgcataaacacctctttttgatttccgccacattacggaatttcacggattgtgcaagcctgcttccttctgatttttgacatgcctcgggacttcattcatt

SEQ ID NO: 81937 - DNA, 408 bp, Glycine max
tcttgcttgtccccattttataccttttagacatgggggattttcgtttataggccatgacacaagccaataatggtggtaattggacacttcctaataatattactagacttgacaaagtaggtttatccacaccacacaacagatatataatgtcccctactctagaactcatgccagatatgcattacgttaaaacaacataaaacagtttttttaatcaaccacaaatatctccttaaaaaataattctgttcaggttaaaagatcaagaaagcgacaatctgtcctttttaagattaatacacgctatgaagattctcactaattaaaccacttgtttagttgtcacgcaaccatagcataatcaacggacttgtgcctataaggggttcaccctcacactaa

SEQ ID NO: 81938 - DNA, 402 bp, Glycine max
cataagtaactagagatgatataatatgaatgtggtagccaaatggcaatatgcacaactttgttgaaacttctaacatgcatggattaacaaatcaaatatattaattctaggttgctacctggaagtaatttgctactttacgagataccataatatgggcgtgcttaaaagaattcaatggcatcgtttgaccatgtaaatgatctaacctaacaagataaggtggtttttttatgttttatctatttatcacaattggatctaaaactcactatgtaatttaatcgatgattaaatattggtagtagtagggcaacggaattgagattctatctgaaagacacaattatattcatgtatttataaaataaatatgtatacataaaggaatttgacatt

SEQ ID NO: 81939 - DNA, 396 bp, Glycine max
gtttggagcagaaacataggaccaactcatgttatttcagaaagtcatatctagtcaagatctgagagaccatacaagtttcctagcggtttctaattatatgggccattaagtctatcatatgctgacaataaccgagaagcccgtggatttcttcaagggcagagtaggtgtccgccagtgccttggccttggcggaagttcttgactcttcgtcaacgtaagagcaaaccggtccatacacatggttgcctcttggtgtaaagagtcgatcacccttcctctatcctttttttccgcgtatacttgggcatactcgtccgcgaccctatgctcatgggccgtggctagacttatctcttcttggtacttggcgatgatagctagcatgttggt

SEQ ID NO: 81940 - DNA, 391 bp, Glycine max
atgccacaataggtagccgtggctatacgaaacattttgccaaacaaaagtaacttaaccataactcgcctgttgcttattttacatgctatatgtagcaaagtcaatgatcctgtccagtctgatgaactggaaaatgacgccgctaatatactgtgccaaatggagatgtaatttacccctgctttatttgacatgatgattcactcgatcgtcgtctggtcagagaaatcaaatgttgtggtcctgttatttgtggagatgaacccgattgagcgatcatgaaaatcttaaagggtatacaataatctaatcattcacaacatcattattgagagctcatcgcacacaaaccattgaattttttcagatacattgagaaggtaaacct

SEQ ID NO: 81941 - DNA, 412 bp, Glycine max
  unsure (1)..(412): unsure at all n locations
tgctcgccactataagaggagaaaccttcttgttgnttcatattaacctcttcctctaaatcaccattaagaaaagttgttttcacatccatttgttgcaactcaaggtcaaaatgagcaactaatgtccagattatacgaagagaatctttcttagatattggagaaaaaagtctctctgtaatctattccttccttttgagtaaatcccttagcaacaagtcttgccttgtatctctcaatgttgcctaatgaatcccgtttggtcttaaatacccatttacatccaatgtcctttgccccattaggcatctctacaaggttccaaaatttgttactgtacatggaattcatctcatccttcatggcatcataccataaatntgactctctacaactcatggcttgatca

SEQ ID NO: 81942 - DNA, 67 bp, Glycine max
  unsure (1)..(67): unsure at all n locations
tgaagtgagaaagcgtggaagagtcagancttcctactttttgtttgttgacctcatagtggtacct

SEQ ID NO: 81943 - DNA, 331 bp, Glycine max
atgcacctgtcgccagactctgtggtatatgctcctctgccgacacaccacagagacctttgtcctattatgcaacaataatgaagcaattagacaagcctaaagctgatgctgtaaacaaatacaacagaactgcccaacctcagcagcaaaaacagccacgacagagcaaatatgacctctccagcaacaggtacaatctcgggtggaggaatcatcccaaccttagatggtcgaatgcttcacaacagtagcaacaacaacagccttatgtcagaatgctgcagcccaagcagaccatacgttcctgcaccaatccaacaacaacaac

SEQ ID NO: 81944 - DNA, 370 bp, Glycine max
gcttcaaggttggctttattgtttacaggcaatcatctttaatcctatccttgtcaaaaattgccagctacctcagattttttgtgtctttctctcctttccacatgaactaggactaccgctgaatgtgttggtttccttttccctgtcaaaaattccaatgactcctcgaaaagctttgaatctccccttccgttacaataattcaatgctttcgtctgtgagttgttgatcgcctccaattttcagagtatcgtctttatctctcgtcatttttagaaatttcctcttgtccaaaaggtccattactctaatatttttaaaaaagtcgtatttataatatactaagggggtttcatatttctaaaaa

SEQ ID NO: 81945 - DNA, 361 bp, Glycine max
ctctattagacactatgtcttatggcacaccatgtagtctgagaatctcactaatatacagggaggctaacttcttcaatgaaattttgatattaattggaataaagtgagtaggcttggtcagtctgtctacatatacctagatagatattaaacctctgagggttctagatagtcctacaacaaattcatggaaatactgtccatcttccactgtggtatctctaaggattgttacttacctgaagttctttgatgttctatcttaaccctctgatagactagacatgcatacacaaatgcactaacctctctcttcatgttgtgctaccacaacattgtctttagatcttgatttatc

SEQ ID NO: 81946 - DNA, 339 bp, Glycine max
cgaatacatgtcactggcggtgcacctttgtaagaaaattatgtaaattattgcctattaagattgatcaaaagcagtaattgaaccattaatgtacgtttggatatggtaattcaaccgagtaaatcaagtagttaataagtctaaattatcatataatttgttacagtgtttcaaagaagtattctaagagaatttgaattcacgtcattttaacaagaattctgatcacctaaaaatgtgggaattgaaattacacctaaataagagaatttgatatttttctctcacctctgcacatgactattctcttaagaacctcgttctttctcttcacga

SEQ ID NO: 81947 - DNA, 244 bp, Glycine max
agcatgaagctgctcaatagctccatgtttgcttgtttgaaaggcaaaagcctgtattgtggtcaacataagatcacataccacaaacccttgcaacaggtacatagtttttattcaatgccactatgtgtaccatattaaccaatgcattcaagttgccttcaacatattgtctcgataagcaactgagtttttgctacctcatgctctcctcttatgactattagattattcattcgctaaa

SEQ ID NO: 81948 - DNA, 395 bp, Glycine max
tactcaactctgaagaaatgatgaggacatgccctaatgcatagcctgtaagatccctagtagtcgaagagaagatcaagtccatagccatcatagtcttgaaagagtatgatgaactaagggacgtcaatatggccaccgctgaaaccttggaatgagaaaccaataacgcccgaaaggaagaacacgtgccagcacagatatgaggggctatatatggcagcaatagcaaactcaagctccgaagaggtgaaaggtaatatcacaggtcaaaggcatgatcttgaaggacgagcttaaggctttacctatgtcgaaaagaaattagtcccaacagttaagcgagactgaagggaatatgtgggccgtcactcatgagtgcaaagagaagctaa

SEQ ID NO: 81949 - DNA, 409 bp, Glycine max
agcttcttagtttcagatgatgcatatggtgtttgagctacctcatgcactcctctaatgactatggcatcatttctggcgctaaactgctgggagttggaagccatcttctcaattaaatttctggcttcagcaggagtcatgtctccaagggctccaccactggcaacatctatcacacttctctccatattactgagtccttcataaaaatattggagaagaagtcgtctgaaatctgatggtgggggcaactggcacatagtttcttaaatctctaccagtactcatacaggctctctccactgagtatgctaatacctgagatatccttcctgatggttgcggtccaggaagcatggtaaattttttctaagaatactctctttacgtcatcctaactcgtgat

SEQ ID NO: 81950 - DNA, 447 bp, Glycine max
  unsure (1)..(447): unsure at all n locations
tccatcacacccncacctgcttatgtgatgtgtcctcggtgtcatagaggtttgcatagaattctattacaatggcaacatcaatgttgccgtccagatagtcagtaaggtcttccctccagtgtcttctatccagctcatctaggaattcatcaaattntatggtgtagaccaccacatttctctcaggtagcaatttcctaggcacaataatgtctatgtatctctccccaacttcctgggatgtgaatcttgatctatcatatcgcactcgagagggtgtagaaggtgcctttcttttcctaggagccatctgcaaaatataagacaaaacacaagagattagccatgtttattctcaagaaaacagaaaaattataactgaaaataaagctgggcgcttagcgcagcaatctggcgcttatccccatcataaaattactcatg

SEQ ID NO: 81951 - DNA, 408 bp, Glycine max
tgcatgctttgtgtggagctttaatggtggattatgaagagagaaagctacgtgagagagggagagaataggcttctgaattcttttggggctgagtgaggagagagaacatatctctttggttttaaataacaaggtgttctctttttctattattttatttaagcaatgccacatgtctccatttgagtggatccaaaagggcccactttcccttttgattgtgacccatactcaggcacaaaaagtgagaaaaacctaacctttgaaacgctaaaatcccgcctcggtttgcatgtcgcttctctagttccagttcctcgcgtttctctgcgtcccgtcgggccagttttcgaaagtatgcaatatatatatcataatgctcagaataaaaccccgagcgtggtc

SEQ ID NO: 81952 - DNA, 405 bp, Glycine max
aatcacactttattacaaatatagaagttaagatctctcccttaagaaactggaattatgttctctgacattcatgtgctacaaagttttaaagtataaaactttgtccgtattcttcttccaatttgtcacctcttacttggcgtgattcatacatccaatagagtaagtacactacttcatcttgcatgctggttatgctatactatcttccatgtgcaaagctgagcatgtataatcagagttgtacaggagaagaagccgattatatctcaagaacaatatctgttaagaaaaacagatacgtatatattggaaaaaatagctgaaattgacttgtcctagatgaaaagcacgaaacatctcataattgatactcaacatgatacatgactaagcctatgt

SEQ ID NO: 81953 - DNA, 472 bp, Glycine max
tgcacgcatgcgagcttgcaagtgaaattgaatcacttgacttatgttctcaatacaagtgaatagtttacactagaatcagaaggtatggtcacaagagtattctatatgaaatatatctccctaccagtcctcaaattatagagtatcaacattgctaagaacaagaaatcactgacaaccatactatctgagcaattaatgctaaacaccatactactaacatacccagaattataaggttcttataatatgtatacaacgtacatatcagaaagaagacattaatagttaataaggatgtataaagaatcacaatttcaactactacattccgactgccacacaaaaagtgagtaagtagtcatgcgtttcatatcaagaaagaatactcatgcagacatatatattggtcagaaggtttcacacactaatcacacatcaagatagaataagtcattacaacatacat

SEQ ID NO: 81954 - DNA, 464 bp, Glycine max
  unsure (1)..(464): unsure at all n locations
gcttatactagagttaaatcttatgacaggttagatcttactctgaccaactatctgtcttctatacctagactatgttctctatttataaccacctaactaattaactactcttacgtcttattagatctactcttcaatggcttgtccttattttttctgttgtaaccctcctaattgtgggttgggagctacattaattcgcccacaatgattgggccttaacctttgttgtatgatattaagctcatgcacatgagaagaaatgaattctggcctgtggcatcgtagttacatcttgtgtcttgcttgccgcaggttgtataacaatgttaacttcttttgagaagatacatagtcatatgactttaaattntttctttgaacttaccacttgatcatcgactagggaaacttaatacagaatctacagtcaactcataaggtaataagtcatcttttat

SEQ ID NO: 81955 - DNA, 450 bp, Glycine max
gatgcagctatgagagccaaacaagcttattattaaattttgtgcaaacacaaacgaagtatataaaaatacctctcacaacatgcgaagtataactcttaaaataattgcacattatgactatcaaaataaaaggaatcaaaatcataggggcaaaagcacgaaaacaccaagaacactcaatgttatcaaccaattcgcattgtgatatcaattggcctgtcaaacagtaaaatctcatgattatgatcataaaggcgcaattacaatatagtgaacatctctaaacagatcccacttccattttaatatgaaccctatatatgttaattctaaccccaagttgcgataaactcatttcctatttctaagcggacttacgtgtgtgggccggcatgatagtgacatctctagcaggtccctaacaattctcaaagcttttctctaatt

SEQ ID NO: 81956 - DNA, 448 bp, Glycine max
  unsure (1)..(448): unsure at all n locations
gacttggtgaatgataactggatatgtggggagggttgctacgtgtgtgtgagggagagagagaataaaattaaggatgattatttccttaaaatatagtatttacttattatagtgacgttcgagatattttaatgagtttaagatgaattgaattcttccctacaaaacccaaggccaccactcatgagtaataataatattatattttgatgtagcaacaaacttttcactttgaccatgtatgattcattgctcataagtatatattaaggctctagctcctgttcttaatgttcaactcaaccaacactttntaatttgagttaatctagtggttaattttgaatatatatagatcattgataaattgcgctttatctaatctacagaaattaataatattcacatatnatatttattnccatatcttctaaaatttcttttt

SEQ ID NO: 81957 - DNA, 426 bp, Glycine max
tttaagaaaagggtgaataaaaactttaaaggtgagtcaattgatttaagaataaaacacaaaaatttggaaaacaattatatttacttttcaaaaatgagtctaatggatcatctaaattaaatcatttattctacatttatttttctaaaaatatcctcaaaatataaatcgaaatatttagcattaatgctttcaagatcaatcctaccaaatgctaaagcaaacaaaccaatatgattcactttgctaatgagcacaactgcacaaatatgataagactgaaccgaagaattgaacgatactggacaccataaaattgtttaattaactaatttatttaaaatatcagtacccaccataacatggtcaaccttttataatcatgaaaagggattgttcagcttgttaaatattgataaacat

SEQ ID NO: 81958 - DNA, 397 bp, Glycine max
agcttacacaaacattcactagtccaactctcactcaacaaatgtcatcatcagtccatagttccaatcaatcattctcagtatgatgcatgcacctgacctcaactctcaaatgcagtgtggtaccatccccaagaaaatagcctaagcgtgtccacacgacactctcatgtacatacacaatatacaacgtatgaaacatgggcaccatcaatgcactgaccgtgaataattaaagattctaagccatccccttccagagatgcttaaaactctttaaccactccatttccctcaccagggatatccaacaaagtcactgcaacccccatgtacatacacaacacataacgtatgaaacatgggcaccatcaatgaactgacagtggataattaa

SEQ ID NO: 81959 - DNA, 346 bp, Glycine max
  unsure (1)..(346): unsure at all n locations
taatggagaaggtaccactactggaaaacccgaatgcaaatttttattgaggcaatagacttaaacatttgggaagccatagaagttagaccttatgtacccaccatggtggctggaaatacaacaatagagaaacctagacaagagtggtatgaagatgaaagaagattagtgcagtacaatttaaaggctaaaaacatcattacttctgccctaggaatggatggatattntagggtttcaaattgtaagagtgctaagaatatgtgggacactctacaagttacacatgatggaacaactgatgtcaaacgatctangataaatactntaactcatgagtatg

SEQ ID NO: 81960 - DNA, 414 bp, Glycine max
  unsure (1)..(414): unsure at all n locations
agagttgtangagacatgttatcgagatctctcgattttgcaattgcagatacctttggttgtcattccctgcttaaacatcttagtactttgttaatgagatcctcattaggaaatatctttcctaatgatgcaagatgattaactatacgcgtgaatctcttttgcataaaatgttcatattcatgtgttagggtgtttattctagatctctttacatcagttgttccttcatggattacttgtaatgtatcccacatttcttttgcattcttacaattttatactctaaagtattcatccatgcctaatgtagaggtaattatgtttttggcctttaagttatattggacctttcttctttcctcttcatcctattgttccctgggttttctatagttgcatttcctaata

SEQ ID NO: 81961 - DNA, 440 bp, Glycine max
  unsure (1)..(440): unsure at all n locations
agcttngtgctcctcctgctgctgctgcaccttgtagtaattgtggctttgttcaaccagttcctccatctagcacctcctcccctgaccatactcgaaaataacgttctttgttggtgttctctattcttttgagttgtctcttctgtcctttttttttttaaagatttttctgttttaattttacttgtacttgagatagaagattataggcttacgagggaaatgggtgttatagtcttgtagagtacacacattatgcattatgcttcacggatttaatttttgagctggaagtttttcatctgtttgcgctggttatctctcatgattatgatatcttgtagccttgtagactatgatatcttgtattgttgttgccgagtagagaacctttctctcttgtgaatgtccatctngcatatcaacggtgctacact

SEQ ID NO: 81962 - DNA, 419 bp, Glycine max
  unsure (1)..(419): unsure at all n locations
ntagatgagggttcactgtaatcaagcaagtcggagacctatcatgatcacagattcacctccactccttatgctcccatgaacccgggtataaggccctttttcactcacagtgtgtgcaaatagtgttggtgtttgtgtgcatcaaatgaataaatatttacttcatgcatacatttaaaatgtactaaaagcaacaaagagtttatattcacaagaacataatgaaaggaaaccaacaaaggggtaagtcacggtaaaacattgcacaaaattaaatggcctaactctctaanaacattccccagtggagtcgccaactgtcgcaacctacccttcggcgggagggcgacgcgagactcgcgggatgcgtgttccacgaaaggaatacgcgcggagtcgccaccaacgtttatttg

SEQ ID NO: 81963 - DNA, 419 bp, Glycine max
  unsure (1)..(419): unsure at all n locations
tgcagcttgtacttctttaaaaaaaaacctagagatcattaatgggcgaatccctttattgtgtctctcctttcaacaaaatcgaaatatccgttaatggtccaacgccttaaatgacttctctcgctcaataaaaatatatcttgcaaaaaaggataaaaacaatttaaccaacgtttagttcttgaagaactacgtaagtctgatttccttaccacaattgaggaatacgtangagcaagggaaacacccttgtcaaccacaaaaagataaaaaatataaaaggcaccaaaagacatatagacgtaaagggaacattaacaaattgaagtcatgtttgacactggattaaagctgcgtccttgtacggacgtgtgggtgctaatccttcacatgcgtaatacactccaaaccttcac

SEQ ID NO: 81964 - DNA, 408 bp, Glycine max
  unsure (1)..(408): unsure at all n locations
atggtgttatcgattaccagcgtgtttgaatgttgaaattcaaattcaaatgtgaagagtcacattctttcacaagaatgctttgtgtaatcgattacaatgatttggtaatcgaataccaatgataacgtttgaacacaaatcataagatgtaactcttccaatacgtttcaagatttttctaaaggttagaactcttctaatggtgttcttgaccagacatgaagagtctatataagcaagaccttaacttgcaatttataacgcgttgaatacattcattacaatctcttacaacctttgaggctctntgacatcttttgaattcttcttttctttgagagctttttaagtttttggtttccaacctgaaaacaaacttggtatcatcttttattccttctcctt

SEQ ID NO: 81965 - DNA, 369 bp, Glycine max
  unsure (1)..(369): unsure at all n locations
agcttacatcanatggtatagcataacaaagaaattgaactcttaaggatatggtgagaagtatgattagtcattcttctttgccagagtcactttggggagaagccttaaagaccgcattttacatccttaatagtgtgctagggaaagcagttaacaaaaacccttatgaactttggactggtaaaaggccaagcattaaacatttgcacattttggattcttcggctgaggcatggccttataagccacatgaaagagagctagactcaagaacaattagctggtattttgttgcctatgttgaatgctcttgggggctataaatttacaatcccaccttaagatcctttttcgagaccggaaatg

SEQ ID NO: 81966 - DNA, 393 bp, Glycine max
caaggaagaagaagaagaagaatatcaagaagatgctcacagagattcacaggttgtaaaggattgtaataattgttcttaaaatgtgagttaaggtcttgcttttgtagactattcatgtctggtcaagaaaaccattataagagttataacctttagaaaaacttgaaaaccattggaagagttacatcttttgatttttattcataacttatcactaggaatcgattacaaaatcattgtaatcgattacacaaaacatttttgtgaaaggatgtgagactcttcacaattgaatttgaatttcaatgttcaaacacactggtaatcgattaccacaatcttgtaatcaattacaccattttgaaattaacttggaacgttgtaaattca

SEQ ID NO: 81967 - DNA, 333 bp, Glycine max
  unsure (1)..(333): unsure at all n locations
gtttgaatgctgttaacatgacgccttctgtggaaaaggatcgtgagattgtggagactcaagaggaaggtgctcgtaaatcttacatcttatatcctttcaatgttcttcctctatatactgatagngcaaatcaagcattgatgagatttcctgagatccaagctactgtatatgctcttcataacacaatgtgtctggcctggcctaatgactactaaaaacaaagagatgaagacattctggattggctcggtggatcgatcggatttcatagacacattgtatcagatgagagagagcatttgatcttattgcttgcaatgtgcacat

SEQ ID NO: 81968 - DNA, 444 bp, Glycine max
  unsure (1)..(444): unsure at all n locations
tctanactntatacaagaatgaagctctgataccacttgttagacaagtggcctcaaatatcttaagaagagggggttgaattaagatatcccaaattactttccccaattaaaaaaatntatttcactttcttttcaagttatagattcccttaacaataaacttcttaaatattaattcaaataaaacaatttgaatatgaatgtaaagcaatgataaacaaaggagattaagggaagagaaagtgcaaactcggatttatactgggtcggccacacccttgtgcctacgtccagtccccaagcaacccggttgagagttccactatctgggtanattcctttacaagttctaaacacacaaggccaatccttnctttgtggttagaantncttttacacaagagacccacagtctcttaatcccttagagaattagtagaa

SEQ ID NO: 81969 - DNA, 333 bp, Glycine max
  unsure (1)..(333): unsure at all n locations
ttgtactagtggatncaaaaccacaagttagcatgaacaaattattttaagaaataaacaataaaattttcttggattctctcttataataaacaaattttatggtgaaacttgtttcttataagaaggatgtaattattataatataatacaatgaaatgaacgcactgatgaaatgttcaattgtgagacctacaagtggaatggaatgtacgaaataaattattaattaaaagacaaaaattgacactagacgaaaaaattagagatagtagattctaatatgctaaaataacagagaacaagtacaccaaactctcaatatatacttat

SEQ ID NO: 81970 - DNA, 224 bp, Glycine max
tgcatcttggattgatcaaatttgataatggggttgcaatagatgcataaccgtgaatcatctgacaataataccctgcgaggacgatgaaactattgtaaagactagctgactgtggttttaaccacttcgaatagtgagaatcttaactggaacaggttccacgccctgagcaaagaccatgtggcccaagttcatcgattttctcctgagcgaatgaacat

SEQ ID NO: 81971 - DNA, 368 bp, Glycine max
  unsure (1)..(368): unsure at all n locations
ttagtcacctgcggctgcaagcttaagatacccctnttacttgcatgtagtgtgtatgatacgaattgtgtgcggcgtagttagattttcgagaaagagtctaccctttgttgttctttcctgtagatcgtgatggcggcgcagctaatccatgatcgagtggagatggagtgcctatagggagcttgggagaccctcgaaggcaacatgatgtgccgatttcggggcacgattcgatttacggctacttcattgtgcatccagatgaacccgcgcgcacgcttcagcgcactgtggagtggatactactcacgcctacaccataccgtctagtggagccagtccacgtgattgaggtgatgtcatcc

SEQ ID NO: 81972 - DNA, 410 bp, Glycine max
ggacacttgaaactaagctagagaggaagcttcatggaggaagagaacgagggagagagagagatagatagaggcatggaaaattgaaggaagataaagagagaagttgaactttgaagtgtgtctcacaaaactcttattcaacaaagttctgacaagtgttacacatgtttctatttatagcctaggtcactatttgcgaatttcatttgcatttcatgtgaatctaagagaaatatcctaaggatatgccaaaggcatcttagcatattccaagaatatgctacacgcatattagcatattccctttagatgccactagaatggaacgtgtgactctagcacatgggaaaggcatatgccacaagaatatgccaaaggaacattccatgaatatgccaaaggaatat

SEQ ID NO: 81973 - DNA, 277 bp, Glycine max
  unsure (1)..(277): unsure at all n locations
catggaattccatgaaaccacattnttttgctgtatactnatcaaatacctttgagcccacatactattcccgcaagcagcatacatgtgaatcaaagaattctggataaacctatcagattcatgcccagtttttataatgtgggcatgcacagatacaccagtttcctggtttaaaaggcgcgctgatgccttcacaagaaatgggtatgtaagataatctggtgcaaccccaagtcgcagcatctttagaaaaatggatagggattggattggg

SEQ ID NO: 81974 - DNA, 313 bp, Glycine max
agcttctagttagttaggtgccagctgtcgaggacagctgttttactaacttacatactctgaaccgagtacaatactcatatcttctgactaaatatcaaattgttgttctattatacgagctgtgtctctgtatatctctctctcacgagaaatggttaagcaagagataattaatttgtctcattcacaatataactactgaaggaagagatgctttctcggttgtccccctcaaataattagagaatatatctcacgatttaattgcaaatcataatgcgaactgggtgacttatcttctgattacaat

SEQ ID NO: 81975 - DNA, 222 bp, Glycine max
tccaaaactaaatcaaggttccggaaaaagattaacgaacctttgttgttaacagccacagcttccaccatttgccacggagctaacgtatccaatgcgccttgaccaaaatggacacaacattgaacaatcacctctcatgagaatggatgccaagaacactacacttaagtggatggcgcgtgaataaaaaaaacgaagaagttaaccggggatattttt

SEQ ID NO: 81976 - DNA, 359 bp, Glycine max
  unsure (1)..(359): unsure at all n locations
agcttncatcaaggccccaatcacatctattctccacatggaaaacaaccatggtgcagccaaaacattcagaggcaagggcggagcgttgacattgtctgcaaacttctggcatttgtgacacttcctctcatggagacaataatcgctctccatggtgagccaatagtagcccgcccttaagatcttcctagccatggcgtgcccgttagcgtgagtaccanacaagtcctcatggacctcccccagcatgctctcagcttccttagtgttcatgcagtgtagcaaaaccatgtcatggtttctcttgtatagtatgcttccgctcaagaagaagccggccaccaatctccttaacg

SEQ ID NO: 81977 - DNA, 444 bp, Glycine max
  unsure (1)..(444): unsure at all n locations
taatgagcaagtgatttgtctcttttagggaaatatgctctccaacgatgggttctcaagctactacaaagagcatttggtatacgcgaagtaaaaaaaaaaaaagctaagtggaaagagataaagggaatacgaatgtgatgaaaatagaataatgtttgtaactacaagattataactgaaaataacgtaaattgatctgaatttgagttgaaagtctttgcaattgttccaattcgaatattgatagacaaaaagctcatatgtgtcgattgaaagccaccactgaaacaattacactccactacctatgcttgtcccttaattattgcgattatcttccaatcatcttattcaatcacatgacgaagacaaccttctgtcccttatgactcaacaacaaataattnctattgcgctctttaagtgggttacgctttgtgt

SEQ ID NO: 81978 - DNA, 395 bp, Glycine max
  unsure (1)..(395): unsure at all n locations
agcagctttctttgaagtagatgaactctgtctctcataatagcatgatcgttggctgacatattctcaattagcttagttgcctcttcaggggtcttcagctttatttttccccctgctgaagcatctagcgngtgcttggtttgtggtctcaccccatctataaacatattcaattgaattggcttacagaacccatgggttggagtccttctcaataaacctctaaacctctccaatgcttcactcaaggacttgttagggaacatatgaaataaagagattgcagctttcccttccgcagtctttgactctaggaaatatttcttcagaaactttttaacaacttcttcccaggttttcagaatgttaccttaaatgatagagccacctct

SEQ ID NO: 81979 - DNA, 446 bp, Glycine max
  unsure (1)..(446): unsure at all n locations
tactaagctacgcatgctcacatatcattgcagaaaggagaattctgttacgcatgaacttgagagaacataattaaagatactaagctgcctcctaagagtgcttctttaacgtcttgagtaggatgcgggatgatgattcgctaatcatgggcctagcacctgctcgtactagccccttagctttataataaaggaaatgacatcatgcactatatgtgaaacaacaccacaaaataccgatattacctttcacttacccttgtctcaattntggtgtgatattgatcatcactcaaaatgacatccttatctatccttcgattcgtaggacgacaagatgcatatgcatgcatgcttatgatttatatgtgtaagtgtaacagttaaacatatgttatcttgttcaattttactgaaacgcttacagaaatccattgattgag

SEQ ID NO: 81980 - DNA, 337 bp, Glycine max
  unsure (1)..(337): unsure at all n locations
agcttcttatccaaggcacattctctatggtgtatctcanagatcaagcctccatagaagctccacaagcaagcttccatcaaggagctctagtttcttggtcctccaccaaggaaccagtagtaacattgtcatcctatgaagctgagtatattgcagcctcagaagctgcatgccaagcagtgtggctagatgccccgatgaagaaattgcaactggaaaaatcatgtaaagtgaagttggtggtagacaataaatcttccattgatttagctaggcatccgacttctcatggaagaagtaaacacatagaaacaaagttccacttcctaagaat

SEQ ID NO: 81981 - DNA, 375 bp, Glycine max
cgaacgtgcgtagcccaccatctatgcatagtataatactggtaatgtgtctactatcattgctattatgcttttctccgtcattgaggtgccactcgagctgccatgtctcttcacctttgggcgtattcttttgaaagattcgtgccccccttttgcacatggtctgtagttgcatcctatctgaagacattatactgacactgcctaacgaaggcaaccactaggtccttccaagaatggactcgggaaggttccaagttagtgtaccatgtaacagctaccccagtaagactctcttggaaggaatgtataagcaatatctcatcttttgcgtatgcctacatcttctgatgatacatctttagatggctc

SEQ ID NO: 81982 - DNA, 271 bp, Glycine max
gtagaatgcatgatgcctatgcacgtggacatatcttggtatgtcagtcccagacccaacaaccatcaagtctatttttggatccatgagggacacaatgcggaaaaacaattaacatgactcaggaaagcatttatcataagctagaagggaagtacttaataaatcaactgccctaacgactcattcatagtggatgcatgcctctattcttccaccgacagtgtaggatgacaacctaatataacaaactcttgtacgcggggaagac

SEQ ID NO: 81983 - DNA, 66 bp, Glycine max
atggcccacaactgcttaaaagatacgcccggctgcctcatcgagactgtgtattattaactctgc

SEQ ID NO: 81984 - DNA, 214 bp, Glycine max
  unsure (1)..(214): unsure at all n locations
agctngaaggcgtgttacccaccaacttctcatattagaacactagtaacgcgtccactatcattggtatcatctccttctccgtcattaaggacgctactngagctggtagatccctccacctttatgtgtattctctgaaagaatcatgccttttcttgcacaagttctataggtgcattctatccggaggcatatcataatttgactaata

SEQ ID NO: 81985 - DNA, 340 bp, Glycine max
ctgcttgctggcgtgattgccttctttcttccatcttttttcttatagaccgcttattcttcatcatttcttcgaacattcctcatctccttttgtctcttattattctcagtgcagctgatcttcttcttcatgcgttcaatgtgtcttgtgctctgactattcaaaatttaagaattaggctctctatttttttagaatttcagaatttacgtctctggtctttcagaattacacaatcatgttgttcatgctttattgaagagatgggagctttgaataatatggcgtgggagtggaactctaaatggaggatgaacctattcaaccacgagattga

SEQ ID NO: 81986 - DNA, 454 bp, Glycine max
  unsure (1)..(454): unsure at all n locations
agcttataacctgaaccagccaagtgagtggtttttagtactctggaatcagatgcttaaacctgaagtaatggaggagtttgtggcttgaattgtggcagttttacctcttcagccttcaatgctgattgatttagctaggttctatagagctgaagttgccgccagaggggaccaatcccatttctctgtctggctcacagggggaggattgccagctgaatgggctaaatatttaggaagatcattcaggtgcttactgaagcgaacaagggatttgaagttgcggatgcagttggctacagtggcaactggatttggngatgtcattgatgcatgtacagaagaaatggataaggtcgctgacaatgcagcaccactagttctgaggaagggtcatggtggagctcacctcctttatgtganagntctactgagatcatcatatgatgat

SEQ ID NO: 81987 - DNA, 417 bp, Glycine max
  unsure (1)..(417): unsure at all n locations
ctaagctttcaccctacgcctgctaataatcgtaaaggcttgatattgtctgtcccatctctttctgaagccctgtgcatttagagaaaagatatatgaaaggaaatcatagtacttagactgaactcaaacatggaggaacaagttcgtgactgcctttaggataacttcaactcctgcctcacagaatcttagcaactccagagcataactacaagaccatgaaaactagtcatattagatatgcaaagcatataatntaaaacttttaatatctaacaggtataaaaaaattataaaggatgaatactatactaacggtttggcaatctcagtgatatcaaaacgaggatcaaggccctgtccaatgccatccaacactcgcaacacaatgttgacttgttaccttgcagtcac

SEQ ID NO: 81988 - DNA, 446 bp, Glycine max
  unsure (1)..(446): unsure at all n locations
aagtcacctgcggcatgcaagcttctaaacttttgacaagaatgaagctctgttaccacttgttagacaagtggcctcagatatcttaagaagggggggttgaattaagatgtcccaaactgtttcccctaattaaaaatctatttcactttntactcaagttatgaattcccttaatgacaatcttcttaaatattaattcaaatgaagcaacttgaatatgaatataaagcaatgataaataaaggagattaagggaagagaaaatgcaaactcagttntatactggttcagccacacccttgtgcctacgtccagtccccaagcaacccgcttgagagttccactatcttgtaaattccttttacaagttctaaacacacaaggacaatccttcctttgtgttagagatccttacaacaagagactacagtctcttaatcctt

SEQ ID NO: 81989 - DNA, 476 bp, Glycine max
  unsure (1)..(476): unsure at all n locations
nttgatgttaacaaagtatacattgtatgtattaacctctcatgcttaagctacaaattcatatatatatcactttgagatatagtcagaaaagcatgaatagaaaggctctggatgataagcaaagtatcagtcattggatgatattatgttagtgtccaaccctaggaagacaagtgccttagcacttacaatgtagctccatgtagagcttgtatgccttggatcttcttcgccaatggagtcctttgctacttgaagatcaatggcagtggaatggagaaggacgaaaggtgattggagatgccacttcaaggaaaagatgagtcaagaacaagctcatcgccataggaaaccatggataagagcttgaaggtaagagaagatgagtggatggagatagagagagaggaacaanactctgagagagagaagatggagaatgagttctgaacttgaagtctaattcttatatg

SEQ ID NO: 81990 - DNA, 392 bp, Glycine max
  unsure (1)..(392): unsure at all n locations
agcttgtgtttgtcttcttctaccctacactctttaatctctgctgtgtacttttaattgccgcttttacttttggttaagtttttgttgctgctctttactttcttaacttagtagtaaaagcctagttgaatctagtaacattaagaaggataaattttaattagtcaagacacattaataattaattcaaccccctcttcttaattattctgaggccacttgatccagcaagtagtatcagagcaggtatcttgagaaaaggttcacaacttcaagataaatggcctctntaaattctctgtttgcaaaagaaattaaggataggcanatctgaatcatggaagacatgatgagatcagccanatatgtttatgaaaaatatcatgaga

SEQ ID NO: 81991 - DNA, 450 bp, Glycine max
  unsure (1)..(450): unsure at all n locations
tcaacttacagngagtgattcaagcttagcgccactacctactctaattgcacttgcaatgacttcaaaacaaaacgatgttggcgcttagcgcatcctttcccgctaagctcatcttgaaagctcaacttacagaatgaatctggggcttagcataggatggcatgcttagcgcaactataataaattntcgcagagaggaagtggcgtttagcgcatcatccatgctaagcccactgcttaaggtgcaacttacagtgaagatgttgggcttagcacagagatgtgcgcttagctgaaccattcagtcaatcaatcacgggtctatgcgcttagcacgagcaagctcatcttagcatgtgaagagatagcgcttatcgcaaggtttgcacttagcggataagcaatctaaaaattttctcaggcatttctgctatctcttacacataa

SEQ ID NO: 81992 - DNA, 307 bp, Glycine max
  unsure (1)..(307): unsure at all n locations
gcttctccttccatgacttattctctagtggatgacgtcttctctaacctcttctnctttatctttcgctgcaattccatggctaanaatcaccattgaaggatcttattgaagctcanagatctagcctncatagaagcttcataagcaagcttccaacaagtggtatcagagcacaagagcttcaagtaggtgctccttanacctccactaattntcagctntactntctcctccattggtnngttcttcgttctctccatgtatctcctcacgtgtctggtgctgaatggtnngtaacataatt

SEQ ID NO: 81993 - DNA, 382 bp, Glycine max
ctaagcttaatggacgaagagaataccacatgagagaggcggaggatgttggcgtctcctctaacctcttctcctttatctttcgctgcaattccatggctaaaaatcaccattgaaggatcttattgaagctcaaagatctagcctccatagaagcttcataagcaagcttccaacaagtggtatcagagcacaagagcttcaagtaggtgcttcttaaacctccactaattttcagctttactttctcctccattgttgtttcttcgattctctccatgcatctactcacgtgtcttgtgctgaatgttgttaacataatcttttagaagttccaccgattaagcttgctatagaagctaaatatgatttctatggtcaa

SEQ ID NO: 81994 - DNA, 315 bp, Glycine max
  unsure (1)..(315): unsure at all n locations
cttagagacataattaatacaatttattattagaccaagttaaatagtcatgtatagttgcatcagagaactgttgctattcaatcctcaataaacttagtttatgttataataaaatttgtggctgaatgcaataaaatcttatctgcaagaagcttatagaggcaaacaagtttggtgtgtttgttgagagctagagagtggtttgacttttgaaagtgacaatggaaataaactaaaggcccgtttgttaccaattattttttccataanaagaataattnttcgtanaatgatcacttgattttatttttg

SEQ ID NO: 81995 - DNA, 415 bp, Glycine max
ggacactctgaaactaagctaatgttccctgcaataatcctagccttttcagaacactgcttaccctaaccctaaacactgcaagcctacactgccatcctcaaaactgtggcatcttcaaaactgcactgtgcatggcgtgaaggtgtctcgccaatgggagaggcgagaccctcttcacgtatctccgacgtggcatgtctcgccaatggtaccagcgacactgtccacgtcaggtgtcttgccattcatcccgacggcacccttacaggtcagcaacacattcgccattggggatggcggcacacgtatctcgccaactctgctagcggcatccatgataaaaacagacccccttttcaaatactttgaaaacaaaccttgattggtaaactagttttaagagtaaccccct

SEQ ID NO: 81996 - DNA, 415 bp, Glycine max
  unsure (1)..(415): unsure at all n locations
attcttgactccacttcattgaagcgcatatccacttgtaattccaaagtgtcaaacctttcaccaacaaaggtttgaagaccatcaaacctgtccaaaatctttgaaaggagagatgaatcttctccatcatgtccttcttcaccaacatgtcaagcacccttcttcacccaagagccatcatgctctttttgataaccaaaggatgctatgactgaagcgcctataaggaaggatctctctgatggaacatacggttcagaatcaagagggatgttgaagtgttgaacgaatagggtaacaagatgaggataacgcaatggagcattcaatcgcaatgccttatgcatgcgatatctaacaagatgtgcccaatcaatntgtaaaccctttatgaaaggcccacataacaatg

SEQ ID NO: 81997 - DNA, 373 bp, Glycine max
gcgcagacacacagagcaccatggttattttctctggcatgctcttacttgcgagccctgatgggtcttgcacaagggctcttgcgagagctacattttcttctcgaaactcggcacactctttccggatgtccgtagcaactaactggaaattttctttggcgagtcttgcttttctaactctgtatttagagctcggacttctccatacattctcagagcttctaaggtctcctcgttgacaattttcaacttggagagccaatctaaccctcgtgtatgaactttcagtcattcaagataaccaccgatgatgccattacggatgcccctacagtctttatctgttcttaacgggcattctcacgccttg

SEQ ID NO: 81998 - DNA, 493 bp, Glycine max
  unsure (1)..(493): unsure at all n locations
tcgacccgcgatcctctgagtcacctgcggcatcaagcttacacatggattcatattaatgttagatattatgttgtgatatcctttgccaagattaagaagctcgtctttgtaatgtggcattggcattgtatatttgaatcaaacatcccatattctattattacctttgntctattgatatttcaagcaccccttgtattacgaactatgtcatggcagaactcgagaagtcaggccaaaaatatcatgtagctctaagggagatgttatgtcttcttgattattagtttatattttcaaacatttgagattacatataaaaaaggcgaggcaatgcatgagggaattcccttagagtgaggtatggngagggtagataaaaattcttggactttattntcctnttgaatatcatggttnttttgttgccatatgaatgntcatnatatttcatccattatcacattctattaaggatagacatgtgagg

SEQ ID NO: 81999 - DNA, 438 bp, Glycine max
  unsure (1)..(438): unsure at all n locations
cgaccggaccaatatggaccactatctgttatgttccatataatcttatagcgagcttcgaatgctgacccgtcatagtggattgacgatagggtcaaagtttaaccatgacctacttccctattttgaaactaacatctgatcatttggtatcaactagacgtttcatcacttcctgagcctttaaaagctacttcttgaacttcgcaaaaatcgctttcctattggtcaacaattcatcaacaacatccacctgagaagttccggcaatatactcaggaaagttgataggctctttgcaaaatgtgatntcatatggagatgctatggacctcgagtgccaagaggtgttataagaccactgaacttatttaacgaatataccccatgatgatggcttcttatgaacaaaagcacgaaagtattgttcaatgacac

SEQ ID NO: 82000 - DNA, 423 bp, Glycine max
  unsure (1)..(423): unsure at all n locations
angctgcagctatagtattgagggagaatacacaatttttatcaattgtacctttcaagtaacgaagaattctttgtgcggctnttaaatgaggagaggtaggagcctccataaagcgacacacaactcccaccgcatatagaatatcgtgccttgtattggttagataccatanactccccacaagactcttgaagatcgtggagtctaccttctctccttcatcaaactntgataacttcaagccaccttccataggtgtgttcacgggattgcaatcaagcatattaaatatcttcaacacttcttttgtgtacctttcttgtgagacatagataccattctttggttgcttcacttccatttcccaagtatatgacatgagtcccatatctggcatatcanattcacgagacatggact

SEQ ID NO: 82001 - DNA, 362 bp, Glycine max
agagaagaacacactatggctcgatgagtgatatttatatttgaggtgacactatggctcgatgagtgtaggttcatgtaccaacttacactccatgtactaagttgtgcaggcaaaattcggctggcgtatgggaaagtgttttataggtgagacccagtacacttggatactttgacacacttgcgagggcttgatgtgaaagcaaagcttcatgatgaatcaacattgattcaaagatgctttgatgataacaatgatgacaacacaagaggatgaacataaagctcatgtgaattatagaacatctcttgagaatcaatatctagtgaagagttcaagaatcactatgaatgcttgat

SEQ ID NO: 82002 - DNA, 332 bp, Glycine max
  unsure (1)..(332): unsure at all n locations
aaggactactactagcttgtatattgaaggctacaaacactaattaaggtgttgagttgataagtttctcaataaatatttgtatgagaaanaagatagagagataaaataaattaagtttcacacaagaatatttttttttccaaatttacagtcacaattttttataattactgtaattcggatatctggatattcgataggatctgagatatttttataaggtttgatactttagaataattacaaaantaatttttaacatgaattagtcatatttaaaggttacttttctctctaaaaaaatatatttttcanaaaacatatattat

SEQ ID NO: 82003 - DNA, 300 bp, Glycine max
agtctctactatgttctataagtatgttatggatgcccgaaatgaaaataagaagccatagtggattagagattgtgtttggaatgatctactatcacattggaatgcacctgatcattatttcaagtgtgcaaaggccatataactaaatgggcatcttgaaaggatgggtgtatgaacacatatgcttctattatcttgcagaatcacatcattcgcttggtatgtacattaaaagtataatacatacatgtttgtacttgatgtatttaccgcttaatgtttatgttattacgtttg

SEQ ID NO: 82004 - DNA, 446 bp, Glycine max
  unsure (1)..(446): unsure at all n locations
agcttgaggaatctttgngaaccactagagatttcattntcgctactgaactacacacatgagcccacttagaggtaagagatgagtttattgcaattgaggttagaatgaacatgtgtagggatccttagaggatcaaattggggtttattnttggatgtttattctacctttatgattataatcacaagattgttatgtttgatggtccaatttatgtcctaatgcaaattggttggataaaatgagtgtttttggtggttttgtgttgttaagcctatgattntgatatgattatgtgaaattgttagaggggttctactccccatgttgtgagaagcatttatgtataattcttttgtgttttggacaagaattactagattagcgtgaaaatagattggtgaaacattcttatcatgtntcgtctcatagcttatacgtgt

SEQ ID NO: 82005 - DNA, 312 bp, Glycine max
  unsure (1)..(312): unsure at all n locations
tcttatccaagactcattgtagctgtngngaaccactttatttttattttcgctactgaactacacacatgagcccacttataggcaagagatgagcttattgctattgagggtacaatgaacatgtgtagggatccttagaggatcaaattggggtttatttttggatgcttattctacctttatgattataatcacaagattgttatgtttgaagcgccaatttatgtcctaacgcaaattggttgataaaattgagagcttttggcgtctttgcgttgccaaacctatgattctgatatgatcatgtga

SEQ ID NO: 82006 - DNA, 176 bp, Glycine max
  unsure (1)..(176): unsure at all n locations
cgaactctaaactatntgattatagaagctttgataccaagacatgaaccaattataccaaaagcttaagttggaagtgaaagcttactctatgattgatttatattacatctcaatctctaatagtagcaaataccaaaaaataaaatggtcgagaagtgtgggaacacgcctta

SEQ ID NO: 82007 - DNA, 375 bp, Glycine max
  unsure (1)..(375): unsure at all n locations
ggacactttaaactcaagcttgcatggattactgcaatcagctgctcggagatgcctattgccacatttgacacatgttttgggaatacatcttaactggagaaaggacacatacgatgagggtattgttttctgccaaatatataacgcacttaatgaggctgcggctaatttggattcttggtcaaaggcctatgaagatatcacattgtcctacctttntatgatgaataatcactgtcatttctgcaatttgaggggtactgtgcttggacatatgatgggagattcttggttaaaagcacacgagcaatattaggactattatgctgcactttatttgaggaacagctgtggaaagcttctatctattct

SEQ ID NO: 82008 - DNA, 401 bp, Glycine max
  unsure (1)..(401): unsure at all n locations
agcttcatctatgtttcttggttcaatctgagatacaaaagccatgttattgcataaaatcctcaatctagagcgaggaagtagatacttcctttgatatttcaccaattatattgtccaaggagatgtctctttgagttatccattcccttgggaggtctttaggaggtgtggcagtgatttccttgctttgttcgagatctttaacattggtttcatcttcaagtgtagcgtccttatcctaaaaacctgcatcttcatcttccaaagaattttcttgaacaatagagttagtttcatcacacacaacatgcatagattcttccacacacaatgttctcctactaaacactntatatgctttgctttgcaatgaataaccaaaacaataacctcatcca

SEQ ID NO: 82009 - DNA, 240 bp, Glycine max
acaactgcgagtttaaaagcttagagcttcatttatgactggacctgttcttggaaaattgggaacaccattcgccctaagacttcttcttttctaagcagcccccgcccgttttctttttcttctcctgagctctctcagctctatcagccatatgggtgaactctttcatgttattctagggatgtgcttcttacccctttcttttcttcactgcatttctggtggaaaacacattga

SEQ ID NO: 82010 - DNA, 388 bp, Glycine max
  unsure (1)..(388): unsure at all n locations
gatccttaagcaccgcggctgcagcttccagttggaagcaatttaattgttacaatagtctttaaggcgttggaccttgaaacgatgttttaaactttgaaaagcgaagagaattgttaaggcattggaccttgaaatgatcttttaaatttgaaaagaggatagattcattaaggcgttggaccttgaaacgatatcaagtgactntaatgaagagaaattcagttatatgttgatttcatctcggtttgattcattaactntcaatctctttaaaatgatgatctacgacattaatgattggttgaaactcactctacaagaagaaaagtgatcattgatagtagaagaatgagatgaagatacacaaagcaacaaagaggaccct

SEQ ID NO: 82011 - DNA, 473 bp, Glycine max
ggacacttgaaactaagcgtggaggtcaagagaagacttaaatggcgctggttgagtactgttatgaagaagtcaatattctcattggatgaagagaagaacttcacgccatgagatgtaatcaacagctaagatgacgagacggatgcagacattaagatatgcacaatgagacatgacatgaagaacaacattgatacaacacacttagaatgcaatttcatcaatagtatgagttcgatttggacattgtatcaagagttccaaaaatgcaattgagttgttcttggtggctatggaaatattgaagaaagctctttaactctcatgaacaagtcataggttgatacagcctagatcatggacagatataagcttcaagttgccaacgttattatgtctggacaacatgatatatgtgcaataattcgtagagcgcttgagctacagaagtgcatttgagatcatctcag

SEQ ID NO: 82012 - DNA, 380 bp, Glycine max
  unsure (1)..(380): unsure at all n locations
taccctgatgaggatgttttatatgttcttaagactttactgattcatttgcttccaaagtttcatggccttgcaggtgaagacccgcacaaacatttgaaagaatttcacattgtctgctccaccatgaaacccccagatgtccaagaggatcacatatttctgaaggcttttcctcattcattagagggagtggcaaaggactggctgtattaccttgctccaaggtccatcacgagctgggatgaccttaagagagtattcttagaaaanaatttccctgcttccaggaccacagccatcaggaaggatatctcatgtattagacaactcagtggagagagcctgtatgagtactgggagagatttatgaaaactat

SEQ ID NO: 82013 - DNA, 451 bp, Glycine max
gaacttgaaactaagctaggtcgacatcgttcgcgtgtacgatatccactcgcattgttagatgtatatgagaccttcaatcctatatcgcaacgtggcggacaaaaatgggcaggtaactagaatggccattattgtcaatgcggaacgtattctgcgcttcactatgcatgttcacacattattgcaacttgcggttacgtgagcatgaactactaccaatatatagatgttgtttacaccaatgaacacatcttataagcatactccgcacaatggtggcctcttgggaatgaagcggtcatacctccttctgatgatgcatggacactcatccctgacccaactacaattcgagcgataggtcggcccaaatcaacaaggataatgaatgagatggatagagtctaaccatctgaccaccgacaaacatgtagtagatgtggagctg

SEQ ID NO: 82014 - DNA, 424 bp, Glycine max
  unsure (1)..(424): unsure at all n locations
atctctaagtcacctgaggcatgcaagcttgagatgaggaagtgtagaagggtgaaacttcctgcttttattcgttgaccacaaagtggtacctggagatatgtcgcggnggtcaggagaccttgnggacgtcaggtggggtgctattgcccacaaccaagcttgaccaatcccgacccaacccgagcatagtcagtcagtgagaacctgtgatgtacctaagcaggcgagctcctgacagtcaacagataaaaggaataaagaccacaaagcnaggaggcttgtgtggtggctggccagatgtgaactntgattgatatatgggatatggcctctggtaatcaattaccaagggtgggtaatcgattacaagggcttaaaatgaagacgggagactaggatggtctctggtaatcgactacca

SEQ ID NO: 82015 - DNA, 375 bp, Glycine max
  unsure (1)..(375): unsure at all n locations
tcatggtgaatcaagattcattcgaagatgttttgatgatatctatgttgattacaaaagatgatgacaaaggtgatgactaaaaattcaaagatcaatcagagaacatctcaactgattgagatagaatctagaacaattcaagagttcaagatagaatcaagaagaattcacaactcaagaggaaagttaagagtcaagaatctagattcaaggttcaagatctcaagaatcaagatcaagattcaagactcaagattcaagaatcaagagaagggttagtcaattcaagaatcaagagaagggttagtcaattcaagaatcaagagaaggcttaatcaagatgagtatgaaaagctttntgtctctggtttg

SEQ ID NO: 82016 - DNA, 427 bp, Glycine max
  unsure (1)..(427): unsure at all n locations
agtcacctgaggcatcgcaagctntgaaatctcggataaaccanatcatgtttataaattgctaaaggctctttatggtttgaaacaagcccttagggcttggtatgaacgcttaagtaattttcttctagaaaaagaattctctagaggtaaagtggataccacattgttcataaagataaagcataatgatattttgttggttcaaatatatgttgatgatataatttttggatccactaatgattcattgtgcaaggagttttcccttgatatgaaaagtgaatttgaaatgtcaatgatgggagaactaaagtactttctgggattacaaatcaagcaaactcaagaaggtatattcatcaatcaagcccagtactgcaaggaatngatcaaaagattggggatggaaagtgcanaacacatg

SEQ ID NO: 82017 - DNA, 198 bp, Glycine max
  unsure (1)..(198): unsure at all n locations
ctaagcgtggcattcatatcctgatgatgatgttccatatgttctctagactggactaatacattcgctgcccaagtttcatgatcttgcaggcgaagatcctcatacgcatcttaaggagttccatattgactgttccaacatgaaatgccgngatgtccaagaagatcatatctctctaaaggcttttcctcattc

SEQ ID NO: 82018 - DNA, 422 bp, Glycine max
  unsure (1)..(422): unsure at all n locations
aaatataaactaaaaattaataatcaaatagtattgataaaaaaaaatgtgcatatattaagtacaaatccttcaaaacaaagtaagatcaaatagtaattttagcagaaaagaaaaagaagcagacaaaaaaggataagcaactaaagttagaagctaaacgtaagaacaaaaccaaaaccattgaaatttaaggtgtgtgtgagagaactgaaccgaaggaattgtgtcctatgaagaacaaatcanagtgaaaatgcatagaagagtgtcattctttttntaactaagaaatatatacttcacggcatgggttntgcacaaccatatcataatcatcccttgaaaccattgagaaatcaagatccatntgtcatttcataagatcaaagctaanattctggtaaaaccacatatcgagt

SEQ ID NO: 82019 - DNA, 423 bp, Glycine max
aaccggttgtgagacaacatacactgtgagtatgaacctacgcataaacattcattctctttatgttgaaaactctctatgtatttctaaataactcctccaaataacttgattatcttatgagaaataacttagggctaacattgtatattccgtttgccacacaattaatagagctagtctttatgcatacaaacaacacatttgcttgatttatataagggctaataagattgtatattcgtctgctagacgattaaaagctagtcattgcacatacagacaacaaattcgctagatttatatagacccgacgacggctcgttaacacaaataatatccgggtttaatcagattgatgtggagtcttgcttgaaacgaagaagaggtgatgacaaaatacttactactatgagaaaataa

SEQ ID NO: 82020 - DNA, 293 bp, Glycine max
  unsure (1)..(293): unsure at all n locations
gctccttcttccatgcttattccttaatggatggcgccgcctcttacctcttctcctttgtattccgctgcatctccatggtggaaaatcaccattaaaggacctcattgaagctcanagatccagcctccatagaagctccacaagcaagcttccatcaagtggtaatcagagcataagagcttcaagtaggtgctccttaaacctccattaattnttttgctttaccttctcttccattggtggttcttcattntttctccatgtatctcctcacatgtcttgtgataaat

SEQ ID NO: 82021 - DNA, 464 bp, Glycine max
  unsure (1)..(464): unsure at all n locations
ngaccaatcccgacccaactccggcatagtcagtcagtgagaacctgtgacgtacctaaacaggcgagctgctagcagtcaacctgataaagaacaaagaccacatagcaaggaggcttgtgtggtggctggccaactatggattctgagtgatatctggaatatggcctctgataatcgattaccaagggtgtgtaatcgattacaaggcatacaaatgaagacaggaagttaagacggtctctagtaatcgattaccaatggtgtgtaatcgattaccaggcctaaaaatgggatcaggaagtagagatggcttctggtaatcnattaccaaggggtgtaatcgattaccatgcttagaaatggatacagtatgttgaggaggcctctagtaatcaattaccaatactgtgtaatcgattacacagagtaacaggccacttgtaatcgataccagtcatgtg

SEQ ID NO: 82022 - DNA, 438 bp, Glycine max
  unsure (1)..(438): unsure at all n locations
agcttgtgatattattactatatatgtgtgtgttttcgtttatctctacctgttnaaaaatgtgataattcactcctcatgtngttgttatgtttggatcatgtgatgatcttaaaccttgtgtttgtgagagcaaatggctaggtgaattactttaagaaaccttgtgatggaggactccgagacacaatattntgataggatgtaacattggaacaagagttnttattttatttgcatgacgtatcaaacatgtcattttactttattcgataaacttgaacagtcttgttttaagtcataaatatttctaagaaattntatnntggtacagtgaagcgaatgtgagcattacccacgtcgactgatttacgaatntatttgaataaaatgatttaattagaattccgcatttatatatgtgttttttttatttat

SEQ ID NO: 82023 - DNA, 380 bp, Glycine max
  unsure (1)..(380): unsure at all n locations
ctgtaccacaagtttggacataccttattgaaattctacattatgtgagttcttgattaccctatataattggcatcatctaatttctgtcttttcaattatataatgataatctcgaacgctttgtcagatgtttaattctttgtcacttaattatgtgagatctaatctatatcatgtagagtcctcttcaaatactctttgctctgtctgtaaagggacttggaagctttgctccattgatgttgttctgctgctctactttgcattntcttttgctaagggagatcaattatccttcatattcctcatctccttgtacttttctttccatcatgatgaattgtgttacccctctgaaatctgatatgaagaggaat

SEQ ID NO: 82024 - DNA, 357 bp, Glycine max
  unsure (1)..(357): unsure at all n locations
tctagcttctcaaggaatgtgtctcanagaagcttctcaaggaagctttcttcagaaagcttctcaaggaagctacctagtctataaatagaagcatgtgtaacacttgttgtaactntgatgaatgagagtcttgtgagacacaactcanagttcaacttctctccctttntcttccttcaatttcgtgttcccccctctctctttctctccctctntcttttcctccattgaagcatcctctccaagcttcttatccaaggctcatcttggtggtgaagctccttcttccatggattattccctagtggatggcgccgctcttacctcttctcttttgcttccgctgatctcatg

SEQ ID NO: 82025 - DNA, 408 bp, Glycine max
tagagtatgcccgagtcattcatccctatgagatgttgttgaagtattggcgatcagaattgccattccttggattatagggttgaaccaagctcatgcttttacaaaaaggttcataaagtcaagttgaaatatggaagtaaccgtcttgcaaaattggggcaaaagatgaatcgagttacatcactgcttcattttctgccaaaacacatttaggactgttgatgtccttgttacttccagtttcaccttgaccaagatgtcatgaaccatgtggaaaaatctaaattgattcaaccccatgtcctgcgtaaaaattcgcaatacttcaactgtacatcattcgcatacatccatgtttttcattaggtgcattgctcatcgcattctttcctttgcaaaataaat

SEQ ID NO: 82026 - DNA, 148 bp, Glycine max
gccatgacacacggtgcgcataacgatgactgagtaacgcctatgcgaaatctggcgaagtacgcgcctatgtatacactcactcgtgcaaatatatgggaatgttatgctggagcctaaagacggattcactgcatgctagtgagac

SEQ ID NO: 82027 - DNA, 251 bp, Glycine max
cgtgcatagagtgatgaagttccggcactaaattcctaacttggtggaagccttgttgcctcctagaaattcctactcctagtctacggaaacgaagagtgttaatgaatctatggtctctatattgccactattgaagccttggtatgtgaatccatatatgtctgtaaggaatagcacgaccatatcgaagatatgaggggctgatataggcaggaatagtgagcgcaagatacgcagaggtgactaga

SEQ ID NO: 82028 - DNA, 326 bp, Glycine max
  unsure (1)..(326): unsure at all n locations
gggacattactcttaaagcaaacatggcatataaccttctcccataaatacaaacatcaatgtaaatntagagcaagcttatgcgcatgtttccttacgaacgttcactcgcggaagatatcctattaaccgaaaaaatgcacccatatacaatcaaggcagctttggtacctagattatatacacgtacttccaaggtgtatttgttacttacatcacacacatctncttggctaaattcacatacatgcatactccaagcatttggggaccaaaaattgacatgtgcacatttggtattttatacctatacatacacgaactta

SEQ ID NO: 82029 - DNA, 465 bp, Glycine max
cgcaagagatattaatagcacctactaaattaacattggattctttttataaatattttacttagagcatcaaatttctccgtcaacttataaacatcactcacctcatacttacatagagccactcttcttgagtagatttcctttttgctcttccattggctatagtttgaagccacaacctcaagaattccaacaatgacttcctttagtgggttgatcataaaagtttcactagttgtggagtctaaaatcattttactttagtgaattggatttcccaccactacttaaatccatgatgcaatcatagttctaacaagactttataccactcccatgcttcatatagggaattcaccacccctctggtggaaattggtgatttgcatcctcacccaattagtcttggaaggcgggtagaatctacgaaagctggctcacataatgtcaaagtagtaatta

SEQ ID NO: 82030 - DNA, 327 bp, Glycine max
  unsure (1)..(327): unsure at all n locations
ctcgacccggatcttaagtcaccgcggctgcagctgcccatttgtttanggtttatgattatgttgtgatgtctgtgtggtgaaattgctgatggacaaactgatatagatgaacggtagagttaacctatggttcaacagtgagaatgtatntatatgagtggaaaagtgtgatgctttgacgttttgaaaagctaaatcttgatttagtggtcattggggatttatgcgagtttatcctactttaaatgtcattaggacttattggaagcttggctgatcaatgacgaaatgagtgccaagtgaaacaaacccttttaggtaatt

SEQ ID NO: 82031 - DNA, 370 bp, Glycine max
  unsure (1)..(370): unsure at all n locations
cgcagttggagaggttccatcaaccgccctaattccttgatgctggtggtatctaagctnttaaccttgacttggtaaaacctcttgccggtttgatttgtccccatgcttactaaagtgagacaaaaagctggtgcaaatcaaaactccgatatctcatgggtggaatggatgaatgcatgaaggaatgcatataacacagatgcaatctaggaatgcggcggtccggggaatttatccccttcctagatacgacgtctaggggtagcaaaatgccccaacgtacgtttttaagaaggcgacacggacccttcgttggtttgtttacagaagggatcaagacagaacccatatgcgatgcctatgcaaa

SEQ ID NO: 82032 - DNA, 414 bp, Glycine max
cgagatgacgaagtgtggaagggtgagacttactactattattcgttgaccacagagtggtacctgaagatatgtcgcggaggtcaagagaccttgcggacgtcaggtggggtgctattgcccacaaccaagcttgaccaatcccgacccaacccgggcatagtcagtcagtgagaacctgtgatgtacctaaacatgcgagctcctggcagtcaacagataaaaggaacagagaccacaaagctaggaggcttgtgtggtggatggccagctgtgaactttgagtgttatatgggatatggcctctgctaatcgggtaccaagggtgggtaatcgattacaaggcttataagtgaagacaagaagctaagatggcctctggtaatcgagtaccaatgcgtgtaatcgattacc

SEQ ID NO: 82033 - DNA, 421 bp, Glycine max
  unsure (1)..(421): unsure at all n locations
agctttaactgtaattgcaacgtttcaattatttnttaaatggtgtaatcgattacaatatattggtaatagattaccagcgtatctgaacgttgaaattcaaattcaattgtgaagagtcacatcttttcataaaatgctttgtgtaatcgattatatggttttggtaatcgattaccagtgacaagttttgaataaaaatcaagagatgtaactcttccaatggttttcaggtttttctcaaggttataactcttccaatggtttttcttgaccagacatgaagagtctataaaagcaagaccttgacttgcatttcaataacttttttcatatattcttttaaaacctttgaatctctttgaacatcttcttgaacttcttcttcttcttcttttgccanaagcttttctgattttct

SEQ ID NO: 82034 - DNA, 318 bp, Glycine max
  unsure (1)..(318): unsure at all n locations
tactaagcgtatcatggcgttcttgaatntacatatggaacaacctgaatcaagcattcatggcttggattgcatcacatttatcactaccgctgccgattattatgaactaacatgggcaatgggacaccctttaccccaaaagatttatctaaataatatgtgtggaaaatgatataaaatgcacatgtgaaaataacagattttcaaaatattttccacaatatttcaaacaaaaacataattaaataggtttttctattaaaaaaacaatttatagaacctgatttgagatttgggacaatgtgaaaaagggag

SEQ ID NO: 82035 - DNA, 223 bp, Glycine max
  unsure (1)..(223): unsure at all n locations
catgtcctggtgtattcaaatgctaaaaactaggaccactcanaggttnttgtttcctcattatntatcagtataaaaaaattgttganagtgtatatataattcatgctcannattaattttcatgttcaatttacactctagtagacaaaaattaatggtgatattntcaatattggaggaccaatagtacaatgaanatnttaagtgtcctatatctttt

SEQ ID NO: 82036 - DNA, 415 bp, Glycine max
actatgaaactcaagctggaggattgatggtgacccggcgttgagaggaacgacgtatatggctacgtgggagtacgtgagctcagttggaggtgggcatcaagggatggtgggctatacgtgatttgtggatgttgagaatcatattgcaccatctgccgaccgtcacctagtaccacatgtgatgggtaccccataatcctacaagcttgtaatgaggaagtgtggaagggtgagacttccttcttttattgtagaccacagagtggtacctggagatatgtcgcgggggtcatgagaccttggggacgtcaagtggggtgttattgcccaaaaccaagcttgagcaatcccgacgcatcccgcgcatacacagtccgagagatactgtgatgtacctaagcacgcaagctcc

SEQ ID NO: 82037 - DNA, 341 bp, Glycine max
  unsure (1)..(341): unsure at all n locations
tctaagtcacctgcggcatcaagctntaagggcagaggaccttanattatctttatgtgtgtatatggngcccactcagagtgagaacgcgtagccctctaatggtgagggcgtgcagccctttgaagttcaagacgtgtcgccttttgaaggcgagggagtgtagtcctatgatggcgaggatgtgcaatcctctaaaggtgagggcatgtccccctttgaaaatgggggacatgtagtcctctgatggcgaggacgtgtagtcctctaaaggcgaggacgttagtcctctgaaggtgaggacgtgtagtcctcttgaggtgaggacgtgtagtcctctg

SEQ ID NO: 82038 - DNA, 418 bp, Glycine max
gtctgcccgtattcgctatagataggggaagaagtgaagattataatggttcagcccctgggcacttctagctctttcgaatatgctgaggaatattatttccgtgaagaaagtccaagccgaggcgcttccgctacgttttcgtgagtaattacgcgaagatactcgaacgatcttcaagatccatcgagtcggggtctggttcctcagacttcaacgggtcagtacctccaaccaagcttatcaattcattatatgtacccgcgagggcccacatagggtttcatgtagtttcattctcgctctcaatgactatgcgtacccccttttgacatgcttaagccatttattaaaatcatttctcgcctatattaacaataaagataagttccccgcgccttttaatggaagattcgtt

SEQ ID NO: 82039 - DNA, 245 bp, Glycine max
  unsure (1)..(245): unsure at all n locations
atccttaagtcacctgcggctgcagctttgctgttagagagttcttacagtttatgtccaagttcgagagagtacgacagattatgttgtgtgaagatctgagagcttgaacaggaaaccgctctgacagcttgagatgagtttatgagtgattgagatgacttagaggatgaagaaacatccccactacgttgatgtctgcgatctctcaacgatctctnnncttttttgtgaaggaatctttc

SEQ ID NO: 82040 - DNA, 323 bp, Glycine max
  unsure (1)..(323): unsure at all n locations
ngaggctgctgacttgctccacggagctgcatagaagggctttagactgtatggtggtcagcaaaagagcactaaaccgtatactcttgcaccaggtgttgatctatgatctaaggccaactggggtaccaggttaaccaaggcatctagtttaccttcaacttgttagtatcgctgatgaagaatgccataccctaattcgtccggcgacctgtgctagaagacaagccaactttctttggtccttgtgaggtgcttggctcccatgagtaggctatctgtgaaattccangacatgccggaaaacctaaaaatatggatgc

SEQ ID NO: 82041 - DNA, 460 bp, Glycine max
  unsure (1)..(460): unsure at all n locations
atccttagagcacctgaggctgcaagctgtgtattaaaatctttttatttgttcttcttaagntaagataagtaactttaacattgttttcagctaagatntatatacttatgttctttttaaatgcaaaatcactagatggatgaccatgatgacattgacatcttggcctctagcacaacaggagaaatgttaccgcctcgctttgtagggcgtaaaaatcaatctattgcatgggatcactttgataaattgtcaaaccccaatcctttatccctatctaaatggttactgtggtgctttgatcaaatatagttagtggaacaactatcatgcacactcatttagacacatgctagaaganatcagacatcacgagcaagatgcaaaaatcaaattcttcttcaacaaccattacaccctttcttggtgcatttcacacactatcttggcatgagat

SEQ ID NO: 82042 - DNA, 373 bp, Glycine max
  unsure (1)..(373): unsure at all n locations
agcttagacttgcatctgggggctttgctgcttccaatggactataatacctggatcaggtttggttcccctcgacatgtataaggagactcatgctttttgcatgacccagtaaggaagcgtgtactacaagcaacgacagctgattagcactaataacaacgggataactgatcttcccgcctctacgcatggtataaaagcgtaaaattctggtatgtaaatttcaatttacattcttcacacaatgcaagatcctcattngacctcattgacttgaacgtggagtgattgcaggtttcacaccaccatcgtaatccccattgaanaacaccttcacatggtgctntgatctctttctcgaaccaaacat

SEQ ID NO: 82043 - DNA, 354 bp, Glycine max
  unsure (1)..(354): unsure at all n locations
ccgataattatcacactacatgggcaatgtgacaccctataccccaaaagatttatctaaatcataggcgtggaacacgatataaaatgcacatgtgataataacgaatttgcgtactattggccacaatatttcaaagaataaaatcgttaaatgagtgtttttattagagaaacattctttagagcctggttcgagtcatgcgacaatgtaataaagggagtacagatggaattgatgncgttagattctctgctaaaatatagccaaggacaagctttttgtaagaaagattattgagatttggaattcatgtctaaagcgataatacccattgctatggactatctaccg

SEQ ID NO: 82044 - DNA, 383 bp, Glycine max
  unsure (1)..(383): unsure at all n locations
agctngaacgcaagttaggctnatttgatattaatcgaacacgaagcatgcacagattaatattaacgaatgtgagttaattggtgaagggaaaaactgccacgaagccacattataaacagaacctcgaagagagttgagctttgtcctcagaaggaaacaacaccagaaaacttagccttccatagattcaataaaagcagaaaacatanatcaaactaaaagcagaaacataaatgaagaacaaacgtaaatgaagcagaaaagtaaatgacagcagaagaaggaacaagaaacgaaattgcaataagaagtagagaaataaaaattgcattacgtgaacagtagcaatagaacagaaaacgtaaaccctaaaccctatg

SEQ ID NO: 82045 - DNA, 310 bp, Glycine max
ccttcacacatgcaatccacactcataaaaatctagttgatgaggaatggaggggctacattcacttacggcctttgttgctggaccatgcccctacttatattttctaaggagcctctacatacatcggcaatgtataagcaaagcttcatggtgaataaaaagtgattgaaaaatgttttgatgataaccatgaagataacaaaaggtgatgacgaaaagctcaaaggtcaatcaagggatgagatcaagatgttaaagaagaaatcaagaacaaattcgagactcaagaggaagagttgaagaacac

SEQ ID NO: 82046 - DNA, 246 bp, Glycine max
  unsure (1)..(246): unsure at all n locations
tgaacaactaggtgtgtcctactatgacttgagaaacaaaggtgatcaaataacaagcaaagatttaaaaggtactaggttgcctcctagtagcgcttctttaacgtcttgagtcggacgcgtgatgacttgtcggtcatggacctagtacctttgctttcctttggctntggacttggtcgcctgctggacgaccacgggtcgtaggcaacgctccagcctttgtatatgagccgaggggctctg

SEQ ID NO: 82047 - DNA, 477 bp, Glycine max
tattacgcgacactatataaactcaagcttggcgagtatggtggacccgtcatatgtggaactacgtggtgatcgggtgatggtgcgaatcaactctcccacatgcacaaatcagaacatgaacccaccatcaccagttgcccaccttcaactgagctcacgtacccccacgtagcccttatcttagttcctctcaggaccgggtgcccatcaaccccttcaagatttcacaacatcctagcaattcaatatgcgaacatcatgaactatccaaaaccaagaaaacagggcagaggcagaaagctctgcccaaaacacattccaataccacaactttgcctactcaaataccccaggaacattctcttcgttgcgattcgtaacccgtggatcgactcgaacttttatagagggccctagacttattatacattttgacgtgggatctgtagaaacgccagaaccaatatgcactac

SEQ ID NO: 82048 - DNA, 245 bp, Glycine max
  unsure (1)..(245): unsure at all n locations
ctctctcaccttannaaaattgagttttttaaatcgtaattaattntgtggtcatatgagaagctggttnttgtggagatcggatgtgaccaatttatctttgtgtgcttctttgngtgtttggaaattgtggtatgtatgtggtcattatgtgggttatgagttattgtcatgaaagttcaagggttttgagtgtggcggtggcggtggcgatgcactctctagtgatatggcaacttctatag

SEQ ID NO: 82049 - DNA, 420 bp, Glycine max
tctatggtccgtgacaatgatgaaacgatgacccaacaaatactgcctccacttcttaaccgccgtcgagacggataacaattcccttacataagtggatgcactcaagagtttcggtggaaaaggcttgctaaagaaagctagggggtgtccttgctgagataagacagctctcatccccacaccggacgcgtcagtctcgacggtgaatggctgctcaaaatccggcaaggataacacaggagccaacgacacagcttgttttagtttctcgaatgcatcctgtgctgcgtccgtccacaggaaatgagcttttatggtgatatgaaccaaaggagcagcgatggtggcataacctctgatgaagcgcctataaaagcctgcgagccccaaaaagcttctaactgctttaatcgagtg

SEQ ID NO: 82050 - DNA, 235 bp, Glycine max
  unsure (1)..(235): unsure at all n locations
agctngagggatgtaacccaccatcttctcatattataatgccagtaatgtggctactatcattggtataatctctctctccatcattggnggcactacttgagttggtagatccctccacctttaggcgtattctttgaaagattcatgctccctcttaaacatgttcagtagttgcattctatccagagccatatcagaattgtactgatacttcctaatgaaggcaaccatt

SEQ ID NO: 82051 - DNA, 421 bp, Glycine max
gggagaggatgcttcaatggaggaaaatatagagggagagatagagagaggggggagcatgaaattgaaggaagaaaaagggagagaagctgaactttgagttctgtctcacaagactctcattcatcaaagttacaacaagtgttacacatgcttctatttatagactatgtagcttccttgagaagttttcttgagaaaacttccttgagaagcttctttgagaaaacttccttgagaagctagagcttatctacacacacccatctaaaaactaagctcacctccttgagaagcttccttgagaagctagagcttatctacacacccctataatagctaagctcacctactacaaagactactcaaaatgccctaaaatacagggctagaaccctatactactagaatggccaaatac

SEQ ID NO: 82052 - DNA, 373 bp, Glycine max
  unsure (1)..(373): unsure at all n locations
tggggatacaaaattacatcagtgggacaactgcattgatggttgcacgttngatattacttgatgccaaatattatagaaacacaattgggtaagatatcaccttctataaatcacattgaagagaccagttaaatagttacaaaaacatatggaaaaaatatactgaagaaaagattaacagccaatcaggaacctccttgccatagaaaccagaacagataanataagaagaagatgataaacaacgatttatacttcacattagctcaggcatttcatcaaataggttgtaggcacgtatgcatgttgttaaatacttanatcccaaagtcctacaaccagcccacacaggcatcactacattcacatg

SEQ ID NO: 82053 - DNA, 377 bp, Glycine max
acaaactaacctatgatgacaactagactaacttcttgtagagaacttatcgtcaatgctctgagaacttggcttctatctatatgaatatgaccctgcattatcctttctcgtgcttaatttcatcgttcatagcttgatcacacatcagcttggtaagatataagggttgcattgtcacatcagtatatactaatagacttgtgcaaatgtatctaaataacttcatcactagggataagttgattgcattcaagcagctatacatcattattaccaatacacattaactattttatctctcattagcacttgatagacattatatataatctaggctcttatccattagggatctaggatacagtatataagtc

SEQ ID NO: 82054 - DNA, 417 bp, Glycine max
  unsure (1)..(417): unsure at all n locations
atctctaagtcacctgaggcatgcaagcttcccatgaatcaacanaatgaatagatattctacatctttattggcatccctgcctccacaaagcagaagaagtccatcagagcgtgcacttgcagttgcatacctagtcaaagattaaatggtaaaatgaaaatcgcaccatgacaagttgcaccaaatgatagccaactaatatatttaaggtaagtctacacttcacagaatcgattgtttacatcttctaatgtaagatatttaaagtattctcttgtgcttacaaaaaaaaaaaagcaataatgtggtaactttgttccacaaacagtaatattaatgctaatcaaaatggccaaataagatgagattcaattcaaaccctactcaagctgcagtctaactcatagtttcgta

SEQ ID NO: 82055 - DNA, 463 bp, Glycine max
tatggaagttatgactcgtgattaattaagggtggccttttgttgtgtgttataattgggactgtaagacttgaattgtgatcaatatgacgttgaaaacacatagaatgtgctgtccgtctaggtatcttcaatcgggaggagttaggattcttggatgatcatttacaatagttgttgcaatttaagttaatatgtacatgttcgccttcctgaggaggatatgatcttgagttgaaataatataaaataatttttaggttgtacgtactatcattttttactactaacttgctgttagaataacaacatctattacattaatgacaattctgcagagtaaacttcattcaaaactaatcttgcattatgcccatccaaatacacttcagttgttgatgagggattaaggattcttattggaaaacgcacggattttgattggcctgcttcacgctatgat

SEQ ID NO: 82056 - DNA, 325 bp, Glycine max
  unsure (1)..(325): unsure at all n locations
catgcaagctatgctgcaatattacaatagaccgttttaacctcagccgcanaatttatcacagcanagcaagtatgacctctccagcaatagatacaaccctggatggaggaatcaccctaaccttagatggtccagccctcagcaacaacgacagcagcctgctccttccttccaaaaagctggtggcccaagcagaccatacattcctccaccaatccaacaacagcaacaaccccagaaacagccaacagttgaggcccctccacaaccttccctcgaagaacttgtgaggcanatgactatgcaaaacatgcatgttcag

SEQ ID NO: 82057 - DNA, 408 bp, Glycine max
gcgaggtattatggtgcacccgtcatatgtggcactaagttgcgattgtgtcgtttgcacaaatcaactctcccacttctgtgaatgcatgtcttcatgatatctatgatgtcaaagaagaatcaaactaagctgctacacatgataaagcatttgtttcaagaataatttatgagtgcttcaccaagcgaagccatgtttcaagaatcattaaagaccaagccttgccttaaaacaaagcgttttcaagacattcaaggctctagaatcgattaccacaagtgtatcgaaaccagaagacaaggttagataatctgcgataatgtttgatttaatttcacttgagtcgatacctatgtcgcatcataccacatcataattgaaaccaattccaagcattaccttcaa

SEQ ID NO: 82058 - DNA, 267 bp, Glycine max
  unsure (1)..(267): unsure at all n locations
aaatcttcgtgtacaaatctgtctcattttgaaatatcagtaaaattacaactatgctttttaaaaatgaagtcaaagcctgatattgaagacaattctttggagaactgtaattgaaatcgctaattcatagacgatttttgaaaatcatctttgaagctcaagtggtatggctcttatactcgtgcnctntctttgcatctcacttcgtctcaatagcttgcaccctctcagagtctctttatgccctctctcactcacgtctct

SEQ ID NO: 82059 - DNA, 421 bp, Glycine max
ttggcaaacgagctctatacatagttagtcgttaatgcgtctaagaatcacaatgctccctaggacctacatgctttttctttgaatgcttgacttcatttgtcgctttgctaatcttctccgcagcttttcaactacagtggcatattctcaacaatgagcctcttcttttgcaaccatcttcttcaatacttatatttgtgcatcatacacacgaattctatcctcatgagaggcaattatctcttcagctgtgataagcttctgtttcagctccttcacttgtgatatacataacgactaacctctgaagaacattgcattgtttaactgtctggctcaattgtcatcctagatccaaaattcacacctactatcttcctgcaaattataccacatatacagatcacacacgacgaac

SEQ ID NO: 82060 - DNA, 312 bp, Glycine max
agctttatacaggtgcagctcattctcactctttataaccatcataggaggaactcaatatgtctacacaacctaccccccactgtgtggcatgaccttcaaccaagggcaatgtcaaacataactcttcacaaccattatggaagaagcttcatataacataaggaagccccaccaaatgggtgataagacctttaaccatattgaaatcaaatctaaaatgacttcacgtcactttactctttacaagaccaccaacgtcctacctctacatcatcaaggtcttgttttgatgttgtctacaacatgacc

SEQ ID NO: 82061 - DNA, 371 bp, Glycine max
  unsure (1)..(371): unsure at all n locations
atacctcttagctctgttctcatgataataatatgtaccacaagcatacaaagcatgataatatgctggacagagctcttcatatttttgcttggtgtaaattaatgaatagctggtgcgttcggttaagtgtttattaactagattcgaaattattcgattctatatatgagattgaatcttatcacaaatgacattaaaataaagtgtcatgtttataaatattcattttaaaggaagcttatattacaacctaatatgactctttaacttagaatgaatagtttatttagagaataaaatatggagttatagtcatcgattaanagtgtataatttcaaatacttcatatattatagagcgacttgaa

SEQ ID NO: 82062 - DNA, 277 bp, Glycine max
  unsure (1)..(277): unsure at all n locations
aggatgcagctgaatcggacctagtgtgaaaagtattttcatntatattcctaagagcttccgtcttcattatcgagtgtctctatatgtgatgcgtcataatctaacatccgtgtgaaaagatatgaccacttgaatttctcaagagcttcctgttgtcaatttcgagcctctcgacatattatgcgcctgaatctgacatccgggtgaaaagttatgggcattttcatttgtcaagagtttccgacgtttaatgtcgagcgtatcaatatattat

SEQ ID NO: 82063 - DNA, 349 bp, Glycine max
ctggagagattcatatggtcataactgttcgcactgatcttttattatacgcatcgcatatagagacgcttgatattgatcagcggaagctatggagaaatttaaatggtcataacttttaactcggatgtctgattcatgcgattcacatatagatacgcttgaaaatctacgacggtggttgttgataaattcaataggtcataacttttcacactaacgtccgattcatgcttataatatatcgagatgctcagaattgaacaacggaagctctgcggaaattcaaatgatcataacttttcacacggatgtccaactcaggcttatagtatatagagacgctcct

SEQ ID NO: 82064 - DNA, 446 bp, Glycine max
  unsure (1)..(446): unsure at all n locations
agcttgtagaatggctagacatgttacatgtctttgtttggtttggttcaaggataaaagggatgccccacattatttccatgacacaaatgcaaaaatgatgatttggaaactttatgcaaaactggtcatgcatgcacctatgtggacactcaagtgtcaaatttttatggtcatgtgatgctagggctcacgattcattttctctattttagtcaacccaacgtttccaaaatatgttcttttatcaattngtgcattcatccgagtccatcttgggcgtctgggaaaatcttcacagcattcacccttcaggtgtatacacatatttgcaaaaactaagtatgatcagtgaatttttttcaaagaggagttggaggtatttcttttcaaagcatgttggttttcagcttgacactcatntcctttttctcccttttttgttt

SEQ ID NO: 82065 - DNA, 293 bp, Glycine max
tcggaagaaagtgatgaggtacaagccctaaaggccgagcttgatagagcccgtgtagtcgaagagaagttcaagtccataaccatcaaagtatgaaaagagtatgatgaactattggacgtcaatatggccacagctgaagccttgcaatgagaaaccaacaaggcctgaaaggaagaacacgaccaaaacaaagttttgaggggctttatatggcagcaatagtgaactcaagctccgaagaggtgaaaggaatcatcacgggtcaaaggcatgatcttgaaggacgagct

SEQ ID NO: 82066 - DNA, 391 bp, Glycine max
cgaaaagacgtaccgtggaacggagagacttcctactcttattcgctgaccatagagtggtacctggagatatgtcacagcggtcaggagaccttggtgacgacaggtggagtgctattgcccaaaaccaagcttgaccaatcccgacccaacccgggcatagtcagtcaatgagaacctgtgatgtacctaaacaggcgagctcctggcagtctaccgataaaagaacaaagaccacaaagcaagaaggcttgtgtggtggctggccagctgagaatcttgagtgatatatgggatatggcctctggtaatcgattaccaagggtgggtaatcgattacaaggcttaaaaacgagatcatgaagctaagatggcttctggtaatcgatta

SEQ ID NO: 82067 - DNA, 346 bp, Glycine max
  unsure (1)..(346): unsure at all n locations
agctntataagcactggtctcttttacgaatgttatgtggtcgcgatatacgaagatgatgttccgagtacattagatttggtacgactatgccctcctgatttccagctgggatattggcgagtggaggaacgccctgtcatttacgcaacgagcataatgtaaacctttacggttttaaaagctctatagttgggcctatgctttagagtctttccttttgctaaggctttgtgtctctggttttgaattataatacaaggatctttcttatctgtccttacggtctcccattctcattatttgatgtcacttcttttctgaacgacgaaccgatgacaatccc

SEQ ID NO: 82068 - DNA, 387 bp, Glycine max
  unsure (1)..(387): unsure at all n locations
acactatataatactaagcgtgtcagtgataattatatcgcgttgagactatcagtacaacgatataccataataacaaggtatgattgtcaaacatcagccacttggaggatatttctagtgcaatcaaatatggtcaaaagtcacaacaacaataatctttctaccgaaacatccagattaaacaataggataatgcttaataattttaagataaaagcttctcataaactacatacttaagtcaagagtggatcccgtcatgcagtatgtatgaaattacaattaacactaggtggatntattaaacatcatcatacattctgtttaaaagccacctaagtactttctttcagatattgagtcttcaaagttggcaatcctact

SEQ ID NO: 82069 - DNA, 235 bp, Glycine max
  unsure (1)..(235): unsure at all n locations
cacacacacattntttcctagtcgatcactcacataaatntccattctccccctttggtttggaatttatgattcacttanaattaagtttattactcatgtgagttcttgatttaatccctatttctctccccctttggcatcaacaaaaagccaaagtgcgtaacaagtatgaaacatacaaatacaactaatcattcacacaacaatcatggagaaatataaactaatcatg

SEQ ID NO: 82070 - DNA, 382 bp, Glycine max
agtgacagatgctaagattctgaacaatgggtgaaacatgtggtgcatggtaatccagtatcaaatgaacaaatatgaagaacactgcgatctgacaattgctcttagtcaaggaaaaaatatgtgaatgatctctaggttacgttacatccctgtcagtagatctatgagcaccacatcattcggagcaagttatttttctcactggtttgcgtgtacccccgccacatacacacacaaacacctttgaattgtggaacctatgaatgcatgtggtaaagaaaaggtggcacaaaaaagtagacctgaacatgctcagtccaaatatataaagaggacattgctggatggggaaaggaaccactgtgactgtactgcatga

SEQ ID NO: 82071 - DNA, 378 bp, Glycine max
  unsure (1)..(378): unsure at all n locations
agtcacctgaggcatgcaagcttccatcaagtggtatcagagcacaagagctttaagtatgtgctccttannacttccattaattttntgctttaccttctcttccattggtgnttcttcattttttctccatgtatctcctcacatgtcttgtgctaaatgttgttaacatgattctttagagtttccaccaattaaacttgctatagaagctagatttgattttctatggttcaaatttcttgttcttgttcttaaaccatgaattgtgttgagtttaggttcctttgagttttgtcttgttattttttgtggcttaaacctaaaccatataattcttacaaaaatattaaagtataagaaaacctcaaaaatcta

SEQ ID NO: 82072 - DNA, 451 bp, Glycine max
cgagcaatttctcttcttgatgatgatggttactagacttactctatggctctagctgccccaagtgagattcgaatacgagaattccatgagagtcatggtttgaagtcatcatctgagtggagtgcatcatacaatgattactgcagtactcatagattagaagccttttgatcatgctctgaacaatattcaacaagctcaacaacatttgcatgccggattctgtcaatattatctatcaattcaataaattcatcatccttctggagtgcagaggctctcttgcccaacttgtctgcataacagataccatcttcaataactaaagctacaaaataactatgtattctttaaaatcaaatttctgatgtgatcaagatcacgtaataacaacattagaagaaacttgcgactaggaataaacactttaattttctcaatagtcaca

SEQ ID NO: 82073 - DNA, 409 bp, Glycine max
  unsure (1)..(409): unsure at all n locations
agcttagcgcgaagaaagcccacagngaagcctataggtgctcttagcatgattagccgngctaagcgtgaagtcggtgtgaaaagtaagctacctagagcttatataagaataaggaagtagaaaggataaacacaccgagtctcaaagctatccaaagcctgagcctatccctaaggggaaaccctccttctttagtcattcctccttctctttctattattcatccagccccttcttccatccacattagcccttgaagtgaaagcctctcatggccatgataggctaaacctccattggtgggagctnggcangccaacacccttgtaatgtaactgtcttattatctattgaatgcanattctatttctatttccttttttctacttttcatctctaatggatg

SEQ ID NO: 82074 - DNA, 373 bp, Glycine max
ttcggcacttatctagctgcagaagcaaactgaattttggggtatgctcacttcaaggcctcaaaatctcctacccagagaaacaagtatcgcagcgggatgcaaattttggagtcaaatagttgggactggaaaaatgataagaggtctgagtttcaagaggagaatgaacatgttgatgaagaacccatcataggaaccagatcactttcagacatctatcataggtgtaacgttgttgtaatggagcctgatggatatgaagaagctacagctgatcagaaatggagaaatgcaatgaaagatgagcttataatgatcgaaaaaaataaaacatgggagctggtggacagacctaaccacaagaaagcga

SEQ ID NO: 82075 - DNA, 321 bp, Glycine max
agcttgaatgccaacggagcctcagatttcaatgtttataactttcactcggatggccgagtcgcgggcataactcatctagatgctcgaaattgaacatcggaagctctcgagaaattcgaatggtcataacttttcacacggatgtccgaatataggacataatatatcgagacactcgaaattccacaacggaagtactcgagaaatttcaatggtcataacatttcacacggatgtccgaatttgggacataatatatcgagacgctagaaattgcgctacagatgcactcgagaaattctaaatatcataactttt

SEQ ID NO: 82076 - DNA, 357 bp, Glycine max
  unsure (1)..(357): unsure at all n locations
agctngcattgaaagatattctgtatataggactcaactgtttatctagcaacactattttttttttgtacatttaaacctcaaacattggcaattcaacttgatatgttgtattttttatttggacaatgttgaagaaaagatagaacaaacaacctaatagaaccttgtatcagaaatgggtcattgctctgttatatattgntggttntcctttctctaaattgctttctatatttattttgtccatcaattagacttgtttatatagcgctcatttcctgtagctaaaatgcgtattgatccacgtgtgtgacttatgtattaattaagaaatggtaattgaaatggaggact

SEQ ID NO: 82077 - DNA, 446 bp, Glycine max
taagctctgccatctatggaaagaaaggaacgcaatgtgcgccatatgggtgttctatcctacattcgcaggtgaaaagaatgcttgtgttatacttgtctccctgttacaaagaaatgagaagttctttttgataatgatagcgcagctgtctgataccttttcagccaggcatacaaagtttggaacagacagagaaagagtagaggtgtatctgttattgcatgaaaggctccgaacaccatattttagctctattaacgacgctaaattaagagttgttctattgcgatacccaactatttgcagactgcactaaagctcatattggattctttgatttacatgagttatctaattcatgcttgacgactaatattttcacacacacacgcacacatatatatatctcaagaaactaagttcacagctttgagctgtctatc

SEQ ID NO: 82078 - DNA, 372 bp, Glycine max
  unsure (1)..(372): unsure at all n locations
agctntagcagtacttgcaggtattattatctttatcttgttgcctgatgctggnttgctattggtgataatcagtaatcaccaagtaattttatgatgcatcaaatgccttattggctntgcactcctgagcattaatcctaatggtgcctggtgtcatgtccaacaagagttcactcttatactgcaattgagccaaagttttgcactcattntcaaacaccatcttattggcagcttcttccttttcaaagttatgaagttnttcgtgtatttaacttcaaactattttgtttctgaggcctgtttatttcaaaatgccctgtttcccttgaattacgaatngaaaactattaattccattaattaaag

SEQ ID NO: 82079 - DNA, 356 bp, Glycine max
ctactgtggtagattttcttttttccttgaagtgttcttgatttgtgaatctcactgtaaattttgagcttaatatgtggcatgcattgcgaatcacatttgtaatctttatcagctaaggtgagttgtttatgtatgttgtagggcctttcaaggagaaacgaagcaacgagcttaaattctaatagctcaccatcacatataattgtcacatttgtcattgagtctttgtgtaaggtactgtcaaattttgtaattctacctaacattaccagcagttgtgtatggaaaatgttgttttcctaagattcaagccaggtttatattctctctggtagttctattgctaaacatga

SEQ ID NO: 82080 - DNA, 362 bp, Glycine max
  unsure (1)..(362): unsure at all n locations
agcttcatgactaaatcaaatcaataaaatntcttatgaatctctggaaatatgtctaattcaagattgagagaaagtcgtgacgattatgtccttcaatctgcaaccacttttgacaaacaaactggtgtaattttaatgtttatttcaaaaagaatttttttagacttagttaaagaatattataaattatttataactctcaatttctttgtctcaggttttctttatattggtttaatgttcatttgacttattcaaattcttgcttaatggtttaacgttaaaatgatggtcaggtgcaattngatgactaacataattngttttcaaacattggagattttntaactaacaatatt

SEQ ID NO: 82081 - DNA, 392 bp, Glycine max
  unsure (1)..(392): unsure at all n locations
ctatggctatttggctctccattgatgtgttttggtgctttatttgatcattttgtgcaaaactcgggaagcagtttgcctctgaatccatgcttgatttcttgatgcaaggatctgaatgagaaggccttangcctatgttgttttctgaagcaatggggcatgccacattgttcccattctcttgcaatctgcgtgcgaacatgcgctcaccaagcgctcatggaagtgccgcaatgatatatgaatatgactattgctacattgtgacggtggtgatgctacatgcatgtatatgccgcgatcgaatgtcaaatagatgcccaacgcaatcctagcctaggacccacactttttagcttcagtgcagaagacatactcatgactaggta

SEQ ID NO: 82082 - DNA, 425 bp, Glycine max
  unsure (1)..(425): unsure at all n locations
agcttagagaggaagcttcaatgtgtganaagtttattagagagaaaggggcacacaactgaaggagaaaaagagggagagaagttgaactttgaagtgtgtctcacaagtttcacattcatcaaacttttgacaagtgttacacatgcttctatttatagcctaggtcactaactacatgaaagcttccttgagaagcttatttgagaagcttccttgagaagctagagtttagctacacacccctctaatagctaagctcatgtcattgagaagtttccttgagaaacttccttgagaagcttcttgagaagctagagctactcacataccctctaatagctaactactctatgcacaaacatgaaatgctactaacacaccctctgaagctaactacctcatgcaaatactgaatacaaaaa

SEQ ID NO: 82083 - DNA, 368 bp, Glycine max
  unsure (1)..(368): unsure at all n locations
taataaatctatatatggnttgaaacaagcttcccgtcagtggtaccttaagattcatgggatcatttcttcatttggttttgatgaaaaccctatggatcaatgcttatacacaagggcagcgggagtaaaatatgtttccttgttgtatatgtagatgatattgtacttgtagccaatgatcggcgtttgctacatgaagcgaaacaatttctctctcagaattgtgacatgaaggatatgggtgatgcatcttatgtcatcgacattaagattcggagagatagatctgcagggatttcgggtctatcataggaaaccataattaacaaaattctacagagatctcggatgaaagattgtacacc

SEQ ID NO: 82084 - DNA, 83 bp, Glycine max
  unsure (1)..(83): unsure at all n locations
cgtcttggtcaacatctcgccagcnagctacctaaccattttagtttgcaaattaaatatccttgtatgctgatattactaat

SEQ ID NO: 82085 - DNA, 406 bp, Glycine max
cgcttgtggagcttctattgaggttggatctttgagcttctatgatgtcctttaatggtgggtttccaccatggagatgcagcggaagacaaatgagaagaggtgagaggaggcgccatccactatggaataagccatggaagaaggagcttcaccaccaagatgagccttggataagaagcttggagaggaggcttcaatggaggaaaagaaagagggagagaaagagagaggggggagcacgaaattgaatgaagaaaatgggagagaagttgaactctgagttatgtctcacaagactctcattcatcaaagttacaacaagtgttacacatgcttctatgtattgactacgaagcttgcttgagaagctttcttgagaaaccttgcttgagaagcttctttg

SEQ ID NO: 82086 - DNA, 215 bp, Glycine max
atcctctatgagtgacctcgcggcatgcaagctttgagggtgcgtagcccatcttatttttatattatagtatcgatgatgcggctaccataacagatatcgacttcctttccatcattgtgggcaccactaggggcggcagatccctccaccttttaggcgtgtattttgaaagatccgcacccctttctgcaaatgttctatagttgcatcct

SEQ ID NO: 82087 - DNA, 333 bp, Glycine max
  unsure (1)..(333): unsure at all n locations
tatgcgcatattcncctacagacgtgctctagctcaagactttctattaaccgacaaaaatgcacccatatacaatcaaagcagcttccttacctatattatttacacgtacttgcaaagcggatttggtacttacattacacacctccttggctgaaatcacatacatgcatactcagagcattttgggggaccaaaaattgtacatgtgcacatctcggtgtttctaatacctatacatacaccaacttcgtgatgaatcctgactatctacacaataaggtgctacattttatgctcttttcagtttttgctacctaaagccgcatgcat

SEQ ID NO: 82088 - DNA, 356 bp, Glycine max
  unsure (1)..(356): unsure at all n locations
agctngctgggggtgctttgatggaggctggatctttgagcttcaatgaggtcctttaatggtgattttccaccatggagatgcagcgaaagacaaaggagaataggtgaaaggaggtgccatccactangtaataagccatggaagaaggtgcttcaccaccatgatgagccttggaaaagaagcttggaaggatgcttcaatggagaaaaagaaagagggagagaaagtgagaggggggagcacgaaattgaaggaataaaagagggagagaagtggaacttttgagtatgtctcacaagactctcattcatcannagtacaataaatggtacacatgcttctatttatagact

SEQ ID NO: 82089 - DNA, 427 bp, Glycine max
  unsure (1)..(427): unsure at all n locations
ggcctgtccgatgcagtagtaatgatggcccgagttatgttgtggaacggctacgaacccggaatgggtttagggaaagacaacggcggcatgactaacctgataaatgccaaaggaaatcgtgggaagtatggcttaggctataaacccactcaggcggatataaagagaagcatcgtgggaagaaagagcggtggtcaaagctcgcggttgaggcaagaaagtgaaggaagcccgccctgccacataagtagaagctttataagcgcgggtctgggagacgaaggtcaagtggtcgcgatatacgaagatgatgttccgagtacattggcattggtacgaccatgccctcctgatttccagctggngaaatggcgagtggaggaacgccccggcatttacgcaacgagcataatgtanaccttta

SEQ ID NO: 82090 - DNA, 312 bp, Glycine max
  unsure (1)..(312): unsure at all n locations
agctgggttggaatatatangctcatttctagtttattcttatccataaaagggtttctccaaaaagatataaaagtggtttctcttatcatatatcatcacagtacactgaatctactccacacttatttcaagaaaaaggaaataaaataatgctcctagatatctagatagtcaaataaacaaaaactccccattaatattagccgttaggagagaattaacattcattgcacgcatcacatgtttacatacgaagaaattgtttatggataatattttgaatttgggtttctaataatgggaatattt

SEQ ID NO: 82091 - DNA, 345 bp, Glycine max
tccatctgtatactgcaaccataataagaaaaaagctctctgtgtttcctcccgcggatgtagccttgatcaaggtgaaccacgcaattctgtgtgagtactttctctctttccttctctttcaccttgctgcaaaactctatgagtatgacataactttctggcgcttctgttgctgttgatcttgcttggtcttcatcacttccataacaaactggtatcaagagctcaagttgcgatcaacggaattcaatattctcgtctgaatataaagatcaagctcggggaggcttgtttctggttctttcgctgcttcttggtgatcaagaacactcaagaaatcat

SEQ ID NO: 82092 - DNA, 289 bp, Glycine max
  unsure (1)..(289): unsure at all n locations
atctttatactgatcaacacttgcacagnggccaaagatgcatgggagatcctganaatcactcatgaaggaacctccaaagtgaagatttccagattgcaactcttggctacaaaattcgaaaatctgaagatgaaggaggaagagtgtattcatgacttccacatgaacattcttgaaattgccaatgcttgcactgtcttgngagagaggataacagatgaaaagctggtgagaaagatcctcagatccttgcctaagagattngacatgaaagtcactgcaatag

SEQ ID NO: 82093 - DNA, 341 bp, Glycine max
ctaagcttaagatacagatggcctcagcaaattccttatatgcagaatggaattctatcaatagacctccaatcttcaatggagagggttaccactactggaaaacccgaatgcaaattgttattgccgcaagagatctaaatatttgggaagccatataaataccgccttatataccctccacagtagaaagagtttcaatagatgggagttcatcaagtgaaagcataactataaaaaaacctagacatagatggtctgaagaggatagaaatcgagtacaatacaacttgaaagccaaagacataataacatgatccctgagaatggatgaatatttc

SEQ ID NO: 82094 - DNA, 403 bp, Glycine max
  unsure (1)..(403): unsure at all n locations
agctngaaccctactcaatcntgaaaataaatttatgtaattttaatattgaataattcagcatttgtgcagtcagtgatgtatcaacaggaactatttcctggacaataatttcgtttgttttatctttgttaggtatgttaaatgctaatagcttcctttagcacaatatcagcgcttgaatttataatcttccaatgctaaagttttcagttntaccaaacatgctgtaaataacatggtttagtaaatattgaggcagtgaatagaacaccttatcacatggtttagtaaatattgatgtgaatttggaggcattcaggttataatagtttcccggtgattcttattgtgtatgaataattaatgggtgctctggctcataattctccctctttttata

SEQ ID NO: 82095 - DNA, 384 bp, Glycine max
ctatgaaactaagcttcggatggctccattcaccttggatccgaaggaatcttgtgtagtgttccaaagactccttctccaatctgagatgccttggagagcatagactcaagattgctgatccaatcaagtgaggactgggaatcaaacaggataagctttactgcggctggacttcccgatcttgaagagctcgagcacatgctttacaaagcattatccaaaaatgttagccttctacttacagagacattaagtaggctaacagcaatcactcctaatacaatgacaaacgatgcacatattgctacaatatctgatacactaatgaacctgctgcgatggactgggccagactcagatgattctgttggttgcctttga

SEQ ID NO: 82096 - DNA, 266 bp, Glycine max
cacttctttcttcaattgctgaaaatgttcggaaaactaccgagcttcaacgttcgacgttcgaagattccaaggttcaccgtcttcgacgtcttattcgtcttatcgtcttcgacttaacgggaagacctcaaccagctttcgtatttatgcccgggggccacatggttcggattttatctcgtcatactttatccctttgctctagcattatagcatctgctactaaataaaattcccacgtgatgtatcgtaagatcacgcgt

SEQ ID NO: 82097 - DNA, 350 bp, Glycine max
  unsure (1)..(350): unsure at all n locations
tctaagacaacatgatgaacagagggcggacagagnaaaataacaaaagccatgcttccttttagaataagcaaacacaacgggaagtttncttcctatgcacaaccttcttcgatggcaacataatgggctgcaccgtcagtgatgtaagctatattggagcttgtaggcctaagatcttcttcatcaatggaggcatttacttcttggaagatgaatgacgtcatactggataatggaatagagatagagaacgccacttgaaggagatgatgattctagaataagctcaccaccataggaggccatggataagagcttgtaggaagaacgagatgaatgaagggaga

SEQ ID NO: 82098 - DNA, 241 bp, Glycine max
  unsure (1)..(241): unsure at all n locations
aaggaggttatgtttctaggtgagctggaggaaatcttagaagtaactcaacctgcagagnttcaacgttgtatggtaccattgttccaccaaataagtcgttgtttgagcagctcacatttccaggttggataacttttactagttttcagaaggttctactttctcttggtatcatatatacaatttctcaactgctcaagaaagaacgaaaagaaagtttagcccgtgggggcttatt

SEQ ID NO: 82099 - DNA, 344 bp, Glycine max
  unsure (1)..(344): unsure at all n locations
agcttacccatttagttgtagggttattatgattatgcttgttatgtttatgtgctgaaattgcttatggaaaactgttagagatgaagggtagagttaacctanggttagaaagtgagaatatggtgttatgagtggaaaaagagtgaggttttgagagttggaaggccaaatctggatttagtggtatttggaggttaaagtgagttaatcctagcttgaaatgtcatttaggacttatgagaaagcttgtgctgtgcaagagagaaaaacaaatgaccaaagtgaacaaaaagccatttctagggtaaaattgggtgttgaggagtcaaattttgattcgg

SEQ ID NO: 82100 - DNA, 400 bp, Glycine max
acccggtgttgacaggaacgaggatatggtctacgtgggagcacgtgagctcatccggatgtgggcaacaggggatggtgggcttatgctcgcattgtggatgtggaaaacttgttgtgcaccatctgccgaccgccacctagtaccacatgtgatgggtacctcataatcctacaagcttgagatgaggaagtgttgaacggtgaactttctgcttttattcgttgaccacagagtgtgacctggagatatgtcatgggggtcaggagagcttggggacctcaggtggtgtgctattgcccaaaaccaagcttgaccaatcccgacccaacccgggcatagtctcgtagtgagaacctgtgatgtacctaaacaggcgagctcctgacagtcaacagat

SEQ ID NO: 82101 - DNA, 453 bp, Glycine max
  unsure (1)..(453): unsure at all n locations
agctnttcacttttaagaaaagtttgtctggtgttcataggtaaaataatctatntattataggtttaattattcatttagtccatgcaatttttaaacttattctnttgagttcctataattaataagtgaattnttttgtttctaaagtttaataaatgaatntttcaatccctgaaatttatattttaatttttaaaatgttcataccattaaatttttttaacatcataagttaaagaattntagcggcaaagacctcttaagaattaaaatataaatttcagggactaaaaaatttacttattaactatatggattaaaagatataagtttgagaactatangaattaaatggataaataacattcatttatataatggatatgggtaaagatngtatatgggactagtatatgattaaaatagaatatatanataaagatatattca

SEQ ID NO: 82102 - DNA, 353 bp, Glycine max
  unsure (1)..(353): unsure at all n locations
gtgtctctaacacaaatcagaagacttgttggtttgattgcacaatgactaacactctatcgtcttactgacagataaacaaattcaacacttaagtttttctctcaagaagaacaaagtgttttgagggcttttctaaaatttacaagaatttacacagagagctttttatgcaaggaatgaaataatgagtgcttcaaatcatgtcatgtctttaaagcttatagtatttataggcctccttcaatcaaatatttgttctttttcctctctttaagcttaggtctgaagaaaatgatcattgngacattaaatgcacgtactngttcatgttgagaaaccactcttcatca

SEQ ID NO: 82103 - DNA, 387 bp, Glycine max
  unsure (1)..(387): unsure at all n locations
agcttctcctctgggtcgagtggtctataacttcgtcctgatcgtgggaacaggatcaacccttatgagatcacctttgagcgcannaccattcaatttccagaatatatcgcgggttcatctaaactagatgtntgtgacgacatgtcaaaggacagagaggaaaccttccagggcattcgaaagaaactcctaaaggctcaaaccgctatgaaacattntgtggatgctaaacagcgcgaggaacctatcnacaggagaatgggtatctcatactaaacctaccgcaacttggcaaggtcaatgcggctgaaatgctaacattatgccttcaatggacgcatgctgtactatgctacactctgcaagtcgattacctgcttcatg

SEQ ID NO: 82104 - DNA, 457 bp, Glycine max
  unsure (1)..(457): unsure at all n locations
cgctcttggccaatcaacactgccaggagtctcattgttaagagtgccanagactatgtcaagttattgaagtacggtgactcgctttaccggcgcacgtgtcttaaggttgctgctcttgggcgcatgtgcactgtgatcaagagggttggcccgagcttggcttatttagaacaggtcacacagcacatggctaggcttccctctattgatccacatacgaggactgttgtgatctgtggatatcctaatgttggctagagctcgttcattaacaagattaccagagctgatgtggatgtgcagccctatgcttccactaccaaggctctctctgtgggtcatactgattataaatacctgaggtaccaagtaattgatacgccagggattttggacaggccttttgaagatcgtgacattattgagatgtgcacgatcactgctcgtacacatt

SEQ ID NO: 82105 - DNA, 385 bp, Glycine max
  unsure (1)..(385): unsure at all n locations
agcttgannacattaagcaatattcttgctacttatgctatntaatagggttaaaacagagattgaaatagcagcctaccaagcatcacaagcaaatctcatcaagagatccttcgagacccanagcaatgaggcctaatccaaatacaatgacattttcgaaaacataaaacctaataattaatttaattatttcaaatcagaatatataattattcanattaccttaattactatatttaaaataatcttaattaccttaattaaaacatatactaataatgactataattatttcaaattagaaaatatacttattctaattactttaattactatatgtaaaataatcttaattaccttaattaaaacatatactaataat

SEQ ID NO: 82106 - DNA, 430 bp, Glycine max
cggtgttatcaccttctcccaccacctccttatccgtgatggagaggaacctaattttgtccaaagcctagaatgtgcacattattcgccattaacaaatcgttcaacaattaaaaaaaaatttaaatgcaaggattttccagatgtaaacaaaaatactttcttttaaaaaaaaaaaaaaaagcgcttacatcagaagcattggaaatcaactctctgaggaagatatccttgctactgtacagagaattgatgatgatatccataagccgcgacacttccgcttggaactcaaatatctccacgttgctctgaagagatttcttcgagatcgactacacctctctgtcaatcgcaacaacacgcacacgtttatacacacataaactagagaacacgagaattatggaaatattacaacgaacacctc

SEQ ID NO: 82107 - DNA, 320 bp, Glycine max
  unsure (1)..(320): unsure at all n locations
agcttctagagagtgctagactactctagagttctccaggacgttctagacaatactacactnttctagagagctctagaattatctagaacctctccaattaaggagggatcccaacaaatctccctctcccgacttaattgaggggtagtatcaaacctgcaccttggataccttatgtcaatgtgctttggtcatcatgcaaggattgtttctgatcttgcatggctcttctccactccaccaattcataggtggtattctcatgcaaggattccatctcttcttgcatggctattttctactccaccaattcatag

SEQ ID NO: 82108 - DNA, 421 bp, Glycine max
  unsure (1)..(421): unsure at all n locations
agngtctggtgagattcagcttggctttgctacttttctgactctgacaccgtcatagcatgtcttatgcttgctttgaaaaaccctagagaaaaagactttgaaacgttatccttttatgaaacgcatgttattttcgtagcctacactgaaccccggacacattggcgtggtcggaatttccaaatgatgttccttcgtaaaacccgaaatggtctgagctctttcatgtatggatgtgcgtgtttgacctagagcactgatgttagctttattttttgattaaatccatattaacactcctatgttctggtatggcaaaggcttgcgtggaatcgacgagcaagagacaaaaggaatcttcttgtgactcgacgaggaacccgcggtggagctcacgataggtgaagagatgttatta

SEQ ID NO: 82109 - DNA, 411 bp, Glycine max
  unsure (1)..(411): unsure at all n locations
agcttcagatcattgtatatcattatctacgtttccaaatcccatcacattaacgaattctcaanggttgagaggtgacaatgagagatggttaatcttggggtaatctctcatctcaatcaagtctataacattgatttacacttgctcaaactggttttaaggagaaaaccccacccattcaaaatttgacctctcaacacccaatttaccctagaaatggctctcctctttcatatttgtcactcatttttatcatatgctctgcccaagcttttctacaagtactaattgacattttaaactatgacaacccactttatactgcatttccactaaccccaatgtggtttttaaaacctcaaatctacacttttcactacatactacattctacattaccctaagtac

SEQ ID NO: 82110 - DNA, 402 bp, Glycine max
  unsure (1)..(402): unsure at all n locations
agcttccttaagaagattcctatagaagctagttcttagctacacatacctctctaatagctaagctcacctccttgagatgagaagctagaacttagctacacaccccctataatagctaagctcacccacatgacanaaaatatgaaaatacaaaanaaagtccttactacaaagactactcanaatgcctcgaaatacaaggctaanaccctatactactagaatgaccaaaatacaaggcccagacgaaggaaaaacctattctaatatttacaaagataagcgggctcatacttagcccatgggctcgaaatctaccataaggctcatgagaaccctagggccttcccttggatctctagcccaatctacttggagtcttctacccaatgcncttac

SEQ ID NO: 82111 - DNA, 263 bp, Glycine max
  unsure (1)..(263): unsure at all n locations
cccgataaggagacattcctatgggtgctttgtangcagtccgatgtgcccagagagcattataagcctggacaccaatcttttctgcttggctgcataatcttctctaaaattctcttgatttcccggatagaaaattctgcctgtccattggtctgggggagggatggagcggataccctgagtaccaccccgtactttttaagcaaggcatgcatatgcctgttgcaaaaatggagtccttgatcacttactactggttt

SEQ ID NO: 82112 - DNA, 316 bp, Glycine max
  unsure (1)..(316): unsure at all n locations
ctccctctntctantgcaaattcttcttgatatcatcaaaatcttcatgaattacgattctccccttttttgatgatgacaaccacctgtaggttaggagcaacaacaaagaanatatctatatgcatatagtttactcccccttggtntacaatgattgcttatatgagacaattgaagatttcatattnttcatatataaaaagtagtctcataaaacaatagataattcttcttactaatttatctnttatctttctctgcccctttgtaacatcaaanacaatcatgaatagagaggagaaagatgtaccac

SEQ ID NO: 82113 - DNA, 446 bp, Glycine max
  unsure (1)..(446): unsure at all n locations
tcaagatgaagatgggctcagcaaattccttatttccagaatggaattctatcaatagacctacaatctttaatggagagggttaccactactagaaaacccgaatgcaaatttttattgaggcaatacatctaaatatttgggaagccatagaaatagggccttatatacccaccacagcagaaagagttacaatagatggtagttcatcaagtgaaagcataactatagaaaaacctatagatagatggtctgaagaggatataaaacgagtacaatacaacttaaaagccaaaaacataataacatctgccctgtgaatggatgaatatttcacggtttcaaatcgtaagagtgctaaggaaatgtgggacactcttcgattaacacatgaaggaactacagatgttaaaagatctatgatanatgcgctcactcatgagtat

SEQ ID NO: 82114 - DNA, 239 bp, Glycine max
  unsure (1)..(239): unsure at all n locations
ccacaagatcaagcccatttctcttcagcaatgatctatattatctgcaatattggaacatctgacagagaagcacacattncacactgagaaactagagaatatagaatgaatagtatacataattctggaagcatataattatgtaggacttcgacattacatggttagatgtagtgcgtgtgtgaaatgaaaacagtagactaacggatttactcttgaactgtaactgatgcatc

SEQ ID NO: 82115 - DNA, 456 bp, Glycine max
  unsure (1)..(456): unsure at all n locations
ngaagtgagaaagtgtggaagagtcagtcttgctacttgtattcgttgaccacagagtggcacctggagatatatcgcgggggtcacgagaccttgtggacgtcaggtggggtgctattgcccaaaaccaagcttgaccaatcccgacccaacccgggcatagtcagtcagtgagaacctgtgatgtacctaaataggcgagctcctggcagtcaatcgataaaagaacaaagaccacaaagcacggaggcttgtgtggtggctggccagctatgaatcttgagtgatatttggaatatggcctctggtaatcgattatcaagggtgggcaatngattacaacgcttaaaaatgaagacaggaagttaagatggtctctggtcatctaataccaagggtgtgtaatcgattaccatgcctaaanatgggatcgggagttgagatgactttggtatc

SEQ ID NO: 82116 - DNA, 229 bp, Glycine max
  unsure (1)..(229): unsure at all n locations
agctngagatgaggaagtgttgaagggtgaaacttcctgcttttattgttgaccacagagtggtacctggagatatgtcgcggtggtcaggagaccttggggacgtcaggtggggtgctattgcccaaaaccaagcttgaccaatcccgacccaacccgggcatagtcggtcagtgagaacctgtgatgtacctaagcaggcgagctcctggcagtcaacagataaaag

SEQ ID NO: 82117 - DNA, 348 bp, Glycine max
  unsure (1)..(348): unsure at all n locations
actaagctntgagccacaatcctgactaatcataaaccttgacccaatgtgagaattgtctattttacactccgaagcaaaaacaaaggggagagggaaaactttcaatcaaagatgaggcaaaatatgagagaaggataatttcccattcaaggtataaaattatatgaaagggaattcccattccaagagtgggaaaacgtccaaagaaaagaaagaaaattccctatcaaaaatgggagaaagaaacaagagatgaacaatggaataaagttcccgatcaataaaaaataatatgcagaaagggctttggaccggacaatatctgaacaatacagaattgtcacc

SEQ ID NO: 82118 - DNA, 286 bp, Glycine max
  unsure (1)..(286): unsure at all n locations
agctnggagaggttgtcttaattgaggaaaagatatagggagagaaagagagaggggggagcacgaaattgaaggaagaaaaagggagagaacttgnactctgagannnntgtcacaagactctcattcatcaaagttacggcnngtgttacacatgcttctatnnnnnnactaaggagcttccttgagaagctntcttgagaaaactctcttgagaagcttctttgagaaaacttccttgagaagctagagcttagctacacacacccctctcataactaagcta

SEQ ID NO: 82119 - DNA, 437 bp, Glycine max
gttgcttctacagtcagacgatggctctttgcttaatcttcttgagagaggttctcaacactctcatagtccttggatagaagggtgatttccttctctgaaccatcggatgagtcattatcatcccaagcaatatacgccttcttggatcttctttcttcacgacttttcttctcattcttctctggccatgactcatttgtggggcagtgtgcctttatgtgaatggctcgattatacttatagcatttaagtgttgggggaccttcttgagatctcttcccattgtcaaagttctctccattcttttatttttaacaaaattatgaaacttcttcacagagagagagaagtgctcttcatcatcagattcttctttttcttcttcttcttgcaatgagggacgacgcttcgagtgctatgcttcttttcccttt

SEQ ID NO: 82120 - DNA, 296 bp, Glycine max
  unsure (1)..(296): unsure at all n locations
tcttagtctttatctttccatatgtacatcatgtatcataatgtagaggtaggaagattggttctaaagttagaaacttcttcagtgccttanactctctgttntaatcgattaccaagatatacgtaatcgattgcacaagtcttttgagaagctagtagagagactcctcgtttggtttaatcaattaccagctatctataatcgattacttcagttcagtgagacccatgttgattntcatgagtctctgctttaatcgantaccacgttgatgaatcgatacttcattcttg

SEQ ID NO: 82121 - DNA, 474 bp, Glycine max
gacactataaaactaagcgtggttggcagctcgatcaaccatgtttgaaactcaatgttctaatgctatgaagaaggatgatcaggagatagttgttattgacatggaacctaaagttctcaaggtgtcacattcattaaaagttcctctttttctctatacctttgaagctgctttttgttccacacaagatatatgctatttaattcagttaaaatcgggcctatcgttcggttggttatctaattctaatcgagatctatgttgagcaggccttacttcattatgtttatagagacactctttcggaagatgaagagctctctatgttggatacgacattctttccttcgctgtctgaatcatttatagcaaagttgctagctgctggagaaaagtatggattgccaagactaatgctgatgtgtgaatctatactatgtaaagacatatctgtagattctggtagctata

SEQ ID NO: 82122 - DNA, 459 bp, Glycine max
  unsure (1)..(459): unsure at all n locations
agcttgtctcagcgtttatgcgagacggagaccaacatgctagctatcatcgccaagtaccaagaagagttaggtctagccacgacccacgagcatagaatcgcggacgagtatgctcaagtatacgcggaaaaagaggctagaggaagggtgatcgactctntacaccaagaggcaaccatgtggatggatcggtttgctcttaccttgaacgggagtcaagaacttccccgcttgttagccaaggccaaggcgatggcagacacctactccgcccccgaagagattcatgggcttctcggctattggcagcatatgatagacttaatggcacacataattagaaatcgttaggaaacttgtatggtctctcagaccttgactagatacgacttncttttttgaatannatgagttggtccatgttcttactcaaaaagctgggcaatcactctacat

SEQ ID NO: 82123 - DNA, 366 bp, Glycine max
ctaagctaaagtatgcccgagtcattcatccctatgagatgttgttgaagtattggcgatcagaattgccattccttggattatatgggtgaaccaagctcatgcttttacaaaaaggttcatcaagtcaagttgaaatatggaagtaaccgtcttgcagaaatggggcaaaagatgaatcgagtcacatcactgcttcgtctactgccaaacatatttacgattattgatgtccttgttacttccagtttcaccttgacaaagatgtcatggaccatgttgaaaatctaaatcgattcaaccccatatcttgcgtaaaatttcgcaatacttcaattgtacatcattcgcatgcatccatgcttt

SEQ ID NO: 82124 - DNA, 342 bp, Glycine max
  unsure (1)..(342): unsure at all n locations
agctntannaattgaattaaaacgttcaataactgctggtaatcaattaccatatatgtgtaatcgattacacagtgcanattttgaattcanattttaatagctggtgtaaatcattcttggccattggtaatcgattaccagagagtaaatctcttgaaaaagactntttaatttaaatttcttgggcaaaccttttgctacttcaattggaattcccttcctatataatatacccttcctaagactctagagactgtcttgacatccatcttgatatctttatttctttgcttgataaatcttgagagcatgtgaccatgtgatcctttgcatcataaa

SEQ ID NO: 82125 - DNA, 389 bp, Glycine max
acatttgtgaagttagtttacaagaaatataacaatcattacatacaaggggccaacaacacttctcatggcacgagtgtcaacatgcactttataaaataatcatacttgggtcgtgctattttatgacacatacgtatttgcatacataataaatttgtatgaagcattttacgacacctatccatgtacatatttttttgacaaaccttttcatgctacatcctatatatacacacattgtttggaaagcttcttttgttacctattcacaaatacacacatattttgaaaacacttttacgctacccatccaacactttataaggcacttcatgctatatatattcatattatgcaaggcatttcatgctatatatatcatattt

SEQ ID NO: 82126 - DNA, 301 bp, Glycine max
  unsure (1)..(301): unsure at all n locations
agctngngaggattgatggngacccggtgttgttagaaacgattatatgggctacgtgggagtacgtgagctcagttggaggtgggcaacaagggatggtgggtttatgcgcgctttgtggatgtggaaaacttgttgtgcaccatcgcccgaccgccacctagtaccacatgtgatgggtaccccataatcctacaagcttgagttgaggaagtgtagaagggtgaaacttcctgcttttattctgtgaccactgagtggtacctggagatatgtcgcggnggtcaggagaccttgggga

SEQ ID NO: 82127 - DNA, 342 bp, Glycine max
tctgcttcaataatcataacccccacgagacataacgtgtgggagagtattctgcttctggatggcctgtgccttcatgcgcacattctgaaaaaaataaacaataatgtttgaaatgggcacaatgaagtataacaacatcatgtttaatatgaaaaacaactctaatggagaaggaacataccttccaagaagggtctctgcgagtctggcaaaactgggcccactttttcttgaagatgccgtatttgtcacagacagcgtcctcgacaccgtcctgatcggttgcgagggcccatttactcgtgaggactatttaaactgcctccatctctaccccac

SEQ ID NO: 82128 - DNA, 453 bp, Glycine max
ctattaggaactatgatactaagcttaggctgctcaattgctccagggtgctgcatggaagggcaaaggtctgtatgggggccagcagaggagcacaaaccacaaacccttgcgacaggtacagatttctgattcaaggccagctgggttaccaagttaaccaatgcatccagttttccttcaagcttcttagtttcagatgatgcagatgggtttgtagctacctcatgcactcctctaatgactatggcatcatttctggcgctaaactgctgggagttggaggccatcttctcaattaaatttctggcttcagcaggagtcatgtctccaagggctccaccactggcagcatctatcatacttctcttcatattactgagtccttcataaaaatgttggagaagaagctgttctgaaatctgatggtgagggcaactggcacataggttc

SEQ ID NO: 82129 - DNA, 365 bp, Glycine max
  unsure (1)..(365): unsure at all n locations
agcttcattggctacttcctcctcctctagatgtataattnggaggaaaaccattnttcctataacatttgtccactatgtgattatccttaccacagtaggtacatgatttcgatgaaagtgagcctgttgcattgatgagactagtggttcccatcagatcactattattgatctgcctttcttggtgaacaacatatgagaagacctttgctatgctaggtaatggatccatcatcactacattggatcagacaatgccaaaatgataatttaaacctctaagaaactgcataacttgatcttggttcttcctttctataacactaccaagagcatcacatatacacttttngtcacatata

SEQ ID NO: 82130 - DNA, 367 bp, Glycine max
  unsure (1)..(367): unsure at all n locations
gtaggaggcatatactgaaatctacgtatcggtgctaggctaacgttgntagtgataaatcatacatagagagtcacattgcatatatgtttgacatttagagtatcacacattgaatattttaataatagaaacaaaggtgaacatagttaaaatatagataaaggagccacaagaataatagtgctattattgtttgtaactctttgcctgcccttatttcatccttgattgtttctattgaaataaacacaacatttgtacgaaagagagagaatatattctgagcaataccataaaataacatattacctttaatgatgtgcttatctaactatagctcaggttttattaatttataacactt

SEQ ID NO: 82131 - DNA, 259 bp, Glycine max
  unsure (1)..(259): unsure at all n locations
agcttcttttctctaccacttgtcatccacaatctgatgggcaaacagaggtagtgaataggtatntatccactctnttaagggctcttctaaaaggcaaccataagtcttgngatgagtatcttcctcatgtagaatttgcctacaataggggggttcatagaaccaccaagcaatccccttttgagggtgtctatgggttcaatcccttaacacccttagacctcattnccctnccacttgacacttcttttataca

SEQ ID NO: 82132 - DNA, 432 bp, Glycine max
cttatgtgaaaggatgtgactcttcacatttgaatttgaatttcaacgttcaaaggcactggtaatcgattaccaaaacattgctatcgattaaagctttatgaaattattcggaacgttgcaaattcaatttgaaaactttttcaaaaaacattttgctactggtaatcgattacaacaatctggtaatcgattaccagagagtaaaaactctttggtaaacatgttttgagaaaaatcatgtgctactcatttcttgagaaaaactttttatacttatcttgattaagccttctcttgattcttgaatcttgatcttgattctcgagatcttgaactcttcttgagtttatcttgaactcttgaattgttctgattcactcgagttgttctttgattgatctttgattcacttgagttgttctttgaatg

SEQ ID NO: 82133 - DNA, 367 bp, Glycine max
aagcttctacagacagtgagctctaatttctctatacttgcctcacctctcaatgagctggtgaagaagaatgcagccttcactcggggtgaaagacaacacgaagcctttactctgctcacagaaaagctcactaaggcaccgccaagctctcctgactttctaaaacattgagctcaaatgtgatcggaggccatagagaagcatcgaaagctgactatatcatcaccgcattgatgacttcagacaaagtcagagatagagcctcaaccacatatagagccacatgcataggccgataggattgcatgacctccatctggaggaagtccagatgattcgtaactaccttgatcttacaaggacc

SEQ ID NO: 82134 - DNA, 450 bp, Glycine max
taagtgagctgccgcatgcaagctttgttcctttgtataaaagagaagttcttattactatcacgttgactaaaaaggccttgaggtggatctaagtgctctgatcattcattaacatattcatgagttggtggcatgctcaccactatttgtttctttacgaaactcaccatatctaataaagcgcaaaggcaccctataacacccgatccaaaagtaagagggagtgcaataacagatgaacgccgacatgttggctttaaaagatcagatggcttctatcacggaagccatgctaataattcataaatcaatagaagacaatgctacggtggacgccttcaatacagctaaggaagcggaaccggtgctacagtcccgcatgaacttgggctgagacagaagcgcgacaggttcaatcggaggtatagcctcaagcctacccttata

SEQ ID NO: 82135 - DNA, 327 bp, Glycine max
agcttatcaaaataaacttaaattaaggattcttccaccataaatgcagaagaaaagatgttacatataggtgaacaattaaacaaatttatttcagtttcagtatgtgataggcaaaaatctgtgaaaataacagacagtgcctagacacacacagatgctgttcaatcattaatatccctcacttagttatgttgtaacttgtagtatgtttggagagtacaggcatgcatgtgggtctttaatagattcacaaaccaagaaagaactcttaagttggctctcttatattatggatgttatgtgcgagacttatctataaagtta

SEQ ID NO: 82136 - DNA, 416 bp, Glycine max
  unsure (1)..(416): unsure at all n locations
ttaagtcacctgacgcatgcaagcttatgctgcanatatttacaataaacctcctttatctcagccgcaaaatcaaccacaacaaagcaattatgacctctccagcaatagatacaaccctggatggaggaatcaccctaaccttagatggtccagccctcagcaacaacgacagcagcctgctccttccttccaaaatgctgttggcccaagcagaccatacattcctccaccaatccaacaacagcaacaaccccagaaacagccaacagttgaggcccctccacaaccttccctcgaagaacttgtgaggcaaatgactatgcagaacatgcagtttcagcaagagaccagaagcctcattcagagcttaaccaattagatgggacaatttgctacccaattgaatcaacaac

SEQ ID NO: 82137 - DNA, 155 bp, Glycine max
agcttaagagaattgacgatgtctctgtcttcttaaatcatatgagccttaatataatacatccatttgaatattacaaaaaacctgtctgtcttattttatggtggtataaattgtcctcgtcacatactatagcctggcatttttaatataac

SEQ ID NO: 82138 - DNA, 498 bp, Glycine max
  unsure (1)..(498): unsure at all n locations
ctgtagagtcacctgctgcatgcaagcttggagaggatgcttcaatggaggtatatatatagggagagaaagagagaggggggagcacgaaattgaaggaagaaaaagggagagaatttgaactttgagttgtgtctcacaagactctcattcatcaaagttacaacaagtgttacacatgcttctatttatagactaggtagcttccttgagaagctttcttgagaaaacttccttgagaagcttctttgagaaaacttccttgagaagctagagcttagctacacacacccctctcataactaagctcacctccttgagaagcttccttaagaagattcctacccaatgcccttgcgggataggattgcatcactntcactggcgaagaccaaatctganaagctgtgagggtgcgcagcccaccatcttttatagtagagtaccgataatgtgtctaccatcacgaattatcgtctccttcttgcacatgttctg

SEQ ID NO: 82139 - DNA, 467 bp, Glycine max
  unsure (1)..(467): unsure at all n locations
agcttgttgattgaaacaattaatcacattatttattacgataattaatcacattcctaatacgtagtaattgaatattattttgattntatggacaatcacaattataaaataatattattttttatatattaattatattcttggtgctagcaatcaatataataatatttcactaaattttttatttgattaaattaaattctctaatctaattatcaaataaattattttcttttgtatagattggaacactcgcttgtgtgtgaccccataggttcaatattaaaccggtaataaattaatcatacttaatttaccaatcaaggtagatgtttagcaacactcattaatatgaagtagcatctttttccttcaagaaccaatataagaacaacgtaatattntcttctatcatttatagctcaaggtaactntagagatattatcatatagatctaataact

SEQ ID NO: 82140 - DNA, 435 bp, Glycine max
  unsure (1)..(435): unsure at all n locations
agctngagcttctcaaataggaaaattcctttctagagccatgtcttcccttcttctccatccctattcttcttccatccccatcaacccctaaagtgtaaatgagccctcattgttgggaacctagcagccaaactcttgtaatgtaattttcccactactatctctttaatgtaatttcaatttttattgttccttttctgtgtttctcattattgattgtggtttgatcatccatactcatgcatttgttgaggatttatgcaatggaaattgtttattctctaaaaaantgggaaaggatatctaaatgaatcatatataagaatagaatgatattgtttagcctattcatggtattctaatgtaatgcaattatttaattaatctctcaaggatacgggaaagatatataatatgcttttacttgaggac

SEQ ID NO: 82141 - DNA, 264 bp, Glycine max
ttgcaggagcttctgaggctgatgttttgatggttctgaagaaccatcgctcaaatggagatgcatacaatggagatgatccaaacggtgagaacccacagcacaataagactgctataccagagatcaactacgctcatcaagtatgagataaatggcgtgactttcaaatctcttttgctccgttccgctgagtcttgaaataagactctggagtctggacaaacgatatgctcgttgttcagagttcacaagagggatatc

SEQ ID NO: 82142 - DNA, 327 bp, Glycine max
agcttgcaaaatgggtcggtcaaactctgattatcgaccagattgaagaacagttggtcatgagctgacctaaggtacataacccctcaatctcgaaggcaaagcttggagagactaaaaggtgtaaatgactcagtatttatataatcgaaggatacacaatccctcagtctcaaaggcaaagcctatagagacgaaaaggtgcaaatgacttggtatttagacaaccggagggtatatagcccctcagtcatgaaggcaaagtctgaagagattaaagtgtaaagaattggtatttagacaactggaaggtacacagcccatcag

SEQ ID NO: 82143 - DNA, 345 bp, Glycine max
  unsure (1)..(345): unsure at all n locations
agcttgaaatgaggaagngnggaatggtgatacttccttcttttattggtgaccacagagtggtacctggagatatgtcgcgggggtcaagagaccttggggacgtcaggtggggtgctattgcccaaaaccaagcttgaccaatcccaacccaacccgggcatagtcagtcagtgagaacctgtgatgtacctaagcaggcgagctcctggcagtcaacagataaaaggaactaagaccacaaagcaatgaggcttgtgtggtggctggccagctgtgaactttgattgatatatgggatatggcctctggtaatcgattaccaagggtgggtaatcgattaca

SEQ ID NO: 82144 - DNA, 400 bp, Glycine max
  unsure (1)..(400): unsure at all n locations
agcttagattgaacccttatggaggggtcaaaaccaaatttctgtttgagtttataagactatgtgatgcagttaatgagaaagtcctcattttcagccaattcattgataccttatgcttaattaaggaccaacttgagtcagccttcaattggtctgtggggacagaagtgctgtatatgtatggaaagcttgaccataagcanaaacagtccctcattcgtagtttcaatgattcaaatagccaagcaaaggtgctgcttgcttctataaaagcatcttctgaaggcattaacttaattggagcttaagggttgtgcttcttgatgttgttggaatccctcagtggaagggcagctatntgcgagcatatgacttggacaaagaaaggtgtttcaca

SEQ ID NO: 82145 - DNA, 441 bp, Glycine max
  unsure (1)..(441): unsure at all n locations
agcttcttttggaccttgaacaagcaatcatctcctctttcagaatcatgctatgtgctcgcgactggtccctttcttcccttcgcaacttgagttcattattgctaccccatagagctccgcgaaatttgttccggccatactcttccttgcgagccctcttggtctcttgttcaagggctcttgcggtaattgcattctcttcccgtaacccggcgcactccttccgaacgtgtgtagcagccaacttgaacttctccttggcgagttntgcctttcctaactcgctnttgagaagctggacttcttcatccgcttccggtgcttcaaaattctcttcgctgacgacttttaacttggcgagccaatctaaacctcgtatgcgaactttcagccattcgtggtacccaccaatgatgccattacgaatgcctctaagct

SEQ ID NO: 82146 - DNA, 474 bp, Glycine max
  unsure (1)..(474): unsure at all n locations
agcttctaagttgattttattgggataaacttcttgaatggcttctttgtctgcttgcattccaaataatccttgcatttctcctgtggttgctgtaagtgaggaattccttgtgcaaacttgtgcatttgagtaagatctctgaaattcaggtgtccaagcctatagtgccaaagccattcttctttattacttacaacactaagacattcatgctcaagtgcttgcgttccaaccttgaaagttctattttcggtcaatggtgtttntatcattagatttctggttttgtcatataccagcatcatcatgtccttcatagttatcttaaagcctttctgaagtaactgaccaaggcttaaaagatngctgcttatgcttggaacataaagtacatcctctatgcaagnttctctaccatctnttctctgaatcaggacattttcaattncttcagcaagcatagtgctgtca

SEQ ID NO: 82147 - DNA, 346 bp, Glycine max
  unsure (1)..(346): unsure at all n locations
agctngaaccctactcaatctgaagaatatatttatgtattaaaaatattgaataattcagcatttgtgcagtcagtgatgtatcaacaggaactatctcctggacaataatttcgtttgttttatctttgttaggtatgttaaatgctaatagcttcctttagcacaatatcagcgcttgaatttataatcttccaatgctgaagatttcagtttaccaaacatgctgtaaataacatggtttagtatatattgaggcagtgaatagaacaccttatcacatggtttactaaatattgaagtgatattggaggcacttaggttataataacttttccggcgattc

SEQ ID NO: 82148 - DNA, 429 bp, Glycine max
  unsure (1)..(429): unsure at all n locations
agcttcaccggatgacgccgatcgaacattttctatccgacgtcatgcaaatttcgttcagggattgaattgaaaactcgttaggcgacatctgtcgngaagtagcgaccgatatttttcagccgacatcgcacaattctttttagaaaagctcgctggtcgataatggtctttttacggcagagtaagttttcttgttttggtgttgcataaaaaagttacaatgtacttcggctaggtttttcgtgcgagttcaaccgacattttgtttcggccaggaaaacattagcccacctctgcaaaaaaaatatttgctaaccggcttcatgcatatttcattcaacgagtgaatagaaaactccatagcccacaaccgtcgtgaaataatccgactgtattttcagccgcattgcgcatttttttaaaaaa

SEQ ID NO: 82149 - DNA, 400 bp, Glycine max
  unsure (1)..(400): unsure at all n locations
gacctgaggcatgcaagctgtgcagatntggtcttcgccagagatatgatcagtgttgggacaaaaagaggcagatntggccatcctacttggacgactgagaagactggggctaataaagagggtgaggatgaaggataagcacatgctgggactaccgattgtgtgcgagaatgctatacgccgacgcaacattatctctactcttacaataacaaactatcttcttacccaccacccagatatacacgaaggtccatcctatgaatagcacaaagcctgtctagcgcgcttcctatgacgaacaccaccgttagcacataccatataacacccaccgacgaacgagttgtgcaacgagaaagcctgtggtaatcaccccaattccagtggctatgct

SEQ ID NO: 82150 - DNA, 396 bp, Glycine max
  unsure (1)..(396): unsure at all n locations
agcttgtgttntatcatgagtattgttcatttgtgtattctagacaaagnaaaaacacgaatgtgagcttgcaattagacatgttagtcagtggacagaatgattgagaaataaaagcttgaaccataacccggtgagagtgtgatcttgaattgtgagtgaacgattaacattaagtaatattctttgtatcagtctctgaattttacaatgaaatgcataaatttgaaagtgatgaaggccattgttctatttgtaaactacttgaccaaaaagcttaccttgaattataaatggatcctttgcaccctctgtgagctgaattaaattttcaaattgaaccctgaacttganagaatatctccagctaccctgtttatattctaggagagcata

SEQ ID NO: 82151 - DNA, 433 bp, Glycine max
  unsure (1)..(433): unsure at all n locations
agcttcaagaaaaagatggcctcagcttattccttatttccggaagggaattctatcaataggctcttatgttcaatgatgagggttatcattattggaaaacccgaatgcaaatctttatagaagccatagatctaaagatatgggaagccattgaatttgattcctttattcctacaatggtagagagaaatgaaactatataaaaaaaaaaaactggagaagaaagaagataatgatgaaagaagaaagaagaagattcctctttagccccaaaatgctaagtgcaatcaacttgggcacatgagattcaatggtcctgtgtttaanagaagaatgaanaaaaatccgacaagatgaatttcatagagaagaaagaaaagaaaggatatatcacttgggaagataatgtcatanattattcaagtgattc

SEQ ID NO: 82152 - DNA, 291 bp, Glycine max
  unsure (1)..(291): unsure at all n locations
agcttgacactatgatntggaagtctctatgttcttaaagaatgcatgaattcaggtgtcagtgcttcaaaactctagttgtctctattctttgttctatcaaatgagtccgagcttaaatattctttttcttctcctacaataatagagaaaaactttatgaagccatgtaatattcgaagntaaatgtttctcactctatagtaatagaataaatttatgttttaaaattaaatgaaaaacctgacattaatgtcaaaacatattgactaatctgatccactgtctcaa

SEQ ID NO: 82153 - DNA, 330 bp, Glycine max
  unsure (1)..(330): unsure at all n locations
agctnnnttgaaaacattttgctactgtgttatctattacaacaatctggtaatcgattaccagagagtaaaaactctctggtaacaggtttttgagaaaaattaatgtgctacacagatcttcgaaaaactttctaatacttatcttgattgaatcttctcttgattcttgaatcttgaggcttgaatcttgatcttgattcttggaacttgaatcttgaaacttgatttttgattcttgaaatcaaattcccttttgatccttgaaagtgttttgattccatcttgaattcattctttgattcttgaagtcatcatctttgttaacat

SEQ ID NO: 82154 - DNA, 401 bp, Glycine max
  unsure (1)..(401): unsure at all n locations
agcttaagcagaagatgtgcanaaatttttacatctcacaatgtgcaagaaagatactccaaacccctccccaaaatccaatgcacataaaatcctataacattatgtccaaggtgatattccatcccaaaaacatgacagaaaccacaaacatgtattcatagaatatttgtgggattcattttaataagataaaagaaaatcctttatttattcacacatcttttatatttaactacattccctgtgaaatgttaaatcacctcatatacatagaanagaaatctaagtaggtggttcatttcaaagntgataacgggcgcgaanagtcggaaaatgaaaagctatatgagataactcttacttatatgtgggaattatattgtacttcaataccacct

SEQ ID NO: 82155 - DNA, 428 bp, Glycine max
  unsure (1)..(428): unsure at all n locations
agcttccatcaataatggtgtttatgacctcttagaattgcccaagggttataagagagttggttgcaagtgggtcttcaagactaaacatgactctcatggaaaccttaaacgttacaaggctagagttgttgctaaggaatttactcaaaaagatggcattgattataaagatgcattttcactggtctcccaaaaggattctttcaggattatcatgtcattagtagcctattatgacttagagttacatcagatgaatgtgaaaattgtctttcttcatagagattaagaggagaatgtttatatagaccaaccaatggngttcttagttgaaggaaaggaacanatggtgtgaaaattaaagaaatcaatatatattcttaaacaagcttcccgccaatggtatntgaagtttaatgatacca

SEQ ID NO: 82156 - DNA, 389 bp, Glycine max
  unsure (1)..(389): unsure at all n locations
agctntacagcagattttagttatgacccactaacctagaattaaaataacttaatgccattaacctagggaattaaaaaaaacttaatggctgagtgtaactgaaattgtggcaaccaaaagtcacccccaatagccaacaagtcagccaccatttggtctcccaaaaggctgatgcctaggttgccaattgggcccttattacaacttgaactaaacctaactaaagcccttttagttgattaacccaaaacatatttttggtcagccaactttacaaggattgngccattatttagacagactaaacactctataattgaaacanagtggtgtcatttagtcctcctccatttgggccatgatacaactcacaacctttggacttt

SEQ ID NO: 82157 - DNA, 477 bp, Glycine max
  unsure (1)..(477): unsure at all n locations
agcttagtaaatatggtccaatgaaggaggttaattttttcaatgagaaggcaaatgggaagtcgaatggctattgtcaagttgagttatttgacccttntgctgctactacttgcaaggaagggatgaatggattttttttaattntaatttaatttttcatttaaatttaattttaatttaattaaaatatgatgttatatcagatgacaagtggtcagcatacatgtcacacttaatctaacgtgatatcacaagtagtttgtcgacgtatcaaataaataaccacatcagcaattaatggatcccttttaacgacagagacctcatacaaaacttttaaattatagtgacccatctcanaatgaanaaattatgaggaatcaaatgtnaaattcaagtatatatcanggatcaaaaatatatntaaactttattnttatatggagtaatgatattttgtatattaaaaaaaaa

SEQ ID NO: 82158 - DNA, 466 bp, Glycine max
  unsure (1)..(466): unsure at all n locations
gcgatccttgagtcacctgcggcatgcaagcttctcccncaattntctataaatagggttgttatgtgaagtagaaaagggttcagccccttaggcacttctctctctctcgaaatagctgaggaaaattagttccgtgaagaaaatccaagccgaggcgcttccgtaacgtttctgtgagtaattacgcgaagattctcgaccgttcttcaagattcatcgttcgttcttcgttttcttgagtcttcaacgggtaagtacctcanaccaagcttttcaattcattctatgtactcgtggtggtccacattntgtttcatgtattnttattctcgttttcatttactttntatacccccttttgacgtgcttaagccatttatttaagtcatttctcgcttaatctaaaaataaaataaatttccaccgatcgtttgaatgtatcatccgttatttcggtaaaatg

SEQ ID NO: 82159 - DNA, 440 bp, Glycine max
  unsure (1)..(440): unsure at all n locations
agcttgtgcaaatcanatcactcctacattttatctctagcatgcattggatgttagtctcgtcctttgtcacgggaagccggaaggtccatatcaccttcttaattgtacacatggggcactgcgcccccaaatgcgcgagtaagaagagataattttccgggctctcgtgtccgtaaaatgcattcatatcatgcatcgcataagcatctcttcataacatcataatggacatatcctgcatttgtccgttatcatattccagcctcaccttttgcatgagtcatggcatcatcatgcatatgcgtccaacannacttttgatctgcanaattgcataccatttgttttcatgttggctcatcctttgcgtttcctctacaaaacaaaaacanagaagggggaagcgtgaaacttcacactacattcttagtttcatg

SEQ ID NO: 82160 - DNA, 392 bp, Glycine max
  unsure (1)..(392): unsure at all n locations
agcttgtgcatccaataccctgatgaggatgtcccatatgttcttaagactggactgattcatttgcttccaaagtttcatggccttgcaggtgaagacccgcacaaacatttgaaagaatttcacattgtctgctccaccatgaaacccccagatgtccaagaggatcacatatttctgaaggcttttcctcattcattagagggagtggcaaaggactggctgtattaccttgctccaaggtccatcacgagctgtgatgaccttaagagagtattcttagaannaaatttccctgcttcaggaccacagccatcaggaaggatatctcaggtattagacaactcagtggagagagcctgtatgagtactgggagagattaagaaactat

SEQ ID NO: 82161 - DNA, 383 bp, Glycine max
agcttgccaagaggttgcacgagtatggcttttctctgtgttttgaagtaattaacaacagtgaggagaatgcgggtgatgaagttgagacattatacatgtatcggtctcttgatgggccacgggatgatgctccaagatttgttaccatcttgcaatagatttttctttttaattcaagaagattttagctcttttcaacgatgactggtcgatgaaacatatggagcaggggattttacataaacctgccagaagatttctctgctgtccatggcaaacaaagttaagcttccaactcctgttcttggtgtgggctgcagtgatggcaggccacatagctgctattgtggagggaggttgggaaaatttctccatatgcc

SEQ ID NO: 82162 - DNA, 441 bp, Glycine max
  unsure (1)..(441): unsure at all n locations
agcttagagtcttccttgtctatgctatattgtctgcatcagggccaactctngatcatgcagagtttgcaggatgtggtccagcaacggccagttatgagcgtggaggagtttctacagaaggtggcctggctaagagtccagccttctcctttgggaggaggtgaggcctctgcagcccaggagccttagtcggaccaggaggacgacattctagaggcctcagagcccactctacctcagcctttcatttttgagactgatccagtagcagctaccccataggtgacaccagagccttccactggagtgctggacatgtcttcttctcagcctgagtcatctgcaccaatgccagacctgccccttnctcaggattcaccatcangcacttctgcactggacctgaatgagtatgccatggactctgcacangatcat

SEQ ID NO: 82163 - DNA, 449 bp, Glycine max
agcttatattctcgaccaatctcttgtgttttcgtttgtccgggatctaatatattttgttcattcctattctttggattattcttttggcatagtatcatactgtacagcttgtacaggaatgatgttaatccttctttaatatataaaatcttgtctttggcttttataacaaattactctctatgcatttttttcccattgacgcatgtattctctgataatattctgagttcaaatttcatctaagacatgtctggataaattttttggaaggattttttggaattaaaaattagaagacagaataaaatcctctttatcgactaaatataatttatgcataaaccaatttgtagaaagtttatcatatgaatatctctaaaaatgattttcatttaacatatataattcaactcataaaatgcttcattgttctcttttttttt

SEQ ID NO: 82164 - DNA, 293 bp, Glycine max
tagtctgttacatttgacatccgatgttttattctaactggacaagtgacatgtctagaaactctcttaaggataagctcaatatactggtatacaagtatactcccgttcctgctgggagttaaggtgagagcattacactaaataactcatggatgacagtttatagttcacctgaatggatagatttccatgatataccaaccaaatggattaagatttacaatatattttggtgttatatttttcattgacacgttactataatttccatgagatatcttttaatttta

SEQ ID NO: 82165 - DNA, 53 bp, Glycine max
  unsure (1)..(53): unsure at all n locations
ccggacataagcaccgctgcatgcagctgttcctggaganatgtactccntat

SEQ ID NO: 82166 - DNA, 424 bp, Glycine max
  unsure (1)..(424): unsure at all n locations
agcttatgcatggaaaatgttatttgaaattgagatgcccgaagaaacaccatttcctagtttaccatgcattatgtaccatgttcaattattttgtttttaagtgaaacgggtttatgatcccaacatggttggctcgtggtgcctaacacatgaaactaagaatgtagtgtgaagtttcacgcttcccccttctttgttttgtttttgttttgtagaggaaaacgcagggatgagcaaacatgaaaacaaatggtatgcaattctgcagatcaaaaagtttgttgaacgcatatgcatgatgatgccatgactcatgcanaatgtgcggctggaatatgataacagacacatgcangaacgatatgttcactatgatgttatgaagagatgcttatgcgatgcatgatatgaatgctattta

SEQ ID NO: 82167 - DNA, 291 bp, Glycine max
  unsure (1)..(291): unsure at all n locations
agctaacaaactnnttttatagtttgggcttgacctttttatctaaaaaggctttttaaaaagcttgagcttggcctttatagtaaacaagccaagccgagccgagccttacataggccgaaccaaaggcccttgacaagctgctcggctcatttccacccctactcccaacgccttttcgttgacccttaactttgaccaatgtcacccatttcgaagaccgtcacactagtcttctcttcctccatctcaaggtgtccccaatggacctttctgctttttcatgggtga

SEQ ID NO: 82168 - DNA, 419 bp, Glycine max
  unsure (1)..(419): unsure at all n locations
ggatccttaagcaccgcggctgcagcttagtcagaaagtacccaaaatgctctcttagggtgttgaaagagcataacaagactttcctaaattggtttaaagatataatcttcggtgaccataatgcatctaaaacgttaagggagttatcaaataggcctaaaagaaattttataacttggcaaggatatgataccaacaagtatttgttctacacaaaatcacaagacgacaagaacacaatgcaaaacagtggtgtaagtctaagggctgaatctcaacactttgctactgtacatgatgacaatcctggtgtagcttccatgccttactntggagtcattgaagaaatctaagaggttaattatgtnaaattcagtgtttatgttttcaagtgtaagtgggtagatagaaatatc

SEQ ID NO: 82169 - DNA, 453 bp, Glycine max
  unsure (1)..(453): unsure at all n locations
agcttgtgacagctgttggcaatccatggttactatattaatcctcgngtacccctaccttgagtcgtggagtcatgatgactttgaggagccccgactggtgtagtggtatttatatactttgaacaaaattcaatagcttcttcaacaatgtatctttcaacaatgcttgcttctggtcgatattgattctctgtatatcctttcaacatctttatgtaccgctcaaccggatacatccaacgtaaatagacaggcccacaaaactaaatctcctgcacaagatgaactattaagtgaatcatgatgtcaaaaaatgatgatgaaaaatacatcttcaattcacanaggatgatggaagcctcattcntcaaattatnncaattgtgaggtcaataacctgctacagatagcattaaaaaaaanacacacgcgagtatagtaagcctaact

SEQ ID NO: 82170 - DNA, 389 bp, Glycine max
tctgacccgcgatcctctgagtcacctgcggcatcgcaagcttggaaagtgttgtttttcaccttttctctttccaatctgctggcttagtgagcgtctgctaagcgcaacactcatgggctaagcgtgaggaagactctggaagaagatgagttgtacaggttcactaagtgcaccgcttcatctcactaagtgcaccgcttcagtccatccgctaagcgagaaaggcacgcgctaagccaaaattcactaatgtgcgctcagcgggccataattgcgctaagcgccagagcatgaacaaggccacctatttaagcctgaaatcaaattttagagaggaagcttggactgcgagttagagctctccatgtctagagattctagagaga

SEQ ID NO: 82171 - DNA, 315 bp, Glycine max
accaagaaatgctactcttaaaacaaaaatggcatacaacctcctccaataaacacaaacatcaatggtaatttagagcaaactcatgcacatactttcttatgaacattcactcgcacaagatattcttctacctaaaaaaaaatgcacccatgcgcaatcaggcacctttgtacctagattatctatgtgacttccaggtgtattgctacctacatacatgcacttcctggtaaattacatacatgctactcaagcatttggctaccaaaatgacacgtcacattctgtattctaatactatgcatatacaac

SEQ ID NO: 82172 - DNA, 457 bp, Glycine max
  unsure (1)..(457): unsure at all n locations
agcttgacttatacctagtgttcttgtttttacttagtcattattgactctaaacaaatcaactagatttgttggaaagttgcttattgactaaaaagaatgatcgtcttatagacggatatatcactcagcactnttagtcttttcttttaaggtatacaaggtgttntgagagttttgtatctttgcaagaatttacagaaagctttacaagaaagaatgattcacatgtatttcttgtcttgtttctttgacgcttcttctatatataacattcatctctaagtacatgttgtctctcaatggttgcattcttcactcttttcttcctttgatgtcttgagtccattggagcatttaatgattgcattaaatgcacatcccttctgcatgcanagaccatgttgataggataacatgtcttatactttagcagaaaaagtcattctttcatcat

SEQ ID NO: 82173 - DNA, 458 bp, Glycine max
  unsure (1)..(458): unsure at all n locations
agctntctcataagtcctaaatgacatttttagctagtattaactcactttaacctccatttaccacagaattcagacttagccttcccactctcaaagcctcactctttttccactcataacaccacattctcactttctaaccctaagttagttctacccttcgtctctaacagatttccatcagcaatttcagcatataaacatcacaaacatcatcacgaaaaccctaaaacagaatgggtatgtttaactcatccaaacatggcaatttcaacaagttntcagcaaatgccttcacaaataatcatcatacagcagaaacctagcaagactacccatcatatctcccanaaccccatacccacganaatcaaaggagaaagaagtcacccnacctgannattcgaagcccactcgtagccacgcacttacgaccccgaaaatgcccctctttc

SEQ ID NO: 82174 - DNA, 52 bp, Glycine max
  unsure (1)..(52): unsure at all n locations
agctntgtagtaaaaataaataaatttttttactttgaacaaataataggct

SEQ ID NO: 82175 - DNA, 314 bp, Glycine max
agcttatggattccaagcagtggggtttgtttttggtggaaaaaaccaagctgcaaggggaggccgcacttgaccgtgattggtgccgacaacactggcagaacaacagataagatgaaaggaacgaggacgatgcattctattttattttattgatgtattccttttataaaaaaattatttcagtgtatttatgccttgttaaataaacaggccctgatctaaacatgcatattaatttacatggcatattcagatcacacagccgaaacttaatattatgagcgtaccccaaccatcgcagatcgaatgcg

SEQ ID NO: 82176 - DNA, 389 bp, Glycine max
  unsure (1)..(389): unsure at all n locations
agctntaagcctccatctagcaccactcttttctttttaatcgctgatgtatgttggccattatgaagtccaactggacaactatgaatatctcgtaattcatgcatatgactcacatttctagtcatgtggttggaggcccgtgtgtcaattatccatgtattggtatcacgttcatctgtcatcttgtcattagagtttattttttgagcatttagtaattctacccgtgtctgttattgcactttagtaagcccagtcaaacctgaactgtctccttatgagatcctggtgtttgtacttgtttcaccactgtgcacaacatttgtatgcattggtcctcctttttctcgtcagatcctgggtcgtcattggaatccattcatatg

SEQ ID NO: 82177 - DNA, 377 bp, Glycine max
  unsure (1)..(377): unsure at all n locations
agcttctttcgaggtatccgctcgttatcgtccaactgcctatctgctgattcctcttctagtttatttagatcttcctctatcttcttgaaacggctgaaagtgtctccgaacttatctttattccaagatnttatcttctgttttagagctatcgatttgttttttaatacatgaccccccatccactctgagggttggacgaccaacttttggacaccaacttcttgaaagagttatcagctaaccagcagtccaatagtctgaagggttttgggccccaatcaatactttcggatctaagtaatacggcgcagtgatccgagaaattcctggccagcggtgtttggactgacccaggccatttggaaagcctc

SEQ ID NO: 82178 - DNA, 412 bp, Glycine max
  unsure (1)..(412): unsure at all n locations
agctnttccacaaaaagagacaaaataaatgcaaaagttgactggagcattaatatgttcatggattgtgaaagacattataactttgtaaattgtgatagaggcaggtattgtcatgctgccattttctttttgtttagaagagctactagtttttgaagccagggtttgcttccaaattagtggcatctcacagcaactagaatcatctcagnttctttgacatttgacttctttgtcaaactaccaaggaatgctccaagttacaactcaaagacttcacttcaactaaaacccattaatcctatttcttttgaacctctaagccccattatttctaacctatgaattcagacttaaaccaactcaagtctagaatagtctctaacttatattttccnnncatacatac

SEQ ID NO: 82179 - DNA, 436 bp, Glycine max
  unsure (1)..(436): unsure at all n locations
agcttgtgatgaaacagatgtgattcatcataaattacatctctgttgagaagaactttctttttcgagtgtgaacagatcatatagcctttcaccccatcaccataacccatgaacagaccctttcttgatctaagtaccatctttccttcattgacatgataataagcattgcagcaaatactcttaagtttgagtagtttgttgttttgtcattccagatttcaataggagttttaagtcctatagtcgtagagggtgttttatcgatcagaaaacaagntgtattgataccttctccctaaaaacttctgttgagaccagcattagacaatagacatcttgttctttccaagagtggtttggtcattcgttcagtaactctattttgctgangagtgttcctaacagtatagtgtctagcaattccttcatc

SEQ ID NO: 82180 - DNA, 458 bp, Glycine max
  unsure (1)..(458): unsure at all n locations
agcnttgagcaccatcaanagtgttgtggttgcttctgtgcagaaagagcgtcgtatgggtgcttcattgctacgcttgcacttacatgattggtttgttaatgtaagacattctacgcttgtgggcatatgcatacacatatatatccatgcacgtgtacatgtatacacacatgtgtatatgataacaagtatttattttgagtgatgatgataagctgattccttacaaantatatgtggtcatggaattcaaatcctgacttttatatatgagaaaaaaagtaagttagaaaggaaatactcatttctgaatgcctttagattattcgaaaaaaagtactgccagaatgtgacacataatactctttagtctaaaagataaatcctaccgattatagaatgatatataccttaagacccattattatacgtggggttaattttatatgatggaa

SEQ ID NO: 82181 - DNA, 259 bp, Glycine max
acgagcgcacttagagaaacatgcctttttttgtgtgcaacagtcaagaaaattaagatggtcacacgccacattagaaattcaaggcatgaaaaaatcccaaattaaaacaagaaagttgatctcagatcacagaaagaatcaagtttgaagaagaacagaagacctccaaggagattgaagattttcaaaacaacaacacatatgttcaaaaagttctaaatattaaaaccaagtttaccttggaacatacccttct

SEQ ID NO: 82182 - DNA, 237 bp, Glycine max
agcttcgaatgggcaaaagcagaggcggcttcctctctgttcatgaaaactagaatacttttgcaaccgtggagcagcaacaacaaccacaggtttcgtcctgtaatgttggttgcttcaagtttggacttttatttcatcagactcgacggggctctcaccctcatcctcgaaaaaagaagaaacctgaaggaaccttgacataagagattatgcagtgtcaaacctgaaggaacc

SEQ ID NO: 82183 - DNA, 436 bp, Glycine max
ttaagtcacctgagctgcagcttgctgatactgcatccaggatatcttatatttggcctataacaaacagttccaaggaggttatgtttctacgtgagctggaggaaaacttagaagtaactcaccctgcagagttataacgttgtatggtaccattgttccaccaaataagtcgttgtttgagcagctcacatattcaggtttgataacttttactagttttcagtagactctactttctcttgttatcatatatacaatctctcaactgctcaagaaagaacgaaaagaaagtttagccgttggggcttatttttcacttgtggtgatgaaacttggaacaagaagttacttttcatgttcatgggtgtagacataacagaattgcctaagtcaataaactataatgtctctgacgggattctacatctgggtt

SEQ ID NO: 82184 - DNA, 456 bp, Glycine max
  unsure (1)..(456): unsure at all n locations
agctntgagccaaaatcctgactcactatttaccttgacccagggtgagaatgtcaatccttaccctcggaagcaaaaaaagaatagaggggaaatttccaatcaaagaaaaagagaaggaaaatttccaatgaaagcaaaaaaagataagaaggaaaattccccaatcatagagtgggagaaagcaaaaaaagataagaaaggaaattcccaatcaaagagtgggagatagcaaaaagaaaagaaagaagttcccaatcaaagaatgggagatagacaaaaaaggggagaaaagaaggaaagatagctcctgatcaaggatcgaaagaaaacagaagaaatgtgcagaaaggtcttttaaccagacaatatctgaacaatacagaattgtcaccanatgaacatgaagaanganagganaccacgacctanaatggtcttctcccttttgatcac

SEQ ID NO: 82185 - DNA, 173 bp, Glycine max
agcttgacactatgtatttggaagacctatattttcttatataatgcatgaattcacgtgtgagtgcttcaaaatactagcacgtctctcattctcttgcttctatcataacgagtgccgagcttataacattctctatctctctcctacaaaaatagagaataactttatga

SEQ ID NO: 82186 - DNA, 325 bp, Glycine max
  unsure (1)..(325): unsure at all n locations
agcttccatgtttaattacgagcgtctcgttatattacggtacacaatcacacatccgagtcctaagctattgtcgatngacttttcttagagctatcgttctcgatttcgagcgtctcgatatattatagggctcaataggacatccgagctataagttattgacgtttgactattcttagagatttccttatcaacttcgagagtctcgatatattacagggctcaatcgaacatacgagtcaaaaagtattgtcgttaagtgttctcaggccttcgttatcaatatcagccgttcgttttctaatgggacacatcgacattc

SEQ ID NO: 82187 - DNA, 440 bp, Glycine max
agcttctaacagttagctgccagatgtctcttgacagctagactactaacttccacactctaatctcatataaccgagtacaatactaatatacccccgacaaacttaagatatgtgagcttcagggagctcaaacaccttgagtttgttcctaataaacttaaatctgtgaaaagagaggggctttgtgagaagatctgcccactgaccctgagttggtatgtgacccacagagttagttgctttgaacctctctccttacaaagaagagaatgatctccaaattgttgatatttccctatgaagaatatgtatatgtgattgtgccacaacgctttgattatcacaaataataagacgcttggaagtaggaacaccaagttcttgatgtaagggttaaaccacaggatgccaggtgagattgagcaagctctatactc

SEQ ID NO: 82188 - DNA, 469 bp, Glycine max
  unsure (1)..(469): unsure at all n locations
agctntcgacaagaaggttcgttctctcgtgtttcaagaaggagatcttgtgctcaagaaggttgtatctttccaacccgattctaggggcaagtggacgcccaattacgaaggcccatatgtcgtcaagagagctttctctggtggtgcactgactcttacgactatggatggagatgagctccctcgtcccgtgaatgcggatgcagtcaagatatactttgtctaaaaataaaagaatagctcggttagtcgaaaacccgaaagggcggcttacgcaaaaatgagcgtctcggtgggtcgaaaacccgatagggcgacccaggcaaaaattagagacatcaaacaagaaaataattatgcctgataggtcgaanacccgaaagggcgatctatgcaaaatttaaggaccaaatagacaaagtaactgcatcgagctgatcttcgttcattngatgcacaatggaat

SEQ ID NO: 82189 - DNA, 461 bp, Glycine max
  unsure (1)..(461): unsure at all n locations
agctnttctacattaaaaatttatggtcatataaattctgtaatacaggtcattcaatattgtctgccctaatatacacaatacaaacaacctcgcttttactttgatattttcttatgtgtactatttgtgcttaattntttcctatccagtttttgattaattattccatgttttgttctatgacaaatttaattaatttttgtgctataggaccgatcaaactggttgacgacaatacggttttcggctgcattctgtgtttccaaggtcagcattcaaccatttaccctattgtcttatttcatatgtaacaaaatttttttaattaatgttaacatgtttccctgcagaacatcattgaggttccactgtcttaccatagacagtggaggccatattatccgacgtatgttttgttcagcatattggaccacacatttatatgcttccagatatgg

SEQ ID NO: 82190 - DNA, 408 bp, Glycine max
  unsure (1)..(408): unsure at all n locations
agctnggaanaaaaaggaaggatccaaccttgatatattaactgcaagactgtattatacatgtcattacccgcaatatcccattaagcttggtaaaaaanaaaacctccaaatccatcaggccacatcatcgttcatgctaaaaagcacttatttcatttcctccatagagggttgtgttagatattcattagaaaattaataatagcaagtttctaagcttataattatgagtcttataattatgcaattttctaagttgaaagttgtaagttactaagtcaaggttgtgagttatgaagtcttgtagttttccatttgtatttagtatcttggaataaggtattaagcatttatgtgattagtcaaatggtcactctattctagtataaataagggatcatactc

SEQ ID NO: 82191 - DNA, 445 bp, Glycine max
  unsure (1)..(445): unsure at all n locations
cttaagtcacctgcggctgcagcttggagcattcanaggcataactttctcttggatgtncgactcacgcgcataatatatcgaggcgctcgaaaatgacaaccggaagctctcgagaaattcaaatggacataacttctcactcagaggtgcgattcatgtgcataatatatcgagacgctcgaaatagaacaacggaagctctcgagaaattcaaatggtcataacttttcactcggaggtccgattcacgcgcataatatatcgagacgctcgaaattaataatggacgctctcgagcaattaaatggtcataactttcactcgaggccgatcaagcgcatattatcgagacctcgaaatgagcacggagcttcgaaaatgaaatggcaaactttcactcgagccgattatcgctaataatcgagacccgaaatgacacgga

SEQ ID NO: 82192 - DNA, 448 bp, Glycine max
  unsure (1)..(448): unsure at all n locations
agcttacaccatccctctttctcatatcatatattactcanaaacctatcaatcgggtcaatccaattggattcatgccactctttcttttcaaaatgaatcacaaattttatttccttctttttattttcccccttttttttgaaggattgggatttacataaactactagctctaaattaaatttacatgaaagtgacctataactgtttccaaattgattttcccaagtactcccccaaacttattcaacttaacacataattgcttgcatactctatgtaagaatatgtctgcttcttaatagatataacattgaaatagttgagtagaacgttagtcatcacataaacctatcagtttgtacccactgaagatcaacttgctaatacacaaccccatactaaagaaagaatgattctattaaggaatcaactcggaataaact

SEQ ID NO: 82193 - DNA, 341 bp, Glycine max
  unsure (1)..(341): unsure at all n locations
agctagttagccataatgccaggtgttatttctctctctcatcttcaagttagggcttatatggatccatcatggatatcaactcttgctacgatgttctttcttacccaaacaagggcttcattaatgcctatttcgtgaggtgcgcttatgagatatctttcttgcagtacctcgacaacacgaatgcttgccctaatacacatggggagtagtttactggcatacctctactccatatgttctatctaaccatctgataacagaattgcgacgtctatggcgtacttatcgtatgaagntttttaacatgccctatttttaatattttttacaacctg

SEQ ID NO: 82194 - DNA, 227 bp, Glycine max
  unsure (1)..(227): unsure at all n locations
agctntgacgatactcgcacgacaataaatttctactcggatgcctgatgcaggtccgctattgatgatgacgctcagtcaccaatgtattatgtgatgcctcatatgcactacaggctctgttctcttggaagtttaatctaatggtgcctgatgtcatgacccacgagagttcacgtttatgctgtgagcgaacccaagcgacgctctcattttactacgacgtc

SEQ ID NO: 82195 - DNA, 404 bp, Glycine max
  unsure (1)..(404): unsure at all n locations
agaatgctcatccttgccctcagaagaaaagaaaacaacacagggagagaaagttcccgatcaaagatcggaggaaagaaagaagaaagttcccaatcaaaggtcgggagaaaacaaagaataaacaaaattcctaatctaaagatcagaagaaaacaatagaaatatgccaaaagatcttcggaccagacaatatctaaacaatacagaaaaggaaggaaaccacgacctacagtggtcctctcccttggattgccaaccaaaatcctatgtgctagcgactttctcgccccgcactanaccaaaacaaaaaagggaaaggccagaacactcagagccaaattcctctccaaaacactattccccaagaaaaggcctatggtccatgacacacgtgaatcttg

SEQ ID NO: 82196 - DNA, 380 bp, Glycine max
  unsure (1)..(380): unsure at all n locations
tagcttgtgccaataaagatggagaatatattttataatagntcaataccatctcatctcttgagaatctacacccttgtggagtggatcccacctcaagagttgcaatcttacatactgagagaagatcagtggaagactcactgacatataagcatctttataggttgatgagtactctctcttgcattcttccattctacttttgaccaaggatagttgaccatattcctcagaagcatcactgaatatctcactagcagccttgagcaccagatcactttgcgactgatatgcttggctctcactatcactatcataagtgattgantcaccatgtattcaatgatcatcccattgcatggatgtgaccttattat

SEQ ID NO: 82197 - DNA, 408 bp, Glycine max
  unsure (1)..(408): unsure at all n locations
accggatcttaagcaccgcggctgcagcttgagatatggctaccgttattggatcaaagngggcctaaaaagaggcagatctgatcatcatgctttgataaacgcaaaaaaaaactagggcatatgaagagggtgaaaatgacggacacccccctgttgtgactgtcattcctatacagccaagtttcccaccaacccaacaatgtcattactcagccaataacaaaccttctccttacccgtcacccagttatccacaaaggccatccctagatcaaccacaaagtctgtctaccggacatccaatgacgaacatcacctctagcacaatccaaatacaccaaccaacaaatgaattttgcaggagaaagcctgtagaatcaccccaatttagtgcctatgctgact

SEQ ID NO: 82198 - DNA, 301 bp, Glycine max
agcttagagaggaagcttaacggttgttaagaattatagagagaaaggggctcgccattgaaggtgaaaatgatggagagaagttgaacattgaagtgtgtgtcacaagtggcacattcatcaaacttttgacaagtgttacacatgcttctatttataggctaggtcactaactacatgaaagcttccttgagaagcctatttgagaagcttccttgagaagcatagagttagctacacacccctctaatagctaagctcatgtcattgagaagtattcttgagacacatccttgagaag

SEQ ID NO: 82199 - DNA, 411 bp, Glycine max
  unsure (1)..(411): unsure at all n locations
agctntgagggtgcgtagcccaccatcttttcatagtagagtatcgataatgtgtctaccatcacgattatcgtctccctttccatcattgggggtaccacttgggccgccagatccctccaccttttaggcgtgttctttgaaagatccggccccctttttgcaaatgttctatagttgcatcctatccggaaccatatcaaaattgtactgatactgcctaacaaaggcaaccattaggtccttccaagaatggactcgggaagattccaagttagtgtaccaggtaacagctaccccagtaagactttcttggaaggaatgtnatagcaattcctcatcttttgcgtattcccccatcttctgacaatacatctttagatnggtcttgggacaagtagtccccttgta

SEQ ID NO: 82200 - DNA, 455 bp, Glycine max
  unsure (1)..(455): unsure at all n locations
agcttgtgaagtctgcagnttgaccaatcacctctctggctagnggctagtggccaaagccctcatcagtgaggcagcataatcctaaggcgccaactgtatccaaacgtgaaaagctgcatcaccgcaaagagtttcttgcctgtaaagatcatactccacgagggagataattcaacaagaaaactatctttcacggacccagttgcagttctttacacctgccaacttcattggagcaacatcacgtgcttcatgctcttgaactctttgatgcagtgctgcctctatctggcgcctgggactntgcgaccataacttagttntcctaatgtgctcagtggcctttacttgctagncgctattcttcatatatnatnctgatctagntaaattcaatgaagtcatatgggagaatatgagatatcaatcatatcatgatgcaagttagtaat

SEQ ID NO: 82201 - DNA, 434 bp, Glycine max
  unsure (1)..(434): unsure at all n locations
agcttcaccttnggccgctcattatggatctatacgtgattgaagaaagggcaaatcaactaaacctcctccaaatggagtgaaaaatttaaatgaggtttgaataggtatttcatgccttgatagtggcgaatagcaacaccctttcttatttttgatttatgtgaagtttgaaacaaatcataatgacatttataaaatatgttaaataaaagttttaaatttgactcacatataaataaatcaaatttaaataaagttaattttttattcatttctatattatacattaaaatacataatttgtccagtaatattctcactctgtcaatcgaaactcccaatattctctttggtttgtgtcacttctttgaaagtgatttatacattancaagtaactagtaaaaaaaatcactatctaaactataatctt

SEQ ID NO: 82202 - DNA, 453 bp, Glycine max
  unsure (1)..(453): unsure at all n locations
agcttataaatatacattatctcatccttttgattatataagtatgtgttataattataaggttaaggcctgacctaattaagtatgttagtataggtcaacatgagtattcgggtattatttatcacaagttcaacattcaattttacctaacttcatataatgctatatgaaatattcattatataatttcatttcagtactgatgacctacttttgactaaatcatagaagtattaatatatgtacgagcatattaatcctaaccgccgaatgtatcaaacagattcacaaaaattaacgacaaaggtacagaacacaacagccattacagcaacttaattacaagttagaacgatataaaggccccagaataccaaccaaaaggaagatgaacctcgnactttacttctttaatttttaatcgtatttatctataaataaatgtatatc

SEQ ID NO: 82203 - DNA, 471 bp, Glycine max
  unsure (1)..(471): unsure at all n locations
caagcttntggagtataaacatgggaccaactcattttatttcaaaaaggaagtcgtatctagtcaaggtcttagagaccatacaagtttcctaacgatttctaattatgtggaccattaagtctatcatatgctgacaatagccgagaagcccatgaatctcttcgggggcagagtaggtgtctgccatcgccttggccttggctaacaatcggggaagttcttgactcccgttcaaggtaagagcaaaccgatccatccacatggttgcctcttggtgtaaagagtcgatcacccttcctctagcctctttttccgcgtatactcgggcatattcgttcgcaatcctatgctcgtgggccgcgtgtagacctaactcttcttggtacttgacaatgataactaacatgttggtctccgtctcgcataaacgctgagacaagctttctttggaccttgaacaggcaacta

SEQ ID NO: 82204 - DNA, 360 bp, Glycine max
agcttgtgtttgtcttcttctaccctacactctttattttccgctgtgtacttttaattgccgcttttacttttggttaagtgtttgttgctgttctttactttcttaacttagtagtaaaagcctaggtgaatctagtaacattaagaaggataaattttaattagtcaagacacattaataattagttcaaccccctcttcttaattattctgaggacacttgatccagcaagtagtatcagagcaggtatcttgagaaaaggatcacaacttcaagataaatggcctctataaattctctgtttgtcaaaagaaatctatggtataggtcaaatctgaaatcattagaagatcatga

SEQ ID NO: 82205 - DNA, 457 bp, Glycine max
  unsure (1)..(457): unsure at all n locations
ccttaagtcacgcggctgcagctattcattataaccttctctcttttttttngttgnctctcaaccaatggattctccactatgtttttcacttgaggctattaaagcatttaatgcttgcattaaatacacgttcattcttcatgcacagttgatgatagggtgacatgtcttatacttcagcataaaagacacttcttccatcggatcaagtctgcaccaacagagtgcgtcttctgataaagatcaacactgctagattgtagactntatttattcttcataggaatcaatagattctagaagaatgctttcttcaacaaagaatctcagatataaagtattaaatgaaggcctaaagggctacttaatgntatgtcacatggcttatattgatgtatnttcanaaaactcaaacgcagaaatacagaccatgatctgatacacatcaaaaaca

SEQ ID NO: 82206 - DNA, 450 bp, Glycine max
  unsure (1)..(450): unsure at all n locations
agctttttgagccataaccatttctctactcttatcataaccatccaacatggaattccatgaaaccacatttttttgctgtatactatcaaataccttttgagcccacatactattcccgcaagcagcatacatgtgaatcaaagaattctggataaacctatcagattcatgcccagtttttataatgtgggcatgcacagatacaccagtttcctggtttaaaaggcgcgctgatgccttcacaagaaatgggtatgtaagataatctggtgcaaccccaagtcgcagcatctttagaaaaatggatagggattggattggattttgctgtttgagtattctcttatgattgtatccagctaaaaatgttgactggaaagctggagaaaccctgangaatagttatgtcgctgaattgacagacagaaaacaaaattttgatataat

SEQ ID NO: 82207 - DNA, 466 bp, Glycine max
  unsure (1)..(466): unsure at all n locations
agcttgaaacatttaagcaatatacttgcttttttgctatttaataggtttaaaacagagattgaaatagcagcctaccaagcatcacaagcaaatctcatcaagagatccttcgagacccanagcaatgaggcctaatccaaatacaatgacattttcgaaaacataaaacctaataattaatttaattatttcaaatcagaatatataattattcaaattaccttaattactatatttaaaataatcttaattaccttaattaagacatatactaataatgactataattatttcaaattagaagatatacttattctaattactttaattactatatgtaagataatcttaattaccttaattaaaacatatactaataatgactgtaattatttcaaaataaaaaatatcctaatctattacccttattttatagttaaataatcttagtaccataattaaa

SEQ ID NO: 82208 - DNA, 417 bp, Glycine max
agcttgcggactatacctccgaccaattctctgtcgtgtttctggctcagcccagatttaaggcgggctgcagcaccggctccgcttccctaactgtattggaggcggttgccgtagctttatcctctatagttttctggagtgataacatgaccttcgagatggaagccatttgatcttttaaggccgatagatcggccttcatctgttcctgcatgccctcttcattatccatttttctggatcgagtgttatacgggtgccttggcgtttccttaattatgatgacactcctaaagaaatcaacactgcgagtatgcacccatacatgacatgcatatgaatgatcggacacttggatcaccccaggtttttagatacgtgagagtcaaactctatttataaaagaacaagttt

SEQ ID NO: 82209 - DNA, 332 bp, Glycine max
gaccttagagcacctgcggctgcagctttaccattagaaacacatgttgtttatagacataaagggaatgatatttgagttttgaaatgcttgaatgcattcgaaactctcatcagaaaagaaattcatatctatgaacttatggttaatgatagaatgagaggagaagaggtttgtgtaccatatacgttgttcttccaatgagaacaatgaggatgaggaaatggaggaagaaattgtagtatcttgagcctcggagtgccgttggcttctacttgaagaacccttgcgcttcttcaatgggtccaccatttgagagacttattcgaaat

SEQ ID NO: 82210 - DNA, 457 bp, Glycine max
  unsure (1)..(457): unsure at all n locations
agcttgatttgcacataattgagaggggcttagagaactattcactactcagaggcctgaagagtgtgaatttcaaagagcgtagagtagagcaaggggccaagttttcatcttttagggagattagtgagtttttgagtgattgtgagattcctagaggtggaggagacatccccactctttttaagcaagcaatttctcttgattcctcttcttcagagtaaaaagaacttccttgccatgaaaggctaaaaccctcagttgggggattcttattgagtagttgatgtgaactctntttcatatctaattaagggtgggttatgtgttcattgcttctatctatgcttattggatgcatgcttgtggcttgatcacccatttgtctgtgatgttagggactttagcattgggaaatgtatgggttccttataacttaatagagtagggacttgat

SEQ ID NO: 82211 - DNA, 414 bp, Glycine max
  unsure (1)..(414): unsure at all n locations
agcttcagatcaaggtaaatcataatctatttatccaaatcccatcaatttagtgaattctcaaggtttgagaggtgaaaatgagagatggttaattntggggtaatctctcatctcaatcaagtctataacattgatttagacttgctcaaactggttttaaggtgaaaaccccagccattcaaaatttgacctctcaacacccaatttaccctagaaatggctctcctctctcatatttgtcactcattnttctcattngctctgcccaagctttcctacaagtcctaattgacattntatactaggatcaacccactttaaactccaatttccactaaccccaaatttggcttttcaaaaccctcanaatctcacacttttccactcacatcactaccattctcacattta

SEQ ID NO: 82212 - DNA, 470 bp, Glycine max
  unsure (1)..(470): unsure at all n locations
agcttgggaatccaaatgtctcaattacacaattagtaaaaaaattgtttcaaaatcgcgtcccaaaataaaaaatgatcattatttcaataggattattttgaatcactttagaaacataaatgactaaattggagtttctaaaacatataggaccaaactaaacaaagactaaaagataaagaatcaaacatggaatttagtaaaaaaaaaaatattattcatggttcaaaaatgcataacacatgcacttgaaaagttaagtaggaattttaaaatgtgtagaataatggtttgtaacttggaggtcatgattacacaatacaaatcaaagntctagtctaatttattggtcatacttgtgctttcgctgcaaatatgccttattatatttagaatagttgaaattcaatatcgcatatttcatattatgattaactaagtgatatatatcaactataanaaagttg

SEQ ID NO: 82213 - DNA, 374 bp, Glycine max
  unsure (1)..(374): unsure at all n locations
agcttgtaggccttggatcttcttcatcaattctctttgnttnttgaagatcaatggcagaggaatggagaaggaggaaaggtgattggagatgccacttcaacgagaagatgagtcaagaacttaaaggtagaagaagatgagtggagggaaagggagagaaggggcacaaaatttatgcctcaaatgaggtttgaactttgaagtgtaatttctaaaatgatcaaagttgaaaaaatgcacacacaaggcctctatttaagcctaagtgtcacacaaaattggagggaaatttgaatttcaattcaaatttcgcttgaatataaatttgaattggtggagccaaatttagagcccaaaattcactaattatg

SEQ ID NO: 82214 - DNA, 364 bp, Glycine max
  unsure (1)..(364): unsure at all n locations
agcttgaaggtgtgtaacccaccattntccatattataacactagtaatatgtctactatcattggtattatttctttcttcgtcattgagggaaacacttgggctgccagatccctccacctttgggcgtattctttgaaagatccgtgccccctttttgcacatgttctgtagttgcatcctatttgaagccattatactgacactgcctaacgaaggcaaccattatgtccttccaagaatggactcgggaaggttccaagttagtgtaccaagtaacagctaccccagtaagactttcttagaaggaatgtaccagcaattcctcatcctttgcgtatgcccccatctttcgacaataca

SEQ ID NO: 82215 - DNA, 400 bp, Glycine max
  unsure (1)..(400): unsure at all n locations
agcttgggaagttgatagaggataaagctaggtgtgtcttgtatttcatgctcatcgntaagagtataaacctttttgacttgtatgtataatctaaatttttcattatgtgtgctgcagttnttatcttgctgcagagtgtcgtgtaataaagacatgaccttcaaactattctcttttcgtgctccatgatctttagcaattgattgctgaaagagtaaaacttattttagtcttccttcaagcctgacaatgacaaatggtatgcatgttgggaagaaaagaaatgataagagggatattgtagtttaatttggtggttgacatgacaatggtatatgttcaatgtattggaggggcacctgagcacgtcatgcgtcttattatgcatatgaattct

SEQ ID NO: 82216 - DNA, 394 bp, Glycine max
  unsure (1)..(394): unsure at all n locations
agcttacctgtttatcaataatgatatcatttgctttcatctttgagttgaattgtaattgtcaaattgaaccttaagctttgaaattattatctccatttaccttgcctaggttttaggagagcacattggtttaagacaattttaccccaattttgggggaatttgttggatggataaatttaaaggtaagaaactacaacacacatagcaaattaataagatgttatgtgttaaaaaaaaggaagaaaaagagaaattcaaataagtgtgtgttgttaaaacaaagtcaagtgaaaggctaatgaatgggctatgtggatcgaaaacacaaactgggttagtctaggatttgtgctctcttagaactcaagcttttgcattctanaaaaac

SEQ ID NO: 82217 - DNA, 374 bp, Glycine max
  unsure (1)..(374): unsure at all n locations
agcttgccacccagctcgcccttgttatcttatctcgcccaggcaagctaggttgctttctcgagaagcaaccaccttttggaggaatattctggaaagcccaagtgggcctggttgctatttgcacccccatttttactaaatacacccccttgctcttttttggtgattctttttccgtaacggtacgaaattttacgaattttgtaacgatgcttgttntcttttcgtaatgttaccaaaccttatggattatggtatcatcccttttttgcttccgaaatgtaccaaactttacggattgtgcactaacacttttaatttctgggatgtcacggaacttcacggattgtgctacaatgcctctttttgac

SEQ ID NO: 82218 - DNA, 443 bp, Glycine max
agcttctccaaagggcatggttatttctattttcctgaaaatatctaaaaatctcgccaaatggcggtccttctccttcttggaaggtaccacgagatatggtacttccgcaccttcattcataacttagctttttctcttttcttcactctagcttgttcacttctactcctcttttcattcttttttttcatctttttcattttttctttttctttatctttttctacttctttttctttttcttggtcatttaatttctttttcttgaccattatttagttttccttttcctgattgctttcacctctcacatcatctttcttttcatcagtacctttcttttcagcagctttcttcttggatacaacactatcctcatcctctggcctcacaaacactctactccttgtatcatagccttacaatcctccttgggattc

SEQ ID NO: 82219 - DNA, 370 bp, Glycine max
  unsure (1)..(370): unsure at all n locations
agcttgtgcctcttcacgtatggaatatgtttgtatcatatagatccaaagacccttaggtgctttgctgatggcttcttcccgttccaagcttcaattggagtcttgtcttttacagacttagttggacatctgttgagtatgtaaacaacagtgtagactgcttcagcccagaatgcgttaggtagtcccttctccttgagcatcaatctagacatttccataactgtgcaattctttctctcggacactccactttgttgaggagaatatgcgattgtaagttgtcgctcaatgccttcatcctcacaaaatctntcaaactcgcgagaggtgtactctttgccgcaatcacttcttaatactttta

SEQ ID NO: 82220 - DNA, 421 bp, Glycine max
  unsure (1)..(421): unsure at all n locations
agcttatagttattggagggatatataaacattccaaaatcaattgtacctttcaagtaacgaagaattctttctgcggcttttaaatgaggagaggtaggagcctccataaagcgacacacaactcccaccgcatatagaatatcgcgccttgtattggttagataccttaaactccccacaagactcttgaagatcgtggagtctaccttctctccttcatcaaactttgataacttcaagccaccttccataggtggtgtcacgggattgcaatcaagcatattaaatttcttcaacacttcttttgtgtacctttcttgtgagacaaagataccattctttggttgcttcacttccattcccaagtaatatgacatgnagtccatatctgtcatatcaaattcacgagacatggact

SEQ ID NO: 82221 - DNA, 374 bp, Glycine max
  unsure (1)..(374): unsure at all n locations
agcttccacaacatccaagcaattcaacattcaaacatcatggactatccaaaaccaagaaaacagggcagaggcagaaaactctgcccaaaacacaaaccaaaaccacaactttccttactcaaaaatcccagtaacattctcttcgttccaattcgttcaccgttggatcgactcgaaaattatactggaggtccctaatacataagtctacattttgacctttgggatctgctagaaaatgtccagaacccaatatgtacaaccctttccacaaccagccatgcataagcattntctgcacaagcacaaaattctgctgcacatttcaacagcanaattctgcataatagtgcagaatttcgaaatcactc

SEQ ID NO: 82222 - DNA, 327 bp, Glycine max
  unsure (1)..(327): unsure at all n locations
agcttaagctccttcaactgcacaatgctcttaatattngaagagtatccttgtggaaccttcacccgacgaagacactggcaaaaacttatcttctccttcttggacaaagtatggcaggctgggggcaagtaaattttcttcccatcagaccttggatgcaactgtgatcgtatacccatatcagctagatcttgacgggtattcaagccatccttcctcttgccttgaatgttaaggagcgtcccaatcacactgtcacanaacattttctccacatgcataacatcaatacaatgtctaacgtcaagatcacaccagtacgga

SEQ ID NO: 82223 - DNA, 420 bp, Glycine max
aagggatattgaggacatcttaatatacaatgccaacgcaagattcctatctatatctgttacataacctcccgcatatggatgacacagtaaggctataagtcggcccacaacttcttgacttggacccctaactgctatactcaatgaagcaagttatttggatgaaattggcaatatggccatccagcagaggtgctgttacagtatggctcttgattgacagataaaagaacttgctacttttagaaataggcgatacataatatactagaaccttataaaacacaacaacctttagggatagtccatgatgaatgcaaaaatgacagatataccactagaagacttgcacaaaggagagaggtatgaccaagaagactgctgcttcgccaggatgacacataataatcataaatt

SEQ ID NO: 82224 - DNA, 454 bp, Glycine max
  unsure (1)..(454): unsure at all n locations
actaagctttatggctcctcataacttaaagacatacaccttttcctgcttttgggaatagattcatcaaatacaacatgcacaaattcttcaatctaatgcattcttattgaaaactctatatgccttactagtatatgagtttcctcttcattggctctggcatcaaacttgctaagtgattctttaccatgtttaacacaaagcactngcaatcaaagaccttgagatgtgatatatttggatttctacctttgtagatctcatatggtttcaatttcaaaataggtcttatagacattctattgagaacatagcaagttatacttaccgcatctgcccaaaaaatatttaggtagatggggtttattgaacatatgtcttgttaattctcaagagatctattnttcctctccataactctatcttgtgaaggattcggagcttaaaatat

SEQ ID NO: 82225 - DNA, 464 bp, Glycine max
tgcagctgcttggggctttacggggctggatttttatcttcaatgaggtccttcaatggtgattttccaccatggagatgcagcggaagacaatggagaataagtgagaggaggcgccatccacttaagaatatgccatggaagaaagagctctaccaccaatatgagccttgataagaagcttggagaggatgcttcaatggaggaaaagagagacggagagaaagagagaaggggagcacgagattgaaggaagaaaaagggagagaagttgaactttgagttgtgtctcacaagactctcattcatcagagttactactagtgttacacatgcttctatttatagactaagtagcttccttgagaagctttcttgagaaaacttccttgagaagctactttgagaaaattttcttgagaagctagagcttagctacacacacccctctaataactaagttc

SEQ ID NO: 82226 - DNA, 448 bp, Glycine max
  unsure (1)..(448): unsure at all n locations
tcatttccaaatatgcatgtgaattatgaagcataaacaagaataaagccaaggctattgtgcaagcaatcaatggtgcaaaacacaccaaaagattatgatgatggatggctcanattcttacaaaggtaaacttatcactttcgaattgagctttcaaaactatcatgacatgtagaggaaaaacaatgatttcaaatcacaaaatgtctagagacttttattttcagaacaattacccatttcttgaacatatactataattcaaagaaaaatatgcaaagttgtacatggcaacagaattgacctaaaatattagactagagaccccactgaactaacataactattatagttgacacccactaactaaagaacatacttaccaaaaccaaaacactcccccatactaaacaacacatgtctcaatgtcacaattaaaagataa

SEQ ID NO: 82227 - DNA, 376 bp, Glycine max
tcatccttggaaaacatcaatatatgaattttgtcgttgcataaaatctttgtttgtttcttgtcctcataaaaataaaatatatactgtttgatccagaattaagctcgtgtgattctcatacctacatgtcactccttcatttgtgcaattggtgattattctctctttatgaatcttttttgggggacgtggggttaaaatcctcacaaattacaaaaagctgccacaatttttcaaatggattaacactccttcatcatgaatttgacaaatagtaacaaaaagataaaggattttggagcatctaaggtagtgttagttctataattgagtggtgcatttggtcaaacactctacgagcataagtcgatgt

SEQ ID NO: 82228 - DNA, 381 bp, Glycine max
  unsure (1)..(381): unsure at all n locations
tttgtgcaagcattgcttcataaaatgactgatatgataaatttttaccagtcatttgaaaaatttggataagacacatgctgctttagaagtttgatatataccaattatctcatgttacttntaagtaaaaaaataacataagctcgtgaaaaacatttccaggaaaatgttggacatttgccattatttgtgctcaaatcctacctgttggctgacaattctttatgaaaaatattctttaattatccaaaaatagaagatcaaataatatgaatttcacgatacttccttgtgtaattaatcaattttaaaaagttcgcactcggaggggatgagactactcaagaactttaacgagagatcattttgtagaaacac

SEQ ID NO: 82229 - DNA, 340 bp, Glycine max
ttctaccctaaggttgcactaacctaccctaaatgctacaaatatagtgcataacacaaccaaagctaaaaagaaggccacctacctctaatgcaaatgggtccaagggctggcggagaataagaccaccaccgagctcgtcgcggaagagagaagagaagaacttaagaagctttcgtggaagagagaaatgaagaagagagaatgctctcgaaagagggaaaaaaagctttttaagttcttaaatgaagggcaaaattgacctttcaataaattgttgggtgcactagcaatattgctgggtgcacctagcatatcccaacaagttatttgcgataat

SEQ ID NO: 82230 - DNA, 361 bp, Glycine max
ttctatgtgggctccaaaagatgcgaatattgatcattctactatgaccactgagaacaccggggcaaataacaatggtgagattaacgagaaacctgctggattgcatcctgaccgcaagttccccccaacccacaatgcattactcagcatgacgaatttctcctacccaccccagtatcccaaaggcatccctaattcaccacaagcctgctatcgcacttcatgacagcaccactttatcacaaccaaaaccccaccaagaatgaatttgcacgaaaaccctgaaatcacccaatcagattctagctgctgctccatatctcttgaattcatggaccatacctaccaagtcacacct

SEQ ID NO: 82231 - DNA, 467 bp, Glycine max
  unsure (1)..(467): unsure at all n locations
cggagatgatgcttcaatggaggcaaagaaagagagaatgtgggagcacacaattgaaggaataaaagagggagagaagtggaactttgaagtgtgtctcataagactttcattcatcaaagntacaacaagtgttacacatgcttctatttatagactacgtagcttccttgagaagctttcttgagaaaacttccttgagaagcttctttgagaaaacttccttgagaagctagagcttagctacacacacccctctcataactaagcccacctccttgagaaacttgcttaagaagattcctaaagaagctagagcttagctacacatacctctctaatagctaagctcacctccttgagatgagaagctagagcttagctatacacaccctataatagctaagctcacccgcatgacatanaacattaaaatacaaacagaagtccttactacatagactact

SEQ ID NO: 82232 - DNA, 469 bp, Glycine max
  unsure (1)..(469): unsure at all n locations
ggatctctagagtcacctgcggctgcagctttgaaggatccactttttattttgtattttgcggagttggttatactagtctgcatgtctatgtctttggccctctctctctctctcacaacagcaaactccgacttgtgtccaacaaatatgggatctgcccactctaaccaggttgcattttatccagttttaattttcccttcaagtaaattacttgatgttctcatctcacccgttataattgcaagctaccatttttcgtttttattgcatcatgttgtgcttactgcattggttttatttcaaccctgttgtgcttatctaaaanatgttctaactttttttcatcaatattctaacttattttaaaaattaaaacacctaatatgaatttatatataatgctattaatttggtatatataattacttagaatgaattacctttttctcatcaatatgtttag

SEQ ID NO: 82233 - DNA, 484 bp, Glycine max
tctacggaagacaatacaagcggcgtcagccatcaacatattacagataaaactaggagcgaaataaaaaacatgattatgttcggtcaaactggcaccatgcttggccaacaggtctgcaacttggtttgcttctctatacacatgaacccactgaattgtgtttcataattatgaatactatgaattttcttcagtagctggtagcacgaatgagacaagcaacaaccttgattcaacattttaacagctacaggtgagtcacaatagacccaaattttcctaaagcctctcctccaaaccaattgtaggccataatagataccccacaattcttccataagcactgaaatatgctattaactgcactgagtacgcacaaagaaaagaaaccatttcatctctggctactctctcagaagaagctcttgatcaaagataggatacaacaccatcacaattaagtgcggttcacctggcaaag

SEQ ID NO: 82234 - DNA, 451 bp, Glycine max
  unsure (1)..(451): unsure at all n locations
agcttagactaagttcagcctaccatcctcagtctgatggccaaactgaacggaccattcagtcattggaggaccttttgagggcatgtgtcttaaaacaaaaacgaagctgggagagttttcttccattgataaagttcacttataacaacagttttcactctaccattggcatggctccctatgaagctttgtatggtagaaggtgtaggacacccttatgttggttagaacccggagaaggtctcaccttatgaccagaagtggtacagcaaaccactgagaaagttaagttaatttaggaaaagatgagaactactcaaagtaggcagaaaagttatcatgataagaggaggaaagatctggaattcgaggttggtgatcatgtattcttgagagtcactccgtggactggggttggtcgagcattgaaatcccgaanactcacacc

SEQ ID NO: 82235 - DNA, 402 bp, Glycine max
  unsure (1)..(402): unsure at all n locations
gttacggcgtacgtttaaaccaagctcgatggtggtgcgagcctttgacggtactctgcgggaagtgatggtggatatccacatttccattcagataggcccccacacttgcaacgtggtgttccaagtaaaggatataaatcccgcctatagctgcctcttgggaagaccactggatcatgccctgtgagtggtccagtcaacgcttcaccaaaaattgaagttcgcagtgggtggacttttagtgatagtgtcaggtgaagaggacatgtttttgagtttgccctcctccgtaccatacgtagaagcggtggtgaatcattggaaatggcttctcaatcctntgaagtggggactgggcctttgtggaaccaagcttattgcatccttttttgttaaagc

SEQ ID NO: 82236 - DNA, 415 bp, Glycine max
  unsure (1)..(415): unsure at all n locations
agcttgccgccacggagntttccgactatgctcttgtgtggtggaacaagctacaaaaggagagagcaagaaatgaagagccaatggttgatacatggacggagatgaaaaagatcatgaggaagcggtatgtgccggctagttactcaagggacttgaaattcaagctccaaaaactaacccaaggcaacaagggggttgaggagtatttcaaggaaatggatgtgctcatgattcaagcaaatattgaagaagatgaggaggtaactatggctcgatttcttaatgggttgactaatgatatctgtgatagctgcaggagtttgttgaaatggatgatttgcttcacaaagcaatccangtggagcaacaattaaaaaggaagggagtggctaagaggaagtntaccaacttt

SEQ ID NO: 82237 - DNA, 412 bp, Glycine max
cgaaagtgaactagatgccttggtaacctggtttcccatctggccatgaatcacaaatctgcacctgttgccagactctatggtttatgctcctctgccgaccaccacacagacctttgcccttctgtgcaacaatctatagcaattgaacagcctaaagcttatgctgcaaacatctacaatagacctcctcaacctcagcagcgaaatcagctaatacaaaacaattatgacctctccaacaactggtacaatcccaggtggaggaatcatcccaaccttagatggtcgagtccttcacaacagaagcaacaacaacagccttattatcataatgttgctggcctaagcagaccatatgttcctccaccaatgcagcagctacagcaacaacaacaaccctagaaacagc

SEQ ID NO: 82238 - DNA, 128 bp, Glycine max
cagagctcacggaatcgaacaaccatcgtgaggatgaactgtaaatccgtgctgcgacagacactccaatacagtatagattgccgcctgacgcaacacatacaatacttcatgattgacaatcattc

SEQ ID NO: 82239 - DNA, 369 bp, Glycine max
aaatgcgcataaacccaccatcccgtgttgcccacctgcaactgagctgacgtgctgccacgtatcccatatgcgcgtttctcttaacaccgggttcctataaattctcgagcttgctcgcatccaagttattctacatccaaattatacatatctacaaccaagataaacagggccaaggaagaaaactctgtccaatacacaactcataatcacagcttgtgacatacaaataccccagtaacattttctttgtacaatacgtataccgtggacgactctaacttttactggaagcgctatacatattttacatttcgactgtgtgactaccacatgcatcaatcttattttgactacttttccaca

SEQ ID NO: 82240 - DNA, 426 bp, Glycine max
gaccttttccaacctacggcaccctggttgcccaaattcctttgatctctaagtacatcaaccaatacacgttccatttcccaactccatgtaaactaacctcttgattcctcattattttctcctaaaacttttcttttgtccgtcattttttcattagacgacttcattgaagttaatgtcacttattcaacctgcacatgacataacatatagtagatatgacctactctattcatttgactagtccactgcacaatcatagaaaatatttcacgcaaagtttttatgcaatagcacagtacataaaagtctatcttcaatagaacagtacaatagtaacagagcacacaaagtatgtcagcaatagcaaactacatttaaaaaagaactatccctaagaaaagtttctcctaacttgatagt

SEQ ID NO: 82241 - DNA, 487 bp, Glycine max
tacggacacttagaatactaagctgggaatacaaccaaatggagtgcagtctaaaagtattcagtgactctacagtgataatcaaccaattgaatggagaataccaagtcaaaaaactgatcctgcaaaaatacgtcaacaaaattggggtaattaaagaatattcaaaaggctggaatttatctacattccaagagaggaaaatgaaagaaaaaattcactctcaaaattatccaacataaaggaacatgtgggaatggaaaacatagttcgtcaaacaattcacacttcgaggtttgtcatgatgatagaaaatcaagaaatttggatgactccaattctagagtacatacaaatttggcgtcaacctagaagaattatagataagatagacattgctaagaagaatcaccaaattttgtataatagatggcaagctctacacaagaggattcactcggccattattaaaatgcttaagagcagc

SEQ ID NO: 82242 - DNA, 391 bp, Glycine max
  unsure (1)..(391): unsure at all n locations
gcttcaacctttgcacaccatttcttgttcaaatcgcgaaaagaagccattttcggagtcgtgaagcgcacctctacgttgtgggacttcaaatttcaggtttgggtagacttctttctcgcataatttcgtgggtattgggtgtttgggagatatgatgggtagttntactaggtttatgccttatgatagttatttgtgatgaaatttgttgaaagaatgctaaactcgtcatgttgggtgtgagtcaagcttaccncattctgtttaggaatttatgatgatgtttgtgtgctgaaattgctgatggaaaactgatagagatgaagggtagagttaacctagggttaanaagtgagaatgtagtgatatgagtggaaaagtgtgatgc

SEQ ID NO: 82243 - DNA, 461 bp, Glycine max
  unsure (1)..(461): unsure at all n locations
agcttctagagaanactacgtgaagctgcctctgtataaacgctgcccagccttcgttaaccggttgatcttctcgaaatttggtttgcaacttcaaaagacactttaacatgatttaaccgttgggatctttaagaaaatatcgggcgtgtgctacaagcttccgttcccgagagcatctcttatttaagcatttcagccttcgctttcttgtagcttaggaaaaatgtcatttcttcttctttctttcttccaaatccatttctaaagttccaagtactttctccatcacccacatccaccattagccaccacaaacatcattgttctccattgaaaacccacaccgagaggaacccttcaaccgaagcagaatttccaacttggcttggcggttcggtagagaacgaanaccctaatctgatctnttcgtttctttcgaggtaaccatggttctatgc

SEQ ID NO: 82244 - DNA, 471 bp, Glycine max
tattctcttctcttataaagattcatgaagattcttatccaaacaagaccttaattggagatgtagtagattctatcttccctcttacgtgggtttcatgactccttcctatctgatgtgtaaaagtagcattcttgtcaatgtgacaatattccctcgtgtctaggtgaggagaggcaataccaatgcagatgggatccattttataatcccacctaagtagaaattcttattacagcaagtggaaatattttcctccactcatttaatgcaagacaaaaaggcacttgatttctaattcaacaacataattatgcacttgttcttgcttccaataatgaggtgaaggaagaattccttctactccaccactaaatccgactttctctccacccaccttagcatgagatgaactctagtgttggagaggaggtgaagaacacacactctatagagacaatgagaggaatg

SEQ ID NO: 82245 - DNA, 454 bp, Glycine max
ctgcagcttactattacaacaaactctagctcttatcgagtcataaatggatgtttcaatgccatgaaatgagcatattttgagaggcggtcaacctctaccaagatcacctcaaattcttgggatcatggcagacccataatgaaatcaagagatatgtcttcctgcaccacctcgggaatgggaatgggttgcaaaacacccgtgggcaacattgcttgatacttattcttctgacatatatcatagccccggatgtactccatgattgcccttttcatacctttccaactaaaggaaccatttatccttttgaatgtcttggtaaaacctgagtggcccccagcgggagtgtcatgacaatccttgagcaaggtgggaatcagagatgaagatgctagaagcaacaacttttccttatagaatagccacccctctcttgccatatagtcag

SEQ ID NO: 82246 - DNA, 390 bp, Glycine max
  unsure (1)..(390): unsure at all n locations
cttcgcagagcttacggtancatctgtgacctagccatggtagaagtctccatagaggtcattgcctccctcgcccagcattatgatcagtcggtgaggtgcttcacctttggggacttccagctatcacctatggtagaagaatttgaagaaatcctacgatgtcctctagggggaaggaaaccatacctcttctcagggttatatccctcattatctagaatttcccagatagtccaaatctcggcccaggaattacaccacagaaagcaagtcgtaaatgaggtggctggaattccgagaaaataattggatgcaaaagcaagaatctaggcaggtaaagacgagtgggccccgctcatagatattctcacactgttgatcttcgga

SEQ ID NO: 82247 - DNA, 459 bp, Glycine max
  unsure (1)..(459): unsure at all n locations
atgaatttccttgaaagcttcggatttatggatatagcgcttcatacattntcttacgtgttctgtttatccaatactcaatgatacttagctcttcaatattgcatgttgctgtctctccttccacttgggaaggtgtagaaatcttcacacaaatttgtatacagcaacattaatagaaaatggatcttttgtttatttgttttctctctcttactgttgactttctgcagttgcatattactatttcttcacaagcaaagtaaagcgaagcattgtttatggagatcagcctagaaacaggtaaattaaaaaactggtaaatctatctagtgatgttggtcatttgatgtattgtgtctaataatcttgaaaattgtggtttgcaggttggatctgtatctacctgccaatattggtgaacctaagccagttttgatattngtaactgggggagca

SEQ ID NO: 82248 - DNA, 431 bp, Glycine max
  unsure (1)..(431): unsure at all n locations
atctgtcacccagtgattctgcttccttatgtgaagactcttgccaagaggtgggataactgggactgagacgtcatcatgagagagagaagcaatgggtgcaattgggatttggtcaattctgaaagcagggatttcacgaatggagtaactgataggagggccattatacaccacagcaagggagtactcatagctgcttaagctatcttcagttctcacagtaacagttggcacagaagaaggccttaactttctcacaagagaagccatttcatgcattccagattgaagccaaaacccanaataaataccacagtactcaccaactcatcatctcaaaagaatccattttgatggaaagacccatgattgcataaacggtgaaatatcagcaccccatgtaggaaaacatggaaacacagcctcat

SEQ ID NO: 82249 - DNA, 355 bp, Glycine max
  unsure (1)..(355): unsure at all n locations
agaaacaaggggtgtgtgtctagctatctaattaagttgtacctatgcaatgagaactatttgtagttctttggtgttatgcaacaagtgaggagaaaatgttgcataatataaaagtgagatggcgtatgagacaggtatttatggacagaaaatagacccttcaactctcagtactgaaaataataatttggtagtaactccttgtgtgatatgtggagaataaaagaaaaagggtatagtgagaaggggtttgggatttcacctgtcaactttcatgctcaatgaattaaccgttcatttntctttatgtatgggaaaaaggtgagggagggacaatgaaagtgtctttttg

SEQ ID NO: 82250 - DNA, 443 bp, Glycine max
  unsure (1)..(443): unsure at all n locations
gaggcgactaagatgagatatctcttgtgaagacactcttcttctagataccctttgttaaaagtacttgaatatgagaagaataactctaggatagtcgccttagttattatatttatgttgcttctgataggtgaatgggtttgggtgaagtgtgttggtatgttgggttggcaatggttagttcatttgaaggaatgtatagtaattatgttcattcaaatacttctttctacaaattcatcatatttattttcctactttngagtatctatgagatcctctattttaatgcatgcaggcaaaaaaagatattatatattttcccctcccaccatccccaatccaattgtttatcaggtaccgacaaatggtgactagcttcaccctcaagtttacttaaattntattaactatagcaagactctttgttgcttatattt

SEQ ID NO: 82251 - DNA, 400 bp, Glycine max
  unsure (1)..(400): unsure at all n locations
attcagaaaattagagcttatctcttttatcttagtgagagcgattctcctaaattcttgagtgattcaagaacaccctggctgtatcaaaggactttcacaacctttgtgtgttgccctcgctggaaagagtgattcttttcttcctttcatcttcacccttgttctttcaaaccacaattccagaaaattcacctctgcccagaattatctcgtggccataactcccattttacgcactcaaattaagtgattcttgagcctaaattgaatttcaaaacgagacctttcacctcgctttggaatcacctcanttggagtcctgtagcttcagttattgccatttctatatttctggccagccatcactaaacctacatnttaccatcccattcatcca

SEQ ID NO: 82252 - DNA, 475 bp, Glycine max
  unsure (1)..(475): unsure at all n locations
atggacgaaaagaaagagggagagaatgatagatgggggagcacgaaattgaaggaagaaatagggagagaagttgaactttgagttgtgtctcacaagactctcattcatcaaagttaccacaagtgttacacatgcttctatatatagactagggagcttccttgagaagctttcttgagaaaccttccttgagaagcttctttgagaaaacttccttgagaagctagagcttagctacacacacccctctcataactaagctcacctgcttgagaagcttctttaagaagattcctaaagaagctagagcttagctacacatacctctctaatagctaagctcacctncttgagatgagaagctagagcttagctacacaccccctataatagctaagctcacccccatgacaaaanatacatgataatacaacaaaaagtccttactacaaagactactcataatgccccg

SEQ ID NO: 82253 - DNA, 389 bp, Glycine max
ctaagcaccgcagctgcagcttgttttaacaaaatcaaattctgtttttatctttgaggtgccactattgtctcctatattttaaccctcgttgcgccattttaagaaccgattaattttaattggccaaataattatgcaggtatattatttgggcccactaaaccaatttgatggttttaatctaatttcacaaattaatgaagcattgggcttgaattcagaaatgggcttggatttgaagaggacaaactattttattctacaaaaatagaacttatcttatcttatctagatattatttagaattgatctcatctaaataatatttcagctagatcgtatcttaacttatctaaaatcgatttgaatttatttatgggcctgga

SEQ ID NO: 82254 - DNA, 493 bp, Glycine max
  unsure (1)..(493): unsure at all n locations
ggacactataatactaagcttcgaaacagtgtgaggtcaagccctatggcagagcttgtttagcccgagtagtcgaagagaagttcaagttcatagccatcaaagtctgacaagagtatgatgaactaagggacgtcaatatggccaccgctgatgccttggaacgagaaaccaagaaggcccaaaaggaagaacacgtgccagcaaagttttgaggggctttatagggcagcaatagtaagctcaagctccgaagaggtgaaaggaatcatcacgggtcaaaggcatgatcttgaaggacgagctaaaggcttgccttatgtcgaaagaaatttgtcccaacagttaagcgagactgaagggaatatgtacgccatcatcgataagtgcanagagaagctaaatctagcggcaactcacgagcacaggctagaggatgagtacgccaagatatcagcatatagggaagtaagggaaagggtaattgattcat

SEQ ID NO: 82255 - DNA, 379 bp, Glycine max
attggccacgtatctactattatttgcacacgccccacaactgcggactattcagagaatgaatcgtcatatcggtgaaaggaccatcggtgaatcctttgacagctctcaacctctctttgatgagactgagtttttcccttgcctccattgcaagcaatggttcccccgcggagaaaagtaatgaacggattgagcagggttgagagactctcgcgatgttgggctgaggcagtgcatcaagcgccaatcccttggtggagaaataggggtagctgtcaatgtctctgtgggcgtgctcttgaggaccctcgtgggcacacccggagggctgccctttaacagtaggtcgagtggaatgattcatgctatcatgcat

SEQ ID NO: 82256 - DNA, 336 bp, Glycine max
tcctcgtggccatttcttgtgggtgatgaacgaaagcgcctaactgaatctaaaaatgcgaaataggatgaccctagggctgcgaactcgtcaatacccggggtatggcttttgaaaggcgggaaaagaagttcttgaatgcaaaaaacgtcccccctatcatcattcttataatttggtgcaggggtggctcgcccaggcgagctaacctgcactttttattttttttttttttgaggggaatattaaccatgtccccttccttctcatggattagcatcttgcctaacttgaactcacttaggttagaattaggtgctgattacttatttttac

SEQ ID NO: 82257 - DNA, 441 bp, Glycine max
  unsure (1)..(441): unsure at all n locations
agcttgagatgaggatagtgtgaagggtgaatctttctgctncttattgtgaccacagagtggtacctggagatatgtcgcgggggtcacgagaccttggggacgtcagatggggtgctattgcccaaaaccaagcttgaccaatcccgacccaacccgagcatagtcggtcagtgagaacctgtgatgtacctaagcaggcgagctcctggcagtcaacagataaaaggaaaataagaccacaaagcaaggaggcttgtggtggctggccagctgtgaatattgtgtaatatgtggattgtggcctctggtaatcgattaccaagggtgggtaatcgaatacaaggcttaaaattgaagacaggaggctaagatggtctctggtaatcgattaccaaggggtgtaatcgattaccaggctttgaaacgaagtcaggaaac

SEQ ID NO: 82258 - DNA, 427 bp, Glycine max
  unsure (1)..(427): unsure at all n locations
taagacagtaaccttgtgttngaaaacaagaacataatgataatatagtggtatatatgcaattaanagtgaaaacaagagacaaaaacacattttctaatagtaaacagtttaatcttaaagacagaaacaagatgacttaccaatgatgcttcagagtaccgcggtggtggttgtgtatggtgctgattatgttcagtctgaaccacatgtaatggatcccctgtctataaaataaaagttaatgaagggatgtattgcaaagattatggcatcaataaatgctagggtataaatcgagagtaattatgtcacaaatatgttcatgtcctgttgacttgtacgactttcagcatcatacatggtattcacagattaaagataccaaacagatgcatagcatagcttgcctaagaataagtgagag

SEQ ID NO: 82259 - DNA, 395 bp, Glycine max
  unsure (1)..(395): unsure at all n locations
agtcatcaaaagattattttatgtgaccatggcatgattntaatcaagagatccatcatctatctttcaatcttctctcaacatcattcaatatctttcaactctctctatagaattttccgattcatttctcttcatctttctaaaattttttgttcaacactttcttttccaagaaattttatttgatcaaaaacttgtgttattcatctttttcattctctgcttccttttccaaaagaacgaaggactaaccgcctgaattcttttgtgtctctcttcgccattacaaaacattcaaaggactcaccgccaaagaattcttttgggtattccctttcccttaagcaaaagatttacaggactaaccacttgagaattctttgtcccaacac

SEQ ID NO: 82260 - DNA, 345 bp, Glycine max
ctaggctctgcacataatggttgtgatatgagagccctgttcttctggtcctactgatagagacagaggcgcttgagtacatattgaagggatgtcatctgctctggctctttgtctcgatgccatcagtaatgaaaagaactcaaaagtcaccttatactacatttattcaagttgctgagattgacaatgggcgcttagcgcgatacagtcgcttatgtgccctaaaaatcaacacttcatctatcatacagggtgcgcatagccgaatatcatcaaaaagaacgcgtaagctagaaaggtgcgcttactgccataattcagaaatttactgagttgtggctt

SEQ ID NO: 82261 - DNA, 445 bp, Glycine max
  unsure (1)..(445): unsure at all n locations
gcttatcatagttntcatcaagttcatatttataatccgaagaacctacaaagctttcaacttcaccaattgccataagatagagatattcctctttatttgttgaatcactcgaagtgctggaagcattntcttcccatgcaatgtaagccttcttcttattattatgaacattcaccttgttttctcctccttgttttttctttagaaagatggagcatttagattttatgtggcccaatttgcaacactcaaaacaagtaaaattaaaggacgttgactcattaaaggtactttttgattcanaagacattttattntttttgggggaacaaaagatattttatttaaaataaattaaaaatatatttattttgtcattntatatattgggtcanatcaaatagggttaaaatgtgacanaaacttttatacatgcacaata

SEQ ID NO: 82262 - DNA, 456 bp, Glycine max
actagttaatacactacggttgctttattaatgctgaccatgtccaacctcgtacccttgtagccaaattcctttgatctctaaaaacatcagccaatacacgttccattttcaaattccatgtaaactaacttcttgtctcctcattattcgttcctaaaacttttcttttgtccgacattttttcattagatgacttcattgaagttaatgacacttattcaacctgcacatgacataacaaatagtagatatgacctcacttattcatttgactagtccactgcacaatcatagaaaatattccaagcaaagtttttatgcaatagcaaaggacataaaagtctatcttcaatataaaagtacaatagtcacaaagcacacaaagtatgccagcaatagctaatcacatttataaaagatctatccctgatgataagttcctcctacttgata

SEQ ID NO: 82263 - DNA, 473 bp, Glycine max
cgcatttcgctattgaagaagatatatttatttatgcaatgattaaataatgaacacaaattcagcaaaatcatgtttggctgcaaaaagtaaaaacaaaaagaagtttaatccacatgtgttgaagcaaaggaactacataagatttataaaagatattcgcatattcaagtgtcgttggtgatatttctacacacagatataaaggaacaattacaaatatttgttatgttccatgcttcaatatttgattagatacataatagtatcaatcggtagagtttaagcttgaactaccctcacaatacaatttcaaagaaatggaataagagagaaacaaaacatataacaaaatacaacgtctaaatgtaaggaaatggagaaactacgataaataatgagtgaggaaggagaaacacactcaatggttggaggcacagttagtagtgaatggatttcacagagttatgatc

SEQ ID NO: 82264 - DNA, 409 bp, Glycine max
gtggagcataacttggaacaaacattggatttgagggccccagtccccttaaagaattaatcaagatgtgtgcaaggtgattatttggattggacagatcaataattatttctttaaacagaacctttctctctaagaaaatgacgatcaatttctatatgtggttctttcaagaaacattggaagcaatatgaagggctgcttggatatcaacaatattacttcctctgctagatgtctcaaaacttcaatccttggagtttattaatccagataagcacagggagtagtattctgacatagatgagctctccaaccaatgtttgatatctctcaagatctgaataaggttatccttgataacggaagaaattatgaattggatccttggaactatcaatgggtctac

SEQ ID NO: 82265 - DNA, 400 bp, Glycine max
gcataagtgacaacatacatcgtgcctgatgaacaacttatctcacaggtatataccaaaatgtgtgcatggatgtcttttgacacaatatacatgacgttggatacctatatggtattatttctagttaaataaagaccaaacgatctaagaagttgagtctttcaatattcgataaataacttttgagtgtgcgaatgatattgagaaacatatactgatgtgcgtgtaattctgaatattttcaagactgaaactatttatttacatatctctcgagtttctaccttgaccagattagatagatttcaatgtttatcatttcaattatcataatgaggacttttttatagaaaaacatacatgttgaacataaagttgcacgcttacctttatatat

SEQ ID NO: 82266 - DNA, 324 bp, Glycine max
agctttgtcatgcattgatggtataatggactaactactgtcattgggcgatcaaagcaccctggatgcgtctgtgctgctagagccgatgacacgatcaaacaataatgtggaccgatcttgatgagctccctcacgtaatcatgcatggctaccgaataccttgtacaaccgctacgaagaattatggaatatctgaacgagtctatcacagaaaaaagtgacgtgacaactaatgtcttccttcagccaaatgcggccctagatgcattctaagatgcgatcgcagatgccatcatagggacttgcactgtctctataagc

SEQ ID NO: 82267 - DNA, 441 bp, Glycine max
  unsure (1)..(441): unsure at all n locations
ctaagcttagctacacacactncctctcataactaagctcacctccttgagaagcttccttaagaagattcctaaagaagctagagcttagctacacatacctctctaatagctaagctcacctccttgagatgagaagctagagaattgctacacaccccctataatagctaagctcatccccatgacaaaatacatgagaattcagaagaaagtccctactacagagactacccgaaatgccctcaaatacaaggctaaaaccctatactacaagaatggccaaaatacaaggccccaacgaaggaaaaacctattctaatatttacaaagataagcggactcatacttagcccatggacttgaaatctaccctaaggctcatgagaaccctatggccttcccttggatctctgacccaatctacttggagtcttctat

SEQ ID NO: 82268 - DNA, 422 bp, Glycine max
  unsure (1)..(422): unsure at all n locations
agcttctagagaanactacgtgaagctgcctctgtataaacgctgcccagccttcttaaccgtttgatcttctcgaaatttggtttgcaacttcaaaagacactntaacatgatttaaccgttgggatctttaagaaaatatcgggcgtgtgctacaagcttccgttcccgagagcatctcttatttaagcatttcagccttcgctttcttgtagcttaggaaaaatgtcatttcttcttctttctttcttccaaatccatttctaaagttccaagtactttctccatcacccacatccaccattagccaccacaaacatcattgttctccattgaaaacccacaccgagaggaacccttcaaccgaagcagaatttccaacttggcttgcggtttcggtagagaacgaaaaccctaatctg

SEQ ID NO: 82269 - DNA, 415 bp, Glycine max
  unsure (1)..(415): unsure at all n locations
taagtagagtttcatagtaactactaactgcacaaatgttctatgtaccggttcctacaaatactggcgctccttctcttagagtacaaggatttttatttcccagcgaatttaacacctttacatgacaaatgtgcttgaggtggatagaattatataacccacatggctgtttagcaagtaggttcactttctcaacattcacggagcataatgaatatttagttgctacaaaaaatcgcagaatattgatgatagggagggaagataaccttctagggcgggagatcacgacgcgcgagtggggaaaagcgcgagtgggaaagctatggttnggaatattgtgggaaacatttcaattatggatgggatcgaagaacaactcgactcgcttgctcactcgctcctatctaac

SEQ ID NO: 82270 - DNA, 442 bp, Glycine max
  unsure (1)..(442): unsure at all n locations
gcagcttctaagggaagtttctcaagaaagcttctctaggaagctacctagtctataaatagaagcatgtgtaacacttggtgtaactttgatgaatgagagtcttatgagacatacttcaaaggtccacttctctccctcttttattccttcaatttcgtgctcccccctctctctttctctccctctttcttttcctccattgaagcatcctctccaagcttcttatccaaggctcatcttggtggtgaagctccttcttccatggcttattccttaatggatggcgcctcctctcacctnctttcctttgtcttccgctgcatctccatggtggaaaatcaccattaaaggaccccattgaagctcanagatccagcctccatagaagctccacaagcaagcttccatcaagtggtaatcagagcacaagaagctcaag

SEQ ID NO: 82271 - DNA, 270 bp, Glycine max
aactcaagcgtctggattcagatgactccaccatgagtgcttcggctgggactgggagttaactcatggcggctatccctaataaacagcttgctgagaagaatgactatggcacggcccaacaatgggtcaagataaatgctacacgttacaacttctatggaggagttaatgtcaagcgagttttgcaacacaaaatttcaaaatcagctgaccgcatcagatatggctattctaaaactggtatagaaattggacgttcttctttga

SEQ ID NO: 82272 - DNA, 398 bp, Glycine max
  unsure (1)..(398): unsure at all n locations
atggggtgcccgtcacatgtggtactatgtggcgatcgggcgatggtgcaagttgactctccacatccacaaatcacacataaatccaccatccccagttgcccaccttcaactgagctcacgtactcccacgtagcccttatcctcattcctctcagcaccgggtccccatcaaccccttcaagctgtctcaatatccaagcgaatcaatatccaaacatcatgaactaccctaaaccaagaaaacagggtagaagcagaatactcttgccaaaaacacattccaataccacagctttccttactcaaataccccagtaacattctctttggtccgaattcgtaaccggtggatcgacttgaaaattntactggagggccctagtatataagtctac

SEQ ID NO: 82273 - DNA, 417 bp, Glycine max
ccatctccctaaagcctcttacgatgtggaggttgagtcatgttctcagtatgaaaattagtagttgaaatgtcaaaatcacaatattcaaaatcactagcaacagaatactcagaatgctcaaaatgctcacaatgctcaaaatgcacataatgatcatgatgcacactatgcctaactaatatatgagaggctctatctatttcacgatcaaaggggtgtaaatcacctggattgcccttagtcatgcactatatgcagcaaataatgtgttctcaaacaagcacctaacaagggggtaaaactacagctatactcaaacgatatccaaataagctgaaattctgtgaggaacaccctattatcatgaaaagatagcacagaaattttccaacacacatgcacagtctaactatg

SEQ ID NO: 82274 - DNA, 462 bp, Glycine max
  unsure (1)..(462): unsure at all n locations
gcttaagaaaaatctagtctttggggatgctatggtattaaaaggttttatctattgtgttgaaggtggagtgatgcaaatcaaagggaaaggtaagtttgttgtaatgcaaggaaccaagcaagaaaatatatacatcctttaagatttcactgtgacagtttcaatctcaactatttcacaagttgaaagtcttggtcacttgagtgaaagggaatgaaaattttaaggaagcaagcattacttggaaatcacaaggtggaaccttttcaattntgtgagcattgtgtctatatgggaagcatcatagggtgaaataccgaanagcggtgcacaccacanaggccatattggactgcatccatattggttgttgggccttttagagntccatccttggaaggagctaggtactttctttcagtcatcaatgattacttagggatgacacaggtattcatg

SEQ ID NO: 82275 - DNA, 474 bp, Glycine max
  unsure (1)..(474): unsure at all n locations
ccctcttctttctcttgctcatacaagctttacttaagtatatacttgctttaatttcctcactcatattcttacttgagcatcgaagtccttaggtntgtaggtcctcctcctgtcaaagacacctctcctagccgacatgtgaagttcgtgaccccacccaaccacatccaccctgatgtgtcatggttccgaattttggtaagaatagttacgtagaagcttctattttggcttgaatttttctagtttgtgtctggtacactatactctcaagtagatgctnttatttataatgttaaagagatcatagattggaacttttcagaataggagagatgttatctaaactaatttcatatctctttatctttatattcgacaataacaattatctcatatctttttatcttaagacgcttcntgatataagatgaagatgatttccccaagaatcacatgactaattacaat

SEQ ID NO: 82276 - DNA, 316 bp, Glycine max
ttttacgctgctagaatatgatgaatgggttcgaaagccatcatacactctaaaggcattctatgtacagataagccactagtacaattcttgggtagagacaacagaaagggagggagaaccttctatgtttaaggaaaagaaagaaacatgaatggtgagaatttgatttctaagagacctctgttgaaatctggatccatggtaaccatactcttctgattaataacaggtgtctctttctctcttctatctattctatctggcaagaaatgataacaaaaatgagatgcagggatacatccatagggaataa

SEQ ID NO: 82277 - DNA, 422 bp, Glycine max
actaagcttctccctaattttgtaataggcggagaagtgaagtactacagggtttatcctcttaggcacttctctctctctcgaaatagctgatgaaaattagttccatgaagaagatccaagtcgaggcgcttccgtaacatttccgcgagtaattacgcgaagattctcgaccgttcttcaagattcatcgatcgctcttcgttttcttcagtcttcaacgggtaagtacctcaaaccaagctgttcaattcattctatgtacccgcggtggtccacattatgtttcatgtattgttattctcattttcatttactatttatacccccttttgatgtgcttaagccatttagttaagacatttctcgcttaatctacaaataaaatatatttccaccgatcgtttgaattgtatcatccg

SEQ ID NO: 82278 - DNA, 370 bp, Glycine max
  unsure (1)..(370): unsure at all n locations
ggttctanatttacattgatgtttgtatggggtgttgtacttgccattnttgctttaagagcaatgtcccactaaaactaactttccaaatgtttgccttcgcaagaatggcaccgaggaatcttgcctcatagaggtccaggaaagacaaggcggccgaaggaactagttccgccccggagtacgacagtcaccgctttaggagcgttgtacaccagcagcgtttcgaagccatcaagggatggtcgtttctccgagagcgacgcgttcagctcaaggaggacgagtatactgtattccaggaggaaatatggcgccggcggtgggcaccactggttactcccatggccaagtttgatccagaaatagt

SEQ ID NO: 82279 - DNA, 442 bp, Glycine max
actcagcgtgagcagattcgaacgacaataacatttcactcggaagttttattgagttccgtaatatatcgagacgctcgaactttaaaaccgaagctcgtagcaaattcgaacgacaatgacatttcactcggaagtcctattgagtcccgtaatatatcgagacgctcgaaatttaaaatcgaagctcgtagaaaatacgaacaacaataacttttcactcggaagtccgattgagtcccgtaatatatcgagacactcaaaatttaaaacccaagctctcagatacttctaacgacaataacttttcactcggaagtcctattgagtcccgtaatatatcgagacgctcgaaatttaaaccgaagcccgtagcaaattcgaacgagcaataacattcactcggaagtctgattgagtcccgtaatatatcgtgacgctc

SEQ ID NO: 82280 - DNA, 408 bp, Glycine max
  unsure (1)..(408): unsure at all n locations
gcaattattggcattagctgtttatacaacaacttacttaatcaatcaaggttcatcagtaccattggatcaaaaaataccaaaagaggtatggagcgaaaaagaggtaaaactctcacatcttagagttnttggttatgtagcatatctgcacattagtgatcaaggtaggaataagcttgatcctaaatcaaagaagtgcactttcatcgattgtggtgaagatgagtttggctaccgcatatgagataatggaaataaatagatgatccatagtagagatgtcatcttaaatgaaagagtaacgtacaaggatagggacaacaaaaacactagcaactcanaacagagtgggctagtgtacacagaggtggatgatgtcccagaaacccctatgaatgagactac

SEQ ID NO: 82281 - DNA, 403 bp, Glycine max
ggaaagatgcttaatacatgacagtagttgtaagaaaaatgctataggttcatacaacaacttcaaagaagcaatgacgatttaaaaaatgaacctaacctttcaagttaaaaactacgatatactattgaagagtggaggcacaatcacaaatcagcaatcaattataggctacccaataacaaattcaagcatgatgtttaaagtggaacacaacaattaccctgcgactgagctgagcagaaacgaagcactaacacaccaaccagtcacggtagaggtagtaatcgcaacatagtcaaagatatacacgagactcaaccgagacacacgtgtgccaacaagtatcgacaagaacaacctcagtgtgatatagtacatacattgaagacacacaatctga

SEQ ID NO: 82282 - DNA, 396 bp, Glycine max
ctacctcctgcactactctaatgactatggcatcatttctggcgctaaactgctgggaagtggaggccatcttctcaattaaatatctggcttcagcaggagtcatgtttccaagggcttcaccactggcagcatctatcatacttctctccatattactgaagcctttataaaaatataagagaaaaagttgttctgaaatctgatggtggtggcaactggcacatagtttcttataatctctccagtactcatacaggctctctccactgagttgtctaatacctgagatatccttcctgatggctgtggtcctagaagcagggaaaaatttttctaagaatactctcttaaggtcaacccagctcgtgatggaccttggagcaaggtaataca

SEQ ID NO: 82283 - DNA, 356 bp, Glycine max
aaactaagcttggagtccagtgccatacgctacattttagccttcttctcggcacacatctcaagggcttccttctggtcacatcttgcgatgtcccacctttgagacgcttccagtctgcttccaggattgaggaagcaccatcttgcttcagatcatagtggtccattagatggggtcgtactggcctctttttctctgtcatagaattactcccaaccactctggattcgaggtgctctgatccaatgaatctgtccaggacaatgcgaccgatgcacactcaccttaacatcaatggtggctgtgacaataccagtaatacacagaatgcacccatcgggcactaccacttg

SEQ ID NO: 82284 - DNA, 403 bp, Glycine max
  unsure (1)..(403): unsure at all n locations
atatatcgagacgctcaaaaatgaatggtgaagctctgaggaaattcaaacgacaataactttttactcggatgtctgattgaagcccgtcatatatcgaaacgcttcgaattgaatggtgaagctctgagccaattcaaacgacaataactttttactcggatgtctgattgaggcccgtaatatatcgagacgctcgaaattgaatgttgaagctctgagcgaattcaaacgacaataactttntactcggatgtctgattgaggctcgtaatatatcgagacgctcgaaatcgaatggtgaagctctgagctaattcaaacgacaataactttntactcggatgtctgattgagtcctgtcatatatcgagacgctcaaaantgaatggtgaagctctga

SEQ ID NO: 82285 - DNA, 226 bp, Glycine max
  unsure (1)..(226): unsure at all n locations
acattcaatatcgagcgtctcgatatattacaggactctatcagacatccgaggaaaaagttattgtcgcttgaattggctcagaagctgaacattcaacttcgaacgtctcgatatattacaagactcaatcatacattcgagtaaaaaggcattggctntgagtatggccccagagctacaacataaattctccgcctcttctatataggagtctctctacacc

SEQ ID NO: 82286 - DNA, 401 bp, Glycine max
  unsure (1)..(401): unsure at all n locations
ttcaagcttgtgacacacccgagtcaacagaatagtactggtgggaaaatccattatcagcatctttaaaatcatgggtcttcccttcctctttctctaaactaggatgacaaattttctcaatcttgcttgccaccacatccattgaatgtctcttgtcaggatattgagcggtacattcaagggcaagctgcaaaagcttgaccatttcctcctcaacagtttggtaccttagaagctccatgtcaaatacctcagtgttccactcatcttgaaccacagattggacccatctngggaggtccaccccttcctcagttagtgaagaatgagtacgagccttccctgtagcagctgcaaagcatgataccaaactattacatcggcctttgggatatctg

SEQ ID NO: 82287 - DNA, 432 bp, Glycine max
gaggtacaagccctaaaggcaaagcttgaaagagctcggttagtcgaagagaagctcaagtccatatccatcaaagtctgaacagagtatgatgaactaagggacgtctatatggccacagctgaagctttggaacgagaaaccaagaatgcccgaaatgaagaacacgaccaaagcaaagttttgaggggctttatagggcagcaatagtgagctcaagctccgaagatgtgaaaggaatcatcacgggtcaaaggcatgatcttgaatgacgagctataggtttgccttatgtcgaatagaaatttgtcccaacagttaagcgagactgataggaatatgtgggccatcatctatgagtgcaaagagaagctaaatctagctgcgactcacgagcaaaggctagaggatgagtatgccgagatatcatca

SEQ ID NO: 82288 - DNA, 448 bp, Glycine max
  unsure (1)..(448): unsure at all n locations
gcttatgcacggaaaatgtaattatgaaattgttatgctctaagaaacaccatttcctagttaaccatgcattangtaccatgttcaattattttgntttggtgttgggtgatttttttttttttttctttttagaaatgggtttatgatcccaacatggttggctcatggtgcctaacacatgcaactaagaatgtagtgtgaaggttcacgcttcccccttttttgtttttgttttgtagaggaaaacgccaggatgagcaaacatgaaaacaaatggtttgccattttgcagatcaaaaagtttgttgaacgcatatgcatgatgatgccatgactcatgcaaaatgtgaggccggaatatgataacggacaaatgcaggatatgtccattatgatgttatgaagagatgcttatgcgatgcatgatatgaatgcattctacgga

SEQ ID NO: 82289 - DNA, 302 bp, Glycine max
  unsure (1)..(302): unsure at all n locations
actgctattcagcaacaggtaggtcttgcgtatgagttgaacaatttctacagcaggcggcgagctgtgatatgaatgctgcgatataattcacgcgtcccaggaaacactcggactttgctctctgtacagggttctgtgcatctatagataaactctaccttttcagagtctacctctatacctctctggctnacaacgagaccaagccttctccctgattggaccccagaggcacacttagcggggatcaactctaatcgacatttcttatacctttccaacaacttacgctggtgaca

SEQ ID NO: 82290 - DNA, 422 bp, Glycine max
  unsure (1)..(422): unsure at all n locations
cttgactttcttagatattaatatataaaaatgtgaatcgccagacacatttaagggtattaacatttatttttatgttcaatcaattcaactagatcctcttaataataaattaattggatttcttttcacaattatcaaatgaagacattttttttttaccatttaagaataagtcatttggtagtaagagttagaaatctttaaaccacttcttaattgtgtgttntgagaattaattcaaagtgaaattaatatttaactctcatgtgagagtaggactttaatttctcctatctccaatcgggtaagattcagcagcaatcttttcatttatcaagcaaaataaagatgggtgtatagccgaattaattggtgatactgatacatggtaaaggggttgatgaatgcaagacatgctc

SEQ ID NO: 82291 - DNA, 305 bp, Glycine max
tgtgcatatatactggtctgagtcacctgttccattccgctcttgatgtctttacaggtgactacctccgtgacatctataggcttgaatggaattggcatgacaggttcatagttacggtctatcatattcggtggttgatattgtgaagccgtaggtaattccggacggaatatctcaccatccttaacttaccgctttgtcatgacacttcgatgaaggatcacctatgatgactcgttactcaatggaatcgatattctttctgatggcataagcttgacaccgctctaagaacaagacaa

SEQ ID NO: 82292 - DNA, 331 bp, Glycine max
  unsure (1)..(331): unsure at all n locations
tatgagactgctccttacacaacttagaaagaagatggttctactctacacactccataacacaatacaaaaacagatctttccacaggattcaacttgtaaaataacaattctaactgagaaacaagaaatagcagcgccataagtaacgaagctagttcattctatctaggaggacataaaaagcctaattaatcgcatattctcacacctcatnaaaaaaactaggggttaacacaattaaataaataaatcgattaactataaaaatagagaaaaaggaaagagaaccttgcgcttgagaatggatcgatgccactcagatttggaa

SEQ ID NO: 82293 - DNA, 442 bp, Glycine max
tacggaactttaaactaagcttttatccaagctcatcttggtgggaagctccttcttccatggcttattcgctattggatggcgcctcctctcacctctattgctttgtcttccgctgcatctgcatggtggagaatcaccattaaaggacctcattgaagctcaaagatccaacctccatagaagctccacaagcatgctgtcatcaagaaatttgaaccatataaaatcaaatctatctggagaagctacacacactcctctcataactaagctcacctccttgagaagcttccttaagaagagtcctaaagaagctagagcttagctacacacacctctctaatagctgagctcaccaccttgagatgaaagctagagcttaactaaccccccctatatatctaactcaccccatgacaaatacatgaaatacaaaaat

SEQ ID NO: 82294 - DNA, 466 bp, Glycine max
  unsure (1)..(466): unsure at all n locations
gcagcttgagccaaatcctgactcaccatattctcttgacccaggtgagaatgtcaatccttaccctcggaagcaaaaaaggaagagaaggaaatattccaatcaaaggaaaaaagagaggaaaggaaattcccaatcaaagagtgggagaaagcaaaaagaaaagaaagataattcccaatcaaagaatgggagaaagaaaaaaaaaagagaaggagaagaaggaaagaaagctcctggtcaaagatcgaaagaaaacagaagaaatatgcagagaggtctttggaccagacaatatctgaacaatacggaattgtcaccaaatgaacaaaagaaagaaaaggaaaccataacctaaaagtggtcttcttccttagattaccaaccaaaatcatgtgcatcggtgacttgttcgcctcgcgtcanacaaaaacagaataggaaaaagccaacaaaaaatcataag

SEQ ID NO: 82295 - DNA, 438 bp, Glycine max
gcttctatagaagggtcggtcctaatttctctactattgcatcacctctcaatgagctagtgaagaagaatgtggcatttacctggggtgaaaaacaagagcaagcatttgctttgctcaaagaaaagcttactaaggcacctgttctagctctttctgacttttctaaaactttcgagctagaatgtgatgcctctggagtgggagttggaactgttttgttgcaaggtgggcaccctattgcttattttagtgaaaaacttcatggtgccacccttaactaccccacctatgataaagagctttatgccttaataaaagcactccgaacgtgggaacattaccttgtttcaaggaatttgcattcatagcgatcatcaatcacttaagttattagagggccagcaagtaaacaaaagatgcaaatggtaagtccta

SEQ ID NO: 82296 - DNA, 369 bp, Glycine max
  unsure (1)..(369): unsure at all n locations
aactagctgggactaggggacccgacaatggggactatgagtctatcgggcgatggaacaaaacaactctcccacatccacanatcaaacatgaacccaccatactcaggtgcacaccttgaactgagctcacgtactcctacgtagcccttatactcggtcctctcaggaccggagccccatcaacccctccaaacttgcacaatatacaagcaactcgatgcccaaatatcatgaactaccctaaaccaagatagcagggcagaggcagaatactctgctcaaaacacattcacatattacaacgtatcttactcaaataccccagtaacattcccttcagtttgatacgtcaacgcgttgatcaac

SEQ ID NO: 82297 - DNA, 464 bp, Glycine max
  unsure (1)..(464): unsure at all n locations
gcttcgggagggagaaaattgatggatcatcttgatgcaagctttcacaatcgcgcatacttacatatttaagatttggtgcatgagacaaccttggacactccacaaggtgcttggagccacaaagntcaattctctctaaatttggcaaattctgcaaaatcatataagggaccaaacgagtaagtacattntccgggaagtttcattttctaattcatcttttattgaagaagacttcgtttctatcaaaaccaaaacataaataaataatcaatatgtgaaccatgcgtacttgtactccttgccaaagtttttccacattgctgtatggcatggaaagctcaacaagcttctcagggaaaaatcttgacggtaaggattccaatggatatccattccaccccaaatatctcaaagttttaggtaagaattcaagaccctgtggaaggacactgaataat

SEQ ID NO: 82298 - DNA, 409 bp, Glycine max
  unsure (1)..(409): unsure at all n locations
agctngtgcctcttcacgtntggaatatgaatgtattatatagatccaaagacccttatgtgctttgctgatggcttctttccgttccaagcttcaattggagtcttgtcttttacagacttaattggacatctggtgagtatgtaaactgcagtgtagactgcttcagcccacaatgtgttaggtagtccctttttcttgagcatcgatctagccatctccataactgtgcgattctttctctcggacactccattntgttgagtagaatatgcgactataagttgtcgctcaatgccttcatcctcacaaaatctttcagactcgcgagaggtgtactctttgccgcgatcacttcttagtacttttatctggtttccactttgattntcagcaagggccttgaact

SEQ ID NO: 82299 - DNA, 393 bp, Glycine max
  unsure (1)..(393): unsure at all n locations
tagcgngttctaattatatgggtcattaagtctatcacatgctgacaatagctgagaagtctatggatctcctaggaggcggagtangtgtccgccattgctttgtccttggcaagcaatcggggaagttctcgactctcgttcaaggtaagagcgaatcggtccatccacatcggtgcctcttaatgtaacgagtcgatcacccttcctctagcctccttttctgcatacacttgggcatactcgtccgccactctatgcttgtgggtcgcggctagatttagttcttcttggtacttggtgataatagctaacatgttggtctctgtctcgcataaccgctgaggcaaacttcttttggacctcgagcaagccttcaattcatctttcaag

SEQ ID NO: 82300 - DNA, 414 bp, Glycine max
  unsure (1)..(414): unsure at all n locations
ataacttatcacaccggagttcgattcaggcacataatatatcgagacccttcgaattgaacaacggaagctctcgagaaattccaatggtcataacttttcaaatggaagtccgaatcaggtgcataatatatcgagaagcttgaaattgaacaaaggaagctctcgagaaattcaaatggtcataacttatcacacggaagtccgattcaagagcatactatgtgaagatngctcgaaatgaacaacgaaagctctcgagaaattcaaatggtcataacttgccacacggaagtccgattcagacgcataatataccgagacgcttcgaaatgaacaatgaaagctctcaacaaattcaaatggtcaaaacttgtgacacagaagtccgattcaggcgcataatatatcgag

SEQ ID NO: 82301 - DNA, 492 bp, Glycine max
ctattaggacacttaaaactaagcttaacatcaacccttcaggtgctggaactacttacattgatttgatggggcctatgcaagttgaaagccttggaggaaagaggtatgcctatgttgttgtggatgatttctccagatttacctgcgtaaactttatcagagagaaatcagaaacctttgaagtattcaaagagttgagtctaagacttcaaagagagaaagactgtgtcatctagagaatcaggagtgaccatggcagagaatttgaaaacagcaggttcactgaattctgcacatctgaaggcatcactcatgagttctctgcagccattacaccacaacagaatgggatagttgagaggaaaaacaggaccttgcaagaggctgctcgggtcatgcttcatgccaaagaacttccctataatctctgggctgaagccatgaacacagcatgttacatccacaacagagtcacactgagaagaggga

SEQ ID NO: 82302 - DNA, 381 bp, Glycine max
  unsure (1)..(381): unsure at all n locations
gttgaagcgaaaattcaatgtttctaatttaaatattacgaagtatatttcacttcgtttaaagtcactgttacttgggcattttattccttttagttattctcaaaaccaaaggatatacaacttaagttttcaagcattaattaaactcaatttgacatattgatcctcaaacatgttttagtcttcacattgagacttgacaagttaacattctcaacaaatagatcagatacgattaanaatttaaaacaagcttaataatatgttagtatgccgtatntagtaaacattattatcattcatcgacttttattactttgatccaaaacttccttatntaggaaaagtgactttctgaaacaattgctaggattgagc

SEQ ID NO: 82303 - DNA, 389 bp, Glycine max
  unsure (1)..(389): unsure at all n locations
cccacatgagtctattgttggagactctgccctggttcattattgggctacaaagaacagtgacatgatgccatcatactacttttgagttgattacgctttagagacattcttcaaatgccaaccacttatcataaacatatacccatctatataggatatgcttatcatgccactttgtgccattactctagctntggtgaatttatcgcacattgataggtccttcaagatacctataagactagagtacacatgttgttatatcccttcctattcgatcaccatattatattacatatgctcattctcttgcacctgagtgattctatgaataatgtactctaacaaactcaacaatacgtatatcgtatacctcttggatctac

SEQ ID NO: 82304 - DNA, 408 bp, Glycine max
  unsure (1)..(408): unsure at all n locations
gtatgcgcatacttcttcacgaacgttcacttgcacaagacattcttataactaagaagaatgcacccatatacaatcaaggcaccttcgttacctagattatttacatgtactttcaaggtgtatttgttacctacatcacacacatttcctttgctaaattcacatacatgcatactctaagcactttggctatcaaaaattgcatacgtgcacatcttggtatttctaatacctatacatacacaaacttcatgatgaatcttgactatctacacaataaggtgctacatttcatgcccttttctttgtcaagtgtttgtttttttttttctttttttttactacctaaagccgcatgcaaattcaagtatantttcttttgctcactaaaatttgattcaaatt

SEQ ID NO: 82305 - DNA, 270 bp, Glycine max
tttatctatggaaattttattcttcctcactcattataaggcgtgatgcacatcagatatgatatggacgaagaattaacattcaatattacacataatatagataccactcacgagatgagcatgtagaacacaaagatggttcagacttctagctccaagcttaagtcttcatgttgctcgctctatctctaacaaagtatagcattagtaaagcatccaatgttggtctgttccttaattatttgtcgaggattgaagattataaca

SEQ ID NO: 82306 - DNA, 198 bp, Glycine max
aaccaacgagtaacaagaagttccacacaggagggaaccctcaacattccaaacaataaaacaaagatcaaaactaggtcaaaaacaaaaccagaaacaccatgtatcaccatcactaggaataatggtagtcaacaacagcacggctcataacataaggagagtaaaacagcaacatccaacaaactaaatgacatc

SEQ ID NO: 82307 - DNA, 426 bp, Glycine max
gtactccttatagctgacatgaaccaatcttgagagatgaactcttctgcttactaaccagatcttcataaagtacagagggccattacctctattaaagaaagtcaaaagacggaaatcgtattacaagtgatactattataaagaaactaactagccgatgtattgcaatactatattaactcaattgctttttaagttcattttttttaacctgatagcctcagacacaccaagcgatgaatagctccacttcaagatcttcttccagaatgaatctgcctttcaatattgaacctctttaacttatgacttatcccttctactgttataatacctcaccttacacacagaaacttgtgtagccgccacactaataaaaatgaaagctgagtgaatgacacatttattcaccacaataactgc

SEQ ID NO: 82308 - DNA, 331 bp, Glycine max
agccttcctttggagctactcaactgctcctctattttcagttgtgcctttctcgaaatagctgtgaaggataacttcctatcatcttggaccaactactaaacctcatagatgttgtgcccaacaaccaaagctttgtcggacaaccacctaacattggagacgtgagcttagcaccaactacaccggtgaccgctggattggagagttcactaactcagatagatagctctgattgtcaacactacgtactagagacaagacacagcttgcatgcctgtgccaagcatgccaacaatattgtgacttgtctccattagtggaaaaaaat

SEQ ID NO: 82309 - DNA, 410 bp, Glycine max
aacttcattctccatcatgactgaaatttatggtttcgtacactgcaccacagatccttcattggagaggtaaactctatggccattcgttatttttacattgccattgtcgactgatacatgattaaaataaaaataatagagtcagatggcaaaatcccatgtgctactttaatccaagggttgagaattaagcaactacaccttgcagttctcgccacaaagtcatggaatccaatcccatcttgaatgtatacaacttaagtaactcattttgggtttctgtcaataattaattgactcccacaatgttacatcatattcaaacaactcatacacattttattctaatggtataattataagaaactcttaactgacccacactcataattatttgagagaaatgc

SEQ ID NO: 82310 - DNA, 368 bp, Glycine max
agcatgagatgaggaaatgttgaaaggtgtattcttctgcttttattggtgaccacagagcggtacctggagaatgtcacggggtcaagaaaccttggggacgctacgtggggtgctattgcccaaaaccaagctagacccatcccgacccaacccgggcataggcggtcagcgagaacctgtgatggacctaaacaggagagctcctggcagtcaacggataaaaggaacaaagaccacaaaacaagggggcttgaggtggctggccaactgtgaatcttgcgagacatggggattatggcctctggtaatccatcaccaagggtgggcaatcgattacaacgcttaaaattgaacgcaggaggcta

SEQ ID NO: 82311 - DNA, 393 bp, Glycine max
  unsure (1)..(393): unsure at all n locations
tctcgcatttgactctctaatatccacatgacatctatcttctgatgcaccttcncagatcaccttgacccacagaatctctttccctcttacgtgttgtgtatgacgtcataccctaatttcgtctatggaccattctttgatggcatacaacctttgcttgaccgcttagaggtacttggctcccattgttgcacaatacgtgaaggtttgtaacatgccagaaatcaaaatgaagcattggtacacaatccgtgaggttccgtaacatgccggaaatcaaaaggaagcattgttacgcaatccatgaggttccgtaacattccaaaagccgcacaaaggatgagtacgttatccgtatggtccataacattacngaaggaaaacaagtat

SEQ ID NO: 82312 - DNA, 481 bp, Glycine max
  unsure (1)..(481): unsure at all n locations
ggatcttaagtcactgangctgcagctatataacaaattgctaatattttcaatatcatgtgaatcangaagcatcaacaagaatcaagccaaggctattgtgcaagcaatcaatggggctaaacacaccaaatgattatgatggtggatggctcaaattctcacaaaggtaaactcatcactttcaaattgagctttcaaaactatcatgacatgtagaggagaatcaaggatttcaagtcacaaaatgtcaataacttttattttcaaaacaattacccatttcttgaacatatcctataattcatagaagaacatgcaaagtcgtacatgcacacaaaattgacccaaaatattaaactaaaaatccgacaaaactaacaacattaacaaaataacacaactaacacattaacaaaaccaacaaaactatgcaaaccaaagaacactctcgccnccacacccatacttaaacaacaca

SEQ ID NO: 82313 - DNA, 473 bp, Glycine max
tacccatcacatgtggtactacgtggtggtcgggcgatggcgcacaacaagtttttcacattcacaatgcgcgcataaacccaccattccctgttgtccacctccaactgaactcacgtactcccacgtagcccatatcctcgtttctctccacccgggtccccatcaatcctaccaagcttgcacaacatccaatcaaaacaacattcatacagcacaagctatcacagtcgagcaaaacagagcaaaggcagaaaactcttgctaacacatcaaccaacatcacagtttttgtctcttatggaccacagtaacaattccttcgatccatatcgttaaccgttggatcgactgcaaaattttactgggagtctatagtgcataagcctacattgtgaccgttgtgatcgactatcatacatacagaactcattctgtactactctgtccacagccaaccacacacaagcatt

SEQ ID NO: 82314 - DNA, 492 bp, Glycine max
  unsure (1)..(492): unsure at all n locations
ccggatcttaagtcacctgcngctgcagcttgtagtatttgttggtataatttttctgtttcattangctcttaatgtncttagaggntatttcctcattgacatcttttgtcttgaatggaattgccatgacaggtttattgttactgtctttgatgtttggtagttgatattgtgttgcgggaggtaattccgattggattaactcaccatccttcacttgccaattngttatgacatttgttgttggatcacctatgatgtcttgtttccaagggtaatcttgttgccatcagaaagggtaatcttgttagatcacaaaggatatagattgccatcagaaagggtaatcttggtggatcacctatgatggcttaagaaattaatttaccatagcttanactntcatatggaatatctccattggcagattgactacggattntatctctaaccttgtctcctaattgtcatacgctaaattcgtctggg

SEQ ID NO: 82315 - DNA, 405 bp, Glycine max
tatcacccgtatcatcgatagaagaaagctattaatgggagtcatgataatgagagtgcgtcaaaaccattagctatgaaagaagtttatgatcaggttaaggacatcgtaactatctttgggaagacccaaaagaagccatcatctgagacaaacatacggaagaaaatgtcaatattcttttatcttccatattggtccgatcttgatgttagacattgtatagacatcatgcatgtggagaaaaatgtgtgtgatagcttaattgacactcttcttaacattaattgacactcttctaacattatacgaatgttctcatttctcaggggatcattgcagcagtagtaaccacatagaaaagactatgtttgctgataaaaaaatagagatcagacagcaatt

SEQ ID NO: 82316 - DNA, 378 bp, Glycine max
agcttgatggagaatcataagtgatgcaattgttctttgatgagcacaatgatgatgacacccgcgactgccgatagctcatagatcgatcaacgacttactcaagtgcatcacgaacaattcctgtttcaccaatcccgataattcacgactgctgatcaatgcctaacaccaggactcatgattcccggctcatgatctctagaataacgatcgagattcatgactcaagattcaggaatgaagagagcactcaatgcagaatagtgttgacacagcttgttttatactttgagtagcacatgagtttctgactataccttctaccgcagagcttctactctctggcaattgattaccctattggtgcactctagt

SEQ ID NO: 82317 - DNA, 413 bp, Glycine max
gaggaccatgactatttatctttatgatatatttaagggcccaaaccagatacctatacgtgcatttatccccaatctttgtattaaaaatactaaatgcgagtgggaataccactaagtgaaaaatgcttattaccgactattgataaacattcattccaaaatccatcggtaactttgattttttcaacggattactgacgaacaaaattccatcggttatattggcgtacaaagaacatccatcggtaatttctgacatattatcaatagaaaagataggttgatacatactgatggttgatctgatggtgaagatcaactatgttatcgttactatttatcggaattactgactgtatatattcgtaataattcatacacatactttgtataagtacttgacaaatatc

SEQ ID NO: 82318 - DNA, 280 bp, Glycine max
  unsure (1)..(280): unsure at all n locations
agcttcagnggcttagcgaagacgacgatgtattagtttctcaccaggctgacgcgcgtctcaccattgtgagatatcatgacatcgtgctgtgtgatgtgggcccatttgaagctagccctgcgctgttttgaagatcgttgcgatatgatcccaatgctgtgcatgatggcttcatcaacaacatctcttttatcgagctgacagaagattgttctctaccgttgtttctcaaaggtttggaggacacattcattggagatttgatatgatgaacact

SEQ ID NO: 82319 - DNA, 373 bp, Glycine max
  unsure (1)..(373): unsure at all n locations
caagaacangaactattancctaggtgacatctggctaataaccaaattgagataagtgggcgtggccatgactatatttctaatagcagccatgatattaaaagtccctttttgcaacctaaattcagtttagctaagaaaaattcaattcccttctccctaatattgatctcatgttttccacttttttctccaatctctcttcattatctgattttatatcaatgattcaactctctccataacctgtcctgacatgttggaatctctttaacctattagattgaagacacgaatataataatgaggcatatatttgcctaatatgggcaatcttacttcaattaaattgcaaccttgatgctgtactaa

SEQ ID NO: 82320 - DNA, 434 bp, Glycine max
  unsure (1)..(434): unsure at all n locations
agcttgtctcagcgtttatgcgagacggagaccaacatgctagctatcatcgccaagtaccaagaagagttaggtctagccacggcccacgagcatagaatcgcggacgagtatgctcaagtatacgcggaanaagaggctagaggaagggtgatcgactctttacaccaagaggcaaccatgtggatggatcggtttgctctgaccttgaacgggagtcaagaacttccccgcttgttagccaaggccaaggcgatggcagacacctactccacccccgaagagattcatgggcttctcggctattgtcagcatatgatagacttaatggcccacataattagaaatcgttaggaaacttgtatggtctctcagaccttgactagatacaacttcctttntgaaataaaatgagttggtcccatgtttctact

SEQ ID NO: 82321 - DNA, 269 bp, Glycine max
actcaatcatacatccacagtaaaagatattgttgactgaattggctcagagcttcaacattcaatttcgagcgactcgttattttacgggactcaatcacatatccgagtaaacagctattgtcgtttgaattggctcacagcttcaacattctatttcgagcgtctcgatatattacgggactcaatcatgcatctgagtaaaatagtattagtcgttgaacttgctcagaggttcaacattcaatttccagcgtctcgatatatta

SEQ ID NO: 82322 - DNA, 471 bp, Glycine max
  unsure (1)..(471): unsure at all n locations
ctgatttcctttgttccggaaacctttcttttatcatgtgctcccaaacccaatctccgggttcgaagacaaccttctttctcccttctgtggcttgtttagcatagcttttatttttcctctcaatttgatctttgactctctcatgaagcttcttcacatagtctgcctttgcttgaccttctttatgcttaaaaacagaaacattaggcataggcaaaagatcaagaggagttagtgggttaaaaccataaacaacttcaaaaggagaacaattagtggtgctatgaacagctctattgtaagcaaattcaacatggngtaaacaagcttcccaagtttttaagttcttcctcagaactgtcctaagcaacagtcccaaagtcctattaacaacttgcgttagcccatctgnttgtgggtgacaagtggctgaaaataaccaattagtgccccaacttgctcacaaag

SEQ ID NO: 82323 - DNA, 457 bp, Glycine max
gcagcttatcgacttctgtatgaaaattatgaccatttgaatttctcgagaggttccattgttcaatttcgagcatctcgatatatgatgcgcctgaatcggacatccgagtgaaaaattgtgatcatttaaatttctcgagagcttccgttgttcaatttctggcatctcgatatattatgcgcctgaatcggacatgcgagtgaaaagttatgaccattttaatttctcgagggctgtcattgttcaatttcgagcggctcaatatgtgatgatcctgaatcggacctccgtgtgataacttatgaccatttgaatttcttgaagcttccgttgttcaatattgagcgtcttagtatgtgatgtgcttgaatcagacattcgagtgaaatgttatgaccatttgaatttctcgagagcttccgttgttcaataatcaacgtctcgatatactatg

SEQ ID NO: 82324 - DNA, 436 bp, Glycine max
tgctggacttgtatggcagtgatttccttggcgaattgatgctcagaagcagcaatatccaccactccttcagttggtctgcccacgtatttgttgattacagcaggggagaatctaacacattttcctctgacaaacactttctgatactcatcactctttctgtttgttatgtcagagggaatgttgacaatgaattccctgactagactttcatagcaatctcccaacttggtgatagttttcagcagtccagcagccttgatgaggtccatgatctccttgcaatccaaggcatctcttcccagttctctttctaaagcaagtctgcgttgatatacaacattccacctttcaacattgccaatggagtggaatgagatgttgtccaatggtgcatcagggacatttccacgcacctttttccctgatttct

SEQ ID NO: 82325 - DNA, 470 bp, Glycine max
  unsure (1)..(470): unsure at all n locations
gcttactatcatcaacataattacaatgccaaaacaattgaatcctgtcacttgaaacaaaaagaaaatgcacgaaaacaaacataacattatatctctccctttcttcctaatcctacaaaataggtacttcctagagtgaccccagttggttagttatgtttgcttctgcagaatgcaacatggaaacaatagagcaaatggacaaatagataacgagttagaaactganagcccgggtgaaaacctaacctgcagtgcaaacaaggggtgaaaagagagagaaagaacactgttaccaaaacctaacttgacaatttattntagataaatgcaaaattaaaattntccgattcttcaatagacattgcagcagccagaatagtagcaatataaattaaatgaatttgtagtanacctttgcaaagcttcatattgaaaacacctaataattcaaccaagcctaaaga

SEQ ID NO: 82326 - DNA, 434 bp, Glycine max
  unsure (1)..(434): unsure at all n locations
cagctnggatacttccagtgcattcaatagcatgatctactccttcattagtcatttcagcaatgaccttagcgccacatatcatagcaaaatagagaattagttctcttggatttgattaaactactttgtatagaataaagaatatttggaagctgaatagaagtaatgaatataatgaaactggaacttattgacaaatacataaattgaacttagtaataaatataataaatttgtcaattttataataattactttagaattccaaaagtgcatgcatgtaaaaatgctacataatcttggaggcagcaggttaggaagaccagaagtccaaaatgccttatctaccacaaccaaaatccacataatataattcatagattcaaagcattaacaacatttctcaatgatgacacatggtagaaaacaca

SEQ ID NO: 82327 - DNA, 318 bp, Glycine max
cactcacagattatgctgtattagtgtttaaaacccaaaccgaaccgatacgtcagattggtccaagataaagcctttcgactgtagcttatcaccagaaagaattgtccagtgataatttctagagaagataagaaggagaaggtggaatggcttggttccaattcttcattccaaggaaccttatcatcacaaggataatacgtatgacttaattccgaatctccaaaaacatatcaggaaacccagcttcaagagatgctggaagagactaagaatttcctgagataaaatcttctaccttagcttccaacaagc

SEQ ID NO: 82328 - DNA, 440 bp, Glycine max
  unsure (1)..(440): unsure at all n locations
attcgagcgtctcgatatattactggactcaatcggacttccagtgaaagttattgtcgttagaattagctgcgagcttcggttttaaatttcgagcgtctcgatatattacgggactcaatcggacttccgagtgaaatgttattgtcgttcgaatttgctacgagcttcggttttaaatttcgagcgtctcgatatgttacgggactcagtcggacttccgagtgaaatgttattgtcgttagcatttgctgcgagcttcgggnttaaaattcgagcgtcacgatatattacgggactcaatcagacttccgagtgaaatgttattgtcgttagcacttgctgcgagcttcggttttaaattttgagcgtctcgatatattacgggactcaatcggacttccgagtgaaatggtattggcggtcatatttgctaccag

SEQ ID NO: 82329 - DNA, 385 bp, Glycine max
agcttgtctcagcgtttatgcgagacggagactatcatgtttgctatcatcgccaagtaccaagaagagttatgtctatccacggcccacgagcatagaatcgcggatgagtatgcccaagtatacgcggaaaaagaggctagaggaagggtgatcgactctttacaccaagaggcaaccatgtggatggaccggttcgctcttaccttgaacggggagcaagaacttccccgcttgttagcccaggcccaggcaatggcagacacctactccacccccgaagagattcatgggcttctcggctattgtcagcatatgatagacttaatggcccacataattagaaatcgttaggaaacttgtatggtctctcagaccctgacta

SEQ ID NO: 82330 - DNA, 414 bp, Glycine max
ctcaagcttcctcgtggccattttctgcgagaacaaacatatagaagtttgtttttttgatatgcttatcctaacgcaaaaaaatgtcatgctaatccctccggtttagaacgaactcatgctcacgtttatagtaacacatttatgcacatgcgtatgtgtagaatatcctactatttatatcaacatagaggccatccaacacattctaatagtcatacatatatgcgcatttgaaaagaacacacattctcacgctcaaggcattgcgtcaagaattacacttaactatgttctaaacatttgctattacaaactacctacacacactccagatatacataccctacaaactttcattggttactcacacttatgcatattggcagctatttacatatgcacatactgcat

SEQ ID NO: 82331 - DNA, 385 bp, Glycine max
cttcttaaccctatcagactattgtttgtcgatggttgtcttatgaactgctgctctataatagaccagatatccttgctcattattgtaaacttacttaactggccataatgcaataatgagagcggtctgtagtcgtcaaatgactgggggtgttctggtgtgggaattaaaactatgaaagaagcattattgcctctagggaagctgccatgcacatggaattcatctacaaatcttctgaagtcagttttcagcatttcccaaaattctttaatgaatttgaagttgaagccatcaggtccaggacatttgtccccatcacaactccacactgcttctttgatctccaaatccaaaaaaggaacaaccaaaaacttcctct

SEQ ID NO: 82332 - DNA, 480 bp, Glycine max
  unsure (1)..(480): unsure at all n locations
tngcatacaccatatgctggactagctattcgatgctccattaattatgaagtccaaagactatccttatacctgtcataagtattgacatctattcaagatttatttcttcattatcagctcacaaagttgaagctatgctatctaatttcttatagagaaggttcatgaataaatgaaaactcaaataaaaaaatagatcgtatgcacaatacataaacctatatctctgttggaatatatgaatcacatgacaatgaatttgagttataattgaatatgtttgttatttcgagaacccactcgatcactactacaatacttgattcaaaggttaagatagatcaatacatatgttatttaacatacattatagacatgatcttattattttgatacatttagtaatatattacatctgaatcgctagttatatatatctatttatatatatatatatatttatggntatatatatat

SEQ ID NO: 82333 - DNA, 448 bp, Glycine max
  unsure (1)..(448): unsure at all n locations
caccagtgatttcaacctataaattatgagtagtggttatgttgcttaaggcttggatagttacaatttgcggtttcttatgctcaattatcttgaataaaacaattcaagagagcttaatacttattttgattcacaaattcatccacaactcagcaccacaactcaacttcatcataggcatcatgtaaaaaacttagaaaacaaaaaaaagttcaacaacaagattacttctaggaattgatttagaacatgttatgaactaaatagcatgcatgaattagattcaaaattcanaatatgggctaagaatgacaaaaatacatganaaaatgtatctagaattcaatcaacaaaatatgaattcaacacaaacatagaacataatgtgacaattattatgactaaacatgactctaagacaacatggattaagtgattacactta

SEQ ID NO: 82334 - DNA, 347 bp, Glycine max
  unsure (1)..(347): unsure at all n locations
cgcctcagagaggtccaggaaggacaaggcggtctaatgaactagatcctgcccggagtacgacagtcactgctatatgagcgttgcacaccagcnagcgctttcgaagccatcaagggatggtcggttctccgggagcgacgtgtccagctcagggacgacgagtatactgatttccaggatgaaatatggcgccggcggtgggcaccactggttactcccatggccaagtttgatccagaaatagtccttgagtttatgcccatgcttggccaacagaggagggcgtgcgtgacatgagatcctgggttaggagtcaagggagtccgttcgatgccgacgctatc

SEQ ID NO: 82335 - DNA, 469 bp, Glycine max
  unsure (1)..(469): unsure at all n locations
agcttctcaaggaagtttctcaagaaagcttcttaangaagctacctagtctataaatagaagcatgtgtaacatgtggcgtccctaaattaatgactggtttaatagtaataatttaaataacaaaaatcatggtaaatttttttttcttctttttctttatcatttctttctcttttcactataactaggtttagaaggaaaatcctcactataaagtcctgaatggccagttcacaactctattcggagtcatttctttcttaccgctcataattctctaaattatnttgctgtttcaaaaggaagaatataccaaccattactttaggtcgtcacgtgaaanaagggtaaaatacagtcgataaactcttttacannataaagtgctaatgatttcttatcagataacaagatcgatcataaatgcattcatcatttaaagctgtcccaaatatgggagtttaca

SEQ ID NO: 82336 - DNA, 359 bp, Glycine max
  unsure (1)..(359): unsure at all n locations
ctatacggacacttgaaactaagctgctcatgaggtgatgagacaagcatgctacgattagtttcactctgnggcacatcaggacgtgatttaagagcggtgaacacgctgagctgctactaacacccatatggaagtcgattctgtcagatcgacattgttcactaagcttactataagatacggtgccctctaatgaatgaaatcagcttccacttgcgccacgtgttactcccatgaccaagctttatgcatacacttctgttgaggtttatcgacttgctgggacaccatgaagatgtcgtgcggcacaagatatcctttgttacagctcattggattcgctgcgacgccgacgc

SEQ ID NO: 82337 - DNA, 471 bp, Glycine max
agcttgagcatcataaggtacaagacttgttttttgtggacaaccaaattcttaaagactgttgtgacagcaaggatttaattgatctaattctcctatacaatattgatgattgtaatgagtggttgataggggaaatggtgtaaagatggagaagtggttgaagatgaaccagtctttggtgatgatagcttgacttggggaatcgtacgtgatgcaattggggttggtgatccagctagactcactatacagcatactagactcactacagttgcacctattgaagaggaaaaggaggaagaacatatctttaatgatggggaacaagagatgaggaagatattggaagtggagatagtgattctatttaaggaatcacttgtaataagcactagtcagcatacttactttgattattagtctttgattagtattggatttgaatgttagcgacaatgacaatggatt

SEQ ID NO: 82338 - DNA, 415 bp, Glycine max
gacttcttctggaggatcttcatcgattcctttatcatttcctttggaatcttgtgcatgaatattcatatgttctaaagaatctgcactatcatctagcatattctttcttgacaagatagcattagattcattaaaggtaacatgaatggattcctcgatattcatagttcttttattatatatcctatatgctctgctttgtaatgaatatccaagaaaaataccttcatcagattttgcatagaattctcctagattatctctaccattattaagcacaaagcatttgcaaccagaaacatgttgatgagaaatattaagttttctaccattatataactcatatgggcgtttctctaaaatgggtcttattaaggccctattcatgatgtacatgcagtattgacacttc

SEQ ID NO: 82339 - DNA, 432 bp, Glycine max
  unsure (1)..(432): unsure at all n locations
aagcacctgctgcatgcaagcttgatttatgcctaagactctgacaataatatttgtgctcagattgaaaccttatcctncttctcatactaaagagctagctcgctagtctaagcaggaagaacagaacaggggtagaagatccttgatctggaagagtcaataactcagatgaggatggtactgcatagtaaatgagaggatatctgtagtttccattgtctatatatgattacatgtttagcaccagaaaaacccaattaagactcctggctatctattttagttccttgaagtttgatataactcctgatatgcagtgctcacttgacatgttactgacttagggacattttgctttcgacatganaatcctgatttcatcctgcttgtactttagaacaaggactaccacaaacaattagtggatgc

SEQ ID NO: 82340 - DNA, 453 bp, Glycine max
  unsure (1)..(453): unsure at all n locations
ttctacatttagctcattccttaaatcctagggaattaactctatacttttttacttacatttttttagaattacatanaatttaatcatgtatatatttctttttaattgtagatattatagtcatgaatggctaagtgaagattctaatcgagttcctccacatcaagatatggaactcactcgtgaaagattaaaatgcttcatgaggttctttcttgatgtggatgtaaggagaaaagtgaatatgagtttgccaacttctcagatggaagagaaggttntgatgatcttgattctttaaatgatagaggtcaaatggatccaaaagcttggtggctagttcatggcgttaatgctccaatacttcaaaaggttgcccttaagctacttgtgaaaccttgttcatcttcatggtgtgaaagggaatggagtacatactcatttatccat

SEQ ID NO: 82341 - DNA, 262 bp, Glycine max
gtctcacactcttagctctgtctttgctcaccatgcacaatgtgctcacatactgtgatatggagaacacacattcacatctataatgcatgctgttctagttagaaccaggcttacgaccaatctcacataagtactgaactatttgactgccataccatcataagttatggttaactgtgaacgatgctctcagatgagcaactatactgcttatgcgcaagactaacacacagtacctaatgtactgacatctaactta

SEQ ID NO: 82342 - DNA, 396 bp, Glycine max
tgttaaccatggaaactacttacctcattagtattcgtatgtgcgagacattcccgaattgcctttaccttatcttcatccacacttatactttattagctaatgacaaaacccaagaacacaacaaattcatggcaaaaagaacactttttaagattgactgatcgaggccgtacctgaatcaaataaacattaaaatgcaataactaggaagtgatcctagatcatttcccaacgagcaatgataaaccaaatgttcataatatactagcagtaacagtaacagtaacacgggggttgtttggtgtgtgaattaaagaacaagtgaactggaatacgaaatcaataatggtaaaaatctgttgattcctctgattcagaagccattctctggtc

SEQ ID NO: 82343 - DNA, 448 bp, Glycine max
  unsure (1)..(448): unsure at all n locations
tgacttaagttgttttgatgatgacaaaaagcccaaaagaatgatttcaagattgagtcaacaagttccagatcaagataagatccagattaatttcaagattcaagaaatgacataaaaaagaatcaagatttaagagaagatgctttcacaagggaagtattgaaaatgatttttcaaaaaaccaaacatagcacagttttgttttacaaaagagttttctcaaatttttctaagttaccagagtatttactctctggtaatcaattaccagtttcctgtaatcgattactggtgataaagtttgatttcaaaagcttttaactaaattntcaacgttccaaatgatttttaaatggtgtaatcgattacaatatattggtaatcgattaccagtgtatctgaacattgaaattcanattcaattatgaagagtcacatcgtttct

SEQ ID NO: 82344 - DNA, 380 bp, Glycine max
gcttctcgctcatgctgagaacgcctctagttcaacacccgtgcatcctaatgcacccacccagagggaagctccccgagttccaactccgaacacggctcgaccggacggtaattccaacacgacaaggaacttccctccaaggccattgccggaattcaccccgctcccgatgacgtacgaagatcttgtaccattcctcatcgccaatcatttggccgtggtaactcccggaagggtcctcgaaccccctttcccgaagtggtatgaccctaatgcaacttgcaagtaccatggtggtgccccggggcattccgtcgaaaaatgcttggcccttatatacaaggtccaacatctaatggatgccggatggctgactt

SEQ ID NO: 82345 - DNA, 449 bp, Glycine max
  unsure (1)..(449): unsure at all n locations
agcttcctcggggccatcttctgcgagaacaaatgtttgttaaattagttacaagataatgcttatcttaacgcaaaaatatcatactaatcactctgatttagaccaaacttatgtaatccatttatgcacacgcgcatgtgtagaaaatgtcctattactcatgtcaacatacaagaacattttccatacacctatatacattctgaacaagaaaacatactttcatgctcaaagtgttgcgtcaaactttacacctaatttatatcctaaacatttgctattacaaactacctacatacatttgaagtacaccatanaaaattttattgtttcactcatatttatttatatgcatattggaaagctaattacatcctgcacacactngcattcaaaaggaaattccatactatcatacattcatttaggaaaataactattcacac

SEQ ID NO: 82346 - DNA, 405 bp, Glycine max
  unsure (1)..(405): unsure at all n locations
acactctgaaactcaagcttccctcctccctattggattctttgagtaggagaaccagactcaatgtagctccattggttgagttgggaaaatatggtgaagtccaataagatggaaggtctcgattttagaaggataaaggcttttaataaagccatgtttgccaaataactatggatgattatagataatgaggagactttttcatctcatgtcttgaaggcaaggtactttccttcatcccatcctttgagtctaagaaaacactctatgccatgcttcacctagagtagcattatcttatgtaagctccattggagcttgtaggcctaggatcttcttcatcaatggattcctttgcttcttggaagatgaatggcagcanaatggagaacgaagagagag

SEQ ID NO: 82347 - DNA, 467 bp, Glycine max
  unsure (1)..(467): unsure at all n locations
gcttattactaataatatcatgactaggaagattctcatcaaaaggatgaggagcctcatgaacgaatttctccagcgtgtcataaacgagcttactgtccacaagaaatttaagtacccttcgacggatgggttccacttggtaacggctttctcctcgggctgcttgacctccttctcgccctccctggcctggtccctcgtgtgaagcctcatcgccacaaacctcatctcttccacgaaccctttcgactcgcccttcttcttcggcgtctccgccgtcgccgccgacacgataaccgcagtccttctaggcatgacagcagcacgaacaccacccgccaccgccggtgaggttaggaaaagagagcggaattggtgatgaggaggccgtggcgccaggcggtgcttaatatagagcgaatgggactgngatagaagtgttgntagtgatgacgccatggatg

SEQ ID NO: 82348 - DNA, 381 bp, Glycine max
tcaaccttcggtgctcatttctgctccaaatcgcgaaaggagggcattcttggagtcgtgaagtgcgtggctacgagtgggacttcgaaatttcatgtttgggtggacttctttctctcttaaatctcgcgggtatggggttctgggagatatgatgggtagttctgttagttttctgcttcatgatggttatttgtaaagactcttgttgaaagctcgttgaaattgccatgttggatgagttaaacatacccattctgttatacggtgtctgtgacgatgtttgtgatgtttatatactgaaaccgctgatggaaaactgttggagatgaaacgtagaactcacctagggttagacagtgagtatgtgatgttatgagt

SEQ ID NO: 82349 - DNA, 393 bp, Glycine max
  unsure (1)..(393): unsure at all n locations
ctattgaatagggattgactatgtttggccgtggttcctatttaggtgaagcataaaagtgagcataactaaattatttttcttctaaaaaattatgattggaactatttgntttcattgattgtgaccggtccttcttttttgagcaaattacataannattttctcgtgctaggtcatcttccttttcattgatggtgctagatgtgttcttgttcgtcgcacatttctcctccatctcttgttctcctcccgatgctaggcaggttcatgttcatcacnagttaaaactattatatacgtattccctgaaattntcaaaatattacacatgtacccctaaacttttaaaaatgttacacataaacccttgtcttttacaaataatacatg

SEQ ID NO: 82350 - DNA, 451 bp, Glycine max
  unsure (1)..(451): unsure at all n locations
agcttctatatagctgaaccattgtatcaataaacacaagttgagttttattcataaaattagagnttatctcttttatcttagagagagtgattctcctaaattcttgagtgattcaagaacaccctggctgtatcaaaggactttcacaacctttgtgtgttgccctcgctggaaagagtgattctttccttcctatcatctccacccttgttctttcaaaccacaattccagaaaatccacctctgcccacaattatctcgtgaccataactcccatttcacacactcaaattaagtgattcttgatcctaaattgaatttcaaaacgagatctttcacctcgntttggaatcacctcatttggagccctgtagcttccgttattggcatttctatatttctgtncagccaccacttatacctacgttaccatcccattcatcattta

SEQ ID NO: 82351 - DNA, 361 bp, Glycine max
tcgactgatcaacacttgcacagttggcaaagatgcatgggagatccctgaaatcactcatgaaagaaccttccaagtgaagatgtccctattgccactcttggcttctaaattcgaaaatcttgaaatgaaggaggaagaatggttttatgacttccacatgaacattcttgaaattgccaatgctcgcactgccttgggagagaggatacagatgaaagctgggaaaagatctagatcttgctagagattgacataagtactggataatgagccagactttgcacagaaatgataactcttggtctcttaaccttgactagacttcgatgggctgaaaaaacaaaattactttggtcat

SEQ ID NO: 82352 - DNA, 477 bp, Glycine max
  unsure (1)..(477): unsure at all n locations
ggacactataaaactaagctgctgtgggctctatggggctgatcttgagcttatttaagttctttaatggagattntccaccatggagatgtagcggaagacaaacgagaatatgtgagaggaggcgccattcactaaggaataagccatggaagaaggagcatcaccaccaagatgagccttggataaaaagcttttataggatgcttcaatggaggaaaagaaagagggagagaaagatagaagggggagcacgaaattgatggaagaaaaagggagagaagtcgaactttgagttgtgtctcacaagactctcattcatcagagttacaacaagtgttacacatgcttctattatagactatgcaggtctcttgagaagcgtttttaagacgacatccttgagaagcttctatgagaaaacttncttgagatgctagaccttagctacacacacccatctaaaacctaagctca

SEQ ID NO: 82353 - DNA, 381 bp, Glycine max
  unsure (1)..(381): unsure at all n locations
tctcacagtctttatattgggagccaatccaatccttgtgtctggactctcagccacttatgatagccgccgatgatcccattactgcttcccctaagctctctatcctttcttcacgccgcatcccatgccttgcaaactccttggggtacctttgcattggggtcactgaaaccccgtgtaatgaaaggcgtgatgctttcgtcaaatggcgctcctctcatggngtagccaagctgtcttatggcgaggacgggattataattaatacaaccccttgttctcatcaagggaacatttggacatccttcgcatgaagatagaatcctgattcttccttccttctagcgaagggaaccaataacagacgcccctccatgc

SEQ ID NO: 82354 - DNA, 482 bp, Glycine max
ctaagcttaagagaataagaagatggccatgagaaatggaagaagttgtgatactcacctagacctccaagaacttaatccctcaacaatggagaaagaggagaagaagaagaaacaaaagcaatggtctcccttctctctcttggtcgtggaaaatgagcaaaaaaagggaaaatgcttctctttttttatagagggaaagggttagtatatgtgagagtctcacatgtgggtcctaagttattccctctttgctttcaaactaactacacttagggacataagctctcaattagtccctaattaattctaacttctacactaatttttgggtcataaattcagttattaatctcttctattaatcgtaattaaaaataatttaagagaatgaaaattaaatctccttttcctcatcatgtaactaatagtactcacatcttatacatacatgtttaaaattccataatctttctaatctc

SEQ ID NO: 82355 - DNA, 410 bp, Glycine max
  unsure (1)..(410): unsure at all n locations
actataaaactaagcttttatccaggcaattcttggtggtgaagctccttcttccttggcttattccctagtggatggggcctcccctatcctcttctcctttgccttccgctgcatctccatggtgaaaaatcaccattgaaggacctcatcgaagctcaaagatccagcctccatagaagctccacaagcaagcttccatcaagtggtaatcagagcacaagagcttcaagtaggtgctccttaaacctccattaattatttttctttaccttctcttccattgttggtgcttcatttntctccatgaatctcctcacatgtcttggtctaaatgtagttaacatgattctttagagtttccaccgattaaactggctatagaaactagatttgattttctatgggtc

SEQ ID NO: 82356 - DNA, 463 bp, Glycine max
  unsure (1)..(463): unsure at all n locations
ctgctgcttcaccaatctaagaatgagtttttttttctcttcatttntctcctcattttgattgtgcatgtgcatatatatccatgcatgtatgtatgtttaattgttacatacttgcactggtgtttgtttaatgataagttgcaatattgaggaggttgcttcacattaagggggtttgcatagatcttgtcttggtcttttggcgtttaattagtctctgggtctaattaccttaagtgagttcaagttggtactagaagttagtctatgttagtgtgtccaaatatccatggatgtattatgattataagtgaacgaaatattaaaaaattaatatgaagcacaaagtaagccatattttttnttataatcttctctagaatccattctaattataatgtgtgttcactctttccaaaacatgcgtgctgagacactaaattgtagtactctatattga

SEQ ID NO: 82357 - DNA, 463 bp, Glycine max
  unsure (1)..(463): unsure at all n locations
cgtggactgtcagattctctcattaactagtgattgtatgctcggctgataaattcttctaacagaacaatgtaactcaactgattttcttgacttgtgagtttgacaaccatttatatcatgttcaaattacttttcactgaatcaatgtatccattaccgttgacatcttaattgctgtgcaatttatatattcattntattttaactaaagatttatcatggttgaagacattgcttctgtacccagaattttatatgttagtggtctattgtctaaaatatatggtgatgatatgtggtcttctatttgatctatgaaatatatactttcctattgctttatgtgcgtattgtctcatcgcaagcactatatagagcccatccttggcttattctatgactaattttaactgctccaatatatttagcttttaacaacatcattttttgaggccatatt

SEQ ID NO: 82358 - DNA, 163 bp, Glycine max
atgctatatatgggacctcgttgcttacatatatgaccttaatttctcaacaaagtaacggactatattagtgttatatcacaggatagcaccggcggcgagcttatataacacatacgatattcactaatggaagcgacctgctatctcaagatcatatgag

SEQ ID NO: 82359 - DNA, 461 bp, Glycine max
taagatattgtgaaatgacaagagtcctcatgatctaccatgatcttcctgattaaccatggtcattgttaatgtaccatggccgttctcaagtgaaaataacattagatcttcatgaaagtgtgtatcttttaactcttccacttaattgagcgaaattacttttacaaggtaaaaattaatgttcaaatgtgacttctgttaaaaaaacacatgaaataacacaaaaactcacataaaatatgagccgaagtatgatttatcttcttaataaacttaacccctaaaagtaatttattctatatattgtgtacagggtgggcatcaaatgcacgctatagcacaatgagctgctgaggctgtgaagaatgcaacatggatgaacaactaatgaagctttagtagatcattatgatgacttggtctcccttgaataaaccctgtctgcatgtgattatgat

SEQ ID NO: 82360 - DNA, 427 bp, Glycine max
  unsure (1)..(427): unsure at all n locations
gcttcggaaaaaggataggtacagcccttatgcagagcttgaaagagcccgggtagtcaaagagaagttcaagtccatagccatcaaagtctgaagagagtatgatgaactaagggacgtcaatatggccaccgctgaagccttggaatgagaaaccatgaaggcccgaaaggaagaacatgaccaaaacaaagttttgaggggctttataaggcagcaatagtgagctcaagctccaaagaggtgaaaggaatcatcacgggtcaaaggcatgatcttgaaggacgagctaaaggcttgccttangtcgaaaagaaatttgtcccaacagttaaagtgagactgaagggaatatgtgggccatcatcgatgagtgcaaagagaagctaaatctagcggcgactcacgagcaaaggctagaggatga

SEQ ID NO: 82361 - DNA, 388 bp, Glycine max
  unsure (1)..(388): unsure at all n locations
gctgacatacatggtaatattaatttacactgataacccccttccacagacagaaactcaaaattgtgctttacacaggagtacctaatccaaattgcatgcagaagtatgttaagactatgtgtcaatttcaaagagttaaaaagcataccaggacaacaggatataatcttacttatctcgagggagtgttccacagtatcggtggatgagactaacactataatctaaagtgaaagatgctccactggatatcacatagtatgcatttgtttccccaccatcatgcccttanactagatcatgtctttataatagagcatctgcatggaccgtcactctaatgattcaaagagtgatcttttgcttaagtttcctgaaatacaag

SEQ ID NO: 82362 - DNA, 396 bp, Glycine max
ctggctatcagtcatatatctttagcaatgttcttactcttcagtaggccatgtactctgcttagtgtgaaagacaacaactgattggtgatttgctttccaactgattgttgtaccaaacaaagtaaacacatatcctgttaaagatttccttgtgtctacatttcctgcaaaatctgcatctacataacctgtgattgctgcctcatatgctgtcttcttgtaccttaatccaactttcgaagatccatttagataccttagtgtccacttcacaacttcccaatgtgcactgccaggatctcccatgaatctgcttataatacttacagcatgagctaagtcaggtctgctacaaaccattccatacattatgcttccaacaccactggcata

SEQ ID NO: 82363 - DNA, 478 bp, Glycine max
cgtgcgagtatggtgtacccaacacatgtggtactatgtggtggtcaggcgatggtgcaaaacgattctccacatgcacaaatcacgtatacccaccatcctctgatgaccacctccaactgagctcacgtactcccacgtagcccttatcctcgttcctgtcaacgccgggtccgcatcaatcctcccaagctatcacaacatctaggtaattccagatccaatcatcatggactaacaaaaccaagctaaacagggcaaaggcagaacactctgcccaaaacacaactcataatcacagctcttcacatacaaataccccagaaatatattcttcgtccaattcgataaccgttggatcgagcacaaattctactggaagtctctagtatataagtctacattttgaccagtgggatctgctagaaaatgtgcagaaccccatatgtactacgcttttcacaaccagccatacaca

SEQ ID NO: 82364 - DNA, 429 bp, Glycine max
  unsure (1)..(429): unsure at all n locations
cccatcacatgtggtactacgtggtggtcgggcgatggtgcaagtcaactctccacatccacagatcacacataaacccaccatccccagatgcccaccttcactgagctcacgtactcccacgtagcccttattctcgttcctctcaacaccgggtccccatcaatctctgcaagcttgcacaacattcaagcaattcaacatcccaaacatcatgaactatcaaacccaaggaaaacagggcagaggcagaaaactctgcccaacacaaaccaatatcacagattttctcacttaaataccccagtaacattctcttcgtccaattcgtaactatggatcgactcganatntactggaagtttagcacatattcacattggaccgtgggactgtagaaacgtcagacccaactgactacttttcaca

SEQ ID NO: 82365 - DNA, 374 bp, Glycine max
aaaaatgatcaagtgcaacatgaaaagtgtcaatttatccctcattgatggaatccaagtgttcttgtctaaggatggagtctggggcgtgccttgtgaccatattttgaaagtattgccgaatctagatattatagaatctgcgaacgcttgattatggctaggtggacaaaacatgctaagaaaagtattcgtggcacgaattctgatggatcttactattaaaattctcattatattggaaggcacgcaacgttggtcaagttatccaggcatgcaatacactatgcatatcgccttgatcattatcaacattgggtggattcgctaagagaggcattgaatcacgtacagcaacaccacaatgcgcaaca

SEQ ID NO: 82366 - DNA, 417 bp, Glycine max
  unsure (1)..(417): unsure at all n locations
agcttanggatggaatacttacttgntggtgatgatttaaagcgcgaaacggaatcaaaaaatgcgtaaaatgatgaccctagggctgcaaactcgtaaatcccgtgggtatggcttttgaaagggggaaaagaagtttttgaatgcaaaaacgtcccccctttcgtcattcttatattttggtgcaggggtggctcgcccaggcgagctaacgtgcanttttttttttttgagaggaacattaaccatgtcccctccttcctttatggttagcatcttgcttaacttgaacttacttaagttagagttgggcattgattacttatttttaaaacaaacaaaaagtaaaagattactgcgaatacaaaggatacggggctgccttgcagcgacgttctccgcttgcttagcgtggag

SEQ ID NO: 82367 - DNA, 377 bp, Glycine max
  unsure (1)..(377): unsure at all n locations
ctgaacaagcttagaacaatagactttgtcttctcttaatcgacattgggcttggcgaccacgatcaatcaagtactttcggcacctactatatgtagacttctccaacgctgttattggaatgctgcgacaatctttcaacaccttattcacacattctgataagttggttgtcatgtgaccatattgtcgtacaaatgtatcgtaagccatgctccatanttcctttgagattcgatcaatacatctagctatagctggactcaatagacgaaaatcttctaagtgttgatcaaacacatgcttgctaggagtgtacgctgtatcaaatttgttatcattaacagttgtacgtatacatgatactatatcaaata

SEQ ID NO: 82368 - DNA, 467 bp, Glycine max
  unsure (1)..(467): unsure at all n locations
gcttangactctgcccccattccttatattcattattaatatacaattcaagaatttctctttgtcccttaatcatttctaatttctcaaatgggcaatgcagaaaatgcttatttcaaacatatccaatatccatctcctcaaacaacctccaaatgttcttaatctccaaaagtttaggtaactaaaacaaaggatatttnttaatatgaagatatgaagaaaaattgagattcctatcatctagaataaaatcgaaaatagggtgtgcgagcatgtttgcacgggtggacagacattacaaatatctcacgacttaacttccaatctgttaaaagattgtaagtcccatcataaatcacatgatagtctnttgataaaagaatctaatctttaaatgcttttatttgatgagaataataatacgtacagatagatgatgcttacggntcatgtntaacacagac

SEQ ID NO: 82369 - DNA, 323 bp, Glycine max
ctacttatgtggcagggcgggctgtcttcaccatcttgttcctacgcgaactttgaccatcgttctgacttaccgcgatgcttcttatcatgtctgtctgagtgggcttatagcctaaaccatacttcccacgattacctggcgtatttatcagtctaggtatgccgacgttggtttttactaaacccataccgggctcataaccgttccgcaacataactcgggccatcattaccgctgcatcagacagactgggctagccaaagaaggagtccacggatgaaatgctgaccacctcaacagactggatagcagtttctaac

SEQ ID NO: 82370 - DNA, 350 bp, Glycine max
acatctcccctttctcaagcttattcttcttgatatcatcaaaatcttcatgatcccgactcgttggtggaggatgcatgaatgacaatcaattcatggggctccgaataaaagtggagaatggaggataggcgaacagcgctatgcaatcaattcgcgggttctccgactcgttggtggaggatgaatgaatgacaatcaactcatggtgctcctaataaaagtggagaatggaggataggagaatagcgctaggcattcaattctccgggctgcaggactctatggcggaggatgcatgaatgactatcatctaatggggctacgaataaatgttgagaatggagaat

SEQ ID NO: 82371 - DNA, 353 bp, Glycine max
tactaagcgtttcagcttctgtaccaaaccacaccttacattgcctctggtttcatgtttgctaatgaagccatatgccaagcatcacaaggaatgagctcaatacacatcgttgaattaagaatggagcatacccttcattgtgtctccctaataagggccctttcttcaaggcctgaatggccttcaacactccggatcaccggattaactggcaatgaagaaaactcaaaacttcaagctagtattaatgtgcttgtagaagaaacaagctcattgggaatgcatcttgaattccacataatttttgagcatttacttcatgtcttttactatggagaagctgcacttag

SEQ ID NO: 82372 - DNA, 438 bp, Glycine max
  unsure (1)..(438): unsure at all n locations
agcttgaactgtgggtntcatttggacttttttttnttaccatgccttgttgcctcctccttcgtttcttagaaaggatatcatttacgttgggcccaccagtcgagaaccgccaacatgccacaacagcgcgtggagccacgccaccttcacatgtctgaactcagaagaacaaaacacagagcgcggagataagatcatatacttttataaattttcgattaagtgtttgaattttttttaattgaattggtttgttgctatgaaaaattaattggaaacacttacgcttaattgtaaatttatcatcaaatttttattattntacatattntatcaatcaagttgtgttgttgggaattctattattcaactctgatatttccatgtattttaccgccaaaagttctttttacagatttacaatctaactttata

SEQ ID NO: 82373 - DNA, 466 bp, Glycine max
ctaagcatacatgatatacatgtgccaacgcttgtttctatctcaactcaggcactcgcattttgtgattctaaacagtaattaatgttggctctcttatgtatccaaactgttaggagagagaaaacacctcagcacttgaaggattatgtctaacggattctggcacaagttcatttatttggtagcgcactgtgcattaagataattctgttagtgttccctctgcttgcactagaggattctgttggtggctgttgttctatagtgagcacatataactatatttatgcagtgtattgaccgcagggaaattagaagatgtatagcatagttttctttctatgtcttaagcttttctactctcttctctctgcttctgcattctgctattctgctattatcaagttcttaacattaggggctttcattgagcctccatggcggaacctgaccgactgaaccc

SEQ ID NO: 82374 - DNA, 417 bp, Glycine max
  unsure (1)..(417): unsure at all n locations
tgcagctttgcacaaaatgtattatgaaattgatatgcccgaagaaacaccatttnctagttaaccatgcattaggtaccatgttcaattattttgtttttaagtgaaacgggtttatgatcccaacatgtgtggctcgtggtgcctaacacatgaaactaagaatgtagtgtgaagtttcacgcttcccccttttttgtttttgttttgtagaggaaaacgcaaggatgagcaaacatganaacaaatggtatgcaattntgcagatcaaaaagtttgttgaacgcatatgcatgatgatgccatgtactcatgcaaatgtgaggctggaatatgataacagacaaatgcacgatatgtccattatgatgttatgaagagatgcttatgcgatgcatgatatgaatgcattttacg

SEQ ID NO: 82375 - DNA, 371 bp, Glycine max
aagcgtgacttacacactacattctatgtcctactaagccatagatggctctaaacaaatcaataagatttgttggaagattatgcactgactaaatatgtgatcgtcttatagacaaatatatcacttaacactgttagtcttttctttcaaggtatacaacgtgtttttgagagcttactcactatacaagaattttaaaaatactttataagaaagaatgaaagaataacgtcacacagatgattcgagtagttgttcttcaaagctccttttatatatagccttcatctccaagtacctgcaggtgcatttaatgcttgcattaaatgcacatctgttcgcaaccggcaagtgtaccggatcgtaca

SEQ ID NO: 82376 - DNA, 453 bp, Glycine max
  unsure (1)..(453): unsure at all n locations
actagatgccttggtaacctggtaacccaactggccatgaataaaaaatctgcacctgttgccagactctgtggtttgtgctcctctgccgaccaccacacggacctttgcccttctgtgcaacaatctgaagacctcctcaacctcagtagcaaaatcagccacaacagaacaattatgacctctccagtagcaggtacaatcccgggtagaggaatcatcccaaccttagatgctcaaatccttcacaacaacaacagcaacaacaacaaccttattttcagaatgttgctagcccaagcagaccatacgttcctccaccaatccaacaacaacagcaacagccccagaaacaacanatagttgaggctcctccgcaacccttccttgaagaacatgtgaagcatatgactattcataacatgcagtttcaacaagagaccagaagcctca

SEQ ID NO: 82377 - DNA, 469 bp, Glycine max
  unsure (1)..(469): unsure at all n locations
acacataatactaagctaggttgactctataacagctgtcctaattgcagacgaatggtgttttctaaccacngacggaaccgagaaagaagntttgaacgtttatcttgggatcctccatcaggccactttcccaatttcatagtaggatgaaaatcatacttcaacttctgggaacaatgtaagagctcctctacctgcttccgtagtgaaccaacaaatgatgagtgcacaattcctccttttggagcggatatattctccaggcatcaatgcctcaatatatgttagagcaagctgctagcagatacaattagcatcaagtcacatactcataatgggcgggctattgcactagtgaatgagacttcgcccattatgaaggcctggagtgggtcatgatttgctaccctacctagtggacttgagaggaatagtgactcatccatgactgatacatcacaaacac

SEQ ID NO: 82378 - DNA, 335 bp, Glycine max
aataaaaaaacattagtagcgcatcactaattaaataggcatgatttattggatgtatttgatctgctaaaatttattatatggacatatatttttggtctatgtttgacttaaaagaatctatgggataatattaattaatcagattagaacagaacagaaatttaattcttttgttaataagaccaatatgagataattttctttgtctcaagtgtaaaatatttaaaagacacgtatcaggtataacaatcttaccttatcatgtattgtgagttcacattatctattagtaattgtcttttgtcgattactctgctaataagggaatggat

SEQ ID NO: 82379 - DNA, 304 bp, Glycine max
gacacataacactcagcttaggcgcgagctactaaataatgcactatatcattctttcgcaaggaaactcatgatcaagttaaagggctcaacctgctcgaaggtctgaacgatctagttcaactgggtgcaaaaacttggacctatcattgacaatggataaagacccacccattatgaccaagaccaacactgatggtgacaagtctcgtacaaaagcttgggagtggtctaacagataggtcttgacatgacgtgataaaatatggctccacttggaagcctatactcctcaaataaaaat

SEQ ID NO: 82380 - DNA, 471 bp, Glycine max
  unsure (1)..(471): unsure at all n locations
agctttgtcattnttaacccaagcaaatggatatgacattgtagagatgggcttagagattgagagcagaacatagatatttagagattgagagcagaaaatagatattcagagattgagagcggagaacaaaaagaagaaaaaatattttttttaggaacaacacacaacgcacaacaaacaacaacacgggggaaaagcaaagcaaataaacataagaagaaaaataatagagtagagaaaagaggtactctggatggaggatgaagatgaaaatgatacaaaaaaaatgagataggaaaaatgacaaaatgtgagaatagattaaaggggagcaataatcacattatcaaacaaagcanaagctgaatgacaacatacctgtcataccctaattntgtccagggactatcattcgttaatcttttgatcctcgctagccgaaatgagttgttcaacaccaagtaccat

SEQ ID NO: 82381 - DNA, 408 bp, Glycine max
tacatcagatctaccctaaggttcatgagaaccctagggttttctttagtctctctagcccaagcctcttggagtcttctatccaatacccttggggggtaggattgcatcaagttgagatttaggattctgtatttattataataattcctttggatgtgctatcttgaatctttattaacatgactatagactatatttagtttatgaattgctgcaccataatttacgttcatttgtatactagcgatgcccatgttttcgagtattgtgcggtatacattgtggttttaagaaattgtgcacgcaatctatagctggtgtgatcattcagaggaacgccagtggaaattataagacttagtaacttcctcgtaatatctaaataatgagtctaacgaagaatac

SEQ ID NO: 82382 - DNA, 476 bp, Glycine max
  unsure (1)..(476): unsure at all n locations
agcttatgcgcatatttccctacgaacgttcacttgcacaagacatcctattaactaagaaaaatgcacccatatacaatcaaggtagcttccttacctaaattatttacatgtacttccaaagtgtatttgttatttacatcatacacgccatcttgtcaaaatttacacacatgcatactcaaagcatttcggggtaccaaaaattgcacatgcgctcatcttggtatttctaatatctatacatatacaaacttcatgatgaatcttgactatctacacaataaagtgctacatttcatgccttttttcaagtttttgctacctaaagccgcatgcaaattcaagcatattttcctttgctgactaaaatggtattcaaaatatatatatattttttggaaatatgtttctttcattcaacatnattatatatannttttgtgagacattntgactaccacaaattatatata

SEQ ID NO: 82383 - DNA, 460 bp, Glycine max
  unsure (1)..(460): unsure at all n locations
accttaagcgacgcagcagcaagctcccttctggaggttctgtcgtgattttctanntacggaacttcaatctgcaacacaaatttcaataatcccatatcagatgagctgtagggtatatcaaagaaacaaaacacaacgaaggtagatagattatagatactcactcttgaggttcttgatcttcttcattatcatcgcccttgttgcctgtaggatcaggctcgggaacactcgacaactcctgagcggctctgagagctagcaatctttcacgacggaacgcatcgctctgctcaatcgaatcctcttcgctacccattgtttccctcacaatccaaattatctgctattctatatctaaatatataaacacaaaccctaatccttctccacactttagccttcacctcctccttcaaaatcaattgttatttactagctacagctcgcatgtata

SEQ ID NO: 82384 - DNA, 270 bp, Glycine max
  unsure (1)..(270): unsure at all n locations
tacggtcgtggagttgcaatagaatataaatgaccagacgctacaggatgcctcatccactatagaataagccatggacggagaagcttctccaccaagagagtgccttggatcagaagctgataaagaaacctagaatagaggactagacatgaggagaaagacatagggtaaggctaattgaatgataatatggagagaagattaactntgaagtgtatctcacaagtttctcactcatcatgtaggatcaagtggccctagaataat

SEQ ID NO: 82385 - DNA, 468 bp, Glycine max
  unsure (1)..(468): unsure at all n locations
cagcttgcttatatttgccctccatgtatatttttcttgccataactgaaatccaaacaaataagcatttatgtcaaattgagaaaattggatctggcattttgacccgaaaaagaaagaatacctgttacaagaaaactgggatggtatggatcatgacataacgttttccataaattgagtgagagtgagagagaaaatgaaaaagataaaactgatattattgttagaaagaaaaaaacccatagagttagatacaacagaggtatttaaagaagtttgacttgagaaactaaccacaactaactctaactacctctaactaacttctaacagaatgtaaactaactctaactacctctaactaacttctaacanaatgtaactacttgggcgcaatttagtgaaaactatcagcccttacaacatatacactggtgtctaatatgaaacaaanattgttacaca

SEQ ID NO: 82386 - DNA, 443 bp, Glycine max
tatagtggcgagtcgggttatgatctgaatgtattggcatctgcgaagggatgtctgcggcatttccctacgggagaaatgatgggaattataaagaaattcattaactcagatgcgggaactgattaactaaggaagttaggagccgttatgagactttttcttttctcactctgaaatcaaagtgatttcaatttctgggtacaacagaccaaattgtgaacttttgtactaaatgtagaataaaaagctttgttctcaaaataacaatgcacactcaacttaaataaatatctcagatgttctttgcttgaaaatatttcaagcaaagtttttatgcaatacaaaagtacatataagtctatcttcatctcaaaatacacatttacatagcacacaatattgtaccgattgcaaattacatttaaataagaccatcccta

SEQ ID NO: 82387 - DNA, 389 bp, Glycine max
  unsure (1)..(389): unsure at all n locations
agcttccacaacatccaagcaaaacaacattcttacagtacaagctatcacagccaagcaaaacagagccaaggcagaaaactctgctcaacacatcaaccaaaatcacagcttttctcacgtaaagaccacagtaacaattccttcgatccaattcgttaaccggtggatcgactccaaaattttactggaagtctatagtgtataagcctgcattttgaccgttgggatatactagcaaacatccagaactcattctgcactagactntccacagccaaccacacacaagcattnttctgcacttgtgcaaaattctgctgcacaatttcacagcanaaattctgcataagtgcagatntcgaanatcacccttcctctatccaatc

SEQ ID NO: 82388 - DNA, 408 bp, Glycine max
ctaagcgtgcttagtataataggaagcaccaatataaatatgctgattcctactattgatatatagcattgaccatacatgatactatctagagagaattgaaactatcgataatagtacactccatatgtcgtaaaccacacaaaactttagtggcttgcataactttatttaaatctagcggcttttaatgcttatcctatatatattataatgacataagtctgtctaacttgttacctcctaagagataacctatggagagcttactggtttgtagatctttcagctgaaacattgcattatggtcatgatgttgatacaacgttgaatatttcttataatctaacattgatggaacattctaattgagcatttgagattcgagatcatacctcaatttaccta

SEQ ID NO: 82389 - DNA, 383 bp, Glycine max
  unsure (1)..(383): unsure at all n locations
agctnganattgaacaacggaagctctcgagataatcttgtggtcataaattttcacacagatgtccgattcggngaaataatatatcgagacgcacgacattgaacaacggaagctctcgagaaatttgaatggtcataacatttcactcggatgttcgatccggggacataatttatcgagacgctcgaaattgaacaaccgaagctctcgacaaattataatggtcgtaacttttcacgcgaatgttcgattcggggacataacttatctagacgctcgaaattgaacaacggaagctctcgagaaattcgaatggtcataagttntcacacggatgtccgattctggaacataatttatcacgacaatcgaaattgaac

SEQ ID NO: 82390 - DNA, 282 bp, Glycine max
aactaagcttcttatacgctgaacgcatttatcaatagacacaagttgatgtttatttagaacattagagtttatctcttttatcttagtgagagtgattctcctaaattcttgagtgattcaagaacaccctggctgtatcaaaggactttcacaacctttgtgtgttgccctcgctggaaagagtgattcttttcttccaatcatctccaccctagttctttcaaaccacaattccagatgatccacctctgctcaaaattatctcgtgaaggtctcgtt

SEQ ID NO: 82391 - DNA, 449 bp, Glycine max
  unsure (1)..(449): unsure at all n locations
agcttctagtcgtccatagacctcctctgtggtacggtctagcaaacgttgcatctgtgcattcatcgcatccactaacagacgttgagcgccgtccaactgatggtactcgtcaccaccaccacctgctccagccataattcaacaggaaaaaaaaaatgtgcaataaaaattattaaggtttcaggacctcacaacactctactcacgtctcttagatggtagtacactcgtgtttaatgctctcaataggcttttgtgtaatgtattccctcttgccttntaccactcgtgtttcctcttaagttcctggatggaccaaattagacacacaaggtaatataaaatataaggaaagacaatataatgatcacaaacagaatttgattgggataacaactnggacttgattgtataataatatataagatttggaattgataacaggt

SEQ ID NO: 82392 - DNA, 346 bp, Glycine max
gggagagatatatagaggggggagcacgaaattgaaggaataaaagagggggagaacgtaaactttgcactgtgtctcataagactttcattcatcaaagctacaacaagtgctacacatgcttctatttatagactaggtagcttccttgagaagctgtcttgagaaaacttccttgagaagcttctttgagaaaacttccttgagaagctagagcttagctacacacacccctctcataactaagctcacctgcctgagaagcttccttaagaagattcctatagaagctagagcttagcttcacacacatgtctaatagctaagctcacctccttgagatgag

SEQ ID NO: 82393 - DNA, 493 bp, Glycine max
  unsure (1)..(493): unsure at all n locations
agcttcccagatccgatcatggaaggacttggcaactgccttcattaggaagtaccagtacaatacggacatggctcccgatcgaaaccagcttcagggtatgactaaacgagagcatgagtccattaaggagtatgcccagagatggagagatctcgcagcccaagtcgtgccgcccatgacggaaagggagatgatcacaattatggtagatacgttacccacgttctactatgaaaagctgataggctacatgccagctaacttcgcggacctcgtcttcgccggagaaaggattgaaaccgggctacgaanaggcaagtttgaatatgctgccaatatggcccccaacaacaacagaagagccccagcagtgggcgtaaggaaaaaggaaggagacgcccacgcggtcaccaccgccccaacatggatganagcaccccaaaatatccanagctcgtaccagcccaatcccccanatttttgatccgag

SEQ ID NO: 82394 - DNA, 328 bp, Glycine max
gaatctatccatcctgagatggagccaaacctagtcacccttattaagaattagctcttttcttcctctattgcctttagttgaatacaccttagtttgggtctttattaggttcttaaccctctcatgcaacttctttacaaacttttatctagattccccttctttatgtataaaagaagtgtccagtggaaggtgaataatgtctaacggtgttagacgattgaacccatagacaacctctaaaggggatttcttggtggctctatgaaccccgctgttgtagtcaaattctacatgatgaggaagatactcattccaagactta

SEQ ID NO: 82395 - DNA, 463 bp, Glycine max
  unsure (1)..(463): unsure at all n locations
agctngttcttggattttcctcagttctttatcaagctttgaacaatatacttggccttcatttaactgtctttgggcttggcggccacgctcaacaaagtactttcgacacctactatacgttgatttcaccaatgctggtatgggaatgttgtgacaatcctttaaaaccttattgatacattctgagaggttcgttgtcatgtggccatatcgacgtccttctctatcgtaagccatcgtccatttttcctttgagatgcgatcaatccatattgctatggttggactcagttcacgaaatttttctaaattntgatcacaaatgtgcttgcatggagtgtaggctgcataaattaggtatgaatacaattttagtataattaagtaaataacgtgacatcaatatgaatctacccattcttaacattatttttgttggcttattaaatttcattgaagt

SEQ ID NO: 82396 - DNA, 406 bp, Glycine max
  unsure (1)..(406): unsure at all n locations
tctcatgaggtgagcttagttatgagaggcgtgtgtgtatctaagctctagcttctcaaggaagtcttctcaaagaagcttctcaaggaagttgtctcactaaagcttctcatggaagctacctattctataaatagaagcatgtgtaacacttgttgtaactttgatgaatgagagtcttgtgagacacaactcaaagatcaacttctctcccttgttcttacttcaattttgtgctcccccctctctctttctctccctctttgttttgctacattgaagcatncttccaagcttcttatacaaggctcatcttggtgatgaagctctcttttccatggcttattccttaatggatggcgcactctctcacctcttatcctttgtctttcgctgcatctccatg

SEQ ID NO: 82397 - DNA, 434 bp, Glycine max
  unsure (1)..(434): unsure at all n locations
acgcctgcgaacttatgatgcacaatgcacttaattacttgttttgcctgaagagggtaaaaaatggagctttctcatatggatactttttagctactgtggactctcttgcattgcttgcatgtctctggggaaggttagtagcgtgctatcgctacctgttatatgttgttacagcttgattctgtgtgccaaatctttntgtatggcttgtcatgtttttcttgtttctgaacaacccatcaacaggaaatntctacagaatactattctccttcgctggttcatatctacgttagcgttgctctcattgaggtttgtcaactctttgcagtggttgactctgaaacatgcacatttatatgcgtgcccacacggtatccctgttttgatacggagtagtgtaccctactcacatatgtactgtgtaacat

SEQ ID NO: 82398 - DNA, 345 bp, Glycine max
agcttagctataaagaagcagcttacaaagttgtctgcatattaaataacgagtgaaatgaaatgatgctaccatagcagagaatgaagggagagatgacttttggctcaatgaaactgatagttacttttcattagtagcatgcataatcaaatcatgatccaagaatgttattaaacgcaaaatctgaatgaaagagatggttagattctggaactctgccaaaaataattattatttaccaagaggatgatgattaacagtggagccgtggaaatattaaatgtgagaaaattatataacctgatgtttatagtagctaaacttttatatgcattggagatg

SEQ ID NO: 82399 - DNA, 451 bp, Glycine max
  unsure (1)..(451): unsure at all n locations
agctntgggttgtgaaaatgctctaaggcctatgtatggattgatagaaaggaatacaatagtgtgaaatgaaagggggatgatacatagttccattgtttgaattgcttaaaataggatgaaatggaatggaacattaaggaatatacattacattccactaaatatccctttttcttcccttcaatttggtgattataggatggaaccatctattcgtttcactctattatgttccatcgcattccacaatccataccattagatagaaaatgaactgatactgtgccacgtttacaacctttggttttggaggcatatttntatacctcgagcactgattntcttggtgcttgcttacgtatataattttgtatagttntaatggacaaaaatggaccaatactagtagaagaacaatgttctaatgaatatgatgaatagtatcttc

SEQ ID NO: 82400 - DNA, 390 bp, Glycine max
  unsure (1)..(390): unsure at all n locations
cgcgaaactacctatcacacaggacgagagtgtaagtgctacacataggaagctgtaaaccggaacgcgcactagatatgaagagaaacaagaccagggctacattgtcattaatattttaagaaaaccaaagcttgcattaaatatttttgtaattcagattattatcattaaatataatgcatatttgccttaaataaataatatttatgtaatatatattaaattttgtaatacaaataaaatgctgccataacaatattnttattttnatagaatatacatattacctaagtcacttattattattgaaatttacatgcgcattaaatatgcattagacacgttagtgataagtatgtatatgaataatttatgtatactaatatt

SEQ ID NO: 82401 - DNA, 478 bp, Glycine max
  unsure (1)..(478): unsure at all n locations
cgcttagtaacggtcggacgataatataaagtcatagcaaatcccgttgctacttggactaanaaacatgtaagtgtaattcctcctaaacaataaaatatattcacatgaggcggaacatatttactggttatatcatcggcaatcgcctgaatttcaagacgttcttcgaaccaatcatagactttattgagataggtaaaccaacggaccccccctgagaaccgtatatgagaatttcatctcgtacggctcanacaaaaatacccaaatactgcttgtaacgaagacagatatgtgtaatagaaagtttgaaatttctttatttaatcctatgaatctaattntctttgacgaatataaaaaatagagatccgaaagctattctgtgtgggtataatggctaaatatcaagtcggctccttcgtctntatcttgatcttttaaggcctcttgaatattctactcattacttcat

SEQ ID NO: 82402 - DNA, 274 bp, Glycine max
acgaatatctatgtcatgtgtaacctaagatagtatcacatgcaggcgggatattgacattatatctatatatctatctatctagagatcgagatatagatagatccatagatatacttcttagagatgctgagggactctgacccctctgtactaatgttgagaaacacatattgcggtttaatcaattctccgaatctcgacaatcgactaaaaacatgtcattatgatctcgagcatgccgctacggagatatcgctagacacgctgctct

SEQ ID NO: 82403 - DNA, 487 bp, Glycine max
  unsure (1)..(487): unsure at all n locations
agctntagagagtggcacattgaaggatgtattaagattatatccatttggtctagatgctcaggtaggtacaccgattatggtataattntatcagtacctttatatgattgggttttcctacagagcttttttgaattatcaattgcaaagatgaaatatgacaaggtaatctcttgcactgaataaaggtttcagagggaggagacaatttcagtgttggacagaggcaactgctaagtctagctagagcattgctacgaagatcaaaggttcttgtcctggatgaagctactgctgctgtagaagatagaactgatgcccttatacnagaaactatcagacaagaattncagtcctgcacaatgctcatcattgcacacagactaaatacaatcattgactgcaatcggattcagctgctcaatgctggccgagtatgtccaagtaccattagttacagatatntaattcctacattcataag

SEQ ID NO: 82404 - DNA, 441 bp, Glycine max
tgggagtgcatatacatgccacagatattacgtccttccaacaatattgacgcagcgacccaaggcactagttgtgaatctgaagatgacactatctggtgttaacaggtatgggacagaaataagttcattagaactattgtctcaagaacataatattgtaaattagacttgaggatctttgggaactgtataccgggcaagcacatacctcattgcaaatgatctccacactggtgctaacgagatgtcacagagattggagatgcaaatcaagtggtagaggacgcgatcaggatactaacactataagaggcaaacctgagaagacaatttcatataactttaattcttggactcttctctgttcggaagtgcactcgctctactatctattattacattgcataaaaattatcaatactatatatattttttatt

SEQ ID NO: 82405 - DNA, 439 bp, Glycine max
  unsure (1)..(439): unsure at all n locations
agcttgctatttatcacttcattcttatacattgtgaatacatcttattgatgtaaacttcaaaattttcagcgagagaaagaggaggcctataacaagatacttcatttggaaaaacaactagatttctctatccatataaaagtatgaccttgtttactttctccctgataaaagtacaccccctggtccccttttctctatccatatatagagatttgctaatttaccttgacctcttttaggagtattttaatttagcaaactataccttggccttggatgcatttagaaaatcctagttatatcctagntatatctcttcatttaagaaaatcctagtttgatntatatgctntattgtgcatacccggaatgatgttgctcatgggtgaagagctgagcangcttataacatatttctaataaatctattaat

SEQ ID NO: 82406 - DNA, 379 bp, Glycine max
gctattaggaacttagatctaagctgagatgcgaagtgttgatggtgaaactttctgtctttattgttgaccacagagtggtacctggagatatgtcgcgggggtcaagagaccttggggacgtcacgtggggcgctattgcccaaaaccaatcttgaccaatcccgacccaacccgggcatagtctgtcagtgagaacctgtgatgtacctaagcatgcgagctcctggtcttccacagataaaaggaaagcaagaccacatagcacggaggcttgtggtggctggccagctgagaattatgtgtaatatgtggattgtggcctctggttatcgattaccaagggggggttatcgattacaaagcttaacaatgaaga

SEQ ID NO: 82407 - DNA, 387 bp, Glycine max
  unsure (1)..(387): unsure at all n locations
agcttacccttatggtttgcctccggacttctacccccgtaccactccagacganttgagccaagcccctaccttcgaggggcaactccctccttatgtcgactatcctctgcaagaagatgatgaaggagaggcccatctaggccctctacttcccctcaaggatctggcccnccatgaatngccccaactgaacatagtccgccatgtcccatctctaccccgcacccgttaaagaattcgatccctttgaaaaagataaaggaaagattgatttacttgaagaaagactaagagcggtagaaggcctcggcaactacccgttctcggatttagcggatctgtgtctggtacctgacatcgtcatccctttccaagttaaagtac

SEQ ID NO: 82408 - DNA, 473 bp, Glycine max
  unsure (1)..(473): unsure at all n locations
agctttngagtgaaacaatgtgactcttcatttttaaattngaatntcaatgttcaaggacactggtaattgattaccaaaacattgtaatcaattacatccttttgaaaatatttggaacgttgtaaattcagtttgaaaactttttcaaactcattttgctattggtaatcgattaccagagagtaaaaactctttggtaaaggttttgtcaaaaactcatgtgctattcaaagttntgaaaaaactttttaatacttatcttgattgagtcttttcttcattcttgaatcttgagtcttaaatcttgatcttgattcttgagatcttgaatcttgaatcttgattcttgattggagactttcttcttgagtcttgaattcttctgcattctggaactctngactngttcttgatntacttgagtngttctttgatcttttgagctnnnttgtcatcanccttgtcatcat

SEQ ID NO: 82409 - DNA, 393 bp, Glycine max
  unsure (1)..(393): unsure at all n locations
aatgagattcttagtagcgggtgttagtcaatgataatgagaagagtgaatttctttgtttttctcactggatccttacagattctaacctttataatttggagactttatttaattcaatcatttcttctttttactgtttacagtcacttgtaggcatcgcagttgcttctcctacaaaaagcagcgaaattggctctccatagtagtgaataagttaattagtgaactctttatttaattatctcttttacaggaagaacgaactttttaataaaatatgaatctctattactctcanagatattaattgagagaggataacttaatattaatatggataattatgctactatcacttggttatattttctatcgaaattggagtcttat

SEQ ID NO: 82410 - DNA, 476 bp, Glycine max
  unsure (1)..(476): unsure at all n locations
agctngcggactataccttcgacagaacacggtcgtgtttctgtctaggcccggattcaaggcgggctgcagcaccggctccgcttccctaactgtactggaggcggntgccgtggctttatcctctatggttttctggagttttaacattacctccgagatggaagccatttgatcttttaaggccgatagatcggccttcatctgttcctgcacgccctcttcattatccattnttctggatcgagtgttataggggtgccttggtgttttcttagttatgatgaaattcccgttgaaataaacaacggtgagtatgccaccaaaacatgagtatgcaaatggatgatcggagcacttggatccaccccaaggttttttagataacatgatgagttcagaacttttcattnntataaaagaacanagctttcatcaagccaagaatatacaaaagggtgtacaagagaacctaa

SEQ ID NO: 82411 - DNA, 391 bp, Glycine max
ctggatgcgttggtcaacttggtaacccagctggccttgaatcataaatctgtacctgtcgcaagggtttgtggcttgtgctcctctgctgaccaccatacagacctttgcccttccatgcagcaacctggagcaattgagcaacctgaagcttatgctgcaaatatttacaatagacctcctcaacctcagcagcaaaatcaaccacagcagagaaattatgacctttccagcaacagatacaaccctggatggaggaatcaccctaacctctgatggtccagccctcagcaacaacaacagtagcctgctccttccttccaaaatgctgctggcccaagcagaccatacattcctccaccaatccaacaacagcaacaaccccagaaac

SEQ ID NO: 82412 - DNA, 495 bp, Glycine max
  unsure (1)..(495): unsure at all n locations
actatagcttgattgcgaggaaaagaataaaggtacacacaacaacattgtgctcctttttnctcgacgaagacgaccctggaggaatatactatatagaccttcgtttctcttctattgtgtcatttacttatattcaaatgttagcagttcaaatgaagaatggaaaaatgaattattatgatcgagaatacgtgtacctcccttttcggctagcataaccttttcgtactacgttggacatcataagagtgcgtaatagacatatacaaattcgatagagtggtgaacacacttagtgtataacactgggtatcataacgagcattattggttttgtagtgcattngacgttggttatatcttaacataacatttgccacttgaagtatgaactagatatgtagataacgaataggtactctaacacagttggtcactgttacttaatatcaactcattagaatataacaaaataatactttttgtaaacat

SEQ ID NO: 82413 - DNA, 472 bp, Glycine max
  unsure (1)..(472): unsure at all n locations
agcttctatataagctgaaccattntatcaataaagacaagttgagttttattcagaanattagagtttatctcttttatcttagtgagagtgattctcctaaattcttgagtgattcaagaacaccttggctgtatcaaaggactttcacaacctttgtgtgttgccctcgctggaaagagtgattctttccttcctatcatcatcacccttgttctttcaaaccacaattccagaaaatccacctctgcccagaattatctcgtggccataactcccattntacgcactcaaattaagtgattcttgagcctaaatngaatttcaaaacgagacctttcacctcgttttggaatcancctcattggagccctgtagctttcagtattgccatttctatatttctgtccagccaccacttaaccttcgttntaccatcccattcatccattntatgccaagaaccacctta

SEQ ID NO: 82414 - DNA, 314 bp, Glycine max
  unsure (1)..(314): unsure at all n locations
tctcatatattatgcgcttgaatcggacccncaagngaaatgttatgaccatntgaatatctcgagagcttctgatattcaatttcgagcgagttgatatattatgcgactgaatctgacctacgcttgaacagctatgaccatttgaatttctcgagagcttccggtgttgaatttcgagcggctcgatatattatcctcctgaatctgaccttcgcgtgcgaagttatgaccatttgaatttctcgagagcctccgctcgtcaatatcgagcgtctctatatgcgatgcgcctcaatcggtacttcgagtga

SEQ ID NO: 82415 - DNA, 479 bp, Glycine max
  unsure (1)..(479): unsure at all n locations
agcttagctacacatacccctctaataactaagctcaccttcttaagaagccttgagaaacttccttgagaagcttcctagagaagctagagcttggttacacacacccctctaatagccaagctcaccttcttgagatgagaagctagagcttagctacacacacctcttataatagctaagctcaccccatgccaaaatacatgaaaatacaaaaaagtccctactacaaagactactcanaatgctctgaaatacaaggcaaaaaccgtatactactagaatgaccaaaatacaaggcccanaagaaggaaaaacctattctaatatttacaaaaaagagtagacccaacttggcctatgggctaaaaaatctaccctaaggttcatgagaaccctaaggccttctttagcagctctagcccaatcctcttggagtcttctatccaataccctgggggtgaggattgcataatatc

SEQ ID NO: 82416 - DNA, 345 bp, Glycine max
  unsure (1)..(345): unsure at all n locations
actatgaaactcaagctactagtgaccttacaatctcaaatctagccactggtgtaaatatatattagtnatcctttcctttcttttgcatgagaccctctaactactagcctatctgtgtgcttggctatgctgccattaggcttcattttggctttataaacccacttgaccgctataggagtcttcccaattggtaaagtgactaactcccacgttgtattcctttctatggctcttatttcttcattcatggcatatgaccacactttctctgtaacgacatgctaaaattttactggttctgtagcagccatcaacgctgtattcacaaactcaccctca

SEQ ID NO: 82417 - DNA, 443 bp, Glycine max
  unsure (1)..(443): unsure at all n locations
agcttccatcacaagataccttggacacgcatgtatatggcaaaatagctcacaaaatatacgtatgtttaggtagcaaaatacctcaaaaaaaaagagagagagcaaaaagagagcgagcaagaaaagaataagaaaaaaataataataaaaagttgtctagctaaaaaacaacatgcttgtgaaaagagataatttccaacttttctttgaaagattntactgatcttaaccagttttttgaaaaaaaaaaatgtgtgtacatatttgaagggtaaatgctgtgaaaagtttttcgaacacccaagatagactcagatgaatgcacaaattgatagattgaacatatttggaaacactgggttgacttaaaatagggaaaatgaatcctgagccctagtgtcacatgaccataaaaagttgatgcttgagtgtccacatgg

SEQ ID NO: 82418 - DNA, 393 bp, Glycine max
  unsure (1)..(393): unsure at all n locations
cttaactagctgtcgggacatatgctgaattctagatgagagctttcttgcgttcttccaaacagaatcaaagaagtatgacaacattaacatgagaagttctactgatacactattagaaaatatgttttctacatcgggtatttatgactttcaacatcggtttttcaaccgatgttgaaagtaccgacgttgatagtattatcgttaacatcggtttttgaaagaccgatgttaacgtaaaattaccaacatcggttatataaataaccgatgttgctaatatgaattacacccagaanatgtatattaatgttgaaagttaacatcggntgttacaaanaaccgatgttggtttcaagaattttttgtatataatgtctctgtagaaaa

SEQ ID NO: 82419 - DNA, 464 bp, Glycine max
  unsure (1)..(464): unsure at all n locations
agctngatttgtgagttgatcttagccttagtttcactctggttattagtcaattcgattaagaataaaatcccaaagaaaaatgttcgattgattntttttttattattttatttaaagatattgttttattattatattattattttgcctctttttggttctaaacgtggttacagcatgaaagatcagtcggattttattctaacagagattaaaagatattataactcanatgatcggtggaaatttattttagttttttattaggcgagaaaatgactaaaataaatggtcaaagcacgtcaaanaggggtacggaaagcaaacgaaataaagataaaagcacgcgatacaagtggggaccactaagggcacatagaatgaatngaaaggttcaattntgggaacttaccagttgaagaccgaagaacgacgaagaacgatgaagaacaatgaagaac

SEQ ID NO: 82420 - DNA, 434 bp, Glycine max
  unsure (1)..(434): unsure at all n locations
cacttaaatctaagctaggaacccaactgttaaagcttaatgcttggaacatgcttatggctaggaatccacaatttggttttaggattaganaagcatgaaaatagggacttgttngttagaatttgggctgccccatgactggcactttgcacctaagtaacgtgggagatgcttttcaatggtgcgtatgtatatatgtgaatatatatggcataaaaatatgttgcanagtgtgtgaatatatggcataaaaataccttgcaaagtgaacgaatagtaaataatgcatttcaaaaatgtatatttgtggataggtagtgtaaaaatgcatttcanaatgtatatttgtggataggtagcgtaaacatgcctttcaaaatatgtatatttgtggataggtagcggaaaaatgcctttcanaatatgtatat

SEQ ID NO: 82421 - DNA, 468 bp, Glycine max
  unsure (1)..(468): unsure at all n locations
agctntacaacanatgccactctactccaaatttttaaaggatatgttaacaaggaaacacaagtatattcaccaggaaaacattgttgtggaaggaaattgtagtgctgtgattcaaaagatccttccacccaagcataaagaccctgngagtgtaaccattccttgttcaattggagaagtcactgtgggaaaggcacttattgatttgggagccagtattaatttaatgccactctccatgtgcagaaggttgtgagagttggagatcatgcccactaagatgactntacaactttgttaccgctcaattaccagaccatatggagaaattgaagatgtgctggttaaagtaaaacattntatcttcccgatagactntgtggtaatggatatttgtgaagataatgacattcctataatatngngaaggccattcatgttaactgtgagctgcatagttgatat

SEQ ID NO: 82422 - DNA, 346 bp, Glycine max
ctggctactgaaatcctagccatgcccaatagagctaacactcccacagaggccaacttctccaaactctatagataccaccctaaccgaggacattcaaccaaggagtgcagcattctaaaagacaagatagaagacctcatcaaagttgggacacctaaaggattttatccacaagcctcattcatatcagcacaacaacaactataggcatgatggagataggaagagaaagggatcacaatcatcactctcagaccgagagacaaaggagtttaagccaatctacggagagggagaaaaaatcccttgatcaaccaagacatatcgtcaatactattacata

SEQ ID NO: 82423 - DNA, 458 bp, Glycine max
  unsure (1)..(458): unsure at all n locations
agcttgaactatctgtgattccacaacttcaatgtttcctcgaaaaatagttcatgtcattaataaatatagcaaaaacattgaatttcacccaaaaaaagggacttttcttcaacttaaataggctttgtacatataaaagaaggatttatgagaaattgaatctaaccaccccccgaaatataaagtatcaacactgtaattatattctaattacccaaaatagttgaggacctcaattatttgatctgctaaatcttcagcagaaggaataggatcctcggcacaatttgcagttgctcccaacttcaagaactcttgtggaagtttcagagggaaaactatatgaataataatattcagttctacatgcaatanaaaatacattcaaatcaaccaacttacanacctcatgtncaggaggactgatatgatatatgcanaaagtgtgaagcagt

SEQ ID NO: 82424 - DNA, 350 bp, Glycine max
  unsure (1)..(350): unsure at all n locations
ggacacttgaaactagcttagcgacacttgatatcggtgtgaaataaagtcttatacgttaactaaaagatcccacaaatcactattttctttaaagtagaaaatcctttctcaatatacgttgtaagcttcattttatgttaggctgacattgaattggtgctcatagaatattaattaaaaaatttaaaaaaatttattatataaatcacaagagattataaaaaaaaaattatgagtaacataattgttcatctttcaataaaaatatttagactttaattnttttaaccgatatccttaaaataataattgtgatttgtattctaataaaaagataggtgcagtag

SEQ ID NO: 82425 - DNA, 453 bp, Glycine max
  unsure (1)..(453): unsure at all n locations
agcttgaagcccttagttnttagttttggtttgtataattntgcaatgcctaacatgtttaatagataggcatttgtattgaatgttttagactaggaatgtgtgtgatatagtctaagttttttttatgcttagtgattgatccaatatgaagtgaatgaagtattcttattctttaagtttctcaagaacttacttttaattgaaatttggctagcaacatcgaattaatcgactgcctaacttggtaatcgaatgcctaagccagttttggaagaagaaaggatttgtatcttangataatcaattacccaacacctagaaacaaagagaatctctatgtgtgattctatagtngactaccacacatgataatcgatacccagcaccacagaagaacaaaatactcagacgaacanataatcgataccctttgatatcgataactagttc

SEQ ID NO: 82426 - DNA, 452 bp, Glycine max
tctaagaagcagcggatgaacaatagtttagaaaattgtttgtgtgccacacgctaagcgcatcccttgtgctaaacgccatttccttcacacgctaaacaagctgatgttcgcgctaagttccttgacccctgctcattggttggatgggcccactaatcgagtgcttagcgctaagcccaaaaacctctctggattataattctttcgaattgggcttagtgcaaatgctcgctaagcgcaattccttctctggaattgcaattattataattgcactaagcacgaatgacacgctaagtgtgggccactactgcatttaatgagcattaattcgctaagcgtagcctttggtggctaagcgcaagttgcatgaccaatcaaagctacagtacccgcttagcgcaaccttgcgtactaagcccaaaagcttctcttggaatttaaacatt

SEQ ID NO: 82427 - DNA, 407 bp, Glycine max
agctctgtaagtgcgggtctgggatactaatgttaagtgttcgcgatatgcaaagatgatgttccgagtactttggatttggtccgaccatgccctcctgatttccagctgggaaattggcgagtggaggaacgccccggcatttacgcaacaagcataatgtaaacctttacggttttaaaagctctatagttgggcctaggctttagaagtttcaattttgtaaagctctgtgtcttttgttttgaatttataatacaaggatctttcttcatctgttcctggtctctacccattctcattcacttgcatgtgtacttctttttctataacggcagattcgatgacgagtcctccgaacttctaataccttgacccgctatcaactcagcaaaaatgatcaacgg

SEQ ID NO: 82428 - DNA, 397 bp, Glycine max
  unsure (1)..(397): unsure at all n locations
tcagatcgctctatagatatgaacatgcgagcattgaatgtattactaatgcttgcggaaagaggcttcttggacgttgatgggcttcaaggaaggcaatggttcaagcatcttgagagtgtgatcgccttctatgcctttgaatttctagttaaagcttttcattaaccaagttgacaaatgtgatccctctagtccaattgggatgattaatgaaaatgctagaactagcaaaagttcacgtttgtggattcttgctctttagccttaccaacatccaagttcagagctgaatagtatttgatgttatgtttcaccacaatgtgatttntatagtgctagcgtatgcctatattctatatggatcttatatgagaattggtgcccttaatattct

SEQ ID NO: 82429 - DNA, 478 bp, Glycine max
  unsure (1)..(478): unsure at all n locations
agcttctggatatgagatcacaaagaatcttctctaactattatggaatagagtaccttcactattagaaaatacactttcaacatcggttntctaaataaccgatgttatatagaaagaactacaacaaaataagtgtatgcatgatgaacgttggcatcggtttttcatgtataaccgatgtgaacgtccatcatctatacacttatnttgttgagttagttatatataacatcagttatttataaataaccgatgttaacgtttgcatattaacattggttatttataaataaccgatgttaacgtttgtacatcaacatcggatatgtataaataaccaatgttattagaaataaacaacatcagttnttttgaaaatcgatgtaaggtgcatgtngacatcggttnttctaaataaccgatggtggttactatattaacatcgggtnnntgtaataaccgatgttgttattat

SEQ ID NO: 82430 - DNA, 338 bp, Glycine max
  unsure (1)..(338): unsure at all n locations
tgttaaaggattacaactgtgactcacgcgacttaacatatactccaatctcccgcattatgtcgcagagtggtaaaatgaaaagagcaatgaaagaagctcagaaagcaattaaaatggccattaattagtatcgcacttcttttgtggtgcactattaaaaagacatacgagaaaaaaaatgtaatgtagctataacaagccaattttgagttaaagtctatttatttaattcactctatccagtatagccattacattttaatttattntatttgcaacatctgctttttaaacaagataccaaaatgaaaggtgatgacgattaattaattgga

SEQ ID NO: 82431 - DNA, 337 bp, Glycine max
  unsure (1)..(337): unsure at all n locations
tgcagcttgtgcaatcaaatctcttctacttttatcctagcatgcattntctttctttacccactcctcacgtttggttttttagggaaaaacaccataactaaacgcgccgcaagggatccctatcgcaccagatccaaatctataacgatgggtgatcaagaggagacgcangaacagatgaaagccgacatgtcggctctgaaagaacaaatggcctccatgatggaggccatcgtatgtatgaagcagctcatggagaagaacgcggccacttgccgcgctgtcagttcggctgccgagcagacccgactctcttggaactacgcaccatcct

SEQ ID NO: 82432 - DNA, 425 bp, Glycine max
ctattacggacactatgaaactaagcttaaggctaagtcttcatgtagctcccactatctctaacaagcacaactatcatcattacaaatgagcattagcttagtggagtttgatagttgtgtcatatagttagctcttttgctcacatgatactgttgcaaagcatcttgtacgtcttggtttgtcaagagatgcatcccttcgaagagagttcccaccggatgttggacttcttcatgatccaagctatgcctgtattcaaaatcttgaaaataggtttcttcaaaaattatcatatggagtgctgcggttgtgattagtgaaacaagccgagcatctttcttataatcttcctcataggcgtgatggtgaagaactttgccttcattctcactcaagggaccaagttctatgtaggtaatcc

SEQ ID NO: 82433 - DNA, 486 bp, Glycine max
  unsure (1)..(486): unsure at all n locations
agcttcacatgtgcaatatatactccattgtggtataatatgatgcaataaacaattatcctttaaaaatagctatattatcatggaaacggatagagttgagttagtgaacaaatcaatacatgcttcaagagcttgatggaatatgggtgtgagcataatatatctctaacaacatcttgagttctatcaacttcatcaaatgttatatttttgttcttggacccctttggtcgtgaagatatttttatctttcattgtatttagttntgatggtggtgaaatttctttgattattaacaaaatttgataaagtttcaccatattntttagttatttgattaaacatnagtattggttattngacccaacaatgtttcagtgagtttatgattatganatccacanactacataatggttccttcttangatcctatcaagagggtgcaactntaattcttgagtaaaatagggtgttacgtca

SEQ ID NO: 82434 - DNA, 380 bp, Glycine max
  unsure (1)..(380): unsure at all n locations
ccatggaaggtatggnctaggttacgagcctacacatgccgacaagagaaaggtcgccttagaaaggaaagaaagaagcctagcctatttacaagggcggagaccacaaatagagagggtccctatttgccacattagcaaaagctttgttagtgtgggatggatgcatcaaaatcaggttgttgtgctagacgaagaaactaaccaaaaacagccaagttgggtgcagacatgctcccgggtttcgaattgaagaattggtggatcgtggactgacccaagatttcggtgtcaaatccaatgtaatccaatagtttgaaccctattgttgggcgaggctttagggtagcttctttgttgggatacctcttctttatatc

SEQ ID NO: 82435 - DNA, 449 bp, Glycine max
  unsure (1)..(449): unsure at all n locations
caagcttggaacgaganaccaagaaggcccgatatgatgtacacgaccaaagcaaagttttgaggggctttatagggcagcaatagtgagctcaagctccgaagaggtgaaaggaatcatcacgggtcaaaggcatgatcttgaaggacgagctaaaggtttgccttatgtcgaaaagaaatttgtcccaacagttaagcgagactgaagggaatatgtgggccatcatcgataagtgcaaagagaagctaaatctagcggcgactcacgagcaaaggctagaggatgagtacgccaagatatcagcagaaagggaagcaagggaaagggtaattgattcattgcaccaagaggcaacaatgtggacggaccgatttgctcttactttgaacaggagtcaagaacttnccccattgctagccaaggccaaagcagtggcggacacctac

SEQ ID NO: 82436 - DNA, 221 bp, Glycine max
tgttcatattaggctatagatgtctctttgtgtaccaatttcccaaatctaatgccctatcttttgagtttaagatgagaggccctctcttagagtcaacctcttggctatcttataaggttaagccctatggtacttgtacctattggcttgcttcataggacgcaaagtgcttgctattacctttcataggacttagaggcctaacttttacctttcat

SEQ ID NO: 82437 - DNA, 458 bp, Glycine max
  unsure (1)..(458): unsure at all n locations
caagcttgtgtaactggctgccctttatttatctcgtgcttatgcttttctttntttcttccattntgtaaattgtgctagattctaacattccaagttgctaagattnttgtttggttgttgtggcaattttcttggagctgttataaattctgcctctgaaatgtgcttatgtttttcttctgctatttattgatatgatcttgagtaggaacaacttgatggngctggcattgagcttcctagcctttataagttgattgaaagagaagctcctaatgtttgctccactgaagcatggaaaaagaggaatcattgngttggctctctggcaactgctgaaattgctgagtcaattgctgatgctgagaaacatcttcaagtaaacagacctgttagaaggtatgattcttatatggcattggatctagaaagaaataaatatgttatcatcttat

SEQ ID NO: 82438 - DNA, 187 bp, Glycine max
  unsure (1)..(187): unsure at all n locations
tattctctaaaacaatatttcttatgttctttaactnttgtaaaatatttctaagatacatatatacaaagaanataaacagccgagataaatacataatatcaaatgtgatgttgaaataaaaaaaaaaactcattcgctaacaattagatttatatgtacttataaaanatattaatacaatatt

SEQ ID NO: 82439 - DNA, 465 bp, Glycine max
  unsure (1)..(465): unsure at all n locations
agcttcctcngggccattcctgcgaaggcaaacatttgtaaagttagttttaccagtgggacgttactcttaaagcaaaaatggcatataacctcctcccataaatacaaacatcaatgtaaatttagagcaagcttatgcgcatatttccttacaaacgttctccgaaaaaaatgcacccatatacaatcaaggcagcttcgttacctagattatttacacgtacttccaaggtgtatttgttacttacatcacacacatctccttggctaaattcacatacatgcatacccannagcatttggngtaccanaaattgcacatgtgcacatcttggtatctctaatacctatacatacacaaacttcatgatgaatcttgactatctacacaataaggtgctacatttcatgctctnttcaagttttggtacctaaagccgcatgcaaattcaagtatattttc

SEQ ID NO: 82440 - DNA, 230 bp, Glycine max
  unsure (1)..(230): unsure at all n locations
acgagagctgtcgctgtacaatttcgagtgtcactatatatgaggcgcgtcatatggacatcctggataaatgctaagaccattgggatttgacaagaggtttctgcgcacaattccgagcgtaccgttttgagactagcctgaatcggatctccgagtgaagagttctgtcctataggatttacccagagctaccgngggtgagtgtcgagcgtataagcatcatctgc

SEQ ID NO: 82441 - DNA, 402 bp, Glycine max
  unsure (1)..(402): unsure at all n locations
agcttactggaacaattccatccagctnttcttgtcttccacgtcttcagaaattgtaagttgcctttgctttcaccatttcctcttctatatcaaactgcaatgtataagtgtaaaccaaataacatcatgtatgtatcagcttacctttcttacaaaacatattttgttgtatttcttaatcaatacatattattntcaattntttaagttctagttctataaaatatgctataaaatcaacaatanttttaagacacatcttttcttatgacacggtcattgcaaacaattcattgagtggatacgttccttctaccatctggcaggacaggagcctaaatggaactgaacgacttatctttgtagacttganatgatagtcacacaaatnttcttact

SEQ ID NO: 82442 - DNA, 335 bp, Glycine max
gtttaagctaactaaactttcaaacaagtcagacttaaacaatatttttattcatgtaaatatgtcatttgttatctttttatagttccaataaattatatcatttttgtttttagtcctgtctttaatcgatgcctctattatcccatcctttattagtatgtctatgttcataccaagcctgtgtctaaggaatactactagtagtattttcctacttttgctttcgctgaattcagtgtctcgtacactgatcttgttccatagattctaattttctatcttcttaacatgcacactttgctttcagaagcccttactcactctccactcct

SEQ ID NO: 82443 - DNA, 477 bp, Glycine max
  unsure (1)..(477): unsure at all n locations
agcttcatggtgaatcaaaggtgattcatagtgttatttgatgataacaatgatgatgacaaaggtgatgaaaaaaagctcaaagatcaatcaaagaacaactcaagtgaatcaagaacaattcaagagttcaagataagaatcaagaagaattcaagactcaagattcaagaataaagagaagattcaagactcaagatcaagattcaagattcaaggttcaagatctcaagaatcaagatcaagattcaagactcaatcaagataagtattaaaaagttttttcaaaagtttgaatagcacatgagtttttgacaaaaccttttaccaaagagtttntactctatggtaatcgattaccatatggttggaattgattaccagtagcaaaataagttggaanaagttntcagactgaatntacaacgttccaattattttcaaaaagttgaatcgatacaatggttggaatcgata

SEQ ID NO: 82444 - DNA, 488 bp, Glycine max
  unsure (1)..(488): unsure at all n locations
gacactatgaaactcaagcttatccactatcttgcagggatgaagagtgccatcttagtgttcttgtcaacaacaacaaacacagaatcctttccattcttggttntgggcagccccaaaacaaagtccatagatatgtcagtccaaggatatttatgaacaggcaaaggagtatacaatccatgaggtttaaccttagatttagcttgtttacacacaatgcaatgaccacaaaacttatgcacatcacgcctcatatgaggccaaaagaaatgatcttgcagaatttccagggtcttttgaaccccaaagtgtcccatcaacccccccttatgtgattcactcacaagcaactttctaatggaacacttaggcacacataatctatatgtttaaacaagaatccattatgcctatagtgacaatnttcagaaaactcttcacatgcagcannaaatttagcaaagtccacatcatgcacatacatg

SEQ ID NO: 82445 - DNA, 379 bp, Glycine max
  unsure (1)..(379): unsure at all n locations
agcttccatcaagtctngatggaagcttgcttgtggagcttctatggaggctggatctttgagcttcaatggggtcctttaatggtgattntccaccatggagatgcagcggaagacaaaggaaaagaggtgagaggaggcgccatccattaaggaataagccatgaaagaaggagcttcaccacctagatgagccttggataagaagcttggaaaggatgcttcaatggaggaaaagaaagagggagagaaagagagatggggggagcacgaaattgaaggaagaaaaatggagagaagttgaactctgagtcgtgtctcacatgactctcattcatcaaagttacaacaagtggtacacatgcttctatttatagac

SEQ ID NO: 82446 - DNA, 368 bp, Glycine max
tgcagctggatgcaatgagtaatgtggttggtatttattgtatataggggattggtctattaccgtgcccacacagaatggaaagtgagagtggctcatccttgatcgatttctgaacacgaccactctgagtggatatgttctatctttggatgatggagacagtccctagtgatcgttcaacgacttatcacggttgaatcaatcgttcggtcgtgattcatacatggacgtatacacatatgctgttgtctcaagtgacaggtggcaactgctatttgattcacactcaccctccaattactcttatttaccttcatacacctcacttctatccataattattaattatcgataagcacactatt

SEQ ID NO: 82447 - DNA, 291 bp, Glycine max
agcttatccggcctcccatcagcaggtgcttttatagagatatattacatgcccaggcaagccagcagcagtaggaagagggccagcatcatcccgccacaaatgcaccaccacctcatctacaggagacaccatccctagggtccatctccgctcacctgcgaagggtagagctccatatgcacaggtacatgcagcatgtgaccagccaacaagcagctaatcacaggtgacaggtgtagtctgaccagagcttctatcatgacatacagcaccagcatagccaggaca

SEQ ID NO: 82448 - DNA, 354 bp, Glycine max
  unsure (1)..(354): unsure at all n locations
agcttgccacccagctcgcccaggctagcaatgttgcttcctccagaagcaacagccttctggaggaatcttctggagggcccaagtgggcctggttgctatnttcacccccatttttactaaatacacccactgcctttttttggtgattctctcttcgtaaagttacggaaacttatgaatttcgtaacgatacttgttttctttcctgaatgttaccgaaccttgcggattacataattatccccttatatacttacggaatgttacagaacctcactatatgtgctacgatgcttccttttgatttccggtgtgtcactagaattttacagaatgtgcatcaatattttc

SEQ ID NO: 82449 - DNA, 135 bp, Glycine max
tattgtggccggacgctctgtcgtctgcgtcatgcattaccctctatgcttgacaaaaacacgatcggtcttgaatgtgtgaaaagcatgtatgaaaatgacgaaaccttttgagaaattgttcaaaactgtgaa

SEQ ID NO: 82450 - DNA, 450 bp, Glycine max
  unsure (1)..(450): unsure at all n locations
agcttcatgaagatgaatcaagttgattcttgtagttttgatgatgacaaanagcccaagagaatgatttcaagattgagtcaacaagttcaagatcaagattaatttcaagtttcatgagaagaaatcaagaagattcaagattcaagagaagtttgatttcaagattcaagagaagatgaattcaagattcaagagaagaaatcaagacaacttcacaagagaagtattgaaaagatntttcgaaaaacaaacatagcacaattttgtttttcaaaagagtttttctaaaaaatttctaagttaccagagtttttactctctggtaatcgattaccaattacctgtaatcgattaccagtggcaaagttggatttaaaagctttaactgaattgcaatgtccanatgttntttanatgatgaatcgatataatatattggaatcgata

SEQ ID NO: 82451 - DNA, 269 bp, Glycine max
cgcctcagagaggtacaggaaggacaaggcgtttctttgatctagttccgccccggagtacgacactcaccgatgtatgagcgatgtacatcaccagcgcttcgaagccatcaatggatggtcgtttcttcaggagcgacgcgttcagctcaatgacgacgagtatactgattttcaggatgagataaggcgcccgcggtgggcaccactggttactcccatcgccaaggatgatccataaatagatcttgagttatacgccacatgct

SEQ ID NO: 82452 - DNA, 416 bp, Glycine max
  unsure (1)..(416): unsure at all n locations
agctngaaggcaaactggatgcgttggtcaacttggtaacccagctggccttgaatcagaaatctgtacctgtcgcaagggtttgtggtttgtgctcctctgctgaccaccatacagacctttgcccttccatgcagcaacctggagcaattgagcagcctgaagcttatgttgcataatattacaatagacctcctcaacctcagcagcataatcaaccacagcagaacaattatgacctttccagcaacagatacaaccctggatggaggaatcaccctaacctcagatggtccagccctcagcaacaacaacaacagcagcctgctccttccttcaaaatgctgctgtgccaagcagaccatacatttctccaccaatccaacaacaacaacaaccccagatacagccaacag

SEQ ID NO: 82453 - DNA, 468 bp, Glycine max
  unsure (1)..(468): unsure at all n locations
cgtagtgaggttcggctacaaaaaattcactggtttttctattgattaaaagnttagattctaagagagcacaagtcctatactaatcccaatgatcttttcttgttctgtacaaatagccttctcactattccctttttcttaagttgctcttgaccttattgtaacaacacaacttattgtctttnttttttaacatacaacttatttgttgtgtgtgctaatgcttaacctttttcttttcattcttttcaactttcctcccctaaatttagagtaaattttccttgaaccatatgttttcctagagtctaaacaaggtattacgagataatcatttaaagttcagggttcaattcatgacaaatcaataagctttatacaagggagcaaaagatacaagtatcattcaggtaagctattggtcaaagagcttgtgctatacaatcatgccttcatatgtttgag

SEQ ID NO: 82454 - DNA, 436 bp, Glycine max
  unsure (1)..(436): unsure at all n locations
agcttagctacacacacccctcaaatagctaatctcacctccttgagatgagaagctagaacttagccacacagcccctataataactaagctcacccccatgacaaaatacatgaaaatacaaaaaaagcccctactacaaagactactcaaaatgcctcgaaatacaagggctaaaccctatactactagaatggccaaaatacaaggctcaaatgaaggaaaaaacctattctaatatttacaaagataagcgggctcatacttagcccatgggctcaatctaccctaggctcatgagaacnctatggccttcctttgatctctagcccaattactggaagctctatcaatgccctgcgggtaggatgcatactttctcctagtctcacctacaaagaaatctatgtgagaagatcttctacttcacatcagt

SEQ ID NO: 82455 - DNA, 385 bp, Glycine max
  unsure (1)..(385): unsure at all n locations
acatgcngtgtatatgtctgtaatatgtaacatgcactgcctatgtcacagatatattattaagctcacaaatatcaatccaggcactgaatagaaagagtcttcagctacttggataaggataacatgacagttctgcaagagagatgggagaggcatactcttttacagattcagagtgttgagcacgagtgtntcttatccagccccaatctttaatctgttcacgacacctactacatggcttgatagtaatctttacctatacctgtatcatcattatcatgcatctgacctgctgcatatgaatatgaacactgatataacatgtcataactcgcattcacacttaatcctctaattcatagatgtgtaccaactgatg

SEQ ID NO: 82456 - DNA, 480 bp, Glycine max
  unsure (1)..(480): unsure at all n locations
agctggaaattgaacaacggaagctctcgagataatcttgtggtcataaattttcacacagatgtccgattcggggaaataatatatcgagacgcacgaaattgaacaacggaagctctcgagaaatttgaatggtcataacatttcactcggatgttcgatccggggacataatttatcgagacgctcgaaattgaacaaccgaagctctcgacaaattagaatggtcgtaactnttcacgcgaatgttcgattcggggacataactcatctagacgctcgaaattgaacaacggaagctctcgagaaatttgaatggtcataagttttcacacggatggtccgattcggacataatatataagacactcgaatttgacaacggaagctctcgagaaaatcgaatggcataactttcacacagatgtccgattcggngcataacttattagacactcgaaattgacaacggatctctca

SEQ ID NO: 82457 - DNA, 405 bp, Glycine max
  unsure (1)..(405): unsure at all n locations
tatctcttttatcttagtgagagtgattctcctaaattcttgagtgattcaagaacaccctggctgtatcaaaggacattcacaacctttgcgtgttgccctcgctggaaagagtgattctttccttcctttcatcttcacccttggtctttcaaaccacaattccagaagatccacctctgcccagaattatctcgtggccataactcccattntacgcactcaaattaagtgattcttgagcctaaattgaatttcaaaacgagtccctttcacctcgtttggaatcacctcatttggagccctttagcttcagttatttccatttctatatttctgtcagccaccacttaacctacgttttaccatcccattcatcccatttatgccaagaaccaccttaat

SEQ ID NO: 82458 - DNA, 480 bp, Glycine max
  unsure (1)..(480): unsure at all n locations
agcttatctaccagttgtaaatgattaggttgttcttgttaattatttaagtagcagtaaacattaacagaaattccgtgcatgtggatgtatgttttcttttttacttttctctttcatttttttttatttatttttttatttttgggggggtggggtctagtgtaatgctgggatataagttataatcttttattctcttctgatctagataaggtcataacccttaccatttatgatttcaccctataatccaatagcttctgtattagctaatggacaaccttttttctccaggttcaaagcgatcattatgacgaattcttttctcctgaactagacaaacatggatatcatggtctttacaagagaanaacaaatganggttgtgaatattctggccctgtgatcataaactnttaaagtatnttagatgcctaacctgttattatgggttacaggtgtcagtggaacacaaat

SEQ ID NO: 82459 - DNA, 424 bp, Glycine max
  unsure (1)..(424): unsure at all n locations
tacatgttgtagctagtagataatgcttatttgttatatatgacatgatacgctaactgataatggacaaaaaataagagaggttgggatatgcatgtcttttaaacactttgagacaaaaagttgtcccatgattntctgagtaacaagaagtttagtttttgtcctgtcctcctctgattaatatttattttgtccagtaccgtaaattttagcaaatcaaatgatcccttaaaaaatttgaccccttcttgacatcactcttaataatgctaaagaataatcatcaataatttaatacattaggtatgcttttaatctccttattattattcttttatgaatgagtctctgcccattttctttaaatttaactccttatttatttcaattgtgtaattttgaattatgtgtaaacttaacc

SEQ ID NO: 82460 - DNA, 476 bp, Glycine max
  unsure (1)..(476): unsure at all n locations
agcttcanaacaaagcaacacagaatctaggtgtcccatacccctcaattcaatggattttctaggtttgagaagtgaaatttagaatgaggtaaatttgaagcaaaccctcacctcacacaagtccataacatcaatctaaacttgctcaaactggatttacacctaanattccaccgaatcaaaatttgacttcctcaacacccaatttgccctagaaatggctcttggntcactntggtcattggttnttctctctagcacagtccaagctntctcataagtcctaaatgacatttcaagctaggattaactcactttaaccttcatttaccacagaatccagatntaaaccttcaactctcaagcctcactctttntcactcataacaccacatctcacttctaacctangtaactctacctcatcttaacagtttcgtaagcattcagctataacatacaagcatatacaa

SEQ ID NO: 82461 - DNA, 362 bp, Glycine max
  unsure (1)..(362): unsure at all n locations
tctagcacactccagacatcttctcaatgatccanacggtcagatcatgtttttattgtcttgtgaagttgcaaaccaaatttcgagaagatccaacagttaacgaatgttgggaagcattcttaccgaggcagctgcatgtagttttctctagaagcttcattaagaggcttcctccagaagcttcattaagagacttctagcacactccacacatcttcgcaaagatcccaacggtgagatcatggacaagtgtcttgtgaagttgcagaccaaatctcgagaagatccaacggttaatgaacgctggaaagcgttgttaccgaggaagcttcatgtagctttttctagaagcttcatta

SEQ ID NO: 82462 - DNA, 460 bp, Glycine max
  unsure (1)..(460): unsure at all n locations
agcttggatagagctntatttgtagagctagttgtggcagtgcataatacttgtaataatttgtgataagttagtggaacttggtgaatttcccagaattagatgtaatctcggggttgaaacgaaccaatataatttcccctgtcttatttgtgcttatctcttttcagtttttatatctaacctagggtttgaatttgattttattaacaaaaatctcttatgtttagaacatctattntaatcgtctaaatgtgtttntagaaaatatgttttttgtcttacaaagttttttttttccagacgataactntatttgcttgcaaaaaagacttttaaatttcaaaatcacaatttcaccattcttcttgtatattcctttcaatgtgaccattatagtcctgaatataaatggatcacaaattacctctacattttatctatgtatttcctcttgtaa

SEQ ID NO: 82463 - DNA, 480 bp, Glycine max
  unsure (1)..(480): unsure at all n locations
agcttcatgatgtataaaagagactatgttgtcttatatgattgaaaatgtacctttgaatgattgatcgttttgaatttgaatttgacattagaattatctttctttgtttattttttatgttaacataaaaattatcagtcaatttttgttttttcaaaaataaaataaatggtgcaactaaaataaagtacgcatttatgataaatcgttgtttgagttgacaatacattggtaaatgtaagcgtgttatcataaaacgtgacaggacactgtaagacttgactacacattgngaaatgcaactgtgttaagataaagcatgaanagacactgtaagactngactacacattgngtaatgcaactgtgttaacataaagcgtgagaggacactgcangactngactacacattggngaaatgcaagtgtgtaacatanagcgtgtaccatgtcacgtcatggtgtggtcacacacaa

SEQ ID NO: 82464 - DNA, 428 bp, Glycine max
  unsure (1)..(428): unsure at all n locations
tatgatgatgcnttgcttaaacttatctagtatgtcttatttgtttcgcagagaaggtcacacaacacactanagctgtgattgttatgtcaacaaaaatagcgatttttatcacaataggtgtgttttgtttgtagttctttcaaagcttaatttttttggttaattgtttgggtgttcttgatccttctcctactttgtttcgcatagaagcccgaagaacacactaaagctttgattcttatctcaagagaagcagcgacttttatcacaacaagtgcgttttctttgtagttctttcaaagcttaatttttttggttaattgtttgcgtgttcctgatccttctcctacatcgattcgcatagaagcccacagaacactaaagctgtgattttatctcaagaaagcagcgtttttatcacacag

SEQ ID NO: 82465 - DNA, 486 bp, Glycine max
  unsure (1)..(486): unsure at all n locations
agctnttctcatttattatcataaaataatattatatattgataaaaataattatataaaataattaagagtgatttgattttaatttttatgttaatttaaatattgttatgttataaagatcatgtaaacatataaaatatattccttgctaattcaaataagattttaatatacatgcctttttagttagaatttttattttcttattagcatgtaaaaaattttatattgttaactggttaaaaatattgttntgtatgattntaacgtaattataataaacttgatatacattataattgactgtctaaaaacatcattacaccaataatgtatgtattatttattcttaaaataataatgttttaacaactatgttttgtgtgctggaacctcccattcattgtctatgccatttttttcttacaanatttctccatcggcggtatattaattctacaatctataannatatcatatttc

SEQ ID NO: 82466 - DNA, 362 bp, Glycine max
  unsure (1)..(362): unsure at all n locations
agtcagtcgcgactgacgaatgatgcagaagacgacgtttgtctctgtgtgctatcaggcttntcatcttacagacagcaaaagaaagtttatacggataaccactcgggtatatccacccgtcaacgtgactcagatgtcagtatgacagatcttgtgaatgtggccgacaaaagcgaggctctcgctcctacgtatcctccaatgaggaactcagacctacgtagttcttgataacttgtgagacttgaaaaagtctccaccggaagatgctgacatctccggaaagggcgcagatgaccacattggcctctgctcgtcaatcacactcgtggtcactgaatgacgaggtgcggataacc

SEQ ID NO: 82467 - DNA, 346 bp, Glycine max
  unsure (1)..(346): unsure at all n locations
agcttgttgagtgttttcccaccaatcaaaacttagtaagagatatttgcattgacgattaaatacccaattgtaaagatcttggagagttggccttgaccaaaagtggtcattaggtcaacatagcctctagtctctactcgctcccctactaagccgaggagttgatcagcgtgagattggatggtgttaggcaaaactttaatttagatggtcattangtcaacatagcctataggtacccagcttgtatgagctctntctatttcaccttaagggcccaacaatctttggtgttgtgaccgatactgcaatggtatctgtagtatttggttgcatctaacct

SEQ ID NO: 82468 - DNA, 434 bp, Glycine max
  unsure (1)..(434): unsure at all n locations
tgaagagagcatgaacatattgtttccttacatgcccatctcctttgagaggcatttgtgaatgttgttatattgaatgttgcatcttatgccatatcatatattgtgtgcatcatacaccatcatgagtgagtgagaagaaagtttctaaagctaaaaaatttctttagaaggaaaaattctattttagtcgattacatccttatcgtaatcgattacacaagttttcttaagcttgcagagttatgtctcgtatcgatttaatcgattacaaccttatcgcaagtgattacatagttggttgtgagacaatgactgatttattcaagagtctctgccttaatcgattaccacgtgatttaattgactacttctctttctataagtgtttcagaagtgaacaagaacactcnntatcgatacatagatcttga

SEQ ID NO: 82469 - DNA, 307 bp, Glycine max
  unsure (1)..(307): unsure at all n locations
agcttctaaactntatacaagaatgatgctcctatactatttgttagacaagtggcctcagatatcttaagaaggggggggggggtgaattaacatattacaaactatttccccgattaaaaatctatttcactttctattcaagttacaaattcccttattaatgaccttcttaaatattgatctcaacagaacacatctgtatataaatataatacactaataaataatagaggtaagggaagagaaaatgcaactcacatttatactggttcgggcacaccctatgtgctacgtccagtcccta

SEQ ID NO: 82470 - DNA, 430 bp, Glycine max
  unsure (1)..(430): unsure at all n locations
gtaggctttctatattccataaccttagtgatgggtcttttaatggttaataataatctttatcattagaatataggttacaaccgttgggtttctctcttttatgatcatttgattattactatgtaatgtttgcttataaaagacaaaataaaatcattcactcttcatatctctatcttctctttattctacaattcttatataataattaagaaaacatttttttgacaaaattaagaaaatagtccttgggttcgaagcgacactcaagtaaagttattcttaaattaacaacgcttgaatgtctaatattgaaagtataatttgtcacagttacaattatcttcatttacaattagaaataattaagtagacgatataataacaataccttaaatataatgttcaatcaggtangatatatgat

SEQ ID NO: 82471 - DNA, 441 bp, Glycine max
  unsure (1)..(441): unsure at all n locations
agctntgagccaaaatcctaacacaccatataccttgacccgggatgagaatttccatcctcgcccttggaagaaaacaaaaaaagaaaaagaaagttcctgatcaaagatcggaagaaaacaaaaaagaaaaaagttcccgatcaaagatcggaagaaaacaaaagaaaaaaaagttcccggtcaaagttcagaagaaaacaaagtgaaaaagaaaatccctgatcaaagatcggaagaaaatgaaagaattatgtagaagggtcttcggaccagacaaatatccaaacaatacaaaatagccataaccaaataaggaaataaaggaaaccacgacttgaagtagtcctctccctttggtaccaaccaaaatcctatgcgctaatgactttcntgccccgcactaaacanaaacagaaaaggggaaggccanaacactta

SEQ ID NO: 82472 - DNA, 447 bp, Glycine max
  unsure (1)..(447): unsure at all n locations
cgtagaatggctagacatgatacatgtcagggtttggttttgtttaaggataaaagggatgccccacattatttccatgacacaaatgcaaaaatgatgatttggaaattttatgcaaaactggtcatgcatgcacctatgtggacactcaagtgtcaaatttttatggtcatgtgatgctagggctcacgattcatttcctctattntagtcaacccaatgtttccaaaatatgttcttttatcaatttgtgcattcatccgagtccattttgggcgtccgggaaaatattcacagcattcacccttcacgtgtagacacattgttcaaaaaccagttatgatcagtgaattttttcacagagagctggaagtatctcttttacaacatgttggtttcagctgacaactacttcattttctcgtctacttttttatcatngttatt

SEQ ID NO: 82473 - DNA, 475 bp, Glycine max
  unsure (1)..(475): unsure at all n locations
agcttctatataagctgaactcatttatcaataaagacaagttgagttntattcagaaaattagagtttatctcttttatcttagtgagagtgattctcctaaattcttgagtgattcaagaacaccttggctgtatcanaggactntcacaacctttgtgtgttgccctcgctggaaagagtgattctttccttcctatcatcatcacccttgttctttcaaaccacaattccagaaaatccacctctgcccagaattatctcgtggccataactcccattttacgcactcaaattaagtgattcttgagcctaaattgaatttcaaaacgagacctttcnacctcgttttggaatcacctcattggagccctgtagcttcagttattgccatttctatatttctgtccagccaccacttaaccttcgttntaccatcccattcatncatnntatgccaagaaaccaccttata

SEQ ID NO: 82474 - DNA, 362 bp, Glycine max
actatgaaactaagcttctcgatgtattctgcgcttgaatcggacccccttttgaatagttatgaccatttgaatttctcgagagcttctgatattcaatttcgagcgagtggatatattatgcgactgaatctgacctacgtatgaacagctatgaccattcgaatgactcgagagctctcggtgtgcaagttctagcggatcgatatattattctcctgaatctgaccttcgcgtgcaaagttatgaccatttgaatttatcgagagcctccgctgatcaatttctagcgtctatatatgtgatgcgcctcactcggatcttggagtgaaagagcctgaccatatgaatttctcgagagc

SEQ ID NO: 82475 - DNA, 331 bp, Glycine max
  unsure (1)..(331): unsure at all n locations
agcttgagggaaaacttgatgccttggtcaatctattaactcagcttgccataaatcagaaatctacttctgcaccttttactgttgcaagagtttgtggtctatgttcttctgttgatcaccatacagatctctgtccttctttgcagcaatctggagtcaatgagcaacctgaagcctatgctacaaacatttataatagacccnctcagcagcaaaaccaacaatagtagaataattatgatctttcaaacacagataccatccaangtggaggaatcatccaaatctgagatggggcaaatcctcacaacaacaaccnnncacagct

SEQ ID NO: 82476 - DNA, 468 bp, Glycine max
ggacatttaaactaagcttaagcacaacctaccacataattcaatctatcttttctatgccacacaaacatgatagaacaaatcaacaatggtgggtgagatgcatgtgagacggtctataccgcattactacagtgatatattgcgggactgtcatcaagaccccacccatactgaatgaccattcgtgtatatatctgttgttaagaaaacaatgagcagaattttatacatgcaacatatttggctaatattattatttcaaggaaattataatatgaaaaaaaaaaacagatattaagtaagatataagccaacctcttgcgcctgctgtatctcagatgtagaaagtgagttttcttcctcaaaaggaagtcacatttgggatgcagcatatgaaccagaacaaaacacaagcttcttttaagatatgatctgattctgattccaattgaggaaccttatttc

SEQ ID NO: 82477 - DNA, 385 bp, Glycine max
  unsure (1)..(385): unsure at all n locations
agcttgccgccacggagttttcaactatgctcttgtgtggtggaacaagctacaaaaggagagagcaagaaatgaagagccaatggttgatacatggatagagatgaaaaagatcatgaggaagcggtatgtgccggctagttactcaagggacttgaaattcaagctccaaaaactaacccaaggcaacaagggggttgaggagtatttcaaggaaatggatgtgctcatgattcaagcaaagattgaagaagatgaggaggtaactatggctcgatttcttaatggtttgactaatgatatccgtgatattgttgagctgcangagtttgttgaaatggatgattntcttcacaaagcaatccaagcagaacaacaattaaaa

SEQ ID NO: 82478 - DNA, 347 bp, Glycine max
atagatatttttatgttcatatcagatgcgaggcattgttcctaaacgatatgacaaaggaaattcaacctccctggtatgctcaaaatgtgatcactatcaaacaatttccatttgatatgaccagttttaatatttgcatagactcataagattgttgctcacattaaaaatgttgatcctagttagtggaatgatgttggtaaagtgggtgagacatatatgaaccaaaatttcgaaatcgagaagaatactggatagtttaagccaacaaaacatggcttctcaggaagctttctttattgctctccaaggaagctaccctatagcttctcatggaagctttc

SEQ ID NO: 82479 - DNA, 466 bp, Glycine max
agcttgttaaagcagaagaaaagaaaactgaaagtaagctaaattaaagtgaaagtacaaaaaacaagtagggaccactaagggtgcatagaatgaattgaaagaattgatttcgggaacttaccggttgaagactgaagaatgacgaagaacgaatgaagaacagtgaagaatttccacaaaatcgcttacggaagcgttacggaagcacttcggctcgatttttcttcatgaaaacgtgttttttgcccaaaatagccgaaatgcattgcttaggggttatgaatattttttaaacagcaccacccctcccctatttataggaaaaaagagaggtaattgccgcctagaggcttcttgaggaagattttgagcgcaccccaatactaagttcacccccttttcatactttacggaaagtacgaaaccttatggaagtgtttggatttgatttcatcttttttta

SEQ ID NO: 82480 - DNA, 269 bp, Glycine max
  unsure (1)..(269): unsure at all n locations
tcttgttggtgatgaacanaagcacatttcggaatcaataatgcgaaaaaggatggccctagggctgcacactcgtcaatcccgtgggtatggcttttgaaaggggggaaaagaagtttttgaatgttaaaacgccccccctttcgtcattcttataatttggtgtaagggtggctcgcccaggcgagcccagctcgcccaggcgagctaacctgcacattctttattaatcgtgaggggaatattaaccatgcgccctgccttgttat

SEQ ID NO: 82481 - DNA, 416 bp, Glycine max
  unsure (1)..(416): unsure at all n locations
agctngtagggttaaagtctcacgattgtcatgtgttgatgcaacttttattagccgtggctatacgagacatcttgccaaacaaagtcaggttagccataactcgcctatgctttttcttccatgccatatgtagcaaaagtcgtgatcctgtcaagtttcatgagctggaaaatgaggccacaattatactgtgttagttggagatgtatattccccctgctttctttgacatcatgattcacttgattgtgcatctggtcagagaaaacaaatgttgtcatcctatttatttgcggtggatgtacccggttgagcgatacatgaagatcttacaagggtatacaaagaatatatatcatctagaagcatctattgttgagaggtacatcgcanaagaagccattgaattttgt

SEQ ID NO: 82482 - DNA, 394 bp, Glycine max
ggacacttgaaactaagctaagctccttaactgacaagactctaatattagaagagtattcttgtggaaccttcacccgacgaagacattgacaaaaacttatcttctccttcttggacaaagtatggcaggctgtgggcaagtaaattgtcttaccatcagaccttggatgcaactgtgctcttatacccatatcagctagatcttgacgggtattcaagccatccttcgacttgccttgaatgttatgaagcgtcccaatcacactgtcacaaacatttttctgcacatgcataacatcaatacaatgtctaacgtcaagatcacaccatcacggaagatcaaagaaaatggacctcttcttgcatatgcaactctgacttttatccttctt

SEQ ID NO: 82483 - DNA, 489 bp, Glycine max
  unsure (1)..(489): unsure at all n locations
agcttatgttgctcaaggttctggctctntgtctcactttggcacgaactacaataattacaatggtggaaatcagtacgttagcgctggcattggccgtggtggcggtggcggntggaaatttaatcgtggtggttgcaatggtggctgtggcagaagtcgatttgctcatttccagtgtcaaatctgtcatanatatggtcatgaggcttcttatgtcatcatangcacaatgatgactatgttcctactcagcctatggattatcccagccagtatcctgatcaaaatcagtctcagatctctactaaccccaatcagaaccagtaccaaagtcagagtcagaaccttaattcctatcanacacagcagtctaatcagtctcagttcaatcaatactcagcattctcctcaagcctatctgataaagtgtccttcagcctcttctttcgagtgatatcctgattcaggggactctcaccatgtcac

SEQ ID NO: 82484 - DNA, 336 bp, Glycine max
tcttagtttcagatgatgcagctgaatgtgagctacctcatgcactcctctaatgactatagcatcatttctggcgctaaactgctgggagttggaagccatcttctcaattaaatttctggcttcagcaggagtcatgtctccaagggctccaccactggtagcatctatcatacttctctccatattactgagtccttcataaaagtattggagaagaagctgctctaaaatctgatggtgagggcaactggcacatagttttttaaatctctaccagtactcatacaggctctctccactgagttgtctaatacctgagatatccttcttgat

SEQ ID NO: 82485 - DNA, 416 bp, Glycine max
  unsure (1)..(416): unsure at all n locations
agctnntgcggattggtcttcatcgacaaatggatcgaagtgggtctgaaaagaggcaaatttgatcatcctgctntgatgaatgagaaaactgnggcaaatgaagaggatgagaattatgaagtaacccatgttgaggttgtcattcctacctggccaaacttcccaccagcccaacaatatcattactcagccaatatcagctcttatcattacccaccacccattcatccgcanaggccatccctaaatcaaccacaaagtctgtctaccgcacttncaatgacgaacaccacctttagcacaaaccanaacaccaaccaagaaatgaattttgcagcgaaaaagcttgtagaattcaccccaattccagtgtcctatgctgactngctcccatatctacttgataattcaat

SEQ ID NO: 82486 - DNA, 369 bp, Glycine max
  unsure (1)..(369): unsure at all n locations
agttcagaaactgctggtaatcgattaccatatatgtgtgatcgattacacagtgcaaactttgaattcaaattataatagctgttgtgaatcagatttggccactggtaatcgattacattctctggtaatcgattaccagagagtaaatttgttgaaaaagactttttaacttaaaattcttggccaaaccttttgctacttcaattggaattcccttcctatttaatataccctctctaagactctagagactggcttgatcatccatcttgaatatctttaatctctttggcttgaataaagctctgagacgcatgtganactgtggcatcatcaaaacattcagcttgatcctttgctacaatc

SEQ ID NO: 82487 - DNA, 375 bp, Glycine max
  unsure (1)..(375): unsure at all n locations
agctgtgatcgaaaccacactctgagccctatattactgattgaaaactaaaccctacaccacattccacttttgttagctagtggccgtaagatgaaccattacttatgtatcttcccggacaaatatagggacacatattaaggtgcagatatcatcatagagcaaatcatgccaaagtgatgtgacgctgataacttgaatcttttgtgtccaaacttggcatgcaaggaatagcaagcatatattctctcanatgcttgtgatggccaacagaatccacagtatctgccagcacgcgaagggggtctagaaatgatagtggtatctntcataaactgccctgtcttatgcaaactaacagcagtatacaaa

SEQ ID NO: 82488 - DNA, 430 bp, Glycine max
gtgggcctctggagatacactaaggtagcctcttgtacatttgaaatcggaaataatgctggatggcgattgccactgctgctagccttaaataaagaatgaataaatcacactagctaattctaagatgtcgcgaaattactttctcttttaactttttataacattaacattaaccttcattgcagactgcttttgagttgggaataaggaaccatacccaccaaattttgcacctgagaacaaatactgttgtttcatttttcaatacaaggtgcaacttttattattccagtcatctttaattgtgttataaaatctacaattagtagacaaaactatctagttaggtaataaatacccagggtaaacatgacatttatctattctccacaattgtataaaacaattgatacccatccattaccct

SEQ ID NO: 82489 - DNA, 373 bp, Glycine max
  unsure (1)..(373): unsure at all n locations
agcttcatgaagaatcaagaatgattcanagatgttntgatgataacaaaggtggtgacaaaaagctcaaaggtcaatcaaagaatcaagtttcaagattcaagttccaaggatcaagatcaagattcaagactcaagaatcaagaatcaagaatcaatagaagactcaatcaagataaatattaaaaagttttttcaaaaactgagtagcacatgatatttttctcanaaccttttaccaaagagtttttactctctgttaatcgattacccaattattgtaatcgattgccagtagcaaaatggttttcaaaaagctttcaactgaatntacaacgttccaattgatttcanaatgttgtaatcgattaca

SEQ ID NO: 82490 - DNA, 390 bp, Glycine max
gatcggttctgtcacgcatgatggcgtgatcactggctgacatattgtcaattagctcagctgcttcttttgtggtcttcaactgtatttatacccctgtagaaggatctagcagttgcttggtttgtggtctcaacccatctatgaacatattcaattggattggctcataaaacccatgggtgggagttcttctcagataaacctctgagcctctccaatgcttcactcacagattcatcaatgaactgatgaaatgaatagattgcatctttccctctcgcaggcttggactctgggaagtatatctctagacacttgacatcaacttcttcccatgatttaagactggttactttaaacgagtgaagctacctcttggcctctcct

SEQ ID NO: 82491 - DNA, 485 bp, Glycine max
  unsure (1)..(485): unsure at all n locations
agcttataacacacaattatttaatatataatatgacatattaaaagtgatcttagaaccaccacaacataaaaaatataccaatcaacattcataggattttttcgacaataaaatatgaggtatgaatgtgtggctccaccttataatgttatttaaaagtctacaaataaaactatgatttctattgaaagtattggcccttacattcacaacattttatgactgaagcccaagtgaatttcttactcacagttgggtcacttcacctcaagctgtgcaacttccattggtggagttgtgactttcgccatatggtgttggaaagtgacgcttctctatatagttggtgtcccgcttattcttatgatangggaaacttacaccaagaaaatgaacctcatatcataccaccaaatggtntccaattcccaagctacatctatgatataatagggtcatgcatacatcattagaattacatc

SEQ ID NO: 82492 - DNA, 480 bp, Glycine max
cggaactataaaactaagctcgctgagaagctagagctcacctacacacattcatctattatctcagctcacctccttgagaagcttgcttgagaagctagatcttggctacacacccctataataactaagctcacccccatgactgaaaaacatgagtatacaaacaacatcctactacaaagactactcaaaatgccctgatatacaaggctaagaccctatactactagaatggccaaaatacaaggcccaaaagaagaaaacaacctattctactatttacagagaagagtggacccaaccttggcccatgggctcaaaaatctaccctaaggttcatgagaaccctaaagccttctgtatcaactctagcccaatcctcttggagcctcttgctcatggctaccggaactggtccttcctagggaggattgcatcacatcctctggtatcaattaccagagagaaaatatatat

SEQ ID NO: 82493 - DNA, 417 bp, Glycine max
agcttgaaattgaacaacggaagctctctagataatcgtgtggtcataacatttcacacagatgtccgattcggtgaaataatatatcgagacgcacgaaattgaacaacggaagctctcgagaaagttgaatggtcataacatttcactcggatgttcgatccggtgacataatttatcgagacgctcgaaattgaacaaccgaagctcttgacaaattagaatggtcgtaacttttcacgcgaatgttcgattcggtgacataactcatctatacgctcgaaattgaactacggaagctctctagaaatttgaatggcataagtgtcacaccgatgccgattcggaacatatatatcaaacaatcgaattgacacggaagctctcagaaatcgatggcattacgttccacaatgt

SEQ ID NO: 82494 - DNA, 299 bp, Glycine max
tctccttatcttagagagagtgattctcctaaattctcgagtgattcaagaacaccctggctgtatcaaacgacattcacaaccttcgcgagttgccctcgctggaaagagagattctttccttcctttcatctgcacccttgttctttcaaaccacaattccagagaactcacctctgcccacaattatctcgtggccataactcccattttacgcactcaaattaagtgattcttgagcctcaatagaatatcaaaacgagtgctgtcacctcgtatcgaatcacctcatatggagc

SEQ ID NO: 82495 - DNA, 410 bp, Glycine max
  unsure (1)..(410): unsure at all n locations
tcaagcttttggagtagaaacatgggaccaactcattntatttcagaaagtcgtatctagtcaaggtctgagagaccatacaagttttctagcgatttctaaatatatgggccattaagtctatcatatgctgacaatagctgagaagcccatgaatttcttcgggggcggagtaggtgtccgccattgccttggccttggctaacaataggggaagttcttgactcccgttcaaggtaagagcaaaccgatccatccacatggttgcctcttggtgtaaagagtcgatcacccttcctctagcctctttttccgcgtatacttgggcatactcgtccgcgaccctatgctcgtgggccgcggctagacctaactcttcttggtacttggcgatgatagctagcatgttg

SEQ ID NO: 82496 - DNA, 444 bp, Glycine max
tcatcttgcaatcaagaaggaagtgatacagatgatttgattgatatatatgaagatgatgaattcagtctcttcgtgaagaggctcaacaaatttctaagaaacaaaggaaatcaaagaagatcaaatttcaaatcacagacaagaggagaagattcatcctctcttccaaaatgttatgaatgtaatcaaccacgacatatgagagttgattgcccgagtttcaagaaaagaatacaaagatctaaaaataaaaccttcaatgataagaaagcaaaaaaggcttacatcacttgagaatacaatgatatggattcatttgaagattgagaaaatgaagttgtgaatctgagtctgatgaccaagaactatgatagcgatgagaaccctagggccttctcttgcatctctggcccaatcttcttggagtcttctatccaatac

SEQ ID NO: 82497 - DNA, 416 bp, Glycine max
agcttaaaggtgagatattaaagagtggatttatatttgtattactgggactttctggccgtagccaaatttgaacatctaatgcctaggggaaatattattggatttaagggtttaagagttggaatgaggaatgggtctttaagtatgcttatgaagaagaataaagtgtgctgtgcctgggatcccatctacttattgggatttctttttgaacaatgggttgggtgtttctatcatcatttaccgatgttgtttatcaagagcctctctaacttagtgatacttaaaagtgtaatactgacaaagattattgtaatacttacagtgactcacagagtttcatacatataagctagtgagatcatgatgtgacatacctgtgtcaatgttgttaaatccatgacactagtgta

SEQ ID NO: 82498 - DNA, 453 bp, Glycine max
  unsure (1)..(453): unsure at all n locations
tactatgagacatcatcaatgaacacagagcagtactgtcaatagccagagatggccatgatgaagcagaggaagatttggtggatgttctcctataattcaaggatggtgatgatagaaaccatgacatttgtttaactactaacaatatcaaggctataatcctggtaaggatagtaacaccttctaaaccctttattttatgaagataatttcactcctttcaagacaacttagaaaattatttaatactagcaccagaatatctcacacatgggctcttcaaactatgcagcatatgatgatttccgtgttgtcttaatggatactttctgcatatataattgttgacatatgtaacaactacacagttagtngtacatctgtacacgatctgaacagtngactttcgaatcatcanttctctgtatactctaaagtacacttctcaca

SEQ ID NO: 82499 - DNA, 450 bp, Glycine max
  unsure (1)..(450): unsure at all n locations
agctntaaccaagcctagcgagtaactnttcatggtattaaaatattgtaaccatcgtgcatataatgtgtgactcagtattgaccttctaagaatataatgttatatntgtcagatgtgttctgacgccaggagatccatacatgcccttaccaaatgacgaaattattgcaagggtagcaaaacaaggtggttaacgaattccatttatcttattctggttttgatattttaccattgatttagtagtgacatgaaacgttngcttccaaagtaggatgcttatgcacacccttagtagctagagtgtgtgtaccgtgtgtttgagttatttaatatttcagcattcaacgtcatatgatggtaatggtgaatgcaagatanatatatttaatgaaataccaatatggngatcagttatggatcactagagacaagtactggttggat

SEQ ID NO: 82500 - DNA, 432 bp, Glycine max
  unsure (1)..(432): unsure at all n locations
actaagcttttcacacctttctgccctttgcaacatcaanattctaagaactcggagatcaacacagatataacaatggagtggcacgatataagtatcagagtattaaatacaataagccaaactcacaaacaagacataatcaaaccagaattcaaataacatagaatgtcaacaaccacaaaacatccaagactgaaatctaaaaaccaagagataaataagcaaagtactttagcataataatgtaaattctaagaaactaaaagccaaaatacacggcttataanagataaataatcagaacctaaaatctaagaagaccgaggtggtggtggaagatcgaaactctgacgaatgtatgcgacatcctcttcaagctgtgtaagacgaatgtccataccggcaaagcgtgaatctaacgagtcaaag

SEQ ID NO: 82501 - DNA, 495 bp, Glycine max
  unsure (1)..(495): unsure at all n locations
agcttgatgataaaggcatgccacatattctaattggttatcactcaactaaaggctacaagttgtatgatccaagaagtcgtcaagtgtccattagcagggatgttatctatgatgaaaatggaagctggaattggaattcaacctctagtgaaagtcagtccaggatactgttagaagaagaaacaccttcaactgcaccaactgttaacaaagttcctggcataagaagatcatcaaggagaagtcaactgccattacctttgagggactatgagttgtttcaagattcataagtcaacttagagggagaattggttcattttgcactcatagtagaagttgaacctattgaatttgacanagtagtgactaatgagatgcggctgaaagctatgaaggaggagcttaactctatagaaaagaattagacctgggaatnggtggatcttccttcanataagaagcctatagcactaaaatgggtctataaag

SEQ ID NO: 82502 - DNA, 312 bp, Glycine max
tcactctgttatataaactaaatagttggtatttcttacataaaagctgaaacatcacaatcttaaaatgctcaaactttgaaatagtggtgaacaacaattattgatgtggatttatatgtatgtgatttcagggtcattggagctattctcatagtaatgggactttactcagttctgtggggcaagcacaaggagaacaaagagaaagaggcagagataactattgaggtattgaagtgcttgttagaaaatgggatgacgttggagactatggtaaaagatgtcgaaacatacaatgacattgacatg

SEQ ID NO: 82503 - DNA, 461 bp, Glycine max
  unsure (1)..(461): unsure at all n locations
agcttgcttgtggagcttctatggaggctggatctttgagcttcaatgaggtccttcaatggtgattttccaccatggagatgcagtagaaggcaaaggagaagaggagaggagaggcaccatccactagggaataagccatggaagaaggagcatcaccaccaagaatgtgccatggataagaagcttgaagatgatgctttaatggaggaaaagaaagagagaaggggggagcacgaaattgaaggaataaaagagggagagaagtggaactttgaagtatgtctcataagactntcattcatcaaagttacaacaagtgttacacatgcttctatttatagactaggtagcttccttgagaagctttcttgagaaaacttccttgagaagcttctttgagaaaacttccttgagaagctagagcttagctacacacacncttctaataactaagctca

SEQ ID NO: 82504 - DNA, 410 bp, Glycine max
  unsure (1)..(410): unsure at all n locations
aagcatgacttacgcttaggaatctaattattggttntgaatgtacaaaggcatgaatattacgacatgtttgagaggtttttgttagaatttaaatttggctgccccgtgatgaataccttgcacctaggtagcatgaaaaatacctttcagcggtatgtatataggtgaatgtatatagtgtggaaatgctttgcagagtgtgtgaatataaggcataaaataccttgcaaagtgtgaatgtatggccaataatgcatttaaaaaaaaatctatatatgtaggataggtagtgtaaaaatgcctttcagaatatgtatatctgtggataggtagcataaagggtttttcaaaaaaaatgtacccatgtcaaaaatgacacgagaatgcttcccanatgaatatatgat

SEQ ID NO: 82505 - DNA, 350 bp, Glycine max
  unsure (1)..(350): unsure at all n locations
agctnggacctcannatggtctcatccacactctcttcatgcaacaactaccaaagtgtgtgcaccctcgacaaggtcaagtcagcactagagagggcagagaaagagcctattgtttggaaaagaacctcattcttgaagtcacctcaacgtacatgaagaattcagccacggatttagaagatcattatgcagtagccactgataatgccccanacacaatatgatcaanagcagggagaaggtccaatttcatcattccaataataacaacaatacctttttcctactaggtgagatcaattacatggatcacacactacaccttaactctgtgatctcaagcctga

SEQ ID NO: 82506 - DNA, 450 bp, Glycine max
  unsure (1)..(450): unsure at all n locations
actaagctgcaagacccaggcatcaaacattattgaaaacactatctatcttgcacatgctcacaagagtgagaaaagaagcaaacatgtaccttgcgttgatgttagactccaacggaggatgctcaacctcacgacagtgacaaaccccaacggtggtcatgaaccccagcggtgacgatggtgaggaggagacggcagtgacaggtcgcaaacgacggttacaggtcttgcgggtgagggagaagagaaagactctgtttgcgagactgagcgtgtgggggaaaaaggttntgggttttaatttatgtataaccagttgacgttaacattgatcttctaataaccgatgttaatgatctcatgttaatatgcgggttttcaaagcgatgtacttaacttaaattattaggaaaattcatcgtgctcttgttatatcgactttttcat

SEQ ID NO: 82507 - DNA, 356 bp, Glycine max
  unsure (1)..(356): unsure at all n locations
agctngaggganaacttgatgccttggtcaacctagtaactcagcttgccataaatcagaaatctacttctgcaccttttactgttgcaagagtttgtggtctatgttcttctgttgatcaccatacagatctctgtccttctttgcagcaatctggagtcaatgagcaacctgaagcctatgctacaaacatttataatagaccccctcagcagcaaaaccaacaatagtagaataattatgatctttcaaacaacagatacaatccaagttggaggaatcatccaaatctgagatgggcaaatccttcacaacaacaacaacaacagcctgtccctcccttctagaatgctact

SEQ ID NO: 82508 - DNA, 415 bp, Glycine max
  unsure (1)..(415): unsure at all n locations
caacatcaaaaagtctatgaactcggatatcaacacagatataacaatggagtagcacgatataagtatcagagtattaaatacaataagccaaactcacaaacaagacataatcaaaccagaattcaaataacataaaatgtcaacaaccacaaaacatccaagactgaaatttataaaccaaaagataaataagcaaagtactttagcataataatgtaaattctaagaaactaaaagccaaaatacacggcttataaaagataaataatcagaacctaaaatctaagaagacggaggtggtggtggaagatcgaaactctgacgaatgtatgcgacatcctcttcaagctgtgtaagacgaatgtncataccggcaaagcgtgaatctaacgagtcanagcggtcaccaaca

SEQ ID NO: 82509 - DNA, 434 bp, Glycine max
  unsure (1)..(434): unsure at all n locations
agcttcactgctcanaccgtcaactatgttagcaagggatgtaaaatccatatagtattcacctacagtaccaatttgcatcaatttaaacaaagtggatcttggacactcataaacagaaggactaaaatccaacttgagggctcttgtaaaaacatgccaagaggaaaaaggattagccctttgcatcatttggaaccagggaatcacatcttggtcaagatgaactgaagcaatggttaaacgatcataatcagacattccataataatcaaagaattgttctactcgaaaaatccaatctcgtaaattntttccaccaaaacgtgggaaatccagcttaacggagcacacctggaatggtgctttcggttagttngaatcaacatggngataacctggaggnggtgtttggactgcaatagagtatcaat

SEQ ID NO: 82510 - DNA, 387 bp, Glycine max
  unsure (1)..(387): unsure at all n locations
agctntatggagtagaaacatgggactcactcattntatttcaaaaaagaaatcatatctagtcaaggtctgagagaccatacaagtttcttaacgatttctaattatgtgggccattaagtctatcatatgctgacaatagccgagaagcccatgaatctcttcgggggcggagaaagtgtctgccatcgccttggccttggctaacaatcggggaagttcttgactcccgttcaaggtaagagcaaaccgatccatccacatggttgtctcttggtgaaagagtcgatcacccttcctctagcctctttttccgcatatacttgggcatactcatccgcgaatctatgctcgtgggccgtggctagacccaactcttcttggtac

SEQ ID NO: 82511 - DNA, 462 bp, Glycine max
tatgaacactaatgtaaaatagaaaagctttttgaaacacgtaattaatatatttattgtattacaattttatgtatattcgatctctttgttattttctgttgattttatcttcctttgggtattgattgtaagtctctaacgtgctgtttaacttgaatgcatagatctaaacatgctgacgtaactttgagaaaacacatagaatttagttaaaaaattacatattcgtttttagttaaaattattttttatgtatgcgttgaaatgacttgttatactcatttttgttttaaaaaaatatttattctgaacaaaataactaaaaatatttaatataaattaaattttacataatttttgtcacatgaaaagagatgttttgataaattatttatgccattaataatttagaatatataaatattataattctatatgaaaataatacatgaatattta

SEQ ID NO: 82512 - DNA, 450 bp, Glycine max
  unsure (1)..(450): unsure at all n locations
agctngatattntcttgttctattctcacttgtagtttcaaaatcttattttgcactcttgaaggtttggaaacttgagtctaaactcccccattcttctttctaaattttgtggagcatcatcaaggtagggggaaagtctctccaacccttgaaccctattcttgttgttaaactttcttgaatatgttgtcttgaaaattttgtattgctaccctgttntggatctatgtgctgagctgtttctcttgagactntgatgccaaaaatgagttctttggatattaaaacctagggttagacttatggtgtgaaaacggaattntctagaaaaagttatgagcaaaacaagttaaggagatctttangaagccataatttttgcacaagactgaattggtagtgctgctgatggactgttntcttgaatnttaacctcaaaatgaaata

SEQ ID NO: 82513 - DNA, 473 bp, Glycine max
  unsure (1)..(473): unsure at all n locations
ngtgtgctgaaatggctaatggaaaactgatatagatgaatggtagagttaacctanggtttaaacgtgagaatgtagtgatatgagtggaaaagtgtgatgctctgaggattagaaaagccaaatctggatttagtggtaattggaggttagagtgaggtaatcctagtttaaaatgtcatttatgactgcgggaaagcttgtgctgtgcaaaggaggaaaatgagagaccaaagtgaaggcaagagccatttctagggtaaattgtgtgttgagaagtcaaattttgattcggtagagttttcttcgtaaaaacaatttgagcaagtttagattaatgttatagacttcgttgagatgagagtnntgctccaaaataccccattctcattttcacttctcaaaccttgaaaatccactaaaatgagggggttagatacctaaatttgagtgcctggtctgaagctgctttg

SEQ ID NO: 82514 - DNA, 484 bp, Glycine max
  unsure (1)..(484): unsure at all n locations
agcttcctaacannaaatttcatgtaggtggaccttcttctagtaattntgacttacaacaacctcctatccctcttccattcccacctagagcaattccaaacaaaaagatggaagaggtggaaaaggcgatgttggagaccttcaggaaagtagaggtgaacatacctctgctagatgccatcaagcagattccaagatatgtcaagtttctaaaggaactgtgcacccacaaaaggaagctcanaggcaatgaaaagattagcatgggtagaaatgtgtcagcattgataggtaaatctattcctcacattcctgagaaatgtaaggacccaagtactntctgtataccttgcattattgnngaacaataaattgagaatgccatgctagatctangagcatcagntagcgtcatgcctttgtccattttcaattctttatctcttgggaccttacaatctacaatggtggtgttcatttg

SEQ ID NO: 82515 - DNA, 394 bp, Glycine max
  unsure (1)..(394): unsure at all n locations
cgatgatcggagtgagatacatgggtncattgtctatgagtgtttgctcatagggctacagattctacaatccacacaatggaaagacaattgtgagccgagatgtcgagttctatgaagatggcacatggaattgggaggagaaagaagacacttatgattgtttcccgtactttgaagaaatagatgaagaagccttgactccaaatgattcaactgcagctctttcaccaactccttcaaccactgaagcctcatcatttttcgaagggagttcaagtgaaaggcgaagaagaatgagaaatattcaagaattaatgatgaaactgaagatataaaggatttgttttgtcttgttgtagacaatgaacccttaaactttgatgaagcaatg

SEQ ID NO: 82516 - DNA, 455 bp, Glycine max
  unsure (1)..(455): unsure at all n locations
agctttagatgcncctcctccatcaaatccattaaccaaacgttaatagtgctctttctcaagattgataaccacatgcaaataaatcgttataggctcattaatctatgtgaaaacatctataagatcatagctaaaattatagtcactccttcaagtaagtcatgcctcaacttatctttgcatggaggaggtttttggaattattagcacctattacaaatggggggcacgtggctttcttagtgtattaggcttcatcaattatatacaatgagaatggaaaaaaaaaaatcttataactttgaaaggtcaattcttctcaaggtagattatgtctaagttcaaaatcctcgaagaatttgcacacaattatgagtttgatgcatatttagcatacacatgcaacaatgacataatgattaataattattttgttaacacgtttgaagata

SEQ ID NO: 82517 - DNA, 432 bp, Glycine max
  unsure (1)..(432): unsure at all n locations
gagaggtgaagagatggcgctagatggtccatanctttccatggaaatattgctatgtgcaaaggagctgcatttgcggcatccatggctgctcctgtttgagttatttgcttactgtcttcgaaaataacgcatgcacgcgttcaaattaaatagtctccatcaactttctgtctctctctgattgcagaagtatcagagtttggtgccacgtgaacttcttgcatacatgtgattcttctatcttcattggcggtcacatacttttcccaatgataacaccacatgactaggtcaattaaatagatagattaaaagtaatcatttaaattataattataatcattataatgatggattaaaaataatttatctatacgtttatgatccattagacactcgttcataatatgtgtgataaaatctatctaa

SEQ ID NO: 82518 - DNA, 440 bp, Glycine max
  unsure (1)..(440): unsure at all n locations
agcttgttaagcagaagaaaagattactgatagtaagcgaaattaaagtgaaagtacaaaaaacaagtagggaccactaagggtgcatagaatgaattgaaagatttgatttcgggaacttaccggttgaagactgaagaatgacgaagaacgaatgaagaacagtgaagaatttccacaaaatcgcttacggaagcgttacggaagcacttcggctcgatttttcttcatgaaaacgtgttttttgcccaaaatagccgaaatgcattgcttatgggttatgaatatnttttaaacagcaccacccctcccctatttataggaaaaaagagaggtaattgccgcctagaggcttcttgaggaagattatgaagcgcaccccaattactaagttcaccccccttttcatactttacgggaaaagtacgaaagccttatgg

SEQ ID NO: 82519 - DNA, 112 bp, Glycine max
tcaaaatgcgaaaaggatgccctaggctgccactcgtaatccgtgggttggctttgaaagggggaaaagaattttgaatgttaaaccccccctttcgcattcttataattgg

SEQ ID NO: 82520 - DNA, 471 bp, Glycine max
  unsure (1)..(471): unsure at all n locations
agcttgttgattaagacaagttggaggcgttcttactttcaatacattgacgactcaactcaaaggataaatgtatcatgggcaatacatttatcanatttcaaggcaagatttacaggaagccctgttgctgagtcacacattattggagtgtttatgctttctgtttttgttttatgcatttataggatttcatgtttattatgcttgataagtgattacttcacattngtataagggtagtaatgctacctgctacttgtagaatatgcgttgtcatgctcatgtcatgcctagagggtagtgctattttcttctagtttattaaattaataatgttgcaagcttagctttctctattcaccaataatctgattattgctttattatttgggtggaagtgttatgcaccagtacacatactcagttataggagaatttactatggtaattgtaccctttangtctatg

SEQ ID NO: 82521 - DNA, 418 bp, Glycine max
  unsure (1)..(418): unsure at all n locations
ctagatgtcgtctaaggttattcaagataactcattaacatgagactcttttgaagtccttgccagtgctagtaagtacacaatatgctgtgcaataatgttctgctgtcttgaatcaacaattggctatagattgctgaaccaaaatctttagatgtaattggacaactaacatggtaatgtcttatcttatatgtgttttcaagattcatttctcaagatgcaaagctatggacacaagctactccaatatgtagacaatcgtcaattgaagagttgaaataagtcacaagatactctgatttgtcaacttatattggtgaaggctccttangaaaggtatccttcaatcacacaatagtctttgaaagatatngggatagttctagtggtttaaatattctttatacttcatcat

SEQ ID NO: 82522 - DNA, 338 bp, Glycine max
  unsure (1)..(338): unsure at all n locations
agctntatggatcaaactatttctccctcttttctcttagctnttcttcattcttctttctctnttacctttngttcttcaatcttcttgcacaaaattctgtggcttttccattggtgatgatcatggaaggcgaaacacttcatgaatccaacaatccactccaagtaaggctgaatttgagttctggcttactaattcttatcattgtgaatggtcatctttctcttcaatcctattttctattttcatgattatgattatgcttaggaatgaaaacagataagggtatggattcatttcctaatttcaaaatataattatagattgtntagatg

SEQ ID NO: 82523 - DNA, 423 bp, Glycine max
  unsure (1)..(423): unsure at all n locations
cgatgtagagcttgattgtgtaagagtcaaaagtgtatctattcaatactcgtgacttgagtgaagttagtgaaatttgatgattctccaagaattggacgtactctccatggtagagatgaaccagtataaaactttttgcattcgatctttcttgctctcctttaagttttatctaaccaaaaggtgtgaattncgttttagatttaaatagatatctcgtgtgttctaaaaacatctttacattatctaatagtattttcgaaaaatctataatatgctctctacaaagttttattagatgaaaactttgctntaagtcgaaaaagattttaaatgtataaatcagaatcaatccccatttggataggtgctttacattaaataccaagtatgaatattttacattgatactaaaagctg

SEQ ID NO: 82524 - DNA, 473 bp, Glycine max
  unsure (1)..(473): unsure at all n locations
agcttatctaagaaatatgttaaattataaatttttacttgtattactgcaattttaagataatttgtttttctattgtaaatttctctagtgtaatcattttttttgtaaattattcttagtttaatcctttttctgtaacaaaaaaaattaccctagttttatagcttgtcagaaaaatctctattttgattatttaaaattagattcttccttgcacactnntattaccttttttatatgaagtctaaaaattatgcttttggtgtacaagtacataaataatatgcaatctatatatacganaaacaaaccctgcctgcagtccataagttttagatgtcttgattntgagttattttacataatactttgattcctagtattaatggctctatcattggaatngaaggctangtggccaacatgctgaaatcttcaacaatgctatatttannatcatttgactaatc

SEQ ID NO: 82525 - DNA, 338 bp, Glycine max
aactagctatgagagatacttgaatcatattggggttatataatactttctctctctggtattattagactttgtaaaataatgcattatttcataaaaaagttaactacactagctagtatgataaaatcattctccttgactaaaatatcctcattaaaatagctaaaatctaattgtaaattaggttaaatagtaatatttttgccatagcaaagtatacaatacaaattgctatttttatataactaaattcataataatagacaaattaatatgtacatcatattaaaattaaagttcataataaataaatatttagaacatatggactgtat

SEQ ID NO: 82526 - DNA, 362 bp, Glycine max
  unsure (1)..(362): unsure at all n locations
agctngagaaggtactaacgtcaacgaacatgcangcatatgtcttggtcacaactgacagctgtgggaaatcgataactatgtatgaaatcacagatcacctctccctcaaaggtggagtgatatgcctgcacagcctacagagtgatctcactcacattaactgcatagctctgactgcgcactatgcagttggaaaacacgtattgcgatcacaaaaaacgaaactagcaacactatcttcccgtgttagtaaaaaaatatataaaactcacgtgtttgtctaaccatcaaccaatctttcttcttctatcttgtagatattccagatcctaaatataagcttcaactgtcttatcaca

SEQ ID NO: 82527 - DNA, 228 bp, Glycine max
cctctaagaagcggattccctcttgctgtgcatcgaatcacaatatggtgactcactcaaacttgacgataaccactttccacgctttgtatcatatctctctttcaggctcactcaatcatgaggatagacacttcccaatctatctatcttatatctcagagaggctctctgataggagcgccatgaacgaaagctcctaccctcacatataagactgcaccctca

SEQ ID NO: 82528 - DNA, 401 bp, Glycine max
  unsure (1)..(401): unsure at all n locations
agcttcggaagaaagtgatgaggtacaagccctataggtagagcttgaaagagcccgggtagtcaaagagaagttcaagtccatagccatcaaagtctgaagagagtatgatgaactaagggacgtcaatatggccaccgctgaaggcttgccatatgtcggaaagaaatttgtcccaatagttaagcgagactgaagggaatatgtgggccatcatctatgagtgcaaagagaagctaaatctagcagcgactcacgagcaaaggctagaggatgagtacgccaagatatcagcagaaaggggaagcagggaaagggtaattgattcattgcaccaagaggcaacaatgtggatggaccgattngctcttactttgaacaggagtcaagaacttccccga

SEQ ID NO: 82529 - DNA, 435 bp, Glycine max
  unsure (1)..(435): unsure at all n locations
catgatacatgtcagggttcggtttggttcaaggataaaagggatgccccacattatttccatgacacaaatgcaaaaatgatgtattggaaattntatgcaaaactggtcatgcatgcacctatgtggacgctcaagtgtcaaattattatggtcatgtgatgctagggctcaggattcatttcctctattgtaaatcaacccaatgtttccaaaatatgttcttttatcaatttgtgcattcatccgagtacatttcgggcgtgcggggaaatttcacagcattcacccttcaggtgtagacacattttccaaaaattggttatgatcaatgagattttttcagagaagagctggaaatcatctcttttcacaagcatgtcgagttttcagctagacaactcattgttcttttatctctcttttttttatcat

SEQ ID NO: 82530 - DNA, 395 bp, Glycine max
  unsure (1)..(395): unsure at all n locations
agcttatgatatntgataattgtcataccctatatttctgttcggtgacctttgcttgatgacatgcgacctttctttggtccttgtgaggtgcttggcatctatcattaggcaatntgtgaaattctaggacatgccgaaaaaccaaaaaaaatattgatgcacaatccgtaagttttcgtgacacaccggaaatcaaatggaagcatcgctgcataattaagtgaggttccgtaacattccgtaagtcaaaaaggggatgattatctaatccgcaaggttccgtaacattacggaaagaaaacaagtatcgttacgatattcgtaagtttctgtaactctacgaaaaaagaatcaccaaaaaaaagcagagggggtgtatcttagtaaaatgg

SEQ ID NO: 82531 - DNA, 345 bp, Glycine max
  unsure (1)..(345): unsure at all n locations
agcctgtccgaggcagaagtaatgatggcccgagttatgttggtgaactgtttactaacccggaatgggtttaggcaaagacaacggtggcataactagcctgataaatgccaaaggaaatcgtgggaagtatggtttaggctataagcccactcaggcagatgtaaagagaagcatcgcgggaaggaagggcggtggtcaaagctcgcggttgagacaagaaagtgaaggaagcccgccctgccacataagtagaagctttataagcgcgggtctgggagacgaanggctacgggtcgcaatatacgaagatgatgtttcgagtacattggatttggtacgacc

SEQ ID NO: 82532 - DNA, 298 bp, Glycine max
  unsure (1)..(298): unsure at all n locations
agctngaatattctattatgacggcatctattcttgctatgatggaggccatcccagtcaccctcattaagaagtaattcttttattactctacagactatactagaacacaccatagagtggttctctatgtgggtcttatgactgatctgcctcatatttactgagtctgacctacagtccgcttctttatgtataaaacaagcgtgccaggtgaggagaatgatgtccaacgcgaaacgggattgaccctagacaacctcaaaggggactgtttggggttattgaaccccctgtg

SEQ ID NO: 82533 - DNA, 459 bp, Glycine max
  unsure (1)..(459): unsure at all n locations
agcttcatgatgatgaatcaagttgattcatgtatgtttgataatgacaaagatgttgagaaaaatcccaaagaatgatttcaagattaaatcaagaacaaattcaagaataaagagaagtttgatttcaagattcaagaaaagatgaattcaagtttcaagagaagaaaccaagacgacttcacaagggaagtattgaaaagattnttcanaaaacaacatagcacagttttgtttttcaaaagagtttttctcanaattntctaagttaccagtgtttttactctctggtaatcgattaccagtttcatgtaatcgattatcagtggcaaagtttgatttcaaagctttaaatggaattacaatggtccaattattcanatggtgaatcgatacagatatgctatcgatacagtgctctgacgtgggaatcaatcaatggagagccatcttcataat

SEQ ID NO: 82534 - DNA, 417 bp, Glycine max
  unsure (1)..(417): unsure at all n locations
tctactgcaataagagatagtagggacttgctagagagtatataagggtgctagagagtatatgccacgatttaattatgacatacaatagatatttgagtttttctcttaaaacttgtcacattgtcacaatgcatattagtactaacattatttccagctacttgtgagatatctctagtggtaagaaagacagaccttactatgtatccatgcctctcacgtataactcatgatattatatagatattnttttgaaggtcagggcttaaaagcctgaacactatctcaattggtgggtttatcctcctcatatngtagttaggcctggatagccaccacatacgtcaaggggaggcaccaccacttcaaggcgaccaatagtattcttggcagcattgtctgtaatctcccgac

SEQ ID NO: 82535 - DNA, 450 bp, Glycine max
  unsure (1)..(450): unsure at all n locations
agcttatcacatttgtgatagttaataccacttaaacatattgcattntataaattaaaactaactaagtcatattttagttgttaaaataattatataacacattaatattttcactaaaactatattagcattttctataaattgagcaacctacaagcttggtagatttttctaaaagcttacaagctaacctacttataccagaaagaaacattntataaagtgtgtgcatgaacattttgctaaataaactaaggtaggccataccttaagtagaataagcattataccttatatgaacaacctaacaacttaattatatttgaagccctagctcatacaagcatgaatgtgtataaaggaatngaatccaatgtaatgaatcgtatcttatgtgtgtgtacgtataaatagatggatagagaatggataatataatatgacaat

SEQ ID NO: 82536 - DNA, 422 bp, Glycine max
  unsure (1)..(422): unsure at all n locations
cataggaatgtcgcattcccaagttcactctctcttgcattgaaacaaacaaccttaagggttaaaatcccactcctgtacatgatgattgcttcactgtcctattgtcaatttttccactaccatccctggtcctgctntagagcagccatcactaccttgagcaaaggctctgacagatcagtaaaaaaaataatttctaatagattttgaggattaatggatggagaaccattgaatggcaatggaaacttatgatggtgtcatgatgtgcacatatagaggaatgtagatctcaagatgctcacgactgtacattgaaataatgtgatctctaacgactatcggaagtgagaccgacaaatntatagagagacagagcaaagactanaatttntatcacaagctttgcaaagaacaat

SEQ ID NO: 82537 - DNA, 401 bp, Glycine max
  unsure (1)..(401): unsure at all n locations
tcaagcttgggactagtcaaggagatgtgagcactgcggtgtctcctaactggttttacttatacagaattgataaggtggctggggaaatctgggagggttgaagatgcatacatgacatacaagaatatgctgaaagatggttgtaaacctgatgtggttctgatgaataatttgattaacattctgggaagatcaaatcacttaagagatgctattaagctntntgatgaaatgaaattgctgaactgtgcacctaatgttgtgacatataataccatcatcaaatctttatttgaggccaaagctcctctttctgaagcttcttcatggtttgagaggatgaaaatagatggaatagtccccagctcatttacttattcatttctatcgagggtact

SEQ ID NO: 82538 - DNA, 487 bp, Glycine max
  unsure (1)..(487): unsure at all n locations
cttagaaactaagcgtggtctcanacctatcatgcataaataagagtcttttgtcttctctctgtaatcagaagttgcattcactctcaataaacaaaagttatttgtctctcatatgtcatatttctatagatcctgaaataataagtgatcacgacaacatagcaattaaaggcatgggtaaatatagcaatcaattacattatctcaaaagcatcaacaaatcaaaaaatatgaacattgacaatctaagggcctttttagctaggaaaacatttcctgtttttagatataattacaaaaatgccaccttgttttactgtgttctagttttaatatttcatacatgagaagtgaaacaacatctaagaagatatccttaggctcatatatatattattatgaaaaaaggagctcaacagctatcatacgataaagcattaatttataaaacaaaaatcatcttagagtcaacgatgacacacaa

SEQ ID NO: 82539 - DNA, 347 bp, Glycine max
  unsure (1)..(347): unsure at all n locations
agctntacgtggataatgcgtctaacataatattataaaaaaaaagcggggcagagatcatcctcaaaggctctaacaatatcaccctagagcaatccctaaagatcaacttcagagccttaaacaaccaggcagagtatgaagcgctcattgcaggtctgaagctagtaagagaaatcggagctaagaagctgtgatgctacacatactgccagattgtccaaggacaggttaccaacacataccagaccaaggaaacaatactgcttaagtactatcacatcgtgaagactctcatcgaatatcttgaatggttggaaatgtacttacattccagggaaagcaac

SEQ ID NO: 82540 - DNA, 445 bp, Glycine max
  unsure (1)..(445): unsure at all n locations
ggagagtatctgtgggatcgaataatatgatctttgagctgattgatcttgttttcttacataaacagattctgcgtgtttctgtatgatatgatcaaaactttctatatctctccttaataactcaatatggtcgttagacttataaaagaaatataagattgattcacanatttattccttctaaacagaattatataaactagcatagactgataaacacaaataaacattcataatacaattggtgtttggatggactgaacgagtatttcttggttctagtagatgagttatccactaatggataagtctcacctggtgttacttccagtcatcaaaccttgtgacttatatgcaatataatagttaatgccactntatatctgttgtttcatcanaaccctaagagatgtctggggtcgctagtgatggatcatcaagt

SEQ ID NO: 82541 - DNA, 366 bp, Glycine max
  unsure (1)..(366): unsure at all n locations
caagcttgacttgagtcatcaagagattataaatatgtgaccatggcatgagtttcaataattatcaatcatctttgaatcatctatctttcaatcttttttcaacatcatctctcaaataactttcaatcaatctttcaatatctttctacagaattttctgattcatttctcttcatctttctaaaagtttttgatcaacactttctcttccaagaaaagttctttgttaaaaaacttgtgctattcatatntttcattctcttctccctctgccaaaagaacgaaggactaaccacttgaaatcttttgtgtctctcttatcccttacaaaagattcaaaggactataccgctgagaaatctt

SEQ ID NO: 82542 - DNA, 165 bp, Glycine max
tatgattgagctaaatgtatatgcatggaacaacaaacccatcggtcatcaccacttatacaaaaactattctttgctgtgataacagaccaacctctcccaatgtgctttgtactcattatttccaccatgtccttaagacaaaaaccaacaggccaaaatatg

SEQ ID NO: 82543 - DNA, 337 bp, Glycine max
  unsure (1)..(337): unsure at all n locations
agcttgcttagcacaaggagctactntggaatccaactgtcatgtgcaagtgcgctaagcgtgcaccatgtggctatgcacagggtcacttaagccaactagatatgttntctctacactcaatgtgcccatcttgtttagtgcatagtcaatgttgaaaaacataattgtgctcgttttaaagaaaaaaagaagagggaactcgggggatgctattaagcaacaaagaatgagagctatggcgtgaaaaggaagggaaaccacttactttggagcatctaccttccacttttctccatatntctttcacccacantcatttcctctaacttctttt

SEQ ID NO: 82544 - DNA, 418 bp, Glycine max
tcaagaattatggcctcatcacactacttgctttccgaggtgtatattctataaagagacctcccatctttaatggagtgggttaccactactggaaaacccgcatgcaaatctttatagaggcaatagaattaaatattcgggaagccatagaacaaggaccttatgttccctctataatggccggaagtgcaacaatagaaaaaccttgagcagattggactgaggaagaaagaagattagtacaatataatttaaaggccaaaaatattattacatctgccctacgaatagatgacatacttatggtttcaaattgacaagtgctaatgatatgtgggatacactacaagtaacacatgatggcgcaacagatggtaaaagatctatgagtaacactttaactcgcgaatatgaa

SEQ ID NO: 82545 - DNA, 377 bp, Glycine max
  unsure (1)..(377): unsure at all n locations
agctttacagcagatattagtaatgacccactaacctagaattaaaataacttaatgccattaacctagggaattaaaaaaaaacttaatgactgagtgtaactgaaattgtggcaaccaaaagtcacccccaacagccaacaagtcagccaccatttggtctcccaaaaggctgatgcctatgntgccaattgggcccttattacatctttgactaaacctaactaaagcccttntaatngattaacccaaaacatatttttggtcagccaactttacaaagattgggccattatntatacaaactaaacactctaaaaattgagacaaagtggtgtcatttagtccttctccatatgggccatgatacaactcac

SEQ ID NO: 82546 - DNA, 150 bp, Glycine max
tacgtgagctcagctgaatgtgggcaattggggatggagggttcatgtttgatttgcggatgtgggagagttgatttgccccatcgcccgatcaccacctagtaccacatatgacgggtaccccataatccaacaaacttgatgtgagaa

SEQ ID NO: 82547 - DNA, 464 bp, Glycine max
  unsure (1)..(464): unsure at all n locations
agctnggccctagtcactgctgaggtgtcttggcttcagtctcttttgactgaacttgcagttccacacaagctgccagtcatccattgtgacaacactagcactgtgtcacttgctcctaacccagtccttcatgctcgcaccaaacacatggacttagaccctgttttttgttcgggaaaaggttctgaacaaactgctttagagttgacacagctcattgtaatgtggcttattctttcagatcaatgataaaatctacttacattttctctcanattctatcaagaatcaacttctatgtcctgtgttgctggtgttacatctccaaagcttcttcatgattgcgttgggtcatcaaaattgtcaaaattaaagcaaatggatgaataatgagtggtttgcagaactagatgtttngtgttatgcagaactagatgttgccaatgattaaattactacct

SEQ ID NO: 82548 - DNA, 490 bp, Glycine max
  unsure (1)..(490): unsure at all n locations
agcttgcttgtggggcttcaatggaggctggatctttgatcttcaatgaggtcctttaatggtgattttccaccatagagatgcagcggaagacaaaggagaagaggtaagaggcggcgccatccactagggaataagccatggaagaaggagcttcaccaccaagatgagccttggataaaaagcttggagaggatgcttcaatggaggaaaagaaagagggagagaaagagagaggggggagcacaaaattgaaggaagaaaaagggagagaagttgaactttgagttgtgtctcacaagactctcattcatcaaagttacaataagtgttacacatgtttctatttatagactangtagtttccttgagaagctttcttgagaaaacttccttgagaagcttctttgagaaaacttccttgaataggtagagcttagctacacatactcttctcataactaagctcaccttcttaagaagcttctta

SEQ ID NO: 82549 - DNA, 417 bp, Glycine max
  unsure (1)..(417): unsure at all n locations
actaagcttttatccaggctcatcttggtgcgaagctccttcttccatggcttattccctagaggatggcgcctgctctcacctcttctcctttgacttccgctgcatctccatggtggaaaatcaccataaaaggacctcattgaagctcaaagatccagcctccatagaagccccacaagcaagcttccatcaagtggtaatcaaagcacaagagcttcaagtaagtgctccctaaacctccattaagatggtgctgtaccttctcttctattgaagttcttcattattctccatgtatctcctcacatgtcttgcgctaaatgtttttaacatgaatctttagagttttcaccgattaaacttnctatagaagctagatgtgattctctatgggtcaaatttcttgtctatgtc

SEQ ID NO: 82550 - DNA, 444 bp, Glycine max
  unsure (1)..(444): unsure at all n locations
agcttgatccttgaatattgattcttgaattcaactttcctcttgaatcttgaagtgtccttcaacctttcctcttgagtcttgaactgttcttgattccttcttgtacatcttgaactcatcctttgattgacctttgagctttttgtcattcaccttgtcatcatcattgttatcatcaaaacatctttgaatcacttttgattcaccatgaagctttgcttctacaaagaagataacacagagaacaaacaaaacatcattacatagatagaaatatatntacattagatacctacagggaagatccaatagaggatttagctttccatagtccagaaacctcttttacaacaaagagaagaacaagatgaaagactgcaaaacacaagtggtgaggatgtcttcttcacctctaggatctcacaatcaatcacaaactca

SEQ ID NO: 82551 - DNA, 425 bp, Glycine max
  unsure (1)..(425): unsure at all n locations
actaagctagcggacagggccggcctaacgagttcatcanaaaacccagaaatttatccagaattgatgaactcgcttagcgagtacattgagatttccagaaaaaatggggcttctaagcccttactattcaaccactttcaagcctaagaatcctatgcaaaacacatcaaagcaacctatattacatgcgaaattaaacccctaacaacatactatctaacaactaagcaatcaacaacaatcatcaacacaaaaacacaattacagagaccacaacatggcttctatcctagggttcaaaaatagaaactaaaaagggaaagtcagatgtacttacttggattacagaggttgntgagtacaaatatgggcanaagaagtanagaatgcaagatgaatatactgcagggaatgccaatgat

SEQ ID NO: 82552 - DNA, 375 bp, Glycine max
  unsure (1)..(375): unsure at all n locations
agcttccttgagaagctagagcttagctacactcacccatctaanaactaagctcacctccttgacaaaatacatgaaaatacaaaaaaaaaaaaagtctctactacaaagactactcaaaatgccctgaaatacaaggttaanaacctatactactagaatggtcaaaatacaaggcctaaaagaaggaanaacctattctaatatttacaaagaatagtggatccaaacttgacccatgggctcaaaaatctaccctaaggttcatgagaaccctagggcattctttagtagctctagcccaagcctcttggagtcttctatccaataccctnggggggtaggattgcatcagaaggaactgctcatttatgt

SEQ ID NO: 82553 - DNA, 332 bp, Glycine max
cctctagaatattctagagatgtgcggaactctttggaaccttatgaaaggatatggaaaagagttgaagagtgtagagactcctataatgtgtggagcattctagagaattaatctccaccctaggatacaagtaatctccaccattcattgtggaggtggagtagtctaaataagggtaggagccttcattcctatccatccaagacaagagtgaatccacttcttatagtgagaaaaagcctctctgagagagaagataaatagcttgcgaagtctctatcctcaagcttgagtaagtttctctgagagagaagataaatagcttggga

SEQ ID NO: 82554 - DNA, 473 bp, Glycine max
  unsure (1)..(473): unsure at all n locations
agcttttatttcagctctgattgctgcaaccagcanagacccaggaataaaaaaataaaatttgaaggaaaaagcaaaatgggttcgatgatgatgggtgtacgtgacactgagctttttcttttcttcttttttccccccctttttttactattatttttcggcctcgcgaagaacgaaatgatttgagattgaggcttctaatcttagaccgctgctttcagataaacactgcattttttatgggttgggaagagtttcgtttattttcgagtatcgttcggagtaaggagggttgagtacgaccaaagaaaaacgacatcatgagtgcgctccatgccgcttaaaacgacatgatcgtgtcttcgtttggcaatcataagatccaccacatgtctgttctaaaagaaaattattatggagaatattaaattaaaaactacaaagntgacaatttatagattcacaccacg

SEQ ID NO: 82555 - DNA, 370 bp, Glycine max
  unsure (1)..(370): unsure at all n locations
cttgccttctgcatataaccataccgctttataaactcttaataataatcaaactactgagaagaaagcttttaactgaaaagttntggttgtcatggagagcgaaacgatagtctgcatatctccatctctagaattagcattaattattatattgattgctacaatgttatcatgatactatacttctgcaggtaggcgttgttattgtttctatagcacttcgtctatacaaacgtgaaagaattcgagtcaatgtgctttgccctgaggtaagatcatgattataagcatgagtatttcttatctacattattactcctcaatatgtggaaatatggaatactcttgtgacattgactataacttt

SEQ ID NO: 82556 - DNA, 458 bp, Glycine max
  unsure (1)..(458): unsure at all n locations
agcttgtcttctacaaataaatcaaaatcaattttttgatctttgatgtgccattattttctcctatttcttaaccctttttgcaccattntaagtactgattaattntaattgtcaaattaattaggcagttttattatttgggcccattaagctaatttgatgtttttaatctaatttcagaaattaatgaagcattgggcttgaatccagaattgggcttggatttgaagaggacaaactattttattctacaaaattagatcttatcttatcttatctagatattatttagatttgatctcatctagatattatttcagctagatcttatcttatcttatctagaattgatttgattntatttatgggcttggatttaanacagaattgtatgctttggnngctaaaaaaactatataacagcatcaaggttctnagtttggcctctcttctct

SEQ ID NO: 82557 - DNA, 489 bp, Glycine max
tatcagaacaacattgtttttcacaatgcaacaatgagaatagaaagcacatagaggaaattcacagaaccaaatgagattaacatcaattcacattatgtttctaaagaatataagagaaaacacccgattcactcacgcagaggaaaacctctcaaaggtgcataattctcatgcaggcaattgttccatcacaattccaatcactgatatgtcataaatcaatttttgcaagtcatttcccatcgaatcacagataaattgcataatcatcatggatcattaaggcttttaggatttggactagctttgaaagaaatattggtttttctggatattcacaaataccttgagaataggaaagcaacatataaacaaactgacaatgtaaaataaatcattacttcctatcccttcgcatttcaaccaagttatcactacttgctataccagaatctcgactttatatatttacaacatctctataca

SEQ ID NO: 82558 - DNA, 476 bp, Glycine max
  unsure (1)..(476): unsure at all n locations
agctntaacataattatgcccattaccaatatttctaaaataataatagattataaataataatagattctttattaaaaagtgtagtataaattcttttgggtctatactatgatttaaattgttatatttagtatgaagtattaaccgaaaaaagaataaataaaaacttgttggaattttcctttcaaaaccgttataagagcattntctagacgggaacattagcttactgcatttctacacgggaacatattaacagttaggtagttttatatatttacagcggtaatttctaactactataaactntaggctttgcacaaccgcttaagttcacgcggttttttattgtttcagcggtatgaggctgctnttcccggttagataccggttgtggcaagcggtttaagtatgttcggaccggctaccattcgataccggnttaataactttgcttgacatgtgctcatatt

SEQ ID NO: 82559 - DNA, 475 bp, Glycine max
  unsure (1)..(475): unsure at all n locations
ttagaacaactacaattatttcttcttatgtttgtgaacagccacaacattctttagtcagagtcagaaccggccaacataacatgcatgctgatttttaaccctatccagtgaattaagttgaattttatatagaattgtgtaaaaaaatattttatgcgcagataatatatttgaagatgaatcaaacatcatagaaagaaaaatatatcttttacaaaaagaaaatatacagaaattaatggcatgttcagatagacggaaagataataaaaagggaataatacagatgattatgtattctttntaattggagactaagaaagacaataaagagagaaacgtttacttttagagacaaaggntaatggctgtttcttcttagtttcttctccattcgaagtaaaataaaattattcctctctcatattctttcctttcgttcaaacacaagctaaagacatttctttcttca

SEQ ID NO: 82560 - DNA, 426 bp, Glycine max
  unsure (1)..(426): unsure at all n locations
agcttataacaatatacttgtccttcatttatctgtctttgggcttggcggccacgatcaacaaagtactttcgacacctactatatgttgatttgaccaacgctgttatcggtatgttacgacaatccttcaataccttatttatacattctgagaggttcgttatcatgtggccatatcgacgtccttctctatcataagccatggtccaattttcctttgaaatgcgatcaatccatgttgctatggctggactcagttgacgaaaattttctaaattttgatcaaaaatatgcttgcaaggagtgtagcctgcatgaaattagttagcaacaataatntgaagtatacatgaaacttaaattaacatgaccatgatanatgaaatcttacccaatnttttcaacatttctttttgttggcat

SEQ ID NO: 82561 - DNA, 458 bp, Glycine max
  unsure (1)..(458): unsure at all n locations
ctataatctagagacatagaaggtgattattagcagagacttggcgtttaacgagaaaggcatgaaggatcggtcttcatagtctcaatacgagtcgatggtgatcgctgacaaccatgaagaaaattatgaaaggctactagatccaacacctgatgagccataatcatccaggaggccatagaggaatcctcaactctcagctagattgcacgattatgtcatgtttaatgacaaagatacatctaatgaagagattatcaattttactttatctgcagactgtgatccagttatttttgaagaagcctcangtgacgagaactggagaaaggcaatggatgatgagattcgtgctattgagaagactgacacatgtgagttggtggactngacaacatacaaaaggccatcattatgagtaaaatgggtggacaagactaagtacantcctaaag

SEQ ID NO: 82562 - DNA, 437 bp, Glycine max
  unsure (1)..(437): unsure at all n locations
agcttatttcanattcattcattctctngaattgcttgttgttggttactttgtaanaatgggaggtttgcatgcagggatttcctatgcctagctaattcatcataaatgatttgaagtgatgatattgagtgttgctctaagttgcaagtagaatgaacaaaatgaatgagttggtggtatgacctataagtgaattgttggtgtgaaatgccctcgtatttgggtaagattctgtgaaccactgtgatctatatactttttagtttgatttagaaattgggtacaatgtgtggctatgtgtttaatttcaaacacaacaagagtgaacatttnttcatgtagctaaccattttggtgcatnttttcatgtagctaatatctattatggattttcttatntaatgaggtncatattatcaacagaatcatactat

SEQ ID NO: 82563 - DNA, 391 bp, Glycine max
gtagacatgctaggaagcaaagatagaagtattgctggtatttaaccagcgatgtcaacgaaaagacaattttgtgagtattgccaatattatatcttaacttgctatgttcttgatattgctttgataaatattgtttcataaatattggatgtatcattagctccatatggacatatgaatattgtagctattctcaccctccctgctcttgcacgatgcactcgtttaaaggttgtcactcaattcgacggttttatagctttatggaattttacacaatgcatctgccatgttgaatgtgtcctttatggtttgtcttatgtcttatctagaaagaagaatggtgtccacaagacaacaaccacagatgacttaaggcttcaaagca

SEQ ID NO: 82564 - DNA, 304 bp, Glycine max
  unsure (1)..(304): unsure at all n locations
agctntggaccttgcttttaaggccaagctctgttcgatcgagtggcctgcggtccccccatggtatgcgcaggtcgtgctagggttataccattttgggaatggagactggaagatctttcccgggaccacgacgaccaattggttggcgatgagagatggtaagagttccccatatgtcattgggatcggngcaaaaatttgtgcccgccttggcgaaaagttccttgccgtgtttgcgccanagtgaacattggccgggtgaggccgagtcggagctggagcccgaagagctcccccctgt

SEQ ID NO: 82565 - DNA, 237 bp, Glycine max
  unsure (1)..(237): unsure at all n locations
tgacattcatccacggagatgtcgcccaatataatagagaagaagtgagaggaggcgctgtctactatagaatacgccatggtatgagaagcttcaccaccaatatattgtcttgcctaacaagcttatagaagaatcctcaatggaataaatgactgagatagatgggggtgaattcgaagtgtgtctcacaagtctcacgtncactccaaagtatgacaatgtgctacacaacgc

SEQ ID NO: 82566 - DNA, 468 bp, Glycine max
  unsure (1)..(468): unsure at all n locations
agcnttcttgagaaaacttccttgagaagctagagcttagctacacacacccctcttataactaagctcacctccttgagaagcttccttaagaagattcctaaagaagctagagcttagctacacatacctctctaatagctaagctcacctccttgagatgagaagctagaacttagctacacacgccctataatagctaagctcacccncatgacaaanaaacatganaatacaaaaaaggtccttactacaaagactactcanaatgccccgaaatacaaggctaaaaccctatactactagaatggccaaaatacaaggcccaaacgaagganaaacctattctaatatttacaaagataagcgggctcatacttagcccatgggctcgaaatctaccctaaggctcatgagaaccctagggcctaccctgggatctctagcccaatctacttggagtcttct

SEQ ID NO: 82567 - DNA, 334 bp, Glycine max
  unsure (1)..(334): unsure at all n locations
gttgcactagtataatggaggataatcaatatcttgacctggtattacaaattcagtcccgcccagatgaacacccttccctttctgtgcacaaggggttaatcttcatagagaaacacatttggntgacttttactaatcctttcacctacttgcttatggatgagttgcaatcaacccctctcggaggtcacactggaattgaaaaactatgcaccgccttcggcagaactttgattggcctaacatccattctgatgtccgacgattcgtgtcccagtgcctcacttgccagctgacgaaatatgatacgaagaaatctccgggcttactt

SEQ ID NO: 82568 - DNA, 462 bp, Glycine max
  unsure (1)..(462): unsure at all n locations
agctnngaacatttctttgcttgacaattcccaacataggtgttaagctgcaacccatgtgtggtacaaattgtttgcaaggatggctacacgatcaacaactcaatataaattggaatatttctttgggaggttttgttctacttctattcacaaaatagaggtgggtgagaattacacttgtagttctgagcatcaattggcaagttagaatgtgattattgaactcagaaaattatattatattcaaactcgttaacagttataactcttaagcctatcttccatcagcatccatgtgtgatcaaatgtatattgaattatgctctactttttttatcacaaaagaacgtatatgaactagtagttcggtaagaaactacatatgtatagtcaatngtactgaaactactcaattctctgtatagatatgtggaagaaactattatatacttctattga

SEQ ID NO: 82569 - DNA, 345 bp, Glycine max
agctttgagccaattaagacgacaatatctttttactcttatgactgagttgagcccgtcatatatcgagacgctcgaaattgaatgttgatgctctgagcacactcaaacgacaataagatgttactccgatgtttgatggagtccccgaatatatcgagacgctccaaattgaatgttgatgctctgagcaaaatcaaacgacaataactttgtactcggatgtctgattcacggccgccacatattgagatgctcgaaattgaatgtagaagctcttagccaattcgaacgacaactacattttactcggatggctgtttgagtcccgttacatatcgagac

SEQ ID NO: 82570 - DNA, 396 bp, Glycine max
ctggagtgtccaagtgccaattcgtctacttctttagtccagtttttttctggactcaatccatcagggggctctccttctgtgtccagcatcttgggatgttcccagcctttgatgacagctttccatgctctgctatccaatgatttgaggaacgccaccatccttgctttccagtattcatagtgtggttccatccagaattggtggtctgtacactggtcctccttctttctccacggtcatcacaatatatcatcctaggtctcactcagagatttcgagtgcctgctctgataccaattgaaattctgataccaatgccagatgtcgtacaggatgtcacgacatcacgctttaaaacatgcagattatctctgagtgtatgaacagatt

SEQ ID NO: 82571 - DNA, 370 bp, Glycine max
  unsure (1)..(370): unsure at all n locations
gatgtttctaaagatatgtcatggcgatcccccggcctaattgtataaagcttaatgcaaatacagtagttaatatggtggacagcgtagcttcctgtggtgagggtttaagagatcatgctttcggatttgattggcctttgcaaggaagattggcattatttcgatgatgtttgctaaacttaaaaccattcaatgtggagttcaactttcatgcgacaagggcttctctgntgttgaagttgagagtgactctcaagaagctataaagttgatcctaagggtgtgatgagactcatcattgttcttcactagttagggacattaaagctctagcctaggagcgcaatatttcctctgtgcatgcctt

SEQ ID NO: 82572 - DNA, 155 bp, Glycine max
ggatatgaatagacaaggcgtggctgcgctgtaattttgtcatgcaaactccacgctgaaatacacggataagatgaggacgaacccgcgacttgccaacaccttcacgggaaagaagccgcgctatatcaacaccggggtgattgagatggacc

SEQ ID NO: 82573 - DNA, 462 bp, Glycine max
  unsure (1)..(462): unsure at all n locations
agcttgtaatggattacacaagtcttgtaatctattaccagaggagattttcagaaaataatttccaagagtcacatctattcaaacggtttatgaatggccatcaagggtctatttatatgtgactcggaaacacgaatttaaagagagtgtccattgcccaaaaagttttatcctctcaaaagattaagagagtttttctgaactgaaatgtcttatcctctcaaaaagattccttggtcaaccacttgtatatttaataaggaattnttattgatcttcattgtacaatctatctantttaagagagatttcttcatctcttcttcttatttctaanaagggattaagagaccgtgggtctcttggtgtagaggattcttgaacacaagggaagggttgtccctatgtgattcagactttgtagaaggaagtttacaaagagagtggaanatctcaagt

SEQ ID NO: 82574 - DNA, 483 bp, Glycine max
  unsure (1)..(483): unsure at all n locations
gttcatcaatgcacacacttgcatgtattagagaagggaatttcatgccatctatttacacttgagaggcaagtccacatcatatattcattttgggaagcattcaaacgtgtgtacatttataaagcacttgaccacctattcaacatatacacattttatttgaagggtcctctctctagctacctatcctatacatatatgtacatggttaataacatctntacacaaactacgcaaacatcatggtgcaaccccaaaaatcagccgctggcctaaagggaaatccctatcacaatgccctcatttttatgctttcttgtattgaaatcaaacgcttgggttcctaggcctaaaattgcattcgggcactcattntaacctctacatgttgccctatacatataaacagcccacaatccaaagttacaaaacatgccctatgcattaggcacttaccgacacttgggggctatgttatgc

SEQ ID NO: 82575 - DNA, 438 bp, Glycine max
  unsure (1)..(438): unsure at all n locations
agcttattaattgtcatgaattgaaccctgttctttatatgattatctcctaataccctgtttagattctaggagtgcatatggttcaaggcaaatttactctaaatttgggggaggaaagtcaattagaatgataagaaaaaggttaagcatcaacacacacaacaaataagttgtatgttaataagaatgaagaaaaagaaaataagttgtgcttgtatcaaaaggtcgaaagcaacttaagaaaaagggaatagtgagaatgctatttatgcaaaacaagaaaagatcattgggattagtctaggactggtactctcttataatctaaacttttgaatcctagaaaaaccattgaattttttgagccacaacctcactacaagcctgagaaaagtcttctgattcnngttatatatttttgacttgatgacatga

SEQ ID NO: 82576 - DNA, 437 bp, Glycine max
  unsure (1)..(437): unsure at all n locations
tgctattacggacacttgaaactaagctcttggagagaacatgggaccactcatttatctcttaactgaagtcgatctagtcaaggtctgagagaccatacataggtcctaacgatgtctaatgatgagggccattaaatctatcatatgctggccatatccgataagcccatgaatctcttcgaggtggagcacgcgtctgccatcgccttggccttggataacaagcagggaagttcttgactcccattcaaggtaggagcaaaccggtccatacacatggatgcctcttggtgctaagaatcgatcacccttactataacctctgtntccgcatatccttgagcatactcatacacgattctatgcttgcgggccgaggctagacctaactcttttcggtacttggctacatagctaacaagtggtctccgtct

SEQ ID NO: 82577 - DNA, 450 bp, Glycine max
  unsure (1)..(450): unsure at all n locations
cacattcttggggttttctccttcttccatggcttatatcctagtggatggtgcctaccctctctcttctctcttgccttctgttgcatctacatggtggaaaatcaccattgatggacttcattgaggctcaaagattcaacctccatagaagctccacaagcaagctttcaacacatactgacaaagtttatactattttcatgtcatatgaagtatgaaacatgggctccatcaatacactgaccatggataattaaagatcctaagccatccccctccaaagatgcttaaaactctttaaccactctatttctcctcaccaggatgtctaacaaggtcactacacnccccatgttcatacacatcatacaacgtataaaacatgggctccatcaatgcactgaccgtggatattaaagattctaaccatccccctcagagatgctt

SEQ ID NO: 82578 - DNA, 326 bp, Glycine max
tcacgttcatattggcaataagtgcatagatgagaggccttctcaaagaggcaacatcgtgctttctcataaggctaaagcactatggtacttgtacctataggctcgcctgcataagactcatagaccttaccttcatctgttacaagactcaaaggcctcgctttagtctttcataagactcaaagacctctatctttatctttcatacgactcaaagtcttctgtcatatttgcttcttagaggctattgaagtctacattgtcaacaagagacaagtgagtttgttggcacgtggagacaaattatggtgatacgctcccct

SEQ ID NO: 82579 - DNA, 405 bp, Glycine max
  unsure (1)..(405): unsure at all n locations
agccttgtggatttanggattgagggctgtttattgttgagtttgtgttntggaagaaaaactagaagaaaaaggtttgggtttaggtgtatatttcttttcatagagtttggccaacgaaactgttctaaggagtgatgtangtgattgtgcaatgacatcccttctgatatcaggttttaatcctcccacaaagcaatccaatagagcttcttgtgtaattccttgtactcgattagctaaagccgtgaactgtacgtaatatgactgaactgaaccaatttgagtgagtttaaacaactgagatctaggacattcatacgttgaggggccaaattctatctctaaggctcgcgtanaagcaatccatgttttgaatgaattttcacaagtcatcatttggta

SEQ ID NO: 82580 - DNA, 373 bp, Glycine max
atcctgagaacgcaatgatctagccttacaagctcagacaagcagaatgtttgacatgctaggagacgaatctcaaaagaacaatagagagtggcgtgatgagaagtggagaaagactgaagattcaaaatgtggtgattctggatcatcttcacagacagctgtgtcaaatccaagaagcctattctcagggaaaaagaaatgggtcgacaagaagaatgtgcagtgttacaactgcatgaactttggccattctgcagctgattatacattcagtaaaggctctcatgtgaaatgtgaagaataaaggttggcacaagaggagaatacagaagatgatcactatctgctgatggttaccaccacaaatgat

SEQ ID NO: 82581 - DNA, 417 bp, Glycine max
  unsure (1)..(417): unsure at all n locations
atcctctgagtcacctgcngctgcagcttaacatcagatcacttccagggtactgtatctacttcacatggacttgatggggcctatgcaagttgaaagccttggaggaaagaggtatgcctatgttgctgtggatgatttctccagatttacctgngtcaactntatcagagagaaatcagacacctttgaagtattcaaagagttgagtctaagacttcatagagaaaaagactgtgtcatcaagagaattatgagtgaccatggcagggagttagaaaacagcaatgttactgaattctgcacatctgaaggcatcactcatgagttctctgcagtcattacaccacaacaaaatggcatatttgaaaggaaaaacaggactttgcaagaagctgctagggtcatgcttcatgc

SEQ ID NO: 82582 - DNA, 419 bp, Glycine max
accctatgcctaaaccagcaaccactctatcttgcactgcaggcctgtaagctttggttaaagattgattgtattgagctgaaacttgactctcgcctgtatatgatgcaacctgcattggaggaatgtgtatcttttatattctactgtctacacacatgttaaagaacaagattgacaagtttcattatgaagagtggcatacttgtcaaattgaatcaattgtgcgctctactatagttgctgcttcagaataagctgcttgttcactggatggcaacattgcgcaagtaaagttcatcatgggaccacagattacaagaggtggaatacaagatataaggacaagggttagaagccaacccttgatgaatgctatgactaaacgtcctataaaacatgccacacactgtatgaat

SEQ ID NO: 82583 - DNA, 423 bp, Glycine max
agcttattaataaatcacattgatacgaatatgatagaaggtgtgcaggcagcaatgcccaagaggcatagtatccatcccatgcacctaagagattatgtgacgtcgtgaggaagctgagggatgcatgcaatctggtagctagcgcaagaaggttcgagaaggagcaattagttgaggcttgcgttagaccgttaagacgttgtaactaccactcagaggttataaaactgtatcttccctcttggtgaaggggacatgatagtaataaagcttcttcttcctagaggactatctctctctctttcttctgtctattcttcgtctcagggaggttagctaggggcctcgaataccctgagctatcacttgtgctttcattgacatgccatggcggaagcttacacgtcgaaagtcaacact

SEQ ID NO: 82584 - DNA, 474 bp, Glycine max
gaacttaaaactaagctcgttcataaaaagctcttttaacctattgtgctctactttcagtcaagcttatgaatcatttgatacagtgctgagttgctgattaagtaagcgcttaattaagctatctaccccaacaaacccttgattattacataacgaatgtaattaataaatacaaatgatataattttcctgattactacctttgcttggcatactgaactttggcactctactgaacttagacataatgatacacgtttcgaatacaaggcataattgatattctgataatataatgatctacttggaacagttatatcatatagctctacaagtggatccttcttacaaagcagctgctgagtgcctatccattgctttaactgatattggtaccaacatagagcttgctgagacactcacgacagaattcacaaatattttgaagctctcacaatagatccacactat

SEQ ID NO: 82585 - DNA, 328 bp, Glycine max
  unsure (1)..(328): unsure at all n locations
agcttaaataatgtatattcacactatgtattattaattgtgtntattccttgacctgtgtaattagcaccattgtctaggttaattagatagagttttacttcttttggtaaaagccaagttgtcttttatgcctaattgatggaagcttgcatgagaagcttctatggaggttggatctttgagctttaatgaggtcctccaatggtgattttcaaccatggatatgtagcggaagataaaggataagaagtgagaggaggcgccatccactacggaataagccatggaaggaggagcttcaccaccaaaagagtgccttggacaa

SEQ ID NO: 82586 - DNA, 434 bp, Glycine max
ctagtagagcgggtctaagacatgaaggccaactcttcgtgatatgcgaggatgactcccctaggaggtcggatatggtagggccatgtgctcctggtttccgactaggaaattggcgagtggaggagcgcccacacgtttacactacgagcataatgtaaccctatgtagctctaaaactctacggatgggcctacgctttagagattccttttgtaaagcattatgtcttttgttcttgaggtaataatataaagactttctatatctggtcctgtgcctccatccattctcattcatttgcatgtctatttctttacgcttagaacaccagatctgacgacgagtgcctcgatggactaatacccaaactcagccgtcgattcgagcatgaacgggacagatgatagtgataggacaggatgtggacttcc

SEQ ID NO: 82587 - DNA, 402 bp, Glycine max
  unsure (1)..(402): unsure at all n locations
ctgatcatgttagacactgatgtgtgtggtttagaagatacaaatcaaagagaaatttttgaattaaaatacagcgtaaaaaggtgtgggagcggcataatatattctctatctctcttctccttaattaaaagtctaacgattctttttgtagaagtggaagatggttgaaaaggaattaaataaacacgaagacttacacttttatttnttcctctaattaaaattttcatcctatttcttttcactctccaaaacatataccatcaagttgatttgaaatagatactcaattctagctttctaattcaatcattggctgatcttattttggcgaatgtattgactattatatgctataacaaaatcataatcttgtcttctcattattatcttagacca

SEQ ID NO: 82588 - DNA, 194 bp, Glycine max
gacgtttatgccatatcccattacacattcgtgccagttgtgcgaccaaagtaacaacgataaagaatgagatggattgagttgaaccatctgagcgccgacacatatgtattacatgtggagcgaattgacacctaataagatatccatatcaggtattgctataggtacattccattgagaacaaaatgggg

SEQ ID NO: 82589 - DNA, 430 bp, Glycine max
  unsure (1)..(430): unsure at all n locations
agcttgtgcanatcaaatcactcctacattntatctctagcatgcattgtatgttagtctcgtcctttgtcacgggaagccggaaggtccatatcaccttcttaattgtacacatggggcactgcgcccccaaatgcgcgagtaagaagagataattntccgggctctcgtgtccgtaaaatgcattcatatcatgcatcgcataagcatctcttcataacatcataatggacatatcctgcatttgtccgttatcatattccagcctcaccttttgcatgagtcatggcatcatcatgcatatgcgtccaacanactttttgatctgaaaattgcataccattgtttcatgttgctcatcttgcgtttcctctacaaacaaaaccaagaaagggaagcgtgaacttacactacattcttagttatgtgt

SEQ ID NO: 82590 - DNA, 440 bp, Glycine max
tcactcctacatctcatctctagcatgtctttttctttctttacccactcctcacgtttggttttttagggaaaaacaccataactaaacgcgccgcaagggatccctatcgcaccagatccaaatctagaacgatgggcgatcaagaggagacgcacgaacagatgaaagccgacatgtcggctctgaaagaacaaatggcctccatgatggaggccatgttaagtatgaagcagctcatagagaagaacgcggccaccaccgccgctgtcagttcggctgccgaagcagacccgactcccttggcaactacgcaccatcctccctcaaacatagtacgacggggaagggacgcactgtggcacggtggcagccctcacctgtgatacaaccgaacggcttacccttatggattgccgcccaactattcaccacccatc

SEQ ID NO: 82591 - DNA, 440 bp, Glycine max
  unsure (1)..(440): unsure at all n locations
agcttcttatccaagggctcatcttggggngaatctccttctttcatggcttattccctagtggatggcgcctcctctcacctcttctcctttgtcttccgctgcatctccatggtggaaaatcaccattaaaggacctcattgaagctcaaagatccagcctccatagaagcccccaaagcaagctttcatcactttcagcaatacattctcccactcaaatagtctccgatgccattcaaaattatagccaccattctgacccacccgagaatcaacttcactgacaaggatatctttatccatcacaacgagaacaatggccagattttatccttcatggtaatttcacccttccatatatctatccaaaatgcatatatgcaccatttcccacctttctaatcatattaacctgaaaccaattcaccggacataat

SEQ ID NO: 82592 - DNA, 476 bp, Glycine max
  unsure (1)..(476): unsure at all n locations
tagacgtgttagagtgttgaagttatggcgcctgataatttatctactggtcatgtgtgtcagcttatatacgtcanggcgacatgtattctctagttaatggctcttcatcagatttgcataggttgaatgctacctagtttgaccttcatatcaaaggttttcttcaatactgaggaactcagttatacttacaaatatcaaacgtttgtatctcatatcaaacgtttacatatcacaggtgctcacaagatttcttcatcagatttaacatttgatctaaagatttctttgacattcctttaccccatctaatcgaactattccatcggactccattttaaacttaattgaagaaacaacaaactatgactaactctttgacatcaataccctcttcctgtagtttgtggtactacaattcatctcattgcgcgctgcgaaaatgtcttaccattctgacctaagatgctcta

SEQ ID NO: 82593 - DNA, 486 bp, Glycine max
  unsure (1)..(486): unsure at all n locations
agcttctcatgcatntgacatagctcanaatgggaagatatttaaggactctatctcataatagatacgagatctctggtgcctatataaaagcatgaagaacagataggaagaagtctaacgaatatattggacaaaaccttctctctgatacaatcattctagacaatgtgcttttacattgcaaagatattgtaatcacactaaactttcatatccttactctataagtagattggtggaatattttcaaacattatttatgaaagtcatgactgtgttaaagaatacttacgttttcaatttaaagagaagattgtttgttgtaatcataagtgattaggagaatactctttacaatcttgttntaattagtgaaacctctccaggctagaggagaactaaatgctacttacgttgaataaatcaatataaaaagttgtgttctcgagtntntgctcttgtatgaccttcacgtgtattcta

SEQ ID NO: 82594 - DNA, 344 bp, Glycine max
gagctcgaaattgaaggaataaaagaggtgtaaaactggaactttgaagcatgtctcacacgactctcattcatcaaagttacaacacgtgttacacatgcttctatctatagactacgtagcttgcttgagaagctttcttgagaaagctactttgagaaaacttccttgagaagctagagcttaactacacacacccctctgataactaagctgacctccttgagaaacttccttaagaagatttctaaagaagctagagcttagctacacatacctcctctaatatgctagctcacctccttgagatgagaagctagagcttatctacacacaccctataa

SEQ ID NO: 82595 - DNA, 424 bp, Glycine max
  unsure (1)..(424): unsure at all n locations
agctngatattntcttgtctattctacttgttgtatataatcttattttgcactcttgaaggtttggaaacttgagtctaaactcccccattcttctttctaaattatgtggagcatcatcaaggtatggggaaagtctctccaacccttgaaccctattcttgttgttaaactttcttgaatatgttgacttgaaaaatttgtattgctaccctgtnatggatctatgtgctgagctgtttctcttgagactttgatgccacaaatgagttctttggatattaaaacctagggttagacttatggtgtgataacgcgaatttctacaacaagtatgagcaaacaagctaaggagatcttacgaagcataattntgcacacactgatatggtagtgctgctgatggactgttttcttgaatttt

SEQ ID NO: 82596 - DNA, 401 bp, Glycine max
cgcgcgagtatttcatgattgtatagaagtcacaaatgtttattattgtggtttaaaacaatgattatgtgcgaacttattagaataaattaaaacattccgcataagctacttaagataagctaagctcaaataaattaacattctttcatagcctctctcattatagttgcataagttctaccaaacttatattctctgtaccttttctattgtttcttatattatacgttatatcgtctattaaattattattatttttggccgagacaaaggcagcgcttgagaaaaaataatggaagagcaaaatacttaaaatgataatgtataaattaaatgtaattattatgataatatcggctcttatgagtgagtttaagcatctagctattttctttctt

SEQ ID NO: 82597 - DNA, 415 bp, Glycine max
  unsure (1)..(415): unsure at all n locations
agctnntgcggattggacttcgccggcagaaggatcataagcgggtctgaaaagaggcaaatntagtcatcctgcttggacgaatgagaaaaccggngcaaatgaagagggtgaggatgaagtagaagcccatgctgtgactgccattcctatatggccaagtttcccaccaacccaacaatgtcattactcagccaataacaacccttctcattacccaccacccagttatccacaaaggccatccataaaacaatcacaaagtctgtctaccgcacttccaatgacgaacatcacctttagcacaaaccaagagcaccaaccaagaaatgaattttgcagcgagaaagcctgttgaattcaccccaattccagtgtcctatgctgacttgctcccatatctacttgataattc

SEQ ID NO: 82598 - DNA, 343 bp, Glycine max
atgccttggtcaacctagcaactcatcttgttatgtatcacaaatctgcacctgatgcaagagtctgtggtctatgatctttagcagatcgccatacagatctctgtgcttctttgcagcaatctggagtcaataagcaacctgaagctgatgctgtaaacatttataataaaccccctcagcagcaaaaccaacaacatcttaatatttatgaccttttaagtaacagatacaatccagcgtggaggaatctccaattctgatatggacaagttcttcacaacaacaacagtctgtccctcctttccaaaatgctactggatcaagcatgccatatgttcct

SEQ ID NO: 82599 - DNA, 475 bp, Glycine max
  unsure (1)..(475): unsure at all n locations
agcttattaaaacattacaagctatttacgatattctaaagtaaaaataaaagtaaaaatntgcctttctataattgaatgtgtaattccattcaataaattaaaatttaaacaagcaaaaaatacatatttcataatttttttcttcagttctaatttttttaattcctatagtttctacaaaaatgttttaatgaagaatgaaaaattatcgtatcaaacattgcttaataacaatatcaaacaaatataatttcagatgataaaattaaatgaatttataaaattttcttaccctatcaaccattcccatatttgtatcatttaagactattaatttttatgataactagcaatcttgtttatgtattatatgagatgagtattctgtaataataaaaatctatacctcaaatttttttgcatttttaatattcaaattataggtatatataagtggtttaatatattaaat

SEQ ID NO: 82600 - DNA, 297 bp, Glycine max
ctcaattatcgctccatttacttattgcacctatcaagtactgcccttagtatgtttctctataatcctaaactaagggctcacaggggtgttgagggtgccttattgtgcgctattttaccattctgagacaatcatgactctacccctcccaccaattaggggcatcacataactaaaaaccttatgctctcttagaaccctaacatacggtgagagatatatgagaaaataggctcacgattcttagaataatataattatcatttttggctcaaataaagcgcaacgggcatt

SEQ ID NO: 82601 - DNA, 484 bp, Glycine max
  unsure (1)..(484): unsure at all n locations
agcttgtaatgtcagaaaaggcaaaacagaatatatgaagcgcggaagattacaagaagcatttcagactatattagagaataatgccacaatttagtttcttgtaatcttttcttttgattttccctttaacaatttctatgagcagatgattnttatgtgaaattgtgaatagctaatactctaaagttagtcttcattaatatgagatcatgatccttgaaatccatggtcctattatggtcttcacatacttcaatgttgtcctgattcatgagtaaaggaaaaaaaaaattgaaatattcatttaagtgagtgtacatgtatattaagagctttaanaaaggataagggtcaatttagaatttattttctggctaggtcaaatgtaattgattcaagagtgaaatagaaacttagaanataatcgaaattcctanggcgtangatannattgtacctcttttcattatactatgatata

SEQ ID NO: 82602 - DNA, 420 bp, Glycine max
  unsure (1)..(420): unsure at all n locations
tatagagcttaacatgatagctacgataagcactatcctatggccaccatacattataaattatatcagaatatgattattatcatattctatcaatgcatgattctcatctggtccatttcttaccaccaaacaaactttaagagttttgtttgattcgcanacaactataatacatatggaacatattaggatatggtcaaatgtttttttattattcataaaatcacggataactttttgtttcgaatataaaatattaaaataggatatatatcaatattgatatttctttaataaccaacaatattaacttaacaatgtaattctgttaaaaaggaaacatcacaattttaattctaatctctctcggtntatgttggtaaacagatataattngatgtaaatcatattaacata

SEQ ID NO: 82603 - DNA, 404 bp, Glycine max
agcttctcgatatattatgcgcctgaatcagacttccgttacaaaagttatgaccatatgaatttctcgatatattatgcgccttaatcggactttcgtgtgacaagttatgtccatttgaatttctcgatagcattcgttgttcaatttcgagcgtctcgatatattatgcgcctgaatcggacttccgtgtgacaagttatgaccatttgaatttttcgagagcatccgttgttagatctcgagtatctcgatatattatgcgcctgaatcggacatccgtgtgacaagttatggccatatgaatttctcgagagcattcgttgctcaatttcgagcgtctcgatatattctgcgcgttaatcgaaacttcgtgtgacaagttatgaccatttgaatttctc

SEQ ID NO: 82604 - DNA, 482 bp, Glycine max
  unsure (1)..(482): unsure at all n locations
actcagcttctcatatattatgtgcctgaatcggacttccgtttgattaattattaccatatgaatttctcgagagctttggctgttcagtttcgagcgtctcgatatattatgcgcctgaatcggacttttgtgtgacaagttatgaacatttgaatttctcgagacctttcggctttcaatttatatcgtctcgatgtgtgatgcgccagaatctgacttccgtgtgacaagttatgaccattggaatttatcgagatcttaccgtggtcaatttcgagggtcttgatatattatgtgcctgaatcggactctcgcgtgacaagttatgaacattggaatttctcgagacactcgatgttcaatatcgagcgtctcgattattatgcgccagaatcggactttngttgacaagttatgacctttcgaattctcgagactttctgtttcaattatagctgcacgattgtcatgcgccaaat

SEQ ID NO: 82605 - DNA, 483 bp, Glycine max
  unsure (1)..(483): unsure at all n locations
agctgggagatgaggctntaatggaggaaaagaaagagggagagaaagagagaggggggagcacgaaattgaaggaagaacaagggagagaagttgaactttgagttgtgtctcacaagactctcattcatcaaagttacaacaagtgttacacatgcttctatttatagactaggtagcttccttgaaaagcttttttgagaaaacttccttgagaagctacacccctctcataactaagctcacatccttgagaagcttccttaagaagattcctaaagaagctagagcttagctacacatacctctctaatagctaagctcacctccttgagatgagaagctagagcttagctacacaccccctattatatctaagctcacccccatgataaaaaacatgaaaatacaaaaaaagtccttactacaaagactactcanaatgccccgaatacaaggctaaaccctatactactagaatgg

SEQ ID NO: 82606 - DNA, 421 bp, Glycine max
  unsure (1)..(421): unsure at all n locations
acccagctcgcccagacgagcaagggtgctttcttcttaagcaacaaccttctggaggaatcttctggatggcccaagtgggcctggttgctatatgcacccccatttttactaaatataccccctgcctttttttggngattcttttttcataaagttacggaaacttactaacttataacgatacttggtttctttccgtaatgttaccgaaccttgcggattacataatcatgccttttttgacttactgaatgttacggaacctcactaaatgcgcaacgatgctatcttttgatttccggtgtgtcacggaaccttacgaatagtgcatcaatatattatattgaattctggcacgtcacggaatttcacaaattgcctaatgatgggtgccaagcaccttataatgaccaaacac

SEQ ID NO: 82607 - DNA, 406 bp, Glycine max
  unsure (1)..(406): unsure at all n locations
ggatcttaagtcacctgagctgcagcttacccctacccctnttatgtttctgatcccgacattctctcccaggcgaactaaccctagccatttttttttcaaaaatttaaatatccccttgttatgcttgtatattttcttatttcctaggattgcaaataaaataggcatattcaaatataacttaagaaaatagatgaataaataaaaaacaaaatttttaaaagtactaggctgcctcctagtagctcttctttaacgtcttgagtcggacgcgggatgacggttgatggattacgggcctagcacctgttcgtaccttccctctaagcttttgaataaaggaaattcccccctgcagtaaaaatgtaaaacaaaccgcaaaacatcgatatcacctttacat

SEQ ID NO: 82608 - DNA, 488 bp, Glycine max
  unsure (1)..(488): unsure at all n locations
cgcgtttatggtcatgtgacactatggctcacgattcattntctctatcttaagtcaacccagtatttccaaaatatgttcttttatcaatttgcgcattcatccgagtctatcttgggtgttcgaaaaacttttcacagcatttacccttcaaatgtgtacacacattttttcaaaaacaggttatgatcagtgaatttttcaaagaaaagcgggaagttatctcttttcacaagcatgttgttttttagctagacaacctttactattttttttcttcctttttattcttttcttgctcgctttctttntgctctctcttttttcatgaggtattttgctacctaaacatacgtataatatttntgctatgtacatgcatatcaaggtatcttgctacctaaacatacatatatatgttttgtgagatatctttgctatatacatgcatatccatggtatctngctacctaaacatacatatatat

SEQ ID NO: 82609 - DNA, 424 bp, Glycine max
agcttcaatggaggaagagaacgagagagagagatgcatgggaattgaacgagattatggagataagatgaactttgaagtgtgtctcacaagtttctcattcatcaaagatatgacaagtgttacacatgtttctatttatagcctaacacataggaagcttccttgagaagcaagtaaggtagctttcttgggaagctagaggaagaaagcttccctgagaagctagagggggggctactcacacccttcaaataactaagttcaccccatgctaaaatacatgaaaatacaatgggaagcttccttaaaaagcaaataatggtagcttccttggaaaccaacgaagaaagcttccttgagaagctaaaggggggctacccaacacccctcaatagctaagcttaccccatgccaaatacat

SEQ ID NO: 82610 - DNA, 422 bp, Glycine max
  unsure (1)..(422): unsure at all n locations
ctgtctttctaattgtcttctcctattagtgcttatagaaaagctgggcattagtggtgttaggaggagtaagggcagttcttggaaaaactcacgtgacaaggtcttgtcgtaaggatctggttggaggttgcatgactatggccataacatctggcatcaccaaattgattggctcacttgatcttcgaatgtcattgtgtactagtcattgaagtacactcccatattaatagtaatgttgttttctgcggtcgcgctgtgagtaaacacggcagctagtattactctctgatagatcaaacaacagaattctaataattcttataggaaaatggcatactaaactaaacttactatgngcgttgacagctaggttgggatcctatatctcgagaagaacattctatttcactcttggg

SEQ ID NO: 82611 - DNA, 457 bp, Glycine max
  unsure (1)..(457): unsure at all n locations
agcttgcccctgaaaccctctgtgtaatatctcggngcctgaattttaccaaattaaggcaccagagaagaagatcctaatctaaaagactgattcccaaaaacacaatcaaaaccaatgtaaaaaccataaagcaatgtgatagataccaactggtaagggaataaggactgaattttattcaaaagaaatacaacagaaattacaaattacacaggaaattgagtaaaccagttaattcataggtttcccccaagatgtttgagagcctggtctctcccttcctgaaaacccactaaaaactgcctaacccccctgctgttactccataanttattctgcaataactgcttaaggcagttacatatggtcctaaaaacacacataattnattctgcaataactgcttaaggcagttacgtacaaacacacaccctaattccattcgagactgcct

SEQ ID NO: 82612 - DNA, 393 bp, Glycine max
  unsure (1)..(393): unsure at all n locations
gtttcgcagagcttacgggaaaatctgcgatctatccatggcagaagtccttggcaggtagaggcgaatgggcctcattcatagacattctcgcattgttgatcttcggaggagtcttctttccaaatgtggatgggttggtggatctagcagcgatcgacgctnttctcacctattatgaccacaaggaaagcccggttatcgctatgctagccgacatatatgacaccttcgaccgaagatgtgagaagaccagtacgacgattgattgttggactccagctctctatgtatggttggattcacacctttttcgccaagaggtgaggcatgcttgcccactataaagccacccgtcatgcacagagaaagaatgggcaaattgggactgac

SEQ ID NO: 82613 - DNA, 485 bp, Glycine max
  unsure (1)..(485): unsure at all n locations
agcttataagaaacaaaatgcctaaatcatttccaaatatgcatgtgaattaggaagcatcaacaagaatcaagccaaggctattgtgcaagcaatcaatggggcaaaacacaccaaatgattatgatggtggatggctcanattctcacaaaggtaaactcatcactttcaaattgagctttcaaaactatcatgacatgtagaggagaatcaaggatttcaagtcacaaaatgtcaagaacttttattttcaaaacaattacccatttcttgaacatatcctataattcaaagaanaacatgcaaagtcgtacatgcacacaaaatngacccataatattaaactaaaaatccgacaaaactaacaacattaacaaattaacacaactaacanattaacacaaccaacanaactagcagaaccaaagaacactccntccccccccccatacttaacaacacattgcctaatgtacacaataaa

SEQ ID NO: 82614 - DNA, 382 bp, Glycine max
  unsure (1)..(382): unsure at all n locations
aatcacgtagataaaagttcaattggattaatgttacaagttatttaagtactattgtgacaatcaacaaattgtatgataacttgaacaaatataaattctaattgatattgttataatttttttatactatacattttaataaaaatcttagaaaaaggcataaaagaataagagaacatttttttattaatatgtgttaataaacatgttaaaatactactcataattaatctatccatatttatattctctaattttattattntaaattgatttcctgtatttatcttattttattatattctaaataaatattntctttctaatagaaaacttaagaattctggtccccaacccgaaatcttaacttgatttgatt

SEQ ID NO: 82615 - DNA, 282 bp, Glycine max
  unsure (1)..(282): unsure at all n locations
agcctccaaatnggnataccatgctacaactgctctattttagctgtctagaaagaaatggaccaacaactcttcgtccacagaatactctcccatttttctgcaatacattcagagatgccctttcggacatgtcagccctttgtatttatcaaagatctgtactcttaactagggaggaatgacgatattgtgtacgatacataagtccgcttgatcctataatgggtaattgcctaggccctctactggtctcaacctcatcttaagcacctcaatctt

SEQ ID NO: 82616 - DNA, 423 bp, Glycine max
  unsure (1)..(423): unsure at all n locations
agctncatgatgaatcaacaatgattcaaaggtgttctgatgataacatttatgacatcataagatgatgacaaaggtgatgaacaaaaagctctaattatcaaagatcatctcaagtgaatcaagaacacgtcaagagttcaagaatcgagatgaattcaagactcaagaagagacgctacaatcaagaatctagattcaaggatcaagatcgtcagagtcaagatcaagattcaagactcaagattcaagaatgtagaaacgactctatcaagattagtatttaaaagttttttctaaactttgaatagcacatgaggtcttgaccaaactttttccacagagtttatctctctggaatagattaccatagtgttggaatcgttaccactagcaaatgagtatgtaaagttcctaattgaa

SEQ ID NO: 82617 - DNA, 431 bp, Glycine max
  unsure (1)..(431): unsure at all n locations
gacacttanaaactcaagcgtagacacgcaaactttgtaaagcttcaatgcaaggaaacatgcttatggctatgaatccaaaatttggttttaggattagagacgcatgaaaatagggacttgtttgttagaatatgggctgccccatgattggcactttgcacctaagtaacgagggagatgcttttcaatggtgtgtatgtatatatgtgaatatatatggcataataatatgtcgcaaagagtgtgaatatatggcatataaataccctgcaaagggaacgaattagtaataatgcatttcaaaaatgtatattngtggattggtagtgtaaaaaagcatttgaaaatgtatatctgtggattggtaacgtaaaatgcctctcaaatatgtatatttgtggatagtagcgtaaaaatgcgtttcaaat

SEQ ID NO: 82618 - DNA, 443 bp, Glycine max
  unsure (1)..(443): unsure at all n locations
agctngccgcccagctcgcccaggcgagcaaggttgcttcctccagaagaaacaaccttctggaggaatactttggagggcccaagtggacctggttgctatttacacccccctttttactaaatgcacccccttatatatttttctgtaattctttttccgtaacgttacgaaactttacgaatttcgtaacgatacttattttcctttccgcaaggttacgaatccttacggatttatgtatttaactcttttggctttcaaagaagttacggaaactcacggattgcgcanaaacacctcttttcgatttccgccacattacggaatttcacggattacgcaagcctgcttcctttggatttctagacgtctgggactcattattgatgtatcatatataatctcggacaattaggatgacagtgccctttactacctta

SEQ ID NO: 82619 - DNA, 374 bp, Glycine max
  unsure (1)..(374): unsure at all n locations
ttgagataataatacacaggatgtgttttatataacgcccacactctcaaatgatgggtggtgctagtcacatgtgaagtaactgtatctagctattgcttaatttctccttaatatctcacctttccctaccctgagaagtgagaacacttcacctttatgtgagaagattacctcaactttagattcaccttcatagaaatcctattcgaaatctttagttagctatttacttccatgcattnttgctattctagacctctctttattaacatatcttcaataatgacccatgtataaccacatggaatagcacacaggtgctgcgcatcacatattttactactacattccgcactctgtgtacttgatct

SEQ ID NO: 82620 - DNA, 416 bp, Glycine max
  unsure (1)..(416): unsure at all n locations
cactatccattatctacttatgcttgaatgtatctcgctccttgtataattaaattcttaaataatactattgttctataagtaatgccaaatgaaccctttttaaaaactctagtaccgaagaaacttcggactatccttttggttacactaacaagtaatatcccgatataaaataatcactgatcagcaattaaactccttccaccattngaaacataatgagataataatatttatgaaaccaaacatattatttatgaaacataacaagtaattaccaaacgttcgtaaaacccatcgaaagggtacaaaaacgttcacatcaacataacaccaccactaataaattgtaaattgctaacatcttactttgccaattaaatacatgattgatgattgaaactaccatcttt

SEQ ID NO: 82621 - DNA, 274 bp, Glycine max
gatgagaatttccatcctcgcccttgtgagagatacataaaagataatgatagttcctgatcaaagatcggtagataacatgatagaaaattgttccctatcaaagatcggaagataacaaattgaaaaaaagtttccggtcatagttcataagaaaacaaagtgaaaaatataattcctgatcaaagatctgaagattatgattgaatttatgttaagggtcttctgacacacatatatcttacaatacaaattgccataccaaataatgaaa

SEQ ID NO: 82622 - DNA, 211 bp, Glycine max
gcaacgcttacaagaacatgctaggcttcgttgatttacgtgagatggatgccccacaccttttccttgacacacatccaaaaatgatgagtacgaaatctgacgcaaaactggtcatgcatgcacctatgaggactctcgagcgacgaatggatatgagcatgagaagatacggctccggttcatttcctctttaatagacgacccaatg

SEQ ID NO: 82623 - DNA, 455 bp, Glycine max
  unsure (1)..(455): unsure at all n locations
agcttgtcttgtgcagaattagggttaatatgtgtacaaacacaatctttgagaattccagagcacaccacagttcctatttcgagaaaagagctctggaggtagcaagaataacaacttttgcagagatacctacgttntgtaattataaagagattagtgagttgtaaagtgattgtgagatgctaataagatgatgagggatccccctttttgtgtaaggaataattattctctactctcaatcttaattgtgttagggttatactgtatggctggctaaacactctagttgggaatttctaatgaacaactgatgtaattactctaatatttatttgattgtgtttctgtgtcaatgcttcttcaatgcttattactaatgctcttggtctgtcacccatagtatgttaggtcgtgactttacttgggagatgactatttcttacactgat

SEQ ID NO: 82624 - DNA, 337 bp, Glycine max
ccgcttatattggctaaacgcgaatcttaaagaccttaaatcaacacagctatctatgtcacctctttcacaacatatagaatcatgagatcagttttggtccatcgccagaatgttttctctcctttcaaaagaatacaacgatcgattaagaggacagctcctctaaatgaccttacgttcaatcaaaatatattttacataatagataaatacaacgtaaccaacgtggatgtgctaaagaactacgtgggtctgatttccgtaccacaattgaggaatacttaagataaagggaaacactcttcgctgccttcaaaagatcaaacaatgaata

SEQ ID NO: 82625 - DNA, 434 bp, Glycine max
  unsure (1)..(434): unsure at all n locations
agcttgaatgtcacacctggtatctctgcaatgtcactacaagtgctgattatataccgtgtttggacaacgaaaaggctntgaaaaagttgcgtatcacaatacactatgaacacagggaaaggcattgtcctgaggaccctcctacttgccttgtgccaatccctaaagggtacaaaacacccatcgagtggcctagcagcagaaataaggtcatattttattttattttatcggcgaatgttaattgttagggggaaaaaataaacttaccatctttcccttgtttcttctattgtcactaagccaaccttataatgtataactcacatgtccaacacacttagtcggttctttatatatatttcatggataaaaatctgcatggctgtatttaaaaatagatattgtaccacaacgtaccacatcaactg

SEQ ID NO: 82626 - DNA, 306 bp, Glycine max
actaactagctcaggaacgcacccgggatttttttcctcgcgatatagaacgagcagcagtgccgcatgacttaatttccatccactcttttgcaatagatttttacatgtcgaaccctccctaatgattgtcatcaacctggatcctctcacgtcggcactttaaaatttactctcataatctgcgtgaaatttcggcagggtacctgatccagtggtgacaaataaccctcacatatccacaatgggcgtataaataaatttgtactacgcgggaatatcactttttacaccaaccataccctt

SEQ ID NO: 82627 - DNA, 322 bp, Glycine max
agcttgcaagtgttatcgaattacttgactttagcacgaaacacaaagaatatgttgcactagaatcaaaaggtacagtcaaaagagtattctttatgaaatatatctcgatatgagtcatagaactatagagtgtcagcattgctaagaataagaaaccacaaaccaccatactatctatgcaataaagatagaacaccatactacaagcatacttagaataataaggttcctataacaagtatataacgttcatataagaagtcagaatgaaatagtcactaaggatgtatttaatgaatcacatgtctcaacaatcacg

SEQ ID NO: 82628 - DNA, 434 bp, Glycine max
  unsure (1)..(434): unsure at all n locations
agctngtcaagatccatcctcttctctggtggttttatgtcatcaatntgttatgaattagatcacataaattctgtaggacaacaccatgtgacatattgtatgaccttatgctccataggtcctctgactcttatcttatacactaattgttgaagtagccaacagtttgttacatatcctttcatctatatatattgatggctgcaagaacttaggaccgaatcgtccatgtcttgagatatttgaaattcanacactttcatgttatatttgcttagttnttttattatctgtcttggttcagtgctgcaagtcatcttaacttgtaccaaaataaaagactaaacaatntanataaaaaataataaaatatgtttagtcttcgtacttatggtgaaacttgggtttagtcctcgaacctcacatataag

SEQ ID NO: 82629 - DNA, 272 bp, Glycine max
agtggccaatctacacaaacacacagtcaccctctgcctcacaggacattactttctctcatgtggcgtcttacgtcacaatagcataattctattctctacaaatcatatcaaaagttcctcttgccatcctaaaagcctttctaaactctgcttcacgaaaataactttgatgcattcatccaaccatgcgcctgaacgatactctacccacattcttgtctgtgagcctcccacaccagatttacccctgtagcactaccaccaccaca

SEQ ID NO: 82630 - DNA, 368 bp, Glycine max
  unsure (1)..(368): unsure at all n locations
tagctttgtagaagtatatcaatatcagagaatgttcttggttgattgataaagacttagattttaatcatgggttaaggagttgttcaactgatggagatatattacacttagttagggatgctcntgaaaatgagaatgagataaatgtttattttcatcattaagtagatccaaatttagaagaagtcccacagatgtttgtcttggaatgtgatccaattctaaaagctgttgagaatgacgatgatttanatgatgtacctgtggctggccattacgaacgtaggtttattgatctgttcttggtccacatgtttccatattattatatgataattttacttatcccattgtacaatattgtc

SEQ ID NO: 82631 - DNA, 297 bp, Glycine max
aatagtcagaatgtttcgcctcaagagttaggaacacgtctatgtaactatcaactggtatgagagtcatacgccttttgtgtgttaatttatactgtgaaatgtgttatacttcttaaattgaatatataattactcaaagccatcaaacaaatcgacatagtgtggaaaagatgtgtgatatagaatctgaaacatgccgagatgcagtagacttatattagattctatatgtgacatcactgattgtgtttcaacagtcaatgaactaatgatatttgcaactctattcataaa

SEQ ID NO: 82632 - DNA, 413 bp, Glycine max
  unsure (1)..(413): unsure at all n locations
gcttaagagagganatatgttcatttagcgactataaatactngattgaatgaggcctataaataccaaaagctttgaagacataaagcattatttgaagcatttattatttcattcttcatacacaancttaagagaggaaatatgttcatttagcgacaataaatacttgattgaatgaggcctataaataccaaaagctttgaagacataaagcattatttgaagaatttattatttcattctttgcgtaaaaatatttcttgtgtaaattcttgcanagtttacaaaagctctcaaaacactttgttcatcttaagagaaaagactaantactaaaattgtttatccgtctgtaagacgaaagagtgttggtcattgtgcaatcaaaccaataaatcttatggcttatg

SEQ ID NO: 82633 - DNA, 487 bp, Glycine max
atgtgaagacccacaatatcttgtgttttctaattagatagggaaaaaatatccagaagctatgaaatgtttctgcactttcaaatataacctaaaagacatacaagacatttgtcactgcattgagctgcatgctgtacaaagtttaaagtacaatgttattctacaaactattctaagacctgtgcaagcaatttgtcctaaagagtttgaagacggcgcatattaatgtaacatagaaagaatttataaagctacaatagaaagacgcaagtttctgacccatactaaactctcagaacaggagatgttgcaccagattacccttattaaagagtacaataaatggataacaaacagttttgaatcatacattcagcagttgtctgaatgaagatcatacaattgtgagaagaagaatgtcatccaatcgcaagaataagctactgtcttgatgcgtagtccattaccacatgctactgtcact

SEQ ID NO: 82634 - DNA, 478 bp, Glycine max
  unsure (1)..(478): unsure at all n locations
agctntagtgattgtgtgcaaccatataatttacattatagtgtcctcactgatatgttctacagntgattntgcatgaatctctaattgtcataacatatgatgcatgaatatgatttaggcactctttctttcttgtacattttaagccactggccaaaaagttatcccaatgtatattattttaccatttgcaagccctatgagccaaacacttgatattntgtttgaacactaacctangataaaagtttcctaccttaccttangttaggagagcaaaggcgttttgttggggatttctatcatttggtggctaatgtgatgtaacatactctgttttaaacgtgtttattcatgtaaattaaatattgtgtagaagcaagcttcatgatgatgaatcaagttgattcaagtatgtctgataatgacanagatgatgacaaanagcccaaagagtgatttcaagagtgagtca

SEQ ID NO: 82635 - DNA, 473 bp, Glycine max
cactgtagaagcagaatacatcgcatctggtatttgttgcgctcaaagtctctagatgaaacaaaagcgggaagacttatgagtgatccttaatcacattcctttgaaatgtgacatcacaagtgctattaatcggtctaaaaatcctgtcatgcattctataactaaacatattgagataagacatcattttcttagagatcatgtatcaaaggatgattacaggattgagttcgataatagtgaacatcaactagctgacatctttggcaaacctcttgctagagataggttcttctttattatgaatgaactaggtatcttagatggatctagtattgaatgatgctatgctttagtacatgtagcttgttatatatgctctctatggctatagatttcttcaatatcttagtatgctgatatgcgggtgcatatttccttatcataaaaatacatgtgttactctttca

SEQ ID NO: 82636 - DNA, 360 bp, Glycine max
  unsure (1)..(360): unsure at all n locations
agcttttgctaaaagattattggcattganaatgctcatgcatacgcatacacatgcatatttgttatcttgtgacagggacatgatcgttttaagcaatagtcaaataccgcgccaaatccaagacaaagacgaatcgaggtaagtggtaacgtggccgcgatttgctgtgcaatatcatttcctactttcaggtacttggggatgggcacgaatggaggccaggcccatgatcaacagatcgtcgtcccacgtccagctccggacaagcgagaagcgctactgggaggcagcctagtatcctttaaattcctacctattattgttgttgtttctttaaggaaatggctccaaagaaac

SEQ ID NO: 82637 - DNA, 463 bp, Glycine max
  unsure (1)..(463): unsure at all n locations
cttctgcgcacgtgccatcaaagcgtgtggcgaaattgtgatcattgttgatgatgaaggaatcaaccgtntggttctgactgangaggagggtgatggcatcattgcttagtttatgaaagctagttcagtttctgctggaaaaaccaaacatgtgaaagaatcgtgtactttctcctagtgtgaacgacagagagtctgtatgatgaataaattattctaaactaacgactatgaactatgacagcccatataaacaagagataatactaagggttaaagaataatctggtgaattcttctcgtcggaaactggctttatatattataattaacgttgcataaagggatggatccatgaataccatatactatcgaactatgtaatcatagcgcgcgtaattcagtctaattgattgattaagtataacgacactactagaaaataattttctacgacact

SEQ ID NO: 82638 - DNA, 373 bp, Glycine max
  unsure (1)..(373): unsure at all n locations
agcttcatgaagaatcaagaatgattcanagatgttttgatgataacanaggtggtgacaaaaagctcaaaggtcaatcaaagaatcaagtttcaagattcaagttccaaggatcaagatcaagattcaagactcaagaatcaagaatcaagaatcaatagaagactcaatcaagataaatattaaaaagttttttcaaaaactgagtagcacatgaattttttctcaaaaccttttaccaaagagtttttactctctgttaatcgattacccaattattggaatcgattgccagtagccaaatggttttcaaaaagctttcaactgaatttacaacgttccaattgatttcaaaatggtgtaatcgattaca

SEQ ID NO: 82639 - DNA, 429 bp, Glycine max
  unsure (1)..(429): unsure at all n locations
tggtttgtgtttatgtttgagttagcgnttgaggtttgtgttttggaagataaactacacaataaagttttgggtttaggcgtatgtttctcttcatagagtttggccaacgaaatttttctgacgagtcatgtangtgattgtgcaatgacatcccttctgatatcaggttttaatccttccacacagcaatccaatagagcttcttgtgtcattccttgtactcgattatctaaagccgtgaactgcacgtaatatgactgaactgaaccacatttagcgagtttaaacaactgagatctatgacattcataccgtgatgggccaaattctgtctctaatgctcgcgtcaaagcatccatgttttgatgaatatcacgagcatcatttggagcaggcacaacctcttatccagtgaatgaacaataa

SEQ ID NO: 82640 - DNA, 414 bp, Glycine max
  unsure (1)..(414): unsure at all n locations
acaaaatatgaaccttctctcaatttaccctttgttcatttaattactaaaatagtttaccatagaactatagatctgcctagagaacaaggctcccacccactagggtagatatatgtagtcttaccctcacaagtgggaaactgtttccatgatatgaaccagtgacctccaggtcacaaggcagcaacctgattgttgtgccaagactcactctcatagaactccaaattaagaagtctgaacataccatatgattgatgaaagagaggaaccaaaagtacataaatccaaggaacaaagcttaagagttaagaattttatgcaactaggtaacaataatcaattntaatatgttttatcattaacaatataattattaatccaattaattaccaatcaataattacttaa

SEQ ID NO: 82641 - DNA, 397 bp, Glycine max
  unsure (1)..(397): unsure at all n locations
ttaatggaggataagaaagagagagataaagagagaggtgggagcacgacattgaaggaagaacagaggaagaanagatgaactttgagatgtgtgtcacaagactctcattcatcaaagttaccacaagtgttacacatacttatatttatagcctaggtagcttccttgagaaacttccttgagaagcttccctgagaagctttcttgtgaaactttcttgagaagcttctttgagaagcttccttaagaaactagagcttagctacacacacccctccaataactaagctcaccttcttgagaaacttccttgacaaaacttcttgaaaagattcctagagaagctagagcttagctacatacacctctctaataactaagctcacctcttgag

SEQ ID NO: 82642 - DNA, 402 bp, Glycine max
  unsure (1)..(402): unsure at all n locations
agcttgctaactcatggaagcttcttattcttctacactntgtggggtgggccattcttggatggacttgattttgtcagggtccacttggaccccatttctaccagctacaaaacctaagaaaactatattatctacacaaaaggtacacttctctatatctgcatagagggtgtttttcctaaggactgaaagaacttgtttgagatgtcctaagtggtcatctaggctcctactatacactaaaatattatcaaaataaacaactacaaatctacctatgaaatccctttagacatgatgcataagcctcataaaggtgcttggtgcattattgagctcaaaaggcatcactagccattcatataaaccatacttggtcttgaaagcggtatccactca

SEQ ID NO: 82643 - DNA, 315 bp, Glycine max
acactgctgataaaaagaatgatgatgtacaacatgagaggagttaccggagagaaaaaccaatcattgtcgaatggaaagaaatataagacaacgaaaacgaaattgacgtagaaaaaaagaagagaacgagaaattcgggtaatattaagaagaggaaaaaacgtagagtgagaacatcacagaacagacaaaacaaacagcttcagatgagggaaaggacgtgccatccttctggaccttccaaaaagaaaggaacgcccctgccagattctagacttcttagaattgagaaacactgcctttgagaaatct

SEQ ID NO: 82644 - DNA, 472 bp, Glycine max
  unsure (1)..(472): unsure at all n locations
agcttgcatgatatggcatatatgttgtcgttgttgtccgcgctgttgggacttctattggtatacatattgaacataaagtaatgacatttcacatgcataattatgccactgttccatatacctccttttcaacttataaattacttcaagtatattctctgttcatcatatggctagtccaagtattctcaatctcatttttatcaatgggatatattgctcactttctttttaaatgatttatggaacaattgagtaagccggaggatcttattgtctggatgctgactgctgctttgccaacttttaagaagttgtatggaaagatagaggtggatctcaatgcacgtgatcaaatnaattgaacactgcataataactactacacatacagctctaatggctagaacatgcttgctcatcaactactacctggttggtgggagagagactttctggcattgctatc

SEQ ID NO: 82645 - DNA, 358 bp, Glycine max
tagaaactcaagcttacgcatggctactgtggaggcttaaacaccatgctttatatactttaattctcgaagcacagaggcacttaatcatggaaagaattatgcttaagcaccagattgcacgtgacaattctcaaatccgcacatgtcagagcctatttaaaggaaacttttaaggatttgaagacaaatcttgttggggagactatttatggcttatggaggaggctacgaagctctaccctcgctctccatctttgagtatacatttgggctattaatctatggttagtgtttattattaagtgatctcttctatgccttaatgctagcttgggcttgatcaccctttgcttga

SEQ ID NO: 82646 - DNA, 439 bp, Glycine max
  unsure (1)..(439): unsure at all n locations
agcttggatgaagaaggagatgaatattgtttatgaagagaagagcacgaaatcttgtgcactaaatgagttctacaatctgaagtttaatttctaaatgatcaaagttgaaaaaaatgcacacacatgacctctatttatagcctaagtgtcacacaaaattggagggaaatttgaatttcaattctacccctaatacaaaatctagtctaggtgccctaaaatacaagggctaaagaatcctatatttctaggatatcctacctacattatggagccctaaatacaaggactgaatataatgacatcctagtctaatatgtacaaagataattggacccaaccttggcccatgtgctctaaaatctaccctgaggttcatgagaaccntaggaccttcttcacagctctacccaatcctctatagcctcttgcttat

SEQ ID NO: 82647 - DNA, 408 bp, Glycine max
tgtcactggagctgacccatcatatgacctaactcttttatactggtgatccctacgctctggaccttgacttgatagaacctctttttaagcgaaggcatttgacttgatcccatgttgtactaaagtgaacaaaaattggtgcgaatcagaactccaacatctatcatgggtggaatggatgaatgcatgaataaatgcatatgacacagatgcaatttatgaatatgggagcccgggacattgtctccttcttatatacaacgtcttgggctagcatagtgcccaacgtatgtatttacaaaagtgacacggacccgccgttggtctgtttcaagagaagtgatcaagacacaatccgtgcgtgacgcatatgcgacatgcgcgacataggatgacatatgtcac

SEQ ID NO: 82648 - DNA, 441 bp, Glycine max
  unsure (1)..(441): unsure at all n locations
agcttctccaccaattttctataaatatggtgagaagtgaagttgaaaagggttcagccccttatgcacttctctctctttcgaatatgcttgtgaaaattgtttccgtgaagaaaatttaagccgatgcgcttccgaaacgtttccgtgaggaatttcgcaaaggtttcgaccgttcttcgacgttcttaattcgctcttcattgctcttcgatcttcaatgggtaagtacctcgaactaagctcttcgattcattctatgtacccgtggtggtccacattgtttttcgagtatttttattctcgcttcatttactctttatacccccttttgacgtgcttaagccactttatttaagtcatttctcgcttanactacaaatataatcaatttccaccgattcgttgaattgattatccgctacttccgtaaatagattc

SEQ ID NO: 82649 - DNA, 347 bp, Glycine max
gacacttgaaactcaacttgccaagaagaattccacagaaagcttctccctcaaagactggaaagcggtttctaatgactcctctgcagcctccacataatgcatagaggatgggcagctcaccaagatgttttcctcgcctaatacgatgaccacatgcccttctactacgagattcaacttttggtggagtgtatagggaacaacttccactgagtggatccacggacgccccaacagacagctgtaggggggcttaatgtccattatttggaacgaactcggcatgtgtgacggcctatctgtactgtgaggtcgatctctcccctaacctctcgaccggtgcc

SEQ ID NO: 82650 - DNA, 398 bp, Glycine max
  unsure (1)..(398): unsure at all n locations
agctntgatattggtaaatggcgcataacttctaccttntaaattcacctgagcatattccacatttttcgttttaatttcctgggggttttccgatctcccacatttaaatattacgatcatgaaaaatatgctacgcataatagtgtagatagttttatattattatgtaatcacaaactatcaagtttattgacatttaaaggatctgtcaactctaatttgttaacaagacaaaaataattatatttacggtgcatagctattattctggagaattagttgcatgaaaatttaatctcgtagtattatatgttgaaacaagcaccttttaatgccttttacttgattgttcacgggtttagtttatgtcctcccctgttgtcttcttctttcta

SEQ ID NO: 82651 - DNA, 440 bp, Glycine max
  unsure (1)..(440): unsure at all n locations
cttctatggaagctggatctttgaccatctatgatgtccattaatggtgattntccaccatggagatgcagcggaagacataggagaagaggtgagaggaggtgtcatccactacggaaaaaaccatggaagaacgagcttcaccaccaagatgagccttggataagaagcttggagaggatgcctcaatggaggaaaagaaagagggagagaatgagagatggcggagcatgaaattgaacgaagaaaaatggagagaatctgaactttgagttgtgcctcacaagactctcattcatcaaagttacaacatgtgttacacatgtttctatttatagactatgtagcttccttgagaagctttcttgagagaacttccttgagaagcttctttgagaacacttccttgagaagctagagcttagcaacacacacccatc

SEQ ID NO: 82652 - DNA, 436 bp, Glycine max
  unsure (1)..(436): unsure at all n locations
agctgtagagntgtgttgatgcttaccaatgacaggccttggnatttttgaacctgtgtggagcttaggtttgacgagtcttatgtgcagcgcatgtgctgtgctcttgcatacatgtcactcactgtgagtggcatgtacttgagacttaatggtgtactcttgcatacatgtcacctacgaagtggcatatactggagacatggtggtgtgctctcgcatacatgtcaccgtgggtggcatatactagagatgtagcatcatgaatcagtacaagtcaccaagggcgaaacatgggctntgtgagccctctggatgaataataagggatttgtctgaccagggttatggtagttatgctctggcatacatttcattcatcgttggtggacatactggagacgtagtggcgtgctcgtgtgtacatgtcactcgt

SEQ ID NO: 82653 - DNA, 385 bp, Glycine max
ttcctgctttaggaacttaaaactaagctttagccaatggactaccttgaataattcctttgatagcccttgtgagccttgtttccctttccttgttttgaagctcactacaagccttaagtgaaaaaccatgatatcaccatatccttaaggaatcttggagctttggaattgttttgggaataagtgtgggggggtttttgtttcattggataacttgttgtgttggctatacttcatgatgtattttgggccatacttgatgtacattgtatattggttaaatgttggacatgctgaatgaaatgctgtttctcaaaggatatagagttgcatagaaaacccttgaaatgattgaaaaaagatcggtaatgaacaaaaaagc

SEQ ID NO: 82654 - DNA, 361 bp, Glycine max
  unsure (1)..(361): unsure at all n locations
agcttcaccttcaggtcctcctcataggcgtggtatgagaaaacatgctctattttcatctgccactccatgtaggcctgcggatcattctctgcttgatatggaggaatgatgagtacaataccatcaatcctgttttgtctaggaacaccatcattccctcttatgctcctttcttctatcattatgagctctattcttcatttgatccaacctctgatggagcgcatcatctagttgatacattaacctctccatatgttgcatangagcttgcatctggaatagcgaaagccncacttcatcattagagataggacctgacatcgtacacaacacaatgagacgtaacatgacatta

SEQ ID NO: 82655 - DNA, 267 bp, Glycine max
atgtttctgcgcctccctgtataatggttgaggatgacgactcagaactgctcggttggctatatccggtgatgctttttagtatacctcgactggtaatctttattgggcgatgtatcaccggactatttttgatcaatgtttgtaatggagcgttttctctgtggaggtcggctacatttatgaccgcctaatcgattaccgcaagccgatggcaacccagaatgaacatactgttgagtgcgcacacgataccacacgcgacct

SEQ ID NO: 82656 - DNA, 401 bp, Glycine max
  unsure (1)..(401): unsure at all n locations
agctnggttcgaggtacttacctgttgaagatctaagaacgatgaagatcgaatgaagaacgtcgaagaacggttgaaacctttgcgaaattcttcacggaaaacgttacggaaacgtttcggaagcgcctcggcttagattttcttcacggaaacaatttttccaagcaaattctatagagagagaagtgcctaaggggctgataccctttcttcttcacttcctcccctatttatagcaaaataggggaggtgcttgccgcccagctcgcccaggcaagcttagctcgcccaggcgagccaggttgcttcctccagagacaacagccttttggaggaatcttctggagggcccaagtgggcctgggtgctatttgaacccacattnttactaagtacac

SEQ ID NO: 82657 - DNA, 345 bp, Glycine max
gattcaggagtacgcatgctatgtatggaaaaagtgatatcgagatggagacgcccgaagagacatcctttattataccacgcattatgtaccatgctcaatcattttgttttgaggtagtgatggtcttttataaaaaatagggtgtttaactcaacattgtttgttatggaaacggaacatgctactaataagcatcatgaatttcatgcttcccctttctagcacttgttgtgagaggaaggccaacgctcttgttgatctaacatgttgaacaaaagtttttgacgcattgcatgatatgcatgattcttcccatttatgccttattgtgtaacttctatt

SEQ ID NO: 82658 - DNA, 413 bp, Glycine max
  unsure (1)..(413): unsure at all n locations
agcttccaatgaaccctttgccctcctttttagtattttccgtattcttttccgaaacgtcgaaaaacctttcaaattgcatggcaattggtgtctagcagctcaattcggctagcaataatcaaaattttagcaaatgatagtccccggacgaaatttgggtatgatagttgcccttttttgcttattntttattggaaataaaagggaagtaaagataaggacactaatttcgtcaagcgatcttgctattcggtcaggcaactggcgaacaaggaagtgaaaccgagaaaacataaggacattgaagttctatagagcggaagatatctgaagttcttcttttctttctttttttaaagcatagagacagaggatgtcgagttctatgaaacacaaaanaagacattgag

SEQ ID NO: 82659 - DNA, 479 bp, Glycine max
agccgagagcaaagcccactaatgaagagaagtctttccaacttggaaaagaaccatcttagtgcaccaaactaggatgccagatgagtacaaaggttgaagaatccatacgccaagtactgaccatgaatgttgacctccttgcatggatagcctgaaacatgccaacaatagatcccgagttctactatcactggctaactatatgtctgatagctagaccaattatgcacataaagaggaaagtctaccctaagcaaggaaggctctgggtgaagaaacacagaaactcctgagtgcatgattcatcaaagaggtgatacaccacatgggtagctacacataccttaacaaatactacactagatacttgtacttgcttcctagtatagatacgctaggtgatggagcacttggatatcccatcctcgggttgtaaatgcatattcgagataatcagacttcaatgtcgagcaaat
